United States Patent Application Publication US 2008/0034453 A1 - sequence listing, part 22

SEQ ID NO: 186467 - DNA, 275 bp, Glycine max
attgttacttctcttcgccttttgctttgcaattgtcaccaaacaattcttgcttagctctcacaagcaagcattatcaacaatgaagaaaattgtgttaaaggtggacttacatgatgacaggatcaagcgaaaagctatgaagacagcatctggcctttcgggggttcaatcagtttctgttgacattaatgacaagaaaatgaccttattgggggatgttgatccagtgagtgcagtgtcaaagctacgaaagtggtgtcacactgaaatag

SEQ ID NO: 186468 - DNA, 268 bp, Glycine max
gcaatcgcgaagagaacagctacgttaacaatgggttctcgctacgaggtggaactgaagctctcatcggcacgcgctctcaagaacgtgaactggcgccatggcccgaaccgcccatacgtcgtcgtttgggtcgacccaagcaacaagctctcgacgcgcgtggacgaaagcggcgacactgacgcgaattgggaccaaacgctcacaattccgttgccaccaaagcctctcgaggatcaaacgttgtacatcgacgtggtccacg

SEQ ID NO: 186469 - DNA, 267 bp, Glycine max
gcttcgcgtggaccaacaagaagtgtaagttttcattcaatggccagcgctcagctctcagcaatatcttcgtcgatctctacggcgtcgtttgaagggcttcgaccttcggctgttcagtttgcttccgcgggcagaattagaattggcaatctctcccaaaggtctttccggggcttggttgtcaaagccgccaccgttgttgcccccaaatacaccgcgattaagcctctgggagacagagtgctgataaaaattaaggaagca

SEQ ID NO: 186470 - DNA, 263 bp, Glycine max
ggcttatggtggatacctaggcacccagagacgaggaagggcgtagtaagcgacgaaatgcttcggggagttgaaaataagcgtagatccggggattcccgatataggtcaacctttcgaactgctgctgaatccacgggcaggcaagagacaacctggtgaactgaaacatcttagtagccagaggaaaagaaagcaaaagcgattcccgtagtagcggcgagcgaaatgggagcagcctaaaccgtgaaaacggggttgtg

SEQ ID NO: 186471 - DNA, 261 bp, Glycine max
cggctcgaggataactagacacagtgtgatgaaaatgaaggtccttgttttcttcgttgctacaattttcgtagcatggcaatgccatgcgtacgatatgttccctctccgaatgaacactggctatggtgcccgtactccggaggtgaaatgcgcaagttggaggcttgctgtggaagcacacaacatctttggctttgagaccattcctgaagagtgcgttgaagcaacaaaggaatacatccatggcgaacaatatag

SEQ ID NO: 186472 - DNA, 259 bp, Glycine max
ggcagttaatagcaatttcgataagaaaagttccaaaattcagctaagactaaatgtctctcattccaaacattttcggtggccgtaggagcaatgtgttcgatcctttctcacttgacatgtgggatcccttcaaggattttcctttcccaaattccgtctctacttccttccctgagttttctcgggaaaattctgcgtttgtgagcactcgtgtggattggaaggagaccccagaggcgcacgtgttcaaggccga

SEQ ID NO: 186473 - DNA, 271 bp, Glycine max
cacaacaaaactctccaattctgaagattttcttatctcttgtctttgaaactagaagctccgtgattgatcaatggcgacaaaagaaggcaaagccataggcatagacctcggcacgacctacagctccgtgggcgtgtggcaaaacgaccgcgttgagatcatccccaacgaccaaggcaaccgaaccaccccctcctatgtcgccttcaccgacaccgagaggctcatcggagacgccgcgaagaaccaagtcgcgatgaacccgcag

SEQ ID NO: 186474 - DNA, 271 bp, Glycine max
caaacctcttcgttccttcgattcattccatttcttccaaaatggccaaagacccagttcgcgttctcgtcactggagccgcagggcaaattggatatgctcttgtccctatgattgctaggggagtgatgctgggtcctgaccagcccgtgatcctccacatgcttgacattcctccagcagcagagtccttgaatggggttaaaatggaattggtggatgctgcattccctcttcttaaaggtgttgttgctacaaccgatgtggttga

SEQ ID NO: 186475 - DNA, 262 bp, Glycine max
gcacatttgcaaagtgttatttttcttttttttctcatttgcattgcaaattgcaatggcttccaacaaggttattgccaccatcatggtgctttctctccttgcctactcaacatcattcaccaatgcatgtggcacatgccacccaaaacctaccccttctccttctcctcctcctccatcaggaaagtgccctaaggacacattgaagctaggggtgtgtgcagatattctaggtcttgttactgttgttgttggctcc

SEQ ID NO: 186476 - DNA, 254 bp, Glycine max
attcaagattcagcaagtgcgtttcggaagcagagaccgaaatacttcgagatggcccgtacaaagcaaactgctcgtaagtcaactggaggaaaagctcccaggaagcagcttgcaaccaaggctgcacgtaagtctgctccaacaactggtggtgtgaagaagcctcatcgttatcgccctggaactgttgctcttcgtgagattaggaaataccagaagagcactgagctcctaatcaggaagcttccttt

SEQ ID NO: 186477 - DNA, 261 bp, Glycine max
cctcgagccgaatcggctcgagtccaattcctctggatctcgtctcactcgatagatctcgaacatgagcactggggagcttaccaacatcgaacctctcgaactcaagttcccctttgagctgaagaagcagatctcatgttctcttcaattgtccaataagaccgatagctatgtagccttcaaggtgaaaacaaccaatccgaagaagtattgtgttcgtccgaacactggggttgtcacgcctcgatctacgtgtga

SEQ ID NO: 186478 - DNA, 266 bp, Glycine max
gcgccggccaaggagcctttggaaacatgtgccgcggcggacgcatgttcgccccgaccaagatctggcgccgctggcataggaagatcaacgtgaaccagaagcgctacgccgtcgtctccgccattgctgcctccgccattccttccctcgtcctcgcccgcggccaccgcatcgagtctgtcccggagctcccccttgtcgtcagcgactccgccgaaggagtcgagaagacaaaagaagcgatcaaagtcctcaagcagatc

SEQ ID NO: 186479 - DNA, 269 bp, Glycine max
aaagaaacagtcagaatcagaatcagaagaagcgagcaaagatgtcgggtcgtggaaagggaggcaagggtttgggtaagggaggagccaagaggcacaggaaggtgctccgcgataacatccagggaatcacaaaacccgccattcgccgtttggctcgcagaggcggcgtcaagagaatcagtggcctcatctatgaagaaacccgcggcgtccttaagatcttcctcgagaacgttattcgcgacgctgttacctacaccgagcat

SEQ ID NO: 186480 - DNA, 275 bp, Glycine max
aaaaccctaacaattgacctcaactttctcgacaagaggctctctgtcggtgttctctcccttccctttggtgtcgtgtcttccaaatggcgaacgtttgattcctctgttcaatcgggttttggtggagaaaatcgtgcctccatcgaagaccaccgctggcattttgttacccgagaaatccaccaagctgaattccggaaaagttattgctgttggccctggctttcacagtaaggatgggaagctaattcctgtggctgtaaaggaaggtg

SEQ ID NO: 186481 - DNA, 275 bp, Glycine max
ttgcatttcatttgagagagagagcgtcttacctttccattatcaaaatggctgtttcggctatcacaggagcgaggctaaccctagggatagggttggcgatacctctttcctctcccacgcgctctcgaaccgtcgcaatggccgtatccgtcgaccccaagaccgacaacaaactcactcttaccaagtccgaggaagctttcgctgctgccaaggagctgatgcctggaggtgtcaatccccagttcgtgccttcaaatccgtgggtggtc

SEQ ID NO: 186482 - DNA, 272 bp, Glycine max
aatcagagcaaggagaaattttgacccagcctttcttggatgcttgcaagcatatacttcctgttatagataagtttggagctgctatggcccttgttaaatctgacattggtggtaacatatcgagattggaatctaagtactcctccaatccaaccaaattcaactacctgtacagtttggtacaagttgaggttgaaactaaaacggctaaatcatcatccagttgtaccaatggacttctttggcttacaagagcaatggatttcttg

SEQ ID NO: 186483 - DNA, 272 bp, Glycine max
gttgttggctgttaatttgttgagagagagcaatcaaaaacattcatggcgtcttccaaggagagagaagaaaacaccaattaaccaccacctgataggctgatacaatacaatctcctttcctttttcgacaacaagaatggctgcgaaatctagttcgagttcgacaacaacaaacgtgctgactctgaaggcggcgtgggttctcccgcagcgcacgcagaacatccgtgaggtgtacgaggttgggcggaagctcgggcagggccaat

SEQ ID NO: 186484 - DNA, 268 bp, Glycine max
cagaaacaatgaggactaccgttctccagcaattccagctatgaccaaaacactgcttgaggatgtcaagaagattttcaagaccataactggaatcccatttctcatccctacaactggtactggtgcttgggagagtgctctcacaaacacactgtctcctggggatcgaattgtatctttcctgattggccaattcagcttgctttggattgatcagcagcaacgcctgaaattcaatgttgatgttgtagagagtgaatggggc

SEQ ID NO: 186485 - DNA, 264 bp, Glycine max
cggctcgaggttcctcaacctctgctaacccttttcctctttctctcccttctctcaattgtcaactcctctccttcccaacaccttcagatctccaatgctgaacgcaggattgacttgacttctcacattattaaggtgtacttgacgttgaaggttgaaaatttggggacatctcctacttcagaagtacatattgccttttcacccactgaagtagaacatctagcaatagtcagagctgctgcaacttctgggaagagg

SEQ ID NO: 186486 - DNA, 126 bp, Glycine max
ctctcttcgacctcgcatcgcaccttcaacttaacctattccacttgtaatcgtaactgctttgctagaagaagagacaaagtgtgtctgtgtgtgtgagagagcagagcaatgtgctgcgctcgt

SEQ ID NO: 186487 - DNA, 261 bp, Glycine max
ctagggttttcgagcggtctggacagagagctggccagataagttcccagaagaaaaaaactggtgtcattgctcccaaacgatttgtacagaggttgaaaaaacagaatgaactcttccgtagctatatgcaccaggatgcccatgagttcttgaactttttgctgaatgaacttgttgacattctggagaaagaggctcaggctgcaaaaactgatcaggagacatctccaccttctgaaaaggctgttaatgggccca

SEQ ID NO: 186488 - DNA, 267 bp, Glycine max
ctctactctactgcttcaccttctgctctagaaaattcagtggtgatacatggcttcggctactctctcctgtagccaaaccagcccttcaggcaaatgggaaaggcttctctgaattctctggcctccgcagctcatcaggcttccttcccttttctagaaaatcttcagaggatttccattctgtcattgccttccagacctatgcagttggaagcagtggaggatacaagaagggtgtgacagaagcaaaactgaaggttgcca

SEQ ID NO: 186489 - DNA, 267 bp, Glycine max
ctcgagccggtgatttggagtttggagcgactgaactaatcattaatttgcactcgctgtttcagcttcatcacccttcttttgcatcatttatatctcttgagaaatggcacaagaaacctttctattcacatctgaatctgtacacgagggtcaccccgacaagctgttctatcagatctctgatgcagtacttgatgcgtgccttgaacaggaccctgacagcaaggttgcctgtgagacatgcaccaagaccaatatggtcat

SEQ ID NO: 186490 - DNA, 267 bp, Glycine max
attgtcatgtcctatcatacccatgtaccagtgtacattccaagatatacctttagctggctggtgaaacccatgtggttgatcataaaatttcttcacagagcagctgatctgactctggtgccatctgctgccattgcgggggatctcctagcagctagagtcacagcagctaacaagattcgtctttggaacaagggtgttgattctgaaaaattccatcccaaataccgctcccatgaaatgcgattaagactaagcaatgat

SEQ ID NO: 186491 - DNA, 269 bp, Glycine max
acgcgtacggcacgtgctgcaccgagtgttgtgaaaatctctaatggccgaattatctcttcctcaggattcttactttctcggattcgacagttccacccagtcgttaaagccgcctgtgttggactccaacctcaacatcgtagcctcagagcttgttcatttcgattccgacttgccccattacaaaaccaaagatggggtgcacagagacccttctggcaatggcagaatcgtttcacccactttgatgtgggtggaactcttga

SEQ ID NO: 186492 - DNA, 263 bp, Glycine max
ctcaatttttctctcaaccggcccaatttagcataagcccagcatggccaccgcaacagcagcagccacctcgtccttcatggggacgcgcctcctggaggcccattccggggcggggcgggtgcaggcccggttcgggtttggcaagaagaaagccgccgccccgaagaaagtttccagggggtcgggctctagctccgataggcccctgtggtatccgggcgccaaggcgcccgagtacctggatgggagccttgtcggag

SEQ ID NO: 186493 - DNA, 264 bp, Glycine max
aaaacagagaatgctactgttgctgagttgcctgacttgatagacactggtgattcaaatgattaccatggaactgatgacactctaaagggtacaagtgatcaaaatatagcaaatttgacatcatcaactcctctggttgatgatttatttggagattttagtgcttctattggagctagtcaagaactaaaaaatgatgatccatttgctgatgtatcatttcacacaaatgagaacaaagaacatgcagatgatctcttt

SEQ ID NO: 186494 - DNA, 263 bp, Glycine max
caaggcaatggatatgaggttgatggatttggactctccattcttcaacactctgcacagaatcatggatctgacggaggacgccgagaagaacttgaacgctccgactcggacatacgtgcgcgacgccaaggcaatggctgcgactcctgctgacgtgaaggagtaccctaactcgtacgttttcgtgatcgacatgcctggcctcaaatctggggacattaaagtgcaggtggaggacgacaacgtgcttctgataagcg

SEQ ID NO: 186495 - DNA, 262 bp, Glycine max
agggctaccgctgagtttaagcatatcaataagcggaggaaaagaaactaacaaggattcccttagtaacggcgagcgaaccgggaaaagcccaccatgaaaatcggtcgccctcggcgtccgaattgtagtctggagaagcgtcctcagtggcggaccgggcccaagtcccctggaagggggcgccagagagggtgagagccccgtcgtgcccggaccctgtcgcaccacgaggcgctgtcggcgagtcgggttgtttggg

SEQ ID NO: 186496 - DNA, 261 bp, Glycine max
gaaaaagtaaagtttccagttttgttaagcaggtctacttattcagccttatggtataagccagatacattgttttctacacccaaggcttatgtaaagattgatttcaattgcccatattctggaaactctcctgaggctgaagttttgacgcatattttcacagagttattgatggattacttgaatgaatatgcttattatgctcaggttgctggtttatattacagcataaatcaaacagatggtggtttccagatg

SEQ ID NO: 186497 - DNA, 253 bp, Glycine max
aacaaagaaaaaaaaaacccttagccaacacaaccatcatggccacctctgctattcagcaatcagcattcactggtcaaactgctctgaagcagctcaatgagttcgtccgcaagaccggtggcgccggcaaaggtcgcactaacatgcgccgcaccgtcaagagtgctcctcagagcatttggtaactcaacattacccttcccactccactagttcaacttagtagttactgcttttaatataatactcg

SEQ ID NO: 186498 - DNA, 259 bp, Glycine max
tcttattctttttctctctttctctctgcttgcggtgcttcacaagccaaatctaacttgtctctgttttctccgatctagtactactatcaatggccggaaaaggagatggtcctgctatcggaatcgatctcggcaccacctactcctgcgtcggagtgtggcagcacgaccgtgtcgaaatcatcgccaatgaccagggtaacagaaccacgccgtcttacgtcgctttcactgattccgagcgtttgatcggtga

SEQ ID NO: 186499 - DNA, 263 bp, Glycine max
gtggacctgggcgttgcaagataaacaatggaggttgttggcatgaagctaggaatggacatgcatattctgcttgttcggatgatggaggggttaaatgccagtgtcctgcaggctttaaaggtgatggtgtcaaaaactgtgaagacattgatgaatgcaaagagaagaaagcttgtcagtgccctgaatgtagctgcaagaatacttggggaagctatgactgcacttgcagtggggatcttttgtatataagggaccac

SEQ ID NO: 186500 - DNA, 249 bp, Glycine max
cgcttctcatattagaattcagacaaagcctcatccttcatagttcagatccattcttgctctgtattttgtttttcttttaaatttttctttaaatttctcaattgatcaaagatcttcagcaaaccggtcaagtttgtgtagtttggccagatgggaggtgggtttagagtgctacacttagttagaccttttctctcgttcctacctgaagttcagactgctgataggaaagtgtcatttagagag

SEQ ID NO: 186501 - DNA, 248 bp, Glycine max
ccacttcctctgacgatgctccaaatccacgcactcggaaggaccttgttctaatgatttgcggtttgtttttgctctcttcccttgttgcctttggagggtacagggcctccaacgcgccacatgctgacgtgtcatcgccagcatcgaacgatgaacaacctagtcccacatcggtgccttctccgaaatggtacccggtttcgcggggtgtttcttctggggtctcggagaagtcatcaagcatg

SEQ ID NO: 186502 - DNA, 257 bp, Glycine max
aattcgctctgtgcagtttcctcgctctcttttctgcaattttcttttttgttcgttctctgcggttatctttttgagcttcaatggcggacgctgaaaccttcgctttccaggctgagatcaaccagcttctcagcctcatcatcaacaccttctacagcaacaaggagaccttcttgcgtgaactcatcagcaacgcttctgatgctttggataagattcgatttgagagttaaccgacaagagcaagctcgatg

SEQ ID NO: 186503 - DNA, 258 bp, Glycine max
cgttcatcatggttcggttcagcaacaacgtgatcggactcctgaacttcctgaccttcctcctcggcgcgtgctgtcgcgtgtcgtggctcctctggctctacctcctcgtcatgttcgtcctcatcgttcttctcttcgccttcaccatcttcgccttcgttgtcaccaacaagggcgctggcgaagttgtgtctaatagagggtataaggagtataggcttggggattactcgaactggttgcagaagagggtta

SEQ ID NO: 186504 - DNA, 258 bp, Glycine max
ccaaagcaaaaggttgaagatggtatctttggcacttctggaggatttggttttactaagcagaacgagctctttgtgggtcgtgttgctatgcttggttttgcagcatcactgttgggtgaaggaataactgggaaaggaattctagcacaattgaatctggaaactggaattcccctttatgaagcggacctcttcttctgtttttcatcctcttcaccctgctaggagccattggaggtttaggtgaccgtggaa

SEQ ID NO: 186505 - DNA, 262 bp, Glycine max
ggaaggtcagagtgacatctactacatcacaggtgaaagcaagaaggctgttgagaactctccattcttagagaagttgaagaagaagggatacgaggttctttatatggttgatgccattgatgaatatgctgttggtcagctcaaggaatttgagggcaagaagcttgtctctgccaccaaggaagggctcaagcttgacgagagtgaagatgagaagaagaagcaagaagagttgaaggagaagtttgacaacctctgc

SEQ ID NO: 186506 - DNA, 262 bp, Glycine max
aaaagttaccagtttgcgatctcattacaatctcccaagtttctaatctcagctaagaaaaaccaaaagatgtctctgattccaggtttcttcggtggccgaaggagcaacgtgttcgatccattctcactcgacatgtgggatcccttcaaggattttcatgttcccacttcttctgtttctgctgaaaattctgcattcgtgagcactcgtgtggattggaaggagaccccagaggcacacgtgttcaaggctgatattc

SEQ ID NO: 186507 - DNA, 257 bp, Glycine max
ctcgagccgcgagcagccacacctcccgcagcagccatggttctcaaaactgaactatgccgattcagtggtgccaagatctacccaggaaagggcatcagatttgttcgtggtgattcttaggttttcctgtttgcaaactcaaaatgtaagaggtatttccacaatcgcctgaagccttcaaagctcacctggactgcaatgtacagaaagcaacacaaaaaggacattgctcaagaagctgtgaggaagaggag

SEQ ID NO: 186508 - DNA, 259 bp, Glycine max
cagctcgagcggctcgagctcagaatttctatctatctcttgtttcaatttcaacaacggttactccttttacgttttgagtttcaatcaagccatcatcatgtctaccgcatcgcaacccaaggccaagaaaacggcgtcgtccaagaagcccctctcccaccctcccttcgccgtgatgatagcagaggcgattgcgcgtctgaaagagagaaccggttcgagccaatacgcgataaccaaatacatcgaagggaag

SEQ ID NO: 186509 - DNA, 262 bp, Glycine max
ggcaaagaaagaagtcatttggtccatgataggagctcaaaccacagaacacggagattgctctaagttcaaaggcaacatacctcattgctgcaagaaaattcccacagttgtggaccttctccctggtgtacattacaaccagcaattctcaaactgctgcaagggtggagtagtggcagcatggggccaagatccttcacaagctatctcatccttccaagtgagtgtaggccaagctggtacctcaaacaagacagtt

SEQ ID NO: 186510 - DNA, 258 bp, Glycine max
caatttcaatctctctctctctctgtctctctctctctagacttagattttgtgaatggctgaagtggaagagggacaggtcatcggcgtccacaccgttgatgagtggaagctgcaactccagaatgcaaaagactccaaaaaactgattgtggtggattttactgcttcctggtgtggtccatgccgttttatggccccagttcttgcagagattgcaaagaaaactcctgaattgatcttcctcaaagtggatgt

SEQ ID NO: 186511 - DNA, 261 bp, Glycine max
  unsure (1)..(261): unsure at all n locations
cctcgagccgctcgagccgctcgagcggtcagagagtcttcagtctctcctcgttgttncaccgctttccaccttttcaatttcgattctttacttaatttaataagatgtttgggagggcaccgaagaagagcgataatacgaggtactacgaaatcctcggcgtctccaagaacgcttcgcaggatgatctgaagaaggcttacaagaaagccgccattaagaatcaccccgacaagggcggtgatcccgagaagttta

SEQ ID NO: 186512 - DNA, 256 bp, Glycine max
caataactccgttgctgacaaattagcatggccgctgccatcggaagcatggtggacacgaatgggctcatggtccaagtcatcaccgtcaggtggttcgtggtgttcgcctcctttctaatcatggccgccgccggcgccacctacatgttcagcctctactccggagacatcaaatccgccctggcctacgaccaaaccaccttaaacctccttagtttcttcaaagacttgggtggcaatgtcggcgtcctct

SEQ ID NO: 186513 - DNA, 260 bp, Glycine max
agcttacatgctcctaccctgggcatcaaattcttctatggaccagagacttactacggaaatgaggtgtcagttgtagaaatggatggacaatttgacagactagatgaactaatatacgttgagagccacctaagcaacctctctacaaagttctatggagaggttactcaacagatgttgaagcatgctgatttccccggcagcaacaatggaacaggtctcttccaaaccatagttggtttgaagataagagattt

SEQ ID NO: 186514 - DNA, 253 bp, Glycine max
aaatcacttcatcatggcttcctcgtgtgcttcctctgccattgcagctgttgccatctccacaccaagttcccagaagaatggatcactcttgggaagcacaaaagcttcttttcttagtgggaggaaactgaaggtgaacaactttacagcaccagttggagcacgatccagcactacagtttgcgcagttgctgagcctgataggcctctgtggttcccaggcagcacccctcctccatggctagatggc

SEQ ID NO: 186515 - DNA, 261 bp, Glycine max
cctcgagccgattcggctcgagtggaaatccatcagaaattatcacgatcttcattgaggactatgtcacagctcctcagggcctaacaaaggtgttcaaagattcagggctgagcaagtacatattcccggtgtctcgcatgcccaagaatggtggagattggccaaccgtcgatgacatggttcagaagaatcagcgcctagtcgtcttcacctccaaatctgccaaggaagcttctgagaacattgcttatcagtgga

SEQ ID NO: 186516 - DNA, 258 bp, Glycine max
  unsure (1)..(258): unsure at all n locations
caaatacctgcatggtatgtcactttggaggatgatgttcttcgggaatttggtgcttataatgatcattgggtagtggcaaaaaatgaagaggaagctcagaaagaggctagccagaggtataatggaaagcagtttcatttaagccaggatcctgacgttcttgatacatggttttcttctggtctgttcccattatctgtgctgggatggcctgatgacacangaggactgaagacattctatccaacttctgtt

SEQ ID NO: 186517 - DNA, 257 bp, Glycine max
atccttatgaggaattccagaaactaaagcatcatcctgcaattaaatcatttctggaaggtggaacagttatccagtatggagctcgcactttaaatgaaggtggttttcagtctatcccatatccagtttttcctggaggagcaattattggatgttcagctggcttcatgaatgtgccaaagatatagggaactcacacggcaatgaaatcaggaatgcttgcagctgaagttacatttggtgcacttaatgaa

SEQ ID NO: 186518 - DNA, 259 bp, Glycine max
acctccacccacccagcatatctctctattcctcatttattagcacccctcacattaccttgtgtcaccaactactttgactcctttaccataccattacaataattatcaaacctaaccagtaaaaatggtgaccgtggaggaaatccgcaacgctcagcgttcccatggacccgccaccatcttggccttcggcaccgccacgccgtccaactgcgtctcccaagccgattaccctgactactacttccgcattacc

SEQ ID NO: 186519 - DNA, 258 bp, Glycine max
gccgatgacgggaacggctggacggttatgctcgattaccgaaccctaaagactccttccaagagacccctcaagcttccctctcttcctcttgctaaagccattgctgctgaatgggaataccagcaaacggatggcataaggcccttcacaatgcctcttatgagacttgcttgcactgccttggaaagagttccactcacaaggagcaaagttattgagaatttgatgaagaaatttaatcaagatttagtattt

SEQ ID NO: 186520 - DNA, 251 bp, Glycine max
ggccatgcagcagctcctaatgacaagattttggaagatggagacatggcgctgtttgatatgggagctgagtaccatttctatggatctgacataacttgttctttccctgtgaatggaaagtttacaagtgatcaatctcttatatatagtgctgtgctagatgctcataatgccgttatatctgcaatgaaacctggaataaactgggttgatatgcacatattagcagaaaaagtgattctggagtc

SEQ ID NO: 186521 - DNA, 252 bp, Glycine max
ctcgagccgctcgagccgtccatggcttcctccaccgctttcttcacacccctccatgatttcactcaagaccagaacaaccccatcaccccctttgcctttcatcaaatcctcctttgcttcctccaagtcaaccttttttcaccctgccctttccctacaaacctcttccaactttcccaggctttttggaaagcctaagtttttctctgttcatgcaagggctgccacagaaaaaaccatttatgattt

SEQ ID NO: 186522 - DNA, 255 bp, Glycine max
actcgagccgaatcggctcgagacaagctcttggagaagtggatgacgagcttcttgacacacaagtgaatcctgctgtgtacggaaattagtgggcacatggttctaaagaggaagaaggattatgatgaggcatctgaaggcaatgcttggaggcttcttgcagaggtgtccctctctcaagagaggtttcaagaagtcaatgatcttatttttgaagccattggctgtggtgaattggaggatgtcaacgtt

SEQ ID NO: 186523 - DNA, 255 bp, Glycine max
gttggctgttttgaacattcacccaatttgcagagttccaagttatatacatacactgcataattaagagaaaatgtctctgattccaagtttcttcggtggccgaaggagcagtgttttcgaccctttctccctcgatgtgtgggagccctttaaggattttccatttcccagttctctttctgctgaaaattcagcctttgtgagcacacgagtggattggaaggagacaccagaagcacacgtgttcaaggc

SEQ ID NO: 186524 - DNA, 236 bp, Glycine max
gccattgttgatgtggcagaaggatttgtgtatcttgtgagctcagtgggggtcactggagcccgcgcatctgttagtggttctgttcagtcccttctacaggaaattaaagaggcaactactaaacctgtcgcagttggttttggaatatcaaaacctgagcatgtgaaacaggtagcgggatggggagctgatggtgtgattgttggcagtgctatagtgaaggtgcttggtga

SEQ ID NO: 186525 - DNA, 256 bp, Glycine max
gccatggccacccacgcggctctagcttctacaaggatccccactaacaccaagttcccatccaaggcttcacactctttcccaacccaatgcgcctcaaagagacttgaggtgacagaattctctgggctaagatccacttcatgtgtgacatatgctaacgatgctagagaatcttccttttttgatcttgtagcttcccaacttcactcccaagaccaatgggatcatcaatcctgtgaggggagagacagtg

SEQ ID NO: 186526 - DNA, 247 bp, Glycine max
tacaggtcaatctggaatttagttctgaagctgacatgatcaggaaatttcgtgcaggtcttgctttgcagccaatagcaacggctctttttgcaaattcaccctttaaagagggaaagccaaatggttttttcagtatgagaagccatatttggactgatactgacaaggatcgcacaggcatgctgccttttgtttttgatgactcttttgggtttcagcagtatgttgattatgcacttgatgt

SEQ ID NO: 186527 - DNA, 254 bp, Glycine max
ctttcgaaagattttatccaattgaaattttaaaaatgactgggataaacttaagaactcaattattgaaattgaataagtaaacaatttaattggattggtcgaatggtatcaaaaaaatggagtactaactcccatttcttatttattattgaattaaccgatcaacttgctttgttatcgaacatttctttttgatttcaaaaattttccggaaaaaatttgaatctatttttatatgcgaatcaatccta

SEQ ID NO: 186528 - DNA, 252 bp, Glycine max
attcccaattcctaattgtttaaacctaattctcatttcttcatcgttcgattcttctcctcctaaagatgcagatcttcgtgaaaactttgaccggtaagaccatcacccttgaggtggagtcctccgacaccatcgataacgtgaaagctaagattcaagacaaggaagggatcccacctgaccagcagagacttatctttgcgggtaaacagcttgaggatggtcgaacccttgccgactacaacatcc

SEQ ID NO: 186529 - DNA, 250 bp, Glycine max
gttggtgagtgtgagtgagtgtatcaatcggccacacagaaatgggcagtgcttctctgattccagtttcctggttgccttggcggccactttctcctttcaagggaacggtgaaaaccttggtcgcaaaaccatggctgaagaagattcagcaagcaagacccctcatttccgtggttaacaaggctgcctctctatcttcccccgtgacagcacccagcgtcggcgttcggtttcggctggacaattt

SEQ ID NO: 186530 - DNA, 254 bp, Glycine max
cgaagaataaccttttttcctctgccgccactggtttctctcccacacccacaaccctctatcctcccgaatgctcttgcgttttccttaaactgcctcattccgaagccatacacacataacggtttttctaggtgctagcaatgtcgactcctgctaggaagaggctcatgagagatttcaagaggctgcaacaagaccctcctgcaggaatcagtggcgcccctcaggataacaacatcatgctgtggaat

SEQ ID NO: 186531 - DNA, 250 bp, Glycine max
ctcaaggatacactccggacttaattacgttattttgttagggtcaccgtttcgagatattctaaacttgtactgaaaaatatggagggaaaagaagaggacgtaagagttggagccaacaggtacggagagaggcagccaatagggaccgctgctcaggctaaagactacagagagccaccgtcggcgcctctcttcgaaccgggagagttgtcatcgtggtctttctatagggctggcatagcagagt

SEQ ID NO: 186532 - DNA, 250 bp, Glycine max
ctattctcctcatcttcctctttttctcaacaaaaaggggttcaattctagctagttctattacgtcgtccgccaccatgaacatggcgatcgcgcttctgttcatggttttcgcagtttcatcagctttagacatgtcaataatatcacacgacaacgctcatgcggatagggccacgaggcgcaccgacgaggaggtgatgtcaatgttcgaggagtggctggtgaaacacgacaaggtgtacaacgc

SEQ ID NO: 186533 - DNA, 248 bp, Glycine max
ctcgagccgttaagatcagctcaacaccatctcaaaaaccatgttggctcattctctcaggacaacaagctttcttcttctgctatgatatccacaacactaaaacatgagaaggcaaatcaatcagaagagtctttgagaactgtcatgtacttaagctgctggggtcccaactagatatcataagcccaacaacaaaatattcttttctcttttcaattctaggaatcaggaatcaagcaagctta

SEQ ID NO: 186534 - DNA, 276 bp, Glycine max
aaaaaatgaaagttgtgtacttccttgttgctatcttggctttggcatcctctcttgtctctgcccatgaccctagtcctctgcaagatttttgtgtggcaaccaaagaacgcgatggtgtatatgtgaatggaaaattctgcaaagagcctaaagatgtgaaagccgaagatttctacaaagaagtggagcctgggaatccttcgaatcaattggggtcagcagtgactcctgtgtttgttgatcaactaccagggctacacacacttggtttat

SEQ ID NO: 186535 - DNA, 275 bp, Glycine max
gaaacagtgtgatgaaaatgaaggtccttgtcttcttcgttgctacaattttcgtagcatggcaatgccatgcgtacgatatgttccctctccgaatgaacactggctatggtgcccgtactccggaggtgaaatgcgcaagttggaggcttgctgtggaagcacacaacatctttggctttgagaccattcctgaagagtgcgttgaagcaacaaaggaatacatccatggcgaacaatatagatcagactccaaaacagttaaccaacaagct

SEQ ID NO: 186536 - DNA, 277 bp, Glycine max
  unsure (1)..(277): unsure at all n locations
aacaacttctgctacttcctactccaaccgcacttctgttccgcaattatcatgggcaaggtcaagatncggaatcaacggatttggaagaattggccgtttggtagccagagtggctctgcagagagacgatgttgaactcgttgccgttaacgaccctttcatcaccaccgattacatgacatacatgtttaaatacgacagtgttcatggacactggaagcatccacgatgtcaccgttaaggacgagaagacccttctctcggtgacaagcca

SEQ ID NO: 186537 - DNA, 274 bp, Glycine max
agatgatgcaggatatccagagagatcctaataacctcaacttgcacttgaaggaccagagaatcatgcaggccctaggagttttgctcaacgtcaagattcaaacccctcccacgggggctgacaccgatatgccggattctccatcgccctctgcggcagcgtctgagaggaagagagctgcggaagccgagcctgctaagcagcccgagcctgaacctgagcccgagcccgtgcccatggaattgacgggggaggagaaggacgcaaagca

SEQ ID NO: 186538 - DNA, 271 bp, Glycine max
ggaagaaacaagatattaccatcactggtgctagcaccttgccttcagatgaggtggagagaatggtaaacgaagctgagaaattttcgaaggaagacaaagagaagagggatgctattgacacaaagaaccaggcagactctgtggtataccagacagaaaagcaattgaaagagcttggagacaaggttcctggccctgtgaaagagaaggttgaagcaaaactaggagagcttaaagacgccatttctgggggttcaacccaagctat

SEQ ID NO: 186539 - DNA, 269 bp, Glycine max
ggtggggctacgctgagtttaagcatatcaataagcggaggaaaagaaactaacaaggattcccttagtaacggcgagcgaaccgggaaaagcccaccatgaaaatcggtcgccctcggcgtccgaattgtagtctggagaagcgtcctcagtggcggaccgggcccaagtcccctggaacggggcgccagagagggtgagagccccgtcgtgcccggaccctgtcgcaccacgaggcgctgtcggcgagtcgggttgtttgggaatgc

SEQ ID NO: 186540 - DNA, 277 bp, Glycine max
accaggatgagatgatcaaaactggtaggctttctgagccctacaaaggtattggtgattgtttcaagagaacaatggcagatgagggtgctatttctctatggagaggaaacactgctaatgttatccgttatttccccacccaggctttgaactttgcatttaaggattacttcaagaggcttttcaactttaagaaggatagagatggctactggaaatggtttgctggcaacttggcctctggtggtgctgctggtgcatcatcccttttgtt

SEQ ID NO: 186541 - DNA, 277 bp, Glycine max
gattttgccaaggagaatgatttggatgttgtggtggtaaatcctggcactgtgatgggtcctgttattccaccaaggcttaatgcaagcatggtcatgcttgtgcgccttcttcaaggctgcgctgaaacatatgaggacttttttatgggatcggtccactttaaggatgtagcattgtcacatgttttggtgtatgagaacaaatcagcggctggtaggcatctgtgtgttgcagctatctctcactacggtgactttgtggcaaaagttgctg

SEQ ID NO: 186542 - DNA, 275 bp, Glycine max
gtgctctgctcgtgcctctagggttatcatatctccatttccatttcctctctctcagtttccaagaatcttaagctatgggaaagtcttacccaaccgtgagcgctgattaccagaaggccgttgagaaggcgaagaagaagctcagaggcttcatcgctgagaagagatgcgctcctctaatgctccgtttggcatggcactctgctggaacttacgacgtgagctcgaagaccggtggtcccttcggaaccataaagcacccctccgaactc

SEQ ID NO: 186543 - DNA, 268 bp, Glycine max
gagacagcattgcttgaagttggaagaggggagaaagatttggcaatggctgctaaagtagatgctaatggtggtggtggtaagggtggggtctctgcagtttctgccaaggattcagcagtggcacatccactggctgaacagcctgatgaggttgcatccaatattagttaccatgctcagttcagtcctcatttttcccctttcaagtttgagctggaacaagcttactatgccactgcagagagtgttcgtggacgtctgattc

SEQ ID NO: 186544 - DNA, 281 bp, Glycine max
tgttactgtccccgccctgtttttacctataactctccttattatgatgggacacgaaccacaggtggttattctaacatcatggttgtgcaccagcgttatgtgctccgatttcctgagaacttgcctcttgatgctggtgctcctctgctgtgtgctgggataactgtgtatagcccgatgaaatattatgggatgacagagccaggcaaacatttgggagtggcagggcttggtgggctaggtcatgttgcatcaaacttgctaaagcgtttgggctg

SEQ ID NO: 186545 - DNA, 252 bp, Glycine max
ggatctataggggaccacacaactaatcactaacagagagaacaactgttactcacacacgccatgggtaaatgaatggtttttgagcaacagcagttaaaagagaaaagggattcagcgaagatgacatcggttggtgtggcaccaacttcgggtttgagagaagccagtgggcatggagcagcagctgcggatagattgccagaggagatgaacgatatgaaaattagggatgatagagaaatggcagcc

SEQ ID NO: 186546 - DNA, 278 bp, Glycine max
ggctgcggaaaacgttgtagagttcacagacttacccgtcaagagacctagagaagaagacgaagaagaagaagaacaaaccaatggagtctccaacgacgccgtttcaacgctacccaatgaccctcaataccctggtatctctgctgttattcccggttggttctcagaaatcagcccaatgtggcctggggaggcgcactccttgaaggtggacaagattttgtttcaagggaagtctgactatcagaatgtcatggtcttccagtcatcaacat

SEQ ID NO: 186547 - DNA, 269 bp, Glycine max
gcacacacagacacacacatttcgtcggaatgggaagggtgattcgcgcacagcgtaagcggtgcggggtcggtgttcaagtcccacacccaccaccgcaagggtccggcgaggttccgcagcctcgacttcggcgagcgcaacggctacctcaaaggggtcgtcaccgatatcatccacgaccctggtcgcggtgctcctctagccaaggtggcgttccgccaccccttccgctacaagaagcagatggagctcttcgtcgccgccga

SEQ ID NO: 186548 - DNA, 272 bp, Glycine max
attgttgatgcggttttatgcattcggaaacctgaggaagaaattgacctgtttatggtggagatcatgcacatgcggcacaaatttgatattgacacacgcttggttgagggtattgtccttgatcatggttctaggcaccctgacatgaagcgacgtgcagagaattgctatatcttgacatgtaatgtatctttggagtatgagaagagtgaagtaaactcagggtttttctactcaagtgcggaacagagagaagctatggttgcagc

SEQ ID NO: 186549 - DNA, 273 bp, Glycine max
atgagacatcagtgcctccttctggtctccctggtgttggtctcctacgctgcccggtcggaatcagcgctgggcggctggagccccatcaaggacgtaaacgacagccacgtggcggagatcgccaactacgcgctgagcgagtacgacaagcgttctggggccaagctcacccttgtacaaggtcgtcaagggcgagactcaggtcgtttccggcaccaactaccgtctcgtcctcaaagccaaggatggatccgccacggccagttacga

SEQ ID NO: 186550 - DNA, 276 bp, Glycine max
tgccaaacgacagcgttctgagtcttttcttcttcgttaccctcttcacatgccttctctctgctacttcccacgatgaccatattttcctaccgagtcaactccatgacgatgactcagtgagttgcactgcaaccgacccaagccttaactacaagccggtgatcggaatcctgacccaccccggcgacggtgcctctggccggctcagcaacgccaccggggtttcttacatcgccgcctcctacgttaaattcgtggagtccggtggtgcta

SEQ ID NO: 186551 - DNA, 276 bp, Glycine max
cgtggcttgattaaaggttcaggtggacaggaacgtgatgctactcttaatcagctcctggtgtgcttagatgggtttgaagggaggggagaggtgatcactattgcatccacaaaccgaccagacattctggatccagcacttgtgaggcctggcaggtttgatcggaaaatatatatccccaagcctggccttattggccgcatagaaattctaaaggtccatgctcgtaaaaagccaatggctgaagacgtggattacatggctgttgctagt

SEQ ID NO: 186552 - DNA, 275 bp, Glycine max
ccaggcgcacgttagcacaaactatcatggccacggcaacagcagctgccacctcgtcctttatggggacgcgtctactggaggctcactccggggcggggcgagtgcacgcccgattcggcttcggcaagaaaaaggctcccgccccaaagaaagcctccaggggatcgggccgagacaccgacagacccctttggtatccgggcgccaaagcgccgaatacctcgatgggagtcttgtcggagattacgggttcgatccgtttgggctaggga

SEQ ID NO: 186553 - DNA, 284 bp, Glycine max
gcaaaaatgagcgtggttggatttgattttggtaatgagagctgcattgttgctgtcgcaagacaaagggggatcgacgttgtgctcaatgatgagtcaaagcgtgaaacacctgcaattgtatgctttggtgacaaacagcggttccttgggacagctggggctgcttctacaatgatgaaccctaagaattccatctctcagataaagaggttaattggtagacagttttctgatccagaattgcagcgagacctgaagacattcccttttgttgtcactga

SEQ ID NO: 186554 - DNA, 270 bp, Glycine max
attttgatctcccaagtttcaaatctcgcgaataaatatatcaaaagatgtctctgattccaagtattttcggtggcagaaggagcaacgtgttcgatcctttctccctcgacgtgtgggatcccttcaaggattttcattttcccacttctctttctgctgaaaattctgcatttgtgaacactcgtgtggattggaaagaaaccccagaagcacacgtgttcgaggctgatattccagggctgaagaaggaggaagtgaaggtgcaga

SEQ ID NO: 186555 - DNA, 265 bp, Glycine max
aaacactcataacacaaagcacaaagcaaagctcatccttgagttaaaaaatggcagcagcttcttccatggctctctcatccccatccttggctggcaaggccgtgaagctgggcccatcagccccagaagtgggaagggtgagcatgaggaagaccgtcaccaagcaggtctcctcaggaagcccatggtacggcccagaccgagtcaagtacttgggcccattctctggcgagcccccgtcctacctaaccggtgagttccc

SEQ ID NO: 186556 - DNA, 275 bp, Glycine max
taggaaatgaattcttcaagcagcagaagtatcctgatgctgtgaagcattacacagagtctatacgaagaaatccaaaagatcctagggcttatagtaacagagcagcatgctacactaaattgggggcaatgcctgacgggttaaaggatgcagagaagtgcattgaacttgatccaacctttgtaaagggttatacccggaaaggtgcagtccagtatttcatgaaggaatacgacaaggctttggagacatatagggaggggttgacatat

SEQ ID NO: 186557 - DNA, 273 bp, Glycine max
ctttgtgtaggtgctcaaccctagtaagccgcaatggtgaagtactcaagggagcctgacaatccaactaagtcttgcaaggctagaggcgccgaccttagggttcattttaagaacacaagggaaactgcctttgcaatcaggaagttgcccttggtcaaggctaaaaggtacttggaagatgttcttgcccacaagcaggcaattccattcagacgtttttgtcgaggtgttggaaggacagcccaggctaagaatagacactctaatggc

SEQ ID NO: 186558 - DNA, 266 bp, Glycine max
aaaaaaaatagcaacaaaaacaagaaaaaaggttacctctttcaattttatcccttgttgtgagcttgattcaatttctgctcacacataatggcttgcacgctcgctgattcattactcctattcaagggttcttatcagaaaccagttctgaggagagacattgctgcccggtactccccgggtatatttagtctaaacagtaatgggcttatccagaaaaggttcaggcgtcaaaggaattttgttactaggaataaggttac

SEQ ID NO: 186559 - DNA, 249 bp, Glycine max
  unsure (1)..(249): unsure at all n locations
cacacactcaatgaagggagttaacgtgaaagttgaagaacacaatggcgtatgctaatgactgcttcaactagcccagcaacatcttcaaacctctccccgcaacccatggaagggttgcacgaggtgggtcccccttccgtttctcaccaaaaccttcgacgttgtggaagacccatccaccaacgantcgtttcgtggagcagagcccgcaacagtttcgtcgtttgggattctncacaagttctc

SEQ ID NO: 186560 - DNA, 270 bp, Glycine max
aaggcgtcttcataaacgcctttcttctccgtttccgtttcctcgttcaaattcgctttttgatctgcgaaaatgagagagtgcatctcgatccacattggtcaggctggtatccaggtcggaaatgcttgctgggagctctactgcctcgagcacggcatcgggcccgatgggcaaatgccaagtgacaagacagttggcggtggtgatgatgctttcaatactttcttcagcgagactggtgctggaaagcacgtgccacgtgcagtg

SEQ ID NO: 186561 - DNA, 276 bp, Glycine max
cctcgacacgcatcggctcgagcacaacggcagaaagcaagctcatactagagttttaaaaatacgcagcagcctactccatggctctctcttccccatccttggctggcaaggccgtgaagctgggcccatcagcccccgaagtcgggagggtcagcatgaggaagaccgtcaccaagcaggcctcctccggaagcccatggtacggcccagaccgcgtcaagtacttgggcccattctctggcgagccaccgtcctacctcactggcgagttcc

SEQ ID NO: 186562 - DNA, 282 bp, Glycine max
  unsure (1)..(282): unsure at all n locations
atgagngtggttggatnngnttnnggtaatgagannngcatnntnantganntanacccagntggtacgaangtacaaccgtgancggtgncgnnanggntgcnccattcacnggcctcaagtccatggctngnntccccaccaggaagaccaacaatgacattacctccattgctagcaacggtgggaagagtgncaatgcatggcaggtgtggccaccagttgggcaagaagaaattgagattctttcctacctgccagacttgatgatgcacantggcc

SEQ ID NO: 186563 - DNA, 278 bp, Glycine max
cggaattcggttcaaccgagcgaatcggctcaggaaggatggtctttctgccgtgcacgtcccttatgcatatacgatttgctatcatattgcacactgttatagttaaggcagcgacgcttcccctgacaaagcaacaggttgaatctacattggctatgcaaaatcttcaaccaaaaattaaggccattcacgatagatatgctggcaatccagaaagcatacaacttgagagtcaaggctatatcggcaggctggggttaaccactggcaagttg

SEQ ID NO: 186564 - DNA, 264 bp, Glycine max
ggagacaatacccatgtttcaaccagagtgatgggaacatatggttactgtgcgccagagtatgccatgagcggcaaattaactcttaaatctgatatatatagctttggtgtggttttgttggagttgatcactggacgtagggcaatagatactaatagaagaccaggagagcaaaacttggtttcatggtctcgtcaatttttcagtgaccggaaaaagtttgtacaaatggttgaccctctgttacacgaaaacttcccc

SEQ ID NO: 186565 - DNA, 265 bp, Glycine max
agcagtgcaatgttgccaacaagcaccatgatcaggacccttgaattttcctccccttgtctatgatcgaggaagaaaatctgtaatatattatgcaaaaaataattaaggtcttttcctttaaatgggctggttcaatgaaccgagaccactgcaggttcatggggatgggaggattaagaggctatgttttttaatcttccgatgttactgttgttttttttttaatttcaataaggatattatatatgtagtactatgcaag

SEQ ID NO: 186566 - DNA, 269 bp, Glycine max
ctctaaaccctaaacaactctttctcttcttccttcgctcgttgttctccctcgcgtagatcgacaatggcggagacagagacgtttgctttccaggctgagatcaaccagctcctcagtctcatcatcaacaccttctactccaacaaggagattttccttcgtgaactcatcagcaacgcctccgatgctttggacaagattcgatttgagagtttgacagataagagcaagctcgatgctcagccagagttgttcattcatattat

SEQ ID NO: 186567 - DNA, 273 bp, Glycine max
gaaagccgttgcaatcctcaagggcaattcctccgtccatggccttgtcactctaacccaacaacaagacaacggcccaacaactgttactgttcgtgtttctggtcttactcctgggcctcatggttttcatctccatgagtttggtgatataacaaatgggtgcatatcaactgggccacatttcaatcctaataaactcaaacatggtgctccggaggataaaattcgccatgcgggtgacctgggaaacatagttgctaatgccgatgg

SEQ ID NO: 186568 - DNA, 265 bp, Glycine max
aaaacactcataacacaaagcacaaagcaaagctcatccttgagttaaaaaatggcagcagcttcttccatggctctctcatccccatccttggctggcaaggccgtgaagctgggcccatcagccccagaagtgggaagggtgagcatgaggaagaccgtcaccaagcaggtctcctcaggaagcccatggtacggcccagaccgagtcaagtacttgggcccattctctggcgagcccccgtcctacctaaccggtgagttcc

SEQ ID NO: 186569 - DNA, 263 bp, Glycine max
caaaacactcataacacaaagcacaaagcaaagctcatccttgagttaaaaaatggcagcagcttcttccatggctctctcatccccatccttggctggcaaggccgtgaagctgggcccatcagccccagaagtgggaagggtgagcatgaggaagaccgtcaccaagcaggtctcctcaggaagcccatggtacggcccagaccgagtcaagtacttgggcccattctctggcgagcccccgtcctacctaaccggtgagt

SEQ ID NO: 186570 - DNA, 264 bp, Glycine max
gctagtttatcgtgaggagaatatgaagttgtttgtattctttgttgctgcagtagttttggtagcatggccatgccatggcgcaggctaccaaaggttccctctccgaatgaaaactggctatggtgagcgttcttcggaggtaaaatgcgcaagttttaggcttgctgtggaagcacacaacatccgagcctttaaaaccattcctgaagagtgcgttgaaccaacaaaggactacattaatggcgaacaatttagatcaga

SEQ ID NO: 186571 - DNA, 265 bp, Glycine max
agaatgtggggattctcgccattgacatctacttccctcccgcttgcgttcagcaggaagcattggagactcatgatggtgccagtaaagggaagtataccattggacttggccaagactgcatgtcattctgtaccgaagtagaagatgtcatctcaatgagtttgacagtggttacttctcttcttgagaagtatgggattgatcctaaacaaatcggtcgtctggaagttggaagcgagaccgtgatagacaaaagcaaatc

SEQ ID NO: 186572 - DNA, 269 bp, Glycine max
  unsure (1)..(269): unsure at all n locations
gctctggtggcaagtgattgatttcgcgaggctaaaccacagcaccatttcgttcttcaatttgcctgagagtgctgcgtcacggtggagtagggtcaaactcaacgcttccaaggtgggaaagggtttgtacttggacgccaaagcacaaaaattggcttttcaacattggattgaagctattgatccacgccaccgctatggacataacttgcattattactatgaagaatggtgcnaaaccgattctggccagccattcttttact

SEQ ID NO: 186573 - DNA, 262 bp, Glycine max
tgctatgatcacattcttagcagctgcagaggctaaagttagacgcgtggtgttcacctcatccattggtgcagtttacatggaccccaaaaggagcatcgatttggtggttgacgagtcctgttggagtgatttagaattttgcaagaacaccaagaattggtattgctatgggaaggctgtggctgaagaagcggcatgggacacagcaaaagagaaaggggtggacatggttgtagtgaacccagttttggtacttgga

SEQ ID NO: 186574 - DNA, 255 bp, Glycine max
attgttttcgtgtggaaacaaaaaaacaatacaaaaacaaacatatgatggtgaagccgagtagcgaaaagccagaggagcatagggattccaagtactacaaaggggtccgaaagagaaaatggggcaaatgggtatccgaaataagactacccaacagccgtcagaggatttggttgggatccttcgacacccccgagaaggccgcgcgtgccttcgacgccgcaatgttctgcttacgtggccgcaacgcca

SEQ ID NO: 186575 - DNA, 257 bp, Glycine max
aacatgttaagtatagtaatgttaatgtcttgtctctaacacacactcatgtgaccctctcgaagcatgtcctttctcgtggttatcaagttgaggacgaggatgatgcagcagactgttacaattacaaagacatggattatgacaaatgggggctcaaaaaaattcctcgagagttgggacttgtctgatgtgttattcatcgttggtaaagatgaaaaacccgttcccgctcacaaggcaatgttagctgcatc

SEQ ID NO: 186576 - DNA, 262 bp, Glycine max
aatgaaccatgccctcatcagaattgcacttttggcgggatatggaacggtggaggggggagtggacaaaaagtcctttatgttactacatctttctattatctggttatacaggctggtatagccgatgcaagtaaaaccagttccaaagtttatcctgcggaattcaaggccgcagctaagcgagcgtgtcaagtcaaatttgaggatgctcaatccacttatccacttatgatggaggatgcacttccatacatttgca

SEQ ID NO: 186577 - DNA, 269 bp, Glycine max
actcgagccgattcggctcgaggacacagacatcgaatgtgaccgcacacctcgttcacattgcttatagtctttcaaaggatatggggttccctggcttcagagttggcatcatatactcttacaatgatgctgtggtcaattgtgcacgcaaaatgtcaagctttgggttggtgtcaacacagactcagcatcttttagcatcaatgctaaatgatgatgagtttgtggaaaggtttctggaagagagtgcaaaaaggttggcacaa

SEQ ID NO: 186578 - DNA, 279 bp, Glycine max
ggagtacttgcagtatgctatggccttttccgtcttgccatggcaaaaggacttgcctgggtggtgtgtgtttatggagttccattgctagtggtcaatggatttttggtgttgattacattcttgcagcatactcaccctgcattgccacattacacttcctctgagtgggactggttgagaggagctttagcaacagtggatagagattatggaatcctgaacaaggtcttccataatattacagacactcatgtagcacatcacttgttctccaca

SEQ ID NO: 186579 - DNA, 278 bp, Glycine max
cccagcattcatattaatatcatgcccttcttctgcatccaaaccttcattttgtagtgggtgggggcttctcatttctctgccgttcgatggatcgggaaggaggatccaacggcggatcttgctactactccgttctcgggattcgtagggacgcctccttctctgatattcgcactgcctaccgcaaactcgctatgaggtggcacccggacaagtgggctcagaatcctgcaaccgctggcgaaccaagcggcggtttcagcagatccaagaag

SEQ ID NO: 186580 - DNA, 258 bp, Glycine max
ctcataacacaaagcacaaagcaaagctcatccttgagttaaaaaatggcagcagcttcttccatggctctctcatccccatccttggctggcaaggccgtgaagctgggcccatcagccccagaagtgggaagggtgagcatgaggaagaccgtcaccaagcaggtctcctcaggaagcccatggtacggcccagaccgagtcaagtacttgggcccattctctggcgagcccccgtcctacctaaccggtgagttc

SEQ ID NO: 186581 - DNA, 277 bp, Glycine max
gtgcctgataacccataaccgaccgcaccaccgttttccttcgctttgcgttctacaatgtcgaaaacctcagagattattacatgcaaagctgctatttgctggggaataggaaaacctcgtgactgtggaagagatacaagtagaccctcccaaagccaccgaagttcgagttaagatgctttgtgccagtatatgctccacagacatctctagcacaaaaggattcccacataccaattttcctatagcacttggacacgaaggagttggtatt

SEQ ID NO: 186582 - DNA, 269 bp, Glycine max
accggatcgacctcaattcgccgtcgtccaatcgctctcagttccaccgcctccgccgccggcatccaattcggtttggccttgcatctctctcaggtattaagattctactaaaaaaaaggttgatcagcgtaaagatggagctcactattacacagcctgatgattggcatcttcacctccgtgatggttcccttcttgaagctgtcctccctcacagtgcgaacattttggaagggcatagtatgccaatttgaaaccacatcata

SEQ ID NO: 186583 - DNA, 272 bp, Glycine max
aaccaccactaccttatccatttccactcctcaccaagccttaccatggcctcaaccaacgccctctcttcagcttccattctacgctctcccaaccgctagtctctgaccagaagagcgaaccacaacggaagagtaaattaccgtcaaccgaatatccgtttctccgtcaaagcctccgccaaagagattgcctttgaccagcattcccgctctgctatgcacgccggcattgacaagctcgacgacgccgtcgggctcactcttgggcc

SEQ ID NO: 186584 - DNA, 253 bp, Glycine max
acttaaggtttcaaacctaggaagttggaagtcatggcagcaacattgatggcagcaacaacaagttctggtactcttaaagcaactcctttccttggccaaggcaagggtgccaatgccaatgctcttagggatgttgtctccatgggaactgggaagtacaccatgggcaatgatttgtggtatggaccagacagagtgaaatacttgggacccttctcagctcagaccccttcatacttgaaaggagaat

SEQ ID NO: 186585 - DNA, 249 bp, Glycine max
gataaatcactgtatccagtgttattgtctaatggaaacctagctgaacaaggtgacttagaggatggcaggcactatgctgtttgggaggaccccttcaagaaaccttcttatctgtttgcctttgttgctgggcaattgcagagcagagatgacacatttatcacccattcagggcggatggtgtcccttaggatatggacacctgcagatgatgtacctaagactgtacatgctatgtattctctg

SEQ ID NO: 186586 - DNA, 251 bp, Glycine max
gcaggaattcacatttaccatccggaggggtgttggaactgcagattgtgttagtgtgaactatgacgatttcgtcaatgatgtggatgtgggggacatgcttcttgttgatggtggtatgatgtctttggtggttaagtctaagacagaggattctgtgaaatgtgaagttgttgatggaggagagctcaagtcaaggagacatttgaatgttagaggaaaaagtgcaacacttccttccatcactgaga

SEQ ID NO: 186587 - DNA, 258 bp, Glycine max
caactacaactcgcagcctcaggcttcgtacaaagttgcagttcttggtgctgctggagggataggtcagccactcgcgcttctcatcaagatgtcgcctctagtttccgacctgcatctctatgatattgcgaatgtcaagggagttgctgctgatatcagtcactgcaacaccccctcacaagtcagggatttcactggagcttctgagttggcgaattgtttgaaggatgtgaatgttgttgtcatacccgccgg

SEQ ID NO: 186588 - DNA, 258 bp, Glycine max
cagcttgaacacaccgcgtttcggagagagacgtcgcaatggggaggaggcctgcaaggtgttatcggcagataaaaaacaagccataccccaaatcacgcttttgccgtggtgttcctgatcctaagatcagaatttatgatgttggtatgaagaagaaaggtgttgatgagtttcccttctgtgttcatctggttagctgggaaaaagaaaatgtttcaagtgaagcattggaagctgctagaattgcatgcaaca

SEQ ID NO: 186589 - DNA, 262 bp, Glycine max
cttttagcaagttaacaacacttttgtcttcgttccattatctagttctcaattctcttcaccctttgcctctgaaagaaatgggtagtcttgaagcggaaagaacaacagtaggattggcagcaagagacccttcagggattctctccccatacacctacaatctaagaaacacaggccctgatgatgtttacattaaagttcactactgtggaatttgccattctgatctccaccagattaaaaatgatcttggcatgtc

SEQ ID NO: 186590 - DNA, 266 bp, Glycine max
gttgacaaaaagataaccaatgcaagggatcttatcaacatactggaggatgctattagaagtggataccctatattaattattgctgaggatattgaacaagaagctttagcaactcttgtggtgaacaaacttagaggatcactgaaaattgcagcactcaaggcccctgggtttggagatcgcaagagccagtaccttgatgatattgccatcttgactggaggtactgtaatcagagaagaggttggccttactttggacaa

SEQ ID NO: 186591 - DNA, 273 bp, Glycine max
cactcgagccgattcggctcgagccttatctctctctctctctctcactcccgaattattgtacgttctacccttttacttaacattccctgtttccggtattcgctccctttttttctgcattctggttttacttagatctctgtcccgcaccagatctggtgcagggtgagagggttgggttcattaattttgtatcaatcttccttctgagcggtaggcgtggggataccagagtcttttcgggaagcaagagagggttctctccgtttt

SEQ ID NO: 186592 - DNA, 253 bp, Glycine max
ctagtcctgttatttctcagcgcgtaaagcatggctttgttggtggagaaaaccacgagtggtcgcgagtacaaggtcaaggacctttcccaggccgacttcggccgcctcgagatcgagctggccgaggttgagatgcccggcctcatggcctgtcggaccgagttcggcccctcccagcccttcaagggggcccgcatcaccggctccctccacatgaccatccagaccgccgttctcattgagaccctca

SEQ ID NO: 186593 - DNA, 256 bp, Glycine max
  unsure (1)..(256): unsure at all n locations
tgcttcaccttctgctctagaaaattcagtgctgaaacatggcttcggctactctctctgtagccaaaccagcccttcaggcaaatgggaaaggcttctctgaattctctggcctccgaagctcatcaggcttccttcccttttctagaaaatctcagaggatttccattctgtcattgcctccagacctatgcagttgncaagcagtggaggatacaagaagggtgtgacagaagcaaaatcgaaggttgccatt

SEQ ID NO: 186594 - DNA, 270 bp, Glycine max
tggagttccatttgagttccacagtgctgctatgtgtggaagtgagcttgaactagaaaaccttgtaattcaacccggggaagctctagttgtgaacttcccttttgttttgcaccacatgccagatgagagtgtgagcacagagaaccatagggacaggctattgagactagtcaaaagcttgtcacccaaggttgtgacccttgttgagcaagaatccaacaccaacacttctccctttttccaaaggtttgttgagaccttgagtta

SEQ ID NO: 186595 - DNA, 272 bp, Glycine max
aaaagaatagagaagagagtgaggtttggtggtgtggtttagtgtcaaaatggcggcgagtagaagcactttacctctgatgaagtacttgagagtgcgcgtggacgctcttccccgcaacactcccttgaccctcgcttccaacttgttgattcgccgcttctccgaagaggttaggggttgttttctcgacaagtccgaggtcacagatcgcgtcatttcctgcgtcaaaaacttccagaaagtcgatccttctaaggttaaccctaatg

SEQ ID NO: 186596 - DNA, 275 bp, Glycine max
gtggattcgaaaaagatgaaggtttggagacgggtggtgagtttgatgttagtggggttactgcccgtgtcaacaatgggtcgattcgtggtggagaagaacagcctgagagtgacatcgccggacaaaataagagggacacacgacagtgccattggcaacttcggaatacctcaatacggtggtagcatggccgggaacgtaatttaccctaaggataacaaaaagggttgcaaagagttcgatgagttcgggatttccttcaaatcaacccc

SEQ ID NO: 186597 - DNA, 255 bp, Glycine max
agcaaaagcaagaagaactagtctaagcagaaatggcctcttcagtgatggcatctgtggccctcaaacctgcccctttcactgttgagaagtcctcagttagaggccttccctccctctcaaggaactcctcttcattcagagttgtggccagtggtggcaagaagatcaagactgacaagccttatggaactaatggtggcatggctttgagggaaggagttgatgcatctggcaggaaaggaaagggaaagg

SEQ ID NO: 186598 - DNA, 251 bp, Glycine max
accggcgagtccatctcgcgccacgcacgtagccgctccggccaccgcctttggttccctcactttctcgtccttcttcttctcagaaatatgccttctcaaaaagttgaaacgggtcatcaagacacggtccatgatgttgcaatggattactatggtaagaggctggccacggcttcatcagatcacacaattaagataattggggtgagtaatacggcctctcagcatctcgcaacattgactggtca

SEQ ID NO: 186599 - DNA, 248 bp, Glycine max
ttctctttgtagtattttggactgaaagaagaacaagtacctctaattatcattcaacacaatgacgggactcagttttttaaacccaatttggaagctgatcacattccaacttggttgaaggcgtacaaggatggtaatgttgcaccatttgtgaagtctgaacccattcctgaagctaacgatgaacctgttaaagtggtagttgggaacagtcttgaggacattgttttcaaatctgggaagaa

SEQ ID NO: 186600 - DNA, 252 bp, Glycine max
ggtcgcttggctatgttctccatgtttggtttctttgttcaggctattgtcactggcaagggccctattcagaacctttacgaccacgttgctgatcctgttgccaacaatgcttgggcttatgccactaactttgtccctggacaatgaggatgcctacatgcaatgcaatcttctgctcccttttgcagttcccttgtgtttaactccattttcactaatgtaactacacctgtgtagcagaaaaatctg

SEQ ID NO: 186601 - DNA, 252 bp, Glycine max
gaagagagaaaaaccactggcaataacactcaacaatggcttcaagatgcctatcattggattgggcgtgtggcgcatggaaggaaacgaaatcagggacctaattctcaattccatcaaaattggttatcgccattttgattgtgctgctgaactacaaaaacgaggcagaagttggagatgcgcttaaggaggcttttgatagtggacttctgaagagagaggatctcttcattacaccaagctttggaa

SEQ ID NO: 186602 - DNA, 259 bp, Glycine max
aagttaaaagccttagccttccctacaactccaaacaataagacatcatcatccatggctgcctccgtctccactgtcggagctgtcaacagagctcttttgaacctgaatggttctggagctggagcttcagctcccagttcagccttctttgggaccagcttgaagaaggttattgcctcaagggtccccaacagcaaggtttccggtggaagcttcaagattgttgctgtagaagagaagaaagagattgaagaga

SEQ ID NO: 186603 - DNA, 236 bp, Glycine max
tcagctgaagagccatccgcagtaagcaatggttaagcataataatgttatccccaatgggcacttccggaaacactggcaaaactatgtgaagacttggtttaatcaaccagcccgaaagaccagaagacggttggctcggcagaagaaggctgtcaagattttccccaggcctactgctggatctctcaggcctattgttcatggccagactctgaaatacaacatgaaagtca

SEQ ID NO: 186604 - DNA, 207 bp, Glycine max
tctgtggttggcttggcattctcaccattgctaatccaaaaatttggttggccatcagtgttttactcctttggatctcttggaagtatctggtttgccttgtggttgagaaaggcatatagctccccaaaagatgaccctgatcttggggtagaggagaaaaggctcatactggaaggcaatgtatcaaatgcacctgtttcttcc

SEQ ID NO: 186605 - DNA, 250 bp, Glycine max
actcgagccgattcggctcgagcttagtatatatttcattgatacaactaccctaacactgtacttggatagccatggaacaacaagtagccacaacaactgaaggacaatccataagatgtaaagcggcaatttgtcgcaaagcaggtgaaccactgagtattgaggagatcattgtggcgccaccaatgcctggtgaagctcgcattcgtattatatgctcctctctctgtcaaaccgatatcagttt

SEQ ID NO: 186606 - DNA, 249 bp, Glycine max
acctttgttcactcttcttctcttgcggctagggttttagcgcagctcttctagatttaaggaagatgggtaaggaaaaggttcacatcagtattgtggtcattggccatgtcgactctgggaaatccactaccactggtcacctgatttacaagcttggaggcattgacaagcgtgttattgagaggtttgagaaggaagctgctgagatgaacaagaggtctttcaagtatgcctgggtgctggaca

SEQ ID NO: 186607 - DNA, 250 bp, Glycine max
caggtactgcgtttcggaagcagacacagatggctcgtacgaagcaaaccgctcgtaagtccacaggaggaaaggctcctaggaagcagcttgcaaccaaggctgcacgtaagtctgcaccaactactggtggtgtgaagaagccccaccgttatcgtcctggtaccgttgctcttcgtgaaattaggaaataccagaagagtactgagcttttgatccggaagctccccttccagaggctggttcgtga

SEQ ID NO: 186608 - DNA, 253 bp, Glycine max
gtgtggttcaaggccggtgcacagatcttctcagagggaggccttgactacttgggcaacccaaacctgatccatgctcagagcatccttgctatctgggctgttcaggttgtgctcatggggtttgttgaaggttacagagttggtggacgatcacttggtgaaggacttgacccaatctaccctggtggtgcttttgaccctcttggtctggctgatgaccctgatgcattcgctgagttgaaggtcaagg

SEQ ID NO: 186609 - DNA, 260 bp, Glycine max
ggcaactcgaagactttcattgctcctctctcgctctctatcttccacttcttttcaagctacttctctacttcactcactagggagaaactctggcaagtggggaaactttaacagattcagcactgcagcagcagttgaggatttaatcactccacaagttccaataacatacactactcatctgataaatggacaatttgtggatgctgcttcagggaaaacttttccaacatatgacccacgcacaggagaagtga

SEQ ID NO: 186610 - DNA, 271 bp, Glycine max
gtgcctgataacccataaccgaccgcaccaccgttttcctttgctttgcgttctacaatgtcgaaaacctcagagattattacatgcaaagctgctatttgctggggaataggaaaacctgtgactgtggaagagatacaagtagaccctcccaaagccaccgaagttcgagttaagatgctttgtgccagtatatgctccacagacatctctagcacaaaaggattcccacataccaattttcctatagcacttggacacgaggagttgg

SEQ ID NO: 186611 - DNA, 271 bp, Glycine max
gagccgaatcggctcgagctcataacacaaagcacaaagcaaagctcatccttgagttaacaaatggcagcagcttcttacatggctctctcatccccatccttggctggcaaggccgtgaagctgggcccatcagccccagaagtgggaagggtgagcatgaggaagaccgtcaccaagcaggtctcctcaggaagcccatggtacggcccagaccgagtcaagtacttgggcccattctctggcgagcccccgtcctacctaaccggtg

SEQ ID NO: 186612 - DNA, 269 bp, Glycine max
cccagtccaagcagcctccaattcgtgccactctcttcaaaatggccgttaccttctcaaatctccacacagaatcaggtctcaagtccctcgacgacttcctctctgggaaggtctacgtttctggggatcagttcacaaaggacgacatcaaagtgtatggtgctgttttggagaagccaggtgactcttttcccaatgctgccaagtggtacgaggttgtctcatctcagcttgctgcaagcttccccggcaatgctcaaggggtg

SEQ ID NO: 186613 - DNA, 267 bp, Glycine max
tgcaaacccttgtccgagcaagaggtaagggtcttgtgtgataaggcaaaagacattttgatggaagagagcaatgtccagcctgtgaaaagtcctgatacaatttgtggtgatattcatgggcaattccatgatcttgcagagctttttcgcattggagggaagtgtccagatacaaattacttgtttatgggagattatgttgatcgtggctattattctgttgaaactgttacgcttttggttgcccttaaagtgcgttatcgt

SEQ ID NO: 186614 - DNA, 266 bp, Glycine max
gttcaacatgaactgttatctgtatatgcaaaccaactccttgaaaaggagcattctggatgtcatgcattactaagagatgacaaggttgaagacttgtcaaggatgttcaggctcttttctaaaataccccgaggtttagatcctgtttccagtatatttaagcagcatgtgaccgctgaaggcatggcattagtgaagttggctgaagatgcagtgagtaccaagaaggcggagaaaaaggatattgttggtttacaagagca

SEQ ID NO: 186615 - DNA, 272 bp, Glycine max
gcgagaaatggcgatggcaatggcgcttcgcaggctttcatcttcaattgacaagcctctgcgccctctcttcaatgccggttccctctactacaagtcgtctttgcctgatgaagctgtttacgacaaggagcgacccggagttacatggccgaagcagttgaatgctccacttgaggtcgtggatcctgagattgctgatattattgagcttgagaaagctaggcaatggaaggggctagaattgataccgtcagagaatttcacctctg

SEQ ID NO: 186616 - DNA, 226 bp, Glycine max
atcgagataactagaaacagtgtgatgaaaatgaaggtccttgttttcttcgttgctacaattttggtagcatggcaatgccatgcgtacgatatgttccctctccgaatgaacactggctatggtgcccgtactccggaggtgacatgcgcaagttggacgcttgctgtggacgcacacaacctccttggctttgagaccatcctgaagaatgcggtgcagcacc

SEQ ID NO: 186617 - DNA, 276 bp, Glycine max
  unsure (1)..(276): unsure at all n locations
gtcgaatcactcccttatccatttccacaccacatcatagatcacaancaacgctctctcttcagcctccattctacgctctcccaaccgccagtctctgacccgaagagcgaaccataatggaagagtaaattaccggaaaccgaataaccgtttctccgtgaaagcctccgccaaagagattgcctttgaccagcattcccgctctgctatgcaggccggcattgacaagctcgccgacgctgttgggctcactcttgggcccagagggaggaa

SEQ ID NO: 186618 - DNA, 254 bp, Glycine max
gttcaactcaactaaactatgtcttccttatccctatatgccaacctctcctctctaccatcctccctcaccattcgttcttcttcatccaaagatacctctttgaaacaggattggaggacaaagtccaaacctatcccaccaggtggcacataccctgcaaaagatcattgcagtcgttgtgggttgtgtgatacttactatattgcccatgtcaagaatgcatgtgctttcttgggagatggaatgtctaa

SEQ ID NO: 186619 - DNA, 272 bp, Glycine max
catttgcaaagtgttatttttcttttttttctcatttgcattgcaaattgcaatggcttccaacaaggttattgccaccatcatggtgctttctctccttgcctactcaacatcattcaccaatgcatgtggcacatgccacccaaaacctaccccttctccttctcctcctcctccatcaggaaagtgccctaaggacacattgaagctaggggtgtgtgcagatattctaggtcttgttactgttgttgttggctcccctgtctccagca

SEQ ID NO: 186620 - DNA, 264 bp, Glycine max
gtaagctcccaagcagtgggaggaggctcgggactctgaccgcgtgcctgttgaagaatgagccggcgactcataggcagtggcttggttaagggaaaccaccggagccgtagcgaaagcgagtcttcacagggcaattgtcactgcttatggacccgaacctgggtgatctatccatgaccaggatgaagcttgggtgaaactaagtggaggtccgaaccgactgatgttgaagaatcagcggatgagttgtggttaggggtg

SEQ ID NO: 186621 - DNA, 261 bp, Glycine max
cttatcgctgtggttttcatcgtcttccttctcttatatttcttatttcttttgccttcgccgcacgccgaaacaatggccggaaaaggaaagggtcctgctatcggaatcgatctcggaaccacctactcttgtgtcggtgtgtggcaacatgaccgagttgaaatcatcgccaacgaccaagggaacctcacgacgccgacttacgtcggcttcactgataccgagcgtctcatcggtgatgcggctaagaaccagtcg

SEQ ID NO: 186622 - DNA, 265 bp, Glycine max
cctcgagccgaatcggctcgagagactcaggcgctgctgcccttcagtccttcagcaatggattacgtgaagtcacagaaatcaaaagcctacttcaagaggtatcaagtcaagttcaagagaagaagagagggaaaaaccgattaccgtgccaggattcggttgattaatcaggacaagaacaaatataacaccccgaaatatcgctttgttgttcgtttcagcaacaaagacattgttgcacaaataatatctgctagcattg

SEQ ID NO: 186623 - DNA, 180 bp, Glycine max
gagaaaatgtctctgattccaagtttcttcggtggccgaaggagcagtgttttcgaccctttctccctcgatgtgtgggaccccttcaaggattttccatttcccagttctctttctgctgaaaattcagcgtttgtgagcacacgagtggattggaaggagacaccagaagcacacgtg

SEQ ID NO: 186624 - DNA, 247 bp, Glycine max
ttcaaacttgaagcattgcattctgctatttaattccactacgtacacgcacattctcctcaaagacaacaatggcaccaacagccaagactctgacttacctggcccaggagaaaaccctagaatcgagcttcgttcgggacgaggaggagcgtcccaaggttgcctacaacgaattcagcgacgagatcccagtgattctcttgccggaatcgagaggtggatggacgcagagagagattgtgag

SEQ ID NO: 186625 - DNA, 271 bp, Glycine max
tgggcggtgaagtgcagtacttcaatccccttttctctcttctccttttatttcatctctctcttcgttcctttcttcttctccaaagttttcaattttcacacttttcgagtaatcacatcttttcaatggcgtcccaaattacccgtgagtggtctggaatcaatacattcgcacctgctaaccagactaagttgcttgcactcttggggaaaacttaaccaagagaatggtgactccttaactatacttgtgatgggaaaagtggtgt

SEQ ID NO: 186626 - DNA, 270 bp, Glycine max
gcaaaactcagatgcaaaaagtgtggtggaacttacaaatggctcatctgaagatggtaaagagacatctaacagtgatgctcctgagaacaatcctcagtatactactgtttatgtgggtaaccttgctccagaggtaactcaacttgatctccatcgccacttccatgctcttggggctggagtgatggaggaggttcgggtccagcgtgataaagggtttggttttgtgaggtacagtactcatgctgaagcagctctggctattca

SEQ ID NO: 186627 - DNA, 271 bp, Glycine max
gtcaatttcgtacactcgaacatctccaagaacagccgccagccatacgccgtcagtcgtcgcgctggtcaccagacctccgccgaatcctggggtaccggccgagccgtctcccgtatcccccgtgttcccggcggcggaacccaccgcgccggccaaggagcctttggaaacatgtgccgcggcggacgcatgttcgccccgaccaagatctggcgccgctggcataggaagatcaacgtgaaccagaagcgctacgccgtcgtctccg

SEQ ID NO: 186628 - DNA, 268 bp, Glycine max
gataactagaaacagtgtgatgaaaatgaaggtccttgttttcttcgttgctacaattttggtagcatggcaatgccatgcgtacgatatgttccctctccgaatgaacactggctatggtgcccgtactccggaggtgaaatgcgcaagttggaggcttgctgtggaagcacacaacatctttggctttgagaccattcctgaagagtgcgttgaagcaacaaaggaatacatccatggcgaacaatatagatcagactccaaaaca

SEQ ID NO: 186629 - DNA, 267 bp, Glycine max
tgaagaggcagacagtgaatgccatgaaacacatgcagctgttagtgcgagttcaatgtcagattcagtctcgaaggatccagatgttggaaaaccaggcacgatatcaagctgatttcaagaatgataaggatgcagccagtatcttgggcaaactcacttctgaagcaggaaatgaagagtgggatgatagcttactgaccaaagaggaagtagaggcaagattgcagaggaaggtggaagcaatcatcaaaagagaaagagcaa

SEQ ID NO: 186630 - DNA, 263 bp, Glycine max
gctgtgagtagtgagagggaggaagacatagacataaagaaggagaagtgaagtgatgaatgccccagatcgttacgagcgtttcgttgtccctgaaggcaccaaaaaggtttcttatgagagggacacaaagatcatcaatgccgcgtccttcaccatcgagagagaggagcacactatcggcaacatcctccgcatgcagcttcacagagaccccaatgtgttgtttgccggatacaagcttcctcaccctcttcaataca

SEQ ID NO: 186631 - DNA, 264 bp, Glycine max
gcaaaatttaaggaattggctccatatgatcctgactggtattatgttagggctgcctcaatggcaagaaagatttatttgagaggcggtcttggtgttggggctttccagaggatctatggtggaagcaagagaaatggcagccgtcccccacatttctgcaagagcagtggggctattgcaagatccattctgcaacaattgcaaaacatgagcattgttgagattgatacaaaaggaggtaggaaaatcacatctagtggt

SEQ ID NO: 186632 - DNA, 261 bp, Glycine max
caagtcaaccggaaagtatcatacatgaagcagatattgttattgcagcagcaggacagccgatgatgatcaagggaaattggatcaaaccaggagctgcagtcatagatgttggcacaaatgctgttgatgacccaacaaagaagtcgggttacaggcttgttggagatgtagattttgaggacgcatctaaagttgctggttggattactcctgttcctggtggtgtaggtccaatgacagtgacaatgttgctgaaga

SEQ ID NO: 186633 - DNA, 263 bp, Glycine max
cacaacttcgcttattaaatctcttcttccaattccttctttcattcattcccaggctgagatggcagcggcaccagcagctaccttcactattggaaccaccggttccctaggccaaagaggaaactcgcttcctcaattaaagtcttctgggttgaaattcaactcccagaatcatttgaagagcttctgcggcctcaaggccatgtcatccgtgagatgtgagtcagaatcgtctttcttggttaacaaaactggtgctg

SEQ ID NO: 186634 - DNA, 264 bp, Glycine max
gaagtcttgcccttctctcttcaactccaaacacaagacatcatcatccatggctgcctccgtctccactgtcggagctgtcaacagagctcttttgaacctgaatgggtctggacctggggtttcagctcccagttcatccttctttgggagcagcttgaagaaggttattggctcaagggtccccaacacaaagatttcctctggaagcttcaagattgttgctgtagaagagaagacagagattgaagagacccagcagac

SEQ ID NO: 186635 - DNA, 238 bp, Glycine max
cggatattgtctgctctaaaacagtttttggatgctgaatctattatcaatactgctttggatcaaactggaaaatgggatcaaggtgatttgttgcgaacaaaagctaaacttcaaattgcacagggccagttaaggaatgcaattgagacatatacgcagttgcttgctgttcttcaaatccagagtaaaggttttgggtctgggcagacgctatacaaggaaaacagagatcgtg

SEQ ID NO: 186636 - DNA, 233 bp, Glycine max
taagctcccaagcagtgggaggaggctcgggactctgaccgcgtgcctgttgaagaatgagccggcgactcataggcagtggcttggttaagggaaaccaccggagccgtagcgaaagcgagtcttcacagggcaattgtcactgcttatggacccgaacctgggtgatctatccatgcacaggatgaagcttgggtgaaactaagtggaggtccgaacgactgatgttgaag

SEQ ID NO: 186637 - DNA, 248 bp, Glycine max
cagagagcgcgtcttaataaacgctcatctctgaaaacccccatttcttttctactatcttcttctctttacgttcttcgatcttcgatcttcgtcgctgaaaatgagagagtgcatttcaatccacatcggccaagccgggattcaggttggaaacgcctgctgggagctttactgcctcgaaaacggcattcagcctgatgggcagatgcccagtgacaaggacgttggtggaagtgatgatgctt

SEQ ID NO: 186638 - DNA, 267 bp, Glycine max
cattaacctcttcttcttccactttcattccaaagcgttattccttcttcttcttcctctccattctcttcgctcttcgatcctcgtccgggggctgctccgaataccaccaccaccacgcgccgatggccacgataggaggcttacgcgactcccaaggctctcagaacagcgtccaaaccgaggccctcgctcgattcgccgtcgatgaacacaacaagaagcagggtggtgaggacacaggaacaggttgttgcgggaacctgc

SEQ ID NO: 186639 - DNA, 266 bp, Glycine max
gtttctattaagcagaaggatcggtctgctatgagtgttgggccgggaatggatttgccgatcatgcatgacagtgatcgctatgagcttgtgcgtgacattggttctggcaacttcggtgtagccaggcttatgagggacaagcacaccgaggaacttgttgctgttaagtatattgagagaggtgaaaagatagatgaaaatgtacaaagggaaattataaatcacagatcactgaggcatcctaacattgtcaggttcaagga

SEQ ID NO: 186640 - DNA, 268 bp, Glycine max
ctcgagccgctcgagccgttcagcagtcgttacagagactccataacccgaaaatgcctttacaagaggtaacgttgagattggaagggttgctcagatcaactatggcaaagagtatgggaggctcgtggttattgtcgatgtcattgaccagaatagggctcttgttgatgctcctgacatggtgaggtcccaagtgaacttcaagaggctatcactcactgacatcaagatcgatattaagaggatccccaagaagaaggatctc

SEQ ID NO: 186641 - DNA, 262 bp, Glycine max
gtttgttgtaggaagaggaatcttgagaaatggcaggggacagcaagagcaagattctgttcatcggagggactggttacatcggaaaattcatcgtggaagccagcgccaaagctggccacccaactttccttttggtgagggagtccactctctccaaccccgcaaaatcacccctcatcgacaatttcaaaggcctcggtgtcaatcttgttttaggagatctatacgatcaccaaagtttggtgagtgctataaagca

SEQ ID NO: 186642 - DNA, 262 bp, Glycine max
ctttcgcattctcaatacccttttgatttgtgaaaggcaagcaaacatggttgaccacgtccaacaccctacaatcatggacaaggttgctggttcgctccatctccgctctggtctttcatctggtattagaagttatgatggagcctaccgccacccagctatgtaccaaagaccctcttttgggcgctactgcaatgctgcattgcagcttcctgtgatgcccacatgcaaagctaccatggatttgtctgctactgca

SEQ ID NO: 186643 - DNA, 260 bp, Glycine max
gtgccttatagctgtggttatcatcttcttcttcctctttcttagatctcttctttctctacgccgcacgccgaaaccatggccggaaaaggagagggtcctgctatcggaatcgatctcggaaccacctactcttgcgtcggtgtgtggcaacatgaccgcgttgaaatcatcgccaacgaccaagggaacagaaccacgccgtcttacgtcggattcactgacaccgagcgtctcatcggtgatgcggccaagaatca

SEQ ID NO: 186644 - DNA, 259 bp, Glycine max
ggtcgttcaagatttttaacctgaaatcttcacttcacatctctctatcctctcattctcatcaccaacaagtgtttctgtaaccatggcatccaccactctatcccctacaaccccttctcagctatgctcaggaaaaagtgggattttcagttcctcacaggcacttcttgtgaagccagtgaagaggcagatgatggggaagagcaagggcttgagaattgcatgccaagccaccagcatttccgctgatagagtc

SEQ ID NO: 186645 - DNA, 259 bp, Glycine max
agtaactccaactccaagtcacattggtgacaaagttagaaacaaggagaaagaaagaagatggcaggaaagaaaatcccagatgtgttgctgaattcaggacacaaaatgccagttataggcatgggaacttcagtggagaatcgtccatcaaatgagacccttgcttctatctatgttgaagccattgaggtgggttaccgtcattttgacactgctgcagtgtatggaacagaggagccataggcctagcgtggcc

SEQ ID NO: 186646 - DNA, 260 bp, Glycine max
cgctcgagccgattcggctcgagcttgctgatgcgcaccactctctccttgttctttctcggatcagtgtctctctttgacagtggtgctgtcagcattgacctcagcttgagcagtaaaacatcatcagcactactacggtaccatggctgtgctgcaatctttcgtttcggtccacccagattctcacttccccatacagaacctcccttacggagtcttcaagccccaatccgcttcgcctcctcgtcccggcgtcg

SEQ ID NO: 186647 - DNA, 275 bp, Glycine max
ggctcaaggcctaatcgaactattcagattctaaaaaatcagttggtggtgggctggagcaatcggtgctgccaagaagaaattcgaggaagaggaaccgccgcgaagcttccagagcgtgggcctggtgatcggcgtgacgggcatcgtgggcaacagcctcgccgagatcctccctctcgccgacacccccgccggtccatggaaggtctacggcgtcgcacgccgcccccgtccgccgtgagaagccgaccaccctgtcgagtacatccagt

SEQ ID NO: 186648 - DNA, 263 bp, Glycine max
ctcgagccgcaatttaccagctatacttgttccttttgaaggttagaagtgctacaatacacacaatggcagctactcaggaagatgtgaagcttttgggtattgtgggaagcccatttgtgtgcagggtccagattgcccttaagttgaagggagttgaatacaaatttttggaagaaaatttgggcaacaagagtgatttgcttctcaaatacaaccctgttcacaagaaggttccagtgtttgttcacaatgagaagccc

SEQ ID NO: 186649 - DNA, 263 bp, Glycine max
ggcagaaagcaagctcatcctagagttttaaaaatggcagcagcctcctccatggctctctcttccccatccttggctggcaaggccgtgaagctgggcccatcagcccccgaagtcgggagggtcagcatgaggaagaccgtcaccaagcaggcctcctccggaagcccatggtacggcccagaccgcgtcaagtacttgggcccattctctggcgagcccccgtcctacctcactggcgagttcccaggtgactacggctg

SEQ ID NO: 186650 - DNA, 238 bp, Glycine max
gcttgttgaggaaggagtggtctcagtgctttgaagagaggaattcgatttgggtttgtagattcaagaggtcctcgtgaactttatggaaaaggcagtacgatttgatggggatttgaatcaagttgaaatcaagtatcacttagaagttgagaatgtgaatgggattcaattacaaacagttctggaggcaatggatgtagttggtattctagagtatgggcttgctacagttgct

SEQ ID NO: 186651 - DNA, 258 bp, Glycine max
  unsure (1)..(258): unsure at all n locations
ggcaactggaagtgtaacgnaacaaaagactcaatcagcaagcttgttgctgacttgaacaatgcaaaattggagcctgatgttgatgttgtcgttgcacctcccttcctctacatcgatcaagtgaaaaactcactcactgagcggattgaaatatctgcccagaattcttgggttggaaaaggtggtgcttttactggagaaatcagcgcggaacaactaanagatcttggatgcnagtgggttgttcttggacat

SEQ ID NO: 186652 - DNA, 250 bp, Glycine max
taaagtggaaggcgagcagggggctccaatacatgttgttctgattgatgccaatagtggaagcattgtaacatctggacctgaatcctgtgttaaacttgatgttgttgtccttgaaggtgattttaacaatgaagatgatgaagattggactcaggaggattttgaaagccatgtggtaaaagaacgtgaaggacagagacctttgttaactggggacctgcaagtgacactcaaggaaggagttggg

SEQ ID NO: 186653 - DNA, 254 bp, Glycine max
atccctcactaggagctcttctccattggttcttcatctgcatgcacacacttgcatagttttggaaaccaagaatttttgaagggtagcatcaacaagaagttctgaaaatggagatcaccaatgtcagcgagtatgaagctattgcacagcagaagttgccacagatggtgtttgactactacgcatctggtgcagaggaccagtggactctgcaggagaacagaaatgccttttccagaattttgtttcgg

SEQ ID NO: 186654 - DNA, 255 bp, Glycine max
attaacaaccatatctatctattgagaaacatgaagaaggtttcacccttggcattttccattctctttttggccttcaccatagaaccctttattggcattgctgcagcagcaccagaagcagtgcttgacacctcaggccagaagctgagaacaggtgtccagtactacattctgccagtgttcagaggcaaaggtggaggcctaacagttcaagcagtggcaacaacacatgccccctctttgtggtgcaaa

SEQ ID NO: 186655 - DNA, 263 bp, Glycine max
ctcaacttctgctcttccaactcctacaacgcttttctctgcactcatgggcaaggtcaagatcggaatcaacggatttggaagaattggccgtttggttgccagagtcgctctgcaaagagacgatgttgaactcgttgccgttaacgaccctttcattaccaccgattacatgacatacatgtttaaatacgacagtgttcacggacactggaagcatcacgatgtcaccgttaaggacgagaagacccttctcttcggtg

SEQ ID NO: 186656 - DNA, 262 bp, Glycine max
cacacacttttttcaaggcataggattggtgaggcaaacttgaattgaagtgaagaaggagatggctgcaacctcttccttgtgctcatcgaccctccaatcccagatcaatggattcttccttcacaaaacctctctttcccatactccttccctcactttctccaggaggaaaatttcaaccacagtgaaggctacatctcgagtcgacaagttttcaaaaagcgatatcattgtctctccgtccattctttctgcaaat

SEQ ID NO: 186657 - DNA, 255 bp, Glycine max
ttcttctcttgcggctagggtttagcgcagttcttctagatttaaggaagatgggtaaggaaaaggttcacatcagtattgtggtcattggccatgtcgactctgggaaatccactaccactggtcacctgatttacaagcttggaggcattgacaagcgtgttattgagaggtttgagaaggaagctgctgagatgaacaagaggtctttcaagtatgcctgggtgctggacaaattaaggctgagcgtgaaaa

SEQ ID NO: 186658 - DNA, 258 bp, Glycine max
tattatcatccgcagctgcttttattcgcaccgcaaacagtgagccatggccgtcggaaagaacaagcgcatctccaaggggaagaagggtggcaagaagaaggcagctgatccctttgccaagaaggattggtatgacattaaggctccttctgtttttcaagtgaaaaatgttggcaaaaccctcgtctctcgtactcagggtaccaagattgcttctgaaggactcaagcatagagtgtttgaggtctccttggc

SEQ ID NO: 186659 - DNA, 256 bp, Glycine max
ctcttcttctcttgcggctagggttttagcgcagttcttctagatttaaggaagatgggtaaggacaaggttcacatcagtattgtggtcattggccatgtcgactctgggaaatccactaccactggtcacctgatttacaagcttggaggcattgacaagcgtgttattgagaggtttgagaaggaagctgctgagatgaacaagaggtctttcaagtatgcctgggtgctggacaaacttaaggctgagcgtg

SEQ ID NO: 186660 - DNA, 255 bp, Glycine max
ctttcagaggtgtcgacaacagtatgtattacatgttagcacccaagggggagttctataactattcaggatgtgggaacacgttcaattgcaaccatccagttgtgcgacaatttatagttgactgcttaagatattgggtaacagaaatgcacgtggatggttttcgctttgatcttgcttctattatgaccaggagtagcagtctctgggatggagctaatgtatttggtgctccaatagaaggtgacttgt

SEQ ID NO: 186661 - DNA, 244 bp, Glycine max
ggaggctcatttgatgcagaacttgagaaaggcttatgagggaacattcatgtgtagtggtggctttactaggaagttgggaatggaagctgtagctgaaggccatgctgacttggtatcctatggtcgacttttcatctccaatccagacttggttttaaggcttaagcttaatgcacctcttaccaagtataacaggaagacattttacacccaggatcctgttataggatacacagattat

SEQ ID NO: 186662 - DNA, 154 bp, Glycine max
agaatttcctgtttacgatctcattacaattttgcaactttcaaagcttattagctaaagtaacatcaaaagatgtcattgattccaagtattttcggtggcccaaggagcaacgtgttcgatccattctcactcgatatgtgggatccctttc

SEQ ID NO: 186663 - DNA, 257 bp, Glycine max
caatagataagccttcctctctgcagagtgcagagctttctctccccgttgcttcattcattctcaacaacaaaccaatctttcttagaaaatgagggggggcttgtggcaacttgggcaatcgatcactcgccgtcttgcccatggagataagaaggctgttgctcgtcgatgttttgcctcagaagctgagctgaaaaagacagtgtttcatgacttccatgttgctcatggtgggaagatggttccatttgctg

SEQ ID NO: 186664 - DNA, 272 bp, Glycine max
  unsure (1)..(272): unsure at all n locations
tttcttacaagggctctactctactgcttcaccttctgctcctagaaaattcantggngatacatggcttcggctactctctctgtagccaaaccagcccttcaggcaaatgggaaaggcttctctgnattctctggcctccgnngctcatcnggcttccttccctnttctagaaaatcntcagaggatttccattctgtcattgncttccagacntatgcagttggaagcagtngaggatanaagcagggtgtgacagangcnaaactgnc

SEQ ID NO: 186665 - DNA, 244 bp, Glycine max
atcgagccgcgcgacgcgcccttttttttttttttccaaaatgggttagctaccactacactattttaagtagagattacaagctcacaaaatctaagaccaaaccggcaaccccatttggtttgtttgaacttaaactacattcccattggttttggctttttgagatttcatcacccggaattttgggttccggttttcggacttcaagggaaattaatggatgagaactaatgaataagct

SEQ ID NO: 186666 - DNA, 264 bp, Glycine max
agcatatctctctattcctttttattagcacccctcacattaccttgtgtcaccaactactttgactcctttaccataccattacaataattatcaaacctaaccagtaaaaatggtgaccgtggaggaaatccgcaacgctcagcgttcccatggacccgccaccatcttggccttcggcaccgccacgccgtccaactgcgtctcccaagccgattaccctgactactacttccgcattaccaacagcgaacacatgactga

SEQ ID NO: 186667 - DNA, 269 bp, Glycine max
gttatccctcacaaaccgccggctgtctcaggtaaacagaaagtgaaaatgaagagaatgatagccttggggtttgagggttcagcgaacaagattggtgttggggtagtgaccttagatggcacaattctttctcacccacggcacacatacatcactcctcctggccaaggctttcttcccagagagacagcacagcaccacctccaacacgttcttccccttatcaaatccgctttggaaactgcacaaatcactccacatgacat

SEQ ID NO: 186668 - DNA, 281 bp, Glycine max
attcggctcgagataatttcagtaccatagtccaacaaagtctattctactatccatcattgtctgccacatcttcccttagtactagaaatgaggctacaacaactcaacttgttctttctgttgctttgtgttgccaaagcaaacgggtctctgctcccattcatggatcctcctccaatcactctcttggctgatctctggtccgatcgcttcccggactcgtttcgcgtgctggaacatattccgtgtggggatgacaaagatgcagcaccatggcc

SEQ ID NO: 186669 - DNA, 265 bp, Glycine max
ctgaagcagaccaaggctgagaagaagatcgcttacgatgcgaactgtgcgacctaatggaggagtacggccagatcctcgttgtgaactccgataacgtgggatcgaaccagctccagaacattcgcaagggtctccgtggcgactccgtcgtcctcatggggaagaacaccatgatgaagcgctcagtcaggatgcacgctgagaaaaccggaaacaacgcctatctcaaccttatcccgctccttgttggcaatgtgggatt

SEQ ID NO: 186670 - DNA, 253 bp, Glycine max
gagataactagaaacagtgtgatgaaaatgaaggtccttgttttcttcgttgctacaattttggtagcatggcaatgccatgcgtacgatatgttccctctccgaatgaacactggctatggtgcccgtactccggaggtgaaatgcgcaagttggaggcttgctgtggaagcacacaacatctttgggtttgagaccattcctgaagagtgcgttgaagcaacaaaggaatacatccatggcgaacatatag

SEQ ID NO: 186671 - DNA, 227 bp, Glycine max
gtggaatgaagggtggtagcaaggttgttgttcagccccatagacatgacggtattttcattgccaagggtaaagaagatgctctcgttaccaagaatcttgttcccggtgaagctgtttacaatgagaaaaggattactgttcagaatgaagatggtaccaaagaggagtacagagtttggaatcctttccgatccaagttggctgctgccatccttggtggagtt

SEQ ID NO: 186672 - DNA, 263 bp, Glycine max
ctcccctttgccgctgttgttgttgctgcaccaccgaacaacttcccctgtaaatcgcgtttcgtttgtgcaaggttttaaaagatggctgatgctgaggacattcaacctcttgttgttgataatggaactggaatggtcaaggctggttttgcaggtgatgatgctcctagggccgtgttccccagcattattgggagaccacgccatactggtgtaatggttgggatgggtcagaaggatgcttacgtgggtgatgaagc

SEQ ID NO: 186673 - DNA, 258 bp, Glycine max
ctgccatcgataacatatcacacttgagacagttatctgtatctacgcaagagaagaatagaaaatggatatcaggttgatggatttggactctccattgttcaacactctgcaccgaatcatggatctgacagaggacgcagagaagaacttgaacgctccgacgcggacatacgtgcgcgacgcgaaggcaatggctgcgactcctgcggacgtgaaggagtaccctaactactacgtgttcgtgatcgacatgcc

SEQ ID NO: 186674 - DNA, 265 bp, Glycine max
gttttgtattgctcctcttctcaggtacacttacaggttggagcatgtgctgtctaacgattcttacatatggagcaagaagtattcgtttaaggcatccccatatcctggccaaaactctttgcaacgtgttatcatatttggtgacacgggaaaggttgagcgtgatggttcaaatggataggctgttatcaacatggttctctcaacaccacagaccaactcatcaaggatctggacaattatgacattgttttccatatag

SEQ ID NO: 186675 - DNA, 272 bp, Glycine max
ctcttccttttctcttctttgtctaaggggtgccctgagatcacattgaacaatggtgaaggctgtggccgttcttggcagcagtgagggtgtcactggaactattcacttcgttcaggagggaagtggtccaaccaccgtaactggatctcttgctggtcttaagcctggtctccatggtttccatgtccatgccttgggggacactaccaatggttgcctctcaactggatcacatttcaatcctaataacaaggagcatggtgcccctg

SEQ ID NO: 186676 - DNA, 268 bp, Glycine max
atcgagccgattcggctcgagccaaaacagaaacaccagaggccgagtaaaaggttctacttctacaagccatggacatcaaactagaaagtgatgattctcagaatgaggagaatgaagaaaggctaccactcctgagaaatagtgaggtgccagaagcagagaggattctgattcagaaggcactaagcacgccttttacagagcagcgcatatgggggaccttttaccaaatgggacagtccctgcgttccaacttctgtcccca

SEQ ID NO: 186677 - DNA, 263 bp, Glycine max
ggaaattggttgtgcatactctcatggtgggcacatgttaaaagccagttgtcttgtatttgtggaggaggataggaatgtaattaacatagagagaaagatttgaccaatgttcaatctctccactgtcattaaaaggagtcaaggatgctggatatgagaaaatgacagttgtgcaggaggctactcttccagtaattctcaaaggtaaggatgtccttgccaaggccaagacaggcaccggaaaaacagtagcctttttg

SEQ ID NO: 186678 - DNA, 241 bp, Glycine max
gtgtggcaattcagatatagctatagtcgatgtcatatagtctcattgctggcaattatccaatacggattctgagtaccatgacagaaggtacatccgcacatacacatttcaacgtagaaaatggggctctttttagtactattaccatgatacggcttgcactcgttggtttaccatccaaagcatcagggtctctgataccattcacaagtgctccaaatgccctcttggctgatct

SEQ ID NO: 186679 - DNA, 260 bp, Glycine max
ctcgagccgcagttataaggctgacagattttggtgtagaaggagctgatgcgaaaaacatgttttatttgagggaggttgatgatgctgacaaattgtatgaggcaatcaaggcaaagaagaatgggaaagctgtggttgttgggggaggatacattggtctggagcttagtgcagtgttgaaactcaacaatattgatgttaccatggtctacccggagccttggtgtatgccacgactttttacggctggtatagct

SEQ ID NO: 186680 - DNA, 262 bp, Glycine max
atctggtcttactgtgtggtgactgtgctctgctctcatctcattcatattcatttcaatggcaactcaaggtcaagtcattacctgcaaagctgcggtggcctgggaacccaacaagcccttaaccgtccaagacgttcaggttgctccgcctcaggccggcgaggtccgtgtccaaatcctcttcaccgctctctgccacaccgatgcttacacttggggcggcaaggatcccgaaggtctcttcccctgtattctcggc

SEQ ID NO: 186681 - DNA, 266 bp, Glycine max
ctcaggcaaatgaaatgctgcatcacaaggcaaacctgggtatctttcctatcacactggtcaaagtttagaaaagatcaaccaggatacagactgtgattttttcatgaaagcgaaagaagccaaagaatatggattcatagatggtgccatcatgaaccctctcaaagctctccagccattgccggctgcagtggaaggtaaagatcgggatagcatttgaacttgagactactgcttactgttaaataacaatgatcttttgg

SEQ ID NO: 186682 - DNA, 262 bp, Glycine max
tgttgatcgagataactagaaacagtgtgatgaaaatgaaggtccttgttttcttcgttgctacaattttggtagcatggcaatgccatgcgtacgatatgttccctctccgaatgaacactggctatggtgcccgtactccggaggtgaaatgcgcaagttggaggcttgctgtggaagcacacaacatcgttggctttgagaccattcctgaagagtgcgttgaagcaacaaaggaatacatccatggcgaacaatatag

SEQ ID NO: 186683 - DNA, 259 bp, Glycine max
tggtggatacctaggcacccagagacgaggaagggcgtagtaagcgacgaaatgcttcggggagttgaaaataagcgtagatccggggattcccgatataggtcaacctttcgaactgctgctgaatccacgggcaggcaagagacaacctggtgaactgaaacatcttagtagccagaggaaaagaaagcaaaagcgattcccgtagtagcggcgagcgaaatgggagcagcctaaaccgtgaaaacggggttgtggg

SEQ ID NO: 186684 - DNA, 264 bp, Glycine max
gatctttctatcatgatgttgcccagcttcagggtcttgcaaaaagtttgcacaaagattgcattgctaaaatggaaccatctaagtgtctctttccatcagaaattgctaaaaacataaagactccactgttccttgttcatccagcttatgatttctggcagatacgcaatattttggtgcctcaaggatcagatcctgatggtcactggcaaaggtgcagactggacattcgcagttgtaatgctaatatgattgataaac

SEQ ID NO: 186685 - DNA, 262 bp, Glycine max
ggatggtggatttccattgccaaaggatggatatatggccccagaaatcaattcatttggccactccttcagagaatatgatgctgaaagtgagaggcaaaaaggtgtggaggaattttataggttgcaacacatcaaccagacatatgactttgtgaagagaatgcgggaggaatatgggaaattggacaaagctgaaatgggcatttgggaatgttgtgagctgctgaatgaattggtagatgagagcgatcctgatttg

SEQ ID NO: 186686 - DNA, 260 bp, Glycine max
gttctgcttcgcgtggaccaacaagaagtgtaagttttcattcaatggccagcgctcagctctcagcaatatcttcgtcgatctctacggcgtcgtttgaagggcttcgaccttcggctgttcagtttgcttccgcgggcagaattagaattggcaatctctcccaaaggtctttccggggcttggttgtcaaagccgccaccgttgttgcccccaaatacaccgcgattaagcctctgggagacagagtgctgataaaa

SEQ ID NO: 186687 - DNA, 264 bp, Glycine max
ctccaaacacatttctagattcacgcttctaccactacactacttcccttcactctctctctctctctctgcaaccaaatggcaccttctaccaccgtacctaacggtaccctcccctccggttccgtcaccggacgcttagcctctgtctacagtgaggtccaaaagacgcgcgtggaccacgcgctccctctcccctctgtcctcaagcatcccttcaccattctccacggtcctccaagctccgccgccggaaatccagac

SEQ ID NO: 186688 - DNA, 263 bp, Glycine max
  unsure (1)..(263): unsure at all n locations
cncatatagaaaattgactgtgacgttgctgaagctgattggtaaagtattgaatcctgtgcatacatcctcacttatcctcttcctgcgactctcttctcattggttctccgtattctccctcaatcctatncaccttttcttctttcatttcccaccccattctataatcaatcaatggcaatggcttcttcaatccctaatgcgcctctgcgttcaattctcagagctacgttggtctcagagcgccatgaggacttcaa

SEQ ID NO: 186689 - DNA, 270 bp, Glycine max
ctacaatggctgcttcaacaatgactctctcttcatcatcattggctggccaagctatcaagcttgccccctccacccctgagcttggtgttggaagggttagcatgaggaaaacagcctccaagactgtttcctcaggaagcccatggtacggcccagaccgtgtcaagtacttgggcccattctctggtgagcccccatcctatctcactggtgaattcccaggtgactatggttgggacactgctgggctttctgctgacccagaga

SEQ ID NO: 186690 - DNA, 272 bp, Glycine max
ctctaaacgactctatctctcttcgttttgttcttccttgcgctcctcctcgttcgttcgttctccctcgcgtagatcggcaatggcggagaccgagacgtttgctttccaggctgagatcaaccagctcctcagtctcatcatcaacaccttctactccaacaaggaaatcttccttcgtgaactcatcagcaacgcctctgatgctttggacaagattagatttgagagtctgacggacaagagcaagctcgatgctcagccagagttgt

SEQ ID NO: 186691 - DNA, 208 bp, Glycine max
ctcagatctcggctcgagctagtttatcgtgaggagaatatgaagttgtttgttctctttgtagctgcagtagttttggtagcgtggccatgccatggcgcaggctaccaaaggttccctctccgaatgaaaactggctatggtgagcgttcttcggaggtaaaatgcgcaagttttaggcttgctgtggaagcacacaacatccgag

SEQ ID NO: 186692 - DNA, 268 bp, Glycine max
gttctccacatcctcagccaaagcaacctcctacaacgtggtggacttcggggccaaacccgacggcgcgacggacgcaaccgcggcattcctaagcgcgtggaacaaagctctgtagttcgaacaaacccgcaggcattcacgtgccgcaacggcaggttcctgatagcacgtgccgttacgttccatgggcaatgtgcgaaccgtgctatctccataaccattcgtggaaccttggtggctccttcccaatacacgttcgtgggga

SEQ ID NO: 186693 - DNA, 213 bp, Glycine max
tctcgagccgattcggctcgagaaaaatgggaagaagattgctgcaattgtgccaaatgatgattgcttaaattacattgaagcgaatgatgaagtcttgatagctggatttggacgaaagggtcatgccgtgggtgatattcctggagtcagattcaaggtcgtgaaggtttctggtgtgtctctcgtggctctctacgaggagaagagaga

SEQ ID NO: 186694 - DNA, 194 bp, Glycine max
gtaagagagaattcgtaaaccctaatttcggaaagatcggcgatgactgcctccaaggatcgcgagaacttcgtctacatcgccaaactcgccgagcaggccgagcgttacgaagagatggtggaatcactgaagaacgttgcgaatctcgacgttgaactgacggtggaggagcggaatttgctttctgttgg

SEQ ID NO: 186695 - DNA, 252 bp, Glycine max
cgcaattttcatttttctctctcccttagtcaaagggattcatcgttcttcttcccaggttatttagaaaagcaaaatggtgaagatttgctgcattggtgctggatatgtggggggtcctactatggcagtcattgcacttaagtgcccatccattgaagtcgctgttgttgatatcactccatcccgcattgcagcctggatcagcttccaacttactatctctgaacctggccttgatggcattccgaa

SEQ ID NO: 186696 - DNA, 261 bp, Glycine max; identical to SEQ ID NO: 172080

SEQ ID NO: 186697 - DNA, 257 bp, Glycine max
gttatggatcgctgttgaatactttttatgagcttgagggagattatgaggagcattacaagaaggccatgggaactaaaagttggagtgttggaccagtttccttttgggtgaaccaagatgctttggataaggccgatagagggcatgccaaagaagagcaaggggaaggagaagaagggtggctcacatggcttgattccaagacagagaactctgttctctatgtgagttttgggagcatgaacaagttccct

SEQ ID NO: 186698 - DNA, 258 bp, Glycine max
gtaacagcgaaagtgaaataccactacttttaacgttattttacttattccgtgaatcggaagcggggcactgcccctctttttggacccaaggtcggcttcggccggtcgatccgggcggaagacattgtcaggtggggagtttggctggggcggcacatctgttaaaagataacgcaggtgtcctaagatgagctcaacgagaacagaaatctcgtgtggaacaaaagggtaaaagctcgtttgattctgatttcc

SEQ ID NO: 186699 - DNA, 261 bp, Glycine max
tgaaccggaggcagggagtatccttatagacaacattaatatttcatcaattggtcttcatgatcttagaagtcatttgagtatcataccacaagatccaaccttatttgaaggcaccattcgaggcaatcttgatcctcttgatgagcactctgataaagagatttgggaggcccttgataagtcacaacttggagatataatccgtgagacagagcgaaagcttgatatgccagtgctggagaatggagataattggag

SEQ ID NO: 186700 - DNA, 265 bp, Glycine max
atacactcataacacaaagcacaaagcaaagctcatccttgagttaaaaaatggcagcagcttcttccatggctctctcatccccatccttggctggcaaggccgtgaagctgggcccatcagccccagaagtgggaagggtgagcatgaggaagaccgtcaccaagcaggtctcctcaggaagcccatggtacggcccagaccgagtcaagtacttgggcccattctctggcgagcccccgtcctacctaaccggtgagttccc

SEQ ID NO: 186701 - DNA, 275 bp, Glycine max
gaatcaaccttcccaattttcatgaccaataacgccccattttccctctccacaagacctcttagacccatcctgaaggtttccgtgaaacccccacctccagatttcgattacaggcgagagatatcggaggagtcaagagccgccatagccgaatctcacccggagttgcttgacctggctgacaatgggagcttggttttggttcagaagaagaggttcggtcctgtcccttcttggaggaccgaattcgtcgaacctgaatccatttggtt

SEQ ID NO: 186702 - DNA, 260 bp, Glycine max
aattcgctctgtgcagtttcctcgctctcttttctgcaattttcttttttgttcgttctctgcggttatctttttgagcttcaatggcggacgctgaaaccttcgctttccaggctgagatcaaccagcttctcagcctcatcatcaacaccttctacagcaacaaggagactttcttgcgtgaactcatcagcaacgcttctgatgctttggataagattcgatttgagagtttaaccgacaagagcaagctcgatgct

SEQ ID NO: 186703 - DNA, 198 bp, Glycine max
gtgttgttacgttgtatacgacgtcgcttctggctgattgttatcgatgtggtgaccctgttaccgggaagagaaactatactttcatggatgcagttcaatccattctcggtgggtattatgatgcattttgtggggtagttcagtactcaaatctttacggaaccgccgtaggatacacaattgcagcttctatta

SEQ ID NO: 186704 - DNA, 259 bp, Glycine max
cgtgcctctagggttatcatatctccatttccatttcctctctctcagtttccaagaatcttaagctatgggaaagtcttacccaaccgtgagcgctgattaccagaaggccgttgagaaggcgaagaagaagctcagaggcttcatcgctgagaagagatgcgctcctctaatgctccgtttggcatggcactctgctggaacttacgacgtgagctcgaagaccggtggtcccttcggaaccataaagcacccctcc

SEQ ID NO: 186705 - DNA, 258 bp, Glycine max
tcgagataactagaaacagtgtgatgcaaatgcaggtccttgttttcttcgttgctacaattttggtagcatggcaatgccatgcgtacgatatgttccctctccgaatgaacactggctatggtgcccgtactccggaggtgaaatgcgcaacttggaggcttgctgtggaagcacacaacatctttggctttgagaccattcctgaagagtgcgttgaagcaacaaaggcatacatccatggcgaacaatatagat

SEQ ID NO: 186706 - DNA, 260 bp, Glycine max
ctttcccttcccaacaacaacaagaatctgccttctgcagaagcttcctccgaaaccatttgtgtcaccggcgctggtggcttcatcgcctcttggatggtcaaactcctcttggaaaaaggctacactgtccgaggaaccctcagaaatccagatgatcccaagaacgggcacttgaaggagtttgaaggagcctccgagaggttaactctgcataaggttgacctccttcatcttgactccgttagatcagttattaa

SEQ ID NO: 186707 - DNA, 261 bp, Glycine max
  unsure (1)..(261): unsure at all n locations
tatcgagccgaatcggctcgaggccaattcttattctttttctctctttctctctgcttgcgatcgttcacaagccaaatctaacttgtctctgttttctccgatctagtactactatcaatggccggaaaaggagatnggtctgctatcggaatcgatctcggcaccacctactcctgcgtcggagtgtggcagcacgaccgtgtcgaaatcatcgccaatgcacagggtaacagaaccacgccgtcttacgtcgctttc

SEQ ID NO: 186708 - DNA, 265 bp, Glycine max
agcaccgtcgcaccttccctgaggcttctcttgtctgtcgcgagtgaccatggtgagggttagtgtgctgaacgatgctctgaagagcatgtacaatgctgagaaaaggggaaagcgccaagtcatgattcggccatcctccaaagtcattatcatattccttttggtgatgcagaagcacggatacattggagagtttgagtatgttgatgaccacagggctggtaaaatcgtggttgaattgaacggtagactgaacaagtgt

SEQ ID NO: 186709 - DNA, 271 bp, Glycine max
caacagagcaaaaagctccaccaaatggcgggttacagagccgacgacgactacgactacctcttcaaggtggtcctcatcggcgactccggcgtgggcaagtccaacctcctctcgcgcttcaccaagaacgagttcaacctggagtccaagtccaccattggcgtcgagttcgccacccgcaccttgaacgtcgattccaaagtcatcaaggcccagatctgggataccgcaggccaagaaaggtatcgtgcgatcaccagtgcttact

SEQ ID NO: 186710 - DNA, 279 bp, Glycine max
cgtacgcacggacttcattcggctcgaggacctgcaaaggtatcctattatttggtcgccctggaactggtaaaacaatgcttgcaaaggcaattgctactgaagctggtgctaacttcatcaacatctccatgtcaagtatcacatctaagtggtttggtgcaggtgagaaatatgtgaaagctgtcttctctctggcgagtacatttcaccagcgttatattgttgatgaagtgacagcatgtgggtcggaggaaaacccagagagctgaggcatgc

SEQ ID NO: 186711 - DNA, 253 bp, Glycine max
tgacgatggcgatgacggcgtcgcagttgcggtgcggttggggcaaggaggacaacgccgaatcagcagcagcaacgacgtcgtatggttccggtggtgtgttccatcgctatagagaacgcgaagaacaaagagagagcgaaactgaagaagctcttcgatgaagcgtacgagaggtgccgcactgctcccaccgaaggcgtttccttcactctccaacaattcaccgacgcactcgacaagtacgacttca

SEQ ID NO: 186712 - DNA, 258 bp, Glycine max
atcgagcgaatcggctcgagctccatgaaggtgaatgaggagactagtgatggggatgactaatagggtccccaagggaaagggggagaaaaatgtgggggtggttgagagcaaattggtgtgcacccttgaggagctttacaaagggtgcaagaagaagttgaagatctcaaggactgttcctcacgaattcgggaaaatgaagactgtggaagaggtcttgaaaattgacatcaaacctggttggaaaagaggcac

SEQ ID NO: 186713 - DNA, 258 bp, Glycine max
tttgaacagaaatttcagaatgcagatccattggcacttcgcctattacaaaggcttttagcatttgatccaaaggatcgaccaactgctcaagaggcactggctgatcccttctttaagggtttgtccaaagttgagagagaaccttcttgtcagccatcttcaaaattagaatttgagtttgagaggagacgagtgacaaaagatgatgttagggaactaatatatcgggaaatactggaatatcatccccagttg

SEQ ID NO: 186714 - DNA, 217 bp, Glycine max
agactgagcaatggtgaacctgagaagcccttgatagttcatgttggacggcttggagttgagaagagtttagattttctcacaagtctcatggataggcttcctgaagcacgaattgcctttatcggagatggaccttacagagaggaactagagaaaatgtttgaaggcatgccagcagtgttcacaggaatgttaggaggggaagaactatctg

SEQ ID NO: 186715 - DNA, 249 bp, Glycine max
gacaagcccataatgcattcaccatatcttttgggaatttatgcttcagagggatggttcatgaggctgatggaagctagtaagcaatttgtgactaaggacccaaagaaggcccacctattttacctacctttcagttctcggatgctagaggaaactttgtacgtacccaattcccatagttctaggaacctgattcagtatctgaaaaattatgtagacatgattgccgggaaacatcgtttctgg

SEQ ID NO: 186716 - DNA, 257 bp, Glycine max
cccaattcttccccctccacccacccagcatatctctctattcccatttattagcacccctcacattaccttgtgtcaccaactactttgactcctttaccataccattacaataattatcaaacctaaccagtaaaaatggtgaccgtggaggaaatccgcaacgctcagcgttcccatggacccgccaccatcttggccttcggcaccgccacgccgtccaactgcgtctcccaagccgattaccctgactacta

SEQ ID NO: 186717 - DNA, 258 bp, Glycine max
aggaatgggctgcagttcctggtggccaagcaacctacctaggcaacccagttccatggggcaccctacccaccattctggccattgaattccttgctatttccttcgtggagcaccaaaggagaatggagaaggaccctgaaaagaagaaataccctggtggtgcttttgatcctttgggatactctaaggaccctaaaacattccacgattacaaagtcaaagaaattaaaaatggacgtcttgctttgttggctt

SEQ ID NO: 186718 - DNA, 257 bp, Glycine max
ctcgaccgaatcggctcgagttcatcgctttccaccaggcacccagattctctccttccttctctctatccaaatttacattctttcgatcaaacccgcaacacccacctcaccaaaaccctacgcaacccatccatgacgcttggcttaggaggatccagtgtcgtggttcctaggaacttcagattgctggaggagcttgaacgtggagaaaaaggaattggagatggcacagttagctatggaatggatgatgg

SEQ ID NO: 186719 - DNA, 255 bp, Glycine max
ctaaattctcaaagacaccaattttccgtgatcagagttcccaaattccccccaagagataaaatgtctctaatcccaaacttcttcggtggccggagaaacaatgtgttcgatcctttctcactggacgtgtgggatcccttcaaggattttcctttcccaaatacgctttcttcagcttccttccctgaattttctcgggaaaattcagcatttgtgagcacccgtgtggactggaaggagaccccagaggcg

SEQ ID NO: 186720 - DNA, 124 bp, Glycine max
atcaagtccaagaaccaacctaccttttgcaatctcaattcaatggcgtcctctctcattgcgaacgcttgcctctcctcttcactcctctccaggtccctccttcgccccgccgcttccgctt

SEQ ID NO: 186721 - DNA, 258 bp, Glycine max
gcacaatttctctgagttgttttgtgagataatagcacatagcataacaagggaaggagtattaacaaccgcaaacctgaagagaaaaagagcagcagaagaagaaacaccaacgatgggtgtggattactacaagatcttgcaggttgataggagcgccaaagacgatgacttgaagaaggcttataggaaacttgctatgaaatggcaccctgataagaaccccaacaacaagaaagaagctgaagctaagtttaa

SEQ ID NO: 186722 - DNA, 258 bp, Glycine max
taaccatcaagtttcagttccaaacaaaacccatcaaagtctttctccctcagtgatcatatattcattcagttctatacaaaatcctcaaaaactcttcctctctgccatgaccatggaatacagaaccttagaactcaacatcatatccgcaaaggacatcaagaatgttaatctcttctccaagatggacgtatacgccgccgtttcgctctccggtgaccctctccaccctcagggcgccaccacccacgtcca

SEQ ID NO: 186723 - DNA, 272 bp, Glycine max
  unsure (1)..(272): unsure at all n locations
tacaacgcctcgaatccacacagttctactcttcgctctaaaccctctctctctctctctctcgatctatcatggctttgccctatcagcaaaccgtggattaccctagtttcaaactcgtcatcgtcggtgcaggcggtacaggaaagacaacgtttcgtgaaaagagcatcttcaccggtgcaattacgagtaaaaataatacgaaccngaccattgagacgtggaggttcacccgattggattctcttcacaaacttgcgagaaagatt

SEQ ID NO: 186724 - DNA, 256 bp, Glycine max
aaaagatgtggctttgaaggttttgcaaaacaaggtgtcaactgtccctatcatacattcttcttcagaggatggttcatatcctcaactgctacatcttgcttccctatccggaatactaaaaggtatatgcaggcattttaagcactccttgagttctttgcccattcttcaacttccagtggcttcaatacctttgggtacatggatgcctagagttggggaaccaaatggtcggccactagcaatgttgatg

SEQ ID NO: 186725 - DNA, 230 bp, Glycine max
ctctctttctctagtcctgttatttctcagcgcgtaaagcatggctttgttggtggagaaaaccacgagtggtcgcgagtacaaggtcaaggacacttcccaggccgacttcggccgcctcgagatcgagctggccgcggttgagatgcccggcctcatggcctgtcggaccgagttcggcccctcccagcccttcaagggggcccgcatcaccggctccctccacataa

SEQ ID NO: 186726 - DNA, 229 bp, Glycine max
ctggttgattcggatctagagtcttcagtttctcctcgttgttcttcgctttcctgttttcaatttcgattctttcgtcaatttaataagatgtttgggagggcaccgaagaagagcgataatacgaggtactacgaaatcctcggcgtctccaagaacgcttcgcaggatgatctgaagaaggcttacaagaaagccgccattacgaatcaccccgaaaagggcggtg

SEQ ID NO: 186727 - DNA, 255 bp, Glycine max
  unsure (1)..(255): unsure at all n locations
gccatgctcccaactaaatgatcatgatggcaaagctaagtctacataancacacagtgacattctaaaccaagacaaagaaagggtgaagtacattaactcaaggctctctaagaacttgggccaagattctagtgttgaggaattggactcagctaccctaccagccaaatctggtagccttattgggtctggaaattactttgtggttgtgggtcttgggacacccaagagggacttgtcactcatttttga

SEQ ID NO: 186728 - DNA, 248 bp, Glycine max
agttgcccgtttaaactttagataagttttttaaaaaaatattttttcttgaccattattttaatttttatattttcctggattgtaaacatggatggctaatagagaaaataatgattcttcccaaaaaaaaaaaaaaaaaaaaaaaaaaaaaaaaaaaaaaaaaaaaaaatcaagaagaaatcaagtaaaaggtgtagacagtaagttgtgatatgctcgaattagaacactccgcagatgcaaga

SEQ ID NO: 186729 - DNA, 248 bp, Glycine max
aaagaaatcaacacacacaaacacaacaacatatggaggtgctaagggtgcaaaccatagcttccaaatccaaagatgctgccatcccagccatgtttgttagggcagagacagagcaaccaggcatcacaaccgttcaaggggtgaaccttgaggtgccaattattgattttagtgacccagatgaagggaaagtggtgcatgagattttggaggcaagtagggactggggcatgttccaaattgtg

SEQ ID NO: 186730 - DNA, 254 bp, Glycine max
ctaaattctcaaagacaccaatttcattgaccagagttcccaaattccccccaagagataaaatgtctctaatcccaaacttcttcggtggccggagaaacaatgtgttcgatcctttctcactggacgtgtgggatcccttcaaggattttcctttcccaaatacgctttcttcagcttccttccctgaattttctcgggaaaattcagcatttgtgagcacccgtgtggactggaaggagaccccagaggcg

SEQ ID NO: 186731 - DNA, 254 bp, Glycine max
tgacgatggcgatgacggcgtcgcagttgcggtgcggttgggggtgcaggccaacgccgaatcagcagcagcaacgacgtcgcatggttccggtggtgtgttccatcgctatagagaacgcgaagaacaaagagagagcgaaactgaagaagctcttcgatgaagcgtacgagaggtgccgcactgctcccaccgaaggcgtttccttcactctccaacaattcaccgacgctctcgacaagtacgacttcaac

SEQ ID NO: 186732 - DNA, 182 bp, Glycine max
gcaattgcatcaacaacaaattgaaaggatgtcgatcttcgagtacaacggaagcgccgtactggctatggtcggcaagaactgcttcgccattgccagcgaccgatgactcggcgttcagctccaaaccatagccacggatttccaacgcatttccaagattcacgacaagctcttcatcg

SEQ ID NO: 186733 - DNA, 252 bp, Glycine max
  unsure (1)..(252): unsure at all n locations
ctttcttccatcttcttcccttttcacgtcattatcctaaaaacttgcagattttcacatcccaaacaacatgaaggcccggttcatgngtctgtcggtgctcctttgtgatacttttcatgtctccttctctattatcgacggtttagttgccaacggcaactttgagttgggtccaaatcactccgcccttaaaggtacagtggtggtgggcgggatccactcgatcccataatgtgagatctccggctt

SEQ ID NO: 186734 - DNA, 261 bp, Glycine max
gccaaaacggtaacccccgacgccgtttcgacgctcctcgcaaacccttcccccgattccacatcggatctcctcagtctcgtcgttcaagtactcgatcttaaggcgacaggcaataaatacatgtttactgctaatgatggaaaaacgaaactgaaagctatgattccttcggatatgcgctctcaggtgctctccggggctattcaaaacctaggtcttattcgcgtccttgattacactgtcaacgatatccccaat

SEQ ID NO: 186735 - DNA, 258 bp, Glycine max
ctcgagccgtggagtttggagcgactgaactaatcattaatttgcactcgctgtttcagcttcatcacccttcttttgcatcatttatatctcttgagaaatggcacaagaaacctttctattcacatctgaatctgtaaacgacggtcaccccgacaagctgtgttaccagatctctgatgcagtacttgatgcgtgccttgatcaggaccctgacagcaaggttgcctgtgagacatgcaccaagaccaacatggt

SEQ ID NO: 186736 - DNA, 190 bp, Glycine max
atttcagtcagacattggctctgtacatagggttatattatcgatgcactgtatttgtattcaaattccaaatggcgaacatatttgattgctgttagttttcaaggttctgtagattatgtgacaatgcagcagcaatatttggatttgtcccatattcacatgctattttaatttgcttacaatgtgg

SEQ ID NO: 186737 - DNA, 254 bp, Glycine max
cgcctttctctctcttctttttactctctctctgtctctctctacgctttctcgttcgagatccctcaagggatccactaactgaaggagaaatggggttgacattcaccaagcttttcagccggcttttcgccaagaaggaaatgcgaattctgatggtgggtctcgatgcagctggtaagaccaccatcctgtacaagctcaaacttggagagatcgttaccacaattcccaccattgggttcaatgtggag

SEQ ID NO: 186738 - DNA, 256 bp, Glycine max
tcgagcttccagtgaaagaaaggcagcgatggaagaagacttcgacatccccggcggcgaagaaatggatctcggcgaagacgaggtcggcgaggagagggagatcggctctggcggcctcaagaagaagctcctcaaggaaggtcaaggctgggaaacccccgaagtcggtgacgaagtccaagttcattacacggggactttgctcgacgggactaagttcgattcgagccgcgacagggattctcccttcagc

SEQ ID NO: 186739 - DNA, 259 bp, Glycine max
acgaaaaggaatcccaatggctttggggctcttggcgatgatcctcttcttcattgcttcctcttcctctcacctcgttcgcgcttccgatgacgccgacgacgcgatcttctacgagtcgttcgacgaggattttgatggacggtggattgtatccgacaaggaggattacaatggtgtctggaagcatgccaagagtgatgggcatgatgattatggacttcttgttagtgaacaagccaggaaatatgctatagtc

SEQ ID NO: 186740 - DNA, 260 bp, Glycine max
ttcaccacttcatatccaaaagcctcatgttgtatgtgtaccattcccagcacaaggccatgtaaacccctttatgcaactagccaaactccttcattgtgtgggtttccacataacctttgtgaacactgagttcaaccacaaccgttttgttaagtaccatggaccagactttgttaagggtctccctgatttcaaatttgagaccatacccgatggcttgccgccttcggataaggatgcaactcaggatgttccag

SEQ ID NO: 186741 - DNA, 258 bp, Glycine max
cctctgcaagcttgttacttggctttgtttgattgattgccccaatggccgcgtgtggctatatatctgctgccaacttcaatcatcttgttggcgccagaaacttatccaaattcagttcttcggatgccacaatttcgttatcatttggcgggagcgattcaatgggtcttagtttgcgacccgctccaattcgtgctcctaagaggaaccatttctctcccttgcgtgtcgtttgcgtcgattatcctcgaccgg

SEQ ID NO: 186742 - DNA, 262 bp, Glycine max
ccggggccgatcaaaaccatagtggtgatagtgatggagaaccgctccttcgaccacgtcctcggctggctcaaatcctcccggcccgacatcgacggtctcaccggcagcgaatccaaccctctctccgtctcctccccctcctccgccacaatccccgtcactgacgacgccctcttcatcgacgccgaccccggccactccttccaggccattcgcgagcaaatcttcggttccaacgacacctctgcagtccctcccc

SEQ ID NO: 186743 - DNA, 260 bp, Glycine max
gttcttcttattctccactaatagcttcttcttcggctacttgagaccttgctgcaaaggttctctcttagcttagtaacaatgggtttgaaagcactttttgtttggtgcattatatggttaggtttagcacatttgtcccttggaggaagagtgaggcactacaagtttgatgtggagtacatgatcagaaagccagattgcttggaacacgtcgtgatgggaatcaacggccagtttccaggcccaactattagggc

SEQ ID NO: 186744 - DNA, 259 bp, Glycine max
ctgtgttgaaggtaaaccatgggaatctagtgaagttggagggattttgcatagacccagaagaagcaaattgctatctagtctatgaatatgtagagaatggatctctatactcatggctgcatgagggcaaaaaagaaaagttgagctggaaaataaggctaagaatagccattgacattgccaatggtctccaatacatccacgagcacacaaggccacgggttgtgcacaaagacatcaagagcagcaacattct

SEQ ID NO: 186745 - DNA, 261 bp, Glycine max
caaacacaccacagcaccaaactagttggctcaattctctttgaatggctttggaggctttgaattcaccaacagcagccaccactcccttccgtggttaccaagaagaggaggaggaggttgaccttcacctacgcgagccttgggccaagagaaaacgctccaaacgacctcgttttgagtcggaggaagagtacttggctctttgcctcatcatgcttgcacaaagcggtaacaacaacaacacccaattaccgtctt

SEQ ID NO: 186746 - DNA, 260 bp, Glycine max
gtttgtggcatcaactacattgcaactgatatcaacccacatgcagtgagagtgacccatgagacattggaagcacatggggttggagctgacttgatagtaacagatattgcatccggactagaggaccggctagcagggttggttgatgtcatggttgtgaaccctccttacgtgcctatccctgaagatgaagtgggtgttgaaggtattacgtcatcttgggctggtggggagaacggccggagtgtaatcaataa

SEQ ID NO: 186747 - DNA, 252 bp, Glycine max
ctcccatcataaaaaaccgaccctctcctttccctcttcaccaaccaatggctcccccaaaggccgagaagaagcccgcggagaaaaagcccgcagagaaggctccggcggagaagaagcccaaggccgagaagaagatatcgaaggaaggaggaagcgagaagaagaagaagagaacaaagaagagcgtggagacctacaagatttacatcttcaaggtgctgaagcaggttcaccccgacatcggaatct

SEQ ID NO: 186748 - DNA, 259 bp, Glycine max
caacgaaaccctcttcatcttgttctatctgtgacgagcatcatggcctcaagagcagtgttattgttggctatgtgtgtgcttccggcgatggttgtggccattcgcccagcaaagaaccctttttgcgtgaagggtcgtgtctactgtgacccttgccgtgctggttttgagacctcagctaccacctacattgctggtgctgagattatgttgcaatgcaagagcagggttagcaacgaggttgtgtacacgaaga

SEQ ID NO: 186749 - DNA, 279 bp, Glycine max
tcggcttgagcagcgcaaaagctgcaactccgcttctcatattagaattcagacaaagcctcatccttcatagttcagatccattcttgctctgtattttgtttttcttttaaatttttctttaaatttctcaattgatcaaagatcttcagcaaaccggtcaagtttgtgtagtttggccagatgggaggtgggtttagagtgctacacttagttagaccttttctctcgttcctacctgaagttcagactgctgataggaaagtgccatttagagag

SEQ ID NO: 186750 - DNA, 262 bp, Glycine max
cctagattcagccacagtttcggaggagaagaaaatagtcgttcgagatggcccgtacgaagcaaactgctcgtaagtccacaggaggaaaggctcctaggaagcagcttgcaaccaaggctgcacgtaagtctgcaccaactactggtggtgtgaagaagccacatcgttaccgtcctggtaccgttgctcttcgtgagattaggaaataccagaagagtaccgagcttttgatcaggaagctccccttccagaggctggt

SEQ ID NO: 186751 - DNA, 259 bp, Glycine max
ggcagaaagcaagctcatcctagagttttaaaaatggcagcagcctcctccatggctctctcttccccatccttggctggcaaggccgtgaagctgggcccatcagcccccgaagtcgggagggtcagcatgaggaagaccgtcaccaagcaggcctcctccggaagcccatggtacggcccagaccgcgtcaagtacttgggcccattctctggcgagcccccgtcctacctcactggcgagttcccaggtgactacg

SEQ ID NO: 186752 - DNA, 256 bp, Glycine max
ccgtaccgtcgcactctgtgttttctgcgccgtctccgatctccgacaatggcgacccaaatgagcaagaagagaaagttcgtagctgatggagtgttcttcgctgaactgaacgaggttctgacaagagagttggccgaggacggttactccggcgtggaagttagggttacgccgatgcgcaccgaaatcataattagagccaccagaacccaagctgttctcggtgagaagggaaggagaataagggaactta

SEQ ID NO: 186753 - DNA, 252 bp, Glycine max
ctcgagccgctcgagccgcttcccgtatttgacgaagataaacagcctacctattgcaaaaacttatgccacaaggacaatcctgttcttgaaagacgatggatctttaaagccacttgctatcgaattaagcaagcctgcaacagtgagtaaagtggtgttgcctgcaacagaaggtgttgagagtacaatttggatgttggccaaggctcatgtcattgtgaatgactctggttatcatcagctcataag

SEQ ID NO: 186754 - DNA, 256 bp, Glycine max
cgagcagtgaataccagttgctcctatagccggcgctcaacaacatggcggacaaggcagtcaccatccgaaccagaaagttcatgacaaacaggcttctctccagaaagcaattcatcgttgatgtccttcatccagggagggctaatgtttccaaggctgaactgaaggagaaattgggcagaatgtatgacgtgaaagacactaacactgtatttgtcttcaagtttcgaactcattttggtggtggcaagtc

SEQ ID NO: 186755 - DNA, 255 bp, Glycine max
ccgatcgaatccaatccaccaaatcggcgacgtcgcattccgctacagatccgcggcggaaccaccgtatctgtctatctccgattgatcttccgataaaagtggaccggaaatgccggttgccgcttccgccatttactttctcaacctccgcggagacgttctcatcaaccgcctctatcgcgacgatgtcgggggaaatatggtggatgcttttaggacgcatgttatgcaaacgaaggagcttggtacttg

SEQ ID NO: 186756 - DNA, 259 bp, Glycine max
ccgcactccgtcttcatcaatcagcatcaccaccgctccaacacaggggaaaatgagggagatccttcacgttcagggacggcaatgcgggaaccagatcggttcgaagttctgggaagtggtgtgcgacgagcacggcatagatccgacggggaagtacgtcggaaactcagatctacaactcgagcgcgtgaacgtgtactacaacgaagcttcctgcgggcggtttgtcccacgcgcagtgctgatggacctggag

SEQ ID NO: 186757 - DNA, 255 bp, Glycine max
ctctctgcttgcggtgcttcacaagccaaatctaacttgtctctgatttctccgatctagtactactatcaatggccggaaaaggagatggtcctgctatcggaatcgatctcggcaccacctactcctgcgtcggagtgtggcagcacgaccgtgtcgagatcatcgccaatgaccagggtaacagaaccacgccgtcttacgtcgctttcactgattccgagcgtttgatcggtgacgccgccaagaaccagg

SEQ ID NO: 186758 - DNA, 285 bp, Glycine max
acgcaaactcagaatccggattcagctcgaggggatatcgagtataccggttgatactgtgcatcgtatacggattctggaaattaggattcttaacaccgatatgcatgctgggaacttgttggttaggaaacttgatggcattgggagttttggtcaggtggagttgattgccattgatcatgggatctgcctgcctgaaactttggaggatccatattttgaatggattcattggtcacaggcttccattccggtctcagaggatgagcttgcctacattga

SEQ ID NO: 186759 - DNA, 250 bp, Glycine max
gcaaaaagcccaagcagtcgtcttggtgctgccgattggtcaaaatatataaatccatttgttgaaatttgttactgtattgcattgcgtttgctgcacccatcaatggcaggcgtttctctcaagtgcggcgactgcactgctctgctgagaaccgtagaagaagcgcaagagcacgctgaactcacctcccactccaacttctccgaatccaccgaaccggttctcaacctcatctgcaccgcttgct

SEQ ID NO: 186760 - DNA, 253 bp, Glycine max
ggattgcatctgtaattacccaacagaggagccagatgaagataataatgatggcaactttcgcttattcacgtatagagaattgaattctgccacacgtggttttcacccatcggaaaagattggagaaggaggctttggcactgtctacaaggggcagcttcgggatggaactttggtggcagtgaaagtgctttcaattgagctagattccttgagaggagagagggagtttgtggcagaattgaataca

SEQ ID NO: 186761 - DNA, 257 bp, Glycine max
attgtattagaaatgattgaacttcgagaactggatactgcacgtgctattttaaggcaaacacaggtgatgggtgtaatgaaacaagagcagcctgaaagatatttgcgtcttgaacatctcctagttagaacttattttgatccaaatgaggcttatcaagactcaacaaaagagaagcgacgtgcacaaatagcccaagctcttgcagcagaagttactgtagtgccaccatcccgattgatggctttaattgg

SEQ ID NO: 186762 - DNA, 255 bp, Glycine max
aattgttgtaactttttgattcctaaattctctaaaattcgaaattctaatttcgttaggggaaagagattgtttgtgtgtgagtgagtatggctggaaaaggcgagggtcctgctatcggaatcgatttgggaacgacgtactcttgcgtcggcgtgtggcaacacgatcgtgttgaaatcatagccaacgatcagggtaacagaactaccccatcctacgtggctttcaccgacacagaacggttgatcggcg

SEQ ID NO: 186763 - DNA, 256 bp, Glycine max
cgaagatcgagatatctatttagatctcagaaaaacagtgtttcatttcaattcattcagtcttattattattagggtttggcgattcagagagaaagagaaatgggagaacgaaaaggaatcccaattgctctggggctcttggcgatgctcctcttcttcattgcttcttcctcttcctctcacctcgttcgcgcttccgaggacgccgacgacgcgatcttctacgagtcattcgacgaggattttgacggac

SEQ ID NO: 186764 - DNA, 262 bp, Glycine max
ctcctttcttccatcttcttctcttttcacgtcattatcctaaacttgcagattttcacatcccaagcaacatgaaggggaggttcatgtttctgtcggtgctcctttgtgccacctttcatgtctccttctccattactgacggcttagtagcaaacggcaacttcgagctgggtccgaagccctccgccctgaaaggaactgtggtgattggtggcagccactcgatcccagaatgggagatctctggcttcgtggagta

SEQ ID NO: 186765 - DNA, 283 bp, Glycine max
tgaattcggctctagcagctcgttggttacacttggaatcataattgaaaccaagcgtttcgtggtttaaaaatgccgaatcacgcctcaatcatcatttgtcaggattattcggagtcagttccttggcttggacagggcatttagtccatgtcgctattccgggatccaggggggaatacgttcgatggaataatttatcaagtatattgcctcaccccgaaggattaggtccatttttcacaggtcagtggaacccttatgctcagaaccccgattccaa

SEQ ID NO: 186766 - DNA, 257 bp, Glycine max
ctcaaggatacactccggacttaattacgttattttgttagggtcaccgtttcgagatattctaaacttgtactgaaaaatatggagggaaaagaagaggacgtaagagttggagccaacaggtacggagagaggcagccaatagggaccgctgctcaggctaaagactacagagagccaccgtcggcgcctctcttcgaaccgggagagttgtcatcgtggtctttctatagggctggcatagcagagtttgtggc

SEQ ID NO: 186767 - DNA, 252 bp, Glycine max
gggtggttgaagtttttagctttagctttgcagagatgtcaggtggtggatgcagcagcatagtgtggttcagaagagatctgaggatagaagacaatccagcactgacagcaggagtgagagctggtgctgttgttgcagttttcatatgggcacctgaagaagaaggacaatactaccctggcagggtctctagatggtggctcaagaacagtttggctcaccttgattcctctctcaggaatcttggca

SEQ ID NO: 186768 - DNA, 252 bp, Glycine max
ctcgtgggttgggaagctccttcattgcttcctgtgttgccaagaggaattcaaggccattctccacagccacagggctcaggtgttgagacccccattggatcgcatggtgtctgaatactttgagcgcagtgtgaaggctttagatgtttgcaatgccattcgtgacggtattgagcagattcgccaatggcagaagctgttggagattgtgctctatgcattggggcatcagaggagcattggtgaggg

SEQ ID NO: 186769 - DNA, 254 bp, Glycine max
acaaatacaatcaaagaatcttctttgctttctctcctttgcactttccttctcctcgtgattttttgtttgcatcaaagggagaaactgggagacacagaagatgagagagataattagtattcatattggacaagctggaattcagtgacacctctgttggcattgcacacgatgctttcaacaccttcttcagcgagaccggattcggcaagcatgtgccaagggctttatttgttgatttggaacctagt

SEQ ID NO: 186770 - DNA, 255 bp, Glycine max
gggacatcgagtttcccggttgcttctgtgcatcgtatagggattttggacattaggattcttaacaccgataggcatgctgggaacttgttggttaggaaacttgatggcattgggagttttggtcaggtggagttgattcccattgatcatgggctctgcctgcctgaaactttggaggatccatattttgaatggattcattggccacaggcttccattccgttctcagaggatgagcttgcctacattgaa

SEQ ID NO: 186771 - DNA, 251 bp, Glycine max
gtttgttgtgagctataagctagtttatcgtgaggagaatatgaagttgtttgttttctttgttgctgcagtagttttggtagcatggccatgccatggcgcaggctaccaaaggttccctctccgaatgaaaactggctatggtgagcgttcttcggaggtaaaatgcgcaagttttaggcttgctgtggaagcacacaacatccgagcctttaaaaccattcctgaagagtgcgttgaaccatcaaagg

SEQ ID NO: 186772 - DNA, 257 bp, Glycine max
ccttcacaagattctcacaaacaactcttgagaaagaaagaatggctgccaacacattgatgagttctgccatctcagccttcccatctctcctttcctcctcaaaatccagatttgccgcagcagttcctctttccagctttgttgtcaccaatgcctcttcttctcgcttttccatgagtgctgactggatgcctggccagcctagacccccctaccttgatggttcagcacctggtgactttggattcgaccct

SEQ ID NO: 186773 - DNA, 250 bp, Glycine max
tcaatcttctgagagtgtttggttgaaagtagcaaagatgtttcctttcgggcaaaagggtcaaaagataaaggggactatggtggttatgcagaagaatgtgttggatatcaacagcatcaccagtgttggagggatcgttgaccaaggcttaggcttcataggcagtgcagtcgatgcacttacttttgcagccaccaaaatctccatccagttgattagtgctaccaacgctgatggtgggaaagga

SEQ ID NO: 186774 - DNA, 254 bp, Glycine max
cctcgagccgattcggctcgagattttatttgcctttaaaattcaaacctttcagcaattataattctgaattattgactcaaattaatgtaggtgagcattgttatggaacaaatgttgcgcctgcttcatacctgtggcttacctgcagaagatgtagacttcataaattctgatgggaagacaatgaacaggctgttgctggaggcaaatccacgaatgaccctctttactggtagttcaagagtggcaga

SEQ ID NO: 186775 - DNA, 254 bp, Glycine max
ggatgagtgctcttggggtagtcggtttggccctgaacctacgtgcctatgacttcgtttctcaagaaatccgcgcacgagagatcctgaatttgagactttctacaccacaaatattctcttaaacgaaggtattcgtgcgtggatggcggctcaagatcagcctcatgaaaaccttatattccctgaggaggttctaccacgtggaaacgctctttaatggaactttagctttaactggtcgtgaccaggaa

SEQ ID NO: 186776 - DNA, 259 bp, Glycine max
attgtattagaaatgaatgaacttcgagaactggatacagcacgtgatattttaaggcaaacacaagtgatgggtgtaatgaaacgagagcagcctgaaagatatttgcgtcttgaacatctcctagttagaacttattttgatccaaatgaggcttatcaagactcaacaaaagagcagcgacgtgcacaaatagcccaagctcttgcagcagaagttactgtagtgccaccatcccgattgatggctttaattggtc

SEQ ID NO: 186777 - DNA, 255 bp, Glycine max
gaactcactatgcagtcatgagctcctacgagtacctcagcactggacttcgccagtacttggacaacaaaatggatggattctacattgctccagcttttatggacaagcttgttgttcacatctccaagaacttcatgaccctgcccaacatcaaggttcctctcattcttggtatctggggaggcaagggacaaggaaaatctttccaatgtgagcttgcctttgccaagatgggaatcaaccccatcatga

SEQ ID NO: 186778 - DNA, 257 bp, Glycine max
cctcgagccgaatcggctcgaggtcactcttcttgcataacccagatctgcagacaatatgcgacgaactggcttgttacatttcttatgccttgtcattgctttagtaagtgtgcaagcagaagatgcgtataagtattacacatggacggtgacttatggaactatttctccattgggtagtccccagcaggttattcttatcaatggtcagtttcctgggcctagacttgacttggtgactaatgagaatgtaa

SEQ ID NO: 186779 - DNA, 295 bp, Glycine max
cagaagtctttcctagtcgaataatagccaaagccatggcagtctgtatgtcagtgcattgggtgataaatttctttgttggactactgttcttacgtttgctggaggaaacttgggatcaacagactgcttatacgctatgctatgctaccttttggcacaatggcactaatttttgtaaaaagaaatgtggtggataccaaagggaagtcacttcatgaaatcgagatcgcacttctacgccaagactagagcatcttatgaagctctattcatcgattgctctaattctgca

SEQ ID NO: 186780 - DNA, 241 bp, Glycine max
gatctatcacccaaatgttgatgagatgtcaggatcagtttgtctggatgttatcaatcaaacctggagtcccatgtttgatcttgttaatgtgtttgatgtgtttctacctcaacttctgctgtatcccaatccatcagaccccttgaatggagaagctggcagctttaatgatgcgtgatcgaccaagttatgaacaaagggttaaaggtcttatctgctgatggaatcgacttcgttg

SEQ ID NO: 186781 - DNA, 303 bp, Glycine max
tgaatctgctcagagtgaagcgcggacttgacatggtcagagtgctctttgagcagattctagttacagagggtaattcccttagggatccagcttccaaagcttacgaacaggtgtttgcacctcaccatggctgggcgatcaggaaggctgtttctgcgggaatgtatgcccttcctacaaaggaacagcttctgaagaaactcaatgaggatgaggcatcggcaaaagaccacatgcaaagttatgtcactgcttccgcacctctaatccaatacattgacaaactctttgtttctagag

SEQ ID NO: 186782 - DNA, 292 bp, Glycine max
gaaagttagggttagggattttgagagatggcatcgactaagaagatcaccctgaagagttcggacggtgaggccttcgaggtggaggaggcggtggcgctggagtcgcagacgatcaagcacatgatcgaggacgactgcgccgacagtggaatccctctccccaatgtcaccagcaagattctggcgaaggttatcgagtactgcaagaagcacgttgaggcgaacagtgctgatgagaagcccagtgaggatgtgctcaaggcttgggacgtggatttcgtcaacgttg

SEQ ID NO: 186783 - DNA, 300 bp, Glycine max
cgatcaccaccgcaaagcaatgggcgctatactttctgccttaactggcggtgccgcaacggcggcgacgtcttcgccggagagttctgcttctagggtccagtctttccactcttcggcgcgctggcagctccacttcaacgagctcaaagaaaccaataagctcgttgtgatagatttctcggcgtcgtggtgcggcccttgcaaattcatagagccagcgattcacgccatgtccgaaaagttcaccgacgttgacttcgtcaagatcgacgtcgacgaattgccggatgtggcgaa

SEQ ID NO: 186784 - DNA, 302 bp, Glycine max
atataaaggaaaacaatgggttccgctaatcaccagaacttggagttcttgaaggagatcggtttgggctcttccaacattggctcttacattaatggccagtggaaagccactggttcttctgtcacttctgttaatccgtctaacaatcagagtatagctcaagtgaccgaagcaactttgcaagattttgaggaggggttgcgagcttgcagtgaagcagctaagacatggatgactataccggcaccgaagagaggtgagattgtgagcacagattggtgaagcattgagggccaatt

SEQ ID NO: 186785 - DNA, 309 bp, Glycine max
tctcgagcctggttactgtctgttcaagctatcatctctctctctctttcttagtgcatccttagctaaagttagagatggcccgaagaaactgtgcactattcacctactgagatcagtatcacgaagggagcaccctagacaggatctgtgaccagatctccgatgctgtgctcgatacatgcttggagcaggaccctgagagcaaggttgcctgtgcaacctgcaccaagaccaacatggtgatggttttcggagagatcacaaccaaggccaacgtggactatgagaagattgtgcgggacacat

SEQ ID NO: 186786 - DNA, 304 bp, Glycine max
cttctctcactcactcactcttcttcttcctcttcgtgtggttatctttctcgaactcgaaagaagatgcgtgagattcttcacatccagggatggcaatgcgggaaccagatcggaagccaaattctgggaggtggtgtgcgcggagcacgggatcgattcaacggggaggtaccaaggggacaacgagttgcaactcgagcgagtcaacgtctactacaatgaagcgagttgcggaacgttcgtgcctagggcggtgctcatggatctggagccagggaccatggacagcgtcagatctggt

SEQ ID NO: 186787 - DNA, 293 bp, Glycine max
cgagattccgatggcgactctggattccgacgtgcctatggttcccgccggcgagccctcgagcagcgccggtccttcttccaagaagcccaagcgcttcgagatcaagaagtgaaacgccgtcgctctctgggcttgggacatcgttgtcgataactgtgctatctgccggaaccacatcatggatctctgcatcgagtgccaagccaaccaggctagcgccactagcgaggaatgcactgtggcatggggagtctgtaaccatgcttttcacttccattgcattagtcgat

SEQ ID NO: 186788 - DNA, 299 bp, Glycine max
ggaggtgatgcatcactatgaggtggatactgatgctgaggtgttggacttgcttgacaccgcttctagggagaaacaggtgactgtggtggcaaagctatactggggggatgcaagagagaaaattgtggaagctgttggggatttaaagcttgactctttggtcatgggtagcagaggattgggcgccatacagagggtattgctggggagtgtgactaattatgtcaccacaaatgcgagttgccctataacgattgtgaaagactctgccccttctactaactgatatgctactg

SEQ ID NO: 186789 - DNA, 295 bp, Glycine max
agatgagttaagccaagtgtacccacaatttgtgtttgatgcttaaatgaagctctatgctggtctcaagtttcaggctaaagagccaaggtttgacgctatgcaggccaatgcaagcgtagttgatgtgggggccatagccacagtttgagtctcagggctctcagcatgtggaatcggttatgtatgtttctgttaatcgtaaacaaaggctactcacaacatattactagtgtttggtgtccttggataattggcatggaagttgtgcttgtgccatataatcgaaccttat

SEQ ID NO: 186790 - DNA, 297 bp, Glycine max
ggtggtcatggttacctttgtagcagtggtctccctgagttatttgctgtttatgttcctgcctgcacgtatgaaggagacaatgttgtgctactgttacaggtggcaaggcatctcatgaagactgtttctcagctgggctctggaaataagcccgttggtactacagcttatatggctcgagtggaacaactgatgcaatatcactctgatgttgaaaaggctgaggattggttgaagcctaatgtagtgttggaaacatttgaagctagggctgctaggatgtcagttgcttgt

SEQ ID NO: 186791 - DNA, 293 bp, Glycine max
atggaagcaactaatggccaccaaaacggttcattttgcttgtccactgccaagggaagtagtgatcccttgaactggggagcggcggcggaggcgatgaaggggagtcacctggacgaggtgaagcgcatggtggccgagtaccgcaagccggtggtccggctcggcggagagactctcaccatcgctcaggtggccgccgtggccggacacgaccacggcgtggcggtggagctctcagagtcagcgagagaaggagtaaaggcgagcagtgagtgcgtgatgaacagcat

SEQ ID NO: 186792 - DNA, 288 bp, Glycine max
attgggcgttgcattgaagatgaacatcggcttctcgtctacgaatttatgccacgtggaagcttggaaaaccatttgttccggagaggctcatattttctgactctttcttggagcttacgtttgaaggtagctcttgatgctgccaaagggcttgcatttctccacagtgcagaagcagtagtgatatatagagattttaagacttcgaatatcttgctggattcagtatgtgaacttttgatcttttaatcttatagtgaaagaaaaaagatctgatgaatgtag

SEQ ID NO: 186793 - DNA, 294 bp, Glycine max
gttcgatcaaatagctcccagtactttaattgatttctgaatatcatcacttaatttgaaggaaagatggtgagcgtagctgagatccgccaggcacaaagggcagaaggcccagcaaccatccttgccattggaactgcaaacccaccaaactgtgttgatcagagcacctatcctgactactacttcagaatcaccaacagtgagcacatgaccgagctcaaagagaaattccagcgcatgtgtgacaagtctatgatcaagaggagatatatgtacctaaacgaagagatc

SEQ ID NO: 186794 - DNA, 295 bp, Glycine max
aaccccactctctttttccgagtcttccagtgaaagaaaggcagcgatggaagaagacttcgacatccccggcggcgaggaaatggatctcggcgaagacgaggtcggcgaggagagggagatcggctctggcggcctcaagaagaagctcctcaaggaaggtcaaggctgggaaacccccgaagtcggtgacgaagtccaagttcattacacggggactttgctcgacgggactaagttcgattcgagccgcgacagggattctcccttcagcttcacgctcggacaagggcaa

SEQ ID NO: 186795 - DNA, 285 bp, Glycine max
tgcatttttcaaggtggaaggactaactgttcttgcagccacagagtagaagattcattttcaaatagagtaccgtgtgatgcattaatggagtaatgcatttatgtgcttgtgacggtaaggcatgcatgaggggtcatgtaaataatgttaatgatgactatgacaagagtgcgactggtggaagagtttattatggtgttcattagttaggattttgtgtttctcatgtacagttgcgctttctaatacaataaaatatatgcttttggcttgagattttct

SEQ ID NO: 186796 - DNA, 289 bp, Glycine max
gcgcatcctgagctctccgattggtacaattcgctggcggatctataccagaacaagctctggcaccagcttaccctcaagcttgagcagttcgtggctctcgccgtcttccaggccggtgatgcattaatacaattatatcacaatttcatcacagactttgagaccaaaatcaaccttctcaagcttgcgcatttcgctgttatagtttctcggcagtatgctgagaaagaagctgcggttggttatcttggaggggttattcagaaacttcaagatactagagagc

SEQ ID NO: 186797 - DNA, 291 bp, Glycine max
gaggagatgaatttacttgttggagctgaccaaccaggaaatcaactggatgattatatttccgagttgaatactattttatcactaaaggctgcaggaatctttcaattgcagacacagttggctcaatttcagagacgcttaaatgagtataatgttgtcgtaacgtctggtaattgatggtgctaatgggcaaatgattggtgtgttgtggatgaggaattctccgttctcttaggtattgcttctatgatttcattgccgtggattgtttctcaagtgtgaagaatt

SEQ ID NO: 186798 - DNA, 295 bp, Glycine max
tggggattagggtttaggaagcagcgacaacaatggatttcacagtggagaagaaggaatcagagaacaacgccgaaaatgctcacccaacaacgttagattcttcttctcaattggcatcggcacttgattccaacaacaaagaaatcgaagaacgacaagctcgtgaactcaaagccggacttcaccccctaaagcagcacaagtttgtcttctggtacactcgtcgaacacctggagttcgaaatcaaacatcatatgaggacaacataaagaaaattgttgaatttagtac

SEQ ID NO: 186799 - DNA, 291 bp, Glycine max
gttaggtagcaagcataagtgtctaaccttagaaacatatctgctacatatcgtgtgcattttggaattgtgccactaaaattctattcatctatggctgcctcatcttatgctatgcaatcaatccttgcaaaccctatgatccgcatttccagcgggtctagggagaaccattttggtgttcctgcttatcacatgagaaggaatgttggcctgagagttaggtccatggctgaggaagagcaaccaagtcagcctgcgaccccagttacaccaccaccagcagaaccc

SEQ ID NO: 186800 - DNA, 285 bp, Glycine max
gctagtccagcgccactgttaggggatcgactgtgtgaaaatggatttgagtgtgttaaaattctccctgccaccaatgatgcacatggaggagtcattgtggacttaaaggagcctttgcactccgaagtttttgctactttgcttagatcttcacttttacattggaagcaacagggaaaagatggtgtttggatcaagtttcctattgagcttgttaatcttgttgaaactgcagttaaggtgctggttctggaaaaaaaaggaggatttcatgggattggt

SEQ ID NO: 186801 - DNA, 287 bp, Glycine max
tatcgagccgattcggctcgaggggcctcctggtactggtaaaacatagttagccagggctatagccagtaatatagatgctaacttcctaaaggttgtttccagtgccataattgacaagtacattggagaaagtgccaggttaatcagagagatgtttggttatgcacgtgatcaccagccgtgcatcatttttatggatgagatcgatgccattggaggtcgccgtttcagtgagggaacaagtgcagatcgtgagattcagagaacgctaatggagctgctta

SEQ ID NO: 186802 - DNA, 287 bp, Glycine max
atggaccaaaacccatttcaattgtggggagtactggttcaattggaactcagacactagatattgtggcagagaatccagataagtttaaagttgtggcacttgcagctggttcaaatgttactcttcttgcagaccaggtaaaaagatttaagcctcaacttgttgctgttagaaatgagtccctaattgctgaacttgaagaggccttgcatgatgttgaagaaaaacctgagatcatccctggagagcagggaatcattgaggttgctcgtcacccagatgca

SEQ ID NO: 186803 - DNA, 287 bp, Glycine max
gctagggatgctattcttagcgggaacatttgatcaggtacgcgtcaaccttccaaatggtgacatggtggggcatacaggtgacattgaagcaacagttgtggcatgcaaggcagctgatgctgctgtgaagatgattcttgatgcaatagagcaagtgggtggaatttatgttgtcacagctgaccacgggaatgctgaggatatggtcaagagggataaatctggaaaaccacttctaggcaaggatggaaaaatccagattcttacttcacatactcttgagc

SEQ ID NO: 186804 - DNA, 286 bp, Glycine max
atccaagttcaaagatgaagatgatccacgttcttttcctctttgctcttgtctcgttcacttcccatgcttctgtcaatgatttctgtgtagcagacctaaaaggtccagatagcccttcaggctatcagtgcaagccacctaacacagtcacagtggatgactttgtgttctctggctttgtagctggaaacaccacaaacactttcaatgctgcattaacctccgcatttgttactgattttccaggtgtgaatggtcttggtgtatctgtggcacggttaga

SEQ ID NO: 186805 - DNA, 284 bp, Glycine max
  unsure (1)..(284): unsure at all n locations
cgcggaggtggaggancgccacctgatgatggatccggaggatttcttgagactgaagaatcagctctcggtgaaatcctccggcggcgaaacggcttcgttctgcttcaggtcgaaggagttggttgaactgacgaagatgtgcagagatctgaggcacaaggtgccggagatattggaggtggaggtggatccgaagggaggaccgaggattcaagaggcggcgatgaagctctacgtttcgaagagcgcgttcgagaaggttnccctgttgcaggcgatgc

SEQ ID NO: 186806 - DNA, 276 bp, Glycine max
gttcgtcactcgctccatctgattgaacaaaatgtacacctcgaggaagaaaattcacaaggataaggatgcctggcccactgaatttgaggagacagttgcacagtacttgtttgacttggagaacaccaatcaggatctgtaaagtgacttgaaagatctctacataaatcaagcaattcaaatggatgtggctggtaatcgcaaggctgtagtcatctatgtgcccttcagattgaggaaggcattccgcaagattcatcttcgacttgtcag

SEQ ID NO: 186807 - DNA, 272 bp, Glycine max
gtatggggaaggtggaaggtcgttttggatacacaacacaggaccattggggtgcctgccatacatgctggatcgctatcccatgaaaccaactcaaatggatgagtttgggtgtgccaaaccattcaacgaggttgcccaatattttaaccgtaaattaaaagaagttgttgagcaactgcggaaagaattgccaggagctgcaatcacctatgttgatgtgtatacggtcaagtacaccctcatcagccatgcccaaaaatatggtaagc

SEQ ID NO: 186808 - DNA, 276 bp, Glycine max
cagttgcagtcactggtgttgttggcttcatagggactggactccctccttttgttgcattaagagctgacatggatgctcttcctcagcaggaaatggtggagtgggagcacaagagtaaagtacctggaaagatgcatgcatgcggtcatgatgctcatgttgccatgcttctcggtgctgcaaagatcctcaaacggcatgaaaatgagatacgaggaactgttgttcttgtttttcaaccagcaggagaaggaggtggaggggctaagaaat

SEQ ID NO: 186809 - DNA, 278 bp, Glycine max
gtaaaagctcgtttgattctgatttccagtacgaatacgaaccgtgaaagcgtggcctatcgatcctttagtccttcggaatttgaagctagaggtgtcagaaaagttaccacagggataactggcttgtggcagccaagcgttcatagcgacgttgctttttgatccttcgatgtcggctcttcctatcattgtgaagcagaattcaccaagtgttggattgttcacccaccaatagggaacgtgagctgggtttagaccgtcgtgagacaggttag

SEQ ID NO: 186810 - DNA, 277 bp, Glycine max
cgagccgatccgagaaaaactctgtaaacatgttggtttaccaggacctccttacaggtgctgagcttctctctgactccttccgttacaaggaaattgagaatggaatgctgtgggaagttgaggggaagtgggttgttaaaggagcagttgatgtagacattggtgcaaacccttctgctgagggtggagaagaagatgagggagttgatgatgcagctgttaaggttgtcgacattgttgacacattcagacttcaggagcaacccgcattcga

SEQ ID NO: 186811 - DNA, 279 bp, Glycine max
aagcttaatcgatcatcacttcacttcactaatacatcatggcagacgaatgtacagaacaagtatgagagctctgaggttgaggtccaggatcgtggtgtttttgactttctcggtaagaaaaaggatgaagaagacaagcctcatcctcaggaggaggtcatcgccaccgagtttcaaaaagtcactgtctcagaccaaggagagaacaagcattgcctcttagaaaagcttcaccgatctgacagcagctctagctctgtaagcttcttttccttt

SEQ ID NO: 186812 - DNA, 275 bp, Glycine max
attaacacgtatatagcaagcatggcagtcactctacgaccttagctctgcctctgggttgaagaagcttgatgagtaccttctcccacgcagctacatcaccgggtaccaagctacaaaggatgatcttactgtttatgcagctttgccaactgctccatcagatgaatatggaaatgtttccaggtggtacaagcacattgatgctttgttgagaatctctggtgtttctggcgagggatctggtgttattgttgagggaccctggttgcgga

SEQ ID NO: 186813 - DNA, 274 bp, Glycine max
  unsure (1)..(274): unsure at all n locations
gantcgctctgcaaagagacgatgttgaactcgttgccgttaacgaccctttcattaccaccgattacatgacatacatgtttaaatacgacagtgttcacggacactggaagcatcacgatgtcaccgttaaggacgagaagacccttctcttcggtgacaaggcagtcactgtttttggacacagaaaccctgaagagatcccatgggggtcaactggagctgacatcattgttgagtccaccggagttttcaccgataaggacaaggctgc

SEQ ID NO: 186814 - DNA, 272 bp, Glycine max
aagagattggcggattacataggtttgccatgtcgaattgctcggggttgtaggtactgtgtttcagatcatagatcgtcttgccttgtcaagattaaagatgatagacagctctcaagggaatatgtagttgatctggttggggaaccaggaaatatccatgggccggattcctctattaatggagcatatgtgtcttcaataccttccccatttcaaatttctcatttgaaagaatcccaatcaccatatgtggatgttgcagcatgttc

SEQ ID NO: 186815 - DNA, 273 bp, Glycine max
ctcacactcgtgttggtggtgctgtttttcgcccccgttgacgcgcattttccggcaaccggagagcttccaacgttccgcgaggcgccggcattccgcaacggaagagaatgccgcaaccgcgcgctgaggacctccgtgatccacatcgcgatgacgctggacgcgacctacctccgcggctccgtctccggtgtgttctccgtcctgcggcacgcatcatgtccggagaacatcgtgttccactttatcggcaccacgcgccgaagcacg

SEQ ID NO: 186816 - DNA, 263 bp, Glycine max
  unsure (1)..(263): unsure at all n locations
caaaacgcttcgcataaggtacttatgcgcgataagactgtactggtaaccggcggagccgttacatcggcagccacaccgttcttcagctcttgctcggaggtttcagagccgtcgtcctcgataacctcgaaaattcctccgaggttgccatccacagagtcagggagctcgccggcgaatttgggaacaacctctcctttcacaaggtggacctacgggacagagctgctctagaccanatattttcttccacacaacat

SEQ ID NO: 186817 - DNA, 270 bp, Glycine max
gtttccaattcaccaaactcacaatggttgatctagattggcaaacaaagatggttcactccaacatcatgcctccaatgtcccccaaactctctctcccggatcataacattccaatcccaactttgcaactcccccttcgccaaaacgacatcaccgcagcgtcgtctcctatctgcgctgcatacgacaactaccttcgtctccctgagctcagagccctctgggcctccaaggacttccccaattgggccaacgagcccatcttaa

SEQ ID NO: 186818 - DNA, 269 bp, Glycine max
accaaataggtatttagttagcctttttagttccagacagtatgtcatatataggtatccttgttttgtttgtgttgtgtaaattgctgacaaatctcaggtgatgccactgtctggatttctcataagcacactcttaaatcttgcaccacattttgcagcaggtttaatattaattgggtgcagtccaggaggcacagctagtaacattataacatatctttcacgtggaaatgtggcgctatctgtaataatgacaactgcaagta

SEQ ID NO: 186819 - DNA, 274 bp, Glycine max
gttccctctctggaactaagctctctttcaagccctctcgccacactgtcaaatccaagaacttcaggagtggtgccgtggtagcaaagtatggtgacaagagtgtgtactttgatttggaggatctgggcaacactacggggcagtgggacttgtatggctcagatgcaccttcaccctacaaccctcttcagagcaagttcttcgagacatttgctgctccattcacaaagaggggattgttactcaagtttctgatattgggaggtggttc

SEQ ID NO: 186820 - DNA, 274 bp, Glycine max
  unsure (1)..(274): unsure at all n locations
tgttgatgaggctgctggtaaactgagagctaaaggaatcgaagtattggcggttgtttgccacgtttcaaatgcccaacaaaggaaaaatttgatagacaaaactttacaggatgcagctcctcacttgaagaagggttcttctgttgttctcattgcctcacttgttgcttataatccaccacctactatggctatgtatggagtgaccaaaacagcagttcttggacttaccanagctatggctagtgaaatgggccctaatactcgggtg

SEQ ID NO: 186821 - DNA, 268 bp, Glycine max
caggtctgttcaagctaccatctctctctctctttcttagtgcctccttgccagaagttaaaatggcccaagaaactttcctattcacatctgaatcagtgaacgaggggcaccctgacaagctctgtgaccagatctccgatgctgtgctcgatgcatgcttggagcaggaccctgacagcaatgttgcctgtgaaacctgcaccaagaccaacatggtgatggttttcggagagatcacaaccaaggccaacgtggactatgagaa

SEQ ID NO: 186822 - DNA, 269 bp, Glycine max
gccatcgatgctcagatctctccactccgccgccacccgcggcgcctctcatctcttccgccgtgggtacgcctccgagccggtgccggagcgcaaggtagccgttctcggcgccgccggcgggatcgggcagcctctctcccttctcatgaagctcaatcccctcgtttcgagcctctccctttacgatatcgccggaactcccggcgtcgccgccgatatcagccacataaacaccagatctgaggtagtggggtacaaggtgatga

SEQ ID NO: 186823 - DNA, 272 bp, Glycine max
attctccatacctcaacgaagaggttaaagagacggcaacactttgctgtccgccttgaccgagcagagcttcgtcttggccctcgattttgccctaaagtactctcagtcacaacagacaccgtcgtcgtcgtcgtcgtcatcaatggcaccgaagcagaccaaggctgagaagaagatcgcttacgatgcgaactgtgcgacctaatggaggagtacggccagatcctcgttgtgaactccgataacgtgggatcgaaccagctccagaa

SEQ ID NO: 186824 - DNA, 202 bp, Glycine max
tctcgagccgaatcggctcgagcggctcgagctgaccgaatgatgctcacattctctgtgttcccatcccctaagttttctgacactgttgttgagccttacaatgcaaccctatcagtgcacctgctcgttgagaatgcagatgaatgcatggttttggataacgaagctctctatgacatctgcttccgcacgctttagg

SEQ ID NO: 186825 - DNA, 268 bp, Glycine max
actgccatggacacagacactgtgaagatatatggtgcacgtgttcgtgttgattctatggctagagttgctcaaattgaaacagcagagaaagagaaaatgagagaaaaggtgcagaagataataggtcatggtatcaactgttttgttaacagacagttgatttacaattttccagaggagctctttgctgatgcgggaatattggctattgaacatgctgattttgatggtattgagcgtctggctttggtaactggtggtgaaa

SEQ ID NO: 186826 - DNA, 262 bp, Glycine max
gtacggaacaaggatccagagtggttcttcttctgtccgcagaccggaagtatccaaacgggcacaggttgaaccgagctacgaatcatggctattggaaggcgacggggaaggatcgaaagattaagtctggctccaccttgattggaatgaagaagactcttgttttctataccggtcgtgctcccaaggggaagaggaccaattgggttatgcatgagtacaggcctaccttgaaggagcttgaaggaaccaatcctgg

SEQ ID NO: 186827 - DNA, 264 bp, Glycine max
gctcactcatctcttacaacgaaaccctcttcatcttgttctatctgtgacgagcatcatggcctcaagagcagtgttattgttggctatgtgtgtgcttccggcgatggttgtggccattcgcccagcaaagaaccctttttgcgtgaagggtcgtgtctactgtgacccttgccgtgctggttttgagacctcagctaccacctacattgctggtgctgagattatgttgcaatgcaagagcagggttagcaacgaggttgt

SEQ ID NO: 186828 - DNA, 268 bp, Glycine max
gtcccaaccaaaaaaagttagtgctgccacgtggcggacgcagttgggttgacaaagagaaaattaaaaagaagaagttaaatttagaaaacacggtcggcgtcgtttgggctggatgatgcaattcaaattctggagtacgttgttaacacgagggaggaaaaactcgggaccgcaaatcctgaggtggatgatgagaagaggaggttgggtgagttgttgaaggaagcaggtagagttcggagcagaaaagccaggtcactggaga

SEQ ID NO: 186829 - DNA, 269 bp, Glycine max
ctgtgacgagcatcatggcctcaagagcagtgttattgttggctatgtgtgtgcttccggcgatggtcgtggccattcgcccagcaaagaaccctttttgcgtgaagggtcgtgtctactgtgacccttgccgtgctggttttgagacctcagctaccacctacattgctggtgctgagattatgttgcaatgcaagagcagggttagcaacgaggttgtgtacacgaagaaggggtacaccgactcaaccggagcatacacaatgtac

SEQ ID NO: 186830 - DNA, 276 bp, Glycine max
ggttagtgctgcagtctcttttccatccaccaagtctacctctctcccaagcaggacctccatcattaccccagagagagttgtattcaagaaggcttcattgcaatacagagatgtttgtagcagtggaagggtagtttccatcagagctcaagtcaccactgaggctccagccaaggttgaaaaagagtccaagaaacaggatgaaggtgtggttgtgaacaagttcaaacccaagaccccttacgttggtagatgcctgctcaacacaaagat

SEQ ID NO: 186831 - DNA, 259 bp, Glycine max
  unsure (1)..(259): unsure at all n locations
ctgacggccatctcttccaggtcgagtacgncccgtnagccgtccgcaagggcaacgccgccgtcggcgtccgcggcaccgacaatgttgtcctcggcgtcgagaagaaatccaccgccatactccaagactccaggtcggtgaggaagatagtgaatctggacgaccacattgcgctggcctgcgcggggctgaaggccgacgcacgcgtgctcataaacagggcacgtgtggagtgccagagtcacaggctcaccgt

SEQ ID NO: 186832 - DNA, 288 bp, Glycine max
atccgccgaattcggctcgagatcgagtaaaggagcaaagtggttattaacaggtaaaacctcagcttcagccaaagacaaagacaaagactagaagaaacccgtttctcgttcttctagagctggtcttcagtttcctgttggacgaattcaccgtcttttgaagtcaagggtgagtgccaatggaagagttggggccacagctgctgtgtattctgctgctatactggagtatctaactgcagaggtgttggagttggctggtaatgcaagcaaggatctgaaggt

SEQ ID NO: 186833 - DNA, 95 bp, Glycine max
gggattcggcaacgtccgtggggaaaatgggccgcggagattcgcgatccaagaaaaggggttcgtgtctggttgggcaccttcaacactgcata

SEQ ID NO: 186834 - DNA, 263 bp, Glycine max
aacaccacttccaatggcttcatatcatgaagaagaagtgaggctattgggcaagtgggccagcccatttagcaacagagtagaccttgctctcaagctcaagggtgttccctacaaatactccgaggaagatcttgctaacaagagtgctgatcttctcaagtacaaccccgttcacaagaaggttccggttttggtccacaatgggaacccattgcccgagtcactcatcattgttgaatacatagatgagacgtggaaaa

SEQ ID NO: 186835 - DNA, 262 bp, Glycine max
ctccgaattagttatcttgagaaacattattcccattgctatatattatggctagcatgaaggttacatgggtggttgtgatcatgtgcatggccgtggtgggtgcaccgatgatggcgcaagccatgacatgcaatgatgtgacggtgaacatggcacagtgcctatcctacctgatgcagggaggaacaccttcaacactctgctgtcaccaccgttgacaaacaaactgtgtgcaactgtctcaaggcggatgctgcta

SEQ ID NO: 186836 - DNA, 267 bp, Glycine max
ataccttaggtcttccgaattcgaagttaatttgcaagatggctaaggaaaaggctcagatcaacattgtggtggttgctcatgtggaccctgaggaggcaaccaccattaacgagctgaagaagcctgttgtggagaaagaagctccagggcatgccatatgagggcatgcacgtacggcctcggaggcggaacagaaaattatgttaacaaaataatctggaaccctaatgtatcagtgtcatcatcagtgtgtagtttaagcta

SEQ ID NO: 186837 - DNA, 271 bp, Glycine max
atttttaagagaacttcgtcatcaattatacttccatctggattatttggagatgttaaaaatactcgagcttcctatattggtgatactggatgaagcatacattgagttttcagcaattgaatcaaggatgagttgggtgaagaaacatgataatttgattgttcttcggacatttagcaaaagagctggtttagctggacttcgagtgggatatggagcttttcctttgagtataattgagtatctttggagagcaaagcagccgtat

SEQ ID NO: 186838 - DNA, 272 bp, Glycine max
gtgcatcaagatctctgtctctctgcaatcgaaaatgagcaagggaccggccctcttcaccgatatcggcaaaaaatccaaagatcttttgactaaggactacagctccgatcagaaactcaccgtttcctcctacagcgtctccggagtgaccctcacttcaacatctgtgacgaaaggaggactctcaacaggggatgtggcagcactgtacaagtataagaacactgttattgatgttaaacttgacaccgcatcaactatctccacaa

SEQ ID NO: 186839 - DNA, 278 bp, Glycine max
gccctcttgaaggaaattcatggtttactcagacaaggtgttgaagttgacaagatatcttctcagctaacaccatgggcatctgctttatttgaatttctgccaccctttattaggagacagttgctcctttaccctgaatccgacgactcagcacagttatcacagattgaaactgagaaattactagcatatcttgtggaagtcgagattaacaagcgtctgaaagaaggcacatacaaggggaagaaattcaatgccatttgccacttttttgg

SEQ ID NO: 186840 - DNA, 228 bp, Glycine max
cgttgctcgactaaagggtgacaacgctttgttctcatcttctgccattgataatgcccacattgaccagtggattgatttttcatccttggagatcgatgctaatctcatgaaattgctcctaccaagacttggatttgccccataccttcctccagttgaggagggtgcaaattctgcgttgaagagagcatttgaggccttgaacactcatcttggctccaatac

SEQ ID NO: 186841 - DNA, 292 bp, Glycine max
gggagcgaagaggagaacggcgaattctacctgcgattctacgtcgggcacaagggcaagttcggtcacgagttcttggagttcgagttccgccccgacgggaagctccgctacgccaacaactccaactacaaaaacgacaccatcatccgcaaggaggtttacctcacccccgccgttctccgcgagtgccgtcgcatcatctccgagagcgagattatgaaggaagatgataacaactggccggaacctgatcgggtggggcggcagagctggagattgttatggggaa

SEQ ID NO: 186842 - DNA, 278 bp, Glycine max
ggccaacacaataggatcagaatcctgtggtgttatcccatgctaatgtatacagagcgtaggcttgctttgagcactctaatttcttcaaagtaacagcaccggaggcacgacccggccagttaaggacaggaggagaagtggccagcaagactaaccagcataccttattggttgacaaattctcaagttggagtttatggaaaacctgcccctgaagattttactgctgattatggacactggacacgtatagtgtccaagtcttatcttaatgg

SEQ ID NO: 186843 - DNA, 287 bp, Glycine max
ctatgtggaaggtggaaggtcgttctggatacactgacacaggaccattggggtgcctgccatacgtgctggatcgctatcccatgaaaccaactcaaatggatgagtttgggtgtgccaaaccattcaacgaggttgcccaatattttaaccgtaagattgaaataagttgttgagcaactgcggaaagaattgccaggagctgcaatcacctatgttgatgtgtatacggtcaagtacaccctcatcagccatgcccaaagatatggtaagcactagacaaacac

SEQ ID NO: 186844 - DNA, 287 bp, Glycine max
gcggccgctcgccaaagatgtcgggtcgtggaaagggacgcaagggtttgggtaagggaggagccaagaggcacaggaacgtgctccgcgataacatccagggaatcacaaaacccgacattcgccgtttggctcgcagacgcggcgtcaagagaatcatcggcctcatctatgaagaaacccgcggcgtccttaagatcttcctcgagaacgttattcgcgacgctgttacctacaccgagcatgctatgaggaagactgttaccgctatggatgttgtttatgct

SEQ ID NO: 186845 - DNA, 286 bp, Glycine max
cttttcgcttcaaatttcatttagatccaaaatttctgaatcagtgaagaatcttagattctgtgggaaaagcttctcaatctttgacgaagataaacaacaatgtcttcacttgcggctgctagagcagacaacttttactatcccccagaatgggaaccgaatcagggttcgctgaacaagtttcatggtcaacatgccttgcgagagagggcgagaaaattagatcagggtatcctgattataaggtttgagatgccttttaatatatggtgtggaggatgca

SEQ ID NO: 186846 - DNA, 281 bp, Glycine max
ggaattaggctcgagctcgagccgatccgagaaaaactctgtaaacatgttggtttaccaggacctccttacaggtgatgagcttctctctgactccttccgttacaaggaaattgagaatggaatgctgtgggaagttgatgggaagtgggttgttaaaggagcagttgatgtagacattggtgcaaacccttctgctgagggtggagaagaagatgagggagttgatgatgcagctgttaaggtggttgacattgttgacacattcagacttcaagagc

SEQ ID NO: 186847 - DNA, 227 bp, Glycine max
gtcgctcgatgggaatttcgcttcaaggcgtctcgtagggctaatccgcgtcacgagggtcaccaacggcacgtttcgttgggtggccgatgcccctacttctggtcgggaaacggacggcgggcgcacgcgtcgcttgtaggccgggttctgatttataggcgttcagtcataatccatcgcacggtagcttctcgccactggtttttcaaccaagcgagatgacc

SEQ ID NO: 186848 - DNA, 288 bp, Glycine max
cgcctgaaccagggtcatcttttacttcattgtgcattgcacaatttaggttcttcctcttcagagcagtatgttcgggcatgctcttcacttgatggttggaaacagcatattggttctggaaaccctaggattgagaaatgtggcagcattttggataatcttctgcggtcacttgatctgccaaaggttaaaaagtctgctaaagggaaggttttgatgcaagctatgtatggagtaaaggtgcagacagtatttttatgcagtgtgtttgctgcggctttttcg

SEQ ID NO: 186849 - DNA, 287 bp, Glycine max
agcaagctcatcctagagttttaaaaatggcagcagcctcctccatggctctctcttccccatccttggctggcaaggccgtgaagctgggcccatcagcccccgaagtcgggagggtcagcatgaggaagaccgtcaccaagcaggcctcctccggaagcccatggtacggcccagaccgcgtcaagtacttgggcccattctctggcgagcccccgtcctacctcactggcgagttcccaggtgactacggctgggacactgctgggctttcggccgacccagaa

SEQ ID NO: 186850 - DNA, 284 bp, Glycine max
ctcgagccgcgggtcactacgtgatttattgggaattgttgaccaaggactcgacgaactcacccagtcacgaggtgttgaatcggtgttgtttggagatggaggagtgcttgaactcggtgtatagacaatgtcgtgttgctgatcattccattggcccattggaaattcgtgttgtgaggaatgggacctttgaggagcttatggattatgcaatctcaagaggtgcgtccataaatcaatataaggtgccaagatgtgtgaatttcacacccataatggag

SEQ ID NO: 186851 - DNA, 286 bp, Glycine max
gtctatttcaaagatttccttcagatttgttgacacagctgaagacagattgtctcgtcctgcacaatcatcgtaatgccatatccccacgcaagcttcaatataataccaagttatctgacttttttgagattctggcaacatctgaggatagagatggaaagactttcgtttccacagcacgtggtaggaaatatcccgtgactgtcaacctatggcaaccagagaaaaatgcttttgaatgggctacatctttgaaagcccctcacacagaggatgcaattcg

SEQ ID NO: 186852 - DNA, 288 bp, Glycine max
caatgctcaaggaggtgtggcaagacccagtaccacaagccctgcatgtttttctgtcagaagtgttgtaggaagtgcctatgtgtgccaccggggtattatgggaacaaagcagtgtgcgcttgctacaacaactggaagaccaaggaaggaggacccaaatgcccttaataaccttatgctatgttcttcatcaaattaacaaagatataatatagctttaatttattatatccatatcatataattttcatggtcctttctatgtcttaattaaccagaaaatgt

SEQ ID NO: 186853 - DNA, 293 bp, Glycine max
ccacccatatccccaaaacctgcctctgtcatctgtgagagtggctcataccatatcatatcacatcttatccagacaaaacaactgttatggataggtatcagagggtagagaagcccaaggcagagagccctataaacgagaacgagatacgcgttacttctcaaggaaggacgaggaattacatcacctacgccaccactctccttcaggagaaaggatctagtgaaattgttctcaaagcaatgggacgtgcaataaataagactgtaatgattgctgaactgatcaag

SEQ ID NO: 186854 - DNA, 283 bp, Glycine max
cttcttcttcttcgagaagccgatggagttacgatactctcaagaatttccgtgagatctctccgctggttcagaatcacatcaaacgggtttattttacgttatgttgcgctgtggtagctgctgctgttagatcttttcttcatgttctgtggaacattgggggtttgctcaccacgttggcttccattggaagcatggtatggttgctatctacaccccctgttgaagagcatgagaggttgtctctgttgatggcttcggcctggtttcagggctcttc

SEQ ID NO: 186855 - DNA, 285 bp, Glycine max
tgttgatgaggctgctggtaaactgagagctaaaggaatcgaagtattggcggttgtttgccacgtttcaaatgcccaacaaaggataaatttgatagacaaaactttacaggatgcagctcctcacttgaagaagggttcttctgttgttctcattgcctcacttgttgcttataatccaccacctactatggctatgtatggagtgaccaaaacagcagttcttggacttaccaaagctatggctagtgaaatgggccctaatactcgggtgaattgtgttgt

SEQ ID NO: 186856 - DNA, 282 bp, Glycine max
gaccgttgttagcattccatgtggtccttctgcattagctgtcaaggaagcagcatggggacttgcacgttatgctgctatctctcaggacaatggtcttgtgccaatcgttgagcctgaaattcttcttgatggagaccacccaattgagaggacgctggaagtggctgataaggtctggtcagaagtctttttctatttggctgaaaacaatgtcctttttgagggaattttgctcaaacctagcatggttacacctggggctgaacacaaggaaaaggc

SEQ ID NO: 186857 - DNA, 283 bp, Glycine max
  unsure (1)..(283): unsure at all n locations
tgcccgtgtaactgatgggatttatgaaggcattgctattggaggagatgttttccctggttccacactttctgatcattggtntacggtttaacaacatgccacaggttaaaatgatggtagtacttggggaactttgtgggcgtgatgagtattccttagtggaggccttaaaacaaggaaaggtatccaaaccggttgttgcctgggtcagtggcacatgtgcacgactcttcaaatctgaagtacaatttggtcatgcaggagccagaagtggtggtga

SEQ ID NO: 186858 - DNA, 280 bp, Glycine max
gcaaaagctcgtggaattgctagcaatggcgaggatcaaggtttacgagctgaggcagaagacgaaggctgatctgctgaatcaactgaaggacctgaaggcggacttgccttgcttcgtgttgctaaggtcaccggtggtgcccctaacaagctttccaagataaaggtggtgaggttgaacattgcccaggttttgacggtgatttctcagaagcagaaggctgcgttgagggatgcctacaagaataagaagtacttgcctctcgatctccgcccta

SEQ ID NO: 186859 - DNA, 204 bp, Glycine max
ctatttctcagtctctgtgtttgctgcttaggattccgaacgagtgaccttcttcgtttctcgcaaagtttaagtaatcatgggtaaggaaaaggttcacatcaacattgtcgtcattggacatgtcgactcttggaagtcaactaccactggtcacttgatctacaagcttggaggtattggcaagcgtgtgattgagaggtt

SEQ ID NO: 186860 - DNA, 290 bp, Glycine max
  unsure (1)..(290): unsure at all n locations
aagcaaatggcttcctcaatgatctcttccccagctgttaccactgtcaaccntgccggtgccggcatggttgctccattcactggcctcaagtccatgngctggcttccccaccaggaagaccaacaatgacattacctccattgctagcaacggtggaagagtgcaatgcatgcaggtgtggccaaccagttggcaagaaggaagtttgagactctttnctaacctgnccagaccttgatgatgcacaattggcnaaagnaantagaataccttctaaggaagggnng

SEQ ID NO: 186861 - DNA, 278 bp, Glycine max
gggttcacaaaattgtatggataggaagcactatgttctggtgcatggggcatgccatggagcttggtgttggtataagctcaagccacgcttggaatctgcaggccataaggtcacagtacttgaccttgcagcttctggaaccaacatgaagaaaattgaagatgttgatactttctcagagtattctgcgcctttgttgcagctaatggccacaattccctcaaatgagaagttagttctagttggtcacagccttggagggctgaacatagcac

SEQ ID NO: 186862 - DNA, 278 bp, Glycine max
tctaggtctaggtcaagatctaggtcgaggtctaggcctagacaaaggccaagatcccgttctagaagtcatggcaggtcaagatcaccaattcatggaaggtcaaggtcacccattcatggaatgtccgagccttcaaatcctggtgacacactttatgtaaccggtctatcttcaagggtcactgaaagagacctagaggagcatttctccaaggaaggaaaggtttcttcatgttttcttgtggtggagccccgtacacggatttctcgtggttt

SEQ ID NO: 186863 - DNA, 275 bp, Glycine max
gtcacccaacacatccaggtcatggatgttccactgccacgggataaattggctttagatttgattaataatgagccctcccctgcaaacacgagcaaaagcaagatatatgtaattctggtggcaactggaagctttaatccacctactttcatgcatttacgcatgtttgagcttgcaagagatgcattgaattcagatggctactgcgtaattggaggttacttgtctcctgtgaatgatgcatacaagaaaaagggcctaatatctgctga

SEQ ID NO: 186864 - DNA, 276 bp, Glycine max
gcggtacccttgctctccaagaggatcgtgaagaagcgcgtcaagaagtttatacgcccccagagtgatcgcaagatctccgtcaagccaagctggcgcagacccaagggtattgattctcgtgtcaggagaaagttcaaaggatgcactttgatgcccaacattggttatggctcagacaagaaaacccgccattatctaccaaatggtttcaagaaatttgtcgtgcacaatgtgaaagacctggaacttctcatgatgcataacaggacatac

SEQ ID NO: 186865 - DNA, 248 bp, Glycine max
atggaacaatgtaggcaagggaagtcggcaaaatggatccgtaacctcgggaaaaggattggctctgagggctgggcacgggggtcccagtcacgaacccgtcggctgtcggtggactgctcgagctgcgtccgcggcgagagcgggtcgtcgcgtgccggtcgagggacggattgggaacggcgcttcggagctcttcccgggcgtcgacagtcactcagactggtacgacaaggggatcgactgtt

SEQ ID NO: 186866 - DNA, 276 bp, Glycine max
gtttgatcctggctcagaaggaacgctagctatatgcttaacacatgcaagtcgaacgttgttttcggggagctgggcataaggaaaagaggctcctagcgtgaaggttgcttgtctcgcccatgaggtgggaacagttgaaaacaaagtggcgaacgggtgcgtaatgcgtgggaatctgccgaacagttcgggccaaatcctgaagaaagcgaaaaagcgctgtttgatgagcctgcgtagtattaggtagttggtcaggtaaaggctgaccaa

SEQ ID NO: 186867 - DNA, 275 bp, Glycine max
agaactaagaagaaggaaatggcttcctcaatgatctcctccccagctgttaccaccgtcaaccgtgccggtgccggcatggttgctccattcaccggcctcaaatccatggctggcttccccacgaggaagaccaacaatgacattacctccattgctagcaacggtggaagagtacaatgcatacaggtgtggccaccaatcggcaagaagaagttcgagactctttcctacttgccagacctcgatgatgcccaattggcaaaggaagtcga

SEQ ID NO: 186868 - DNA, 265 bp, Glycine max
cgccggagcctccaaaacctaccctcagcaagccggtaccatccgcaagaacggctacatcgtcatcaaaggccgcccctgcatagttgtggaagtttcgacttccaaaactggaaagcacggtcacgctaagtgtcactttgttggaattgatattttcactgccaagaaacttgaggatattgtgccctcttctcacaactgcgatgttcctcatgtgaatcgtactgattaccagctcattgatatcgctgaggatggattt

SEQ ID NO: 186869 - DNA, 274 bp, Glycine max
atgccattgtcaaggaagcaatgaggctgccctcagtggcaccaatgttggttccaagactagccagagaggactgcaatcttggagggtatgacatccccaaagggacacaagtgcttgtgaatgtgtggactattgggagagaccttcaatttgggacaaccctaatgagttccaaccagagaggtttcttaataaggagattgatgtgaagggggcatgactatgagctattgccatttggtgctgggagaaggatgtgcccggggtaccc

SEQ ID NO: 186870 - DNA, 275 bp, Glycine max
gttgcagcttcagcagcagcggcaagcaactccatccgcaatgggaatcgatttgaaggcaggaggtaagtccaagaagaccaaacgtacagcccccaaatccaatgatatttacctcaagctcctcgtcaagctgtaccgttttcttgttcggaggactggtagtaacttcaatgccgtcatcctcaaacgccttttcatggagcaaggtcaacaagcccccgctatccctctctagattgattcgttacaccaagggaaaggaggataagata

SEQ ID NO: 186871 - DNA, 270 bp, Glycine max
acccgaaccgcttccaaacctccgaaatccactctcaaattcctctgtagctacggcggcaaaattctccttcgttaccccgatggcaagctccgttacctcggcggccatacctgcgtcctcgccgtcgatcgctccattccattctccgagctattgctgaagctagaggagctctgcggtgcctctgtgaggcacctccgctgccaattaccttctgaagacctcgacgctcttgtctccatcacctccgacgaggatctcacaaaa

SEQ ID NO: 186872 - DNA, 274 bp, Glycine max
  unsure (1)..(274): unsure at all n locations
agaacacgatgttgcttgaacttgcacttggtttattggttttggctctgtttctgcacttgcgtcccacacccactgcaagcacanaagcacttcgccatctcccaaacccaccaagcccaaagcctcgtcttcccttcataggacaccttcatctcttaaaagacaaacttctccactacgcactcatcgacctctccaaaaaacatggtcccttattctctctctactttggctccatgccaaccgttgtcacctccacaccagaattgtt

SEQ ID NO: 186873 - DNA, 278 bp, Glycine max
gtttgaaatccctcaagggatccactaactgaaggagcaatggggttgacatttaccaagctttttagccggcttttcgccaagaaggaaatgcgaattctaatggttggtcttgatgccgctggtaagaccaccatcctgtacaagctcaaacttggagagatcgttaccacaattcccaccattgggttcaacgtggagactgtggaatacaagaacattagtttcactgtctgggatgttggtggccaggacaagattcgtcccttgtggaggca

SEQ ID NO: 186874 - DNA, 277 bp, Glycine max
gtgccgtttgtgttgttttcgggacgaagaagaagatggtgtcaggttctggaatctgcgcaaagcgggtggtggtggacgcgcgccaccacatgctgggtcgtctagcctccatcgtggcgaaggagcttctgaacggccagaaagtggtggtcgttcgctgtgaagagatttgcatctcgggcgggctggtgaggcagaagatgaaatacttgaggttccttcgcaaacgcatgaacaccaaaccctcccatggccccatccacttccgtgcccc

SEQ ID NO: 186875 - DNA, 279 bp, Glycine max
taagaaagagaaacgattgtctaatgtgaaggcttgggaagaaagtgaaaaagaaagcagaatatggtgaaaaaaatgaaaaacaaaatagccttagttcacaagcaagcagaggagaagagagcaatggttgaagccaagcgtggtgaagaaattctcaaggcagaggaaatagctgcaaaacaccgtgcaactggaacctctccaaagaaggcctttggatgcttttaaatttttattcctttttttgttgttgtgcttttgtgcctgatgtcatag

SEQ ID NO: 186876 - DNA, 262 bp, Glycine max
ttatcgtcttcttttgttgtttgtgtgtttgtttgttctctcacctgaaaatgtcttgctgcgttaggtactgtggttgcggaacgcctgcagtcgcggcaacttctgcggaggctgcaagatgtacccagacctgagctacaccgagtcaaccatcacgcgagacttggtcatgggagtggcaccagttaaggctcaattcgagagtgctgaaatgggtgttcccgctgagaacgatggctgcaaatgtgaagctaactgc

SEQ ID NO: 186877 - DNA, 270 bp, Glycine max
cggaactctagcttgggcagcgaatcacaatggcgagaggattgaagaagcatttgaagaggcttaatgtcccaaagcattggatgcttgacaaactgggtggtgcatgtgctcctaagccctcatctggaccacacaaatccagggattgcctgccactcatactcattttgcgaaaccggctgaagtatgctctgacataccgtgaagtcattgctattctgatgcagcgacatgtccttgttgatggcaaagtcaggacagacaaga

SEQ ID NO: 186878 - DNA, 276 bp, Glycine max
  unsure (1)..(276): unsure at all n locations
agctttgcttcgaaagtgacacaccaatggtttctgttgagataggacatggaagcattctcatcaggcatcctagctctatagctcgtgatgaagagtctgaggctagctctctctcagttgataataaacaatgcctaatgaatgaagcatattcatcttctagtaccattcctatatatagtgatcgcagtagcatgaacttctcatctcacggagttgaaaatatcanaaactcagctggccaaatcatgcaacaagagaagcttgaaaggg

SEQ ID NO: 186879 - DNA, 277 bp, Glycine max
agagcatgctcctacataccccggtatcgaacatgtaggaggagatatgtttgagagtgttcccaacggagacgccatttttatgaagtggatacttcacgattggagtgatgaacaatgcttgaagttgttgaagaattgtcataaagctattcctagtgatggaaaagtgattgttgtggacttaattcttcccattttgcccgagagcacagttactgctaagagtggtttccaagctgacctcttaatgatgactcaaaactcaggaggaaaa

SEQ ID NO: 186880 - DNA, 275 bp, Glycine max
tgaaaagaccatcaaagtttcacttcagccttatccggtttagggtttcggtttttgacccaacctttgacgtatcgaaaccttaagtttcggatcaggtctgagcaatctggttggtagaacctttggtcttagagagtcaagttttatgtctgaattagacgatcaaattcctactgccttcgatccttttgctgatgcaaatgctgatgactcgggtgctgggtcaaaggagtatgtgcatattcgcgtacagcagcgaaatggaaggaaaa

SEQ ID NO: 186881 - DNA, 270 bp, Glycine max
caacaacttcaccttcttcctcctcgatcatgtctcacttcaagggcaagtaccatgatgagcttatcgccaatgctgcgtacattggcactcctggaaagggtattcttgctgctgatgagtcaacagggacaattggcaagcgtttggccagcatcagtgtagagaacattgaatccaacaggcgagctcttagggagctgcttttcactgctcctggtgttcttcaatatctcagtggtgtcatcctctttgaggaaaccctctacc

SEQ ID NO: 186882 - DNA, 276 bp, Glycine max
taagcttctttcttcttatatatcgaacatggctaagtatcattcaagtgggaaaagctcttccatgactgctatagccctcctgtttatccttctaatcacttatacaggcacaacagatgcacaatccggggtatgttatggaagacttggcaacaacttaccaacccctcaagaagttgtggccctctacaatcaagccaacattcgcaggatgcgaatctacggtccaagcccagaagtcctcgaagcactaagaggttccaacattgagct

SEQ ID NO: 186883 - DNA, 277 bp, Glycine max
tgcagcttcagcagcagcggcaagcaactccatcagcaatgggaatcgatttgaaggcaggaggtaagtccaagaagaccaaacgtacagcccccaaatccaatgatatttacctcaagctcctcgtcaagctgtaccgttttcttgttcggaggactggtagtaacttcaatgccgtcatcctcaaacgccttttcatgagcaaggtcaacaagcccccgctatccctctctagattgattcgttacaccaagggaaaggaggataagatagctgt

SEQ ID NO: 186884 - DNA, 269 bp, Glycine max
gattgccttcaaatcacacactctcttcaatttctagggttttgctattgctttgcctccgttccccctttctcaccaaaacaacgccttttctcttctccttcgtatctattctttgcatttagttttaggttgattgaaggcattcacagcgtaatttgttgctgcattttaatcgatttatctaaccaggactgaatgacctaatggagtctaaaggtgggaaaaagaagtctagtagtagtagtagtaaatcaattttttacgaa

SEQ ID NO: 186885 - DNA, 276 bp, Glycine max
cggatatctcggctcttgcatcgatgaagaacgtagcgaaatgcgatacttggtgtgaattgcagaatcccgtgaaccatcgagtctttgaacgcaagttgcgcccgaagccattaggccgagggcacgcctgcctgggtgtcacacatcgtttcaaaaaaaaaaaaaaaaaaaaaaaaaaaaaaaaaaaaaaaaggggggcccccaaaataaggccccccccccccgggaatttattcggggggggttacctggggggcacactttttcccaaaa

SEQ ID NO: 186886 - DNA, 289 bp, Glycine max
gctgcgctacgcgaagggggtgactatatgttcaatctaccatctctctctctcgttcttagtgcctccttgccagaagttaaaatggcccaagaaactttcctattcacatctgaatcagtgaacgaggggcacccgaacaagctctgtgaccagatctccgatgctgtgctcgatgcatgcttggagcaggaccctgacagcaaggttgcctgtgaaacctgcaccaagaccaacatggtgatggttttcggagagatcacaaccaaggccaacgtggactatgaga

SEQ ID NO: 186887 - DNA, 274 bp, Glycine max
cttttaattcatctcactcacaaatcacaatgctcttcctttcttccttaataataataccataataatctgttacgttacggggcccaaatgtctgttacggagctcaaggagcgtcactctgctgccaccgacaccgtcaacaatctcagacaccgtttaaagcagaagcgcctttcgttgctcgacacagatatttctggccatgcaaggtctcagggtagaacgcctgtgacctttggacccacggatctggtttgctgtagaaccttgc

SEQ ID NO: 186888 - DNA, 274 bp, Glycine max
tgcaggcctaagtattcccaaagacttgtcgagtgaggaagctaatcaatatttgaaggacgtgtgcttgaagtatgagatcaaatgtcctccccctgagacaactgctcgtttgttggataaacttgttggtcactttttggaagagacatgtgtaaatcctacattcataataaaccaccctgagatcatgagtcctttagcaaagtggcacagatcaaaacctggcctgactgaacgttttgaattgtttgttaataaacatgaactttgc

SEQ ID NO: 186889 - DNA, 270 bp, Glycine max
tgttcgatcttttgaaggattctgataaaggggtcatcacttttgagagcctcaagaggaattcttacttgcttggtcttcagggtctcagtgatgaggatcttcgctccatggttttggaaggtgactttgatggtgacggtgcactcaaccagatggagttctgtgtcttgatgttcagactcagccctgaattgatggagggctcaaagatgtggcttgaacaagtccttcaacaagagcttaaagattatttctaattcttgtaat

SEQ ID NO: 186890 - DNA, 279 bp, Glycine max
ggctcgagcaaaaacctgcatgaaatcatcttcaatcataattaacaccatccaagaattggaaagtgaagttctcaatgctcttatggctcaataaccaaatatatataacattggtccacttcaattgttaggaatgcattttgctgataaagacaagggcttcaaggtgagtgggtcaaatctttggaaaaatgactcaaaatgtatccaatggctagaccaatgggaaccttcctcagtcatatatgtgaattatggaagtattactgtgatgtc

SEQ ID NO: 186891 - DNA, 275 bp, Glycine max
tgttgttgagatctgaatcaaaatcagaaacgataatggctacaccggaccacctcttcaacctccgcaacaacttctacctcggcgcttaccaagccgccatcaacagcagcgacgttgccaacctctcccaagaagataccctcgagcgcgacaccctcgtccaccgctgctacatcgccctcggccagctccagttcgtcatctccgagatccacgacgatgctcccacaccactccaagccgtcaaactcctcgccctctatttctcctct

SEQ ID NO: 186892 - DNA, 290 bp, Glycine max
gctcgaaattcggctccaggtgtatgtcgctacctctcccatcaagatgcagatcttcgtcaagaccctcaacggcaagagcatcaccctatcaagtggatagctctgacaccatcgacaacgtcaaggccaagatccaggacaaggaaggaatccccccggaccagcaacgtctcattttcgccggaaagcaacttgaggacggccgtacccttgctgactacaacattcagaaggagagtactcttcacctcgtcctccgtctccgtggtggcatgcagatcttcgtt

SEQ ID NO: 186893 - DNA, 269 bp, Glycine max
cttagaaagttgaagctttttttgttgaggtgaaagtgaaatggttggcaaggataatctgagggctgaggacttgaacttgtgctttaagaagcttatgatggtggccgggagtgggaacagtgagaaaggggtgaacttgaaggttggggtgatcaccgagtggaaggatattcctgtggagcttctgatgcaaattctgtcccttgtggatgatcagacggtgatcatagcttctggagtttgtcgtggatggagagatgctattt

SEQ ID NO: 186894 - DNA, 272 bp, Glycine max
actcgagccgattcggctcgaggagagaagaagaaacttaatcgactcatcattcacttcactaatacatcatggcagaagagacccagaacaagtatgagagctctgaggttgaggtccaggatcgtggtgtttttgactttctcggtaagaaaaaggatgaagaagacaagcctcatcctcaggaggaggtcatcgccaccgagtttcaaaaagtcactgtctcagaccaaggagagaacaagcacagcctcttagaaaagcttcaccga

SEQ ID NO: 186895 - DNA, 264 bp, Glycine max
gtggtattggtactgtgccagtgggacgtgtagagactggggttgtgaagcctggtatggtggtgacttttggtcccactgggctgacaactgaggttaagtctgttgagatgcaccatgaggctctcacagaggctcttccaggtgacaatgttggatttaatgtgaagaatgttgcagtcaaggatctcaagcgtggttttgttgtctccaactccaaggacgaccctgccaaggaagctgccaacttcacatcccaagtca

SEQ ID NO: 186896 - DNA, 267 bp, Glycine max
gtgaatataataagatggcgatcgtaccaggacagctcatatgggaggtcgtaaagaagaacaactctttcttggtgaaagagttcggaaggagcactcagagcgtgcagttcagcagagagcccaacaatctctacaacctcaacacattcaagtactccggtttggcgaacaagaaaactgtcactgttcaacctgcgggtaaagaccagtctgtgttgctggcaacaaccaagacaaagaagcaaaacaagcctgctgctttgc

SEQ ID NO: 186897 - DNA, 268 bp, Glycine max
aaggatgtgtttgaaaggattgttcacacctccttcccttcattgagattcaaagtttatgtgtttagggaaagtcttgttgacaatctcatatctccttcaattagggaggcacttgacaaccctcttaactatgcaagaagttaccttcctgatttgcttgatcaatgcattgaaagggtcatatacttggactctgatgttatagttgttgatgatgttcaagagctttggaaggtttcattgacagggtcaagagtcattggtg

SEQ ID NO: 186898 - DNA, 267 bp, Glycine max
cggtttctgtgggtggtgaagagcccaaacgaagaaatagccaacgcgacgtacttcagcgccgagagccaagcggatcccttgcagttcttaccggaagggttcgtggagagaacaaaaggaagagggtttttggttcagtcttgggctccgcagcctcaggtattgggccatccatccacgggtgggttcttgacccactgcggctggaactctattctggagagcgtggtgaacggtgtgcctttcatagcctggcctctgttc

SEQ ID NO: 186899 - DNA, 262 bp, Glycine max
  unsure (1)..(262): unsure at all n locations
tgtcgaacttccctgaggcttctcttgtctgtcgcgagtgaacatggtgaaggttagtgtgctgaacgatgctctgaagagncatgtaaatgctgagaaaaggggaaagccgcaagtcatgattcggccatcctccaaagtcattatcaaattccttttggtgatgcagaagcacggatacattggagagtttgagtatgttgatgaccacagggctggtaaaatcgtggttgaattgaacggtagactgaacaagtgtggg

SEQ ID NO: 186900 - DNA, 253 bp, Glycine max
acttgcatcaatgatcaaaggaatgggtcagtaaacttgcttcaaagggaatgtaaaacctgatagtggagaatctgagaaggattgctctgcggaggataaactgaactcaacatggagggaagctttcatgaaggcatacaaggctatggacaaagagctcaggtctcatccgaatctggattgcttctgtagtgggagcactgctgtgactatagtgaagcagggttcaaatctgttcatgggctatatc

SEQ ID NO: 186901 - DNA, 265 bp, Glycine max
caggcggtggagccggagcttgaggatgaggacgtggaggggtatgttccggaggcgatgttcgacgaggcggacactggaaggaagaggaagaaggggaaggagggtgggagtgggaagaaggagaagaggatgaagggggagaagagttttgggagcagcggtgggaagagtgggtccaaatttgggagtggaaagaaagggtttggtgggaaggcagggaaggatcatgatggtgaagttaaggagatgtgggatacaattg

SEQ ID NO: 186902 - DNA, 265 bp, Glycine max
ctttaccaactcctaacaatttctctctgtttccttcttcaccgcatcaatggagttggacggcgttctcctcggcatgtgcaaccctctcctcgacatctctgccgtcgtcgacgacgctttcttgcaaaaatacggtatcaagttgaacgatgcgattctcgctgaggataagcacaaacctatgtatgaagaattggctaacaatcctaatgtggagtacattgctggaggtgctactcagaattcaatcagggttgctcag

SEQ ID NO: 186903 - DNA, 249 bp, Glycine max
gggagagggcttgtttggctcctaattctgcacccgctgatgagttggttattccgtttaactcctccggcgagtggttcagacagaccttcacctcgtggcagaaaggtgacgtcttgggaaatgggtccttcggaactgtctatgaaggcttcactgatgatggattcttttttgcggtaaaggaggtgtctttgctggatgaaggtagccagggaaagcagagttttttccaacttcagcaggaaa

SEQ ID NO: 186904 - DNA, 247 bp, Glycine max
aaaccctaatttctcgctaggtagggttttgcagagcctcgtcctcctctcacggtttcttcttgttatcttctcacctttcttcttccaatgctctaatctaatatgggcaagtcaagcaagaaatcagctctcaaggcgacgctgttccagctgtggttccgccatccaagtctgccaagaagggaggcaagagacaagctcaagatgaaattgagaagcaattgagtgccaaaaaacagaagat

SEQ ID NO: 186905 - DNA, 244 bp, Glycine max
aagaagaaaatccagcgaaagtaaaaccagcatccgaaaaagatgagcagcatcggaacaggttacgatctctccgtcaccactttctcccccgatggccgtgttttccagatcgagtatgctgccaaagccgtcgataacagcgggactgttattgggatcaagtgcaaagatggggttgtgttgggcgttgagaagcttattccgtcgaaaatgatgcttccgggttccaatagaagaatac

SEQ ID NO: 186906 - DNA, 244 bp, Glycine max
ggacactgctgggctttcggccgacccagaaaccttcgccagaaaccgtgagctcgaagtgatccactccaggtgggccatgctcggggccttgggctgcgtcttccccgaactattgtcccgcaacggggtcaagtttggagaagctgtgtggttcaaggccgggtcccagatcttcagcgagggtgggctggactacttgggcaacccaagccttgtccacgcccagagcatcctcgccatc

SEQ ID NO: 186907 - DNA, 218 bp, Glycine max
aatcgaccgattcggctcaggcgaaaatgccttcccacaagacgctcatataccaagaagcagctcgcgaagaagatgacgcagaacagacccatcccttattggatccgcatgagaaccgacaacactatcaggttccgctaccctaatttttgttatagctcgttctacaaacttctaccaaacgctgcgttttgcaaattttgcctctgcctcat

SEQ ID NO: 186908 - DNA, 245 bp, Glycine max
gtttgttttttctctcacctgaaaatgtcttgctgcggtggtaactgtggttgcggaagctcctgcaagtgcggcaacggctgcggaggctgcaagatgtacccagacttgagctacactgagtcaaccaccaccgagacttggtcatgggagtggcacctgttaaggctcaatttgagggtgctgaaatgggtgtgcccgctgagaacgatggctgcaaatgtggaccaaactgctcctgcaac

SEQ ID NO: 186909 - DNA, 247 bp, Glycine max
tgcggctctaatcaccggattctccctcgcgatggcttctcttccggcggctttgtagtcgtagctgcagtcgtggcggtcggagtaccggtgctcggcgcagaagagctcgccgcatcggcaccgaaatccggtgagtcgaccttcctcctgcagccggagcagcggttcaccacgcgcttcgcctccgacggggtcgtctggtctgaagacggaggatccgccggcagcgagggctcctcgggaa

SEQ ID NO: 186910 - DNA, 246 bp, Glycine max
gttagatctgtacctgcctagccattgatttggaaaagtccaagcttcaaagatgagtaagcttcagagtgatgctcttagagaagctatctcaggaatcatgactgattccaaggaaaagaacaggaaatttgtggagaccattgaactccaaattgggctgaaaaactatgatccccagaaggacaagcgttttagtggctctgttaagttgcctcacattcctcgccccaagatgaagatttg

SEQ ID NO: 186911 - DNA, 245 bp, Glycine max
atttgtcaccaaacaattgttgttagctctcacaagcaagcttcagcaacgacaatgaagaaagtagtcttacagttggacttacatggtgatagaatcaagcaaaaagctatgaaaacagcatctggcctttcaggggtgaatcagtttctgttgatatgaaagacatgaaaatgatcgtgttgggggacattgatccagtgagtgcagtgtccaagctacgaaagtgttgtcacactgaaata

SEQ ID NO: 186912 - DNA, 242 bp, Glycine max
gcttcaagtcaggaggaggtgacccttttgggagctactggaagcccatttgtgtgcagggttcatattgccctcaagttgaagggagttcaatacaaatatgtcgaagaaaatttgaggaacaagagtgaactgcttctcaaatccaacccagttcacaagaaggttccagtgtttattcacaatgagaagcccatagcagagtctcttgtgattgttgaatacattgatgagacatggaa

SEQ ID NO: 186913 - DNA, 244 bp, Glycine max
gcttctactctctcccaagaaagaatcatcaatggcgattgaacacgaagacgatctcaaagacgagaagaaccctcgacctctcgacgaggatgacatcgccctcctcaagacctacggtttgggaccttactccaaagcataaaaaaggcggagaaggaaatcaaagatatggccaagaaagtgaatgacttatgtggtataaaggagtctgatactggtttagctgcaccaagccagtggg

SEQ ID NO: 186914 - DNA, 246 bp, Glycine max
gcgactgcagagcagttctctgtcgcaaaggagaggccattgacatgtctcaagatcacaggcctatttatccatcagagaggaggcgagttgaagaattgggtggctacatagaagatggttatctcaatggggtttatcagttactcgagcactgggggactgggacatgaagttacctaagggtgctccctcacctttgattgcagagccggagttccggcaagtggctctaacagatgatga

SEQ ID NO: 186915 - DNA, 244 bp, Glycine max
  unsure (1)..(244): unsure at all n locations
ctcgcttcttcctttttgggttctattgctgnnattgggagttcttgaccgctctcctcctttttagttcttccccttaatcttctttcttcacaatttttatttccttccttattagacgtattagatcagattgaacaaaagggtttttctttccttnctntcttggggaataatagaaataagaaaagattagtgaggtnnaaatgtcgcaacgatcggtgccggcgccgttcttgacgaa

SEQ ID NO: 186916 - DNA, 241 bp, Glycine max
gctccctgagagagctcgtcgcggcggttgcagaagaagattgcaagatgaagttcaacatcgcgaatcccaccactggatgccagaagaagctcgagatcgacgacgatctgaaactgcgagcattttgggacaaaggatctcacaggaggtcatcggagatgcactcggtgaggaatttaagggctatgtcttcaaaattaccggaggttgtgacaaacaaggatttccaatgaagcag

SEQ ID NO: 186917 - DNA, 238 bp, Glycine max
gaagaaaaagaagcgaaactaaagtcagcattcgaaaaagatgagtagcatcggtacaggttacgatctatcggtcaccactttctcccctgatggccgcgttttccagatcgagtatgccgctaaagccgtcgcaacagcgggactgttattgggatcaagtgcaaagatggggttgtgttgggcgttgagaagcttattccgtcgaaaatgatgcttccgggttccaatagaagaa

SEQ ID NO: 186918 - DNA, 241 bp, Glycine max
atttaccctctgcagaatgtgtttgttcgtaaagtcaagatcctgaaagctcctaagtttgatcttgggaaactgatggaggttcatggagattactccgaggatgttggtgcaaaggtagacagacctgctgatgaaatagtggcagaggaacccactgaaattgttggagcttgatttagtgataatgcatattcaaattgttctaggttttctgtttcttatgttatcattgaaaatt

SEQ ID NO: 186919 - DNA, 241 bp, Glycine max
ctactactcacactcactgcagatctcaatccatggctaccattgttagcatcaaggcccgccagatctttgacagtcgtggcaatccaaccgtcgaggtggatttgacatgctccgatggtacttttgctagagcgctgttccaagtggtgcatccactgggatttatgaggcccttgaattgagagatggaggatctgactaccttggaaagggtgtatcaaaggctgttgacaatgtg

SEQ ID NO: 186920 - DNA, 264 bp, Glycine max
tcggaattaggttcgaaggcaggagaaccccattattgagatatggccttcctatgatctctctcactgtccttggttctataggccttgcccaactcttgcaaggcagcaaggatattgcaaaggtgaaagatgatcaggagtgggaaataattgaaacaaaaaaagcattgtctaagactggaccagtgaatgcatacaatccaaaaaagatttccttggaggatgagctaaaggctttgcaacaaaaggtggacattaaca

SEQ ID NO: 186921 - DNA, 240 bp, Glycine max
gcgaaagaacaacagcaacaacaatcagtgctcctcaagcaaggaagacgctgacatgaatagcaaccaccttcggtttgaagaagctgacgaggctgtcgacgagagttccaacctcgaccaatccatgtgcgcatcgaagaatccgatgataaaaccagcgccgactattacttcgattcctactctcattttggaattcacgaagaaatgttgaaggacagtgtgagaaccaagaca

SEQ ID NO: 186922 - DNA, 238 bp, Glycine max
ggaaactctctaccaatccacaactgatggcaggaagattgtcgacgtgctcctcgagcaaaacattgttcccggtattaaagtcgacaagggtttggtaccccttgctggttccaacgacgagtcatggtgccaggtcttgatggtcttgcctctcgctcggctgcatactaccagcaaggtgcccgtttcgccaaatggcgtactgttgtgagcatccccaacggtccctctgctc

SEQ ID NO: 186923 - DNA, 240 bp, Glycine max
ctgagagttaggtccatggctgaggaagagcaaccaagtcagcctgcgaccccagttacaccaccaccagcagaacccaaaccacagccagtctctactccttcaccaaaggtgagcaccaagttttctgatgtttggcgttcagtgggccagcacctgagaggatcaatggaagtttggccatgattgggtttgtgggtgcaatggcagtggaagtagccaaagggcaaggtgtgtttg

SEQ ID NO: 186924 - DNA, 239 bp, Glycine max
cagtgttgagggtttatctcggaggcttttctatcttgctcttccaccttcagtatatccatcagtttgcaagatgatcaagacttgttgcatgaataaatctgatcttggtggatggacacgtgttgttgttgagaaaccttttggtaaggatctagaatctgcagaggaactcagtactgagattggaaagttgtttgaggaaccacagatttatcgtattgatcactacttgggaa

SEQ ID NO: 186925 - DNA, 237 bp, Glycine max
accctactcattctccatacctcaacgaagaggttaaagagacggcaacactttgctgtccgccttgaccgagcagagcttcgtcttggccctcgattttgccctaaagtactctcagtcacaacagacacctcgtcgtcgtcgtcgtcatcaatggcaccgaagcagaccaaggctgagaagaagatcgcttacgatgcgaactgtgcgacctaatggaggagtacggccagatcc

SEQ ID NO: 186926 - DNA, 235 bp, Glycine max
tttcgagccgattcggctcgagcttctctcttcaatcctagcttaactgttatgctctaaaaacctcccttttcaggtttattgggagagaaaatgctcgtattgtttgataaaccgcgggtttgccctttaaagtgctggatgaaggcaagctttctaaagttgaggacttgtggaagaacttttccagtgcagatactgctagacaggtggtcaagttgaaagcattttctaa

SEQ ID NO: 186927 - DNA, 237 bp, Glycine max
ggaggcactgtggcagaagtcctaggagtgtaaaacagagacgcaaaatgaagacgatcttgtcgtctgagaccatgaatattcccgacggcgtgagcatcaaggttcacgctaaggttatcgaggttgagggcctcgtggaaaactcgtgcgagacttccaccatctgaacttggacttccaacttattaccgacgatggcggtaaaaggaagctcaagattgattcttggtttgg

SEQ ID NO: 186928 - DNA, 240 bp, Glycine max
tctcgagccgattcggctcgagggacaagtgatcggtgtccacagactagaggagtggaaggcacatctcaagaagggagaacgagtccaagaaattgattgtggtggattttactgcttcttggtgcggtccagccgtttcattgccccaattcttgcagagtttgctaaaaagttgccgaatgtcaccttcctcaaggtggatgtggatgaattggagactgtttccaaggagtgggg

SEQ ID NO: 186929 - DNA, 238 bp, Glycine max
gttcttcttcgtcgttatcttcttcttttgttgtttgtgtgtttgttttttctctcacctgaaaatgtcttgctgcggtggtaactgtggttgcggaagcgcctgcaagtgcggcaacggctgcggaggctcaagatgtacccagacttgagctacaccgagtcaaccaccaccgagaccttggtcatgggagtggcaccagttaaggctcaattcgagagtgctgaaatgggtgttc

SEQ ID NO: 186930 - DNA, 238 bp, Glycine max
agttccctgtgattgcagtgtctaaggctttaaaaatcttaaggaaaaggggtcactgggttcgtgtaattcaagtagctaagtggatgttaagcaaaggtcaaggagcaacgatgggaacatatgacaccctcttctggcatttgatatggacaagagggtagacgaggcagaatcgttgtggaatatgatcatacatgcccacatgcgctctgtctcaaaaagattgttttctagg

SEQ ID NO: 186931 - DNA, 236 bp, Glycine max
gatcagaaccgttgaatcaagttgaggaagatggcactagtctctggaggaagatcaacactgaaccctaacgcccctctttacattcctgccgcgtttcgccaagtggaggatttctctccggaatggtggcagctggtgacgacgctgacatggtaccatgactactggctaagccagcagcacgatgagggagccttctacggcgaggacgacgggtttgatggcaatgatgt

SEQ ID NO: 186932 - DNA, 237 bp, Glycine max
actcgagccgaatcggctcgaggttttctcaacatactctgacaaacagcctggtgtgcttatccaggtctttgagggtgaaagagcaaggaccagagataacaatttgttgggcaaatttgagctatctggcattcctcctgcacccaggggtgttcctcagattacagtgtgctttgacattgatgccaatggtatcttgaatgtctctgccgaagataaaaccactggccagaa

SEQ ID NO: 186933 - DNA, 235 bp, Glycine max
ctcgagccgcgaatatcttgttgtttggagcgatccgagaaaaactctgtaaacatgttggtttaccaggacctccttacaggtgatgagcttctctctgactccttccgttacaaggaaattgagaatggaatgctgtgggaagttgaggggaagtgggttgttaaaggagcagttgatgtagacattggtgcaaacccttctgctgagggtggaggagaagatgagggagttg

SEQ ID NO: 186934 - DNA, 234 bp, Glycine max
ctcgagccgcgaatatcttgttgtttggagcgatccgagaaaaactctgtaaacatgttggtttaccaggacctccttacaggtgatgagcttctctctgactccttccgttacaaggaaattgagaatgaatgctgtgggaagttgaggggaagtgggttgttaaaggagcagttgatgtagacattggtgcaaacccttctgctgagggtggaggagaagatgagggagttg

SEQ ID NO: 186935 - DNA, 235 bp, Glycine max
ggtgaacctgcttttagtgttctggtttcaagatttcttttgggtgagagctttcctgtgccagtctatctgtctttaattccaatcattggtggatgtgcacttgctgctgtgactgagctcaatttcatatgatcggttttatgggggccatgatatcgaatttggcatttgtattccgtaatatcttttcgaaaaagggcatgaagggaaagtctgttagtggaatgaatta

SEQ ID NO: 186936 - DNA, 235 bp, Glycine max
gtggagataatgggagaaacaaaggacgaagcatacgaggaagagcttctcgattacgaggaggaagacgaaaaggcccccgactccgccggagctaaagtcaacggcgaactaccaagaagggctatgtggaattcacagttcgggattcagggacttccttctgaagccagagcttcttcgggctattgtggactcgggatttgagcatccatctgaagtgcaacatgagtgc

SEQ ID NO: 186937 - DNA, 231 bp, Glycine max
ctaggcactctctattcccattcattgcagaagaagatggaggctcacccctacgtcccacgcgatttgcacttacccggctacgctccctgcttcctttccatgtccaacattctttccgtcttcgcccctcctcattgctcatcgtcactctcgtctggatcttctctggacgctttaagaaaaccaaagttgatagagtgctgatgtgctggtgggccttcacaggtc

SEQ ID NO: 186938 - DNA, 254 bp, Glycine max
ctatgggaaagtcttacccaactgtgagtgctgattaccagaaggccgttgagaaggcgaagaagaagctcagaggcttcatcgctgagaagagatgcgctcctctaatgctccgtttggcatggcactctgctggaacctttgacaagggcacgaagaccggtggacccttcggaaccatcaagcaccctgccgaactggctcacagcgctaacaacggtcttgacatcgctgttaggcttttggtagcactc

SEQ ID NO: 186939 - DNA, 259 bp, Glycine max
tgtatcttcaaaacatactcctctgttctctctgtttctcttcaatcttcctgaaaaaacaaaaacacgaaaaatcatccaccctctcacattctctctctctctccattcaactaatatggcaattgaaaaccaagacaacactgtcagagaaatcaagccaaagaacaggagaatcatgggtgctggaggccctgatgatgacgacaataggtggccaccgtggttgaagccactgctgaaagagagcttctttgtt

SEQ ID NO: 186940 - DNA, 253 bp, Glycine max
tatcgagccgaatcggctcgaggaggcggaaaataatgcagagagatgttgagattgaggtagtgactgttgacagaactggaactttcttgggttccttatgggagtcaaggaccaatatggcaattacactgctcgaagctggtcttgcaaagctgcaaacctcctttggcagtgacagaattcctgattttcatcttctggagcatgtggcaacaatctgccaagaagcaaaagctgagaatttgggaga

SEQ ID NO: 186941 - DNA, 251 bp, Glycine max
gtaaagttcgttgctttctgcttcactgcgaagatgaacggtggtccatctggtttcacaaatgctcccgtcacaagggccttcatcatcgcttcggcgcttttcacaatcttctttgggatccaaggccgtttcggcactctggggttgtcgtatcaggatatttttggaaagattcgcctttggaagttgatcatgtccatattttccttctcgtcaacaccagagttgatgtttggactgtatcttct

SEQ ID NO: 186942 - DNA, 246 bp, Glycine max
ataataagcaagagttatcctcttgcagttactaaggttgaggaatctggggagcacactattttagggactggtgagctgtacttggattcaattatgaaggacctgagagagctctattccgaagtagaagtcaaggtagcagatcctgttgtctcattttgtgaaactgttgttgaatcttcctcaatgaaatgttttgctgaaacaccaaacaagaagaataaaataactatggttgctgag

SEQ ID NO: 186943 - DNA, 251 bp, Glycine max
ataccctaacacctaaaagccagaagaagcgaaatcgtaatcgcaatctagcggatatgaaggtcgtcgctgcatacttgctcgcagtgttgggagggaatccatctccttctgccgatgatatcaaaaacatcctcggcgcagttggagctgaggctgagcatgagttgattgatttgctcttgaccgaagtcaagggcaaagacttcaatgagctacttgctagtggaagtgaaaagatttctgcagtg

SEQ ID NO: 186944 - DNA, 248 bp, Glycine max
ggctcgagcactgccacttttgaaacactcgctatggatcggagaaagaaggaggatatacttagagaccttgtgaagtttaagaagggaaaggattattatgataagataggtaaagcttggaagcgtggctatcttgtgtacggtcctccggggactggtaagtctaccatgattgctgctattgctaatttcatgaactatgatgtgtatgatcttgagttaaccgcggtgaaggacaacactga

SEQ ID NO: 186945 - DNA, 251 bp, Glycine max
agatacactaagttatcctcataaatacactctaattaggtggcaagataagtgtctaaccttagtaacattgccacatattgtgttcattttggaattgtgccactaaaattctattcaattcatctatggctgcctcttcttatgctatgcaatcaatcctggcaaaccctttgatccgcatttccagcgggtctagggtgaaccaatttggcgttcctgctttgcacatgagaaggatgttggctgag

SEQ ID NO: 186946 - DNA, 254 bp, Glycine max
gcccaatcagcaaaccgtcgattaccccagcttcaagcttgtcatcgtcggcgacggtggcacaggaaagacaaccttcgtgaagaggcatctcactggtgaattcgagaagaaatatgaaccgaccattggtgtggaggttcatccgttggattttttcacgaactgtggaaagattcgcttctattgttgggatactgctgggcaagagaagtttggtggcctcagagatggatattatatccatgggcaat

SEQ ID NO: 186947 - DNA, 253 bp, Glycine max
  unsure (1)..(253): unsure at all n locations
ggnatgcacgagtgttccatctgtcacaagagtttccctaccggtcaggccctgggtggccacaagcgctgccactacgacggcgggaacaaccacagtaacagcaacgccaacggaaacaacagcagcngcgccactacctccgacggcggcgctgcctcctcctcccacacgctccgtgggtttgacctgaaccttccggcgccgctgacggagttctggtcgccgatggggtttgatttcgggaagaaga

SEQ ID NO: 186948 - DNA, 250 bp, Glycine max
atacgacggacaaattgttaatgttattgacaccccaggattatttgatttgtctgtcggatctgagtttgttggtaaggaaattgtcaaatgcattgatttggccaaggatgggatccatgctgtcattgtagtgttctcggttagaacacgctttactgaggaagaagaaactgctcttcggagcttgcagacattatttggaagcaaaattgttgattacatgattgtggtcttcactggaggagat

SEQ ID NO: 186949 - DNA, 249 bp, Glycine max
ctcgagccgcgaatatcttgttgtttggagcgatccgagaaaaactctgtaaacatgttggtttaccaggacctccttacaggtgatgagcttctctctgactccttccgttacaaggaaattgagaatggaatgctgtgggaagttgaggggaagtgggttgttaaaggagcagttgatgtagacattggtgcaaacccttctgctgagggtggaggagaagatgagggagttgatgatgcagctgtt

SEQ ID NO: 186950 - DNA, 261 bp, Glycine max
tctcgagccgaatcggctcgagagaccggcgaggtgttaccggcagctaaagaacaaaccgtatccgaaatcccgtttctgccgcggcgtgccggagccgaagatccgaatctacgacgtgggaatgaagaagaaaggcgtggacgagttcccgttctgcgtgcacctggtctcgtgggagaaggagaacgtctccagcgaggctttggaggcggcgcgcatcgcatgcaacaagtacatggccaagttcgccggaaaaga

SEQ ID NO: 186951 - DNA, 262 bp, Glycine max
gctcgtgcctctagggttatcatatctccatttccatttcctctctctcagtttccaagaatcttaagctatgggaaagtcttacccaaccgtgagcgctgattaccagaaggccgttgagaaggcgaagaagaagctcagaggcttcatcgctgagaagagatgcgctcctctaatgctccgtttggcatggcactctgctggaacttacgacgtgagctcgaagaccggtggtcccttcggaaccataaagcacccctcc

SEQ ID NO: 186952 - DNA, 252 bp, Glycine max
caactttattgtctcaactttttttgatcaagttgtgacactatcaacccatccatatggttgccgggtgatacagagagtactggagcattgcaaagaccctaacacccagcaaaaagttatggatgagattttaggagcagttagcatgttagcccaggatcagtatggcaattatgttgtccagcatgtacttgagcatgggaaacctcatgagcgatccgccattatcaaggaattagcaggaaagat

SEQ ID NO: 186953 - DNA, 251 bp, Glycine max
gtgtggtattcttgctgttcttggttgttctgatgactctcgagccaaaagggtccgcgtgcttgagctctctcgcagattgaagcaccgtggccctgactggagtgggctccatcaacatggtgactgctttttggcacatcaacggttagccatagttgatcctgcttctggggatcaacctctctttaacgaggacaaatccgtcattgttacggtaaatggagagatttacaaccatgaagagctca

SEQ ID NO: 186954 - DNA, 250 bp, Glycine max
aagttctggaaaacttctgaagtatggttcgcttgttattgctacaggatgtacggcatcaaggtttccagagaaaattgggggaaacctacctggtgttcactatattcgggatgttggagatgccgatgcactaattttatcgttggagaaagcaaaaaaggttgtagttgttggaggtggttatatacgaatggaggttgctgcagctgctgttggttggaaacttgatacaacaatcatattccca

SEQ ID NO: 186955 - DNA, 179 bp, Glycine max
aactactggaacttgctcgttcattccatccacctccgtggaaacataagtgtctaacctcagtcagcttcacacgtgtgatatgcgtcctgaaattgggccactagcatactattcaattcgtctatggctgcatcttcttatgctatgcaatcaatcatggaaaacccttgatccga

SEQ ID NO: 186956 - DNA, 237 bp, Glycine max
cggctagagcgcagcgtagcaaaagctcgtggaattgctagcaatggcgaggatcaaggtttacgagctgaggcagaagacgaaggctgatctgctgaatcaactgaaggacctgaaggcggacttgccttgcttcgtgttgctaaggtcaccggtggtgcccctaacaagctttccaagataaaggtggtgaggttgaacattgcccaggttttgacggtgatttctcagaagcag

SEQ ID NO: 186957 - DNA, 253 bp, Glycine max
gcagtttccggtgcatctcatcgtctccgaaaatgaacgacgcagatgtctcgaagcaaatccagcagatggtgcggttcatccgccaggaagctgaggaaaaggccaacgagatctctgtctccgccgaagaggaattcaatatcgagaagctgcagttggtcgaagccgacaagaagaagatcaggcaagaatacgaacgcaaagagcgccaagttgaaattcgcaagaagattgagtactcaatgcagct

SEQ ID NO: 186958 - DNA, 249 bp, Glycine max
ctcgagccgaaaaaaatgaccaagatcttctttgtattgctgttatgtctgatcatagcagattcttctgggtttgtgaattgctttgatgttgaaaagaaggaaaagattggaatatttgagctcaataaaggtgacctttctttgaatcgtcaccaactggggtgcttcaattttgtccctggtgattcctgataagaatggaaagttgagtgatgttgttcttggatatgattctgttaaggatta

SEQ ID NO: 186959 - DNA, 244 bp, Glycine max
gtttgttttctttgttgctgcagtagttttggtagcatggccatgccatggcgcaggctaccaaaggttccctctccgaatgaaaactggctatggtgagcgttcttcggaggtaaaatgcgcaagttttaggcttgctgtggaagcacacaacatccgagcttttaaaaccattcctgaagagtgcgttgaaccaacaaaggactacattaatggcgaacaatttagatcagactctaaaaca

SEQ ID NO: 186960 - DNA, 255 bp, Glycine max
tggtccacaaaccttgactggtacaagggtccaactctgcttgatgcacttgaccagattagtgagcccaagaggccctctgacaagcccctcaggcttccccttcaggatgtgtacaagattggaggtattggaactgtgccagtgggacgtgttgagaccggtgtcttgaagcctggaatggtggtgacttttgcaccaactggactgacaactgaagtcaagtctgtggagatgcaccatgaatctcttaca

SEQ ID NO: 186961 - DNA, 250 bp, Glycine max
gcgcgtttcatttgatcagatcataacaatggtgtccgaaggcactctcctgggcatgggtaaccctctcctcgacatctccgccgtcgtcgatgaagacttcttaaaaaaatatgatatcacctcgaacaatgcgattcttgcggaggacaagcacaagcctatgtatcaagaattggctgagaaatataatgtggagtacattgctggaggtgccactcagaattcaatcaaggttgctcaatggatg

SEQ ID NO: 186962 - DNA, 249 bp, Glycine max
cggagagagacgtcgcaatggggaggaggcctgcaaggtgttatcggcagataaaaaacaagccataccccaaatcacgcttttgccgtggtgttcctgatcctaagatcagaatttatgatgttggtatgaagaagaaaggtgttgatgagtttcccttctgtgttcatctggttagctgggaaaaagaaaatgtttcaagtgaagcattggaagctgctagaattgcatgcaacaaatatatggcga

SEQ ID NO: 186963 - DNA, 246 bp, Glycine max
tgtcatgccatggcgcaggctacctcaggttccctctccgaatgaaaactggctatggtgagcgttcttcggaggtaaaatgcgcaagttttaggcttgctgtggaagcacacaacatccgagcgtttaaaaccattcctgaagagtgcgttgaaccaacaaaggactacattaatggcgaacaatttagatcagactctagaacagttaaccaacaagctttcttttatgctagtgaacgcgaag

SEQ ID NO: 186964 - DNA, 244 bp, Glycine max
gcgaaatcgtaatcgcaatctagcggatatgaacgtcgtcgctgcatacttgctcgcagtgttgggagggaatccatctccttctgccgatgatatcaaaaacatcctcggcgcagttggagctgaggctgagcatgagttgattgatttgctcttgaccgaagtcaagggcaaagacttcaatgagctacttgctagtggaactgaaaagatttctgcagtggctggtggtggtgcagcggtt

SEQ ID NO: 186965 - DNA, 246 bp, Glycine max
atttggaaagcggttctcgcccgctgtatccgatgatgcttgagagccccgaactgcgctggtctttcatcagaaaagtatactccataatcgccatacagttgctcgtaaccatcgtcgtctgcgccgtcgtcgtcaccgtccgcccaatcagcgtcttcttcgccaccaccggcgccggattggctctctacatcgtcctcatctttgtccccttcatcacattgtgtgcactttactactact

SEQ ID NO: 186966 - DNA, 252 bp, Glycine max
attttgtcttcgttccattatctagttctcaattctcttcaccctttgcctctgaaagaaatgggtagtcttgaagcggaaagaacaacagtaggattggcagcaagagacccttcagggattctctccccatacacctacaatctaagaaacacaggccctgatgatgtttacattaaagttcactactgtggagtttgccattctgatctccaccagattaaaaatgatcttggcatgtccaactatccc

SEQ ID NO: 186967 - DNA, 248 bp, Glycine max
gtgcaggaatggaggtcgcaacaaacacggccgcggccacgtcaagttcattcgatgctccaactgcggcaaatgctgccctaaggacaaggctatcaagaggtttctggtgaggaacattgttgaacaggctgcagtcagagatgtgcaggaggcttgtgtctacgaacaatacacgcttccgaagctgtatgtgaagatgcagtattgtgtttcctgtgctatccactctcatgttgtgagggttc

SEQ ID NO: 186968 - DNA, 248 bp, Glycine max
atctttctctctcattaatattaataatattattgtgttacattttttctacaacaatggagttgggaagcatactccattttcttcaggataagagcattttgatcactggagccaccggttttcttgccaaagttttgttggagaagatattgagggtccaaccaaatgttaagaagctttaccttcttttaagaacttatgatgccaaatctgctactcatcgcttgcacaatgagatcataggg

SEQ ID NO: 186969 - DNA, 249 bp, Glycine max
ttcgtttttgttgatcctgtgaacttatggctgacggggtggttctgttggatacatgggccagcatgtttgggatgagggttaggattgcattagctgaaaagggtgttgagtatgaatacaaggaagaaaatctcaggaacaagagtcctttgcttttgcaaatgaacccaattcacaagaaaattccagttctgatccataatggcaaaccaatttgtgaatctgcaattatagtgcagtacattg

SEQ ID NO: 186970 - DNA, 227 bp, Glycine max
gtcccatcacagacaaacaagcaattaattcaccagctacatagtttttctgtttgaagtgctacaaacaatggcagctactcaggaagatgtgacgcttttgggagttgttggaagcccgtttgtgttgcagggtccagattgccctcaaattgaagggaattgaatgcaaatttttggaagaaaatttggcaaacaagagtgatctacttctcaaatccaacccc

SEQ ID NO: 186971 - DNA, 256 bp, Glycine max
cttgtctcaaagattaagccatgcatgtgtaagtatgaactaattcagactgtgaaactgcgaatggctcattaaatcagttatagtttgtttgatggtatctactcggataaccgtagtaattctagagctaatacgtgcaacaaaccccgacttctggaagggatgcatttattagataaaaggtcaacacaggctctgcctgttgctttgatgattcatgataactcgtcggatcgcacggcctttgtgccgg

SEQ ID NO: 186972 - DNA, 280 bp, Glycine max
atcgaaactcagaagtagaaagaaacacaaatcacaatcgctatggctaggtacgaccgagcaatcaccgtgttctcccctgacggccatctcttccaggtcgagtacgccctcgaagccgtccgcataggcaacgccgccgtcggcgtccgcggcaccgacaatgttgtcctcggcgtcgagaagaaatccaccgccaaactccaagactccaggtcggtgaggaagatagtgaatctggacgaccacattgcgctggcctgcgcggggctgaaggcga

SEQ ID NO: 186973 - DNA, 276 bp, Glycine max
atcggcttctgcttcaaggaaggagagcttgttattctctatcaacaagtaaaatgtcaggtgaagagggtgtcattgcagttgagccagctgctgctgctgctgccatcccaggcgagccaatggatatcatgactgccttacaacttgtgctcagaaaatctctggcttatggtggtttgtcgcgtggccttcatgaaggtgcaaaagtgattgagaagcatgctgcacaactctgtgttcttgcagaagactgtgaccagcctgactatgtta

SEQ ID NO: 186974 - DNA, 265 bp, Glycine max
ggaattagatgagacaagccaagtgtacccgaaatttgtgtttgatgattacatgaagctctatgctggtctcaagtttcaggctaaagagccaaggtttgaagctatgaaggccaatgcaagcgtggttgatgtgggggccatagccacagtttgagtctcaggctctcagcatgtggaagcaacatgggaacggttatgtgtgttttctgttaataataaacaaaggctactcagaacatattagtgtttggtgtccttggat

SEQ ID NO: 186975 - DNA, 266 bp, Glycine max
gcaggaagtggtagaagggttcaagttcgaacagaggcacgggaaagagcgcgtgagagtggcgcgcgtgtggaagacgaggcaggggcagcacttcgttgtggagtggcgcgtgggcatcactctcttctcagactgcgtcaactcgtatctccgcgatgacaactctgacatcgttgctactgataccatgaaaaacacagtgtatgcaaaagcaaaggaatgctcagacatactctctgctgaggactttgctattttgcttg

SEQ ID NO: 186976 - DNA, 257 bp, Glycine max
gtcccactttcttctccttttagggtttcctttttgtttctcctttccagatctgcatcttccattttttaggattaagcggtgagattcgtgaatctgagaaatgtcggattcttctcgggaggagaatgtttacatggcgaaattggcggagaggccgagcgttacgaggagatggttgagttcatggagaaggtagcaaagactgtggaggttgaggagttgacggtggaggagagaaatcttctctctgtggc

SEQ ID NO: 186977 - DNA, 266 bp, Glycine max
gcagcctcaggaggagaaggatgtctcacaggaagttcgagcacccaaggcacggttcactgggatttcttcccaggaagcgtgctgctcgtcacaggggaaaagtgaaggcattccccaaggatgacccatccaaggcacccaagctcactgcattcttgggttacaaggccggtatgactcacattgttagagaggtcgagaagccaggatcaaagcttcacaagaaggaaacttgtgagcctgttacaattattgagacccct

SEQ ID NO: 186978 - DNA, 269 bp, Glycine max
gttatcctcataaatacactctaattaggtggcaagataagtgtctaaccttagtaacattgccacatattgtgttcattttggaattgtgccactaaaattctattcaattcatctatggctgcctcttcttatgctatgcaatcaatcctggcaaaccctttgatccgcatttccagcgggtctagggtgaaccaatttggcgttcctgctttgcacatgagaaggaatgttggcctgagagttaggtccatggctaaggaagaaca

SEQ ID NO: 186979 - DNA, 280 bp, Glycine max
ggcattcggctcgacgctagcgcttcttctctcgcattccgtggagatctagtgctgccaaacctcgctgaaaattagggtttcgtttcggaggtagacgaagatgttcggaaaggcaccgaagaaaagcgacagcaccaggtactacgaaatcctcggcgtttcgaagaacgcttcgccggatgatttaaagaaggcttacaagaaagccgccatttaagaacaccctggacaaggcggtgatcctgagaaggtccaagagcttgctcaagcctatgag

SEQ ID NO: 186980 - DNA, 277 bp, Glycine max
cgcgctcgagaggttggactacctggaaacgtaggatgcactgggactgaagagctaggtttcaggaaccgacgtcgttgcggatggcatggctggtgctgctatgtatgaactcgtgcgtgttggtcatgataatctcattggtgaaattattcgtctcgaaggggatgctgctaccatccaagtttatgaggatactgctggtttgatggttaatgatccggtcttacggacgcacaagcctttggtccgtggagttaggttctggaatattggg

SEQ ID NO: 186981 - DNA, 267 bp, Glycine max
gcgagatcttgagtcgccgatttgaaaagatgagtaagcttcagagtgatgctttgcgtgaagccatctcaggaatcatggccgattccaaggagaagaatcgcaaatttgtggagaccatcgaactccaaatcggtttgaagaactacgatccacagaaggacaagcgtttcagtggctccgtcaagttgccccacatccctcgccccaagatgaaaatttgcatgcttggtgatgctcagcatgttgaagaggcagagaagatag

SEQ ID NO: 186982 - DNA, 268 bp, Glycine max
gttgccaacactgacagtcttctctatgatgatgaattcagcaaatacctcaaggattatccggacaatttccgctacaatcgagccctcagcagagaacaaaagaacaagagtgggggcaaaatgtatgttcaggataagattgaggagtacagtgatgaaatcttcaaactcctggataatggggcccacatatatttctgtggtctgaaagggatgatgccagggatccaagatacgctgaagaaggttgctgagcaaagaggag

SEQ ID NO: 186983 - DNA, 265 bp, Glycine max
atagaagcagcactatttttgaagatgctacccctgagatggtgagggacttgttttgggatgacgagttccgaccgagatgggatgacatgcttgcaagctcttcaatcattgaagagtgtcccactactggtactatgaaagtgcagtggatacggaaggtgaataacatttttaacttgatttaagtgtatttaattaattggtgtcttggttcagtgtgctaatggatgctaattatctgtgcaacagtttccctttttct

SEQ ID NO: 186984 - DNA, 266 bp, Glycine max
gggagcaccactcaaccaccacacctctcctcgttcacgctacccctttctgctcttcttctacctttcaagttttaaaagtataaagatggcagagacattcctatttacctcagagtcggtgaacgagggacaccctgacaagctctgcgaccaaatctccgatgctgtcctcgacgcttgcctcgagcaggacccagacagcaaagttgcctgcgaaacatgcaccaaaaccaacttggtcatggtcttcggagaaatcacga

SEQ ID NO: 186985 - DNA, 265 bp, Glycine max
tggtcgatggaacaatgtaggcaatggaagtcggcaaaatggatccgtaacctcgggaaaaggattggctctgagggctgggcacgggggtcccagtcccgaacccgtcggctgtcggtggactgctcgagctgcttccgcggcgagagcgggtcgtcgcgtgccggtcgggggacggattgggaacgggcccttcggggcctcttccccgggcgtcgaacagtcaactcagaactggtacggacaaggggaatccgactgttta

SEQ ID NO: 186986 - DNA, 263 bp, Glycine max
gcagatttcaagatgaagttcaacattgcgaatcccaccaccggttgtcagaagaagctggagatcgatgatgacctgaagctgcgagcattttgggacaagaggatctcacaagaggttgttggtgatgctctgggtgaggaattcaaaggttatgtcttcaaaattactggaggttgcgacaagcaaggatttccaatgaagcaaggagtgttgacccctggtcgtgttcgcctcttgctgcatagaggaactccttgttt

SEQ ID NO: 186987 - DNA, 267 bp, Glycine max
gagggtgtgaacaacatcaacattaacatctccgattcgtataagaagaatcgcattcaggtctctaacaccaagaagcccctcttcttctacgttaatctcgccaagagatatatgcaacagcatgatgaggtcgagctctcagctctaggaatggctattgccacagtagtaactgttgctgaaattttgaaaaacaacggacttgctgttgaaaagttaatcacgacatcaactgttgacataaaggatgactctagaggtcga

SEQ ID NO: 186988 - DNA, 257 bp, Glycine max
tagactggttgctgtggttagtacataagcaatactagtctgagtgcaattctgagatcaaattgctatcacaagaaagggcatgaggctccttgcaaatatgggggcaatctgtatatggcactgtttggacttgttcagattgtaatgtcattcataccggatctccataacatggcatgggtttcagttgttgccgcacttatgtcctttacatactcattcattggactaggacttggcatagcaacagtcat

SEQ ID NO: 186989 - DNA, 271 bp, Glycine max
gggaaagttgtccttgaactggcagctaaaagcaatcttaagcctgttactttggaacttggtgggaaatccccctttattgtgtgtgaagatgctgatgtagatcaggctgttgagctagcccattttgctttattctttaatcagggacaatgttgctgtgctgggtctcgaacatttgtacatgaaagtgtatacgatgagtttgttgagaaagcaaaggctcgtgctttgaagcgtgttgttggtgatccattcaaggggggaatag

SEQ ID NO: 186990 - DNA, 255 bp, Glycine max
cggctcgagggaacaacagctacatttgtattggttgatggatggactgtcactgttgcatctgttggggattcccgctgcatatcagatactcagggaggtgtagtttctctcttgacagttgatcacagactggaagagaatgcagaagagagggagcgtgttactgccagcggtggtgaagtaggaagactcaatgtatttggaggcaatgaggttgggcctcttcgctgctggccaggtggatggtgccta

SEQ ID NO: 186991 - DNA, 257 bp, Glycine max
ctcgagccgccaaagttaaggtccctctggctttgtttggaggttcaggaaactatgcctctgctttgtatattgcatctgtgaaagccaatgcagtggaaaaggttgagactgagcttctgcaatttgttgaggcagtaaagaatagtcccatattttcacagtttataagggacttgtctgtggctaaggatgttagagtgaaagttatccaggatatttgtggggaagccaagttttcggatgttacaaagaac

SEQ ID NO: 186992 - DNA, 260 bp, Glycine max
agcatcactaatccttttcctttgtgtttattttccatcttccattaatatgggtgttgttactcagatttatgatacccctgctgctgtgcctcctactaggcttttcaaagccatgacattagatttccataacctcttcccaaagcttgtggatagcatccacagcattgttttcacccaaggaaatggtggtcctggcaccatcaagaagatcaccaccattgaaggtgacaaaaccaagtatgtgctgcacagag

SEQ ID NO: 186993 - DNA, 271 bp, Glycine max
ggcttggactgcctggaaacgtaggaggcactggcactgaagaagtgctcatcaggaagagaggtttctctgagactgaaactgaaactgaggaggatgagtctgctaccactgtggatttgatgcttaatctttcttctaaggaagctgctgctgctgcagatccaactgataagcacaagactttgcctaaggagaagactcttctgcctgcagatcctgctaagcctccagccaaggcacaggtggtaggttggccacctgtgcggtc

SEQ ID NO: 186994 - DNA, 267 bp, Glycine max
ctcactcactcgcaagcaaaaagaaagaatcccaggcgaggagaaagatggaggggaaggagcaggatgtgtcgttgggagcgaacaagttccccgagagacagccaattgggacggcggcgcagagccaagacgacggcaaggactaccaggagccggcgccggcgccgctggttgacccgacggagtttacgtcatggtcgttttacagagcagggatagcagagtttgtggccacttttctgtttctctacatcactgtcttaa

SEQ ID NO: 186995 - DNA, 243 bp, Glycine max
aacccctcgagaggaacaccaggtatgttgatgctgttcttaccattcccaaaggaacattgttccacatgtgtggtatgaatctggcattcgatcgtcagctgattggacctgcaatgtatattggactcatgggtgatggtcaacctataggacgatacgatgatatgtgggctggatggtgtgtaaaggttatctgtgaccatttgggcttgggagtgaatactggccttccatacatct

SEQ ID NO: 186996 - DNA, 219 bp, Glycine max
ctctcaagtccaacctacccctatgtcttctcccaccaacttcaccgtcttcttcctctatcatgtctcacttcaagggcaagtaccatgatgagcttattggcaatgctgcttacattggcactcctggaaatggtattctttctgcttattagtcagcagggtcaattggcaagcgattggccagcatcagtgtagagaatgttgaatcctacaggc

SEQ ID NO: 186997 - DNA, 262 bp, Glycine max
gttagaggagaaatcatcatggcatcagcagcatctgggtttgtgttgtcacttaatgttgcagctgccaccacaaactcaagggtggtcatgttcaacacaaagaacaacgcttctaggcttgttgtaagggcttcagatgagcctgcagcggcggcacccgccaccgccacacccccagctgaagctgaagctaaaccaaagccaccacctattggccccaagagaggtgctaaggtgaagattcttaggaaggaatctt

SEQ ID NO: 186998 - DNA, 257 bp, Glycine max
atctgcttaaaagtagttatccaggagcacatattggacctgagccaacaactgataggtttgttgttgtcatgtctggatctgatgagagaagcgttcctggaaatacttttgctgtccaagcagacatgccatttagtggtcttacaacttttggcacagcatttttgtcaaaatttgtgtgttcacagatgcctcatcctctactggaacacatcacatttgttgacactccgggagttctatctggagaaaag

SEQ ID NO: 186999 - DNA, 260 bp, Glycine max
gaaaatggcagtgactcttacatcaacactctttctggctttgctatttgctgcttcagcttttgctgctcttcagcctagagtacctgaagcttacctccaaaatgggaactttgaggagcagccaaaccctaaatacctgaagaaaacaaagctctttggtaaatacgctttgcctaaatgggagatcaatggtctggttgagtatgtctctgggggtccccaacctggaggcatgttcttcccagtgactcatggaa

SEQ ID NO: 187000 - DNA, 260 bp, Glycine max
gttgctgtggataacatttcaagcggaacagacactgtcataaaggttgatagcgcgaacaagcgtgggagcttgttggaggtggttcaggttctcactgatatgaatctcagtgttagaagagcttatatttcctctgatggagaatggttcatggatgtttttcatgtcacggatcaaaatgggaaaaagtttatgcaagatgatgttgctgaccgcattcaacagtcactgggtccaagagcctctagttttcgatc

SEQ ID NO: 187001 - DNA, 256 bp, Glycine max
cttgtctcaaagattaagccatgcatgtgtaagtatgaactaattcagactgtgaaactgcgaatggctcattaaatcagttatagtttgtttgatggtatctactactcggataaccgtagtaattctagagctaatacgtgcaacaaaccccgatttctggaagggatgcatttattagataaaaggtcaacacaggctctgactgttggctttgatgattcatgataactcgtcggatcgcacggcctttgtg

SEQ ID NO: 187002 - DNA, 262 bp, Glycine max
aacttgcagattttggattggctagggcttttggaattcctgttaggacatttacacatgaggtggtaacactgtggtacagagctccagaaattttgcttggatcccatcattattctaccccagttgatatttggtcagtgggatgcatatttgcagagatggtaaatcaacgacctcttttccctggggactctgagattgatgaattgtttaaaatattcagaatcatgggtacaccaaatgaagacacatggcctgg

SEQ ID NO: 187003 - DNA, 265 bp, Glycine max
gtacactagatggtgtaaaggttaactattatgaaatcgacactacacctacaggaacttgtgctgtttgtgtggttggtggtgaaaggtcccttgttgccaacttatcagctgcaaattgctacaagtctgagcatttgacgagaccggaaaattgggcattagttgaaaaggccaagtattactacatttctggctttttcctcactgtatctcctgattccatacaattggttgctgaacatgcagctgcaaataacaagat

SEQ ID NO: 187004 - DNA, 264 bp, Glycine max
tgaaggtccttgttttcttcgttgctacaattttggtagcatggcaatgccatgcgtacgatatgttccctctccgaatgaacactggctatggtgcccgtactccggaggtgaaatgcgcaagttggaggcttgctgtggaagcacacaacatctttggctttgagaccattcctgaagagtgcgttgaagcaacaaaggaatacatccatggcgaacaatatagatcagactccaaaacagttaaccaacaagcttactttt

SEQ ID NO: 187005 - DNA, 256 bp, Glycine max
gcaacgttagggagtccggagacgtcggcgggggccccggaaagagttatcttttctgtttaacagcctgcccaccctggaaacggctcagccggaggtagggtccagcggctggaagagcaccgcacgtcgcgtggtgtccggtgcgcccccggcggcccttgaaaatccggaggaccgagtgcctcccacgcccggtcgtactcataaccgcatcaggtctccaaggtgaacagcctctggtcgatggaacaat

SEQ ID NO: 187006 - DNA, 260 bp, Glycine max
gtttctctgtctgcttcttcactttctctcgtttcaatcgaaaccaaaacaaaatcatgggcagaaaattcttcgttggtggcaactggaaatgcaatgggaccactgaggaggtaaagaagattgttactactttgaatgaggctaaagtccctggagaagatgtcgtagaagttgttgtgagccctccttttgtgttccttcctgttgtaaaaagtttgctgcgccctgatttccatgtttcggcacaaaactgttgg

SEQ ID NO: 187007 - DNA, 257 bp, Glycine max
ctgagatcggagaaccctctctttcttctccttcttcagcagttgacaataaaaaatggcagatggtgaggatattcaaccactcgtctgcgataatgggacaggaatggtgaaagctggatttgctggggatgctccgagggctgtgtttcccagcattgttggtcgtccccgtcacacgggagtgatggttggcatgggccaaaaagatgcatatgttggggatgaagctcagtccaagagaggtatattaactc

SEQ ID NO: 187008 - DNA, 259 bp, Glycine max
  unsure (1)..(259): unsure at all n locations
ggagtgccagagacttggcctcaccaaagccattggagtcagcaacttctccatcaagaagcttgaaaaattgctctcttttgctaccatccctcccgcagtgaatcaagtagaagttaaccttgggtggcaacaacagaagcttagagatttctgcacggaaaagggtattactgttacttttntctcatccctgaggaagggtgctagtaggggtgctaattttgtgctggacaatgatgtaatcaaagaattggca

SEQ ID NO: 187009 - DNA, 259 bp, Glycine max
cttctttcttcttatatatcgaacatggctaagtatcattcaagtgggaaaagctcttccatgactgctatagccttcctgtttatccttctaatcacttatacaggcacaacagatgcacaatccggggtatgttatggaagacttggcaacaacttaccaacccctcaagaagttgtggccctctacaatcaagccaacattcgcaggatgcgaatctacggtccaagcccagaagtcctcgaagcactaagaggtt

SEQ ID NO: 187010 - DNA, 259 bp, Glycine max
gacccatcacagacaaagaagcaattaattcaccagctacatagtttttctgtttgaagtgctacaaacaatggcagctactcaggaagatgtgacgcttttgggagttgttggaagcccgtttgtgttgcagggtccagattgccctcaaattgaagggaattgaatgcaaatttttggaagaaaatttggcaaacaagagtgatctacttctcaaatccaaccccgtttacaagaaggttccagtgtttattcataa

SEQ ID NO: 187011 - DNA, 260 bp, Glycine max
gcgatttctcatttctcattcttaacaacacacttcaacaatggccaaaaccttcaaatacatcatcctcggaggaggagtttccgctggttatgcggcgagggagtttgccaaacagggcgttaagccaggggagttggctatcatttccaaagaagcggtagcaccttatgaacgtcctgctctgagcaaggcttacctttttccagagtcccctgctagacttcctgggttccatgtctgtgttggaagtggagggg

SEQ ID NO: 187012 - DNA, 299 bp, Glycine max
  unsure (1)..(299): unsure at all n locations
tgagttcttgtttttccgaaatcctagtgctgatatgctacttcaagagtccgagcttgataaaaatctcataaagaaggctaaaattttccattatggttccatcagcttgattgatgagccatgcaagtctgctcatctgctgctaatgagatttgnctaaagaatctggttgcattcctttccgtaatgatcccaaatttgagaattggcacntaatgggccaatctggctggaaggctggctcggggatgggcaataaatggagttatnatgggggttcaaaggccggattgttc

SEQ ID NO: 187013 - DNA, 270 bp, Glycine max
actaagttatcctcataaatacactctaattaggtggcaagataagtgtctaaccttagtaacattgccacatattgtgttcattttggaattgtgccactaaaattctattcaattcatctatggctgcctcttcttatgctatgcaatcaatcctggcaaaccctttgatccgcatttccagcgggtctagggtgaaccaatttggcgttcctgctttgcacatgagaaggaatgttggcctgagagttaggtccatggctaaggaag

SEQ ID NO: 187014 - DNA, 268 bp, Glycine max
ctataagctagtttatcgtgaggagaatatgaagttgtttgttttctttgttgctgcagtagttttggtagcatggccatgccatggcgcaggctaccaaaggttccctctccgaatgaaaactggctatggtgagcgttcttcggaggtaaaatgcgcaagttttaggcttgctgtggaagcacacaacatccgagcctttaaaaccattcctgaagagcgcgttgaaccaacaaaggactacattaatggcgaacaatttagatca

SEQ ID NO: 187015 - DNA, 270 bp, Glycine max
ctcgagccgatggcttcttccaccatcacctcctccctcctcacatcacacccttcatcccacttcaacaaatcatcatcttcatcattcccctccttccatgccacccccactctccgcccccacaggccacgcgcctccatgtccgcggcacgccaccgccgccctacgacttcggctcgttccggttcgagccgattagggagtcgatcgtgtcgcgcgagatgacccgcaggtacatgaccgacatggtcacccacgccgacaccg

SEQ ID NO: 187016 - DNA, 268 bp, Glycine max
attctgtctcttatgggtcagatgatgaagcctaggaaaacagagatcactgacaagttgaggcaagaaattaacaaggttgtcaaccgatatattgatgaaggtgtagcagagcttgttcctggagttctattcattgatgaggttcatatgctagatatggagtgtttttcgtatttaaatcgtgctttagagagctccctatctccaatagtaatctttgctactaatagaggaatatgcaatgtaagagggactgatatgacca

SEQ ID NO: 187017 - DNA, 267 bp, Glycine max
  unsure (1)..(267): unsure at all n locations
cattgatcgctgaaacgatacgatgacagggaaggcgaacganagaagcacacggcgaaggagatcgcggcgaaggtggacgcggcgaccacgaaccgcggcggcgggaaggcgggtatgaaggaccgaaccgggttggagaagggcgggcacgcgaaatacgagtgccctcactgcaaggtgacggcgccggacgtgaaatcgatgcagatccaccacgacgcgcgtcaccccaagatccccttcgaggaggacaaagttgtcaat

SEQ ID NO: 187018 - DNA, 271 bp, Glycine max
gatacactaagttatcctcataaatacactctaattaggtggcaagataagtgtctaaccttagtaacattgccacatattgtgttcattttggaattgtgccactaaaattctattcaattcatctatggctgcctcttcttatgctatgtaatcaatcctggcaaaccctttgatccgcatttccagcgggtctagggtgaaccaatttggcgttcctgctttgcacatgagaaggaatgttggcctgagagttaggtccatggctaag

SEQ ID NO: 187019 - DNA, 273 bp, Glycine max
gctccttcacctccttagtttcgaaagcatggcttccctggcggcttccaccgcggctatgtcagaaatccttggaaaccccgttaacctcagatgcgcaaccaggtctgctccatcaccaactacacctgccaccttcaagaccgtcgcacttttctccaagaagaagccagctccacctccaaagaaaaagcctgccgctgtatcccccgccaatgaggaactcgccaagtggtatggtcctgacagaaggatcttcttgcctgagggtct

SEQ ID NO: 187020 - DNA, 267 bp, Glycine max
cttgagtcgacgatttgaaaagatgagtaagcttcagagtgatgctttgcgtgaagccatctcaggaatactggccgactccaaggagaagaatcgcaaatttgtggagaccatcgaactccaaatcggtttgaagaactacgatccacagaaggacaagcgattcagtggctccgtcaagttgcaccacatccctcgccccaagatgaaaatttgcatgcttggtgatgctcagcatgtagaagaggcagagaagataggactgga

SEQ ID NO: 187021 - DNA, 265 bp, Glycine max
aaccccttcggcgttttgtccttacgttgttattaagaagcgtaacgcattcaccacgatggtgaccaaagcgatggaggtggtgaaggatctggacgtgaagcggtacatgggtcggtggtacgagattgcgtgcttcccgtcgaggtttcaacccagtgacggcaccaacaccagagccacctacactctccgagatgacggcaccatcaacgttcttaacgagacttggagtggcggcaaaagaggtttcattgagggcact

SEQ ID NO: 187022 - DNA, 267 bp, Glycine max
ctgaggtgacagcaataagagaggcttgtaagaagcttaagcagatagaacttgcagattgtgaaatatatgcttcttgtgaaccttgccccatgtgctttggtgcaatccacctttctcgaattaagaggttggtttatggagcgaaggctgaggcagcaattgctattgggtttgatgatttcattgcagatgcactgcgaggtactggattctatcagaaagcaacactggaaattaagagagctgatggtaatgaggccatca

SEQ ID NO: 187023 - DNA, 271 bp, Glycine max
gtcgatttcagtgctccgcattccatgggaaccactatcatcggcgttacttacaacggcggtgtcgttctcggagccgactctcgaaccagcactggagtgtatgttgccaaccgagcatcggacaaaatcacacagctcactgataatgtttacgtgtgtcgctctggatcggctgctgattctcagattgtctctgactatgtgcgctacttccttcaccaacacacgatacaacttggacaacctgcgacagttaaagttgctgcaa

SEQ ID NO: 187024 - DNA, 267 bp, Glycine max
tgttgagaagactgagagtcttctctatgatgatgaattcagcaaatacctcaaggattatccggacaatttccgctataatcgagatctcagcagagaaataaagatcaagagtgggggcaaaatgtatgttcaggataagattgacgagtacagtgatgaaatcttcaaactcgtggataatggggctccatatatttctgtggtctgaattggatgatgccatggatccaagatacgctgaagaatgttgctgagctaagagga

SEQ ID NO: 187025 - DNA, 218 bp, Glycine max
cttcgacaggctgctgtttatggtgttggtgtttgtgctgagtttggtggatctgttttcaaaccccttgttggagaggcactttcaaggttagatgctgtgataaggcatccaaatgcactacattctgataacataatggcatatgacaatgctgtttcagctcttggaaaaatatgccaattccatcgtgatagcataaatgcagcacaggttgt

SEQ ID NO: 187026 - DNA, 242 bp, Glycine max
ccagtagtcatatgcttgtctcaaagattaagccatgcatgtgtaagtatgaactaattcagactgtgaaactgcgaatggctcattaaatcagttatagtttgtttgatggtatctactactcggataaccgtagtaattctagagctaatacgtgcaacaaaccccgacttctggaagggatgcatttattagataaaaggtcaacacaggctctgcctgttgctttgatgattcatgat

SEQ ID NO: 187027 - DNA, 264 bp, Glycine max
aaggggtgaaaccatggcgcttttggatgaagcttgtcagaaatggggtttctttctgattgagaaccatgaaattgacaaaaacctgatggaaaaggtgaaggagctaattaatattcactatgaggagaacctgaaggaaggtttctaccagtccgagatagcaaagaccttggagaaaaaacagaacacctctgatatagattgggaaagtgccttcttcatttggcaccgtcccacttccaacattaagaaaatcacaaa

SEQ ID NO: 187028 - DNA, 262 bp, Glycine max
ggcagatgttggtgttggaatatgtgggcaggaagggcgccaagcagtgatggcatcagattttgctatgggacaattccagttcttgaataaattacttctagttcatggacactggaattaccagcgtgttggttatttaattctgtacaacttctaccgaaatgctgtctttgtgttgatgctattctggtatatattatgcactgctttttctacaacttctgcattaacagattggagtagtgtattttattctgtg

SEQ ID NO: 187029 - DNA, 261 bp, Glycine max
gttgtaactcgttcttcttcttttgttgttctgtgtttgtgtttgttttttctctcacctgaaaatgtcttgctgcggtggtaactgtggttgcggaagctcctgcaagtgcggcaacggctgcggaggctgcaagatgtacccagacttgagctacactgagtcaaccaccaccgagaccttggtcatgggagtggcacctgttaaggctcaatttgagggtgctgaaatgggtgtgcccgctgagaacgatggctgcaa

SEQ ID NO: 187030 - DNA, 270 bp, Glycine max
aatggtgtacgtcaaggctcagaaatcaaaagcctacttcaagagatatcaagtcaagttcaagagaagaagagagggaaaaaccgattaccgtgccaggattcggttgattaatcaggacaagaacaaatataacactccgaaataccgatttgtggttcgctttagcaacaaggacattgttgcacaaataatatctgctagcattgccggcgatttagttcttgctacagcatattcacatgagctgccacgatatggtcttgaagt

SEQ ID NO: 187031 - DNA, 275 bp, Glycine max
ctcgagatcgagccgatggccatgccatggcgcaggctaccaaaggttccctctccgaatgaaaactggctatggtgagcgttcttcggaggtaaaatgcgcaagttttaggcttgctgtggaagcacacaacatccgagctattaaaaccattcctgaagagtgcgttgaaccaacaaaggactacattaatggcgaacaatttagatcagactctaaaacagttaaccaacaagctttcttttatgctagtgaacgcgaagtccatcacaacg

SEQ ID NO: 187032 - DNA, 224 bp, Glycine max
gagcaattttccctcaccaaagaagaagaagcaaacaatggccgatcaacttaccgatgaacagatctccgagttcaaggaagccttcagcttgttcgacaaggacggcgatggttgcatcacaaccaaggagcttggaactgttatgcgttcattggggcaaaacccaactgaggcagagctccaggacatgatcaatgaagtggatgctgatgggaatggta

SEQ ID NO: 187033 - DNA, 256 bp, Glycine max
ccccgaggtaactcatcttgctgctagtgctgtctcttttttgtgtgatttggatctacaaggtttgacagggtactggcatccaaaaaatgggttctaaaactaatgcttcgggccatagagcacgaaggccgctgtcaatatttgctgtgcttggtctttgctgtttcttttatcttttgggagcatggcaaagaagtggatctgggaagggagataaccttgcattgaaagttaataacctgatgactgactg

SEQ ID NO: 187034 - DNA, 241 bp, Glycine max
ggctcgagaatacaagactaagtgatttgaagcttgaagggataaacgctttgaagattgaaaggatgcaggaactggaagcagtgacaagtgagatcgttaggttgattgacacagcaacagtgcctattttggccgttgatgttgatgggctggtcaatgggtggaacataaaaattgctgagttgacgggtcttccaattggtgaagctactggaaagcatttactcacacttgttga

SEQ ID NO: 187035 - DNA, 263 bp, Glycine max
ctcgagccgctcgagccgcttcaagtcaggaggaggtgacccttttgggagctactggaagaccatttgtacgcagggttcatattgccctcaagttgaagggagttcaatacaaatatgtcgaagaaaatttgaggaacaagagtgaactgcttctcaaatccaacccagttcacaagaaggttccagtgtttattcacaatgagaagcccatagcagagtctcttgtgattgttgaatacattgatgagacatggaagaac

SEQ ID NO: 187036 - DNA, 261 bp, Glycine max
gccacctccaacttctctattgttctctccgtctccctagccttctttttggtgctacttaccaaggcacactcgaccgataccgtttctttcaccttcaacaagttcaacccagtccaaccaaacattatgctccaaaaagatgctagtatttcatcctctggggtgttacaactcaccaaagttggcagcaacggcgtgcccacctcgggatctctcggtcgtgccctttacgctgccccaatccagatttgggacagc

SEQ ID NO: 187037 - DNA, 264 bp, Glycine max
agatagcgcgtcttaataaacgctcttctctgaaaacccccatttcttttcttctttcttcttctctttcgcttcttcgatcttcgatcttcgtcgctgaaaatgagagagtgcatttcaatccacatcggccaggccgggattcaggttggaaacgcctgctgggagctttactgcctcgaacacggcattcagcctgatgggcagatgccaagtgacaagaccgttggtggaggtgatgatgctttcaacaccttcttcagt

SEQ ID NO: 187038 - DNA, 262 bp, Glycine max
agaccttacaaagtacagtggctatgatgaattagttgctgaattggatcagctgtttgaatttgggggtgaattattgtcaactaataaagattggcttatcgtctttactgataatgagggtgatatgatgcttgtaggcgatgatccatggcaggaattctgtgccatggtacgctaaatttatatctaccctaaagaggagatccagaaaatgagcccaggtaccttgagctcgaaaaatgaagagaatcattcggtg

SEQ ID NO: 187039 - DNA, 280 bp, Glycine max
  unsure (1)..(280): unsure at all n locations
gtgagcctgttacaattattgagacccctccaattcgtnacttgttgtgtgttgtgggttatgtggtaaacttccacgtaggtcttccgtacacattgaacatctgtctggtgctcagcatttgagatgaggaattgtcaacgtagggttctacaagaactggtagcaagtccaagaagaaggccttcttcaagtactctaagcagtatgaaactgaggagggaaagaaaaacattgaggcgcactggagaaactgaagaagtatgctactgtggttcgt

SEQ ID NO: 187040 - DNA, 268 bp, Glycine max
  unsure (1)..(268): unsure at all n locations
gtttattatcaggaagcccaccaagattcactctcgctcacgtgcccgtcgaatgaaggaagccaagaggaaaggacgtcactctggatatggtaagcgtaagggtacaagggaggcaaggcttcccactanaatcctttggatgaggagaatgcgtgtgcttagacgcttgcttcgcaaatacagggaatctaagaagattgacaagcacatgtatcatgacatgtacatgaaggtcaagggtaacgttttcaagaacanaagagtt

SEQ ID NO: 187041 - DNA, 259 bp, Glycine max
  unsure (1)..(259): unsure at all n locations
gagaatatgaagttgtttgttttctttgttgctgcagtagttttggtagcatggccatgccatggcgcaggctaccaaaggttccctctccgaatgaaaactggctatggtgagcgttcttcggaggtaaaatgcgcaagttttaggcttgctgtggaagcacacaacatccgagcccttacaaccattcctgaagagtgcgttgaaccaacaaaggactacattaatggcgaacaattagatcagactctanaacagt

SEQ ID NO: 187042 - DNA, 256 bp, Glycine max
gttctttgtggacgaggtgccaatcagggtgttcaagaacagcaaggacttgggagtgaaattcccattcgaccagccaatgaagatctacaacagtttgtggaacgctgatgactgggcaacgaggggtggtttggagaaaacggattggtcgaaagcacccttcatagcagcgtacaaggggtttcacatcgacgggtgcgaggcttcggtgaacgccaagttctgcgacacgcagggcaaaatgtggtgggac

SEQ ID NO: 187043 - DNA, 262 bp, Glycine max
ccctcgagccgctcgagccgctcgagccgctactccgcccccaagaataaaccctctcttcaatacctcggcgaccccctcaacgagcagaagcgcctcgccaacgtcgccgtcgacgccgtcctcgacagcgtctcaatcgcctcaacgcaccgcaaaaccctagaaaaggccggcgttatattctgctccatctccgaggccattaaggaatatcctgatttggtgaaaaagtatttggggaaagttgtcccgtcagacg

SEQ ID NO: 187044 - DNA, 257 bp, Glycine max
tgatacaatgggttccgataatcaccagaactttgtagtcttgaaggagatcggtttgggctcttccatcattggctcttactttaatgcgcagtggaaagccacttgtgcttctgtcacttctgttaatccttctaacaatcagagtatagctcaagtgaccgaagcaactttgcaagattttgacgatgggttgcgagcttgcagtgaagcagctaagacatggatgactataccggcaccgatgagaggtgaaa

SEQ ID NO: 187045 - DNA, 256 bp, Glycine max
agtgaccgttaagtggcgtggaaagccagtgttcatcaggcgccgaaccgaggatgatatcaagctggcaaacagtgttgatgttggatctcttcgcgatccccagctggatgctgatagagtcaaggacccagaatggctcattgtgattggggtttgcacccatttgggttgcattccattgccaaatgctggtgactttgggggatggttttgcccttgccatggatcacattatgatatttcaggcagaatt

SEQ ID NO: 187046 - DNA, 258 bp, Glycine max
gtgaacaagcctcaggtaagccaaaaccatggttaagcataacaatgttatcccaaacggacacttccgtaagcactggcagaactatgtgaagacttggttcaatcagccagcacggaagacaaggagacgattggctcgtcagaagaaagctgtgaagatattccccagacctacggctggacctctcaggcccattgtacatggtcaaactttgaaatacaacatgaaagtgagaggtggaaggggattttctct

SEQ ID NO: 187047 - DNA, 256 bp, Glycine max
aattgcatcatcagtttctaaaatttttgcatccacattgacatatcctcacgaggttgtacgttccagattgcaagaacaagggcatcattcggagaaacggtactctggtgtgattgattgtattagaaaggtttttcaacaagaaggtgtacagggtttttaccgaggttgtgccaccaaccttctgaggacaacaccagctgctgtgatcacattcaccagctttgaaatgatacaccgatttcttgtttcc

SEQ ID NO: 187048 - DNA, 258 bp, Glycine max
gcaaaacatatcacataatatggcatttaaaggctatttcgttttgggcctcatagctcttgttgtcgttggcacttccaaagttacatgcgaaatagaagcagataaagtttcacctattattgacttttccctcaatcggaacagtttccctgaaggcttcatctttggggcggcatcatcctcctaccagttcgaaggtgcagcaaaggaaggtggtagaggaccaagtgtatgggataccttcacccataaata

SEQ ID NO: 187049 - DNA, 261 bp, Glycine max
ctcgagccgatctttttctgctctttgaagaaagaagggtctttgcttgattttggagatgtctctgctctcagatctcatcaaccttaacctctccgataccaccgagaaggtgatcgcagagtacatatggatcggtggatcaggaatggacctgaggagcaaagcaaggactctcccaggaccagttagcgacccttcagagcttcccaagtggaactatgatggttccagcacaggtcaagctcctggtgaagacag

SEQ ID NO: 187050 - DNA, 263 bp, Glycine max
cgggaccagaagttcgatgagaaggaaaacattgtgttcatcacagtggtgtgttgtagccccgagaagataagagacaagctttgctacaaaggtggaggctctatcaagagcattgagatactggaactgcccaagcccaaggccgagaagcctaaagcagaccctcccaaagctgagaagcccaaggccgagcccgagaaaaagaaggacggtggcggcgagaagcccaaggccgagcccgagaaaaagaaggacggtgg

SEQ ID NO: 187051 - DNA, 245 bp, Glycine max
ctcttcatcttgttctatttgtgacgagcatcatggcctcaagagcagtgttattgttggctatgtgtgtgcttccggcgatggttgtggccattcgcccagcaaagaaccctttttgcgtgaagggtcgtgtctactgtgacccttgccgtgctggttttgagacctcagctaccacctacattgctggtgctgagattatgttgcaatgcaagagcagggttagcaacgaggttgtgtacacg

SEQ ID NO: 187052 - DNA, 255 bp, Glycine max
ctcttcatcttgttctatttgtgacgagcatcatggcctcaagagcagtgttattgttggctatgtgtgtgcttccggcgatggttgtggccattcgcccagcaaagaaccctttttgcgtgaagggtcgtgtctactgtgacccttgccgtgctggttttgagacctcagctaccacctacattgctggtgctgagattatgttgcaatgcaagagcagggttagcaacgaggttgtgtacacgaagaaggggt

SEQ ID NO: 187053 - DNA, 254 bp, Glycine max
gaagttggagatagtgattctggttctgttctgttcttctttctactcacaacaacatcagaatcagaaacaacaatggccaacactaacttggaagatgttccctctctggatctcatgactgagctccttcgtcgtctcaagtgctcttccaaacctgacaagcgtcttattctcattggcccacctggatctggaaaaggcacccagtcaccaatcataaaagatgagtactgcttatgccacttagctac

SEQ ID NO: 187054 - DNA, 245 bp, Glycine max
gcctctgttcaaagtttggtgactaccgcaatgatgatccatcatcttttacattaaacccatcattttcacttttccctcagtttatgttcaatctgcgacgctcgcagtttgtacaggtttttaacaacagtccagacgagactgcatatttccgtatgttgttaaacagggaaaatattagtaatgctgctgttatgattcagccgtcattgatatcatattcatttaatgcgctgcctgca

SEQ ID NO: 187055 - DNA, 254 bp, Glycine max
caaaaaccattgcgcgatcataaccaattcagcaaactacaacttctttgttgaatgtttgacaacaatccaaagtaaattgacacgcataattctattttacattaactgacatatgcaatgcaaaagctacaataaattaaagataagatgatgctatcattcatatcagaagagaatatatatttgatgagtttgcacaatcattcttatatataggtgccaccactgcaacctaattcatgccctcaaag

SEQ ID NO: 187056 - DNA, 260 bp, Glycine max
  unsure (1)..(260): unsure at all n locations
tctcgagccgattcggctcgangggggctacccgctgagtttaagcatatcaataagcggaggaattgaaactaacaaggattcccttagtaacggcgagcgaaccgggaaaagcccaccatgaaaatcggtcgccctcggcgtccgaattgtagtctggagaagcgtcctcagtggcggaccgggcccaagtcccctggaagggggcgccagatagggtgagagccccgtcgtgcccggaccctgtcgcaccacgaggc

SEQ ID NO: 187057 - DNA, 256 bp, Glycine max
gcaccgtctttttattggcaatgttcctagaagctggggtgttgaagatctgaagaagattgtaactgagattggacctggagttactggtgtggaactagtcaaggatatgaagaacaccaacaataaccggggctttgcttttattgactattataaccatgcatgtgctgagtattcaaggcaaaagatgatgagcccaacatttaagctaggtgagaatgctccaacagtgagctgggctgatcctaaaaat

SEQ ID NO: 187058 - DNA, 258 bp, Glycine max
aagacattatcccattcttccagagcgttgttcttccaaaagaagctaccactgttcagaagtgctacattgagcttgccaagcaagtcaaggaaaagcttaccaaggtagatccttactttgacaagttggcagatgccatggtcacttggattgaagcttgggatgagcttaacccagctggagcatcagtggccaatggcaaagcatgaatcagttttggttaactgcataacaacagccacagaacttgaagtg

SEQ ID NO: 187059 - DNA, 263 bp, Glycine max
gtggccaccaattggcaagaagaagttcgagactctttcctacttgccagacctcgatgatgcccaattggcaaaggaagtcgaataccttctaaggaaaggatggattccttgcttggaattcgagttggagcacggtttcgtgtaccgtgagcacaacaggtcacctggatactatgatggacgctactggaccatgtggaagctgcctatgtttggctgcactgatgcttctcaggtgttgaaggagcttcaagaggcta

SEQ ID NO: 187060 - DNA, 268 bp, Glycine max
caggactctgaccgcgtgcctgttgaagaatgagccggcgactcataggcagtggcttagttaagggataccaccggagccgtagcgaaagcgagtcttcacagggcaattgtcactgcttatggacccgaacctgggtgatctatccatgaccaggatgaagcttgggtgaaactaagtggaggtccgaaccgactgatgttgaagaatcagcggatgagttgtggttaggggtgaaatgccactcgaacccagagctagctggttc

SEQ ID NO: 187061 - DNA, 268 bp, Glycine max
cttggactccaagtccaccatcggtgttgaatttcagacgaggactttggttatcgatcacaagaccgttaaggctcagatctgggacactgccggccaagaacgatacagagcagttacgagtgcatattacaggggtgctgtgggggcaatgttggtttatgacatcactaaacgccaaacctttgatcacataccacgttggttagaagaactgcgcaaccatgctgacaagaacatagtcatcattcttacaggcaacaaatgt

SEQ ID NO: 187062 - DNA, 269 bp, Glycine max
aagggaacgagttgactgcgaacggattaaggagtacagacagaaggttgaattggagctatcgaacatctgtaatgatgttatgagagtgattgatgagcaccttatcccttcggctgcagctggtgaatccactgtgttttactataagatgaaaggagattattatcgttatcttgctgaatttaagtcaggcaatgagaagaaggaagctgctgatcagtctatgaaagcatatgagtctgctaccgctgcagcagaggctgatt

SEQ ID NO: 187063 - DNA, 261 bp, Glycine max
caacaatggtgccgcaacacattttgcatctaacccttttgtcattaataatctctctgaccactctttccttggtcgatgccgccgatcccacatttggcttcacccctcttggattatctagtagctcaaacttgcaaatccaaaagccttacgacgttgcagtcaacgagcgctacagcttttcaaatggagtgcacagattttgggtatactccacggacaagcctcatatgcaaggcagcaatacgaagccacgaa

SEQ ID NO: 187064 - DNA, 261 bp, Glycine max
ctcgagccgaaaggcactggttcagtggttgctgttgatcaggaacccaacactcgctactctgttgtggttcgattcaacaaagtcaactatgccaatgtatcaacaaacaactatgctttggatgagattgtggaagtggaatgagtctaatttatgtgtaattttgattctggtcatgctatcgcagttactagcctaaggtttttttatgtcaaaaacaaaaaagaatttgtatcaaaaaaagaaaaataagaaaaa

SEQ ID NO: 187065 - DNA, 276 bp, Glycine max
cgaaaggatggtattcgaattagataccatgatggccatctcaaatccctgcttcatgcgatcagagatatagttaatgtgaagggctactatatatggtcattttcagatagctttgaatgggatgctggttacacagctcgatttggcatcatatatgtggattacaagaacaatttgagtagataccctaagtcctctgcgttttggctgaaaaaattccttctcaagtgatctaaatctattgttcctttggcatgcatgcccagtttttct

SEQ ID NO: 187066 - DNA, 276 bp, Glycine max
gacacatgtaactgacagaatgatgctcaatgctgccaacattttccccttcaacactccaaccaccaaagaagcataccactatagaatgatatttgagaggttcttccctcagaactcagcaaggctcactgttcctggaggaccaagtgttgcatgtagcacagcaaaagctgttgagtgggatgctgcttggtctaacacccttgatccatcaggtagagcagcacttggagtgcatgcatcagcttatggaaaccaggtcaaagctgtaga

SEQ ID NO: 187067 - DNA, 265 bp, Glycine max
gttgacttctacaccacaatcacccgtgccaggtttgaggagctcaacatggatctcttcaggaagtgtatggagcctgttgagaagtgtttgagggatgccaagatggacaagagcactgtccatgatgttgtccttgttggtggatccactagaattcctaaagtccagcaattgttgcaagatttcttcaatggaaaggaactttgcaagagcattaaccctgatgaggccgttgcttatggagctgctgttcaggctgcta

SEQ ID NO: 187068 - DNA, 267 bp, Glycine max
cagatcctcaagaatgagggcgccaagtccttgttcaagggtgccggtgctaacatcctccgtgccgttgctggtgctggtgtgcttgctggttacgacaagttgcaggttcttgtgttcggcaagaagtatggttctggtggtgcttaatttcagtgctgagtcagtgttattattattgttttttagatggcgatgataaaaaccgttctgagtttcaagagttttttagactaatggctgccgcaaattttgtttaataaattt

SEQ ID NO: 187069 - DNA, 269 bp, Glycine max
gttgggggatctcatccattttcagttgaggtgataaccgtgtgtctgtgaaggaaatgacagctagtaaaccacatactactgaaccaatgcataatgtagcatcattctctacaattcatttgagagagcccccttctgtactgagaccattggagagcaattcagagaccgaagctggttgaaatcacagtaacaaagttgcttttgaaatcatactatgacattgtcaggaaaaatgttgaggatcttgtccccaaagcaattat

SEQ ID NO: 187070 - DNA, 275 bp, Glycine max
tcctgccagtagtcatatgcttgtctcaaagattaagccatgcatgtgtaagtatgaactaattcagactgtgaaactgcgaatggctcattaaatcagttatagtttgtttgatggtatctactactcggataaccgtagtaattctagagctaatacgtgcaacaaaccccgacttctggaagggatgcatttattatataaaaggtcaacacaggctctgcctgttgctttgatgattcatgataactcgtcggatcgcacggcctttgtgc

SEQ ID NO: 187071 - DNA, 269 bp, Glycine max
aaccctagtagtgaacccctctataaaacctcttcattctttcattcggtgcctattcccattttcttcctctaaaccctaaacaactctttctcttcttccttcgctcgttgttctccctcgcgtagatcgacaatggcggagacagacacgtttgctttccaggctgagatcaaccagctcctcagtctcatcatcaacaccttctactccaacaaggagattttccttcgtgaactcatcagcaacgcctccgatgctttggacaa

SEQ ID NO: 187072 - DNA, 201 bp, Glycine max
tcggctcgaggaggaccccgttagctgcatggttagagactgcagttgctccctgagataagatgggtggtgttcagtgtctggagcgagagctgttaagatgacaccagctgctaccttgtctgggaatttctccattgcaatggctatgggcagccctccaaggctgtgaccaactagaactaacttctcatataccat

SEQ ID NO: 187073 - DNA, 268 bp, Glycine max
caatgttccacgttctgcttcttctcgttcatcctttgtgggaagaaaaagcgttccacgcagcctgtcctttactgcatcacaacttgtgtggagacaagattcccacagattcagtttgattggctacaaaaataggtcgcagtccagttatcgttactcctaaagcaggttctgattcccagaactcacaaacgtgccttgatcccgatgctagcagaagtgtgcttggcattatacttggaggtggtgctgggactcggcttta

SEQ ID NO: 187074 - DNA, 251 bp, Glycine max
actcgatccgctcgagccgattcggctcgaggaaatttcctatactctacaaatggagccaaacatcccttacccacccttttgtgcaagaagtccttcatcctagagacccactttttaccttcttcaaagcccgctatgaaagtctttctgcttcaaaatagacttatttagggatatttgttgaacaacttgtgtcttgttgagttattgatgtttgaatttcatgtcaaatgatactagctatatgt

SEQ ID NO: 187075 - DNA, 269 bp, Glycine max
atttatagtttactattgaaagatgggtttgaaaatggcagtactgatcctaagcctgctggccatgttccttgtggtctcctcagaggtggcatccgcgaattcaaaagaggtgacaaatggagttgaagatgccaaatatcctggtggaggctatggtgggggttacccaggcaatggcggtggtggctatcctggccgtggtggtggctaccctggtcgtggtggtggctatccaggtcgcggtggtggttaccctggtcgtggtg

SEQ ID NO: 187076 - DNA, 269 bp, Glycine max
gcttgtcaaggattacttcgttgacgagatgaagaagcttggaagcaccaagagcaccaacaacaataatgaacttaaatgcgctattgaccacattttggatgcccagagctaaggcgagatcaacgaagacaacgtcctctacattgttgaaaacatcaacgttgctgcaattgaaacaactctatggtcgattgagtggggcattgctgagcttgtgaaccacccagagatccagcaaaagttaagggatgagattgacagagttc

SEQ ID NO: 187077 - DNA, 258 bp, Glycine max
gcaatttcaagccactattactgagcttcacaaaatcaaagaactcgctgctgcagctaccaccagaagcttatctaattgtcactaaacatagcaatgtctgcttgggaattctagatggcactgaaataggactaggaaatactaacataattggagatatctctttacaagataagttagtgatttatgacaacgagaaacagcagattggatgggcctctgccaattgtgatagatcttccaattcataaataa

SEQ ID NO: 187078 - DNA, 183 bp, Glycine max
ctcgagccgggaggaccgagtgcatcccacgctcgggcgtactcatgaccgcatcaggtctacaaggtgaacagacctctggtcgatggaacaatgtaggcgagggaagtcgtgcaagatgtgatccgtaagctcgggaagagggttagctctgagggctgagcacgggggtcccagtcccga

SEQ ID NO: 187079 - DNA, 264 bp, Glycine max
attatgatggtgtagatgggattcttgacaagcaacttatgggaaaatgcaatcttgaagaagtgagacagcttacgtaaattgcacacaaatgtttggacaaatcacctaggtaacgcccctccattggtgaggtttcgcagggtatattgatgatgaagctaagacgcctcatgtaagaagacaccatgtcatgtgcaagcagcaacttctcccgtagtgtgagtcagatagaggaacagacaggttgaattaagtaaaata

SEQ ID NO: 187080 - DNA, 264 bp, Glycine max
ggggcaggttccatcttaggtggggatgtagagaagtacttcatgacaaatctgctgatgggagtatttatgttacaggactttccatgtcaaaggctactgccaagaaaattgtgaaagctgatgcttatgtagctgcttgtgatgtccctggaattaagagattacttccatcaaagtggagggaacaggagtttttcaataacatatatgaactagttggagttcctgtagtcacagtgcaacttagatacaatggttggg

SEQ ID NO: 187081 - DNA, 266 bp, Glycine max
ctcgagccggcggatgttgacgcaatatgatttctgcccagtgctctgaatgtcaaagtgaagaaattcaaccaagcgcgggtaaacggcgggagtaacgatgactctcttaaggtagccaaatgcctcgtcatctaattagtgacgcgcatgaatggattaacgagattcccactgtccctgtctactatccagcgaaaccacagccaagggaacgggcttagcggaatcagcggggaaataagacctgttgagcttgactctag

SEQ ID NO: 187082 - DNA, 270 bp, Glycine max
cggggtcccagtcccgaacccgtcggctgtcggtggactgctcgagctgcttccgcggcgagagcgggtcgtcgcgtgccggtcgggggacggattgggaacgggcccttcggggcctcttccccgggcgtcgaacagtcaactcagaactggtacggacaaggggacaccgactgtttaattaaaacaaagcattgcgatggtccctgcggatgttgacgcaatgtgatttctgcccagtgctctgaatgtcaaagtgaagacattcaa

SEQ ID NO: 187083 - DNA, 274 bp, Glycine max
gggtaagggaacggggagtttcggtaagaggaggaacaagacccacaccctctgtgtgaggtgtggccgccgcagcttccacctccagaagagtcgttgctctgcgtgcgcttaccccgctgcgcgcaccaggaaatataactggagcgtgaaggcctctaggagaaagaccaccggaactggaaggatgaggtacttgcgtaacgtgcctcgcagattcacgagcggcttcagagagggtagcgaagctgcacccaggaagagaggagctgct

SEQ ID NO: 187084 - DNA, 283 bp, Glycine max
tcggaattctgatcgaagcaatggtgtacgtcaaggctcagaaatcaaaagcctacttcaagagatatcaagtcaagttcaagagaagaagagagggaaaaaccgattaccgtgccaggattcgggttattaatcaggacaaggacaaatataacactccgaaataccgatttgttgttcgctttagcaacaaggacagtgttgcacaaataatatctgctagcattgctggcgatattgttcttgctgcagcatatgcacatgagctgccacaatatggtct

SEQ ID NO: 187085 - DNA, 265 bp, Glycine max
tagggcacctgcaacactgtctctgtctctcctcctcctggtctcactcagcatcgccgtaaccgttagatcgagcgactacgactacgattgtgtgtacactgcatacgttagaaccggttcggtgttgaagggcggaacggactctaagatcgggctgaagctgtacgacaagtacggctactacatctacattaaaaacctcgaagcatggggcggcttgatgggcaagggctacgactacttcgagcgcggcaacctcgac

SEQ ID NO: 187086 - DNA, 272 bp, Glycine max
gtttgcttcccaagtctctcgaagcatctttctttctcttcctgcagaagctatccgtgttacttgttcccaagtctccaacaagcaaagtacatggttgatttggaaatccaggtccccagcgcattcgacccgtttgccgaggcgagagaatcagatgcccccggggcaaaggagtatgtgcacatacgaattcagcagaggaatggaaagaagagtctgacaacagtgcaagggctgaagaaggagttcagctacgagaagatcctcaa

SEQ ID NO: 187087 - DNA, 265 bp, Glycine max
gcgctgttggacatgttttgaatgttctttagatgattcaagtgtcagcaaagtatttcttgtcttcgaatatgtaccaaatggcacgctcaggaattggatctctgatgagcatgctagaaaatccttgagttggactcaacacataggagctgcaattggagtggcaaaaggaatccagtttttgcatacagggattgtccctggtgtatattccaatgatctgaagatagaagatgttttattggatcagaatcttgttgca

SEQ ID NO: 187088 - DNA, 273 bp, Glycine max
gagaatgatgatgaagtctgctatgtgtgcagtggtggttgtagcacttcttcttctggcggaagtggggcccatggctgaggctgtgacatgcaacccaacagagttgagtccgtgtcttccagcaatcacttccggtgctaaaccttccaatgcttgttgcacgaagctgaagcagcaaaaaccatgcttatgtggctacctcaaaaacgctagcttgaagcagtatgttaactctcctaatgcccgaaaaaccgttgcttcttgtgggat

SEQ ID NO: 187089 - DNA, 275 bp, Glycine max
cttgagaaggtgttcggaaccgagcactcccacattcttcgagttccctttagaactgagaagggaattgttcgtcagtggatctcaagattcgaagtctggccatacttggaaacttacactgaggatgttgctcatgagcttgccaaagagttgcaaggcaagccagatctgattgtcggaaactacagtgatggaaacattgttgcctctttgttggcacataaattaggagtcatcagtgtaccattgctcatgcacttgagaagaccaat

SEQ ID NO: 187090 - DNA, 288 bp, Glycine max
gagaatatgaagttgtttgtattctttgttgctgcagtagttttcgtagcatggccatgccatggcgcaggctaccaaaggttccctctccgaatgaaaactggctatggtgagcgttcttcggaggtaaaatgcgcaagttttaggcttgctgtggaagcacacaacatccgagcaactaaaaccattcctgaagagtgcgttgaaccaacaaaggactacattaatggcgaacaatttaggtcagactctaaaacagttaaccaacaagctttcttttatgctagt

SEQ ID NO: 187091 - DNA, 218 bp, Glycine max
cctaggcacccagagacgaggaagggcgtagtaagcgacgaaatgcttcggggagttgaaaataagcgtagatccggggattcccgatataggtcaacctttcgaactgctgctgaatccacgggcaggcaagagacaacctggtgaactgaaacatcttagtagccagaggaaaagaccgaaaagcgattcccgtagtagcggcgagaaaaatggga

SEQ ID NO: 187092 - DNA, 283 bp, Glycine max
ctccctaccctattccgctttctctcatccatcatgaaaggaggaaagtccaagaccgaatctaagagagccgatgccaaacttgctgtgaataagaagggcgccgacaccaagactaggaaacccgccggaaaggggaaggcagcgaaagatcctaacaagccaaagaggcctccaagtgctttgcttcgttttcatggaggaattcaggaaggtgttcaacaaggaacatcccgacaacaaagcagcatctgctgtgggcaaagctgctggaacaaaatgg

SEQ ID NO: 187093 - DNA, 277 bp, Glycine max
aaccctagtagtgaaccctctctataaaacctcttccttctttcattcggtgcctattcccattttcttcctctaaaccctaaacaactctttctcttcttccttcgctcgttgttctccctcgcgtagatcgacaatggcggagacagagacgtttgctttccaggctgagatcaaccagctcctcagtctcatcatcaacaccttctactccaacaaggagattttccttcgtgaactcatcagcaacgcctccgatgctttggacaagattcga

SEQ ID NO: 187094 - DNA, 279 bp, Glycine max
  unsure (1)..(279): unsure at all n locations
cttattcgttcctcactcaacagcaccatantctctcttctctgaccagtaaacggctgttttgtatacgagatgtcccagtatcagcctatacatcccaagacatcaaaacaactggttgggctccttgtatggcttcttcctcagttggtagaagggctacatattcaacacaatctgtatcaacagatgagccaattgtatctgtagattggctttatgataaccatgaagacccagatatcaaggtactagatgcttcgtggtacatgccggatg

SEQ ID NO: 187095 - DNA, 168 bp, Glycine max
cactcgagccgattcggctcgaggagcgtgcaactttcggcaaccaacgaccatgacattcaaccgcaggaatggaggtcgcaacaaacgcggcagcggacatgtcgactgcatccggtgctacaactacggaaaatgctgccccaagggcaaggcaatcaagaggtt

SEQ ID NO: 187096 - DNA, 260 bp, Glycine max
ctaacaccagctgcttgcaccattgtttcttcgctcagaagctataatgtcgactcctatgttctatctgagtccagcctctttgtttatgcctacaagatcatcatcgaaacctgtggtactactaagctattgcttgcaatcccacccatattgaagttcgctgagatgctttcactgaatgttaagtctgtgaattacaccaagggaagtttcattttccccagtgctcagacatatccccatcgcagcttttctga

SEQ ID NO: 187097 - DNA, 284 bp, Glycine max
actcgagccgaatcggctcgagcgcaaatctcaatcgaatctcagacaaatgagagaactcatcagcattcacataggtcaggccgggatccaggtcggaaactcctgctgggaactctactgcctcgaacatggcatccagcccgacggcaatgatgccttctgactccaccttcggtgtagcccacgacgccttcaacaccttcttcagcgaaaccgggtctggcaagcacgtcccccgtgctgtctcggtagacctcgaacccaccgtcatcgacgaggtc

SEQ ID NO: 187098 - DNA, 176 bp, Glycine max
agcagatcctccatggcctccaccaaggaacgtgaaaacttcgtctaagtcgacaagatcgacgaacaagccggacgctatggagaaatggtggaagcaatgaagaatgtggcgaactaaacgtggaattgacggtagagggacgggaccttctgtcggttgggtacaaggacgtg

SEQ ID NO: 187099 - DNA, 240 bp, Glycine max
cggaattaggatcgagggtgcatctgacccttatgtgaagctaaagcttactgaggataaattgccatcaaaaaagactactgtgaagcacaataacttaaatcctgaatgggatgaagaattcaatatagttgttaaagatccagactcccaggttttagagattaatgtatatgactgggagcaggttgggaagcgtgacaagatgggtattaatgggatccctttgaaggaagtttc

SEQ ID NO: 187100 - DNA, 279 bp, Glycine max
agaagatggattacagtgctggttcgagtctgtttccgttgcacagttgcaaaaccattcacctggttggtgatgcacgcgcaggggattcacaatgtggagggtgacaaaaactacaaagcctacatgaaccccgattacttcgatgctcatctcactcccttgggatggcaacaggttgacaatttgcgtaacatgttcgcgactctggcactatcaacaccattgatctagtcattgcatctcctttgatgaagactctacaaacaactgttgggg

SEQ ID NO: 187101 - DNA, 248 bp, Glycine max
  unsure (1)..(248): unsure at all n locations
tgcgagtgttctttcttcgtttcaacaccttgatttgcaagcgatgcttcttcagnctgagaaatggcacaagaaacctttctattcacatctgaatctgtaaacgagggtcaccccgacaagctgtgcggccagatctctgatgcagtgctcgatgcgtgccttgaacaggaccctgacagcgaggttgcctgtgagacatgcaccaagaccagcatggtcatggtctttggagagatcacaaccaa

SEQ ID NO: 187102 - DNA, 251 bp, Glycine max
atctcaatggaggcccaggagctgaagcgcgtgttccagatgttcgaccgcaacggcgacgggagaataacgaagaaggagctgaacgactcgctggagaacctgggcatcttcatctctgacaaggacctgagccaaatgatccagaggatcgacgtcaacggcgacggttgcgtggacatggacgagtttggggagctgtatcagaccataatggacgagcgcgacaatgaggaggacatgagggaggc

SEQ ID NO: 187103 - DNA, 276 bp, Glycine max
cagcaatggtgtaggtcaaggatcagaaatcaaaagcctacttcaagaggtatcaagtcaagttcaagcgaatgagagagggtgaaaccgattaccgtgccagtattcggttgattaatcaggacaagagcagatataacactccgaaataccgatttgtggttcgctttatcaacaaggacattgttgcacagataatatctactagcattgccggcgatttagttcttgctacagcatattcacatgagctgccacgatatggtcttggaagta

SEQ ID NO: 187104 - DNA, 198 bp, Glycine max
ctcgagccgctagatgacactgctgatttcaagaacttcaaggaatggggagacattgaatttccactgacatttggaagtgttatgagtgccacagagtctttcattcatagattagatgaaaagacaagtgcatccttagaattcacagtgttgaacccagagggccgaatttggacaatggtagactggggaagg

SEQ ID NO: 187105 - DNA, 299 bp, Glycine max
  unsure (1)..(299): unsure at all n locations
ctcaagtccancctacccctttttcttctcccaccaacttcaccgtcttcttcctcgatcatgtctcacttgcaagggcaagtaccatgatgancttattatnaatnctgcttacattggcactcctggaaagggtattnttgctggntgatgagtcaacagggacaattgggnangcgtttgnncnggcatcagtgtaggnantgttgaatccaacangcgtgntcttaggnagttgnttttnaccgatccnggggngcgtgaantagctcagggntgntcagccctcttgngggaaa

SEQ ID NO: 187106 - DNA, 277 bp, Glycine max
gtacggacaaggggaatacgactgtttaattaaaacaaagcattgagatggtccctgcggatgttgacgcaatgtggtttctgcccattgctctgaatgtcaaagtgaagagattcaaccaagcgcgggtaaacggcgggagtaactatgactctcttaaggtagccaaatgcctcgtcatctaattagtgacgcgcatgaatggattaacgaggttcccactgtccctgtctgctatccagcgaaaccacagccaatggaacgggctttgcggaat

SEQ ID NO: 187107 - DNA, 269 bp, Glycine max
  unsure (1)..(269): unsure at all n locations
cgaaccagcntgtggaatggagcaagatccagacgcntacggacgaatggntgtgcctacgacactttggcgcnanctncctgaaggttcttcggaggtnaagantctattggacaagcttgtggtgttgaagctaaatggaggcttgggaacaactatgggttgcactggtcctaaatctgtaattgnnttcgtgcacgggtganntttcgtatnttgcaatnccatgccnaattggnggnacntcanttnccnactntggcgngcnt

SEQ ID NO: 187108 - DNA, 173 bp, Glycine max
gcaatcgtcgtggacgtcgattcctaagatctgataggcgacagtcgcagtttgactacatagatagtggtagtgtggtgagaccaggcaattacagactggtgagaccatatcctaggcgtgcttttagtgatggagaaagtgctgcgacattggatgaacttggcctgacc

SEQ ID NO: 187109 - DNA, 154 bp, Glycine max
gtgtcaatgctgatgaggaggaatagcatggattaactcaatgggagtcaattatctggctggctatcttgacagcatgggtatctatagtgtctggataccttgtagacgccatacagggagcatctgagtcattggatatgtcagtggcttg

SEQ ID NO: 187110 - DNA, 277 bp, Glycine max
cttatggactccatggtcaatgttcaggaccaaagtgatgatggtgattctccatcagattctgatgagtgtggtgggttaatgcatgtgctgagagacatgagcatgcttcagagttgcagaagtgtgtgtgagtttgagatgattaagaaaataaacgaaggaacttatggtgttgtctacaaggctagggactaagagactggagaactagtagcattggagagagtgaagatgaacatagagagggatggatttccaatgtcatccttgagag

SEQ ID NO: 187111 - DNA, 249 bp, Glycine max
atttgcatttgcagttcatttggcgtagtgtttctttctagaagcttcgttcgggcatcaatggcgtccttcgatgaagttcctcccggaaactccaagaactgcgataagatcattcgaactcagtacgctcagtgccacaccgacgacaaaggttccggccacaaacacggacccagtctgaatggtttgtttggaagacaatctggtaaaactactggatattccaattctacttctaacaaaaca

SEQ ID NO: 187112 - DNA, 191 bp, Glycine max
agtgaaaattctgatgaggaggaagaacatgaattagctcaatgggaggcaattatctggcttgctatctggacagcatgggtatctgtattgtctggataccttgtagacgccatacagggagcatctgattcattgaatatttcagtggctttgattccagtcatcttgcttccagttgtaggcgatgc

SEQ ID NO: 187113 - DNA, 200 bp, Glycine max
attctgaggagagcctttgatgatgaagagcatccttatctgccagagcacattttatacaggcagaaagaacaattcagtgatggagttggctatagttggattgatggccttaaggcccatgctgcaaaacatgtgactgaaaaaatgatgcttaatgctggtaacatttacccccagagcaccccagagaccaaggg

SEQ ID NO: 187114 - DNA, 223 bp, Glycine max
gcatcatggcgtcaagatcagtgttattgttggctatgtgtgtgcttccggcgatggttgtagccattcgcccagcaaagaaccctttttgcatgaagggtcgtgtctactgtgacccttgccgtgctggttttgagacctcagctaccacctacattgctggtgctgatattatgttgcaatgcaagagcatggttagcaacgaggttgtgtacacgaagaa

SEQ ID NO: 187115 - DNA, 277 bp, Glycine max
gtgaggataacaagaaggtgaaaaaggtatcaaaacctgctcttattccagcagtagaggttgatccaacaggctgctctttcaatccctcacatgaaagtcaccaggatacattagcttctgctgttgcggaagaaatgcaaaaaatctacaaaaatgaattgggccctgaaccagtgccattaactgttcctggagaagctattgctgaagaagatatgtattttcttgatgtggacaatgggagtgacaatgatgaaagtactcttgaaaatga

SEQ ID NO: 187116 - DNA, 275 bp, Glycine max
ggactacataatgtcgaagcacgcggtgttggggttgatgcgttcggcgagcgtgcagcttgcggaacacgggataagagtgaactgcgtctcacccaatgggttggcaacgccgttgacttgtaaacagcgagggatgagcgaggaggaggggcaagaggtttaccggaaatacgcgagattgcaaggagtggtgctcacgcccaaacacgtggcagacgccgtgttgtttctcgtctctgatgactccgcctttgtcactgcccttgatctta

SEQ ID NO: 187117 - DNA, 276 bp, Glycine max
taactcgagccgattcggatacgactacgatgggtaagggagcggggccattcggtgagagaagacacaagacccacaccctctatgtggagtgtggacgccgcagtttccacctccagaagagtcgttgcgccgcgtgcgctttccccgctgcgcgcaccaggacatataactggagcgtgaaggccattaggagaaataccaccggaactggaaggatgaggtactttcgtaacgtgccccgtagatttaagagtggcttcagagacggtaccg

SEQ ID NO: 187118 - DNA, 215 bp, Glycine max
cgcatagctgcgtattccgaatcgaaaggtgacgttagtaagtaacaatggtggagaaggccaagggtaggaaggaggaggttgtcactcgagagtacaccatcaacctccacaaacgcttgcatggctgcacatttaagaagaaggctcctaaagcaattaaggagataagtgagtttgctcagaaagcgatggggacgaatgatgtaagagtg

SEQ ID NO: 187119 - DNA, 158 bp, Glycine max
caatggcgccgaataagccgagaaccacgacaaggaaccctgatttggttaaggggattggcaaatattcgaggtcgcagatgtaccacaagatgggcatctgggccatcaaggccaaaatctgtggcattttgcccggccacgatcccaagcccaag

SEQ ID NO: 187120 - DNA, 219 bp, Glycine max
gcaccagcagctaccttcgctattggaagcaccggttccctcggccaaagaggaagctcgatttctcaatcaaagtcctttgggttgaagttcatctctctggatcatttgaagagcttctgtggactcgaggccatgtcatccgtgagatgtgagtcagaatcgtccttcttaggtaacaaaaccggtggtgctgtacggacgtcttttccatccaaa

SEQ ID NO: 187121 - DNA, 139 bp, Glycine max
tagaactccttctggccatgagctgtctttgcaaaggcaaccccgacgcgcttttgatgggcaacggcttcaaggacgcggagtacatttctcttgccctggttgccaacaaacttgccctcaacaccgtgattgttgt

SEQ ID NO: 187122 - DNA, 285 bp, Glycine max
tctcgagccgattcggctcgaggagcgtgcaactttcggcaaccactgaccatgacattcacgcgcaggaatggaggtcgaaacaaacacggccgcggccatgtcaaattcatccgatgctccaactgcggaaaatgctgccccaaggacaaggccatcaagaggtttttggttaggaacattgttgaacaggctgcagtcagagatgtgcaggaagcttgtgtctatgaacaatatacacttccaaaactctatgtgaagatgcagtactgtgtttcctgtgcc

SEQ ID NO: 187123 - DNA, 281 bp, Glycine max
tggggtggataagggttttggacattgtgggttttatgcccctttctctgtctcttgtttgctgggttagatttttggggtgttagggtttcgtggcttgattttttggttgtgctgtatgaaataggtttgatttcgaaagcgattttgagggaagaagaagatgaggccgatttttgctgggaacttggagtacgatactcgtcaatcagagcttgagcgcttgttctcaaagtatggaaggattgaccgcgtggacatgaaatctggttttgcttttg

SEQ ID NO: 187124 - DNA, 286 bp, Glycine max
gccaattaggaggtacccgaggaagagtggtgcaacatttcctctgaggccaatgtggctatatggttcaatatgggatgcatcatcatgggcaactgaggatggaaagtacaaagctgatctataaataccaaccttttgtggcaaagtataccaatttcaaagctagtggttgctcagcctatgcccctcgttggtgccatccagtttcagcctcaccatataggtctggtgggttgagtaggcaacaacatagtgccatgagatgggtgcaaagataccacat

SEQ ID NO: 187125 - DNA, 286 bp, Glycine max
  unsure (1)..(286): unsure at all n locations
gccaaatcaaaatattgaaaagccgcgaggngaggtttcgtttcgtttcgttcagttcncacattctattctctatcgattcctcttccctttttctcaatccactacaccacagttatgaggagccaacttgtgtgtaatgggtgtaggagcatcttggtttacccncagaggagcaaccaatgtttgctgtgcgttgtgcaacaccattacctctgttcctcctcctggaatggacatgtcacaactctanngtggaggctgtacgacattgctaatgtacaca

SEQ ID NO: 187126 - DNA, 281 bp, Glycine max
atcataatcgtcagcgtcaattgaagaagatgccgatcagaaacatcgccgtcggaaggcctgaagaggcgactcaccgcgacacgttgaaggcggctttggctgagttcatctcaaccttcatcttcgtgttcgccggctcaggctccggcatcgcctacaacaagctcaccgacaacggcgctgccacccctgccggcctcatctccgcctccatcgcccatgcattcgccctcttcgtcgccgtctccgtcggcgccaacatctccggcggccacgtc

SEQ ID NO: 187127 - DNA, 286 bp, Glycine max
ctaggcactctctattcccattcattgcagaagaagatggaggctcacccctacgtcccacgcgatttgcacttacccggctacgctccctgcttcctttccatgtccaacattctttccgtcttcgcctcctcctcattgctcatcgtcactctcgtctggatcttctctggacgctttaagaaaaccaaagttgatagagtgctgatgtgctggtgggccttcacaggtctcacacacattattcttgagggttattttgttttctctcctgagtttttcaagg

SEQ ID NO: 187128 - DNA, 215 bp, Glycine max
ctttcaagcacacagcaggaaaatggtctggggatcctgatgacaaaggtcttcagacatataatgacgccaagcattttgccatatctgcaaagatacccgagctaagcaacaaggacagaaccctggtgctgcagtattctattaggtttgagcaggacattgaatgcggtggcggttacatcaaacttctttctggttatgtcaatcagaag

SEQ ID NO: 187129 - DNA, 283 bp, Glycine max
gtacaagcaagtgcttctaaaggactatgttaccggttttcccaaagaatccgacatgaatattgtcgaaagtaccataacattgaagcttccacaaggttccaatgatgtcttgctcaaaaatttgtatttgtcttgtgatccgtatatgaggaatctcatgaacaggcccgaaggccctcccaatagtcgtgcttacactcctggctctccattaataggatatggtgtgtctaaagtcctggaatctgggcacccagattataaggaaggtgatttagtg

SEQ ID NO: 187130 - DNA, 279 bp, Glycine max
tatcaaggcacttcttgttgctgcaactgactgtgaacctcaatatctaatccgtttgctacagacaaagttgcgaattggctatgctgagaaaactctcttagctgcattgggccaagctgcagtatacactgaagaacactctaaaccacctcctgatattcagtctcctttagaagaggcttcagagattgttaaacaagtctattctgtacttcctgactatgacaaaataatatctgcactgcttacagagggtctatggatgcttccaaagaa

SEQ ID NO: 187131 - DNA, 282 bp, Glycine max
gctataagctagtttatcgtgaggagaatatgaagttgtttgttttctttgttgctgcagtagttttggtagcatggccatgccatggcgcaggctaccaaaggttccctctccgaatgaaaactggctatggtgagcgttcttcggaggtaaaatgcgcaagttttaggcttgctgtggaagcacacaacatccgagctcttaaaaccattcctgaagactgcgttgaaccaacaaaggactacattaatggcgaacaatttagatcagactctaaaacag

SEQ ID NO: 187132 - DNA, 239 bp, Glycine max
ctcacttctagggttttctctgcgctataagcaatcatggcggatgaaacaccaaatgagatgaaggaggaggttccagaaattgttccttttgatcctaccaagaagaagaagaagaagaaaattacaattgtagatcctgctgatgaacctgtggagaaattggctgagaagacagaaaacctctcagtttccgagggggttgagactgcatttactggtttgaaaaagaagaagaa

SEQ ID NO: 187133 - DNA, 224 bp, Glycine max
ggaagcagaaatagcaatgtttgagaataacattgttctttacaagtttgtccaagatcttcacttctttgttaccggtggtgattatgaaaatgagcttatcttagccacagttctgcaggcattttttgattctgtgggccttctgctcagaggcaatgtagacaagaaggaagcactagagaacttggatctcattctattgtgcattgatgaaattgttg

SEQ ID NO: 187134 - DNA, 281 bp, Glycine max
cctcgagccgattcggctcgagctagtctccatacatcaacttgaccggttaaagagacggacaacgttgtgctgtccgcctacgaccgagccagagcttcgtcttggccctcgattttgccctgtaaaactaatcccagtcacaacagaaataatcaatggcaccgaaacagaccaaggctgagaagaagatcgcttacgatgcgaactgtgcgacctaatggaggagtacggccaaatcctcgttgtaaactccgacaacgtgggatcgaaccagctcc

SEQ ID NO: 187135 - DNA, 279 bp, Glycine max
ctcgagccgctcgagccggttttaatttcttccaattccatggctgggaaagattgaatcctgattttgggacccactggagccattggaaggcacatagtctgggcaagtgtgaaggcagggaacccaacatttgtgttggtgaggaacacccctggctctaacaacagggtcaatctggtcaaagctgctaatcctgaaaccaaggaagagctcattgagagcttcaaaaattcaggattaaatctaattcagggagatatgaatgatcatgagagt

SEQ ID NO: 187136 - DNA, 215 bp, Glycine max
gcgatttttccctcaccaaagaagaaccaaaacaatggcggatcaactcaccgatgaacagatctccgagttcaaggaagccttcagcttgttcgataaggacggcgatggttgcatcacaaccaaggagcttggaactgttatgcgttcattggggcaaaacccaactgaggcagatctccaggacatgatcaatgaagtggatgctgatggga

SEQ ID NO: 187137 - DNA, 187 bp, Glycine max
tgaacctttttgcgtgaagggtcgcgtctactgtgacccttgccgtgctggttttgagacctcagcaaccacctacattgccgatgctgagattatgttgcaatgcaagagcagggttagcaacgaggttgtgtacaccaagaaggggtacactgactcaactggagcttacacaatgtacgtggac

SEQ ID NO: 187138 - DNA, 177 bp, Glycine max
ctgcaacgttgtgctgtccgccttgaccgagccagagcttcgtcttggccctcgattttgccctgtaaaactaatcccagtcacaacagcaataatcaatggcaccgaaacagaccaaggctgagaagaagatcgcttacgatgcgaactgtgcgacctaatggaggagtacggcca

SEQ ID NO: 187139 - DNA, 269 bp, Glycine max
  unsure (1)..(269): unsure at all n locations
ggcgatcctagcactctcttctgcagctttcgccgacagcttcattcaccatggctgagcaaaccgagaaggcttttttgaaacaaccaaaagtgtttctcagctcgaagaaaactgggaagggaaagagacccggaaagggtgggaaccgcttttggaaatccattgggcttggatttaagactcccagggaagccatcgaaggaacctacattgacaagaagtgccccttcactggcaatgtntccatccgtggccgtatcttggct

SEQ ID NO: 187140 - DNA, 271 bp, Glycine max
gtcttgatgtctgaggcattggaagaggttgttccttcaatgaaaggagggtgtgaagaagaagggttgaacctgaaggctactgagctgaggcttgggttgccagggtgtgagtcaccagagagggatggtgtgtgtaagactgtagtggtgtctggggccaagaggggtttctctgatgccattgatttgaactggaatggtggaggatctgaaatagatgccgctgccttgttttctccaacttcaatgggtgctgttagtgttagtg

SEQ ID NO: 187141 - DNA, 194 bp, Glycine max
aagttatcctcataaatacactctaattaggtggcaagataagtgtctaaccttagtaacattgccacatattgtgttcattttggaattgtgccactaaaattctattcaattcatctatggctgcctcttcttatgctatgcaatcaatcctggcaaaccctttgatccgcatttccagcgggtctagggtg

SEQ ID NO: 187142 - DNA, 279 bp, Glycine max
gaacgagcgaccttcttcgtttctcgcaaagtttaagtcatcatgggtaaggaaaagactcacatcaacattgtcgtcattggacatgtcgactctgggaagtcaactaccactggtcatttgatctacaagcttggaggtattgacaagcgtgtgattgagcggttcgagaaggaggctgctgagatgaacaagaggtcattcaagtatgcctgggtgcttgacaagctcaaggctgagcgcgaaagaggaattaccattgatattgctttgtggaag

SEQ ID NO: 187143 - DNA, 214 bp, Glycine max
ctgagtttccacactgcataccttaggtcttccgaattcgaagttaatttgcaagatggctaaggaaaaggctcagatcaacattgtggtggttggtcatgtggaccctgaggaggcaaccaccattaacgagctgaagaagcctgttgtggagaaagaagctccagggcatgccatatgagggcatgcacgtacggcctcggaggggaaccag

SEQ ID NO: 187144 - DNA, 183 bp, Glycine max
ctggccttggctgtgatattggggcagcgcagagatacgtaacaagttctatcagtgaggaagtttccggtctccgaaaatgagcgacgcagatgtctcgaagcaaatccagcagatggtgcggctcagccgccaggaagctgaggaaaaggccaacgagatctctgtctccgccgaagagga

SEQ ID NO: 187145 - DNA, 228 bp, Glycine max
aatgaaaccaaccccgttttgtttctgagcccgaggttcaagggcccaaggttgcgtttctcttcattgcacggaacaggctccctttggaaatggtttgggatgctttctttaggggaggcgatcgcaaattctcaatttttgtacactgcaggcctgggtttcttctcaacaaggcaacgactagatcaccatattttttgaatcgtcaagttaatgatagcgtac

SEQ ID NO: 187146 - DNA, 274 bp, Glycine max
caagctgaggaccctgctgctcgacgttacattatttcattcaatgcaaacaccactcttgtagttgagggcgtggaatttgtaaagtgtgaggttgtgggacagagcttcatgcttcatcagatacggaagatgattgggctggcagtggcaatcatgagaaattgtgcaccagagtcacttatcgatgaagctttgcagcaggatgttaacattaatgtgcctactgcccctgaggtgggattatatttggacgagtgcttcttcacttcat

SEQ ID NO: 187147 - DNA, 275 bp, Glycine max
tctcgagccgaatcggctcgagcggctcgagcggctcgagcggctactgatacttcccatccactggagtcatcacaacattactgtttggctgctatgtttcagccgccaattttggagttccatccacagagccgattacatggcattgcgcttaggcttcattactaatcatggtcttcccacaacatacgatttccacaactatatgcttcgaagcatggatgaggaatttcgtgacatagttggtgttagtgtgcttctctggatatatg

SEQ ID NO: 187148 - DNA, 118 bp, Glycine max
  unsure (1)..(118): unsure at all n locations
cgggcaactgggcaggaatatgcggacttctangaggagttcatgcgcgcagttaagcagaattatggggagaaagttctcgtacagtttgaggatttcgccaatcataatgcatttg

SEQ ID NO: 187149 - DNA, 184 bp, Glycine max
atgtccgggatcatccacaagattgaggagaccctccatgtgggagggcacaagatagaggagcacaaaggagaacaccatggtgagcacaaaggtgaacacaaaggagaacaccatggtgagcacaaaggtgaacacacaaggagaacaacaccatggggagcacaaggagggacttgtggat

SEQ ID NO: 187150 - DNA, 278 bp, Glycine max
ctctctctcacaaaatgacaacaatatcaaattgctcccttctcttcctcttcctcttcctctccaccctccacatagcttccaccctctcaacccccaccaacttcatcaagtcctcctgcagcaccacccagtacccagccctctgcatccagtccctctccgtctacgcctccaccatccagcaagacccccacgagctcgtccagacagccctctccctctccctcaaccacaccgaggccaccaaaaccttcgtcgcaaaatgcaacaaattc

SEQ ID NO: 187151 - DNA, 263 bp, Glycine max
aagtccctccttcctctgccttataattcttgtgaccttttggctggtagcattgaaagtgcaccagcaaacgtgaagccaagccattatgctgcacccttcaataggagtgtttttccttctggttttctatttggaataggctctgcagcttaccagatagaaggagcagcagctatagatggcagaggaccaagtatatgggacacctatactaaacagcaaccagggaagatttgggatcatagtgatggaagtctagc

SEQ ID NO: 187152 - DNA, 277 bp, Glycine max
aaaaaattactttatagtaatgtgaatctgaaggtagtgagtcacatgtgtcctttcaattctgctgcttttccagacagtttggcaattgcaaaagaaggtgagcttactattggcactattgatgatatacaaaaacttcatattcgctctattccgctgggggagcacgcacgacgtatctgccaccaggagcaatctaggacttttgctatttgtagtttgaaatacaacccagctagtggtgaagactcagaaatgcactttgtccgcttgc

SEQ ID NO: 187153 - DNA, 281 bp, Glycine max
gtccgattccccgacaatggccacccaaatgagcaagaagagaaagttcgtagctgatggagtgttcttcgctgaactgaacgaggttctgacaagggagttagccgaggacggatactccggcgtggaagttagggttacgccgatgcgcaccgaaatcatcatcagagccaccagaacccaagccgttctcggtgagaagggaaggagaatcagggaacttacctcggtggttcagaagaggttcaagtttcccgagaacagtgttaaactttatgctg

SEQ ID NO: 187154 - DNA, 244 bp, Glycine max
cgaggagtgggctttggagaagaagcaggaactcgatgccgcaaagaaaaagaggttcgaaacgcggaagctgatttttaacagagccaaacagtactcaaaggaatacgacgagcagcaaaaggagttgattaggttgaagcgtgaagccaagcttaagggagggttttatgttgaacctgaagctaagctcttgttcatcatcaggatccgtggtatcaatgcaatggatcctaaaacaggg

SEQ ID NO: 187155 - DNA, 256 bp, Glycine max
gtttggcattggtctgttaacagaatggctgccactgccacgagctgcaggaacatcatggttgtgcttcccctcataggttgtgatcacagcccttaggtcatgtgaagctctttccacatgcttcctcactggacatcctgggtgtgtacacttgtagtaactcctacatgtcacaagtttagcacagtatcagacaagcccatctaggagtgctattattcttctaaatcacatggacacattggaaaaccga

SEQ ID NO: 187156 - DNA, 281 bp, Glycine max
gaaagtgctacctctatttaggaacatacaccacagtccagacaacttcaaggagccagaaaaatttgatccctcaagatttgaggctgctccaaaacccaacacttttatgccatttggcagtgggatccacatgtgtccagggaacgaatagccaagttggagattttggtcctcctacatcatctgaccacaaagtacaggtggtctgttgtgggtgcaaagaatgggattcaatacggcccttttgctcttccccaaaacggcttacccatcacatt

SEQ ID NO: 187157 - DNA, 278 bp, Glycine max
cttggactccaagtccaccatcggtgttgaatttcagacgaggactttggttatcgatcacaagaccgttaaggctcagatctgggacactgccggccaagaacgatacagagcagttacgagtgcatattacaggggtgctgtggggcaatgttggtttatgacatcactaaacgccaaacctttgatcacataccacgttggttagaagaactgcgcaaccatgctgacaagaacatagtcatcattcttacaggcaacaaatgtgatcttgagaa

SEQ ID NO: 187158 - DNA, 277 bp, Glycine max
tgctacctctgacaagctcctctccgaggcacccaaatacaaactcattactccttccattctctctgaccgtttgaggattaatggatcacttgcaaggaaggctattagggaattgatggccagaggttcaataaggatggtgtctgccatgctagtcagcagatttacactagagcgacaaacacctagatgtactggttataatttatgtagtattgatgcaccgctgaagtgacattttgtttttttctgtttgagacatacctcatgctag

SEQ ID NO: 187159 - DNA, 276 bp, Glycine max
cctcgagccgaatcggctcgagatgatggtaaccgtccaacttgtgcatgcctgagaggttaccttcctaagtctccggatcagtggaatatgtcaatttcaccaaacggctgtgttccaaggaataaatctaactgccaaaacagtttacagatggcttcttcaagtacgcacacacgaaaatgccagacacatcttcttcgtggtttaatacaaccatgaaccttgatgaatgtcggaagtcatgtcttaaaaactgttcttgtactgcatatg

SEQ ID NO: 187160 - DNA, 273 bp, Glycine max
catatcagtcacacttcagtgaatacatcaagcgtggaatagaagctgatggtattgaggcactgtacaagaaggttcatgctgccatccgtgctgatccttctctcaagaaatctgagaagcagcccccgaaggaacacaagaggtcaatctgaagaaactcacttatgaggagaggaaggctaagttgattgctcgtgtggcggctatcaactctgctgctgataatgatgaagatgatgagtgaaagttcattgcagattccatgtcatc

SEQ ID NO: 187161 - DNA, 269 bp, Glycine max
agcgtttcgctttaccgcggtaacgctttgccggattcttctttgcctttggtttatgcagggaatgtgagtaatggtgctatgaatgggaacttgtgtatcacgggaacgttgtctcctgagaaagttgctgggaagatcgtgtgtgtgaccgtgggttgaccgctagggttcagaaaggctcggtggtgaaatccgccggagcgttggggatggtgctgtccaacaccgccggtaacggcgatgagctagtggcggatgctcattta

SEQ ID NO: 187162 - DNA, 269 bp, Glycine max
atcgagccgacggcagtgaagttattagaatctgtgttgtgttgtgttgtgttgagcagagatagagagtgagggataagaagagaatagggttagggttagggttagggttagggtttgattgaggatgccgaagaacaagggaagggaggtaagaacaggaagatgggaaagaactaggcggacgacgagaagcgggagctggtgttcaaggaggacgggcaggagtacgcgcaggtgctccggatgctggggaacgggcggtgcga

SEQ ID NO: 187163 - DNA, 278 bp, Glycine max
tctcgagccgacggcagtgaagttattagaatctgtgttgtgttgtgttgtgttgagcagacagagagagtgagggataagaagagaatagggttagggttagggttagggttagggtttgattgaggatgccgaagaacaagggaaaggaggtaagaacaggaagatgggaaagaacgaggcggacgacgagaagcgggagctggtgttcaaggaggacgggcaggagtacgcgcaggtgctccggatgctggggaacgggcggtgcgaggcgatgt

SEQ ID NO: 187164 - DNA, 277 bp, Glycine max
ggcttctgtagcctccaaccagaaagagtgttaaatggctcccaaacatcctagtacgggtttgtttgttggattgaacaagggttacgttgtcaccaagaaggagttgcctccacgcccttcagatcttaaggggataactagcaaggagtgcactttgtgaggaacctcattcgagaggttgccggctttgctccttatgaaaagcgaatttctgagttgctcaaggttggaaaagataagagggcactgaaagttgccaagagaaagcttggaa

SEQ ID NO: 187165 - DNA, 274 bp, Glycine max
attaatctcaatatcaatcctaagggacacaagggcaaggttgaagatgagcattttcacccatccagatcttgcaagaaaaacaacaacctcaacaaaaaacatgggaacaacaacaacaatgataacaataaggattccaaggctctggcgacaagagattcaaaacgctgccaccatcagagtctcttcctagggatgaaaccattggaggctatatctttgtgtgcaacaatgataccatggctgagaatctcaagagacaactcttcgg

SEQ ID NO: 187166 - DNA, 270 bp, Glycine max
ggcagtccaaatgtcttcaagataagatgacagcaaaggaaagtgcaacctggcttgcaatcatcaatcaagaggaggccttagcaagagcgctataccctgattatatccccccattagcctcagctggaggtagtggatctttgggatcaatgatagcaatgagtatgatgttgaagggggtgaggatgagcctaactttgacgtggaagactgcaaacatgagaatcttcacacatccaatcttgtgatggaaagagtgagggtaac

SEQ ID NO: 187167 - DNA, 270 bp, Glycine max
aaaggccctcctgctatcattccttcccagcctggatttggctatcaacaacaacttatgcctggtatgacgccaggtgcagtcctgtgccgaatttttccgtgccaatggttcagcagggacaacacggacagcgtcccggtggaggcgtccaggtgcagttcagcagtcccagcagccagttcctatgatgccacagcagatgcttcctaggggacgtgtctatcgttatcctcctggtaggggtattcctgatgttcctatacctgg

SEQ ID NO: 187168 - DNA, 265 bp, Glycine max
tgttatagagggggaaagtgactgacgtgtggctgaattgtttacatggattgtttctgctgcttcaacaatcaggtggttggaggacgcacttcatgtggctctggcaagggcaagagccatcagggctcagttaagtatgctttagcctagttaaagggaaagcaaaccacccaatggaggactatcatgtagcaaaaattgtcaagcttggagggcaagagttaggactttttgctatatatgacggacacttgggagacag

SEQ ID NO: 187169 - DNA, 278 bp, Glycine max
aacatggcagatgaggtggttctgctagatttctggccaagtccatttgggatgagggtcaggattgcacttgctgaaaagggtatcaaatatgagtacaaagaagaggacttgaggaacaagagtcctcttctcctccaaatgaaccggttcacaagaagattccggttctcatccacaatggcaaacccatttgtgaatccctcattgctgttcagtacattgaggaggtttggaatgacagaaatcccttgttgccttctgacccttaccagaga

SEQ ID NO: 187170 - DNA, 272 bp, Glycine max
agatgtcatagacacaacacaagaaatgtctgttgttgagtcaggtgaacacaacaacatcagaggagtacctactcatggtggacgctatgttcagtacaatatctatggcaatctctttgaagtttccagaaagtatgtccctcctattcgccctgtgggtagaggcgcttatggtattgtttgcgctgctgtaaatgcagagacaggtgaggaagttgccattaagaagattggcaatgcatttgataacagaatagatgccaaaagga

SEQ ID NO: 187171 - DNA, 263 bp, Glycine max
gcattgttgtgtgcatttgctatgcatgcaggtttttcagtctcttatgctcagcttactcctacgttctacagagacacatgtccaaatctgctccatattgtgtctggagtaatcttcgaccgatctttcaccgatcccgaatcggggccagtctcatgaggcttcattttcatgattgctttgttcaaggttgtgatggatcagttttgctgaacaacactgatacaatagaaagcgagcaagatgcacttccaaatatc

SEQ ID NO: 187172 - DNA, 268 bp, Glycine max
  unsure (1)..(268): unsure at all n locations
attggccgtttggttgccagantcgctctgcaaagagacgatgtggagctcgttgccgttaacgaccctttcattaccaccgattacatgacatacatgtttaaatacgacagtgttcacggacactggaagcatcacgattcaccgttaaggacgagaagacccttctcttcggtgacaagccagttcactgnttttggacacaggaaaccctgaagagtcccangggggtcaactgggagctgatatcattgttgagtccaccgga

SEQ ID NO: 187173 - DNA, 271 bp, Glycine max
acaaggtgacaattctgatgaggaggaagaacatgaattaactcaatgggaggcaattatctggcttgctatcttgacagcatgggtatctatattgtctggataccttgtagacgccatacagggagcatctgagtcattgaatagtcagtggcttttatttctgtcatcttgcttccaattgtaggcaatgctgcagaacatgccagtgctatcatgtttgccgtgaaggacaagcttgatatcactattggagttgctattggatcgt

SEQ ID NO: 187174 - DNA, 267 bp, Glycine max
ggcctcgagagcagtgctattgttggctatgtgtgtgcttccggccatggttgtggccattcgcccagcaaagaaccctttttgcgtgaagggtcgcgtctactgtgacccttgccgtgctggttttgagacctcagcaacacctacattgccggtgctgagattatgttgcaatgcaagagcagggttagcaacgaggttgtgtacaccaagaaggggtacactgactcaactggagcatacacaatgtacgtggacgaggatcac

SEQ ID NO: 187175 - DNA, 271 bp, Glycine max
tgttctggctctggctctgccctttttggttttctctcgttaccgaaaccagaagaaccatttgtggtggacatggatctggaccagtggatctccaaggtcaaagatggccagcatcttcttgaagacgagcttcatgttctctggaatttgtaaaagagatccttattgaggagtccaatgtgcagcctgtcaatagtccagtgactgtttgtggtgatattcatggtcaattccatgatctaatgaaacttttccagactgggggtca

SEQ ID NO: 187176 - DNA, 267 bp, Glycine max
gttatgatattggagtcatgagtggagcagccatatacataaaaagggacctgaaagtctctgacgagcaaatcgagatcctgctcggaatcatcaacctatactctctgataggctcatgtctcgcaggcagaacctccgctggataggtcgccgttacacgattgttttcgccggcgccatcttctttgtcggagcacttctcatgggtttctcccccaattattcctttctcatgtttggccgtttcgtcgctggcattggcat

SEQ ID NO: 187177 - DNA, 267 bp, Glycine max
ctcaaccttctttcttcttatatatcgaacatggctaagtatcattcaagtgggaaaagctcttccatgactgctatagccttcctgtttatccttctaatcacttatacaggcacaacagatgcacaatccggggtatgtatggaagacttggcaacaacttaccaacccctcaagaagttgtggccctctacaatcaagccaacattcgcaggatgcgaatctacggtccaagcccagaagtcctcgaagcactaagaggttcca

SEQ ID NO: 187178 - DNA, 264 bp, Glycine max
atggcccaagtgagggtgttcctcgggttctggcatgctttagcaataatctcctccgtggagagcccctcaagcttgtggatggtggccaatcccagaggacttttgtgtatattaaggatgctattgaagctgtcttatgatgattgaaaatcccgccagggctaatggacatatttttaatgtgggaaacccaaacaatgaggttacagttaggcagcttgctgaaatgatgactcaggtttattcaaaggtaagtggaga

SEQ ID NO: 187179 - DNA, 265 bp, Glycine max
cttaacaacagcacaaagcgggttactgtctgttcaagctaccatctctctctctctttcttagtgcctccttgccagaagttaaaatggcccaagaaactttcctattcacatctgaatcagtgaacgaggggcaccctgcaagctctgtgaccagatctccgatgctgtgctcgatgcatgcttggagcaggaccctgacagcaaggttgcctgtgaaacctgcaccaagaccaacatggtgatggttttcggagagatcaca

SEQ ID NO: 187180 - DNA, 265 bp, Glycine max
tctctctcacccagatcttgtagcaatggcgagcgctcccactccacgcgaagagttcgtttacatggcgaactggcggacaggccgagcgctacgaggagatggtggagttcatggcgaaggtctccgcctccgccgaagcgaggagctgaccgtggaggagcgtaacctcctctccgtcgcctacaagaacgtgatcggcgctcgccgcgcctcctggcgcatcatctcctcaatcgagcagaaggaggagagccgcggcaac

SEQ ID NO: 187181 - DNA, 269 bp, Glycine max
gtttttactctaaatttcttatcttgaaattttgcgcagtttcagatttagaattgttgatcagaaaaggttgagggtgaagaaagagactagtgaaaagcaagtatggggatggactactatgggattttggaggttgacagaatgcctcagatgaagagttgaagagagcctacagaaagcttgcaatgaaatggcaccctgacaagaacccaaccaataagaaagaggctgagattcaattcaaacagatatctgaatcctacgag

SEQ ID NO: 187182 - DNA, 267 bp, Glycine max
ctactggaaatggtttgctggcaacttggcctctggtggtgctgctggtgcatcatcccttttgtttgtttactctcttgactatgcccgtacccgtcttgccaatgatgcaaaggctgcaaaaaagggtggagagagacattcaatggtctcgttgatgtctacaggaagacattggcatctgatggtgttgccgggctctaccgtggtttcaacatctcatgtgttggaatcatcgtgtatcgtggtctgtactttggattgtat

SEQ ID NO: 187183 - DNA, 275 bp, Glycine max
aaccctagctggataggtcaaacatcatcatgtcggacgaagagcaccatttcgagtccaaggcagacgccggtgcctccaaaacctaccctcagcaagccggtaccattcgcaagaacggctacatcgtcatcaaaggacgccctgcaaggttgtggaagtttcgacttccaaaactggaaagcacggtcacgccaagtgccactttgttggaattgatattttcactgccaagaaacttgaggatattgtgccctcttctcacaactgtgatg

SEQ ID NO: 187184 - DNA, 267 bp, Glycine max
cgaaactgaggtcgtagacagaatggcgaaaacgacgtcgttgttgctctttacactgctactcttcagaaacttagctctcatccaggcgaagaaatcgaaggaggatttgaaggaagtgacccacaaggtttactttgatttgagattaatggaaaagaagcaggtcgtattgtgatgggtctttttggaaaggctgttccaaaaactgcagaaaactttcgagctctttgcactggggaaaagggaactggtaaaagtggcaag

SEQ ID NO: 187185 - DNA, 270 bp, Glycine max
caaatttaacaatatctgagaaaagaagatgctcttccctgttactcctggaagggaggcccaaagattctccaaaagcagagaagactggtgtcaacatcctttcaaaatccgaaattgatgcagagctatcgaaaatgaaggtgtgacacctcaagaggctgcggcggcagctgcaaaagcagttgcagaggcagaagctgccattgccgaggctgaggcagcagctagggaggcagatgctgcagaagccgaggcagaggctgcacg

SEQ ID NO: 187186 - DNA, 264 bp, Glycine max
gggcacttctccaatctcaacaactttcgtgtagtgcactgttttgctatagtaacccattaattaaaccgatctacgtagtagccatgaagagaggcagagaagagagtaagttagacatggctaattgcttgatgctttgacgaaagttggagagagtgaaaccaattacccaatatcaaagggtagtgatattggtgatttcaagtgcaagacttgcaatagaaggttctcttcttttcaagcccgtggtggccatagagc

SEQ ID NO: 187187 - DNA, 272 bp, Glycine max
ctacccttcgccgtatcataaatgtcattggagagcctattgatgacaagggagaaatcaataccgagcattatttgcccattcatagagaagctcctgcttttgttgagcaagaaaccgcacagcagattcttgttactggatcaaggttgttgacctgcttgcaccatatcaaagaggaggaaagattgggttgtttggtggtgctggtgtaggaaaaactgtgcttattatggaacttattaacaatgttgcaaaagctcatggtggtt

SEQ ID NO: 187188 - DNA, 268 bp, Glycine max
tctcgagccggcaaattcttgtgggcatccaagacctgcttgatcaaccaaatcctgctgacactgcccagacggagggttatcatctattcatccaggtagctaacctaaaaatcctacacttttcactgtttattaaaagaacttaaatttgttggctaccttcactttttattttttgaattttattatattattactttacaatgttgggaactcatggggatactcaaacaaggatgggagtcaaaattaccccaagaagagg

SEQ ID NO: 187189 - DNA, 261 bp, Glycine max
gggatcatccacaagattgaggagaccctccatgtgggagggcacaagaaagaggagcacaaaggagaacaccatggtgagcataaaggtgaacacaaaggagaacaccatggtgagcacaaaggtgtacacaaaggagaacaacaccatggggagcacaaggagggacttgtggataagatcaaggacaagatccatggtgatggccatgacaagggtgagaaaaagaagaagaaggacaagaagaagaaggagcatgga

SEQ ID NO: 187190 - DNA, 265 bp, Glycine max
aaatgttcagaaaccagtacgacacggacgtgaccacatggagccctgcggggaggctgttccaggtggagtacgctatggaggcggtgaagccgggctcggcggcgatagggctccgatcgaagacccacgtggtcctgcatgcgtcaacaaggccaactccgaactctcctcgcaccagaagaagatcttcaaggtcgacaatcacatcggcgtcgccatcgctggcctcaccgccgatggccgcgtcctctcccgctacatg

SEQ ID NO: 187191 - DNA, 263 bp, Glycine max
ggtttccactagatcaaaagctgctggctttgatttgaagacatactgggccaacctaatggtgcagatcaatcagaagctggacgaagctatcccggttcagtttcctccgcagatatatgaagctatgaggtattcatccttgccaaaggtgccaagcgagccccacctgttatgtgcatctctgcctgtgaactctttggtggcagccgccttgccgcctttcccactgcctgtgcccttgaaatggttcatgcagcttc

SEQ ID NO: 187192 - DNA, 265 bp, Glycine max
taaaaattagaaagtactgtgacatgacactcttatcatgtgcctatgctggaactggaaatgttctcaaggttcaaaatctgttgggtcattgttcacaacatcttgataaaggtgaaactcaccaaggtcctgctgtgttggaattgctatggtagctatggctgaagaattgggacttgagatggcaattcgatcattagaacatcttctacaatatggagagcagaatattcgccgagcagttcctttggcccttggtcta

SEQ ID NO: 187193 - DNA, 267 bp, Glycine max
tctgacccaacacagccacatggtctaaagctcatattggaagactacccttatgcagctgatggaatactaatctggtctgcaatagaagactgggttcgaacctatgtgaaccattactaccctcactcaagccttatagcaatgacaaagagttacaatcttggtactctgagtcaatcaatgtaggccatgctgatctcaggcatgaaagttggtggccaacattgaacaatagtgaggatcttgtgtccattctttccacat

SEQ ID NO: 187194 - DNA, 296 bp, Glycine max
tctcgagccgattcggctcgaggctccctgtgaatccttgaaggtacatataagcaatttgagatcgttcatcatggctccgtagttcaacatattcaatatcaccagaaaatgaaaagaactccttaatgtcttgctcagttgcaataactcaggatccagattaccagcttccacctgctgcgttagcgtcatctgtaagagaaactcaaactcctggtggtgctgactctgctttacggaaggcagaggatgtggtctccggcatgctagccaagggctttatcttaggaaaa

SEQ ID NO: 187195 - DNA, 288 bp, Glycine max
gaggtactcaatgctctagacgatgccggctttccagcaaacgatgaggatgttcagcaagaagtggttgcaatgtctaaaacaaatatatttaggcccgggattgatgttacacaggcagttcttttgcctcagttgacttggaggcgacaggagaaaacagaaatggtagggccttggaaagctaaggtgtatgatatgcacaatgtagttgtgagcataaaatctagaggagtacctggagccatgacagatgatgagctcttttcttcttgcaatgaaatgaaa

SEQ ID NO: 187196 - DNA, 286 bp, Glycine max
aaaaaataaccatgatgatgcatgtcctttgcttctcagtgttcctagcagcagcaatgcaaggaacactggcggttgaatacagtgtcaccaacaacgccctctcaacccctggtggtgttcgtttccgtgatgcaataggggacgaatacgccaaacaaacaccttgactcagccacccaattcatatggggggtcttccagcaaaacgctcctgctgatagaaaagatatacaacaaataaacttatttgtggaggacagggttgtgccaaatggtgttgttg

SEQ ID NO: 187197 - DNA, 286 bp, Glycine max
cagcacttggctgagaagctagacttggaaatgtctgccctccagtatatgataaaagaataccctggaaacgaggaggagaggatgagagcagccattgggaaatttggactgtctggcaaagcgcaggtcatgcctatgaagaatttatccgatgggcagaggagccgtgtgatattcgcatggttagcttatagacagcctctcctgctacttttggatgagccaacgaaccatttggatatagaaacaattgactcattggctgaggcattgaatgaatggg

SEQ ID NO: 187198 - DNA, 284 bp, Glycine max
atttatagaggttgccttcctgatggcaaggaacttgctgttaagatcttaaagccatctgatgatgttttgaaggagtttgttctagaaatagaaattatcactaccttaaatcacaaaaacattatttccctccttggattctgctttgaagatggcaatcttcttttggtctatgatttcttatcaagaggaagccttgaagagaatctccatggtaataagaaaaatccacttgtgtttggttggactgagagatacatcgtggcaatgggtgttgctga

SEQ ID NO: 187199 - DNA, 286 bp, Glycine max
ggacaatcggggaaggcgtggaggcaggtcatatgattcaggattcactttctactttaaccctgttgatttattctggtactgggatccatattattataggaggcgaaggctacaagctgatgatgacaagatgaacttcattgaatcggtcttctcctttgtatttggagatggtgatcccaatcaaggaattgaagaagagagatggaagttggtaataattgaggactgaattcagtgattgggcaatacatagcatctaatggtggcgttgttgcagctg

SEQ ID NO: 187200 - DNA, 284 bp, Glycine max
tgtgaagtttctgaaaccaaacaaagccgtcatcgtccttcagggacgctacgccggcaaaaaagccgtgatagtgcgaaccttcgatgaaggcacgcgcgagccaccctacgggcactgcttggtggcagggataaagaagtaccctgcgaaggtgatcaagaaggattcggccaagaagacggccaagaagtcgcgtgtgaaggcgttcgtgaagctcgtgaactaccagcacctcatgcccacgcgctacacgctcgatgtcgatttgaaggacgcggtta

SEQ ID NO: 187201 - DNA, 287 bp, Glycine max
tctctcctctcaagatgcagatattcgtgaaaactttgaccggcaagaccatcacccttgaggtggaatccttcgacaccattgacaacgtaaaagctaagattcaagacaaggaagggatcccacctgaccagcagagacctaactttgcgggtaaacaacttgaggatggtcgcacccttgccgattacaacatccaaaaggaatcaaccctccatctcgtgcttcgcctcaggggtggcatgcaaatctttgtcaagactttgaccgggaagaccatcaccttg

SEQ ID NO: 187202 - DNA, 285 bp, Glycine max
tgtttgctcttcaagcaatgtctgacattcctggtaatgttgagaatgtgcggaaactgttaagccacccagcatttgatctgcgcaatcccaaccaagtgtactctctcattggaggtttctgtgggtctccggtgaactttcatgcaaaggatgggttaggctacaagtttttgggagagattgtgctgcaacttgacaagctaaatcctcaggttgcctcgagaatggtgtcagccttctcaagatggaggcgttatgatgaagacagacaaaaaacttgcg

SEQ ID NO: 187203 - DNA, 285 bp, Glycine max
attatttccaatgctagctgcacaaccaactgccttgccccacttgccaaggttatcaatgacaggtttggcattgttgagggtttgatgaccactgttcattccatcaccgctacccagaagactgttgatggaccatcagccaaggactggagaggtggaagagctgcttcatttaacatcattcctagcagcactggagctgccaaggctgttgggaaagtcctccctgctttgaatggaaaatgactggtaggcatccgtgttcccaccgtggagtctctg

SEQ ID NO: 187204 - DNA, 279 bp, Glycine max
cagactttggccttgcaaaggatggtccgatgggggaccaaacccatgtttcaacacgagtaatgggcacatatggatatgctgctcctgagtatgtcatgactgggcatttgacagctagaagtgatgtgtatggttttggggtggtgctgcttgaaatgcttattggtagaagagcattagacaagagcaggcccagccgagagcacaacttggttgagtgggcccgtccactactgaatcataacaaaagcttttgaaattctagacccaaaacta

SEQ ID NO: 187205 - DNA, 289 bp, Glycine max
  unsure (1)..(289): unsure at all n locations
tttttatttgttcctgagttccaatggctcttcaggctgcttccttggtttctgcttctttttcnattgctaaagagggaaagtctggtgtatctctcagggacnccacaatgtttggtgtttcattgtcggatactctcaaatctgacttcagctctccntcatcgacttgcaaaagggaattccancaaaaattnggcccgttnagggttcagntcagtggcaacaacaactccaggagtcaccaaggcttcaccagaanncnannaaactttgagnnaaggcagtg

SEQ ID NO: 187206 - DNA, 286 bp, Glycine max
tatggcttctgcagatgttgagtaccgttgctttgtcggtaggctcgcttggttacatgtataccatgccctcgagagagccttctctcagtacggcgaaatcgttgaaacgaagattatcaacgatcgtgagactggcagatccaggggacttggatttgtgaccttcgcctcggagcagtccatgaaagatgcgatcggagcgatgaatggacagaacttggacggccgtaacatcactgtcaatgaagctcagtcccgcggtggcggaggcggcggcggagga

SEQ ID NO: 187207 - DNA, 266 bp, Glycine max
  unsure (1)..(266): unsure at all n locations
ctgatgctccacaagcgacactacattttctttcaacnagtattatttacagctatcatctaacgaagttttaacctacaattggaatggtaccatcatgttcacctgaaattagaaatctaccaggcttagagaaggtttagaatcatggtgtggattttcaccagagcataaggcctactcagatgggtctttccctcatattgatagtactctgctgcgttcattgaactctccacgttgtggaatatgttgaccagctatta

SEQ ID NO: 187208 - DNA, 264 bp, Glycine max
ctcgagccgctcgagccggccgatttgaaaagatgagtaagcttcagagtgatgctttaagctgaagccatctcaggaatcatggccgattccaaggagaagaatcgcaaatttgtggagaccatcgaactccaaatcggtttgaagaactacgatccacagaaggacaagcgtttcagtggctccgtcaagttgcgccacatccctcgcaccaagatgaaaatttgcatgcttggctgagctcagcatgttgaagaagcagag

SEQ ID NO: 187209 - DNA, 285 bp, Glycine max
tcccaggcgaggagaaagatggaggggaaggagcaggatgtgtcgttgggagcgaacaagttccccgagagacagccaattgggacggcggcgcagagccaagacgacggcaaggactaccaggagccggcgccggcgccgctggttgacccgacggagtttacgtcatggtcgttttacagagcagggatagcagagtttgtggccacttttctgtttctctacatcactgtcttaaccgttatgggagtcgccgggctcacatctaagtgtagtaccgttggg

SEQ ID NO: 187210 - DNA, 286 bp, Glycine max
tgttttctgttaatgcaagtggacattctgtggggttgcagagatggttggtacagttgactttagcaagaatatggacttttggcagcaagataaatggagtggaagctttcctgtgaagtggcacattataaaagatgtaccaaatccaaattttaggcacattatactggagaacaatgaaaataagccagtaactaatagcagagacgcacaagagataatgtatttgaaaggtttggaaatgctgaaaatattcaaaaatcatacattgaagactctttgc

SEQ ID NO: 187211 - DNA, 252 bp, Glycine max
cggctcgagattggcgcttcatcaagatgggtatttctagggattccatgcacaagaggcgtgacactggtggcaagaaaaaggcttggagaaagaagagaaagtatgagcttgggcgtcaggcagcaaacaccaagttatcaagcaacaagacaatcaggaggattcgtgttagaggtggcaatgttaaatggagggcattgaggctggatactggcaattactcatggggtagtgaagcagttactcgca

SEQ ID NO: 187212 - DNA, 286 bp, Glycine max
tattatcctaagtctttgggaatagtgctgcaatggcttcaagtcaggaggaggtgacccttttgggagctactggaagcccatttgtgtgcagggttcatattgccctcaagttgaagggagttcaatacaaatatgtcgaagaaaatttgaggaacaagagtgaactgcttctcaaatccaacccagttcacaagaaggttccagtgtttattcacaatgagaagcccatagcagagtctcttgtgattgttgaatacattgatgagacatggaagaacaaccc

SEQ ID NO: 187213 - DNA, 280 bp, Glycine max
tattagaagttgttttcatctcaagtgacagatatcaaacctcctttgatgaattctttgcgggaatgccatggttggcacttccctttggggactcgaggaagaaattcctgagtcgcaaattcagggtatctggcatccccatgcttgtggccattgcatcaagtggtcagacattgacaacaaaagctcgagatctggtttcactctatggagcagatgcatatcctttcaccgaggagagaataaaagaaatagagacagaacaagaagagactgc

SEQ ID NO: 187214 - DNA, 280 bp, Glycine max
caaaatttaaggtattggctccatatgatcctgactggtattatgttagggctgcctcaatggcaagaaagatttatttgagaggcggtcttggtgttggggctttccagaggatctatggtggaagcaagagaaatggaagccgtcccccacatttctgcaagagcagtggggctattgcaagacacattctgcaacaattgcaaaacatgagcattgttgagattgatacaaaaggaggtaggaaaatcacatctagtggtcgaagggatcttgatca

SEQ ID NO: 187215 - DNA, 281 bp, Glycine max
ctcaaatattaattttaggttcttcgttacgcgttgtgttgcgttgtgcgtgagaaagtgcgcgtggtgaaaaagcatggcttctcagctcctgagacgaaccttcggaagtcgtttccttgcaaaccctaaggccttctcctccgctgcttccactccgatccgcgccactctcttccccggcgacggcatcggccccgagatcgccgattccgtcaaacagatattccaagcagctgatgtcccaatagaatgggaagagcactatgtaggaactgaat

SEQ ID NO: 187216 - DNA, 280 bp, Glycine max
gaaaccctaaaccccgttttcggttagatcgagatcgatcgaacatggatgaggagtacgatgtgatcgtgttgggcacgggtctcaaggagtgcattctcagcggtcttctctccgtcgatggcctcaaggttctgcatatggataggaacgactattacggaggagaatccacttcgctcaatcttattcagtttgaactgcgaaatgatgattttctctgtcctcctcttcagctttggaagagattcaggggagatgacaagcctcctccacattt

SEQ ID NO: 187217 - DNA, 285 bp, Glycine max
gtaccgttgctcttcgtgagattaggacataccagaagagtaccgagcttttgatccggaagctccccttccagaggctggttcgtgaaattgctcaggacttcaagactgatctgcgtttccagagccacgccgtgcttgcattgcaagaagctgctgaggcataccttgttgggctctttgaggacactaacctgtgtgctattcacgccaagcgtgtaaccattatgcccaaggatattcagctggcaagaaggattcgtggtgagcgtgcttgagttggtg

SEQ ID NO: 187218 - DNA, 278 bp, Glycine max
ctcttcctgcagaagctatccgtgttacttgttcccaagtctccaacaagcaaagtacatggttgatttggaaatccaggtccccagcgcattcgacccgtttgccgaggcgagagaatcagatgcccccggggcaaaggagtatgtgcacatacgaattcagcagaggaatggaaagaagagtctgacaacagtgcaagggctgaagaaggagttcagctacgagcagatcctcaaggacctcaagaaggacttctgctgcaacgggactgtggtgc

SEQ ID NO: 187219 - DNA, 264 bp, Glycine max
  unsure (1)..(264): unsure at all n locations
tggaagctatgcatcctctctatcatcaaacctttgtcgtcatttctcatttgctgaaatcaaggctgccacacacaactttgtctagngcttgcttcttggtgtgggaagatacggtaaggtatacaaaggagaaattgatggtggacaaccaaggtagcattaaacgtgggatccactatctgagcagggggtgcatgagttccacactgagattgacatgctctcaaaacttcgtcacagccaccttgtttcactaattgg

SEQ ID NO: 187220 - DNA, 279 bp, Glycine max
cattaatttgcactcgctgtttcagcttcatcacccttcttttgcatcatttatatctcttgagaaattgcacaagaaacctttctattcacatctgaatctgtaaacgagggtcaccccgacatgctgtgcgaccagatctctgatgcagtacttgatgcgtgccttgaacaggacccttacagcaaggttgcctgtgagacatgcaccaagaccaacatggtcatggtcttcggagagatcacaaccaaggccaacgtagactatgaaaagattgtc

SEQ ID NO: 187221 - DNA, 283 bp, Glycine max
ctccggcatgttcattcccaagaacaaggatccaattgtgtctgggatagcatttgggtagagactaaagaaaagaagtgcatcccagacacaatgagtctacatgcaggatgccctgtaattgaaggtgagaaatggtcagcaacaaaatggattcatgtggactcatttgataagatggtggcagatgggggcgattgcaatgataagcaagaaaactgtgatagatgggctacccttggagaatgcactagtaatcccaattatatggttggatcacagg

SEQ ID NO: 187222 - DNA, 284 bp, Glycine max
tagaggaagaatcagaagatagctgagattctctacagtgcaattgatggcagcaaagggttctataaatgccctgttgagaagtctgtgagatctttgatgaatgtgcctttcactttggagaaatcagagctggagggtgagtttatcaaggaggctgctatagagaagatggtgcagctcaagggacatagatcagtgggaggtatgagggcttctatttacaatgcctagcccttggctggggttgagaattggtggctttcatgaaggattttcagcag

SEQ ID NO: 187223 - DNA, 290 bp, Glycine max
ggaaaccctagctggataggtcaaacatcatcatgtcggacgaagagcaccatttcgagtccaaggcagacgccggtgcctccaaaacctaccctcagcaagccggtaccattcgcaagaacggctacatcgtcatcaaaggacgcccctgcaaggatgtggaagtttcgacttccaaaactggaaagcacggtcacgccaagtgccactttgttggaattgatattttcactgccaagaaacttgaggatattgtgccctcttctcacaactgtgatgttcctcatgtg

SEQ ID NO: 187224 - DNA, 275 bp, Glycine max
gtcaaatggtccttagttctgggagtgttgatgcttgagtcttgacggaacgaacggaaaaggggatctcaatggacaacaccaagccccttatcgaactggaactcgacgatgatggcagaatcagaagaaccgggaatgtgtggactgctagcatacacattataacagtggttgtaggggcaggggtgctgtctttggcatgggttatggcacaactaggatggttagctggcatagccagtatcattaccttttcagctgtctccattttc

SEQ ID NO: 187225 - DNA, 275 bp, Glycine max
ctaattattgtgcttattattattgttgagaaagaaaagaatggcaaagttaataaaattctttgagttgaacacaggggccaagattccttctgttgggttaggcacttggcaagctgagcctggtgttgtagccaaagctgtcaccacagccattctggttggatacaggcatattgattgtgctcaagcgtataacaatcaagcagagattggttctgctcttaagaagctttttgatgatggtgtggtgaagcgtgaggacttatggatca

SEQ ID NO: 187226 - DNA, 283 bp, Glycine max
tatcccccctatcaatctatttttgctaagctatcatatggagagagccagatgcttgacaaggcattctatgaggaggaggtgtaaaggctttgcttggcatttgagcaacagtttcattatgctgtgttcttcgcatatatgaggttaagggaacaggagatcaggaacttaatgtggatttcagaatgtgttgctcagaatcagaagtccagagttcatgacagtgttgtcttcatattttaggcggattgctcgttatagtttgtatgttcgttgggac

SEQ ID NO: 187227 - DNA, 284 bp, Glycine max
tgagtttcaagggttaccggaaggttgcattgctagtatactctctcgcactacgtcggcggacgtgtgtaggttttccgtcgtatcaaagattttccgttcggccgctgaatcggacgctgtgtggaaacgttttctcccttccgattaccattccatcatttcccagtctccttcgcctctcaactatccttccaagaaggagctctatctcgctctctcggatcgccctatcatcatcgatcagggtaaaaagagctttcaattggagaaaaagagtggga

SEQ ID NO: 187228 - DNA, 281 bp, Glycine max
gctctgcccaaagctaaggagatcgtgtcgtccaattccgtcgtcgttttcagcaaaacctattgccctttctgcgtcgatgtgaagaagctcttcggtgacctcggttccaattacaaggccatcgaactcgacactgaatccgatggaaaagagctccaagcagcattagttgagtggacggaccagcgaaccgtgcctaatgtgtttattggtggaaaccacattggtggctgtgactcaacaactgccctgcacactcaggggaagctggttcctct

SEQ ID NO: 187229 - DNA, 277 bp, Glycine max
cttctctctcctccctccaacctccctcctctccaaacctctcccactcctcttcgcaaccaccaccctcaaatccaaaccctccgacgacattgacacatcgttcttcgacaacatcaacccgcaagacgacatcacattcaaccctccggagcccccggagggcttcgtggcgcctccgtccttcgacgacggccccctggagactgaggacgaaatcgccgcagcctacgaggagctctacggccccggctacagcggcgtctcggtcctcggc

SEQ ID NO: 187230 - DNA, 278 bp, Glycine max
gaaccacccaattcacctgaaccctgcgcactacatcagtgagattattagagaaggcacaaaaaatggcactgctttctttaagtgccatggacatgagcaatttgagatgacgggtttggatcctgagtataataggttgttcaatgagggcatggtgtgcactgctagggttgtgtccaaggctgtgatcactggctacaaagatgggttcaaccagattaagtccttggttgatgttggaggtggcattggacggtctctttcggagattgtta

SEQ ID NO: 187231 - DNA, 279 bp, Glycine max
ctcgagccgcgccccaatctctgcagcgccttcgatctagaaaacatgactaagagaacaaactaggctggcattgttggaaaatacggtacccgttatggtgccagtctgcgaaagcagattaagaagatggaagttagtcagcacagcaaatttttctgtgaattttgtgggaagtatgctgtgaagaggaaagctgtaggaatatggggatgcaaggactgtggtaaagtgaaagcaggcggtgcttatactttgaataccgcaagtgctgtgacg

SEQ ID NO: 187232 - DNA, 275 bp, Glycine max
gaaaacccccaactccaacctctgttcatcgtctaccgcgctttcttttcaaccagaactatgattaagctttttaaagtacaggaaaagcagagagaacttgcagaaaatgcaagtggcggaccacctgttaagaagcaaagtgctggagagttgcgtcttcacaaaggttttcttatttttattatatggagtgtcttttctatgttttactatgcccaatttgtgtagcattctaaagtttcaaacaatggaaacggatagggcaagaggaa

SEQ ID NO: 187233 - DNA, 279 bp, Glycine max
tctcgagccgattcggctcgagatttaacgagggagtgaagcttagatccggtgttaacaagatctctctactgagtgttgacgttggactcccggtttgctctctctctctctctcacatatacatacacaccaaatagatatttcagatgcacccctgcacgtcacactaagctgatttttcagtatcaactgcggattatgatcatgaatcatgactatatttaacatgcagaatgttggtcctcattttgaaacatggaatgctggtgttcttgg

SEQ ID NO: 187234 - DNA, 276 bp, Glycine max
caagatttttctttcaacaactaatatctggagttagctattgtcattccatggtacatatgcatttagaattttgttgttggtgttaatttaaaagtcctttgtagtatcaacttctgcctcctagtgcaggacatatgtcccagggatactgaattggcacacactctaatagacggaaatccagctcctaggcttaaaatttgtgactttggtttctccaaggttaataacatctcaccagaatgagcctttatggactagtcctttcatata

SEQ ID NO: 187235 - DNA, 271 bp, Glycine max
gtgaagaagagggtactgcaaacaaagcaagcaaaacaaaagacgcagtgattggagaggatgaagagggtgcttctgctagttctggccttcactgttcttctcatgttgccagaagcttctgctacaaagtttactgttggaaacaaccagttttggaaccccaatattaactacactgagtgggctaaaggcaaacatttctaccttggtgactggctctattttgtgtacgataggaaccaagcgagcgtgttggaagtgaacaaga

SEQ ID NO: 187236 - DNA, 285 bp, Glycine max
ggggagtatttatgtagattgtggtaatcttgatcttgcagaggcatgctatgagaatgcccttgcaattaggcacacaagagctcatcaaggtctagcacgggtttatcatcagaaaaatcaacgaaaagctgcatatgatgagatgaccaagctaattgaaaaggcagagagcaatgcctcagcatatgagaaacgatcagaatactgtgaccgtgagatggcaaaggttgaccttgatgtagcaacccaactggatcctttgaaaacatatccgtatagata

SEQ ID NO: 187237 - DNA, 278 bp, Glycine max
cgcaggtcggtcatggatcggtggtgcaggcgcatacacagcgggaccaccagcattcgcacagcgcaatcgcgcgtcagatccttgaaaaaatccccggcaacaacgacacgcacgtttcatactctcaggatcgctacatcttccatgttaaacgcaccgatggactcaccgttctcagcatggccgacgacaccgccggaaggcaattccttttgcgtttcatgaggatattcatcagaagttcgtgcggacttacggacgcgccgttcactccg

SEQ ID NO: 187238 - DNA, 299 bp, Glycine max
accaaacaccatgaacaaagttcacatcctggcgttcccatacccagcacagggccacatcctcccactcctcgacctcatccaccacttagccctacgaggcctaaccgtcacaatcataatcacaccaaaaaacgttcctatcttaaaccctctcttatcctcgcatccaaacacggtccaaactttagttctcccattccctccccaccctaacatccccgctggcgcagagaacgtccgtgaggtcggcaacagaggaaactaccccttcatcaacgccctctccaaactccaac

SEQ ID NO: 187239 - DNA, 298 bp, Glycine max
actcgagccgattcggctcgagtcacccattcatacgtggtgttgatactgctgctcttttatcttttcttttctctttagttctctcttcccctttctttttctttttcttcttcttctgagcttgtttaagcttttcttccattaacatattatcacaatgtgtggtattcttgctgttcttggttgttctgatgactctcgagccaaaagggtccgcgtgcttgagctctctcgcagattgaagcaccgtggccctgactggagtgggctccatcaacatggtgactgctttttg

SEQ ID NO: 187240 - DNA, 300 bp, Glycine max
aatcgctatgactgctcagacacaagaggagcttcttgcggccgaccttgagcaacaaaagatccatgatgatgagcctgtagttgaggatgatgatgaggatgacgaagatgacgacgatgaggatgacgacaatgttgaagaaggtgatgcatctggtaggtccaagcagaccagaagcgaaaagaagagtcgcaaggcaatgctcaaacttggaatgaaacctgtcacaggtgtcagtcgtgtgactgttaagaagagcaaaaatatcctgtttgttatatcaaaaccagatgtttt

SEQ ID NO: 187241 - DNA, 298 bp, Glycine max
tggatcggcagggaacaagttccgcatgtcactgggtctgccggtggcggcgacggtgaactgcgccgacaacacaggcgcgaagaatctctacatcatatcagtgaaggggatcaagggaaggctgaaccggttgccgtcagcttgcgtgggtgacatggttatggccaccgtcaagaagggaaagcctgatctccgtaaaaaggtgctccccgccgtcatcgtccgtcagcgcaagccgtggcgccgaaaggacggtgtttacatgtacttcgaagataatgctggggtcatagtg

SEQ ID NO: 187242 - DNA, 299 bp, Glycine max
  unsure (1)..(299): unsure at all n locations
cngaagaagaccgctcngcccaggaaacngtccacaatggngtcgcctnngacggagctaggcggcgaggagatggacatcgntgaggtgacggccgccggaagagtgaagggaccgtggtctccagaggaggacgcgctgctgagccgattggtggcgcagttcggtgcaaggaactggagcatgatcgcncggggagtgccgggacgctccggcaagtcgtgccggctccggtggtgtaatcagctggacccttgcgtgaaacgcaagcccttcatgaggaagaggatagcatcata

SEQ ID NO: 187243 - DNA, 299 bp, Glycine max
gtcctatcagttctgaagcagaaaggcaaagagtgattcattgtttggaggctgctgttaggagacgaacttctgaggtactactaccacacatgatttggatgctaattcacaattttttaccaaatatttattagtgacactgttattttgtatttgatattgtagggtataaagctagaattatgtggggaagacagggttggccttctgtctgatgtaactcgcatctttagagaaaatggtctttcagtcaaccgtgctgaagttacaaccaggggcagccaagccatgaatgt

SEQ ID NO: 187244 - DNA, 299 bp, Glycine max
gaacactagtttgttgagcactgcgatgaggaagtggacggttgcttccgctctccttcttctctctctcctctttctctttgcagatcaaggtcgaaagtttcaggcgaatgccgagggagattccgacgagcttgtagatccacccaaggtgaaggaaaagatcggtgctgtgcctcatggcctttcaaccgattcagatgtcgtcaagagggaggcagagtcgatctcgaagagatctctccggagcaacgcggagaagtttgagttccaagcggaagtgtcgcggcttatggata

SEQ ID NO: 187245 - DNA, 298 bp, Glycine max
gaagactaaaaggttgcagaatgttatgaactctttagtccacgacaagcagaagcagtatggaggtttctattacagatgaaattgcaggcactatggagctcaaccctgataggctgggtgagctcaaagcatttgatgacacaaaagctggtgtgaaaggccttgttgatgaaggggtcgcaaagatcccaagattatttcatcatccacctgatgaatttgtcagggcttcaaagttaggcaacacagaatacactatacctgttatagaccttgaagaagttggcaaagatcc

SEQ ID NO: 187246 - DNA, 273 bp, Glycine max
acaagatcttgaaggtcatccgtaagaacttggtcaagaagtgccttgagctcttctttgaaattgcacagaacaaggaggattacaacaagttctatgaggctttctctaagaacttaaagcatggtatccatgaggattcccagaacaagggaaagattgctgaattgctcaggtaccactccaccaagagtggtgatgagctgacaagcctcaaggattatgtgaccatgatgaaggaaggtcagagtgacatctactacatcaccggtg

SEQ ID NO: 187247 - DNA, 297 bp, Glycine max
tgcttcaactcatctgcttcccctagcaaccttcttcttacttctctccgcttcttatctccagattgctggggcggaagcacaaccgttgactagtctcaaacttaactctcatattcttcaggagtctactgctaaagagattaatgaaaatcccgaggcaggatgggaggctgctataaatcctcgtttctccaattatacagttgaacaatttaagcgccttcttggagtcaaaccaatgcctaagaaggaacttagaagtacacctgctatatctcacccaaagacgttgaa

SEQ ID NO: 187248 - DNA, 295 bp, Glycine max
gccatatccccatcgcaacttttctgaggaagttgctattcttgatggctactttggcaaacttggtgcaggaagcaatgcttatattttgggtggccaagacaaagcacagaactggcatgtctactctgcttctgcagattctgtaactcaatgtgacaatgtttacactcttgagatgtgcatgactggcctggatagagagaaagcacaggttttctacaaagaacaatctgcttcagctgccatgatgactgttaattccggcattagaaaaattcttccagattccgag

SEQ ID NO: 187249 - DNA, 296 bp, Glycine max
actcgagccgctcttatggacccgacactcgcgacatagacgaactcgttctcatggatcctaacggacgttgcctcctcaccgttcgtcgaaagcggccgagtttgcatcaacggtgggaaggtttcaaaggggagagaatggacggtgataaacccatcttcagcgtgaggagagcgtcgatcataggacggtcgcgtgcgagtttgacggtggagatgtacgataaccccggtgaggagtaccagatcgaggggtgcttctcgcagcgttgctgcacggttttcaatgtgacg

SEQ ID NO: 187250 - DNA, 294 bp, Glycine max
aatggcttctgcagatgttgagtaccgttgctttgtcggtgggctcgcttggaccactgacgaccatgccctcgagagaaccttctctcagtacggcgaaatcgttgaaacgaagattatcaacgatcgtgagactggcagatccaggggttatggatttgtgaccttcgcctcggagcagtccatgaaagatgcgatcggagcgatgaatggacagaacttggacggccgtaacatcactgtcaatgaagctcagtcccgcggtggcggcagctgcggcggaggaggaggata

SEQ ID NO: 187251 - DNA, 297 bp, Glycine max
attaaattatagaatggatttttacctatgcctagatctcggataaatgaaaattttattgataaaaccttttcaattgtagccaatatcttattacgaataattccgacaacttcgggagaaaaaagggcattcacttattacagagatggtgcgatttgattctatttttttaccgaaatcggtaaaaagtggaaaaaacccacgcttgctgaaggtgaaatttgtaaatataaaggattaattccttctgtcgtgtatcctcgattaatgcagcctcatatgcttaaactttag

SEQ ID NO: 187252 - DNA, 295 bp, Glycine max
aatcgatctctctctctctctctgcttattgcaataacctaacctcgtgtcgtgatccgggcactggaactagggtttgcgctttctgtgttcaacaatcaagtttcaagaggagaggagaagagatggatgactgttgtgccgtttgcgatgagcctttggaatgggttgcgtacggaccctgtttgcaccgggaggtgtgttccacgtgcgtcgctcgtctccgtttcatctgcgacgatcgccgttgctgcatctgcaagaccgaatgcaacctcgttttcgtcaccaaggc

SEQ ID NO: 187253 - DNA, 286 bp, Glycine max
atccaagaagaacaacgacgatggcgatggctgcagctctgcgtcgcgaaggaaggcgtttgacccaaccaatcaacgccctccactcttctctcaattcctccctcatctctcaataccaagcccctcatggcgcgcgctccatttccactcaagttgtgaggaaccgaatgaagagtgtgaggactatccagaagatcaccaaggccatgaagatggttgccgcgtccaagctgcgggccgttcagaccagaactgaaaattcacgcgggctctggcaaccgtt

SEQ ID NO: 187254 - DNA, 298 bp, Glycine max
agaatttctatctatctcttgtttcaatttcaacaacggttactcctttttcgttttgagtttcaatcaagccatcatcatgtctaccgcatcgcaacccaaggccaagaaaacggcgtcgtccaagaagcccctctcccaccctcccttcgccgtgatgatagcagaggcgattgcgagtctgaaagagagaaccggttcgagccaatacgcgataaccagatacatcgaagggaagcacaaggagttgcctgcaacctacaagaagcttgtcctcgttcatctcaagaaatctgtt

SEQ ID NO: 187255 - DNA, 294 bp, Glycine max
acaggcagtcaaagaagtggatttgattcaagaggaattggagaagaaaactgccgagtttagagaaacaagtgcagttcttcaggttaaagagtcagagcatgttgatgctaagatagaaatccagcgtttgaaatctgaaaaggcttctattcagggtatcttggaggagaaagacttggagatttccagtgctaggaaaatgatgggggatgttaaccaggaaatctatgatcataagatgcatatgcacagtaaagaaacccagctcattgaagcaaacagtatgctaag

SEQ ID NO: 187256 - DNA, 290 bp, Glycine max
cgatgaagcagctgaacttttaagggatgaacagaaagatgatcctatagctgctgtagaatttctttccaaatactgccaatgggctgttgtaacattgggtgctaatgggtgcattgccaaacatggaaaggagatgatacaagtcccggccattggggaaacaaaggcaaccgatgctacaggagcaggggacctttttgcaagtggatttttgtatggagtggtcaagggtttgtcactagaagaatgctgcaaagtaggcacatgcagtggtggatctgttatcc

SEQ ID NO: 187257 - DNA, 291 bp, Glycine max
aggttgcattgctagtatactctctcgcactacgccggcggacgtgtgtaggttttccgtcgtatcaaagattttccgttcggccgctgaatcggacgctgtgtggaaacgttttctcccttccgattaccattccatcatttcccagtctccttcgcctctcaactatccttccaagaaggagctctatctcgctctctcggatcgccctatcatcatcgatcagggtaaaaagagctttcaattggagaaaaagagtgggaagaagtgttacatgcttgctgctagagc

SEQ ID NO: 187258 - DNA, 252 bp, Glycine max
  unsure (1)..(252): unsure at all n locations
cgtagatccggggattccgttgtaggtcaacctttcgggctgctgctgaatccacgggcaggcatgagacaacctggtgaactgaaacatcttagtagccagaggagaagaaagctagagcgattcccgtggtggctgcgggcgaaatcggagcagcctggaccgtgaaaacggggttgtgggagagctatacaagtgtcgtgctgctatgctnagcagcagggaatgctgcgccctagatggcgagagtcc

SEQ ID NO: 187259 - DNA, 289 bp, Glycine max
agctcgagcaaccagagatggagcatccaaagaaggtttttggttgggctgctcgggactcatctggagtactctccccattcaacttctccagaagagaaacgggggagaaagatttggtattcaaagtgcaatacagtggaatatgccactcagatctacatatgttaaagaacgagtggggcaacacaacctatcctcaggttacagggcacgagattgcaggtgtggtaacacaagttggaagcaaggtgcaaaagttcaaagttggagaccgggtaggtgtggg

SEQ ID NO: 187260 - DNA, 283 bp, Glycine max
agagcttgatattatttccaacgctagctgcacaaccaactgccttgctccactgcgcccaaggttatcaatgacaggtttggcattgttgagggtttgatgaccactgttcattccatcactgctacccagaagactgttgatgggccatcagccaaggactggagaggtggaagagctgcttcatttaacatcattcctagcagcactggagcttccaaggctgttgggaaagtccttcctgctttgaatggaaaattgactggtatggcattccgtgttc

SEQ ID NO: 187261 - DNA, 285 bp, Glycine max
cggttgttcgcgtcacgaagatgatcgaggtggtgttgaacgatcgattggggaagaaggtgcgcgtgaagtgcaacggcgatgacaccatcggcgacctgaagaagctggtggcggctcagacgggcacaagagccgacaagatccgcatccagaagtggtacaccatatacaaggatcacatcactctcaaggattacgagatccacgacggcatgggtctcgaactctactacaactaaacacaaggtctatacccatctcaattcttctttttatagatac

SEQ ID NO: 187262 - DNA, 285 bp, Glycine max
caggattcagaccaatgtttatggcaatggtagcaccaacattggcagagaggaaagatatggtctctggtttgaccctgcagatgatttccatcagtacactattgtctggacagactctcagatcatattttatgtggacaatgttcctattagagaagtgacgcgaacagaatctatgggaggagatttcccatctaagccaatgactttgtatgcaacaatatgggatgcatctgattgggctaccaatggaggcaaatacagggttaactacaagtatgc

SEQ ID NO: 187263 - DNA, 287 bp, Glycine max
aacaacttcccctgtaaatcgcgtttcgtttgtgcaaggttttaaaagatggctgatgctgaggacattcaacctcatgttgttgataatggaactggaatggtcaaggatggttttgcaggtgatgatgctcctagggccgtgttccccagcattattgggagaccacgccatactggtgtgatggttgggatgggtcagaaggatgcttacgtgggtgatgaagcccaatcaaaaaggggtatactcaccttgaagtatcctatagagcatggcatagtcagcaa

SEQ ID NO: 187264 - DNA, 288 bp, Glycine max
atgctcgagactctcttcatcttgttctatctgtgacgagcatcatggcctcaagagcagtgttattgttggctatgtgtgtgcttccggcgatggttgtagccattcgcccagcgaagaaccctttttgcgtgaacggtcgtgtctactgtgacacttgccgtgctggttttcagacctcagctaccagctacattgctggtgctgagattatgttgcaatgcaagagcagggttagcaacgaggttgtgtacacgcagaaggggtacaccgactcaaccggagcat

SEQ ID NO: 187265 - DNA, 284 bp, Glycine max
ctcgagccgagttgctcctatagccggcgctcaacaacatggcggacaaggcagtcaccatccgaaccagaaagttcatgacaaacaggcttctctccagaaagcaattcatcgttgatgtccttcatccagggagggctaatgtttccaaggctgaactgaaggagaaattgggcagaatgtatgacgtgaaagacactaacactgtatttgtcttcaagtttcgaactcattttggtggtggcaagtccactgggtttggtttgatctatgattcagttgag

SEQ ID NO: 187266 - DNA, 280 bp, Glycine max
acaagacccagtgcttctcactgaggctcctctcaacccaaaggccaacagagaaaagatgacccaaatcatgtttgaacccttcaatgtgcatgcaatgtatgtagccatccaggctgttctctccttgtatgccagtggtcgcacaactggtattgtgttggactctggtgatggtgtgagtcacactgtaccaatctatgaggggtatgcactcccccatgccatccttcgtttggatctcgcaggtcgtgatctaactgatcatttgatgaagatc

SEQ ID NO: 187267 - DNA, 219 bp, Glycine max
  unsure (1)..(219): unsure at all n locations
ttnatnnattagtncnnancnattaattncnattgaagtccgaaaacagaanccaaaaatacgggntgatgaaatcncatangncaaaaanaaatgggnatgtagtttaggtacaacaaacaaagtggggnggctanagatgctttgcaaattttnnaatgncttggaaccctgggggcttntaggcgatgaacctgttncactgnattggngaacgtt

SEQ ID NO: 187268 - DNA, 284 bp, Glycine max
  unsure (1)..(284): unsure at all n locations
ctcgagccgctcgagccgctcgagccgaatcggctcgagctcgagacgcattcattccttttactgatgacattganctgaccacagttactacttcagtgatgggtgttggagatattggtgacgtgaaaataattgatctacaggctccaattagtagccttattggaaaacaagtggtgaaggttggaagaagctctggcttgaccacgggagtagttttggcttatgccctagagtacaatgatgagaaaggtatatgctttctgacggatcttcttgtt

SEQ ID NO: 187269 - DNA, 266 bp, Glycine max
aaagctcgaacagcggagctcgagcagcaagtaaggaggaggtgacacttttggaagctactggaagcccatttgtgtgaacggttcatattgccctcaagttgaagggagttcaatacaaatatgtcgaagaaaatttgaggaacaagagtgaactgcttctcaaatcacacccagttcacaagaaggttccagtgtatattcacaatgagaagccatagcagagtcacatgtgattgttgaatacattgatgagacatgggaga

SEQ ID NO: 187270 - DNA, 272 bp, Glycine max
acctgctttccttttttttaatttgaatacttcttatgcaactatagtgaggataagagattggtccataattaatcaaaatgttggctatattccacaaagcttttgctcatccacctgaagagctcaacagccctgcatcttacaaaggttccaagaagcctaaggttcccgaggaaactctcaaagatttcctttcccaccatcatcacaacacttgctctatgagctttggtgatgctgctgttctagcatatgtacgtcctgatcaa

SEQ ID NO: 187271 - DNA, 208 bp, Glycine max
  unsure (1)..(208): unsure at all n locations
aggatagagatttggagagatcagagaanagctatgtaaacatgttggtttaccaggacatacatacaggtgatgagcttatatcaggctcattaagttgcaaggaaattgaggatgggatgatgtgggaagttgaggggaagtgggttgttaaagagcagttgatgtagacattggtgcaacacatctgatgagggtggaggagaag

SEQ ID NO: 187272 - DNA, 282 bp, Glycine max
atcgtggttcaagaaacccgtgccgaagaacttgatgggaaagaaaagagaggaattggatctggaggagaagattaaacaacatgagcaggaggtttctactacgatgaatgcttttcacatcatttcgctctcggaggggttcgatttgtcgccgttgttcgaggaaaagaagagagaagagaaagagttacggtttgcgaccacgcgccccgcgagcagcgtgatttcgagattggaagatttggcgaaggcggtgaagttcgacgtgaagaagagcga

SEQ ID NO: 187273 - DNA, 283 bp, Glycine max
gtgggttgggagatgttcttggaggtctaccaccggcattggcaggttttgggcatcgagtaatgactattgtgccgcgctatgaccagtacaaagatgcatgggatacaagtgttgtaattgaggtgaaagtaggagatagaacagaaaaggttcgcttcttccattgttataagaggggagttgatcgtgtctttgtggatcacccttggtttcttgaaaaggtatgggggaaaactggacaaaaactttatggaccaatactggaaatgattacgaagac

SEQ ID NO: 187274 - DNA, 279 bp, Glycine max
gggcatccaggcaacccttttgatctctcagcaatgtctggtctgctcaatgatccaagtatcaaggaattggctgaacagatagcaaaagatccatcgttcaatcagatggctgagcagcttcagaaaacttttcaaggagctccacaagatgctatccctagcttcgataatcaacaatatttttcaaccatgcaacaggttatgcagaatcctaattttatgaccatggctgagcgcctgggtaatgcattgatgcaggatccgtctatgtctgcc

SEQ ID NO: 187275 - DNA, 276 bp, Glycine max
gttaggttctgcacgctctgcttccagcgagtgttctttcttcgtttcaacaccttaatttgcacacgctgcttcttcagcttgagaaatggcacaagaaacctttctattcacatctgaatctgtaaacgagggtcaccccgacaagctgtgcgaccagatctctgatgcagtgctcgatgcgtgccttgaacaggaccctgacagcaaggttgcctgtgagacatgcaccaagaccaacatggtcatggtctttggagagatcacaaccaaggc

SEQ ID NO: 187276 - DNA, 273 bp, Glycine max
cgaagatggcttcacgcaggttcgtatcttctctgattcgatcctcccttcgtagatctcaatcgaaaccctcgatttccgcatccgcatcgaggatcacgtcatccaaccgtgcctctccgcacggttacttgctgaaccgcgtcgccgaatacgctaccgcggcggcggctgctaccgctcctccctctgctccgcctccgggcaagaaggaggttagcggcggcgggaagatcaccgatgagttcaccgggaagggctcgatcgggcagg

SEQ ID NO: 187277 - DNA, 269 bp, Glycine max
actggtcacctgatttacaagcttggaggcattgacaagcgtgttattgagaggtttgagaaggaagctgctgagatgaacaagaggtctttcaagtatgcctgggtgctggacaaacttaaggctgagcgtgaaagaggaatcaccattgatattgctttgtggaagtttgaaacaacaaagtattattgcacagttattgatgcgcctggacatagggatttcattaagaatatgattactgggacatcccaagctgactgtgctgt

SEQ ID NO: 187278 - DNA, 271 bp, Glycine max
  unsure (1)..(271): unsure at all n locations
actcgagccgattcggctcgagctccgcaccagtttcaccgcacgacatatcttgttgtntcgagcgatccgagaaaaacactgtaaacatgttggtttaccaggacctccttacaggtgatgagcttctctctgactccttccgttacaaggaaattgagaatggaatgctgtgggaagttgaggggaagtgggttgttaaaggagcagttgatgtagacattggtgcaaacccttctgctgagggtggaggagaagatgagggagttga

SEQ ID NO: 187279 - DNA, 286 bp, Glycine max
ctcgaagctctgcttccagcgagtgttctttcttcgtttcaacaccttaatttgcaaacgctgcttcttcaccttgagaaatggcacaagaaacctttctattcacatctgaatctgtaaacgagggtcaccccgacaagctgtgcgaccagatctctgatgcagtgctcgatgcgtgccttgaacaggaccctgacagcaaggttgcctgtgagacatgcaccaagaccaacatggtcatggtctttggagagatcacaaccaaggccaacgtagactatgagaa

SEQ ID NO: 187280 - DNA, 267 bp, Glycine max
tcggctcgagggaaccgcgccaaccctctcttcattcttcttcttcaatacttttataacctttatagattcattcttaatcgttgggaaaaatgttcatcgagaattttaaggtagagagtcctaatgtgaagtacaccgagactgagattcagtccgtgtacaactacgaaaccaccgaacttgttcacgagaacaggaatggcacctatcagtggattgtcaaacccaaatccgtcaactaccaatttaaaaccaacacccatg

SEQ ID NO: 187281 - DNA, 274 bp, Glycine max
ctggataggtcaaacatcatcatgtcggacgaagagcaccatttcgagtccaaggcagacgccggtgcctccaaaacctaccctcagcaagccggtaccattcgcaagaacggctacatcgtcatcaaaggacgcccctgcaaggttgtggaagtttcgacttccaaaactggaaagcacggtcacgccaagtgccactttgttggaattgatattttcactgccaagaaacttgaggatattgtgccctcttctcacaactgtgatgttcctc

SEQ ID NO: 187282 - DNA, 274 bp, Glycine max
acacacacagagagagatggctacgacgaggattgaggcagagaagaagccgaagacgaagatcgtgtgcactctgggccccgcatcacggtcggtcccaatgatcgagaagcttctgcgagcaggcatgaacgtggcgcgcttcaacttctcccatgggtcccacgagtaccaccaggaaaccctcgacaacctccgcgccgccatggagaacaccggtattctctgcgccgtcatgctcgacaccaaggggcctgagattcgaactggtttt

SEQ ID NO: 187283 - DNA, 269 bp, Glycine max
cttaacaagaagctcgatttggtcaatggagtgctcttcactggtgggtgggctgtttctggtccatatttggatactcttggaaacatttttaagaaagctttagagaaaaatgatgctggagaccatttcccagtaattgccttcaacttaggtggaaacctcgtaataaggatcgtaagcgagcaaactgatattcttgaaccatttactgcgtcgagtttgccaagttctcttgtattgtggaaggaagcaaatgctaaaggaag

SEQ ID NO: 187284 - DNA, 269 bp, Glycine max
cttctgaatctccagctgttagctcctttcttcctcttcttaatacttccagtgtttttcttcttctgtttcacctcctcaggtcctacaaaaggaaccatccctattccaaaaccataccctattattggtcactacttcgccctcaaaagcgtcggcaaccgccgtatccagtggctatccgatattgtcaaaatctcaccggccggcacgttcaccctccaccgccccttgggccgccgtggagtcatcaccggcaaccccgccac

SEQ ID NO: 187285 - DNA, 267 bp, Glycine max
tctttcggagagttcgaagatgtcgggcgttaccaacaacaacgaggaagacaagaagccaaccgaacagggagcacacatcaaccttaaggttaaggggcaggatgggaatgaagtttttttcaggatcaagagaagcactcaattgaagaagcttatgaatgcttactgtgaccgacagtcggtggatttcaactccattgcttttctgtttgatggacgccgcctccgagctgagcagactccagatgagttggaaatggagga

SEQ ID NO: 187286 - DNA, 268 bp, Glycine max
  unsure (1)..(268): unsure at all n locations
ctcgagccggtcaatttgcagttgcacgcttcccaattcgcacacccatatcacatcacatctttctccacacgcaacgcaaccacttaataatcaatcatcctcactagcatttaaacatgcagcaatctttgccgtgagaagggaccatggaggcaaattcaggtgccagcgaccgaatttcgagaatcgccggccacctccgcccccagagagaggatgatgtttgtttgaagcgtacannttgccgtgcaaaaggtggggtctc

SEQ ID NO: 187287 - DNA, 277 bp, Glycine max
ggaacaatgtaggcaagggaagtcggcaaaatggatccgtaacctcgggaaaaggattggctctgagggctgggcacgggggtcccagtcccgaacccgtcggctgtcggtggactgctcgagctgcttccgcggcgagagcgggtcgtcgcgtgccggtcgggggacggattgggaacgggcccttcggggcctcttccccgggcgtcgaacagtcaactcagaactggtacggacaaggggaatccgactgtttaattaaaacaaagcattgcga

SEQ ID NO: 187288 - DNA, 274 bp, Glycine max
aacaaaatcaacacgcatgtgctcttgaatgtctacgatctcacccctgtcaataattacgtctactggtttggatttggcatctttcactctggcattgaagtacatggtaaggagtatggttttggagcccatgacttcccagctagtggagtttttgaagtggagccaaggaaatgccctggattcatatatagatgttccatctctttgggtcaaaccaatatgaatccttctgaatttcgtacatttattgaaaacatggcttctgagt

SEQ ID NO: 187289 - DNA, 263 bp, Glycine max
tctacaatcaagccaacattcgcaggatgcgaatctaatcgtcaagcccagaagtcctcgaagcactaagaggttccaacattgagcttttgctagacattccaaatgacaacctcagaaacctagcatctagccaagacaatgcaaacaaatgggtgcaagacaacatcaaaaactatgccaacaatgtcagattcagatacgtttcagtgggaaatgaagtgaaacccgaacactcatttgcacaatttctagtgcctgca

SEQ ID NO: 187290 - DNA, 267 bp, Glycine max
ctcgagccgtttttatttttttaaattatccaaaacagtaaaatagccttaaacaaaacgatcaatagtttccccagatttatatttaaaaaacacgaaacaaacataagagagaaggaaaaagagagagaaacaaagtcttcttcctcaatcgagagggacctcaacatcaccatcggaaatctcctgctgcaagtcctttggatcctttccatcaacggtgcaaccaaccgaaacgcatgttccgagaatctccttaatggagcc

SEQ ID NO: 187291 - DNA, 270 bp, Glycine max
gcggtacccttgctctccaagaggatcgtgaagaagcgcgtcaagaagtttatacgcccccagagtgatcgcaagatctccgtcaagccaagctggcgcagacccaagggtattgattctcgtgtcaggagaaagttcaaaggatgcactttgatgcccaacattggttatggctcagacaagaaaacccgccattatctaccaaatggtttcaagaaatttgtcgtgcacaatgtgaaagacctggaacttctcatgatgcataacagg

SEQ ID NO: 187292 - DNA, 266 bp, Glycine max
gctctgcttccagcgagtgttctttcttcgtttcaacaccttaatttgcacacgctgcttcttcagcttgagaaatggcacaagaaacctttctattcacatctgaatctgtaaacgagggtcaccccgacaagctgtgcgaccagatctctgatgcagtgctcgatgcgtgccttgaacaggaccctgacagcaaggttgcctgtgagacatgcaccaagaccaacatggtcatggtctttggagagatcacaaccaaggccaac

SEQ ID NO: 187293 - DNA, 257 bp, Glycine max
ctcgtatcccctatttgcttcatgttcagatgactgcactgcatatgtttttcatggaatggtttattctgatctcaatcaatatcctcttattgttcctttagaaattctacgaggtcataccaattcaaatgggagagggatactggactgtaaatttcacccgagacagccatggttatttacggctggtgctgataaactgattaaactttattgtcattaatataaacatggacatacgtgcatgtgatagg

SEQ ID NO: 187294 - DNA, 255 bp, Glycine max
gaagctacctagagcttgcacctattggtatcttctacaatatcctctcatagtgctcttctactgcgccaggtgcattgatcgcgagggcaagaggtctctccctcctcatgaggcaggaaaagaagctttccactttcccatgattactgagtacagatgggttggtggatctggtatggacctcagaagcaaagccaggactcttcctgggccagtgagtgaccctgcaaagcttccaaagtggaactacga

SEQ ID NO: 187295 - DNA, 271 bp, Glycine max
aaccaacagaattgaaagtcttgatccagctttgctacgacctggtcgaattgacaggaagatagaatttcctcttcctgatatcaaaacaaggagacgcatcttccagatacacacgtcaaggatgacattagctgatgatgtcaacttggaagaatttgttatgactaaagacgaattctccggagctgatataaaggcaatatgtactgaagctggtttacttgctctacgagaacgtcgaatgaaggtgactcatgccgactttaag

SEQ ID NO: 187296 - DNA, 265 bp, Glycine max
acacacacagagagagatggctacgacgaggattgaggcagagaagaagccgaagacgaagatcgtgtgcactctgggccccgcatcacggtcggtcccaatgatcgagaagcttctgcgagcaggcatgaacgtggcgcgcttcaacttctcccatgggtcccacgagtaccaccaggaaaccctcgacaacctccgcgccgccatggagaacaccggtattctctgcgccgtcatgctcgacaccaaggggcctgagattcga

SEQ ID NO: 187297 - DNA, 262 bp, Glycine max
gccggtttccaagttggtcattgggatgatactgcaatgatgtctgacaacgttggtagtctcaaaagatttagtgaagaagattcaaaaccattttctggcttaaatgcggttgagactcagaatgaaacgggacagactcatgctcctttggcccatcagttgagtttgccaaatacttcagctgaaatggctgccattgagaagtttctgcagttttcagattctgttccgtgcaaaatccgtgcaaaacggggctgtg

SEQ ID NO: 187298 - DNA, 266 bp, Glycine max
cttatatctcatccactggcccctcagttctcagccagggaagtactcctttcctattgaggtagatgatctcttgcctttcgatgtgaagggtgtgtgggaatccatggaagagtgccagaaacttggcctcaccaaagccattggagtcagcaacttctctgtcaagaagcttcagaatctgctctctgttgctaccatccgtcccgtggtcgatcaagtggagatgaaccttgcatggcaacagaagaagctaagagagttct

SEQ ID NO: 187299 - DNA, 262 bp, Glycine max
gctttttctgctggtttgcatggctgggcttttaccctgactaactttgccaagatgtatgcatccaagtttggagttgatgaaggaaagatgatggaaaggctctggggtgaaaacttttttgatccagccacaaagaaatggaccagcaagaatagtggttctgctacctgcaagcgtgggtttgttcagttctgttatgagcccatcaagcagattattaacacttgtatgaatgatcagaaggataagctgtggccta

SEQ ID NO: 187300 - DNA, 262 bp, Glycine max
  unsure (1)..(262): unsure at all n locations
attttggtcaagccctttcgttcatagagtgatatgggctctaaagttgaagaacattagttatgagtacatagaggttgataggttcaacaaaagtgagctacttcttcaatccaatccagtttacaagaaagtccctgtgcttattcatggaggcaaagccattgcagagtctcgtgtcattcttgaatacatcgaagaaacgtggccagagaaccacccattgctagcanaagacaaccatcaaagggccttggctcgc

SEQ ID NO: 187301 - DNA, 261 bp, Glycine max
gtcatatgcttgtctcaaagattaagccatgcatgtgtaagtatgaactaattcagactgtgaaactgcgaatggctcattaaatcagttatagtttgtttgatggtatcttctactcggataaccgtagtaattctagagctaatacgtgcaacaaaccccgacttctggaagggatgcatttattagataaaaggtcaacacaggctctgcctgttgctttgatgattcatgataactcgtcggatcgcacggcctttg

SEQ ID NO: 187302 - DNA, 260 bp, Glycine max
ggagtcagaccttgtcgttccaaccgataaactaagtttcctgaatagagcctgtgttatcaaagatcgggaacaagaaatagcctcggatggttcagcatcaaatccatggaaactctgcacagtagatcaagtagaggaactaaaagccattattaaagtgattcccttgtggtctacagggatcatgatgtcagttaacattggaggctcatttggattgctgcaagctaagtccctggacagacacatcacctcac

SEQ ID NO: 187303 - DNA, 256 bp, Glycine max
attgatgcagtgaagcagaggcagtcccaagaacaggctaggagaaaaaagatgtcgagggctcaagatggaatcttgaagtacatgctgaagatgatgcgaggtttgtaaggcccaaggatttgtctatgggattattcctgagaagggaaaaccggtgactggggcatctgataatcttcgtgaatggtggaaggataaagtccggtttgatcgaaatggtcctgctgccatagccaagtatcaagctgataac

SEQ ID NO: 187304 - DNA, 244 bp, Glycine max
cccagagagcgcgtcttaataaacgctcttctctgaaaacccccatttcttttcttctttcttcttctctttcgcttcttcgatcttcgatcttcgtcgctgaaaatgagagagtgcatttcaatccacatcggccaggccgggattcaggttggaaacgcctgctgggagctttactgcctcgaacacggcattcagcctgatgggcagatgccaagtgacaagaccgttggtggaggtgatg

SEQ ID NO: 187305 - DNA, 261 bp, Glycine max
cttctacaatatcctctcatagtgctcttcttcttcttcattttcattatcaagatgtctttgctttcggatctcatcaacctcaatctctcagaatccacagaaaagatcgtttatgagtacatatgggttggtggatctggtatggacctcagaagcaaagccaggactcttcctgggccagtgagtgaccctgcaaagcttccaaagtggaactacgatggctctagcacagaccaagctccaggggatgacagtgaa

SEQ ID NO: 187306 - DNA, 263 bp, Glycine max
gttttcatcgtcttccttctcttatatttctattttttttttgtcttcgccgcacgccgaaacaatggccggaaaaggagagggtcctgctatcggaatcgatctcggaaccacctactcttgtgtcggtgtgtggcaacatgaccgagttgaaatcatcgccaacgaccaagggaacagaacgacgccgtcttacgtcggcttcactgataccgagcgtctcatcggtgatgcggctaagaaccaagtcgccatgaacccca

SEQ ID NO: 187307 - DNA, 262 bp, Glycine max
gactgctatagccttcctgtttatccttctaatcacttatacaggcacaacagatgcacaatccggggtatgttatggaagacttggcaacaacttaccaacccctcaagaagttgtggccctctacaatcaagccaacattcgcaggatgcgaatctacggtccaagcccagaagtcctcgaagcactaagaggttccaacattgagcttttgctagacattccaaatgacaacctcagaaacctagcatctagccaagac

SEQ ID NO: 187308 - DNA, 263 bp, Glycine max
gaaagttggaatggcgaaaaaggcagtgttgatcggaataaactacccaggaacaaaggcggagctgagaggatgcataaacgacgtgtggagaatgcatcgctgcctgatcgagcgatacggtttctccgaagacgacatcaccgttttgatcgacacggacgagtcctacacggagcccaccgggaagaacatccggtcagcgctgaccaggctggtccgatcggcggagccggggacgttctgtttgtgcactacagcgg

SEQ ID NO: 187309 - DNA, 257 bp, Glycine max
ggggtctagaagcacgtgtaccatttttggacaaggcgtttatcaatgctgcaatgagtattgaccctgagtggaagatgataaaaagagatgaaggacgaattgagaagtggattctgaggagagcatttgatgatgaagagcatccttatctgccaaagcacattttatacaggcagaaagaacaattcagtgatggagttggctatagttggattgatggccttaaggaccatgctgcaaaacatgtgactgaa

SEQ ID NO: 187310 - DNA, 256 bp, Glycine max
caggaatacagttgtgttgtcatttgaaccagatttcaataatgattcttgctgctcttctaacttcagttgtaattaaccttggcctatgttttatatttttcaccctctactctgtattgaggaagcagcctggtaatattaccgtctatgcaccacgcttagtttctgaagggaaacgtcaagagggtgatcaatttaacttggaacgtttgttacctgctactactgctggttgggtgagaaaagcatggga

SEQ ID NO: 187311 - DNA, 258 bp, Glycine max
actcgagccgattcggctcgaggagaaattggtggatctgcttgataaggcattatctgcagacacagttaacactgtgaagaatttgagagtgatcatggaaactggtgtcgagccattggctttaatgtcacaacttgctacagtaattactgatatacttgctgggacctatgatttcacaaaagaaaggcgaaggaggaagttcttccggagacaaccattgtccaaagaagacatggagaagctgcgccaagc

SEQ ID NO: 187312 - DNA, 256 bp, Glycine max
atggcttctgtgcctcaaccaaaaatctcccttctaaccttattcttcttctcttccttcaccatcattgcgaatgcaattgttcctcaaaacgaaaccttacaatttgagaactcaggtgaacttggaccctacatcgttgagtacggtgcagattacagaatgataagcatcttcaactctccattccaagttggtttctacaacaccaccccaaatgccttcactctagctttgcgtgtagggctccaacgct

SEQ ID NO: 187313 - DNA, 254 bp, Glycine max
caagctactacatttttaacttcctctttctacatttcattcaaaacaatcatggcttctcttcattccattacattttcaacaaaaactgtcctttatgtatttgtattggcctcttccatcgcagcctctgctggcaacttctaccaggattttgacgtaacttggggagatggtcgtgccaagatactcaacaacggcgatcttctcactctttcccttgacaaagcctctggctcggggtttcagtccaa

SEQ ID NO: 187314 - DNA, 282 bp, Glycine max
ggaggagctatgcacgaagatctcgtgctgtgacgctctgatagtcaggagcgggacgaaggtgacgagggaagtgtttgaagctgggaaagggaggttgaaggtcgtgggaagagccggcgtggggattgacaacgtggatctgcaagctgccactgaatttggttgcctggtcgtcaatgctcccactgccaacactattgctgctgccgagcatgggatcgctctccttgctgccatggcccgcaacgttgcccaggctgacgcctccaccaaagctgg

SEQ ID NO: 187315 - DNA, 286 bp, Glycine max
cggctcgagtggaaggccgctgacttgaccaaaattattgttggtgttgttgaggcttgccattcccttggggtcatgcatagagatctcaagcctgaaaactttctcttggtcaacaaagatgatgatttctctcttaaagccattgactttggcctctccgttttcttcaaacccggtcaagttttcactgatgtagtcggcagcccatactatgttgctcctgaggttctcctcaaacattatgggcctgaagcagatgtgtggacagcgggtgtcatactgt

SEQ ID NO: 187316 - DNA, 271 bp, Glycine max
ggtggctctcagaaaagccgtgttctttgtaatcgctcaatgcttcaccttttccgcatatgctgcaaggtttgaaatcacaaaccgatgcacatacactgtctgggctgcgtctgtgcctgttggcggtggcgtgcaattaaacccgggccagtcatggtccgtggacgtgcctgttggaacgaaaggggcccgcgtttggacccgaaccggctgcaacttcgacggttcgggccgcggtggatgccagaccggtgactgcgggggtgtc

SEQ ID NO: 187317 - DNA, 269 bp, Glycine max
cagcacttggctgagaagctagacttggaaatgtctgccctccagtatatgatacaagaataccctggaaacgaggaggagaggatgagagcagccattgggaaatttggactgtctggcaaagcgcaggtcatgcctatgaagaatttatccgatgggcagaggaaccgagtgatattcgcatggttcgcttatagacagcctcacctgctacttttggatgagccaacgaaccatttggatatagaaacgattgactcattggctga

SEQ ID NO: 187318 - DNA, 268 bp, Glycine max
ctgttgttctttggctttattgaactgctgtatttctcagcttcactgacaaagttttgtgagggtgcctggttacctattctgctggccctattcctcatgattataatgtttctttggcactatgcgaccatcagaaaatatgaatacgatcttcacaacaaggtgtcactagattggcttctagccttaggtccaagcttgggaattgctagagtcccaggaataggccaagtgttcactgacctcaccactggcatcccagcaa

SEQ ID NO: 187319 - DNA, 263 bp, Glycine max
ctaaagggagatcttcctattggagttgacagaaacagtgtggatacctgggtttatccaaatttgtttcgaatgaacacttctactggggcacctccagattattttgataaaaatggccagaattggggtttccctacttataattgggaagaaatgtcaaaggacaactatggttggtggagagctcgattgacacagatggcaaaatattttacagcttacaggattgatcacattttgggattcttccgaatttggga

SEQ ID NO: 187320 - DNA, 262 bp, Glycine max
cttgttttcttcgttgctacaattttcgtagcatggcaatgccatgcgtacgatatgttccctctccgaatgaacactggctatggtgcccgtactccggaggtgcaatgcgcaagttggaggcttgctgtggaagcacacaacatctttggctttgagaccattcctgaagagtgcgttgaagcaacaaaggaatacatccatggcgaacaatatagatcagactccaaaacagttaaccaacaagcttacttttatgcca

SEQ ID NO: 187321 - DNA, 262 bp, Glycine max
caagcatggcagtcacactctacgaccttagctcttcctctgggttgaagaaacttgatgagtaccttctcccacgcagttacatcaccgggtaccaagctacaaaggatgatcttactgtttatgcagctttgccaactgctccatcagatgaatatggaaatgtttccaggtggtacaagcacattgatgctttgttgagaatctctggtgttactggcgagggatctggtgttattgttgagggatctctagttgcaga

SEQ ID NO: 187322 - DNA, 253 bp, Glycine max
ggaacaagaagatatctgctagtgtacttggtgtagccactgctgtttggatcttttttgagttgcttgaatatcacctgcttactctagtttgtcacatttcgattctggtgcttgcagttttgtttttgtggtccaatgcccatacctttattcacaaggcaccgccttgcatcccaaccgttcatctccctgaagaaccaattcgccaattcgcatctgcattgacaattgaaatcaaccgtggatttgc

SEQ ID NO: 187323 - DNA, 256 bp, Glycine max
  unsure (1)..(256): unsure at all n locations
cggctcgagcggctcgagggcaaatcaaaacagaaacacgactacaaaaagaagaaaagaagaaaaagaatcaatcattcattgatcgctgaaacgatacgatgacagggaaggcgaagcgnagaagcacacggcgaaggagatcgcggcgaaggtggacgcggcgaccacgaaccgcggcggcgggaaggcgggtatgaaggaccgaaccgggttggagaagggcgggcacgcgaaatacgagtgccctcactgc

SEQ ID NO: 187324 - DNA, 277 bp, Glycine max
tcggctcgagcttctattcagagggaaggatagtcttggtgaagaagttgtgataccatatactcctacaacattggatactgatgttggatactttgaattggttgtgaagatgtatccacaaggacggatgtctcatcactttagggagatacgtgaaggtgattacatggctgtgaagggaccaaagggacgttttaagtaccagcccaaccaagtaagagctttgggtatgattgctggtggcactggcatcaccccaatgtttcaagttaca

SEQ ID NO: 187325 - DNA, 265 bp, Glycine max
atgtatggattcttcaagaacaagaggattgtgctttatgacacattaattcaacagtgcaaagacgatgaggagattgttgctgttattgcccatgagttgggacactggaagctcaaccatactgtgtacacgtttgttgctatgcagattcttacacttctacaatttggaggatatacactggtgcgaaattcaactgatctgtatcgaagctttgggtttgatacccagccagtcctcattgggctcatcatatttcagc

SEQ ID NO: 187326 - DNA, 265 bp, Glycine max
aatcgagccgatgttggctcgatggaaccgcttcaaccctctcttattcttcttcttcaatacttttataacctttatagtctcattcttaatcgatgggaaaaatgttcatcgagaattttaaggtagagagtcctaatgtgaagtacaccgagactgagattcagtccgtgtacaactacgaaaccaccgaacttgttcacgagaacaggaatggcacctatcagtggattgtcaaacccaaatccgtcaactacgcatttaa

SEQ ID NO: 187327 - DNA, 262 bp, Glycine max
cggagtactggaacggcgagtcaacggagaatttaccgttcgagtcagacgaagacgaagaagaagaggaagcgagaaacggaggaggagacaaggaggaacagattccggtggcgctgccggtcaccggcttcgatatcgtcatcgacgcgctgccgtcggggacgatcaacgacctccacgagattgcgaacgaatggtggcaggaggtttcgggaaggagtgctctcacgtgtacagcagctgccggagggagtttctg

SEQ ID NO: 187328 - DNA, 255 bp, Glycine max
atgaaaatgaaggtccttgttttcttcgttgctacaattttcgtagcatggcaatgccatgcgtacgatatgttccctctccgaatgaacactggctatggtgcccgtactccggaggtgaaatgcgcaagttggacgcttgctgtggaagcacacaacatctatggctttgagaccattcctgaagagtgcgttgaagcaacaaaggaatacatccatggcgaacaatatagatcagactccaaaacagttaac

SEQ ID NO: 187329 - DNA, 256 bp, Glycine max
attggattccaaatccaaacatgacacagcaaaagaagatgatgacgctttgaaagacagcactgaagccgaagtcaccaaaattcgtctcatgagagcctttgttgaaagccgagatccctcttccaaggaagaaaatgatttgatgatgagaagattcttgcgggctcgtagtttggatgtggagaaggcttcggcaatgttccttaagtacttgaaatggaagcgttcatttgttccaaatggttgcatatca

SEQ ID NO: 187330 - DNA, 265 bp, Glycine max
tctactctcacaacatcgttcatggatgcttctctagttctccacgccacgatgctccaccagctggtttgctgagtctagttagcgatgactgatctaacatggttgagaatccttgaaaagatgctcaagaagtgcttatatgaagtgactacatgttgtttagcaacagaggccctgaaaaaacttcgtgaaaggaaagaagcatatgacatagtgatcagcgatgtgaacatgcctgacatggatggtttcaaacttctgg

SEQ ID NO: 187331 - DNA, 269 bp, Glycine max
gctccttagtgctgctccttgcagctctaattctatcccctcaagttcttgcaaactatgagaatcccccagtgtacaagcctcccactgagaaaccaccagtttataagcccccagttgagaagcctcctgtttacaaacctccagttgagaagcctccagtttataagcctccagtagagaagccaccagtgtacaagcccccagttgagaaacctccagtttacaagcccccagttgagaaaccaccagtgtacaagccaccagtt

SEQ ID NO: 187332 - DNA, 258 bp, Glycine max
caaagattaagccatgcatgtgtaagtatgaactaattcagactgtgaaactgcgaatggctcattaaatcagttatagtttgtttgatggtatctactactcggataaccgtagtaattctagagctaatacgtgcaacaaaccccgacttctggaagggatgcatttattagataaaaggtcaacacaggctctgcctgttgctttgatgattcatgataactcgtcggatcgcacggcctttgtgccggcgacgc

SEQ ID NO: 187333 - DNA, 264 bp, Glycine max
gtgcaacctagcagcctccaaatccaatggcttcagagaagaaactttcgaacccaatgagggagataaaagtgcagaagctcgtcctcaatatctctgttggcgagagtggagatcgtctcaccagagccgccaaggtgttggaacaacttagtggccaaaccccagtgttttccaaagcaaggtacactgttcgttcctttgggattagaagaaatgagaagattgcatgctatgtcactgtcagaggtgacaaggcaatgc

SEQ ID NO: 187334 - DNA, 272 bp, Glycine max
gtcccacaatcgagaatgggaaaattgtggtaagagctccgactttggatggatgcagattgctgaacctgtaatgaaactctatacagaggcgactgatggttcctctattgaaagaaaagaaagtgctttggtctggcaataccgtgatgcagaccttggttttggatctgctcaggctaaggaaatgttagatcatctagaaagtgttttggccaatgagcctgttgctgtgaagagtggccagtttattgttgaagtaaaaccccagg

SEQ ID NO: 187335 - DNA, 271 bp, Glycine max
cgagctctgcaccgaagaacgaagccatggggaagacacatggaatgggctctgctcgcaagctcaagtcccaccgcaggaggcaaaggtgggctgacaagtcatacaagaaatcacatcttggaaatgaatggaagaaaccttttgctggttcatcccatgccaagggaattgtccttgaaaagataggtattgaggctaagcagcccaactctgccattcgtaagtgtgccagggttcaacttatcaagaatgggaagaagattgccgc

SEQ ID NO: 187336 - DNA, 263 bp, Glycine max
gtaaagcatggctttgttggtggagaaaaccacgagtggtcgcgagtacaaggtcaaggacctttcccaggccgacttcggccgcctcgagatcgagctggccgaggttgagatgcccggcctcatggcctgtcggaccgagttcggcccctcccagcccttcaagggggcccgcatcaccggctccctccacatgaccatccagaccgccgttctcattgagaccctcaccgaccttggcgccgaggtccgctggtgctcct

SEQ ID NO: 187337 - DNA, 263 bp, Glycine max
ggagaatatgaagttgtttgtattctttgttgctgcagtagttttggtagcatggccatgccatggcgcaggctaccaaaggttccctctccgaatgaaaactggctatggtgagcgttcttcggaggtaaaatgcgcaagttttaggcttgctgtggaagcacacaacatccgagcacttaaaaccattcctgaagagtgcgttgaaccaacaaaggactacattaatggcgaacaatttagatcagactctaaaacagtta

SEQ ID NO: 187338 - DNA, 259 bp, Glycine max
cggctcgagaatgggtgcctacaagtatgtttcggagctatggcgcaagaagcagtctgatgttatgagattcttgcagcgggtgaggtgctgggagtatcgccagcaaccttctattgtccgtttgacaaggtctactcgcccagataaggctcgtcgcttgggtttcaaggctaagcagggttacgtgatttaccgtgttcgcgtacgaaggggtggccgtaagagaccagttccaaagggtattctttatggtaag

SEQ ID NO: 187339 - DNA, 263 bp, Glycine max
accatttcgagtccaaggcagacgccggtgcctccaaaacctaccctcagcaagccggtaccattcgcaagaacggctacatcgtcatcaaaggacgcccctgcacggttgtcgaagtttcgacttccaaaactggaaagcacggtcacgccaagtgccactttgttggaattgatattttcactgccaagaaacttgaggatattgtgccctcttctcacaactgtgatgttcctcatgtgaatcgtactgattaccagctc

SEQ ID NO: 187340 - DNA, 261 bp, Glycine max
gcgtagtaagcgacgaaatgcttcggggagttgaaaataagcgtagatccggggattcccgatataggtcaacctttcgaactgctgctgaatccacgggcaggcaagagacaacctggtgaactgaaacatcttagtagccagaggaaaagaaagcaaaagcgattcccgtagtagcggcgagcgaaatgggagcagcctaaaccgtgaaaacggggttgtgggagagctatacaagtgtcgtgctgctaggcgaacagc

SEQ ID NO: 187341 - DNA, 263 bp, Glycine max
ctttggttggatagatctctgatctgaagatgagtgcgtcgaggttcattaagtgcgtcaccgtcggcgacggcgctgtcggcaaaacctgcttgttgatttcctacaccagcaacacttttcccacggactacgtgcccacggtttttgacaatttcagtgctaatgttgtggtggatggaagcaccgtaaacttggcattgtgggatactgctggtcaggaagattataataggcttagacccttgagctatcgaggagct

SEQ ID NO: 187342 - DNA, 267 bp, Glycine max
gtctacaatcaagccaacattcgcaggatgcgaatctacggtccaagcccagaagtcctttaagcactaagaggttccaacattgagcttttgctagacattccagatgacaacctcagaaacctagcatctagccaagacaatgcaaacaaatgggtgcaagacaacatcaaaaactatgccaacaataccagattcagatacgtttcagtgggaaatgaagtgaaacccgaacactcatttgcacaatttctagtgcctgcattg

SEQ ID NO: 187343 - DNA, 269 bp, Glycine max
ctacagggcactggccaacatatccgcccatggatgttagacttcctcatgaattgaatgtttaccaggatattttcaaagagttctatctaagcaaatacagtggaagacgtctgatgtggcaaaattcactaggtcattgtgtcttgaaggcagagtttcccaaaggaagaaaggagttggctgtgtccctatttcagactgttgttctaatgttattcaatgatgctgagaagctaagtcttcaagatatcaaagatgctactggt

SEQ ID NO: 187344 - DNA, 262 bp, Glycine max
atttttaaatcaaatcggcattacaaaaacattaggtgaaagaaattaaaagttaacttctaggaaccacacctaatgctaaccacaaaccatccggcattatattttgatgttgaaataatctgggtcaaagtggtgcaaccgtacataaccatcttcacctccacttgaaaaactttttccatcagggttaaaagccaatgcattaattggtccaaaatgcccttttacacccccaatttcttcttgaagaatcttgtca

SEQ ID NO: 187345 - DNA, 259 bp, Glycine max
cggctcgagcagctttgcaaatcatctggcaaacttctgaagggtggtgagcctgacctgatgactgcggcaaagatgatacttcatgactggcagaggggccgaattccattttttgtttcccctcctagggttgaggacttgtccgaggaacctaatgttaatggtgttgacttagatgattcagttgatggcaatgaggcttctgctgctatgaaggctatcgcagatgttctttcatcgcagcagcaaacaagtg

SEQ ID NO: 187346 - DNA, 258 bp, Glycine max
aaagaagagaggtggtcgtcgtcttaggaagatgaaggaaaggtatgcaataacagacatgaggaagttagccaataggatgcaatttggagtcccagaagagagttcattaggagatggtctgggtgagggctatggaatgcttggtcaggctggcagtggcaagcttcgtgtgtctgttggtcaaagcaaacttgcagcaaaagttgctaaaaaatttaaggaaaagaattatggtagtagtggtgctacctctgg

SEQ ID NO: 187347 - DNA, 256 bp, Glycine max
aattgtttctgtggagaatgcaaggatgggaattcggaatagtggctctacgggaatgcttgtcgccggaatggaggctcaagtagttagtgtggatactctgaagcctctccctcctggacagttgggggagatatgggtacggggccctaatatgatgcaaggttatcacaacaatccacaagccacaagattgactatggataaaaaagggtgggtacatacaggagatcttggatattttgatgaggatggg

SEQ ID NO: 187348 - DNA, 257 bp, Glycine max
cgaggagcagcctcaggaggagaaggatgtctcacaggaagttcgagcacccaaggcacggttcactgggatttcttcccaggaagcgtgctgctcgtcacaggggaaaagtgaaggcattccccaaggatgacccatccaaggcacccaagctcactgcattcttgggttacaaggccggtatgactcacattgttagagaggtcgagaagccaggatcaaagcttcacaagaaggaaacttgtgagcctgttaca

SEQ ID NO: 187349 - DNA, 257 bp, Glycine max
caagaacatgctctagctgttgaacacctggcaccaagcttagctgctcttagaatggagctctgccccggatacatgagtgatggtaacttttggaagatatactttgttctcgtgcaccctagacttagcaaaactgatgctgctattttatccactccacaaataatggaagctagagcaatgttaactctggctttagacaaaagaagtaaggaaaagaaagaatctgacttatctgcaggagggaatgttcc

SEQ ID NO: 187350 - DNA, 255 bp, Glycine max
cttaacaagaagctcgatttggtcaatggagtgctcttcactggtgggtgggctgtttctggtccatatttggatactcttggaaacattttgaagaaagctttagagaaaaatgatgctggagaccatttcccagtaattgccttcaacttaggtggaaacctcgtaataaggatcgtaagcgagcaaactgatattcttgaaccatttactgcgtcgagtttgccaagttctcttgtattgtggaaggaagca

SEQ ID NO: 187351 - DNA, 260 bp, Glycine max
tatggcatctatgaaaacttttgtgggtttgcttttctcttcctgtttttctggggtaagattatgtttgttatgaggggatagggaagggcggtgtcttaatttgataaaaataactatgttcaacaaccactgtgatgtttttatcatgatgcgaacgcatgaacaagatgttatttgtgtcatggctgtggtgttactctatgaagtaatgtagaaatagtcatatgttttaaacagctttttccaagaaaaataaa

SEQ ID NO: 187352 - DNA, 254 bp, Glycine max
cgaaaccctgagtcgccagcgcagcccgaaacctagtccagtttgcagtttcttgtgcggtttatcatgggggatagtcagtattcgttttctctcaccacatttagcccttctggaaagcttgttcagattgagcatgccttgacagctgttggctctggacagacgtctttgggaataaaagctgcaaatggagttgtcattgccaccgagaagaaattgccatctatattggttgatgaaacatcagtcca

SEQ ID NO: 187353 - DNA, 255 bp, Glycine max
ctcgtatcccctatttgcttcatgttcagatgactgcactgcatatgtttttcatggaatggtttattctgatctcaatcaaaatcctcttattgttcctttagaaattctacgaggtcataccaattcaaatgggagagggatactggactgtaaatttcacccgagacagccatggttatttacggctggtgctgataaactgattaaactttattgtcattaatataaacatggacatacgtgcatgtgata

SEQ ID NO: 187354 - DNA, 258 bp, Glycine max
gttccttgatctctcctctcaagatgcagattttcgtgaaaactttgaccggcaagaccatcacccttgaggtggaatcctccgacaccattgacaacgtaaaagctaagattcaagacaaggaagggatcccacctgaccagcagagacttatctttgcgggtaaacaacttgaggatggtcgcacccttgccgattacaacatccaaaaggaatcaaccctccatctcgtgcttcgcctcaggggtggcatgcaaa

SEQ ID NO: 187355 - DNA, 260 bp, Glycine max
cttggccctcgattttgccctaaagtactctcagtcacaacagacaccgtcgtcgtcgtcgtcgtcatcaatggcaccgaagcagaccaaggctgagaagaagatcgcttacgatgcgaagctgtgcgacctaatggaggagtacggccagatcctcgttgtgaactccgataacgtgggatcgaaccagctccagaacattcgcaagggtctccgtggcgactccgtcgtcctcatggggaagaacaccatgatgaagc

SEQ ID NO: 187356 - DNA, 292 bp, Glycine max
gccgccaccgcagcattctctcgccaccgccgtctcgtcgcctccgcatcgccgatgaatccgtcgtcgcagtctcagtccccgcctcctccggtggcaaagaaggtggagcatgcgatggaaatgttcggcgacgtgagaatcgacaactactattggctccgtgacgattcccgcaccgatcccgaagtgctctcgtacctccgccaggaaaatgcctacaccgattccatcatgtccggaactaaggaatttgaagataagtttttgctgagataagaggaaggattaa

SEQ ID NO: 187357 - DNA, 285 bp, Glycine max
cttccattctgtttattccacacatctatccataaaaagtagaacccaagcccccagtagtgaagggactatcatatcccttctcttccaaaacatgccccaagcttgagtccattgtgaggaaacatctcaagaaggtgttcaaggatgacaatggccaagctcctgccttactccgcattttcttccatgattgttttgttcagggatgtgatggatcattgctgctagatgggagtccaagtgaaagagaccaaccagccaacggaggcatcagaactgagg

SEQ ID NO: 187358 - DNA, 288 bp, Glycine max
tttcaatcctcagtttctttcttcaacgtttccatcatacacagatccaaatcctctctcaagccctaatttcccctcatttccatggccacagaagagagcactgtcgcggtggaacccgctcccgaacctgcctccgccgatcctcccccggaggagaaggaggagaccaaacctgaagccaaggctaagaaaaccaaggagcccaaacctaaaaaggtttccagacctcgcaaccctcccactcatccttcctacgaagagatggttaaagatgcaattacctcg

SEQ ID NO: 187359 - DNA, 279 bp, Glycine max
gttagactaagcaagaggtcgttcagtgtaagtactccttgttcttgtttctgtttcatcatttttgatcttatgctagtcgaatcaattgtgatgcttagaattagtcaatgaagctccctgtgcgttacttgattgttattttgaccttcgtctgcacctcggtttgctacatcgaacgagttgggttttccatcgcgtacacagttgctgctgacggtgccggagtgaatcaatcgagcaaaggtacaatactgtccaccttctattacggatacg

SEQ ID NO: 187360 - DNA, 283 bp, Glycine max
atgattccataattgaatcaattacatactggatccaagctaaaggaatgttatggtaaatattcgtttgaaacgatgtggtaaaaagcaacgtgcgacttgaaagacatgattagattagctgtggattcttacatccgccattttttctagtatatagaaatgaacatgctcttgactcgacatcgtttgttctgttccactagaacttattgttttggggacgggaaagcagttgatgatgtaagttgatgatgtaaatagtacatgatggagctcgagt

SEQ ID NO: 187361 - DNA, 286 bp, Glycine max
aatattttgaatggcttccacaagagacacggataaagctgaacatcagagaggctattggagatggagcaaacaagatctcttgcctgaggagtccttccaaagctggagcaactacgtttccgccctttctcaaacacggctaaggttcaaggaccgtctcttagcaagatcagatgatgccactgagacagaggaactcaagaaacaaagtgagcatgacatgaaacgttgcctcaactggtgggacctcatatggttcggttttggcgcagtgataggagca

SEQ ID NO: 187362 - DNA, 291 bp, Glycine max
gcttgacgttcggagagacgctgtgctcggtgtaaattccgctcataggaatagttgaagctttggttttcacattcgccagttgcttcgatttccaatctcccaagaagaataagaaacattcttctaccttcgatgacattctcaccctcgccgaggattctccatttagtgttaatgaaatcgaggcgttgcatgagttgttcaagaagttgagtagttctatcattgatgatggcctcatccacaaggaagagctcgcattggcactgttgaagaccaccactggcg

SEQ ID NO: 187363 - DNA, 280 bp, Glycine max
cttagccatatctttacttcccataacttgctctacaatgagtacccttcgttcttttgcaagaaacaaggatatatcaaaagtaggacgcagaggtatccattgcatgcagaaactatgtgcagaaaaaatatctcctgattcactagagaaggcccaaaatcgtgtgatagatgctgcactcacacttgttcgagaaaatacaaggcttaagaaagaacttgtgcatagtttgggaggtgctgtagcaacttcaactcttcttggagttcctttgggt

SEQ ID NO: 187364 - DNA, 283 bp, Glycine max
gatcctgtgaaaattgctgtggaaggggttgaacgattcaagcaagaaaactgtgatcttataattgttgacactagtgggcggcacaaacaggaagctgctctttttgaagaaatgcgccaagtttcagaagcaacgaaaccagatcttgtcatatttgttatggatagcagtatcggtcaggctgcttttgatcaggctcaagcatttaaacagagtgttgcagttggagctgtcattgtcactaaaatggatggccacgcaaagggtggtggtgctctta

SEQ ID NO: 187365 - DNA, 281 bp, Glycine max
ggaggtccccatatccctcttaagactggaagaagggatggtagaaggagcagagctgatgtggttgagcagttcctcccagaccacaatgagtccatttctgcagttcttgacaagtttggtgccatgggaattgacacccctggcgtcgttgcactgcttggagcacacagtgttggtcgaacccattgtgtgaagttggtgcaccgtttgtacccagagattgatccagctctgaaccctgaccacgtccctcacattctgaagaagtgccctgatgc

SEQ ID NO: 187366 - DNA, 286 bp, Glycine max
  unsure (1)..(286): unsure at all n locations
cttttctatttaattcctaaaatcccattcttcttcgctcattactctgcactgccatcatcctccaactgtcctacacaagcgtctcgacttttcnanagagtngngccaccatgtcggacgatgaaagggaggagaaagagttggatctctcttctgccgaagttgtcaccaaatacaaaaccgttggctgagatcgttaacaaggcctcgaagctagttatttcagaatgtaaaccaaaggcgnagattgtggatatttgtgagaaaggggattcatacatta

SEQ ID NO: 187367 - DNA, 278 bp, Glycine max
catgattgataggtccaccaaccttgactggtacaagggaccaactctccttgaggctcttgaccaaatcaatgagcccaagaggccctccgacaagcctctaaggcttccattgcaggatgtctacaagattggtggtattggtactgtgccagtgggacgtgtagagactggggttgtgaagcctggtatggtggtgacttttggtcccactgggctgacaactgaggttaagtctgttgagatgcaccatgaggctctcacagaggctcttccag

SEQ ID NO: 187368 - DNA, 287 bp, Glycine max
ctttgttgctgcagtagttttggtagcatggccatgccatggcgcaggctaccaaaggttccctctccgaatgataactggctatggtgagcgttcttcggaggtaaaatgcgcaagttttaggcttgatcgtggaagcacacaacatccgagcatttaaaaccattcctgaaagagtgcgttgaaccaacaaaggactacattaatggcgaacaatttagatcagactctaaaacagttaaccaacaagctttcttttatgctagtgaacgcgaagtccatcacaa

SEQ ID NO: 187369 - DNA, 281 bp, Glycine max
  unsure (1)..(281): unsure at all n locations
cgagccnattcggctcgaggagaattagcagtcttgggggataaaatagaaaagttgtctggtatgctagaaggctttatatggtctcccaggagtagtgaagccaatgaccgtgtcaatgattgggcttttgaggaggggccccattctgctactactggaccaaactctggaagcacagcttgtgtggctgtcatccgaggaaacaaacttgttgttgctaatgctggagattctagatgtgtcttatcaaggaaaggccaggcacacaatttgtccaa

SEQ ID NO: 187370 - DNA, 286 bp, Glycine max
aagtaatgtgctaatctttgaagattacaaggccaagatagccgactttaacctttctaatcaggcccctgacatggctgcacgccttcattcaactcgtgtattgggaacttttgggtatcatgctccagaatatgcaatgactgggcagttgactcaaaaaagtgatgtctatagttttggtgtggttcttcttgagcttcttactggcagaaaacctgttgaccataccatgcctagaggacagcagagtcttgtcacatgggctactccaagattaagtgaa

SEQ ID NO: 187371 - DNA, 283 bp, Glycine max
tttctatctcattttcgttcggttcaaacactctcatggcatcagacaagaagattaggatcggcatcaacggatttggaaggattggccgtttggtggccagggttgctcttcagaggaatgacgttgaacttgttgctgtcaacgatcctttcatcaccactgattacatgacatacatgttcaagtacgacaccgttcatgggcagtggaagcattttgatgtgaagctgaaggactctaagacccttctcttcggtgagaagcccgtcaccgtttttgg

SEQ ID NO: 187372 - DNA, 281 bp, Glycine max
agaacagaaaacttccattaccaccatataactcccctgaacattaccatcataagaaggagtcagaccttgtcgttccaaccgataaactaagtttcctgaatagagcctgtgttatcaaagatcgggaacaagaaatagcctcggatggttcagcatcaaatccatggaaactctgcacagtagatcaagtagaggaactaaaagccattattaaagtgattcccttgtggtctacagggatcatgatgtcagttaacattggaggctcatttggattg

SEQ ID NO: 187373 - DNA, 278 bp, Glycine max
ggaaagtgaagttgagagtttaagaagaacaagaaatgggggttggttcccaggatgccatcaagcagttccaggcattcattgaccaagttgaggagcctttgcgaacaacgtttcagaatgttcatcaaggatttgtcactgcaactttaatgcggtttctaaaagcaagggactgggatccttacaaggcacagaaaatgttggttgattgtttaaattggagggtgcaaaatgagattgacaatatattatctaaaccaattgttcctgctgat

SEQ ID NO: 187374 - DNA, 276 bp, Glycine max
atcccatactatgaaaaacatggatatggggtggaggaatttaatgaaaccttatatgatgaatgggttaacaagggcgacgcaccggcattgccagagactcttaaaaattacaacaagctgttgtctcttggcttcaagattgtattcttgtcaggaagatatcttgacaaaatggccgtaacagaagcaaacctaaagaaggctggcttccacacatgggagcagttaattctcaaggatccacatcttatcactccaaatgcactttcatac

SEQ ID NO: 187375 - DNA, 274 bp, Glycine max
ctgtgtttgtatttgtattttctctcacctgaaaatgtcttgctccggtggtaactgtggttgcggaagctcctgcaagtgcggcaacggctgctaaggctgcaagatgtacccagacttgagctacactgagtcaaccaccaccgagaccttggtcatgggagtggcacctgttaaggctcaatttgagggtgctgaaatgggtgtgcccgctgagaacgatggctgcaaatgtggaccaaactgctcctgcaacccctgcacttgcaagtga

SEQ ID NO: 187376 - DNA, 278 bp, Glycine max
gaaggtccttgttttcttcgttgctataatttagtagcatggcaatgccatgcgtacgatatgttccctctccgaatgaacactggctatggtgcccgtactccggaggtgaaatgagcaagttggaggcttgctgtggaagcacacaacatctttggctttgagaccattcctgaagagtgcgttgaagcaacaaaggaatacatccatggcgaacaatatagatcagactccaaaacagttaaccaacaagcttacttttatgccagagacctcga

SEQ ID NO: 187377 - DNA, 278 bp, Glycine max
gcctccttctggtctccctggtgttggtctcctacgctgcccggtcggaatcagcgctgggcggctggagccccatcaaggacgtaaacgacagccacgtggcggagatcgccaactacgcgctgagcgagtacgacaagcgttctggggccaagatcacccatgtcaaggtcgtcaagggcgagactcaggtcgtttccggcaccaactaccgtctcgtcctcaaagccaaggatggatccgccacggccagttacgaagccatcgtctgggagaag

SEQ ID NO: 187378 - DNA, 276 bp, Glycine max
ctcgagccgatggcagtgaaagtatacggtccccactgtgcttccaccaagcgggtgctgatttgtcaggttgagaaggaagtcgaatttgaggttgtccctgttgatgtcactaagggggagcagaaggatcctgagtacctcaaactacagccatttggagttgttcctgtcatcaaagatggagattataccttatatgaatctcgtgctataatgaggtattatgcagaaaaatacagatctcaaggggttgagttgctgggaaaaacaata

SEQ ID NO: 187379 - DNA, 274 bp, Glycine max
aattttctagggttttattcattttccgatggcttctgcagatgttgagtaccgttgctttgtcggtgggctcgcttgggccactgacgaccatgccctcgagagagccttctctcagtacggcgaaatcgttgaaacgaagattatcaacgatcgtgagactggcagatccaggggttttggatttgtgaccttcgcctcggagcagtccatgaaagatgcgatcggagcgatgaatggacagaacttggacggccgtaacatcactgtcaat

SEQ ID NO: 187380 - DNA, 227 bp, Glycine max
gaaacaatagagagggtagcaagtgatgatgaaccatttgctggactggcttttaagatcatgagtgatccatttgtaggctcccttacgtttgtcagggtgtatgctgggaagctaagtgctgggtcttacgtactcaatgcaaatgataaaaaaaaaaaaaaaaaaaaaaaaaagaaaaaaaaaaaaaaaaaagggggcgccccccaattgtgtttttccccccc

SEQ ID NO: 187381 - DNA, 272 bp, Glycine max
ctccgatctgcgactttctatttctccctcaacacaacacgagacaacatgttcctctttgactggttctatggcattctcgcttccctcggtctctggcagaaagaagccaaaattctcttccttggtctcgataatgccggcaaaaccaccctccttcacatgctcaaagacgagagattagttcagcaccagccgacccagcaccccacttcggaggaattgagcattgggaagatcaagtttaaggctttcgatttggggggccatca

SEQ ID NO: 187382 - DNA, 275 bp, Glycine max
tggggatcgatctcaaggccggaggtaagagcaaaaagaccaaaagaacagcacccaagtccaatgatatctatctcaagctcttggtcaagctttatcgcttccttgttcggagaactggcagcaacttcaatgctgttatacttaagagattgttcatgagcaaggttatcaaacccccattgtctttgtcaaggttgattaagtatacgaaggggaaggaagataagattgcagtggtggtggggtctataaccgatgatattcgtgtttat

SEQ ID NO: 187383 - DNA, 241 bp, Glycine max
agccactagatgtttccatttgcctgcatatctttggtattgtggggtgtggttcatttagtggtgtcaagtcgtgcgaatatgagggtgcatgattagtaatcgggatgtttttgttgcactgctccatgcttgcgcatgcaacgtgtgacatgcatccttgtaagtgtcaccttaaccttcggggcttatgtgctgactatggggtcctgtgttgcctacctaccaaacggtattcgtg

SEQ ID NO: 187384 - DNA, 276 bp, Glycine max
  unsure (1)..(276): unsure at all n locations
ggagaactttccagttgttgacatgggtcnacttgataatgaagagagatcagcaaccatggagataatcaaagatgcctgtgagaactggggtttctttgagttggtgaaccatgggatatccatagagttgatgatggacaccgtggagaggatgacaaaagagcactacaaaaagtgtatggagcaaaggttccaagaaatggtagcaagcaaaggcttggagtctgctcaatctgaaatcaatgatttggactgggaaagcactttcttttt

SEQ ID NO: 187385 - DNA, 283 bp, Glycine max
ctttggagtccatttcttcacttatagtgaacttgaagaggccaacaacttctttgatcctgccagagaactaggagatggaggatttggaactgtgtattttggcaaacttcacgatggacgtgtagttgcagtgaagagaatgtacgagaacagttatagaagagtggagcaattcgtgaatgaagtagagatcctaacaggcctacaccaccaaaacctcgtttcactgtacggatgcacatctcgacacagcagagaacttctgctcgtatacgaatac

SEQ ID NO: 187386 - DNA, 275 bp, Glycine max
gtctgaacccctaagcttctctgctccttcctgattcgctttcgctgcagttaaacacttgaactggctcaacgattcatcatcttcacggagagattcaagttctacactacacatacataagatggtggtcacatcctctgcgcgcgattacatcaatcgcatcttgcaggacatctccggcatgaaggttctcatcctcgattctcaaacgtgattgtgagtgtcgtgtattcacagtcggagcttcttcagaaagaagtgtttttggtaga

SEQ ID NO: 187387 - DNA, 269 bp, Glycine max
cggccgaatcgaccgattcggctcgaggctccctgagagagctcgtcgcggcggttgcagacccagactgcaagatgaagttcaacatcgcgaatcccaccactggatgccagaagaagctcgagatcgacgacgatctgaaactgcgagcattttgggacaagaggatctcacaggaggtcatcggagatgcactcggtgaggaatttaagggctatgtcttcaaaattaccggaggttgtgacaaacaaggatttccaatgaagcag

SEQ ID NO: 187388 - DNA, 249 bp, Glycine max
atacggtacgatggtagtgaggagccagaatccctcttcctgctttatgatataataaaaataaaatagcgattccggaaatcatgtctgtagctgctctttttatttatgtgataaatgtaaaacgctttggtttggcttggccgttgtgcattaggttgaaaaaataaatgttataattactcagaaaaaaaaaaaaaaaaaaaaaaaagaagaaaaaaaaaatgaaagtaaaaaaaaaaagaagag

SEQ ID NO: 187389 - DNA, 271 bp, Glycine max
cagcacttatcgttctcatgcaacaagggaaaatgaggcctattttctgtggaaattttgaatatgatgcccggcagtcagagctggagcggctttttagacgatatgggaaggttgatagggtggatatgaagtctggatttgcttttatctatatggaagacgagagagatgctgaggctgcaattcgtgctcttgatcgagtagaatttggtcggaagggacgcagactccgtgtggaatggacaaagcatgaacgtggtgttagaag

SEQ ID NO: 187390 - DNA, 269 bp, Glycine max
ggaattttcttgaagaggaataaacgtagatatgctggtaatgatgaattttcaagccaggctatggaaggactacaaattattaatggtctggagtgtaagatagcttgcagttcatctaaggtctcatatgttttagataccgaagactttttgtttcggataagaaggaaaaaaagagttttgcatccaaagagttcaggcgcccatgaacaggcacagtctccaaagagttcaagcagagtacaacgattccgcaatttgttttc

SEQ ID NO: 187391 - DNA, 270 bp, Glycine max
gtttaaagtgagagaaaaagaaagaagaaaatggcaaactttccagttgttgacatggggaaacttaacaccgaagatgagagcagcagccatggagattataaaagatgcctgtgagaactggggtttctttgagttggtgaaccatgggatatccattgagttgatggacactgtggagaggctcacaaaagagcactacaagaagactatggagcaaaggttcaaagaaatggtggccagcaaagggcttgagtcagttcaatcaga

SEQ ID NO: 187392 - DNA, 269 bp, Glycine max
attaaattaacaacacagataacataattccttcaaactgatcactcgtttcataaaaggatctctaactagataaaataagaggcaaacaaagaaacccatagtagaatgggtaacccttattctcaaacacaaagtggttaattaacaacacgagtagaaagatgatagatctatcatcttctatcaaagcactcttaattaattttttaaaattaacaatgtttggtgcagaagcatctgcgacggaagccacggcagtgtcctcc

SEQ ID NO: 187393 - DNA, 272 bp, Glycine max
gttgaacacaggggccaagattccttctcttgggttagggacttggcaagctgaacctggtgttgtagctgaagctctcaccacagccattcaggttggatacaggcatattgactgtgctagtgcgtataagaatcaagcagagattggttctgctcttaagaagctttttgatgatggtgtggtgaagcgtgaggacttatggatcacttccaaactctggtgttcagatcatgcaccagaagatgtgccaaaagcattggataaaacat

SEQ ID NO: 187394 - DNA, 276 bp, Glycine max
ctctctttgacggtggtgctgtcagcattgacctcagcttgagcagtaaaacatcatcagcactactacggtaccatggctgtgctgcaatctttcgtttcggtccacccagattctcacttccccatacagaacctcccttacggagtcttcaagccccaatccgcttcgcctcctcgtcccggcgtcgccatcggcgacttcgtcctcgacctctccgaaatatcttccgctggtctcttcgacggtcctctcctcaaaaactccgatgctttt

SEQ ID NO: 187395 - DNA, 269 bp, Glycine max
catgattgagaggtccaccaaccttgactggtacaagggaccaactctccttgaggctcttgaccaaatcaatgagcccaagaggccctccgacaagcctctaaggcttccattgcaggatgtctacaagattggtggtattggtactgtgccagtgggacgtgtagagactggggttgtgaagcctggtatggtggtgacttttggtcccactgggctgacaactgaggttaagtctgttgagatgcaccatgaggctctcacagagg

SEQ ID NO: 187396 - DNA, 266 bp, Glycine max
gttgttgacatgggaaacctgaataatgaagagagatcagcaaccatggagataatcaaagatgcctgtgagaactggggtttctttgagttggtgaaccatgggatatccatagagttgatgatggacaccgtggagaggatgacaaaagagcactacaaaaagtgtatggagcaaaggttccaagaaatggtagcaagcaaaggcttggagtctgctcaatctgaaatcaatgatttggactgggaaagcactttctttttgcg

SEQ ID NO: 187397 - DNA, 269 bp, Glycine max
gaaaaactctgtaaacatgttggtttaccaggacctccttacaggtgatgagcttctctctgactccttccgttacaaggaaattgagaatggaatgctgtgggaagttgaggggaagtgggttgttaaaggagcagttgatgtagacattggtgcaaacccttctgctgagggtggaggagaagatgagggagttgatgatgcagctgttaaggttgttgacattgttgacacattcagacttcaggagcaacccgcattcgataaga

SEQ ID NO: 187398 - DNA, 272 bp, Glycine max
  unsure (1)..(272): unsure at all n locations
atcatccccaacttcctcacaaggttacatgggctanagagttgtgccaccatgtcggacgatgaaagggaggagaaatagttggatctctcttctgccgaagttgtcaccaaatacaaaaccgctgctgagatcgttaacaaggccttgaagctagttatttcagaatgtaaaccaaaggcgaagattgtggatatttgtgagaaaggggattcatacattagagagcaaactggaaatgtgtacaagaatgtgaagaggaagattgagag

SEQ ID NO: 187399 - DNA, 268 bp, Glycine max
actcccttctcatcgttggcaagatgagtgccatgaaattttgccgtgaatgcaataacattctgtaccctaaggaagacagagaccagaaagttcttctcttcgcttgccgaaactgcgacaatcaggaggttcctgataacttctgtgtgtatgggaatgagatacatcactctgttggagagagcactcaggtgttgcaggatgtcgctgcagatccaacgcttcctcgaaccaagtctgttcgctgcagtcaatgcaatcatgg

SEQ ID NO: 187400 - DNA, 265 bp, Glycine max
ggaggctattgggcctatggccaattgattcctgcaaatggaggaatgctcactgccctataccaattccactctcgcgatgtgtcaagattcgtgctagggttaacaagtttttttgtagtggtgaatggtttgtgctcgtttcaaatctatggcatgccagcattcgatgacatggaatcagggtacactacaaggatgaagaagccatgcccgtggtggctgcgtgcatttattagggtgttctttgggttcttgtgcttct

SEQ ID NO: 187401 - DNA, 270 bp, Glycine max
gacctctatggtaacattgttctttcaggaggaacaaccatgttccctggtattgctgacataatgagcaaggaaatttcggcattggcacccagcagcatgaagatcaaggttgtagcaccaacggagagaaaatacagtgtctggatcggtggttctatcttggcatctcttagcaccttccagcagatgtggattgcaaaggcagaatatgacgagtctggtccatcaattgtgcacagaaagtgcttctaaaactgtttgagagat

SEQ ID NO: 187402 - DNA, 238 bp, Glycine max
cggcaacgttgtgctgtccgccttgaccgagccagagcttcgtcttggccctcgattttgccctgtaaaactaatcccagtcacaacagaaataatcaatggcaccgaaacagaccaaggctacgaagaagatcgcttacgatgcgaactgtgcgacctaatggaggagtacggccaaatcctcgttgtaaactccgacaacgtgggatcgaaccagctccagaacattcgcaagggt

SEQ ID NO: 187403 - DNA, 260 bp, Glycine max
ctcgctcgaactcgagccgaatcggctcgagctcgaccgcacccccatcactctctccttcaccacaatgaccacaaaaacatctctctcatctctgaacaagtctcactcattctcagagagatcgatttgtcccagaagaaactggcccagatggagaaagagcttctaggatatgaaagcattgatctttcgagacccaacattgcatccgagctcaaactcttcctccagcgccaccagctccctctggggaaaga

SEQ ID NO: 187404 - DNA, 252 bp, Glycine max
  unsure (1)..(252): unsure at all n locations
caaacaccaaacaccaaactagttgggctcaattctctttgaatggctttggaggcttgaaattcaccaacagcagccaccactccgttccgtggctaccnnnnnnnnnnnnnnnnnnnnnnnnctgaccttcacttacgtgagccttgggctaaaaggaaacgctccaaacgaccgcgttttgagacggaggaagagtacctcgctctttgcctcatcatgctcgcacaaagcggtaacaccagaaacatc

SEQ ID NO: 187405 - DNA, 255 bp, Glycine max
gaagaaggaagtggaagtgacggaagagaagaaggaaattgaagtaacagaagagaagaaggaagcagaagtcatagaagagaagaaggaagtgcgaagtgacggaagagaagaaggaaattgaagtaacagaagagaagaaggaagcagaagtgaaagaagagaagaaggaaggggaagtgacggaagagaagaaggaagttgaagtgacggaagagaagaaggaagcggaagtgatagtagaagagaagaagg

SEQ ID NO: 187406 - DNA, 249 bp, Glycine max
gtttcgccggcgccggagacgcggcggagaaaaacccgttcaccccaaaagccttcgcgattcggtattgggacaaagagatccgcagcgggttaccgaagccaccgtttcttgtatcaaaggcgtcgccgctgagcgcggcggaggcggcggcgttcttaaagctcgtctccgggaactcgctctccacgcggctgccggaattctgcgccgccgcgaagctcctctgcttcccggaggtggggcccc

SEQ ID NO: 187407 - DNA, 248 bp, Glycine max
ggaagctactagaacactagtttgttgagcactgcgatgaggaagtggacggttgcttccgctctccttcttctctctctcctctttctctttgcagatcaaggtcgaaagtttcaggcgaatgccgagggagattccgacgagcttgtagatcctccgaaggtggaggacaagatcggtgctgtgcctcatggcctttccaccgattcagatgtcgtcaagagggagtcggagtcgatctcgaagag

SEQ ID NO: 187408 - DNA, 248 bp, Glycine max
gaccaatggcaatggagttgataatgatgccaagcaagggaatcagaatcaccagcgaaactattcacattcggggataaacatgaaaggaagggatcatgaggatcctgagactaaggctaacatgaaggaaatggcagcgagagctctctggcatttagccaaaggtaactcgccaatttgtcgtagcattactgaatcaagagccctgttgtgtttttctgttcttcttgaaaaaggaacagagg

SEQ ID NO: 187409 - DNA, 247 bp, Glycine max
actcgagccgaatcggctcgaggattattattaggttatgtaaattcagctgtcaagttcagtactgctgagaatatatacaggtgaatatcctttaacttattaaaaaaaaaaaaaaaaaaaaaaaaaaaaaaaaaaaaaaaaaaaaaaaaaaaaaaaaaaaaaaaaaaaaaaaaaaaagagggggggggcggaagaatggggggtgctcccggggggttatttgcgggggggggggagggggggg

SEQ ID NO: 187410 - DNA, 246 bp, Glycine max
atttctaggctttcatctcagacagtgaaaaaatgatagatataagtacacttaatgctgcacagattactgtgctgggatctgccttttgtgctatgctttccatgcatttcacgtcgcagttactgtctcagcatctcttttattggaagaatccgaaagagcaaaaggctattatcattatcatcctcatggctccaatctatgcagctgtctcctttgtgggtctcttggatatcagaggaa

SEQ ID NO: 187411 - DNA, 232 bp, Glycine max
attcggctttgagtctagcctctttgtttatgcctacaagatcatcatcaaaacctgtggtactactaagctattgcttgcaatcccacccatattgaagttcgctgaaatgctttcccttaatgttaagtctgtgaattacaccaagggaagtttcattttccccagtgctcagccatatccccatcgaaacttttctgaggaagttgctattcttgatggctactttggc

SEQ ID NO: 187412 - DNA, 250 bp, Glycine max
atgagagagtgcatttcaatccacatcggccaggccgggattcaggttggaaacgcctgctgggagctttactgcctcgaacacggcattcagcctgatgggcagatgccaagtgacaagaccgttggtggaggtgatgatgctttcaacaccttcttcagtgaaactggggcaggaaagcacgtgccccgcgcgatttttgtagatcttgagcccactgtgattgatgaggttaggactgggacatacc

SEQ ID NO: 187413 - DNA, 252 bp, Glycine max
gtccctccttcctctgccttataactcttgtggcccttttagctggtagcattgaaagtgcaccagcaagcgtgaagccaagccattatgctgcaccattcaataggagtgtttttccttctggttttctatttggaataggctctgcagcttaccagatagaaggagcagcagcaatagacggcagaggaccaagtatatgagacacctacactaaacaacaaccagggaagatttgggatcatagtgatg

SEQ ID NO: 187414 - DNA, 250 bp, Glycine max
atctgctcagcatgcttataaacaatttcgagacaaggcagcttcatccagatcaatgactgtagaaaagatggaggagtttgcacagggaagggtttggactggtaaggatgcagctttgcgtggtttagttgatgctattggtggcctttctcgagctattgccatagcaaaaatgaaggctgatatacctcaagacagacaggttacacttgtggagatctctagagccagcccttctctacccgag

SEQ ID NO: 187415 - DNA, 250 bp, Glycine max
aagatcttgaaggtcatccgtaagaacttggtcaagaagtgccttgagctcttctttgaaattgcagagaacaaggaggattacaacaagttctatgaggctttctctaagaacttaaagcttggtatccatgaggattcccagaacaagggaaagattgctgaattgctcaggtaccactccaccaagagtggtgatgagctgacaagcctcaaggattatgtgaccaggatgaaggaaggtcagagtg

SEQ ID NO: 187416 - DNA, 249 bp, Glycine max
gtgggattggaccttcaggagttggatcaagttcttcctatgccccaaaggagctaaataaggaagtgatgcctgaaaagaatgtaaaaacctttaaggatgtgaaaggttgtgatgatgcaaagcaagaacttgaggaagttgtggagtacctaaaaaatccatctaagtttacacgccttggaggaaagttgccaaaggggattcttttgacaggagcacctggaactggaaaaactctgctagcca

SEQ ID NO: 187417 - DNA, 249 bp, Glycine max
cgaggatcaaacctcaggctctgctacagcaaagcaaaaggaagaagggtccttctcggataagtgccgtgactgttatattttactttttgattcttgccttggttgggtttttcctgtttgcttcgtacagacattggtccagcagatcaagattacaatccgaagatcacttgtcagtctctgagggtgaaaatacttttgtggactccaagaaatctgagctgcctggatatgctgttttaaata

SEQ ID NO: 187418 - DNA, 246 bp, Glycine max
ccgaggccttcactgggcccatgccggacccaccgggcctcaaactcaagaaggaaggactcaaggtgaagcaccctgtggtttttgtgcccgggattgtcactggggggcttgaactgtgggagggtcacctgtgtgctgaggggttgttcaggaaacgcttatggggtggtaccttcggagaagtttataaaagaccttcatgctgggtggatcacatgtcactggacaatgaaacaggattgg

SEQ ID NO: 187419 - DNA, 249 bp, Glycine max
cagagagagacgcagccatggggcgaagacccgcgaggtgttataggcaaattaagaacaaaccataccccaagtcacggttttgccgtggtgttcctgatcccaagatcaggatttacgatgttggtatgaagaagaagggtgttgatgaatttcctttctgtgtccatctggttagttgggagaaggaaaacgtttctagtgaggccctggaagctgctcgtattgcttgcaacaagtacatggcca

SEQ ID NO: 187420 - DNA, 249 bp, Glycine max
gttgactatgaagaagggtgagatagcattgttgattataggacctgaatatgcttttggttcatcagagtctcagctggaacttgcagtggttccacctaactccacagtatattacgaggttgagctagtatcatttgagaaggagaaggaatcctgggacatggacacgccagagaagattgaagctgctggtaagaagaaagaagaaggaaatgcattatttaaagctggtaaatatgcaagagc

SEQ ID NO: 187421 - DNA, 248 bp, Glycine max
ggactaccttggacaactacaccatcagaatctggtaaaattgattggatactgtgcagatggagagaaccggttgttggtatacgagtttatgtccaaagggagcttagagaatcatctgtttagaagaggaccacaacctctttcttggtcagtgaggatgaaagtggccattggtgctgctagaggactttcttttcttcataatgccaaatcacaagtcatataccgtgattttaaagcatcca

SEQ ID NO: 187422 - DNA, 249 bp, Glycine max
aataatgtgaagcagtggctcagtgaaattgatcgctatgcaagtgataatgttaacaagctttaggttggaaacaagtgtgatctggaagcaaatagagctgtgtcatatgaaacagctaaagcattcgcagatgaaataggcataccttttatggaaacaagtgcaaaagatgctacaaatgttgaacaggctttcatggcaatggctgcttcaatcaaggatagaatggcaagccaacctgcaaac

SEQ ID NO: 187423 - DNA, 252 bp, Glycine max
ggccactagtgctgcaacttcacaagacggaagatgggacacaggagtatgctgagtttcttcacataccaagaaggagattcaccgactttgctgctgtgaggaaggaaatatcggatgaaacagatcgtataactgggaagacaaagcaaatttctaatattccaattcacctcagcatttattctccaaatgttgtgaacttaaccctcatagatcttcctgggttaacaaaggttgcagtagagggac

SEQ ID NO: 187424 - DNA, 248 bp, Glycine max
ctcaaagattaagccatgcatgtgtaagtatgaactaattcagactgtgaaactgcgaatggctcattaaatcagttatagtttgtttgatggtatctactactcggataaccgtagtaattctagagctaatacgtgcaacaaaccccgacttctggaagggatgcatttattagataaaaggtcaacacaggctctgcctgttgctttgatgattcatgataactcgtcggatcgcacggcctttg

SEQ ID NO: 187425 - DNA, 246 bp, Glycine max
attcatacgtggtgttgttactgctgctcttttctcttttcttttctctttagttctctcttcccctttctttttctttttcttcttcttctgagcttgtttaagcttttcttccattaacatattatcacaatgtgtggtattcttgctgttcttggttgttctgatgactctcgagccaaaaagggtccgcgtgcttgagctctctcgcagattgaagcaccgtggccctgactggagtgggct

SEQ ID NO: 187426 - DNA, 248 bp, Glycine max
agcaggaatcagtggccttggtgcctgcaaataccttctagagtttggatttaacccaattgtctttgaagttgatgatggtgttggaggactatggagacataccatggactccaccaagctccaaaacaataaacaaatgttccagtttatggattttccatggccttcttctgtgaaagaagataatccaagtcacaagcaagtgctagattatgttaactcctatgctgaacatttttccctca

SEQ ID NO: 187427 - DNA, 245 bp, Glycine max
actgtttctctattcaagtacttccaatttcaataatgcagatcagcagaggagttctctggtctttgttccttggtttcttcactctccgagagcattttgtgcactactgggttgaaaatgtatttggtggagagcaaaggaggtgccataacatgcatgttcttggctcttttcttcttggggacatggcctgctcttttgactatgttagaaaggcgtggtcgtcttcctcagcataccta

SEQ ID NO: 187428 - DNA, 250 bp, Glycine max
ggattcttacaaagaccttggtgcaaacaacttaattccaatggaaattgcattaaaaatagccaataaaatcaaacaacatgagagattttctgtgtatattgtcattcctatgtggcctgaaggtgtacctacaagtacagctactcagaggattctcttttggcagttcaaaacaatgcaaatgatgtatgaaacaatttacaaggccctacaggaggctgggcttgacaataagtatgaaccacag

SEQ ID NO: 187429 - DNA, 250 bp, Glycine max
ctcgagccgttatggctcaagggtggcttctgtaaggcgaccatcttacagggattatcctgcccgtggtcctggctacaccgagctccctagaagcacatctcgtgctgcaccaaggagaggctatgtggatgatgggtatggccaaagatttgaaagggctcctcctccacctcctccaccccatctaagttaccgtgaaggacgtcctcgagattatgatgctctgtctggctcaaaacgtccttat

SEQ ID NO: 187430 - DNA, 246 bp, Glycine max
  unsure (1)..(246): unsure at all n locations
cggctcgagcggctcgagctcgagccgaatcggctcgagggttagagtttgttcttgtgatcgaagctaagcgaccanaatgggtggctcagtgagggacgtgaagtcgaagggcgaggtcgacgaggtggtggcgagtggctctccggttatcctccacttctgggcgtcctggtgcgaagttccaagcacatggaccaactcttctctcacctttccactgatttccccaacgcccgcttctta

SEQ ID NO: 187431 - DNA, 248 bp, Glycine max
ggtggggtgacaacgcagagcgtgttcttgagtcaattcaacttctcttggatcttcttgaggcccctgacccttggcacccttgagactttccttggaagaattcctatggtcttcaatgttgtcattctttctccccatggttactttgcccaagataatgtcttgggataccctgacactggtggccaggttgtttacatcttggatcaagttcgtgctttggagaacgagatgctccatcgcat

SEQ ID NO: 187432 - DNA, 247 bp, Glycine max
gctcctaccagctaatcctgatattttagagggtgttgaagatcttatacagctcagttatttaaatgagccctcagttcttcacaatcttcagtctagatactctcaggatatgatttacagtaaatcagggccaattttaattgcactcaatccgttcaaagatgttcagatttatggagacgattatatttcagcttataggcagaaacttatggataagcctcatgtttatgctatggcagat

SEQ ID NO: 187433 - DNA, 222 bp, Glycine max
  unsure (1)..(222): unsure at all n locations
cttattcccacagagactgagaggaccgaatcaccatgctatcaggaccatccantagcaccatcaaacagattgggcatcactatctacttgttcatcttcctcatcagacattgtcgctcccgtaccttccccgggtgaaactcctgttaaactttgtaaggattgctcaatctcccaacaagccatgatgcttccattggcatggaccggacntgctgt

SEQ ID NO: 187434 - DNA, 248 bp, Glycine max
attctctcgcatctcaatacccttttgatttgtgaaaggaaagcaaacatgcttgatcaggtccaacaccctacaatcatggacaaggttgctggccagctccatctccgttctggtgtccctggtattaggagttatgaaggagcctactgccaccccacaatgtaccaaagaccctcttttgggaattactcgaatgctgcattgcagtatcctgtgatgccctcatgcaaagctactatggattt

SEQ ID NO: 187435 - DNA, 247 bp, Glycine max
taagtccctccttcctctgccttataattcttgtgaccctttttgctggtagcattgaaagtgcaccagcaaacgtgaagccaagccattatgctgcacccttcaataggagtgtttttccttctggttttctatttggaataggctctgcagcttaccagatagaaggagcagcagctatagatggcagaggaccaagtatatgggacacctatactaaacagcaaccagggaagatttgggatca

SEQ ID NO: 187436 - DNA, 247 bp, Glycine max
gggttactgtctgttcaagctaccatctctctctctctttcttagtgcctccttgccagaagttaaaatggcccaagaaactttcctattcacatctgaatcagtgaacgaggggcaccctgacaagctctgtgaccagatctccgatgctgtgctcgatgcatgcttggagcaggaccctgacagcaaggttgcctgtgaaacctgcaccaagaccaacatggtgatggttttcggagagatcaca

SEQ ID NO: 187437 - DNA, 246 bp, Glycine max
atcatgagcttcattctgtttccgattctctttgcatttacctttctgtcctcgcccgttctctctgcttcggatctggtcctcgccaaggttgaccgtcgcattgatctgacttcacagattgtgcgcatcactacttcactaaaggtgcagaatacgggatctgatgttgtgtctgagattttgctgtcctttcctgagaaccaggcaagtaacttggcatacttgaaggcaacacttggtgat

SEQ ID NO: 187438 - DNA, 244 bp, Glycine max
gcagattttcacatcccaaacaacatgaagggtaggttcatgtttctgtcggtgctcctttgtgccacttttcatgtctccttctctattatcgacggtttagttgccaacggcaactttgagttgggtccaaagccctccgccctaaaaggaacagtggtggtgggcgggagccactcgatcccagaatgggagatctccggctttgtggagtacataaaatccggccaaaagcaaggggaca

SEQ ID NO: 187439 - DNA, 245 bp, Glycine max
ctcgagccggcaatgttggcctttgttgggttctggttccaagctatttacactggggaaggacccattgaaaatttgatggcacaccttgctgatcctggtcactgcaacattttctcggctttcacgcgttagtgcaatgtatagtttgaagaaaagaagacggaagacgtgcgtccggaatgaacatagctttatgctgcaccagcaatatccgttatttactttatacatgtactttgctt

SEQ ID NO: 187440 - DNA, 245 bp, Glycine max
atgatgtagttgcaaatatactgtctaaaggtaccaaacttagggattatacaaaaggagttgagaacgatttgcgcaaagttgaattggattcaattcaggattatattaaagaaagtgataatctagtttctcttcacgatcaaattcatgattgtgatagtatcttgtcacagatggaaactcttctaagtggatttcaggctgaaattggttccattagttcagacataaagattctccaa

SEQ ID NO: 187441 - DNA, 245 bp, Glycine max
ctcgagccgctcgagccgattcggctcgagctttctattcacatctgaatctgtaaacgagggccaccccgacaagctgtgcgaccagatctctgatgcagtgctcgatgcgtgccttgaacaggaccctgacagcaaggttgcctgtgagacatgcaccaagaccaacatggtcatggtctttggagagatcacaaccaaggccaacgtagactatgagaagattgtccgtgacacatgccgcg

SEQ ID NO: 187442 - DNA, 247 bp, Glycine max
ataaacacaaaacccttcccatcctaattaaggtgaaaatgaaggcatcacccattgcttggttcactttggtggttgtgtttcttgtggctgaagttcaagtttcaatggcagtgacatgcagcccagtgcagctgagtgcatgtgtaagtgcaataacctcttcaacccctccatcaaacctatgctgctccaagatcaaagaacagaaaccatgcctctgccaatacctcaagaaccccaatct

SEQ ID NO: 187443 - DNA, 246 bp, Glycine max
gggccattcccttcaagtccaagtgattcaatcaaacggttcatgcttaatcaagttgggaacaacaacaacaacaaaaatcaagccaatgtttgtgggttttggtttcatttcattaagatgatctgtttatctcttttcttctttttaaaatttaaagtctttgtattttgtatgtaaagatgtaaaattatgattattaggtggtgcatgtgtcgcgtcatgggccaatgttatcctctgctt

SEQ ID NO: 187444 - DNA, 244 bp, Glycine max
cttgccgtttcatctcgccctaaactcgtcgccgttgaagtcatgtcttacaaccaagcctttgttggcttggcaccgtatggaccctattggcgcgagttacgtaaaattgtcacgttcgagtttctctccaatcgaagaatcgaacaacggaaccacattcgtgtctccgaagttcgaacttcgattaaagagctattcgacatttggtcgaatggaaataagaacgagtctaggtatactc

SEQ ID NO: 187445 - DNA, 245 bp, Glycine max
gaaggagaagtttgacaacctatgcaaggtgatcaaggatgttttgggtgacaaggttgagaaggttgtagtctctgaccgtgttgttgattcaccatgctgtctggtgactggagaatacggttggactgcaaacatggaaaggatcatgaaagctcaagccctaagggacaacagcatggcaggatacatgtcaagcaagaagacaatggagatcaaccctgagaacccaattatggaggagc

SEQ ID NO: 187446 - DNA, 248 bp, Glycine max
aatcaccaccttcaaagtcttctctctcgagaatcatcgaataaaactagggtttccgatcgtcgtcgaggagaatgccgaagaacaagggaaagggaggaaagaaccggaagcgcgggaagaacgaggcggacgacgagaagcgggagcttgtgttcaaggaggacggccaggagtacgcgcaggtgctccggatgctggggaacggccgctgcgaggcgatgtgcatcgacggcaccaagcgcctc

SEQ ID NO: 187447 - DNA, 275 bp, Glycine max
gttaaaatggcccaagaaactttcctattcacatctgaatcagtgaacgaggggcaccctgacaagctctgtgaccagatctccgatgctgtgctcgatgcatgcttggagcaggaccctgacagcaaggttgcctgtgaaacctgcaccaagaccaacatggtgatggttttcggagagatcacaaccaaggccaacgtggactatgagaagattgtgcgtgacacatgcaggaacattggttttgtctctgatgatgttggtcttgatgctga

SEQ ID NO: 187448 - DNA, 219 bp, Glycine max
atcaagatggtgaggttcacagctgaagagctacgtcgtattgtggactataagcataatatccgtaatatgtgtgtcattactcatgttgatcacggaaaatcaagccacactgattcgtcggtggctgctgctggtattattgctcaagaagttgccggtgatgtccgaatgactgatacgcgtgcagatgaagctgagcgtggtattaccatcagg

SEQ ID NO: 187449 - DNA, 268 bp, Glycine max
cttacatgttccaagatcaggaggtgcgcacagtgagctggaacgcactttcattgccattaagcctgatggagtgcagagagggctgatttctgagattatatcacgttttgagcggaaagggtacaagcttgtggggattaaagtagtgattccttcaaaggaatttgcccaaaagcactatcacgacctgaaagaaagacccttctacgatgggctgtgtgatttccttagctctggccctgttattgcaatggtgtgggaagga

SEQ ID NO: 187450 - DNA, 270 bp, Glycine max
ctcgagccgctcgagccgattcggctcgaggcgaaatgttgcaaggttcttaagtccacttccagcagtatcctttggtatctcttgttggttttgggctttatgagttaggctttcctggggttgctaaatgtgtagagattggactgccagagcttatattactagtatttatttcacagtttgtacctcatgtgctacatgcaggaaaacatgtcttcgatcggttcgctgttttatttacaattgcaattgtatggttatatgctt

SEQ ID NO: 187451 - DNA, 269 bp, Glycine max
ctcgagccgtccctttcttagattctccctctttactctctgccctccgccatgactgaggctaaggagatgtcttcctctgtcaccaatggcgatgattccctcactggtcacatcatatctacaactattggaggcaaaaatggggaacccaaacagactattagttacatggcagaacgggttgtaggaactggatcatttggaattgtttcccaggcaaaatgcttggaaactggggaagcagtggctattaaaaaggttttaca

SEQ ID NO: 187452 - DNA, 267 bp, Glycine max
gaaagatggaggggaaggagcaggatgtgtcgttgggagcgaacaagttccccgagagacagccaattgggacggcggcgcagagccaagacgacggcaaggactaccaggagccggcgccggcgccgctggttgacccgacggagtttacgtcatggtcgttttacagagcagggatagcagagtttgtggccacttttctgtttctctacatcactgtcttaaccgttatgggagtcgccggggctaagtctaagtgtagtaccg

SEQ ID NO: 187453 - DNA, 271 bp, Glycine max
tataaactgaactgaattgagtctcaacaacccagttgagtaactaagatcgcgcaagtgaggaacaagcaagtgcttctaaaggactatgttaccggttttcccaaagaatccgacatgcatattgtcgaaagtaccataacattgaagcttccacaaggttccaatgatcgtcttgctcaaaaatttgtatttgtcttgtgatccgtatatgaggaatctcatgaacaggcccgatagccctcccaatagtcgtgcttacactcctggc

SEQ ID NO: 187454 - DNA, 264 bp, Glycine max
  unsure (1)..(264): unsure at all n locations
ccgggcgctggtgctggaaggcagcaatcgacgaaagctgctaaggatcctaacaagccagagagccctccaagcgctttcttcgttttcatgtacggattttcgtttgcttttgataccgaatctgttttcgtatcgtttcgttttgatttntnttttgtgtactggcgattgcagcctntgtgattgtttctttaggtccgagttcagagagcagtttaagaaggagcatcgtaacgacaaatcggtcgctgtagtgagtga

SEQ ID NO: 187455 - DNA, 248 bp, Glycine max
cttctctctccacccaaaccctaactcccgaccctgttcccctctcgtatccgtcatgaaaggaggaaagtccaagaccgaatctaagagagccgatcccaaacttgctgtgaataagaagggagccgccaccaaggctaggaaacccgccggcaaggggaaggcagcgaaagaccctaacaagccaaagaggcctccaagtgctttcttcgttttcatggaggatttcaggaaggttttcaacaaag

SEQ ID NO: 187456 - DNA, 270 bp, Glycine max
gcctaccaaaattttctgttccaaaatcttttgagtatgcacagtccttaattccaactgctcttctcataactggtgtggctatattggaatcagtgggaattgcgaaggcattagcagcaaagaatgggtacgagttggattcaaatcaagagttgttcggtcttggtgtttccaatgttcttggttcatttttttcagcataccccacaacaggatccttttcaaggtcagctgtaaatcatgaaagtggtgcaaaatctggtgtat

SEQ ID NO: 187457 - DNA, 282 bp, Glycine max
gtgagctcggaattgtgctcgggcggctcgagctcgagcgctgttacatatatgtcacctgagagacttcgaaatgaaagctatactgatacagctgatatttggagccttggtcttgcactttttgagtgtgggacaggagaattcccgtatactgcaaatgaaggtcctgtcaatcttatgttgcagatcctggatgatccatcaccatcaccattgagaaacaagttttcacctgaattctgctctattgtgaatgcttgcttacaaaaggatcgagat

SEQ ID NO: 187458 - DNA, 272 bp, Glycine max
aagctgtgtgcgagtcaacgggcgagtaaacccgtatagcgcaagggagctgattggtgggatccccctagtgggttgcaccaccgaccgtccctgatcttctgtgaagggttcgagtgagagcatacctgtcgggacccgaaagatggtgaactatgcctcagcggggcgaaccagaggaaactctggtggaggcccacagcgatactgacgtgcaaatcgttcgtctgacttgggtataggggcgaaagactaatcgaaccgtctagtag

SEQ ID NO: 187459 - DNA, 259 bp, Glycine max
gaattatcaaaggtgaaacgaagaagccctaactacgcacgcattcgtgagacaactcaatattcgtcgctcatggcactctctactcgtctcttttccaaatccaaattgatctatggcagtcaaatacttctacaaaaggagcatgctattccagttcgtcactttgctaaagagtctgcccctcctgcccttaagggagacgagatgctgaagaacatttttgtggaggtgaagaacaaatttgagaccgccatag

SEQ ID NO: 187460 - DNA, 271 bp, Glycine max
  unsure (1)..(271): unsure at all n locations
gttcccatctttcagantcagaacttcagctttctccaaatgtggcatcagggcttccattgccgttgagcaacaaacttcccagactaaggttgctctcctcagaattggtaccagaggaaggtaccctacccttaanantaacacctttagcttcttatgagcatttcttttaaagaacaagtctgtgaaaatattgagtcctgaatctcttcaaaactttgccctcattttcaaatttngttttcaatgctagttttatgncngaant

SEQ ID NO: 187461 - DNA, 268 bp, Glycine max
gtttttgatgtatagagatggcagagacattcctatttacctcagagtcagtgaacgagggacaccctgacaagctctgtgaccaaatctctgatgctgtcctcgacgcttgcctcgaacaggacccagacagcaaggttgcgtgcgaaacatgcaccaaaaccaacttggtcatggtcttcggagaaatcacgaccaaggccaatgttgactacgagaagatagtgcgtgacacctgctagaacatcggctttgtctcaaacgatgt

SEQ ID NO: 187462 - DNA, 272 bp, Glycine max
aagctatccattgcacctttctctttctccgatggctaatcccacactcttgttctacagtctcctcctattatccgccaccgtagccgccgccgaacggatcgacgatgaagacgaccttctgatccgtcaagtggtgccggatgcggaggaccaccacctgctcaacgcggagcaccacttctccgccttcaagacaaagttcggcaagacctacgccacgcaggaggagcacgacctacgcttccgtatcttcaagaacaacttgctcc

SEQ ID NO: 187463 - DNA, 197 bp, Glycine max
aagctgggtagtagtgaatatcagactctgcacattttcttctatcccttcttggctcatggccacatgataccaaccgtagacatggccaaattatttgccgaaaagggtgtgaaggccactataatcaccacacccctcaacgaatcttacatctacaacgccattggaaaatccaaaactaatggcaacaaaat

SEQ ID NO: 187464 - DNA, 266 bp, Glycine max
ctactactcactcactgcagatctcaattgcatcgctgtccatgactcaccatcgttagcatcaaggcccgccagatcttcgacagtcgtggcaatccaactgtcgaggtggatttgacttgctccgatggtacttttgccagagctgctgttccaagtggtgcatccactgggatttatgaggcccttgaattgagagatggaggatctgactaccttggaaagggtgtatcaaaggctgttgccaatgtgaacaccgtcattgg

SEQ ID NO: 187465 - DNA, 269 bp, Glycine max
gcgcttcaaggcgtctcgtagggctaatccgcctcacgagggtcaccaacggcacgtgcctttggggggccgaggccccctactgctggtcggcaaacggacggcgggcgcacgcgtcgcttctagctcggattctgacttagaggcgttcagtcataatccaacgcacggtagcttcgcgccactggcttttcaaccaagcgcgatgaccaattgtgcgaatcaacggttcctctcgtactaggttgaattactattgcgacactgtc

SEQ ID NO: 187466 - DNA, 265 bp, Glycine max
cgatgcttgtcttccgtcttggatggacttaagtatgcagattcacacgaatgggtcaagcacgacggctcagtcgccaccattggtatcactgaccatgcccaggaccatcttggagaggttgtgtatgtggagctgccagaatcaggtggcacagttacccagaagtctggcttcggagccgttgaaagtgttaaagcaacaagtgacataaactctcttttctcgggggagattgttgaggttaacaaaaagctcacagaga

SEQ ID NO: 187467 - DNA, 265 bp, Glycine max
ctcgagccgctctgctaccctcttctctctctctcggttgtgagtgcagatttcttgcgcagtttatcatgggggatagtcagtattcgttttctctcaccacatttagcccttctggaaagcttgttcagattgagcatgctttgacggctgtcgggtctggacaaacgtctttgggaattaaagctgcaaatggagttgtcattgctaccgagaagaaattgccatctatattggttgatgaagcatcagtccagaaaattca

SEQ ID NO: 187468 - DNA, 266 bp, Glycine max
ggcaagtacaagtggctatcatacaaagaagtatatgaccaggtgatgaaagttgggaattctatccgcagctgtggttatggagaaggtgtaaaatgtggtatttacggtgctaattctgcagaatggattatgagcatgcaggcttgcaatgctcatggactttattgtgttcctttatatgataccttgggtgctggggctatagagtttattatatgccatgcagaggtctcaattgcatttgcagaagaaaagaagatact

SEQ ID NO: 187469 - DNA, 268 bp, Glycine max
ctatctatccatttgttttgaaaatggcttccaagagtattgcatgcattgttcttctctccctcaacctccttttctttaccatggttagccccaacaccattgccccttcccctgcgatacaaccaccaccaccgccacgtgagtgtcccgagttgggtctttgcctcgatattttgggtttgggtcaagggtctccatcaaaagattgctgccccatcctccgtggacttattgaggttggtgccattgtatgcatttgcgacaa

SEQ ID NO: 187470 - DNA, 222 bp, Glycine max
ctttgaaatccgccatgaattgtagctacgttaaagactacgagtttgttgcaatttttgatgcagattttcagcctaccccggattttctcaagaaaaccgttcctcattttaaggataatgatgatttggggcttgttcaagcgagatggtcatttgtaaacagggatgagaacctgctaacgaggttgcagaacataaacctgtctttccattttgagg

SEQ ID NO: 187471 - DNA, 262 bp, Glycine max
cgcaactgcacgcactgtaactcactcaccgtttcttccgctttgatggaacagtacgagaaggttgagaagataggcgagggaacatacggcgtcgtttacaagggtcgcgaccgctccaccaacgagaccatcgacttgaagaagattcgcttggagcaggaggatgagggggttcccagcaccgccattcgcgagatttctctcttgaaagatgtgcagcacaggaacattgttaggttgcaggatgtagtacatgatg

SEQ ID NO: 187472 - DNA, 265 bp, Glycine max
gctagtccagcgccactgttaggggatcgactgtgtgaaaatggatttgagtgtgttaaaattctccctgccaccaatgatgcacatggaggagtcattgtggacttaaaggagcctttgcacttcgaagtttttgctactttgcttagatcttcacttttacattggaagcaacagggaaaagatggtgtttggatcaagtttcctattgagcttgttaatcttgttgaaactgcagttaaggagggtttttggtaccaccatg

SEQ ID NO: 187473 - DNA, 263 bp, Glycine max
ctcaggtccaacaccctacaatcatggacaaggttgctggccagctccatctccgttctggtgtttctggtattaggagtttcaaaggagcctactgccaccccacaatgtaccaaagaccctcttttgggaattactcgaatgctgcattgcagtatcctgtgatgccctcatgcaaagctactatggatttgtctgctgctgcaacaactgcctcccccgtctttgttgctgctccagcagagaaaggccattttcttata

SEQ ID NO: 187474 - DNA, 264 bp, Glycine max
gctagctatctaggatggtgagtgttgaagagatccgtcaggcacaacgtgcagaaggccctgccactgtcatggctattggcaccgccactcctcccaactgcgtcgatcagagtacctatcctgactattacttccgcatcaccaacagcgtgcacatgactgagctcaaagaaaagttcaagcgcatgtgtgataagtcaatgaacgagatgcgatacatgtacttaaatgaagagatcctgaaggagaatccgagtgttt

SEQ ID NO: 187475 - DNA, 261 bp, Glycine max
cccactcctccaccaccaccaccaccaccaccatcttcaccgtcatattcctcctccttgcaatattattcactctcacaccccacaaggccaacggtgccacgtgtcaccctgaggaagaagcgggcctgttcggcttcacatccggtatccgatccgacccgtccggcctgctcagtaactggatatcgggtacggactgctgcacatggaccggagtagaatgccactataacagcacccgggtccaaagattattct

SEQ ID NO: 187476 - DNA, 263 bp, Glycine max
ctcctacctcgtccttcttacccaacctcaacctgtttctccgagactcacatccaacgcttctgtcatggaggaagttaacgttgtggaaactaaggatggaactgtctcagtagctgctgcgtttgctggtcatcaggaagccgtgcaggatagagaccacaaatttttaagaaaagctgttgaagaagcatataaaggggtagattgcaaagatggaggcccttttggtgctgttatagttcataatgatgaaatagttg

SEQ ID NO: 187477 - DNA, 263 bp, Glycine max
aggacaattaccatcaccaaggattctaccactgtcattgctgatgctgcgacaaaggatgagttgcaagccagggctgctcagttaaagaaggagctgtctcagacagactcagtatatgatactgagaaactggctgagaggatagctaaactgtctggtggagttgcagtcatcaaggttggtgctgctacagagactgagcttgaggatcggaagctccgaatagaggatgccaagaatgcaacttttgctgccattga

SEQ ID NO: 187478 - DNA, 261 bp, Glycine max
gttatggagttgatgagaggcgttagaaatcagttaactgaacttatatctggtctagctgttcaagacatggccccaatgagcttgggtttatctcacagcttatccagatacaaattgaagtttagtgcagagaaggtggataccatgattgtccaggctattggtttactagatgatcttgataaagagttgaatacctatgccatgagggttcgagaatgttatggttggcattttcccgagcttactaaaataata

SEQ ID NO: 187479 - DNA, 263 bp, Glycine max
cacacctaaccctccaaattcctatctctcttcgaatcaaatacacagctctgtcgcgcataggcctggcgggcctggccgtgctgggccaaaacctagccctgaacatcgcggaaaaggggtttcctatctccgtctacaaccgcacagcctcgaaagtggacgagaccgtagatcgggcccgcaacgagggctccctccctctcacgggccaatacacccctcgcgacttcgttctctccctccagcgccctagatccgtc

SEQ ID NO: 187480 - DNA, 262 bp, Glycine max
gcgggtaaacggcgggagtaactatgactctcttaaggtagccaaatgcctcgtcatctaattagtgacgcgcatgaatggattaacgagattcccactgtccctgtctactatccagcgaaaccacagccaagggaacgggcttggcggaatcagcggggaaagaagaccctgttgagcttgactctagtccgactttgtgaaatgacttgagaggtgtaggataagtgggagctggaaacagcgaaagtgaaataccact

SEQ ID NO: 187481 - DNA, 262 bp, Glycine max
ctttgagagaggcagaagaagaagaagaaaagatggtgggaccagtgagacctcagtttgtgctctttggttcttccattgttcagctcagttactctctccaaggttggggcgctattcttgctcatttgtatgctcgcaaggcggatataattctgcgaggatactctggttggaattcaaggcgtgctgtgcaagttctggataaaattttccctaagaacgccactgagcaaccagatttggtaattgtgtactttgg

SEQ ID NO: 187482 - DNA, 265 bp, Glycine max
ggctcgagcggctcgaggcaatccactcagagagctagacgaattcaacaatgcctcgctatgatgataaatacggcaatacccgcctctatgtgggacacttgtcttcgaggactcgttcccgtgatctggagcgtgcctttagcagatatggaagagttcgaggtgtggatatgaagaatgatttcgcttttgttgattttagtgatcctcgagatgctgatgatgcaagatataacctggatggtcgggatgttgatggaag

SEQ ID NO: 187483 - DNA, 264 bp, Glycine max
gaagaacaaaaccaacatcaacaaccacaagaagaagaagcttgcaaattagaagaatcttcagttgaaagggaagaacacacaagaacaaagagaggaagaaacgcgaatgaagggagaattagagttgccaccagggttcagatttcaccccactgatgaagaattggtgaatcactacttgtgtaggaagtgcgcgggtcaaccaatcggggttcccatcatcaaagaggccaatttgtccaagtttaatccatggcagct

SEQ ID NO: 187484 - DNA, 256 bp, Glycine max
agcagtgcctggcgaagaagagaaagacaacaatcatgagcttcattctgtttccgatacacattgcatttacctttctgacctcacccgttcacactgcttcggatctgatcctcaccaaggttgaccgacgcattgatctgacttcacagattgtgcgcatcactacttcactaaaggtgcagaatacgggatctgatgttgtgactgagattttgctgtcctttcctgagaaccaggcaagtaacttggcata

SEQ ID NO: 187485 - DNA, 269 bp, Glycine max
accgcacaagcacgagccgctcgaaccgaaaagggcatcccctatttgaacacatatgacggccgtaccatacgctaaccagacccactaatcaaggccaatgacaccatcaagctggaccttgaaagcaacaagatcactgatttcattaaattcgatgtggggaatgttgttatggtcacaggcggaaggaacagaggccgggtcggtgtcatcaagaacagagaaaagcacaagggaagctttgagaccatccatgtccaggatgc

SEQ ID NO: 187486 - DNA, 265 bp, Glycine max
cgagttcagatctagagtcatcagtttcaccacattgttctacacttacctgattacaattacgattcttacgttaatttaataagatgtttgggagggcaccgaagaagagcgataatacgaggtactacgaaatccacggcgtctccaagaacgcttcgacaggatgatctgaagacggcttacaagaaagccgccattaagaatcaccccgacaagggcggtgatcccgagaagtttaaagagctggcgcaacttatgaggt

SEQ ID NO: 187487 - DNA, 284 bp, Glycine max
gcacggaatacggctcgaagccaaaaccctagcaaccggcgagaatggcagacgttgaggttgatgtggcggcggcggcggcggcggcggctgcagggcagccaaagaagagaacgtacaagaagttcagcttcaggggggtggatctggacgcgacttctggacatgtccactgacgaactcgtgaagatgttcagtgctcgagacagcagaaggttccagagaggtctcaccagaaagcccatggccttgattaaaaagctccgcaaagcaaaaagggaagc

SEQ ID NO: 187488 - DNA, 277 bp, Glycine max
actttgccttctccttcactaggctccccaagcaacaacaacaactactcttttttctctttcatcgacgatcttcactaagctctttcactcaaacacacacctttgattatatcactttctcttgttctcttaccgtagaacattgcatttactcctatctctcactctggatcttcaacttcttcctgattttgctgatttgggggattgagttggacggggaaacatggctgcttcttctgcatctctttctggtgcttctgcttcggatctt

SEQ ID NO: 187489 - DNA, 275 bp, Glycine max
gcagtcgcaaccctaatcagaagaagcgcagttcaagcgagtgacagccaccagccatgggtcgtatgcacagccgcggtaagggtatatcctcttctgctttgccctacaaaaggacacctcctagctggctcaagatctcttcgcaagatgtcgaagaaaatatctgcaagtttgcgaagaaaggtttgaccccgtctcagattggtgtcattctcagagattctcacggtattgctcaggtcaatagcgtcactggcagcaaaatccttcgc

SEQ ID NO: 187490 - DNA, 265 bp, Glycine max
ctggaggcacttcatgaaagtcttgaaagacgacattgagatagttgagtacttgccggtccaatatgcatcattgacacctcttgtgaaggcccctgtttcctggtcaaaggctagttactacagaggtgagattcttccattgttgaagcgacataaggttgtacagtttactcacacagattcccggctcgccaacaatggccttgcttcctctatgcagaagctgaggtgccgtgccaattaccatgctctcaagtacaca

SEQ ID NO: 187491 - DNA, 276 bp, Glycine max
ctcttgaagaagaacaaagaaagattgaagagactgctaagctcctttgctgggagaagaagtctgagaattctgaaattgccatttggcaaaaaactgtagacactgaatcatgtcgtagcagacaagaagattctagtgtaaaattctgtgaatcaacagatgctaatgatgtctggtataagaaaatggaggtctgcattactccaagtcctaaagtttatggtgattataagccatttccagagaggctatatgctatccctcctagaattg

SEQ ID NO: 187492 - DNA, 275 bp, Glycine max
cgaatcttggctctcctgatcctaattgtactttagatactcatcagacaggagtgaattgtgttgattattttacaggtgctgacaaaccatatctaatcactggttctgatgatcacactgctaaggtatgggattatcagaccaaaagtcgtgtccagaccctagaaggtcacacacacaatgtatctgctgtatgctttcatcctgaacttcctataatcattactggttctgaggatggcacagtacgcatatggcactccacaacttat

SEQ ID NO: 187493 - DNA, 274 bp, Glycine max
gttaccggaaggttgcattgctagtatactctctcgcactacgccggcggacgtgtgtaggttttccgtcgtatcaaagattttccgttcggccgctgaatcggacgctgtgtggaaacgttttctcccttccgattaccattccatcatttcccagtctccttcgcctctcaactatccttccaagaaggagctctatctcgctctctcggatcgccctatcatcatcgatcagggtaaaaaggtaggtagcgtgttgtgtgtttcgcatccc

SEQ ID NO: 187494 - DNA, 271 bp, Glycine max
gacgaccaggttcaagaagaacaggaagaagagaggtcacgtcagcgccggacacggccgtatcggaaagcaccgcaagcatcccggaggtcgcggtaacgccggtggcatgcatcaccaccgtatcctcttcgacaagtaccatcctggtttcttcgggaaggtaggcatgcgctacttccacaaacttcgcaacaaattctacaatccgatcatcaacatcgacatgctgtggtccctcctcccccaggaggccaaagacaaggccacc

SEQ ID NO: 187495 - DNA, 271 bp, Glycine max
cggaacaatcggaaaggaaaggataaaggtagagaggagagacctattgtggctgtatatgacaagcagcaagacaatactgctgatgagaaaaaagattctaacatggaggaagttcaagctcttgatgaaaagctttatgccctggaaattgtttctgatgtgtctgattctgtggatggggttggtgaagtgcttcagcctgattctgaagacagagatgtgagtcctgtaaattgggatactgatgcatcagaagttcatcctccca

SEQ ID NO: 187496 - DNA, 268 bp, Glycine max
ggaagatgggcgtaccctggctgattataatatccagaaggaatccactctgcatttggtgttgaggcttcgtggtggtatgcaaatatttgtgaagactctgacagggaagaccgtaaccttggaggtggaaagctctgataccattgataatgtgaaagcaaagattcaggacaaggagggtattccaccagatcagcagaggcttatttttgctgggaagcaactggaagatggtcgtaccttggcggattacaatattcagaag

SEQ ID NO: 187497 - DNA, 275 bp, Glycine max
caaaaattaaaaaggggcttgtaatttcagagacaaatattcattcaaacaaaacaacttatgatagtaaaagggtagaattcgaaaaaaaaaaattgcagatattacaaagaagaagaaatgctcgattaactcgtaaatcacattcttttttaaaatttttcatgaaaaggatatacagagatatatttctatatatcagttgtattccgaggatcaatatacaactttttcttgaattaacaaaaaaatttttaaataaatccatttacgat

SEQ ID NO: 187498 - DNA, 274 bp, Glycine max
gttgattgcagttgagagagttgtaatgagtaacgaatacgattatctgttcaagcttctcctaatcggcgactcttccgttggaaaatcctgcttgcttctcagattcgctgatgactcctacgtcgacagctacataagtaccattggagttgatttcaaaatcagaaccgtggagctggaaggaaaaaccgtcaagctgcagatttgggatacagctggacaggagcgattcaggactataacaagcagttactatagaggagcacatgga

SEQ ID NO: 187499 - DNA, 274 bp, Glycine max
tactcgagcgaatcggctcgaggttcagctgtgcctcaaatcaactggctcaagtgctttacgacactggcatactcattatctcaacttggcatgctatcaggaatcatttttcaggtgttctatggaattgttggaagctggactgcttatctaatcagtgtcctctacatagagtaccgcaccagaaaggaaaaggaaaacgtcagcttcaaaaaccatgtcattcagtggttccaagtccttgatgggttacttggtccatattggaaag

SEQ ID NO: 187500 - DNA, 275 bp, Glycine max
aaagcgaactacagcacagcactgcactcttcgcaacacaacaaaaaaagacaacccagagagcgcgtcttaataaacgctcttctctgataacccccatttcttttcttctttcttcttctctttcgcttcttcgatcttcgatcttcgtcgctgaaaatgagagagtgcatttcaatccacatcggccaggccgggattcaggttggaaacgcctgctgggagctttactgcctcgaacacggcattcagcctgatgggcagatgccaagtga

SEQ ID NO: 187501 - DNA, 271 bp, Glycine max
cttttgaaggttagaagtgctacaatacaaacaatggcagctactcaggaagatgtgaagcttttgggtattgtgggaagcccatttgtgtgcagggtccagattgcccttaagttgaagggagttgaatacaaatttttggaagaaaatttgggcaacaagagtgatttgcttctcaaatacaaccctgttcacaagaaggttccagtgtttgttcacaatgagaagcccatagcagagtctcttgtgattgttgaatacattgatgagg

SEQ ID NO: 187502 - DNA, 267 bp, Glycine max
gttgggctgaaatagcacatgagggtgagacaggcaaagtctccagagctaactttcatgatcgacatgggagggctgtgcttattatgaggccagggatgcagaatacaacatcggctgaagataatatcaggcatttagtctatctgttggaaaatgctatcctgaatctttctgaaggtcaagaacaaatgtcatggttgatagacttcacaggattatcacttagtacaaatatatctgttaaaacatctcgtgatattattc

SEQ ID NO: 187503 - DNA, 274 bp, Glycine max
cttttctcttcgctgttcctcttcagatcaaacgcacacagttacgctctttaaatcaatctcttctcagaaatgggtgtggctcaaaacattcccgatgcggaggagggaaccttggagattggaatggaatacagaactgtgtctggagttgctgggccattggtcattcttgataaagttaagggacctaagtttcaagagattgttaatattcgcttgggagatggaactactcggcgtggacaagtgctagaagttgatggtgaaaagg

SEQ ID NO: 187504 - DNA, 272 bp, Glycine max
gtttgctcggaactactcctccactcatcgtttaaaatgtctgacgtggaagagtttcgttgcttcattggtggccttgcatggtcaacgtctgatagaaagttaaaggatacatttgaaaagtttggcaagcttattgaggcaaaggtggttgttgacaagttctctgggcgttctcgtggttttggatttgtcacatttgatgacaagaaagcaatggacgaggctattgatgctatgaatgggatagatttagacgggcgaactattac

SEQ ID NO: 187505 - DNA, 273 bp, Glycine max
ctcagaaatcaagagcctacttcaagagatatcaagtcaagttcaagagaagaagagagggaaaaaccgattaccgtgccaggattcggttgattaatcaggacaagaacaaatataacactccgaaataccgatttgttgttcgctttagcaacaaggacattgttgcacaaataatatctgctagcattgctggcgatattgttcttactgcagcatatgcacatgagctgccacaatatggtcttgaagtagggcttacaaattatgctg

SEQ ID NO: 187506 - DNA, 268 bp, Glycine max
ctgacaatgaggaagatatgatgcaggatataaaggaaatttgtcaagatgttgaccgagaagcactccctctaatgaggagggcagagtttagttattggttgcgagagagtgtttcctatcatgttcaaaatcaaataagctctctaaatgattctgattatctgcagcatatatttgtactcctgactgggcggcaactagatgaagcagtgcagctggctgtgtccaaaggagatgtgaggttggcttgtttgttaagtcaggc

SEQ ID NO: 187507 - DNA, 266 bp, Glycine max
gccatcatacatccagcgcctccgttgtaaggtcaactttgaaacactgatctttgtttcacatatcaaggaattcggaaaggccattgttcatcgtcttcgccaccctacagaagggactgactatccgctggaggaaactgataagtttggaaaacagcaaactgggaagtttgttgtgttgcatctgcgttttgacaaagatatggcagctcattcagcctgtgattttggtgggggtacagctgagacacttgctctagcga

SEQ ID NO: 187508 - DNA, 266 bp, Glycine max
ctgatggtcccaccgtatttgacaagatcatcaataaggaaattccatctactgtggtctatgaggatcataaggtccttgcctttagggacatagatccacaagctcctacccatattctaatcattcctaaagttagggatgggttaactggtctgtccaaggctgaggagaggcactgtgagattctaggtcgacttttgtgcactgctaagctggttgcaaagcaagaaggtcttgatgatggcttcaggattgtaattaat

SEQ ID NO: 187509 - DNA, 272 bp, Glycine max
ctgcgtgctagcatagttgttgctgctcagtatggcgggaatcttttcgttggttactgggaggccgggactaagtggattcggatcttcctcaactgctgaacaagttactgaaggaattgatgccagcaatctcactgcaatcatcacaggaggagcgagtggcatagggttggagacagcacgtgttctggcaattcgaaaggtccatgtaataattgctgccaggaacatggagtctgcaaaggaagctaaacaactcatacttcagg

SEQ ID NO: 187510 - DNA, 272 bp, Glycine max
gagaggagtacaaaagagcattacaaaaagtgtatggtgcaaaggttccaagaaatggtaacaatcaaaggcttggagtctgctcaatctgaaatcaatgatttggactgggaaagcactttctttttgcgccatcttcctgtctctaacatctcagagatccctgatcttgatgaagattacaggaaggtaatgaaggattttgccgtggaactggagaaactggcggactagttcttgagttgctgtgtgagaatcttgggctagagaaa

SEQ ID NO: 187511 - DNA, 273 bp, Glycine max
ctctcattatgtctattgtgtgtgttggggttagtcattgtgggtgatcatgttgcgtatgctcaagactcaccaacagactatgttaatgcacacaacgctgcaagatcacaggttggtgttccaaatatagtttgggataacgcagtcgctgcttttgcacagaactatgctaaccaacgcaaaggtgactgcaaactcgtccactctggtggtgatggaaaatacggggagaatcttgcaggaagcaccggtatactaagtgggaaagat

SEQ ID NO: 187512 - DNA, 273 bp, Glycine max
cccctgcacaagtgagcgagacagacggaattaactttctgggagttaaaggtaaatgcttgtggccaattagaatagggtgcttaaatcccaaggaccaaataccaaagtggtcaatgaagacaatacaatgtataacagatgaggattattactttgtatgcgtggagatctttgaaggattaaaaagaattggaaagccgtctatccttctttccatacgcgaaggagtacaagcagtacatataatcatggggatgtagcaggcttgct

SEQ ID NO: 187513 - DNA, 271 bp, Glycine max
ctgccagtagtcatatgcttgtctcaaagattaagccatgcatgtgtaagtatgaactaattcagactgtgaaactgcgaatggctcattaaatcagttatagtttgtttgatggtatctactactcggataaccgtagtaattctagagctaatacgtgcaacaaaccccgacttctggaagggatgcatttattagataaaaggtcaacacaggctctgcctgttgctttgatgattcatgataactcgtcggatcgcacggcctttgt

SEQ ID NO: 187514 - DNA, 271 bp, Glycine max
attccatggctgggaaagatagaatcctgattttgggatccactggagccattggaagacacatagtctggggaagtgtgaaggcagggaatcccacatttgtgttggtgaggaacacccctggctctaacaacagggtcaatctggtcaaagctgctaatcctgaaaccaaggaagagctcattgaaagcttcaaaaattctggagttaagctgattcagggagatatgaatgatcatgaaagtttggtgaatgcaatcaagcaagttga

SEQ ID NO: 187515 - DNA, 270 bp, Glycine max
caacattttaagaagccctgggctcatgagcatgatcctgttagaaatcttctagatgctgttaataaaattaagccaacagtgttgattggaacatcgggacaaggaagaacttttactaaagaagtgattgaggcaatggcttctattaacaagagacctattattctttctctttccaaccctacgtcacagtcagaatgcactgctgaagaagcttacaagtggagccagggacgtgccatttttgcaagtgggagtccatttccc

SEQ ID NO: 187516 - DNA, 270 bp, Glycine max
tccactgcgccaccgcctcattccatccttgacaatggcattaacgcaaggtcaattcacaatgtccttctcttcaacccatctctctctacctatcaccctgtctagctcctctgttgccttctgttaatgccattgtcaaggaagcaatgaggctgcacccagtggcaccaatgttggttccaagactagccagagaggactgcaatcttggagggtatgacatccccaaacggacacaagtgcttgtgaatgtgtggactattggga

SEQ ID NO: 187517 - DNA, 268 bp, Glycine max
ccacctccttgttcttcacatcatcctcatcatcttcttcaatcagttaactcttcgttcctccctctattctttcggatggagcccatggacatcgttgggaaggccaaggaagacgcttctcttcctaaagcgacaatgacgaaaattattaaagagatgttgcccccggacgtgcgtgtcgccagagatgcacaggatttattgatcgagtgttgtgtcgagtttataaaccttgtctcgtcagagtccaatgaagtctgtaaca

SEQ ID NO: 187518 - DNA, 269 bp, Glycine max
caggcactgtggcagaagtcttaggagtgtaaaacagagacgcaaaatgaagacgattctatcgtccgagaccatgaatattcccgacggcgtgagcatcaaggttcacgctaaggttatcgacgttgagggccctcgtggaaaactcgtgcgagacttccaccatctgaacttggacttccaacttattaccgacgatggcggtaaaaggaagctcaagattgattcttggtttggttctcgtaaaacctccgccgccatccgcaccg

SEQ ID NO: 187519 - DNA, 270 bp, Glycine max
  unsure (1)..(270): unsure at all n locations
gntggcctcatcgagacctacaagttgaacggccaatncagatggatatcctctcagatgaaccgtgtgaggaacggagagctctaccgtgtcatctgtgacacaaggggtgcctttgtgcagcctgcagtttatgaggcctttgggttgactgtggttgaggccatgacttgtncggttgccaacgtttgccacatgcaatggtggtcctnctgagnatcattgtgcatggaaaatctggttaccacattgatccttaccatggtgacc

SEQ ID NO: 187520 - DNA, 271 bp, Glycine max
caggtcttagaatgctgggatagagaaaggaaggaaatggttgccgtaaaaattgtccgtggtattaagaagtatcgagaagcagccatgatagaaattgaggtgttgcaacagcttggtaaacacgataaaggaggcaatcgtcatgcatgacttgcgcatgattcatactgacctgaagcctgaaaacatactactagtttcaccagagtatgtcaaagttcctgactacaagagttcatctagatcaccaagttcctatttcaagaga

SEQ ID NO: 187521 - DNA, 267 bp, Glycine max
ctcgagccgaatggcgcaaccttcctcctcctcgaagcctgttgtccctctcctgaaggacgagctggacatcgtgatcccgacaatccgaaacctcgacttcctcgagatgtggcggcccttcttcgaaccttaccacctcatcatcgtgcaggacggagaccccaacaggaccatcaatgtccccgaaggcttcgattatgaactctacaaccgcaacgacatcaatcgcatcctcggacccaaagcctcctgcatctcgtttaa

SEQ ID NO: 187522 - DNA, 271 bp, Glycine max
cggctcaccagatttgaaggctgcaaaagaggttgctgactatctaggcagtgtccaccatgagtttaccttcactgttcaggatggaatagatgccattgaagatgttatctaccatattgaaacatatgatgtgactacaattagagcaagcacacctatgtttctcatgtctcggaagattaaatcacttggtgtcaaatgggttatctcaggagaaggatctgatgagatctttggagggtatttgtacttccacaaggcacccaac

SEQ ID NO: 187523 - DNA, 270 bp, Glycine max
ctcgagccgataccctttctatcctacttgctacttcccacttccattcttttcttaaccagctaggatggtgagtgttgaagagattcgtaaggcgcaacgtgcagaaggccctgccactgtcatggctattggcaccgccactcctcccaactgcgtggatcagagtacctatcctgactattatttccgcatcaccaacagcgagcacatgaccgagctcaaagaaaaattcaagcgcatgtgtgataagtcgatgattaagaagcg

SEQ ID NO: 187524 - DNA, 261 bp, Glycine max
gattcagtccgtgtacaactatgaaaccactgaacttgttcacgagaacaataatggcacttatcagtgggttgtcaagcccaaaactgtcaaatatgaatttaaaaccaacacccatgtccctaaactaggggtaatgcttgtggggtgggggggaaacaatggctcaaccctcactggtggtgttattgctaaccgagagggtatttcatgggcaacaaaggacaagattcaacaagccaattactttgggtcgctgac

SEQ ID NO: 187525 - DNA, 267 bp, Glycine max
cttgaaccaggtggatgaagcttctgacgtgggcaattgcttgagcagtaatcataaaattgatgtgccaattatgaaggtgaagtcatcatttggtgggcccacgcaggctcgtatcttctctgattcgatcctcccttcgtagatctcaatcgaagccctcaatttccgcatcgacatcgagagaaacgtcatccaaccgtgcctcaccgcacggatacttgctgaaccgcgtcgccgagtacgccaccgccgcggctgctgcta

SEQ ID NO: 187526 - DNA, 267 bp, Glycine max
ctcacactcactgcagatctcaatccatggctaccattgttatcatcaaggcccgccagatcttggacagtcgtggcaatccaaccgtcgaggtggatttgacatgctccgatggtacttgtgctagagctgctgttccaagtggtgcatccactgggatttatgaggcccttgaattgagagatggaggatctgactaccttggaaagggtgtatcaaaggctgttgacaatgtgaacaccattattgcccctgctttggttggca

SEQ ID NO: 187527 - DNA, 263 bp, Glycine max
tcgggtaccagctggtggtgtccctgggggacagttgatgactacaactgaagtggagaattttccaggattcccagatggcataagtgcacctgatctgatggataggatgcgacggcaagctgaacgttggggtgcagaattgtatcaggaagatgttgaagttattgatgtgaaaagtagtccttttactgtccaaagtagtgaacgtaaggttaagagccatactgtcatttatgctactggagctactgcaaaacgac

SEQ ID NO: 187528 - DNA, 266 bp, Glycine max
ctaccatctctctctctctttcttagtgcctccttgccagaacttaaaatggcccaagaaactttcctattcacatctgaatcagtgaacgaggggcaccctgacaagctctgtgaccagatctccgatgctgtgctcgatgcatgcttggagcaggaccctgacagcaaggttgcctgtgaaacctgcaccaagaccaacatggtgatggttttcggagagatcacaaccaaggccaacgtggactatgagaagattgtgcgtga

SEQ ID NO: 187529 - DNA, 266 bp, Glycine max
gccctaactacgcacgcattcgtgagacaactcaatattcgtcgctcatggcactctcttctcgtctcttttccaaatccaaattgatctatggcagtcaaatacttctacaaaaggagcatgctattccagttcgtcactttgctaaagagtctgcccctcctgcccttaagggagacgagatgctgaagaacatttttgtggaggtgaagaacaaatttgagaccgccataggaatattaaagaaggagaaaatcaccattgac

SEQ ID NO: 187530 - DNA, 271 bp, Glycine max
ggctcccaagggtttaatctttttggctgtgttatgcttctcagcactgtcactgagtcgttgtcttgcggaggataatggacttgttatgaacttctacaaggaatcatgccctcaggctgaagacatcatcaaagaacaagtcaagcttctctacaagcgccacaagaacactgctttctcctggctcagaaacatcttccatgactgtgctgttcagagttgtgatgcttcactgttgctggactccacaagaaggagcttgtctgag

SEQ ID NO: 187531 - DNA, 268 bp, Glycine max
gggatcagcaactatgatatctttctgaccagagattgtttagcatattccaagataaagcctgctgtaaatcagattgaaactcatccatacttccagcgtgattctctagtcaaattttgtcagaagcatgggatttgtgtcactgcacacactccactaggaggtgctgcagcaaatgctgaatggtttggaacagtttcatgtttggatgaccaagttctcaaaggtctggctgaaaaatacaaaaagactgccgcccagatca

SEQ ID NO: 187532 - DNA, 270 bp, Glycine max
cttcgcaccgcaaacaaacagtgagccatggccgtcggaaagaacaagcgcatctccaaagggaaaaagggtggcaagaagaaggcagctgatccctttgccaagaaggattggtatgacattaaggccccttctctttttcaagtgaaaaatgttggcaaaaccctcgtctctcgtacgcagggtaccaagattgcttctgaaggacttaaacatagagtgtttgaggtctccttggctgatcttcaaggggatgaggatcatgcattc

SEQ ID NO: 187533 - DNA, 271 bp, Glycine max
ggcgctcgtaaactcactaaaaagccaagtgagtctctctatgagcagaagcctgaggaaccccctgctccagtttcatcttcaacaaacaatatgcctgctgggccatctccaacgtctcggtttgagtatgtagaaaatgtccaatcatctgagttgaacactggaggttcacatttgcttagtcatgtgtctccaccaaagtcatcaagcttctttgcagactttggaatggatagtggctttccaaagaaatctgggccaagctcct

SEQ ID NO: 187534 - DNA, 271 bp, Glycine max
ggcgacaacatcaagcacgtcgtcctcgagaatgtgaaagacgcctccctccgcgtccgctcgcgccaggagaatgtcgccggcacgaagctcccgaagttcgactacaccgccgacgccgacgccacgaaaaacgacctcaccggacttgcacgcggcgggcagcaggtgcagcagtgccgcgccgcgtacataaaggccatcgaggtgctcgtcgaacttgcgtcccttcaaacatcgtttctgactctggatgaggccatcaagacca

SEQ ID NO: 187535 - DNA, 267 bp, Glycine max
gttaggttctgcacgctctgcttccagcgagtgttctttcttcgtttcaacaccttaatttgcacacgctgcttcttccgcttgagaaatggcacaagaaacctttctattcacatctgaatctgtaaacgagggtcaccccgacaagctgtgcgaccagatctctgatgcagtgctcgatgcgtgccttgaacaggaccctgacagcaaggttgcctgtgagacatgcaccaagaccaacatggtcatggtctttggagagatcac

SEQ ID NO: 187536 - DNA, 266 bp, Glycine max
gttatactctctctctctttgtcgcttggatcactgatctcatctcaattttcagatatgtcgacatctgataagccagaagtggtggaaaggggtagcaaggatgaaaaacacaaggaagatgatcaagaggaggggaagggtggattcattgagaaggcgaaggatttcattcatgacattggtgagaagattgaggaagctattgggtttgggaagccaactgctgacgttactgcgattcacattccatcgattaatcttca

SEQ ID NO: 187537 - DNA, 266 bp, Glycine max
gcagatctcaattgcatcgctgtccatggctaccatcgttagcatcaaggcccgccagatcttcgacagtcgtggcaatccaactgtcgaggtggatttgacttgctccgatggtacttttgccagagctgctgttccaagtggtgcatccactgggatttatgaggcccttgaattgagagatggaggatctgactaccttggacagggtgtatcaaaggctgttgacaatgtgaacaccgtcattggccctgctttgattggca

SEQ ID NO: 187538 - DNA, 264 bp, Glycine max
gggcttctccagcctagtttgttctcagatcttcttcttccatggaccagtacgaccaggtggagaagataggcgagggaacatacggcgtcgtttacaaggctcgcgaccgcgccaccaatgagacaatcgctctgaagaagattcgcctcgagcaggaggacgaaggcgttcccagcaccgccattcgcgagatttctcttctcaaagagatgcagcataggaacattgttaggttgcaggatgtagtgcacagtgagatgc

SEQ ID NO: 187539 - DNA, 266 bp, Glycine max
ataaaattgacatgattgctctttcttttgttcgaaaaggttctgacctggtggaagtcaggaaagttctgggaaaacatgctaagaacattatgctcatgtctaaggttgaaaaccaagaaggggttgcaaattttgatgaaatccttgcaaattcagatgcatttatggtggcacgtggtgaccttggaatggaaattccaatagagaagatatttctcgcacagaaagtgatgatttacaagtgcaacatccaaggaaaacca

SEQ ID NO: 187540 - DNA, 290 bp, Glycine max
ctctaaagagtctccgctgaactttttggtttcttgaagatgtcgttactctccgatcttatcaaccttaacctctccgacatcaccgataaggtgatcgccgagtacatatgggttggtggatctggcatggatatgaggagcaaagcaaggactctctcgggactggttaatgacccttccaagcttcccaagtggaactatgatggttccagcactggtcaagctcctggacaagatagtgaagtgatcttatatccacaagcaatttgtcgggatccattcaggag

SEQ ID NO: 187541 - DNA, 283 bp, Glycine max
gcagttgtcggtgccagagatcacgaatgccgtgtttgagcccgcgagcatgatggccaagtgtgatcccaggcatggcaagtacatggcatgctgcttgatgtaccgtggtgatgttgttcctaaggacgtgaatgctgctgttgccaccatcaagactaagaggactgttcagtttgttgattggtgtccaactggattcaagtgtggtatcaactaccagcctccttctgttgttcctggtggtgaccttgccaaggtgcagcgggctgtatgcatgatc

SEQ ID NO: 187542 - DNA, 282 bp, Glycine max
gactcattggatcggttgatgttgaggagtctgtgaaaacaggcacaactgttttccagccaggcttgcttgcagaagctcatagaggtgttttatatgttgatgaaattaatcttttggatgagggtatcagtaatttgctccttaccgtattgagtgaaggagtaaatactgttgaaagagaggggatcagtttcaagcacccttgcaggccccttctcatgccacctataacccagaagagggtgctgttcgtgaacatctgctggaccgcatgcgatt

SEQ ID NO: 187543 - DNA, 274 bp, Glycine max
gtgaaggcggtggagataagatcaagctacctcctacttgctttgcagaactgtctgagcagggtacttttgataagagacagggacccttagactttcagttgtcgttagttcatgaagaaagcacttcaagcatccaaactactgatcaagtgaaacaggggaggaccacccattctggagttttagaattcactgctgatgaaggttcagtgggtcttcctcctcatgtatggaataatttgttttctgaaggcactccaaaacctccctt

SEQ ID NO: 187544 - DNA, 279 bp, Glycine max
ggtattgtaagtggcagagtggccttgctgccacgatccactgagattcagcccttgtcgctttgattcgtctgcaaaggatataattctctttcatctgaattttccctttcaaatctcttcctttgaagttttcgtagttctctgcatcatggagatggaacgcgtcttcgagtttccttagcatcacatggagcggcgcccgagaaagagagcgagattgggctgggacatccctgaggtccccaaggctcaggtaggattgttttgtggacaaga

SEQ ID NO: 187545 - DNA, 283 bp, Glycine max
gttatggatcgaatcgaacacaagttcgtcaacgttggagatctcaagctccacgttgctgaaataggaagcggtgagaattactatacaccactgcattttcaataagttaaacactgttctttcttcttcttcttcttttttgtttcttcaggtggaagcgccgttgtattcctgcacggtttcccggagatatggtactcgtggcggcaccagatgatagccctggccgatgccggattcagagctgtctccttcgattacagaggctatggtctttccg

SEQ ID NO: 187546 - DNA, 284 bp, Glycine max
cggctcgaggctaagtctaagtgtagtaccgttgagattcaaggaatcgcttgggccttcggtggcatgatcttcgccctacgtttactgcaccgctggcatctcagggggacacataaacccggcggtgacatttgggctgtttttggcgaggaagttgtcgttgcccagggcgattttctacatcgtgatgcaatgcttgggtgctatttgtggcgctggcgtgatgaagggtttcgaggggaaaacaaatacggtgcgtatgatggtggtgccactttgtt

SEQ ID NO: 187547 - DNA, 294 bp, Glycine max
cagttcttaagttttggtctgtgacttgctagcttggtgagagagtggatatagacgaacggtacgagactttgaaggacgttggttcagggaacttcggagtggcaaggttggccaaagacaacgagacaggagaacttgttgccatcaaatacatagaaaggggaaaaaagattgatgcgaatgttcaaagggatatagttaaccaccgatctttaaggcatccaaatattatcaggttcaaagaggtgaagagtttgtttctatacttaaactgttctttgagtgtgattt

SEQ ID NO: 187548 - DNA, 290 bp, Glycine max
gaaatgttattgatccatataaacagagcattaggaaaacaagaagctttgatcacaaaatatgccaactccttggacactttcattttaacgaatagcaagaaacttcgatcacaaaatactgttttctggcactagaataacagtcaaatttaattatataatacttgggtacactggagatggcttcctttgtatccttcctagtgctgcttcttgcagcccttatcctcatgcctcaagggcttgctacttactacaaaccaattaagaagccaccagtgtacaag

SEQ ID NO: 187549 - DNA, 279 bp, Glycine max
cagagccagacaagtacaagatgatcaactttgaagaaaccgagttgcgactcggcctgccactcagtggaatcgagacgacgctcaaaaacacttgcagtactgggaagagggttttttcggatactagcgtggatttgaagcttaacctttcctcaacctcagataacgcccctcctcctgcaaagtcacccgcaaaggcacaagtggtggggtggccaccagtgaggtcattcagaaagaacattgtagcacacgttcaaaggagtaacaacaacg

SEQ ID NO: 187550 - DNA, 290 bp, Glycine max
attttccccaatccttttcgcctttgtctgcgaatggcgtcgttcgatcaggcacctcccggcgatgtcaaatccggtgacaaaatcttcaggaccaagtgcgctcagtgccacactgtcgaaaaaggtgccggtcacaagcaaggacccaatctcaatggtttgtttggaaggcaatctggcacaactcccggatattcctactcttcagctaacaagaacatggctgtgacttgggaagaaaagacactatacgattacttgcttaaccccaaaaagtatattccagg

SEQ ID NO: 187551 - DNA, 283 bp, Glycine max
cttggtcagaatggtgttcgtgacattgaaggaaatgaattacatcgtcttgtctatgtgtctcgtgagacaagacctggatatgatcaccacaaaaaagctggggctatgaatgctttggggagagtctcagcaataatcaccaatgctccctatgtactgaatgttgattgtgatcactacataaataacagtaaggcccttcgtgaagccatgtgcttcatgatggatcctacatcagggaaaaaaatatgctatgtacagtttcctcaaagatttgatg

SEQ ID NO: 187552 - DNA, 285 bp, Glycine max
cgcgggtgaggtagaacccttccactgtggtgactctgcgatgggtgcctacaagtatgtttcagagctatggcgcaagaagcagtctgatgtcatgcgcttcttgcagcgggtgaggtgctgggagtataggcagcaaccttccattgttcgtttgacaaggtctacccgccctgacaaggctcgtcgcttgggcttcaaggctaagcagggctatgtgatttaccgtgttcgtgttaggaggggtggccgaaagagaccagttcccaaaggtattgtttatgg

SEQ ID NO: 187553 - DNA, 284 bp, Glycine max
tatcgagccgattcggctgagattcctaatcacctggttaatttcctcacatagagctatactgatccaacgttaacataccgaatgttttagtaaggtcagctgcgcgagctctgcttggcggcggtgggcggactactaccgccagctctcaacggcggcgatcgtggaacagagacaccagcacggtggcggcgcgtttggaagcttccacttgcggaggatgtccactcttccagaggtaaaggatcagcactcagaggagaaaaagaacgaggtcaacg

SEQ ID NO: 187554 - DNA, 280 bp, Glycine max
acaaaaagacccgagtggaagaaaatgcggggtagagaccatttccttgtttcagggaggattgcttgggatttcaggagacaatacgatgatgagtcctattggggtagtaagttcaggtttctacccgaatccatgaacatgtccatgttagcagttgaagcaagttcgtggaataatgactatgcaataccctacccaacttctttccacccatcagaggacacagatgttttccagtggcagagaaaaatcagacatcaaaagcggccatacttgt

SEQ ID NO: 187555 - DNA, 283 bp, Glycine max
  unsure (1)..(283): unsure at all n locations
gccgctcgatgggaattgcgcttcaaggcgtctcgtagggctaatccgcctcacgagggtcaccaacggcacgtggctttgnggggccgaggccccctactgcttgtcggcaaacggacggcgggcgcacgcgtcgcttctagcccggattctgacttagaggcgttcagtcataatccaacgcacggtagcttcgcgccactggcttttcaaccaagcgcgatgacgaattgtgcgaatcaacggttcctctcgtactaggttggattactattgcgacact

SEQ ID NO: 187556 - DNA, 283 bp, Glycine max
gaaaatatgaaggaggtggaagttgaagatggatatgtcttgaaagaagagatccatctcacggtgctaaaaacctctctgttcttcgcgggcgatggcttcagcgtctacgattgcaaagatcaactcgtgttcagagttgactcttatggacccgacactcgcgacatagacgaactcgttctcatggatcctaacggaagaagactcctcaccgttcgtcgaaagcggccgagtttgcatcaacggtgggaaggtttcaaaggggagagaatggacggtg

SEQ ID NO: 187557 - DNA, 295 bp, Glycine max
attgttcattgagccaacaattttgttagatcctccgttagattactcagataatgtcagaagagatatttgacccactgcttcctataatcactatggataaaattcaggaaagtattgaatttatcaatgcaaagccaaaacctcttgccatctatgccttcaccaaagatgaaactttcaagagaaatattctatcagaaacatcctcaggaagtgtcgtatttaacgacacaatggttcaatttttatgtgatacactaccatttggaggtgttcgccagagtggttttgg

SEQ ID NO: 187558 - DNA, 290 bp, Glycine max
atgttgatgatgaggccaagttgacccttcacgggcttgtgcagcactacatcaaattgaaagaggaagaaaaaaaccggaagttgaatgatcttcttgatgcactggactttaatcaagttgtgatctttgtgaaaagtgttagcagagcagctgagctggacaaactacttgtggagtgcaactttccatctatatgcattcattctggcatgtcccaggaagaaaggttaaagcgctataaaggtttcaaggaggggcatacaaggattcttgttgcaacagatttg

SEQ ID NO: 187559 - DNA, 288 bp, Glycine max
agaccctcttccatggatcatcacaaacagggttcaccagagacagagttttttaccgagtatggagaggcaagtcaatatcagatccaagaggttgttggaaaaggaagttatggtgttgtgggttctgccattgatactcacacaggtgaaaaggttgcaatcaagaaaatcaatgatgtttttgagcatgtatctgatgccacgcggatccttagagaaattaagctcttgcggttgcttaggcatcctgatatcgtggaaattaagcatattatgcttcctcct

SEQ ID NO: 187560 - DNA, 283 bp, Glycine max
ctcttgagaacaagttattgttggcagggtttacagaaacacaagttttacaattaactgggatcaaagctaaaaagccttcatggaaaattggttcatcttttgcgctaaagaaggtgataaagagttcacctaaaatgcaaattgattttgattcggatctaattgatgaggatagtctcttgactgaagaagatttaaagaaaccccagctgccacctggtgattgtgaaattgggagcacaagaaaagcctgcaaaaattgcacctgtgggagggctga

SEQ ID NO: 187561 - DNA, 282 bp, Glycine max
aatccctcatctcattgctgagatctgcaagctggctatggactacgaaccctacgacagtagcggaactgatgatgaccttccaccaacccatcaaaaccgaatttccaggggaggaggaggacgtctcgctgggaatgggagatctgctgttggttcaattccttacccaaggatgtatggtgaaattgatatggagacccaaattgcatcagcttgagcaagaagcatacagttcagttctaagagcctttaaagctcaagccgatgccattacttggg

SEQ ID NO: 187562 - DNA, 283 bp, Glycine max
ggcaaaaccacctaccagtgaacagataatggcactgcttgctgacacacagggagcaaaactcactaagaagcatagtgaagccaaccggcaaaatcggttcctaaaaagacagttgaatgtaacggaggatgcattggtaaaattcaaaaatgaacttgcagtcatggagcttgaaattcaggccttggccagactagcagaagaaatagctcaatgtggtattccagaaggttcaaggaagatcaatggaaagtacattcattctcaccgtgttgctaga

SEQ ID NO: 187563 - DNA, 279 bp, Glycine max
gttttctcccccaaatcgtagatctacggttaaattggtgtagtgtggtaagatgggaggaggatttagagtgcttcacttagttaggccatttctctcgtttcttcctgaagttcaaactgctgacaggaaagtgccatttagagagaaggtcatatacactgtgatctctcttttcattttcctggtttgtagtcagctccctctatatgggatacactcaacaacaggtgctgatccattctattggatgcgtgttattctcgcttcaaaccgtgg

SEQ ID NO: 187564 - DNA, 285 bp, Glycine max
ggacctaagtctagctgctaatagactcgcccatcatgccatcaaacttggtggcattggctttggagcctcttttttcggattgtttgctgccattgctgctatttatctgttgattttggatcgtacaaactggaaaacaaatattctcacagcactactcattccatacattttcttcagcttgccttcattaattttcgacgtcttcaggggagagcttggaaaatggattgctgcagttgctgttgtattacgccttttccttccaagacacttccctgt

SEQ ID NO: 187565 - DNA, 281 bp, Glycine max
ctcgagccgacgtgattcgctcttctcttcgaataaaccacaaaaccaacaaacgagaagaggagtgagagaagatggggttgtcgttcacgaagctgttcagcaggttgtttgcgaagaaggaaatgaggattctgatcgtaggtctcgatgctgctggtaagacaaccatcttgtacaagctcaagcttggagaaatcgtcaccaccatccccaccatcggatttaatgttgagactgtggagtacaagaacatcagcttcactgtgtgggatgttggt

SEQ ID NO: 187566 - DNA, 291 bp, Glycine max
cttgaacataaagctgagaagcatctttcagatatggttgtgtctaaggcattggtggcgaagattgatagacccatgggaatagtttgtttccaaagagctaaggatagcaatgacgttcttaactcatgggcagcaaacttggagaggctgcttgatcttgtggagaagagctgccatcaaatacacaaggagaccatggtgcataaagctgccttagaggtttaagaagctccatatcactgttaaaagttacaggtgaaccccaatatagatgtgattttggactgc

SEQ ID NO: 187567 - DNA, 222 bp, Glycine max
cagtcttcgaatcataatggtagctaatgttctctggtttcttcggtggaagatgatgaatgggaaacagtggggccgaaggataaatctgctgttacaaggactcaaagctttctcgcatcagagataagtggtatttttggaggacaacttagaagtttggtgagagctagaggaaatagagcttctgctactgttcaaccgtatctcttggtccatctt

SEQ ID NO: 187568 - DNA, 288 bp, Glycine max
ctcgagccgcgatcatcacttcacttcactaatacatcatggcagacgagtcccagaacaagtatgagagctcagaggttgaggtccaggatcgtggtgtttttgactttctcggtaagaaaaaggatgaagaagacaagcctcatcctcaggaggaggtcatcgccaccgagtttcaaaaagtcactgtctcagaccaaggagagaacaagcacagcctcttagaaaagcttcaccgatctgacagcagctctagctcttcaagtgaggaggaaggagaagatggag

SEQ ID NO: 187569 - DNA, 285 bp, Glycine max
agctgtcaccttctcagatctacacaccgaagagggcatcaaatccctcgatcaattcctttctgggaaaacctatatttctggggatcagttgacaaaggatgatattaaagtgtatgcagctgttgttgaaaagccaggggacacttttcctaatgctgccaagtggtacgatgctgtctcttctcaacttgctccaagctttcctggccacgctcaaggggtaagattcagtggcgctgctgctccagctgaagctgcacctgccaaagcggctgccactgc

SEQ ID NO: 187570 - DNA, 191 bp, Glycine max
tcttcgtcaaaaccctaaccggtaaaacgattacgctagaggtcgagtcctccgacacaatcgagaacatgaaagctaaaatccaagacaaggaaggcattccaccggatcagcagcgtttgatcttcgccggtaaacaactcgaagacggcagaactctcgccgattacaatatccagaaagaatcgacg

SEQ ID NO: 187571 - DNA, 280 bp, Glycine max
ctgtttcgcctccaccagcaccatgttcctgtgggccctcttcttaatcgccctcaccgcttcctatctcagcttccaaggcttcgtcgattccggctgccgctacctcaccgcctcctggggcgggatccagtgggagaagcaggtccgcacctccgcccagatccaccgtcaaggcggcatgtccgtcctcgtcaccggcgcaggccattcgtcggctcccacgtctccctcgccttaaaacgacgcggagacggcgtcgtcggactcgacaacttca

SEQ ID NO: 187572 - DNA, 279 bp, Glycine max
cgcccctgatgatgattaccttagcgttcacataaaaatacttggtgattggactcgaagtctgaaagccaaattcacacaggcgtgccagcaacccctcaatggacagagtggactcctaagagctgaatgcttgaaaggagataacagcccaagttcctttccaaaggttctggtggatggtccatatggggcgccacgcaagactacagggagtatgaggtggtgttgctagtggggcttggaattggggctaccccaatgataagtatactaaag

SEQ ID NO: 187573 - DNA, 279 bp, Glycine max
gcagttcaattgatcaactcagatttcagggacctaagtctagctgctaatagactcgcccatcatgccatcaaacttggtggcattggctttggagcctcttttttcggattgtttgctgccattgctgctatttatctgttgattttggatcgtacaaactggaaaacaaatattctcacagcactactcattccatacattttcttcagcttgccttcattaattttcgacgtcttcaggggagagcttggaaaatggattgctgcagttgctgtt

SEQ ID NO: 187574 - DNA, 283 bp, Glycine max
tatctgtctaccgaagcaggaactaaatatggctgacttgttggaatggtcaaagcaagataagaaacgaatgcttcatgtcgtctaccgtgttggtgaccttgatcgcacggtcaaattttacacagaatgtttaggaatgaagcttttgaggcaaagagatatcccagaggagaaatatgctaatgcttttcttggatttggccctgaagaatcgcattttgttgttgaattaacatataattatggggttcctcgtatgacattggcgatggctttggac

SEQ ID NO: 187575 - DNA, 291 bp, Glycine max
  unsure (1)..(291): unsure at all n locations
ctcagattcttccagtgccctcatgacaatttgtccatcaacagaggaacatagtccgaggaacagccaacacatgtatggtagggagttccaatcgatgttggacggactcgacgaggaagggtgtgttgaagaaccggggtatcaatctgagaagaagcgtcgtctaagtgtggatcaagtgaaggcnttggagaagaactttgaggttgaaaacaagcttgaacctgagaggaaggtgaagcttgcccaagaacttnggttgcaacctagacaggtagccgtatngtt

SEQ ID NO: 187576 - DNA, 255 bp, Glycine max
ctcgattcgttccatttcttccaaaatggccaaagacccagttcgcgttctcgtcactggagctgcagggcaaattgggtatgctcttgtccctatgatcgctaggggagtgatgttgggtcctgaccagcccgtgatcctccacatgcttgacattcctccggcagcagagtcattgaatggggttataatggaattggtggatgctgcattccctcttcttaaaggtgttgttgccacaactgatgtggttga

SEQ ID NO: 187577 - DNA, 285 bp, Glycine max
agcattgtttcgctaggaggtccccatatccctcttaaaacaggaagaagggatggtagaaggagcagagccgatgtggtagagcagttcctcccagaccacaatgaatccatttctgcagttcttgacaagtttggtgccatgggaattgacacccccggcgtagttgcattgcttggagcacacagtgttggtcgaacccattgtgtgaagttggtgcaccgtttgtacccagagattgatccagctctgaaccctgaccacgtccctcacattctgaagaag

SEQ ID NO: 187578 - DNA, 283 bp, Glycine max
agattcatgggtcccaactactctatatccacggcttgtgctacttccaattattgcttttatgctgcggcgaaccatattcggagatgggaggctgatttgatgatagccggtgggactgaggctgccattattcctattgggttagggggttttgttgcttgcagagcgctttctcagaggaacgacgaccctaaaaccgcttccaggccatgggataaggaacgtgatggctttgttatgggtgaaggtgctggagttttggtaatggagagcttggagc

SEQ ID NO: 187579 - DNA, 282 bp, Glycine max
cgccgatcacgccctcgccgccttctccggctacatgcagctcggcgacaccttctccatgctcggccaggtcgacagatccatctcctgctacgaccaaggcctccagatccagatccaagccctcggcgactccgatccccgcgtcggtgaaacttgccgatacttagcggatgcaaatgtgcaagcaatgcagtttgataaagcagaggatctgtgtaagaagacgttggagattcatcgcgcacatagtgaaccagcttcgcttggaggagctgcaga

SEQ ID NO: 187580 - DNA, 282 bp, Glycine max
gcaagtgggcagtgtcaagcggtggtcagccttatccaaatggacagatcttacctacctctaatttgaggatcttcacttttgcggagttgaaggctgcgactagaaatttcagagctgatacagtgcttggggagggaggttttggaaaagtttacaagggttggcttgaagaaaaggccacctcaaagactggaagcggagcagttattgccgttaaaaaactcaactctgaaagcttacaaggacttgaagaggggcagtccgaagtaaattttctag

SEQ ID NO: 187581 - DNA, 284 bp, Glycine max
tatcgagccgctcgagccgaaaaactaagttcatttcttgtgctttactttattcctcaaaaacgaacatggcgaacacatgcggcaactgtgactgcgctgacaagactaactgcaccaagggaaacagctatggtgttatagtagagactgagaagagctacatcgagactgttgacatggatgttccagcagctgagcatgatgggaagtgcaagtgtggcactaactgcacttgcacggactgcacttgtggccattaaggaatatgtatgaacatgtaa

SEQ ID NO: 187582 - DNA, 264 bp, Glycine max
ccctcgagccgattcggctcgactccctttctggctttctctctctccaactatcatgtcctaccccgcggctcccgtcctagccatatccaacccccaaaccaccgccgcaggccagcgccatcgaggctccggcgaacaacccggccttccgcgccttcatcaacaacctctccgcgtccctccgacacggcctcgaccagcgccgcccgtggtcggagctcggggaccgctccgcgttctcgaagcccgagtccttctccg

SEQ ID NO: 187583 - DNA, 225 bp, Glycine max
ctcttgcataaagaatggcatcagcaacaataaggaatgcagttgtcacgggagcaaacaaagggataggatttggaatatgcaagcaattggtttctaatggcatcacagtggtgctaacagcaagggatgagaaaaggggtcttgaagctgttgaaaagctgaaagagtttggtgtgtctgatcaagtggtgtttcatcagcttgatgtgactgccccaaaaa

SEQ ID NO: 187584 - DNA, 266 bp, Glycine max
aaaaatgagagaaatcatcagcattcacataggtcaggccgggatccaggttggcaactcctgctgggaactctactgcctggaacatggcatccagcccgatggcatgatgccaagtgactcctccttcggtgtagcccacgacgccttcaacaccttcttcagcgaaaccggatccggcaagcacgtccctcgcgcggtcttcgtcgatctcgagcccaccgtcatcgacgagtccgttgtggcactgccgtcaactcttccac

SEQ ID NO: 187585 - DNA, 262 bp, Glycine max
gaggacttccgtaactatgctgacttttgcttcaagacatttggtgatcgggtgaagcactgggtaaccctaaatgaaccatatggctacagcgtgaatggctacagtggtggaaattttgcaccaggtagatgttctaactacgttggaaaatgccctgctggtgattcttccaccgagccctacattgttaaccaccacttaatacttgctcatggagcagcagtcaattgctacaggaacatataccaggctcatcaga

SEQ ID NO: 187586 - DNA, 247 bp, Glycine max
ctttgattttcttctgcaaccttatctactgcaaagctttgattcactgagtctaacttaccctgccacagtttgccttgtttacctgagctctgtttttaactggtctttgatcaaggatggccataaaggcaattgagttgttgaaaggaagcggaacccatgaagagatattagaagttcttgcaacagtggcagcatctgggggggatataataggatgtgagaacatttgcgggtaaccctt

SEQ ID NO: 187587 - DNA, 269 bp, Glycine max
atggctcccaagggtttaacctttctggctgtgttaatatgcgtttcagcactgtcactgagtccttctgttgcgggggaagggcaaaataatggccttgttatgaacttctacaaggaatcatgccctcaggctgaagacatcatcacagaacaagtcaagcttctctacaagcgccacaagaacactgctttctcctggctcaggaacatcttccatgactgtgctgttcagagttgtgatgcttcactgttgctggactccacaag

SEQ ID NO: 187588 - DNA, 273 bp, Glycine max
  unsure (1)..(273): unsure at all n locations
aagaaaacgtttatgttcctgagaagaaatttcactctttcaagaaggtatctcggtccatgggatatggtgagaatgatatcaccttagtatcttttcaatcagtctccaaaggctaccacggggagtgtgggaaacgaggaggttatatggaggtgactgggttttctgcagaagtgagggaacaaatatataaagtggcatctgtcaacctttggctctaatatctctggtcaaattcttgctagctagtcatgagtcctcctnaggttg

SEQ ID NO: 187589 - DNA, 272 bp, Glycine max
cgacacccccccaaaaatgacaggagagacagtgaacccaaaagcttaccctttggccgatgcgcaactcgcaataacaatactggatcttgtgcaacaagctgccaactacaagcaactcaaaaagggtgctaatgaagcgaccaagacatctgaacagaggcatctctgagttcgttgtgatggccgcggacactgagcctcttgagattcttctccatcttcctctcctagctgaggataagaatgttccctatgtattcgtcccatca

SEQ ID NO: 187590 - DNA, 269 bp, Glycine max
ggggcagagtcaattcatcaattaggagttggatgagagaatggaagccacaacagagcagaacaattcaaaggtggtgctgattgattctttgcaatcttgggagttccatgtcaaccaggcctccaatcagaatagtcctgttgttgttcacttcactgcttcatggtgcatgccatcggtggctatgactcctgtttttgaagaactggcttcaagctatccggatgttctgtttctcactgttgatgttgatgaagtcaaggagg

SEQ ID NO: 187591 - DNA, 269 bp, Glycine max
tgctattctctcgcattccgtggagatctagtgcttctgctgcaagacctcgctgaaaattagggtttcgattcggaggtagacgaagatgttcggaagggctccgaagaaaagcgacagcaccaggtactacgaaatcctcggcgtttccaagaacgcttcgccggatgacttaaagaaggcttacaagaaagccgccattaagaaccatcctgacaaaggcggggatcccgagaagtttaaagagcttgctcaagcctatgaggttc

SEQ ID NO: 187592 - DNA, 172 bp, Glycine max
gcctctcagcatctcgcaacattgactggtcaccaaggacctgtttggcaagtggcatgggctcaccctaagtttggttctctacttgcatcatgttcctatgatggtcgtgtcattgtttggaaggagggtaaccagaatgaatggactcaagctcatgtgtttgatgccc

SEQ ID NO: 187593 - DNA, 183 bp, Glycine max
ggtgaaccaaacagactattagttacatggcagaacgggttgtaggaactggatcatttggaattgttttccaggcaaaatgcttggaaactggggaagcagtggctattaaaaaggttttacaggacagaagatacaagaatcgcgaactacagttaatgcgtgttttggatcatccaaatg

SEQ ID NO: 187594 - DNA, 152 bp, Glycine max
atcccaggtgaggagaaagatggaggggaaggagcaggatgtgtcgttgggagcgaacaagttccccgagagacaggcaattgggacggcggcgcagagccaagacgacggcatggactaccaggcgccggcgccggcgccgctggttgacc

SEQ ID NO: 187595 - DNA, 262 bp, Glycine max
atctgttgagggggtttaatactgaaaatgggacaagtgttaggttgcgtgcaagtggatcagtcaagcttggccatcaaggaggttttcgggaagtacgatgatgttctcgaacctggttgccactgtgtttcatggtgtttcggtagtcgtgtggctggtgctctttctttgcgtgtcaaacagctagatgttcgctgtgaaaccaagactaaggacaatgtctttgtgactgtggttgcttctatccaatatcgagcat

SEQ ID NO: 187596 - DNA, 269 bp, Glycine max
tctcgagccgctcggttgcagaacagaacaaacttctttcactctctcgcttctgaatcttcaacaatggtgctcgaagcgacgatgatctgtatcgacaattctgaatggatgcgtaacggagattactctccttctcgatttcaagctcaagcagacgctgtcaatctcatatgcggtgctaaaacgcagtctaatccggaaaatacagtgggagttctcacaatggctgggaaaggcgttcgtgttttggttacccctaccagtga

SEQ ID NO: 187597 - DNA, 264 bp, Glycine max
gtgggatgctaccctgcattcttggtggaacttcctcataatagttcagacattgacgaatttggatgcttggtttcatacaacaatgcagtactggaatacaacaacatgttgaaagagacattgaggcaaactagagaaagtctttctgatgcttctgtcatttatgtggatgtttacgctgttctgttagagctcttccggcatcccacttctcatgggcttaagtatggtataaaagcatgttgtggatatggagggggt

SEQ ID NO: 187598 - DNA, 248 bp, Glycine max
agggattagggtttaggaagcagcgacaacaatggatttcacagcggagaagaaggaatcagagagcaacaccgaaaatgctcatccaacaactttagattcttcttctcaattggcatcggcacttgattccagcaacaaagaaatcatagaacgacaagctcgtgaactcaaagccggtcttcaccccctcaagcacaagtttgtcttctggtacacgcgccgaacacctggagttcgaaatcaaa

SEQ ID NO: 187599 - DNA, 269 bp, Glycine max
cgggttctggggcaatttttaccggagacactttgttcagcttatcatgtggcaagctcttagaaggaacccccaaacagatgttattctctcttaaaaggatcatgtctttgcctgatgatacaagtatttactgtggtcatgaatatacatcgagtaattcaaagtttgccttgtctatagaacctgaaaacaaggaacttcaatcctatgctgcccatgtagctaaccttagaaataagggcttgcccacgattccaactacggtg

SEQ ID NO: 187600 - DNA, 266 bp, Glycine max
ctaccagaatcttacgaagcttacaggaaacagcagcatagatggcattctgggccaatgcaactgttccgcttgtgtttgcctgatatcatcagggccaagataagtgtgtggaagaaattcaacatgatattcctcttcttccttcttagaaagctgatattgccattctattcattcaccttgttttgtataatcctgcctatgacaatgtttgtgccagaggccgagcttcctgcgtgggttgtgtgttacatccctgctgc

SEQ ID NO: 187601 - DNA, 265 bp, Glycine max
atggtgagcacctccttcatgaggaagcaacctatgacgaccaagagcctaaagacattccccaacgctctttttggtctgaaaggtggacgaggtggtcgtgtaacttgcatggcctcgtacaaggtgaagctcataaccccagaaggagaagtggagtttgaatgcccagatgatgttttcattgttgacaaggctgaggaagaaggcattgaacttccctactcgtgcagggctggttcttgcgtttcatgtgttgggaaaa

SEQ ID NO: 187602 - DNA, 265 bp, Glycine max
ctacttttggacctagacctggacctgctgggcatccaggcaaaccttttgatctctcagcaatgtctggtctgctcaatgatccaagtatcaaggaattggctgaacagatagcaaaagatccatcgttcaatcagatggctgagcagcttcagaaaacttttcaaggagctccacaagatgctatccctagcttcgataatcaacaatatttttcaaccatgcaacaggttatgcagaatcctaattttatgaccatggctga

SEQ ID NO: 187603 - DNA, 266 bp, Glycine max
gccatggctgccaccaccgccaccgccacgtcatacttttttggcacccgcctcaacaacccgacaaccttaaacaacggaagattccacgcgctcctcaacttcggcaaaaagaaggcggcggcgccgcaccgaagaaaaaggaagtgaaagtgaaaccctccggcgaccggctggtgtggtttcctaatgcggagccgccggagtggctcgacggaagcatgatcggcgaccgcgggttcgacccgttcggtttcgcgaacccg

SEQ ID NO: 187604 - DNA, 241 bp, Glycine max
cacaactcagtgaaagagaatccgaggcgaagagaagagaaaaattaagatggaggggaaagagcaggatgagtcgctgggagcgaacaagttcccggagagacagccgattgggacggcggcgcagagccaagacgacggcaaggactaccaggagccggcgccggcgccactggttgacccgacggagtttacgtcatggtccttttgacagagcagggatagcagagtttgtggccac

SEQ ID NO: 187605 - DNA, 261 bp, Glycine max
agcagcccatggatctgggtactgtgaagtccaatctctctaagaacgtgtacgccacgcctgcagatttcgcctctgatgtgagattgacgttcaacaatgcactggcttataaccctaagggtcacgacgtgtacaccatggcggaacagcttctggctaggtttggggaactatatcgcccggtgcatgagaatttcgaaggtggcatagttcatgatcgcgattctggggaggatttgcaagccagttcgtggagcc

SEQ ID NO: 187606 - DNA, 262 bp, Glycine max
tctcgagccgattcggctcgagcgaaaatggcgcagaagaagaaagctagggtttccgacgacgaggaaatggaagtgcaacatgatcaaaccagcctttaccaggttcttggcgtggagagaacggcgtctcagcaggaaataaagaaggcgtactacaagttggcgttgcggcttcaccccgataagaaccctggtgatgatgaggaagctaaggagaaattccagcaactacaaaaagtgatatcgattcgcggggata

SEQ ID NO: 187607 - DNA, 251 bp, Glycine max
gccataccgaattggacaatttcggggttcgttgaatacataaaatcaggacaaaaacagggtgacatgttactggttgtgcccgagggtgactatgcagttagacttggcaacgaagcttccattaagcagaagctgaagctgattaaggggtcgttctactccatcacgttcagtgcagctcgaacctgtgcacaagaggagaagctcaacgtgtcagtggttccaaccaccgagaagggagtgtggga

SEQ ID NO: 187608 - DNA, 232 bp, Glycine max
gctcccagtactttaattgatttctgaatatcatcacttaatttgaaggaaagatggtgagcgtagctgagatccgccaggcacaaagggcagaaggcacagcaaccatccttgccattggaactgcaaacccaccaaactgtgttgatcagagcacctatcatgactactagttcagaatcaccaacagtgagcacatgaccgagctcaaagagagattccagcgcatgtg

SEQ ID NO: 187609 - DNA, 267 bp, Glycine max
gtaagattgaaagtcttctccaaaagctcacatctgtgcgtcctgaagaccagagatcagctgctggcgagatccgccttcttgcaaagcgcaacgcagataaccgcgttgccattgctgaagctggtgcaatacctctccttgttggtcttttgtctgtgcctgactcccgcactcaagaacatgccgtgacagcgatcctgaatctttccatatatgaaaacaacaaaggaagtattgtttcttcaggagcagttccaggtatag

SEQ ID NO: 187610 - DNA, 150 bp, Glycine max
cgaacactgcaggaagagagaaaggcgatggacctcggaacctatgaagtgccagaaggagtggacattctaggaagatacgatgcagagtttgcaaaaatcctcacaaaagacgctttgaaattcgttgctgagctgcaacgtgagttc

SEQ ID NO: 187611 - DNA, 264 bp, Glycine max
gcattgggctacttatgggcgccattattatactcgatatgactatgaaaacgtggatgcaggtgcagcaaaggaactgatggcatatttggtcaagctgcagtcctcactttcagaagtcaatcagattgttaaggggataaggtcagatgtttcgaatgttgtccacggtgatgaatttgagtacaatgatcctgtggatggttccatctcatcacatcagggaatccgatatttgtttgaggatggatcacgattgatttt

SEQ ID NO: 187612 - DNA, 261 bp, Glycine max
catggcctcaagagcagtgttattgttggctatgtgtgtgcttccggcgatggttgtggccattcgcccagcaaagaaccctttttgcgtgaagggtcgtgtctactgtgacccttgccgtgctggttttgagacctcagctaccacctacattgctggtgctgagattatgttgcaatgcaagagcagggttagcaacgaggttgtgtacacgaagaaggggtacaccgactcaaccggagcatacacaatgtacgtgga

SEQ ID NO: 187613 - DNA, 199 bp, Glycine max
cgaaagagagaggcatggccgagcaaaccttcatcatgatcaagccagatggcgttcaaagaggccttattggcgagattattagcagatttgagaggaagggtttttacttgaaagggttgaaactcgttactgtggaccgtccttttgctgagacgcactatgctgatttgtctgaaaagcctttcttaaggggttt

SEQ ID NO: 187614 - DNA, 262 bp, Glycine max
ggcttctgtgcctcaaccaaaaatctcccttctaaccttattcttcttctcttccttcaccatcattgcgaatgcaattgttcctcaaaacgaaaccttacaatttgagaactcaggtgaacttggaccctaaatcgttgagtacggtgcagattacagaatgataagcatcttcaactctccattccaagttggtttctacaacaccaccccaaatgccttcactctagctttgcgtgtagggctccaacgctcggagcag

SEQ ID NO: 187615 - DNA, 265 bp, Glycine max
catacctcaacgaagaggttaaagagacggcaacactttgctgtccgccttgaccgagcagagcttcgtcttggccctcgattttgccctaaagtactctcagtcacaacagacaccgtcgtcgtcgtcgtcgtcatcaatggcaccgaagcagaccaaggctgagaagaagatcgcttacgatgcgaactgtgcgacctaatggaggagtacggccagatcctcgttgtgaactccgataacgtgggatcgaaccagctccaga

SEQ ID NO: 187616 - DNA, 257 bp, Glycine max
cttgttccttttgaaggttagaagtgctacaatacaaacaatggcagctactcaggaagatgtgaagcttttgggtattgtgggaagcccatttgtgtgcagggtccagattgcccttaagttgaagggagttgaatacaaatttttggaagaaaatttgggcaacaagagtgatttgcttctcaaatacaaccctgttcacaagaaggttccagtgtttgttcacaatgagcagcccatagcagagtctcttgtga

SEQ ID NO: 187617 - DNA, 258 bp, Glycine max
gcaaatctcaatcgaatctcagaaaaatgagagaaatcatcagcattcacataggtcaggccgggatccaggtcggaaactcctgctgggaactctactgcctcgaacatggcatccagcccgacggcatgatgccttctgactccaccttcggtgtagcccacgacgccttcaacaccttcttcagcgaaaccggatctggcaagcacgtcccccgtgctgtcttcgtcgacctcgaacccaccgtcatcgacgagg

SEQ ID NO: 187618 - DNA, 263 bp, Glycine max
cgctccacccgaagtggtggcgcgtatggctgcggctaagcaagagtttgaggcacggcaaagatcttcagttggttcaagggaaacttcaaaagaccctgaacttgaccaattcatggaagcatactatgacatgcttgtgaagtatagagaggaattaacaaggcctattcaagaggctatggatttcatgcgaaggatagaaactcagctaaatatgctttgcaatggacccgtgcggatcttctctgatgataaatgtg

SEQ ID NO: 187619 - DNA, 260 bp, Glycine max
gttgcttggtgatgtccctttctgttctcttcactcttggtcttgcgagagaaagccatgccagagacgaagatttttggcatgctgtttggccaaacactcccattccaagttcattgcgagatcttctaaagcctggccctgcaagtgttgaaatcgatgatcaccctatgcaaattgaagaaacacagtacccgaaaaccttcttctataaagaagaccttcatccaggcaaaacaatgaaagtacaattcagcaag

SEQ ID NO: 187620 - DNA, 201 bp, Glycine max
ggcggcacatctgacaatgtcttccgcccggatcgaccggccgaagccgaccttgggtccaaaaagaggggcagtgccccgcttccgattcacggaataagtaaaataacgttaaaagtagtggtatttcactttcgctgtttccagctcccacttatcctacacctctcaagtcatttcacaaagtcggactagagtcaa

SEQ ID NO: 187621 - DNA, 256 bp, Glycine max
atcggaaggaggattagggtttgtggagatgcaagggcaaggcgttgatgaagtgagcatagaagagttggcgtcgaatctttccctctacaaagatcaactgaaccaggttagagaactcttaaacgatgaccctgcaaattctgaatatgttgacatggagagggaactttccgaggtcattgccttgaccgaggaactccttgcaactgcaaagcagcatgaaatctctgctcctcctaataatgctgctgca

SEQ ID NO: 187622 - DNA, 254 bp, Glycine max
gtcgctcactgcaacaacaacaacaacaacaacgaacgccaacgcaaacgcaaacgcgaataagagcgagaacattctcttcagctcaacccttttctttttcgatggctaatcggcacacgattattctaatgcagacctcgcagaacagagcaactaggacgttcatggattatgaatccataactcaggccatggatggcatatgtgcactgtatgaaaggaaactgaaagagttgaatccggctatcaga

SEQ ID NO: 187623 - DNA, 257 bp, Glycine max
cttcggtctcctcctattctccgctgccgtagccaccgtcgaaacaatcgacgatgaagacaaccttctgatccgtcaagtggtgccggacgcggaggaccaccacctgctcaacgcggagcaccacttctccgccttcaagacaaagttcgccaagacctacgccacgcaggaggagcaagaccaccgcttccgtatcttcaagaacaacttgctccgcgccaagtcgcaccagaaattggacccctccgccgtcc

SEQ ID NO: 187624 - DNA, 255 bp, Glycine max
ctttctcagattcttccttcgtggtaaccggtcgaatcatggagcccatggacattgttggcaagtcaaaggaagacgcttcgcttcctaaagcaacaatgacaaaaattattaaagagatgttacccccagatgtacgtgttgcaagagatgcccaagatctattgattgagtgttgtgtagagtttataaaccttgtctcgtcagaatccaatgaagtttgtaacagagaggataaacggacaattgcacctg

SEQ ID NO: 187625 - DNA, 250 bp, Glycine max
  unsure (1)..(250): unsure at all n locations
cttctcctgcttttcagcccttccaaagaaagggtaaaatatgaacattcatgatttatccttgtaaggcggtgacaaaaaataatatagaaaagaagataccaactagaagtggaaacaaggaaaagcgggtggtgactgtatagtataaaataaaattgtgcccatagaaatagaatagtgacagacacactcgtgaatcgtgatttagcatttaccacaccaaaatcaatctgncgggtcagaaagc

SEQ ID NO: 187626 - DNA, 245 bp, Glycine max
gagaaaatggtttcggggtcaggaatctgcgcgaagagggtagttgtggacgcgcggcaccacatgctggggaggctggcatcgatcgtggcgaaggaacttctgaatgggcagaaggtggtggtggtgcgctgcgaggagatttgcatctccggtgggctcgtcaggcagaagatgaagtacttgcgtttcctccgcaagcgcatgaacaccaagccctctcacggccccatccatttccgtgc

SEQ ID NO: 187627 - DNA, 254 bp, Glycine max
gcgaccttgaagagctatggctgtcggaaagaataagaggatttccaagggaaagaagggtggcaagaagaaagccgctgatccctttgccaagaaagactggtacgatatcaaggccccttccctcttccaggtcaagaatattggcaaaaccctcgtctctcgtacccagggaaccaagattgcatccgaagactcaaacatcgggtttttgaggtctcattggctgatctccaaggggatgaagaccactc

SEQ ID NO: 187628 - DNA, 251 bp, Glycine max
  unsure (1)..(251): unsure at all n locations
ttctctctgcattgcttcangttcttctgaaaagatntctcgnntgtatgttggtaacttggattcacgagtcaccgagagagatctcgaagacgaattccgtgttttcggagttattcggagtgtttgggttgcacgtagaccacctggtnatgctttattgactttgatgatcgcagagatgcacaggatgctatccgtgaattggatggtatgtttagaagaattatgttgttggaatgtaatagaat

SEQ ID NO: 187629 - DNA, 255 bp, Glycine max
  unsure (1)..(255): unsure at all n locations
atgaagaggaacagaaaaaccacctcttcggcatcaaagatctcggtcacaagactctccttcagagtgattcnatctatcagtatatacttgaaaccagtgtctatccaagagagcacgagtgcttgaaagagatacgcaagatgactgcaaaacacccactgaacatcatggcaacaccagcagacgaaggacaacttctgagcatgcttgttaagctcacgaattcaaagaacgccttggaaattggtgtat

SEQ ID NO: 187630 - DNA, 253 bp, Glycine max
aacagcagctgcagcagcaatggctcccaaacgaggtggaaaggctccggctcttgccgctaagaagaagcctgagaaggtcacgaatccgttgttcgagaagcgtccgaagcagttcggaatcggaggggcgttgcctccgaagagagacttgactaggttcgtgaagtggccaaagaatgttcaaattcagaggaagaagaggattctgaagcagaggttgaaggttcccccagctttgaaccagtttacc

SEQ ID NO: 187631 - DNA, 252 bp, Glycine max
  unsure (1)..(252): unsure at all n locations
gcnccagcnactcatacaagttttgcatctttacctggaatgtgggaccgaactctaactgtgaatggattttccaagacatttgcaatgnctggttggcggcttgggtacattgctggtacaaaacattttgttgcagcatgcggaaagattcaaagtcagttcacttncaggtgcaagtagtatatctcagaaagctggagttgctgcataggactaggctatgctggtggggaagctgtttcaaccatg

SEQ ID NO: 187632 - DNA, 252 bp, Glycine max
atgggttcttcttcttctatgtggacggtgtgtgtgattttggcatcactggcctctgcagcactctgtgccaacccacgcaggccagtggatgtacaatttggccgaaactacgtgcccacatgggcctttgatcacatcaaatatttcaatggtggttctgacattcagcttcatcttgacaagtacactggtactggcttccagtccaaagggtcttacttgtttggtcacttcagcatgtacataaag

SEQ ID NO: 187633 - DNA, 253 bp, Glycine max
tgtagatattgctattacgttcactggtttatatggggagcatccagatgatgcttataacccaaatgctctacctgtaatagaaaagattacaatcaaggatgtggtaggagaaaatatcaaaactgcaggtcttatagagggtatagaaggtgacaattttgtcaacatttgcctatcaaacatcatccttaatgtgacctcaaactatccatggaactgctcctacgttaaaggatattctgacttggtc

SEQ ID NO: 187634 - DNA, 254 bp, Glycine max
atctcttaaccctatctcaaattcattcagattctcccttcccctttttgatttttcttagaaaactcccaacttcgaatcaatatgaagaaagtggtgctaaaggtggaactccatgatgacaaaatcaagaaaaatgccatgaaggcagtatctggtatttcaggggtagagtcagtctcagtggacatgaaggaccagaaaatgactataattggggatgttgatcctgtaacagtagttggaaagtttac

SEQ ID NO: 187635 - DNA, 251 bp, Glycine max
atggagcactaggcatattgaaagcaggcctaaaagcaaagactgtgaagagggttgtttacacttctagcgcctccaccgtttccttcagcagccttgaagaaaaagatgtggtggatgagagtgtttggagtgatgtggatttgcttaggagtgtgaagccttttagttggtcatatgctgtttcaaaggtgttgtcagagaaggcagttcttgaatttggagaacagaatggattggaagttaccact

SEQ ID NO: 187636 - DNA, 256 bp, Glycine max
  unsure (1)..(256): unsure at all n locations
gcgatactgacgtgcaaatcgttcgtctgacttgggtatatgggcgaaagactagtcgaaccgtctagtagctggttccctccgaagtttccctcaggatagctggagcccgcgggcgagttctatcgggtaaagccaatgattagaggcatcgggggcgcaacgccctcgacctattctcaaactttaaataggtaggacggtgcggctgctctgttgagccgctccatggaatcgagagctccanatgggccat

SEQ ID NO: 187637 - DNA, 252 bp, Glycine max
ggaaagtcttacccaactgtgagtgctgattaccagaaggccgttgagaaggcgaagaagaagctcagaggcttcatcgctgagaagagatgcgctcctctaatgctccgtttggcatggcactctgctggaacctttgacaagggcacgaagaccggtggacccttcggaaccatcaagcaccctgccgaactggctcacagcgctaacaacggtcttgacatcgctgttaggcttttggagccactcaag

SEQ ID NO: 187638 - DNA, 251 bp, Glycine max
cttagccgccgatctctcagggcttgcatcttctcagctgtgaagatgtacacatcaaggaagaaaatccacaaggataaggatgctgaaccaactgaatttgaagagtcagttggacaggcattgtttgatctggaaaataccaatcaggagcttaaaagtgatctgaaggatttatacataaactcagccgtgcaagttgatgtttctggaaaccgcaaggctgttgttattcatgtcccttacagatt

SEQ ID NO: 187639 - DNA, 239 bp, Glycine max
  unsure (1)..(239): unsure at all n locations
gccgcagcacgatgagcagcctcaggaggagaaggatgtctcacaggaagtacgagcacccaaggcacggttcacagggatttcgtcccaggaagcatgcagcacggcacacgggaaaagtgaaggcattccccaaggatgacccatccaaggcacccaagctcactgcattcttgggttacaaggccggtatgactcacattgttagagaggtcgagaagccangatcaaagcttcac

SEQ ID NO: 187640 - DNA, 250 bp, Glycine max
aaaaccctaaccggtaaaacgattacgctagaggtcgagtcctccgacacaatcgataacgtgaaagctaaaattcaagacaaggaaggcattccaccggatcagcagcgtttgatcttcgccggtaaacaactcgaagacggcagaactctcgccgattacaatatccagaaagaatcgacgctccacctcgtcctccgccttcgcggtggcatgcaaatcttcgtcaaaaccctaaccggtaaaacga

SEQ ID NO: 187641 - DNA, 140 bp, Glycine max
gctacatcttgagtggcaaggcttggaacaatctccttgaaaacaagactgccttcaccaccaagaaagactatggtaaagaggagagggaagctcaatgggctcttgctcagaggaccctgcatggacttcaaccacca

SEQ ID NO: 187642 - DNA, 252 bp, Glycine max
accaaagcaaggcgacttggggtttgtactcctgtgctgtatgctgtggatcctgctttgcacacgttaacatttgaatatgttgagggcccttctgtcaaagatgtgtttcttgaattcaggtcacatgttgtcaataaagagtggctggatgatattgcatcccaaattggtgatgcaattggaaagctacatgatggtggtcttattcatggtgatttaacaacatcaaatatgttactgaagagtgat

SEQ ID NO: 187643 - DNA, 248 bp, Glycine max
aagcttccttgtatgcattggagagaagcactgagaaattaagtctaatgaaagtggctactgttatagtaagttgtgctggtagtggagctacaatccttgagcttagagggaaattggtggatcagatggagtggttgcctgtgtcaattgggaaattatctgatgtcactgaaatggacctatctgaaaacagactcatggctcttccaacaaccattgtggagaatacggccttaacaaagctt

SEQ ID NO: 187644 - DNA, 246 bp, Glycine max
cgaaccttattgtcgtatgtacgaagctaagtacccggaggtggacatggcggtgatgatacaggtgaagaacatagcggacatgggggcgtacgtgtcgctgctggagtacaacaacatcgagggcatgatcttgttctcggagctctctcgccgtcgtattcggagtgtgagcagcctcatcaaggttggccgcatcgagccggtgatggtgctccgtgtcgacaaggaaaagggttacatcga

SEQ ID NO: 187645 - DNA, 248 bp, Glycine max
cttgttgctgtgaggaaggagattcaagacgaaactgatagagagactggacgaaccaaacaaatttctactgttcccattcatcttagtatatactctcccaatgttgttaacttgacactcgttgatcttcctgggcttacgaaagtagctgttgagggtcaaccggatagtattgtgaaagacattgaggatatggttcgctcctacattgagaagccgaactgtataattttggccatttcacc

SEQ ID NO: 187646 - DNA, 248 bp, Glycine max
agaagaagttagatttgaaattgaaagagaaacaaacttgggatataagaagaatggctagtggaggaggctatggagacgcgaaccagaaggtagattacgtgttcaaggtggtgctaattggtgattcagcggtggggaagtcgcagatacttgcacgcttcgcgagaaacgagttcagtttggattcaaaggccacaatcggcgtcgagttccaaacgcgcactttggtcattcagcacaagagc

SEQ ID NO: 187647 - DNA, 249 bp, Glycine max
gggcaatgagaaggttcaggatcttctcctcctggatgtcacccctctgtctcttggtttggagactgccggtggtgtgatgactgtcctgatccctaggaacactacaattccaacaaagaaggaacaagttttctcaacatactctgacaaccagcctggtgtgcttatccaggtctttgagggtgaaagagcaaggaccagagataacaatttgttgggcaaatttgagctatctggcattcctcc

SEQ ID NO: 187648 - DNA, 255 bp, Glycine max
ctcgagccgctcgagccgtcttccatgactgctatagccttcctgtttatccttctaatcacttatacagacaacaacagatgcacaatccggggtatgttatggaagacttggcaacaacttaccaacccctcaagaagttgtggccctctacaatcaagccaacattcgcaggatgcgaatctacggtccaagcccagaagtcctcgaagcactaagaggttccaacattgagcttttgctagacattccaaa

SEQ ID NO: 187649 - DNA, 253 bp, Glycine max
acaccctgcttcgtgaatcttagtgcatcaagatctctgtctctctgcaatcgaaaatgagcaagggaccgggtctcttcaccgatatcggcaaaaaatccaaagatcttttgactaaggactacagctccgatcagaaactcaccgtttcctcctacagcgtctccggagtgaccctcacttcaacatctgtgacgaaaggaggactctcaacaggggatgtggcagcactgtacaagtataagaacactgt

SEQ ID NO: 187650 - DNA, 248 bp, Glycine max
gggggctagagtagttgctgtgaagaatgacttggcgaagttgcaacttacttcccctgtgtgcactagcaagggtgagaagattgcacttagtcgacgtgttgagaagcattggcgtcttatcgggtggggacaaatccaagctggaatcactcttgatgtccctcccgccccccatctgagttgaacactgatcacaagaaacaccagcagctataaaaaactgagatgaatttagatatgtggga

SEQ ID NO: 187651 - DNA, 247 bp, Glycine max
atctcttgccaaaagaggttgaaagtgcaagggctgcttatgagagtggcaaagctgcaattccaaacaagatccaagaatgcagatcttacccactgtacaagtttgtgagagaggaattagggactgggttgctaactggagaaaaggtgaggtcaccaggtgaagagtttgacaaattattcacagcaatgtgccaagggaaaattattgatcctcttatggagtgccttggggagtggaatgg

SEQ ID NO: 187652 - DNA, 239 bp, Glycine max
ctccttgaactcgaatattcactatggcagatgaggacgttctgctagatttctggccaagtccatttgggatgagggtcaggattgcacttgctgaaaagggtatcaaatatgagtccaaagaagaggacttgcagaacaagagccctttgctcctcaaaatgaacccggttcacaagaaaatcccggttctcatccacaatggcaaacccatttgtgaatctctcgttgctgttcag

SEQ ID NO: 187653 - DNA, 248 bp, Glycine max
gcaggaggcatcaccattgccacaatggttaaaggtcgccaaggagaacgtgtaagactctacgtcaggggttcaattcttggatacaagaggtccaagtcaaatcaatacccaagcacctccctaatccagattgagaatgtaaactctaaggaagaagttgcgtggtactgtgggaagcgcatggcttacatctacaaagcgaaggtaaagaagaacggaagccactatcgctgcatttggggtaa

SEQ ID NO: 187654 - DNA, 248 bp, Glycine max
cgcaacctctctctcttcttttcttcagttcggtggagggagggagccgtagcagcggaagctctagcttgggtagcgaatcacaatggcgagaggattaaagaagcatctgaagaggcttaatgccccaaagcattggatgcttgacaaactgggtggtgcatttgctcctaagccctcatctggaccacacaaatcgagggaatgcctgccactcatactcattttgcgaaaccggctgaagtatg

SEQ ID NO: 187655 - DNA, 248 bp, Glycine max
gcctgcgtcttacacgaccaagtattttggttgtgaacttggggcccagtcaaaatttgatgagaagaccggcacttctcacgtcaatggagcacatgatactgttacgcttgctggccttcttgagaacttcattaagaaatatgttcagtgttatggttgtggaaatcctgaaactgagatcataatcactaagaaccaaatgatccagctgaaatgcgctgcttgtggttttgtgtctgatgttg

SEQ ID NO: 187656 - DNA, 250 bp, Glycine max
gttaggtagcaagcataagtgtctaaccttagaaacatatctgctacatatcgtgtgcattttggaattgtgccactaaaattctattcatctatggctgcctcatcttatgctatgcaatcaatccttgcaaaccctatgatccgcatttccagcgggtctagggagaaccattttggtgttcctgcttatcacatgagaaggaatgttggcctgagagttaggtccatggctgaggaagagcaaccaa

SEQ ID NO: 187657 - DNA, 269 bp, Glycine max
  unsure (1)..(269): unsure at all n locations
ttcttgagcatatattcagggaagatgcctacttgtctaagctccctgtttccattataaactcttggtatcaacgagaaggttatattaagtcaatggctaacttaattcagaaagagctccagagtttttctgaaccaaaagaggtaatgatatttttcagtgcccatggtgtacctgtncagttacgttgaggaagctggggatccataccgagaccaaatggaggagtgcatctcttgatcatgcaagagttgaaagctagagga

SEQ ID NO: 187658 - DNA, 264 bp, Glycine max
tttgttgctgcagtagttttggtagcatggccatgccatggcacaggctaccaaaggttccctctccgaatgaaaactggctatggtgagcgttcttcggaggtaaaatgcgcaagttttaggcttgcactggaagcacacaacatccgagcctttaaaaccattcctgaagagtgcgttgaaccaacaaaggactacattaatggcgaacaatttagatcagactctaaaacagttaaccaacaagctttcttttatgctagt

SEQ ID NO: 187659 - DNA, 263 bp, Glycine max
agcctgcaagcttcgccgtttgaaacagtgcctcaaccatggcagaacaaacagagaaggcttttctgaagcaaccaaaagtgtttctatgctctaagaaaggtgggaagggaaagaggcctgggaaaggtgggaatcgcttttggaagtcaattgggcttggattcaagactcccagagatgccattgaaggaacctatattgacaagaagtgccccttcactggcaatgtttccattcggggtcgtatcctagccggtact

SEQ ID NO: 187660 - DNA, 260 bp, Glycine max
aggaggaagaagaagaggaaggatgagacctttagacgagaaggagacgagcgcggtgttcgagaagctgttcaaattcgtcggaaacaacctgaagaacatcgtggagaacccctcacacgaaggtcctgattcgaaccctggccgctactgcttccgcctccacaagaacaagatcttctacgccagcgagtccctcgtcaaacgcgccaccaacgtcgcgcgccccaacctcgtctccctcggcacctgcatcggca

SEQ ID NO: 187661 - DNA, 263 bp, Glycine max
gggaagactaaaactaaaaccccactctctttttccgagtcttccagtgaaagaaaggcagcgatggaagaagacttcgacatccccggcggcgaggaaatggatctcggcgaagacgaggtcggcgaggagagggagatcggctctggcggcctcaagaagaagctcctcaaggaaggtcaaggctgggaaacccccgaagtcggtgacgaatccaagttcattacacggggactttgctcgacgggactaagttcgattcg

SEQ ID NO: 187662 - DNA, 268 bp, Glycine max
gcggttcaggtggagttcctggagtttccagcggtggttacttcaccagcctccggcaagacctatttcctcggcggcgcaggggagagaggattgacgattgagggaagttcataaagttcacaggcataggagtatacttggaggataaggcggtgccatcactcgccgctaagtggaagggtaaaacttcagaggagttagttcacaccctccacttctacagggatatcatttcagggccgtttgaaaagctatgtagagggtc

SEQ ID NO: 187663 - DNA, 258 bp, Glycine max
tcttcatgaaactgcaaagaagagagagatgagatacgatgacataaagaaaattgacaaaggaataagacgacacttccatgatgatatcactgtggttgtaatctatcttgatcaccatgcaggctcctctaagcaaactgctgttggctatacaactgccccagttgatattttttccctaaatgcggatgggatgcttggtacagttgcctaagagtgaaattgcttcaaaggatcatacactgacattatttg

SEQ ID NO: 187664 - DNA, 261 bp, Glycine max
ggcacctgcaacactgtctctgtctctcctcctcctgttctcactcagcatcgccgtaaccgttagatcgagcgactacgactacgattgtgtgtacactgcatacgttagaaccggttcggtgttgaagggcggaacggactctaagatcgggctgaagctgtacgacaagtacggctactacatctacattaaaaacctcgaagcatggggcggcttgatgggcaagggctacgactacttcgagcgcggcaacctcga

SEQ ID NO: 187665 - DNA, 144 bp, Glycine max
gtttaatatctgatatgtggaccattggttcacacgatattaaattacttttttaaaggggagagtccaaaacagtagcttgctactgggcctctcatgtgtcgcccttgcgttgcactatagcgtgggcctggcacaccctac

SEQ ID NO: 187666 - DNA, 262 bp, Glycine max
aggggtttgggattggagggattgacgctgcgtctcttcctcttctctttcgatccatccctcattcctaatcctccaatccaaccacctcagcctcacactcacatatacacatatctgaacgcgtatcgtccctcctatggcttcaaagcgcatcctcaaggagctcaaggacttgcagaaagacccaccaacttcttgcagcgctggtccagtagctgaggacatgttccattggcaagcaacaataatgggtcctgct

SEQ ID NO: 187667 - DNA, 260 bp, Glycine max
ctttaatcttgaaactaaacctgaaagcagagaaatgctatcaaggtcatcacttcttgctgaactggcatccaagggtgtgatgtcttgtgtgactcaggaagtgaaggacatttaccatcttttggaacatgagttttatccctctgatcttgcattaaaagcgctgcccttaataactaaaatctctaagttagggggtaagctttctactgcatcatctgttccagaggtgcaattagctcagtatgttccagcac

SEQ ID NO: 187668 - DNA, 262 bp, Glycine max
cggctcgaactcgagcgaatcggctcgagatttccatttcctctctctcagtacccaagaatactaaactatgggaaagtcttacccaaccgtgaacgctgattaccagaaggccgttgagaaggcgaagaagaagctcagaggcttcatcgctgagaagagatgcgctcctctaatgctccgtttggcatggcactctgctggaacttacgacgtgagctcgaagaccggtggtcccttcggaaccataaagcacccctcc

SEQ ID NO: 187669 - DNA, 259 bp, Glycine max
gggggcactggctctggtcttggttcccttttgctggaacgtctttcagtggactatggcaagaagtccaagcttggtttcactgtctatccttcaccccaagtttcaacctctgttgttgagccttacaacagtgtcctctccactcattcccttcttgagcacactgatgtggctgtcctgctcgacaacgaagccatttatgacatctgcagacgttcacttgacattgagaggccaacctacaccaaccttaatc

SEQ ID NO: 187670 - DNA, 260 bp, Glycine max
gcagatttgagccttgtggtctcattcagttacaagctatgcgctatggatctgtaccaattgttacctcaacaggtggattagttgacactgtcaaagaaggcttcactggatttcagatgggtgccttcaatgttgaatgtgatgctgtggatccggctgatgtggatgctatatcaaagactgtcaaaagggcccttgcagtctatggaactccagcttttacagaaattatcaagaactgcatggctcaagatctt

SEQ ID NO: 187671 - DNA, 259 bp, Glycine max
gcgaaagtgaaataccactacttttaacgttattttacttattccgtgaatcggaagccgggcactgcccctctttttggacccaaggtcggcttcggccggtcgatccgggcggaagacattgtcaggtggggagtttggctggggcggcacatctgttaaaagataacgcaggtgtcctaagatgagctcaacgagaacagaaatctcgtgtggaacaaaagggtaaaagctcgtttgattctgatttccagtacga

SEQ ID NO: 187672 - DNA, 257 bp, Glycine max
cctcgagccgattcggctcgaggttcccatggaggtgatgggtacgatgcttggagaatacgtggacgagtacaccgttcgtgtggttgatgtcttcgcaatgccgcagagtggcactggtgttagtgttgaggctgttgatcacgtttttcagactaatatgcttgacatgctcaaacaaactggaagaccagaaatggttgttggttggtaccattcccatcctggatttggctgttggctctctggtgttgaca

SEQ ID NO: 187673 - DNA, 257 bp, Glycine max
atccttctctgttctcctagaacttgattacttgaacattccctatgacagatgaggtggttcttctggatttctggccaagtccatttgggatgagggtcaggattgcacttgctgaaaagggtatcgaatatgagtacaaagaagaggacttgaggaacaagagtcctcttctcttacaaatgaacccggttcacaagaagattccggttctcatccacaatggcaaacccatttccgaatccctcattgctgtt

SEQ ID NO: 187674 - DNA, 258 bp, Glycine max
ctctcagctgtctttttaatcccccttttctcattttcccttttgcaattttcactaacagtccttctttctatcttagctctcagaaacttcaataacaatgaagaaagttgtgttgaaggtggaagtacatgatgacaaaatcacgcaaaaagctatgaaggttgtctctggcatttcaggggttgagtcagtttctgtggacatgaaagacaagaaattgaccgtaattggggacattgatccagtaaaagtagc

SEQ ID NO: 187675 - DNA, 264 bp, Glycine max
cgcatcgcttcggattatctagatctaaagaactagtcaaaacaaaaaaaaacataaaaaaagatatattatagcaactgaactattgtgaagcataaaagaacaaaaatcttatttagttgtaaagcaataaaaatatacagataaatgaagaggtgaaagaaagagagaaaaaaaatcaatgatatagaattctaatatgtaaaggtctatgggttatctcataaaaggtagtgtaataaagcatcaatctaaatcaattca

SEQ ID NO: 187676 - DNA, 258 bp, Glycine max
caagagaagagatggtggataaacatgcagctattcggggtacctttggctatcttgaccccgagtatatatcttccggaacattcactaagaaaagtgatgtatacagttttggggtgttgctctttgaaattatagctggcaggaatcctcagcagggtcttatggaatacgttgagcttgtaagatctctttctctcccttcaaaccatattgaggacaatggttgtggttgttacttttgggagatatatagtg

SEQ ID NO: 187677 - DNA, 252 bp, Glycine max
aaattttctcccccaaatcgtagatctacggttaaattggtgtagtgtggtaagatgggtggaggatttagagtgcttcacttagttaggccatttctctcgtttcttcctgaagttcaaactgctgacaggaaagtgccatttagagagaaggtcatatacactgtgatctctcttttcattttcctggtttgtagtcagctccctctatatgggatacacgcaacaacaggtgctgatccattctattgg

SEQ ID NO: 187678 - DNA, 275 bp, Glycine max
tcggctccagcgcacggaaaaatttttgaatgtgaaggtttcaagtacataaaggaatgttttgaaaatggcacattgcatctcattgggctactgagtgatggtggagttcactccagacttgatcagttgcagttgttgcttaaaggagttagtgagcgaggtgttaaaagagtccgtgtccatattcttacagatggccgtgatgttttggatggctcaagtgtggggtttgtggaaacccttgaaaatgatcttgcaaacttgcgcgcaaa

SEQ ID NO: 187679 - DNA, 257 bp, Glycine max
cttaagttcattccttgtgttttgctttcttcctcaaaaccaaacatgtcgaacacatgcggcaactgcgactgcgctgacaagactagctgcaccaagggaaacagctatggtgttattgtagagactgagaagagttacatcgagactgttgtcatggatgttccagcagctgagcatgatgggaagtgcaagtgtggcactaactgcacttgcacggactgcacctgtggccattaaggaatatgtatgaaaat

SEQ ID NO: 187680 - DNA, 253 bp, Glycine max
gaaaaactctgtaaacatgttggtttaccaggacctccttacaggtgatgagcttctctctgactccttccgttacaaggaaattgagaatggaatgctgtgggaagttgaggggaagtgggttgttaaaggagcagttgatgtagacattggtgcaaacccttctgctgagggtggaggagaagatgagggagttgatgatgcagctgttaaggttgttgacattgttgacacattcagacttcaggagcaa

SEQ ID NO: 187681 - DNA, 254 bp, Glycine max
gcgaatcccaccactggatgccagaagaagctcgagatcgacgacgatctgaaactgcgagcattttgggacaagaggatctcacaggaggtcatcggagatgcactcggtgaggaatttaagggctatgtcttcaaaattaccggaggttgtgacaaacaaggatttccaatgaagcagggagtgctgactcctggtcgtgttagacttttgcttcacaggggaactccttgcttccgtggatatggaaggcg

SEQ ID NO: 187682 - DNA, 256 bp, Glycine max
gcgtgacaccaccaaaaaccgaactgttcccagatctctctctctctctctctcttccaacaatccaaatccaactccaaaaccctaccaacaccacactcaatcgatcgatggggcagaagtctctgatctacgcgttcgtgtcgcggggaactgtgattctcgcggagtacacggaattcagcggaaacttcaactccatcgccttccagtgccttcagaagctccctgccaccaacaacaagttcacctacaa

SEQ ID NO: 187683 - DNA, 252 bp, Glycine max
tgcaggaggagcagcctcttcaggtggcaaggtgcacaaagattataaacccaaattctgaagatgccaagtatgttatcaatgtgaagcagattgcaaagtttgttgttgggctaggagacaaggtttcccccactgacatagaggaagggatgcgtgttggggttgatagaaataaatatcagattcagattcctttgcctccaaaaattgatccaagtgtgaccatgatgactgttgaagagaagccag

SEQ ID NO: 187684 - DNA, 251 bp, Glycine max
caccggtattgccggtttcattggcacccacaccgtcgttcagcttctcaaagctggcttcagcgtttcaataatcgacaatttcgataactccgtcatgccagcagtggaccgcgtccgccaagtggttggccctctgctttctcagaacctccaattcacccagggcgatctccggaatagggatgacttggagaaactcttctccaaaacaacatttgatcccgtgatccactttgctggcttgaaag

SEQ ID NO: 187685 - DNA, 255 bp, Glycine max
gtgaacaagaggatggctacgacggggaagaaggaagggaacaacttgctagggttgccgaatttcacagaattaggaaacgggcgtttcaagtgcttagaaacagggcacgaggtcctctcgaaggacatagcgtcctactcgcacagcaaaaaatgccgtttgggtctcatcgatttcgccttgtccaataacaaaccccctctcaacatgttcaaacaacaccctctctgccgttcaaagttgatatgtaag

SEQ ID NO: 187686 - DNA, 252 bp, Glycine max
caaaaatctcccttctaaccttattcttcttctcttccttcaccatcattgcgcatgcaattgttcctcaaaacgaaaccttcaaatttgagaactcaggtgaacttggaccctacatcgttgagtacggtgcagattacagaatgataagcatcttcaactctccattccaagttggtttctacaacaccaccccaaatgccttcactctagctttgcgtgtagggctccaacgctcggagcagctatttc

SEQ ID NO: 187687 - DNA, 249 bp, Glycine max
cgtccctccttcctctgccttataattcttgtgaccttttcgctggtagcattgaaagtgcaccagcaaacgtgaagccaagctcgtatgctgcacccgtcaataggagtgtttttccttctggttttctatttggaataggctctgcagcttaccagatagaaggagcagcagctatagatggcagaggaccaagtatatgggacacctatactaaacagcaaccagggaagatttgggatcatagtg

SEQ ID NO: 187688 - DNA, 249 bp, Glycine max
atttccatccacattggccaggccggcattcaggtcggaaatgcttgctgggagctttattgcctcgagcatgccattcaggctgatgggcagatgccgagtgataagaccataggtggtggtgacgatgttttcaacaccttcttcagcgagaccggtgccggaaagcacgtgcctcgtgcagttttcgtggatctcgagcccactgtcattgatgaaatcagaactggcacataccgccaattgttc

SEQ ID NO: 187689 - DNA, 257 bp, Glycine max
cgaggatgctgaagagaagaaagaaaagaagaaaaaggaaaagaaagacaaggatgacaaaactgatgtagagaaggtcaaggggaaagaagacaaagagaagaagaaaaaggaaaagaaagtcaaggatgacaaaactgatgctgagaaggtcaaggggaaagaagatgatggggaggacaatgaagagaaggaggaaaagaaaaaaaaagaaaaagaaggaaaaggatgacaaaattgatgtagagaaggtcaag

SEQ ID NO: 187690 - DNA, 252 bp, Glycine max
gccaaggtcctgaatctcacagagacagagagaatgagtacggtgggagaagggaaggtgagtagtaatggtcatggatgttgcaaatcagggccaggctatgcttccccactggaagccatttctggtcccagagagtctctcatttatgtaacctctgtctacacagggaccggaatagagaagccagactatttggcgacagtggatgtggatccaaactctccaacttattccaaagtcatccatagg

SEQ ID NO: 187691 - DNA, 251 bp, Glycine max
gttcatatatctctctgctcttctcttctcttctacctctcaagtttttgaagtataaagatggcagagacattcctattcacctcggagtcagtgaacgagggacaccctgataagctctgcgaccaaatctccgatgctgtcctcgacgcttgcctcgaacaggacccagacagcaaggttgcctgcgaaacatgcaccaagaccaacttggtcatggtcttcggagagatcaccaccaaggccaacgt

SEQ ID NO: 187692 - DNA, 252 bp, Glycine max
gttgttctgtgtttgtgtttgtcttttctctcacctgaaaatgtcttgctgcggtggtaactgtggttgcggaagctcctgcaagtgcggcaacggctgcggaggctgcaagatgtacccagacttgagctacactgagtcaaccaccaccgagaccttggtcatgggagtggcacctgttaaggctcaatttgagggtgctgaaatgggtgtgcccgctgagaacgatggctgcaaatgtggaccaaactg

SEQ ID NO: 187693 - DNA, 254 bp, Glycine max
ctgacccagaaagggatcagagaactgtttttgcctaccagatgccgttaaaagcaacagagagagatgtgtatgagttcttttcaaaagctggcaaggtgagagatgtccgtctgatcatggataggaactcaagacgatctaaaggagttgggtatattgaattttatgatgcgatgtcagtgccaatggctattgctctctctggccaacgtcttcttgggcaacctgtaatggtgaaacttctgaagctg

SEQ ID NO: 187694 - DNA, 257 bp, Glycine max
gtcggttcttccttctcaaatattcttgagatccccattttctccgaagcaaagccatggctaagggtcctggtctctactctgacatcggcaagaaagctagggatctgctgttcaaggactaccacagtgaccagaagttcaccatcaccacctactcaccgactggagtggctattacagcatcaggaaccaggaaaagtgaactgtttctggctgatgtcaacacccagttgaagaacaaaaacatcactact

SEQ ID NO: 187695 - DNA, 192 bp, Glycine max
cgaatatcttgttgtttggagcgatccgagaaaaactctgtaaacatgttggtttaccaggacctccttacaggtgatgagcttctctctgactccttccgttacaaggaaattgagaatggaatgctgtgggaagttgaggggaagtgggttgttaaaggagcagttgatgtagacattggtgcaaaccct

SEQ ID NO: 187696 - DNA, 129 bp, Glycine max
ccgtaaccatgtctcagactgttgtcctcaaagttggtatgtcatgtgaaggatgtgttggagcagtgaagagagttctaggaaaattggatggtgtggaatcatatgacattgatttgaaggaacaaa

SEQ ID NO: 187697 - DNA, 257 bp, Glycine max
cgaagccttcaccgcattgcaaccatgtcgagaagaaaggttagagagccaaaagaagaaaacgtgactctgggcccagctgttagagatggcgaacatgtctttggcgtcgctcgcatctttgcctccttcaatgataccttcattcatgtcactgatctgtccgggagggaaacacttgtacgcatcacaggtggaatgaaggttaaggctgacagggatgaatcgtctccctatgcttttatgcttgctgcaca

SEQ ID NO: 187698 - DNA, 256 bp, Glycine max
gaacgcgaagtccatcacaacgacatatttatattcggcatagataacaccgtactctctaatatcccatactatgaaaaacatggatatggggtggaggaatttaatgaaaccttatatgatgaatgggttaacaagggcgacgcaccggcattgccagagactcttaaaaattacaacaagctgttgtctcttggcttcaagattgtattcttgtcaggaagatatcttgacaaaatggccgtaacagaagcaa

SEQ ID NO: 187699 - DNA, 169 bp, Glycine max
gttagaatggctgctgctattgaaatctccacaatagtgtttccaaactcctctgcccaacagaggatgccagtggttggaatgggatctgcccctgacttcacatgcaagaaagacacaaaggaggctatcattgaggccgtgaaacagggttacagacacttcgaca

SEQ ID NO: 187700 - DNA, 125 bp, Glycine max
gccagactttacttccaacaactcatctctgatgtggacttctgccacagccgcggcgtctaccaccgtgacctcaagccagagaaccttctcctcgacgacgacggcaacctcaaggtcaccga

SEQ ID NO: 187701 - DNA, 149 bp, Glycine max
gtcctcaactagtacttttacagagaactagaaatattgacaatttgactggacaatatgtctttcttcttggtgcatacagagcactatacattctcaactggatctaccgctactttaccgagcctcactttgtccattggataaca

SEQ ID NO: 187702 - DNA, 148 bp, Glycine max
gtgggccccaccctgaaggacgaggtgatgaagatcacgccggtccagaagcagacccgggccgtgcagagaacccgtttcaaggccttcgtggtcgtcggcgacaacaacggccacgtgggtctaggcgtgaagtgcagcaaggaat

SEQ ID NO: 187703 - DNA, 223 bp, Glycine max
gggatttgagggttgtgtagctctagaagaactgtacttgagccataatggtattgcaaaaatggaagggttgtcatcgttggtcaatcttcgggttttagatgtatcatcaaataagataacttcagtggatgacattgtgaacctgacaaaattggaagatttgtggcttaatgataaccaaatagcatcacttgaaggaattgctgaggcagtctctggt

SEQ ID NO: 187704 - DNA, 209 bp, Glycine max
gcgatttgaaaatatgcgactttgggcttgcacgaactaatggagttgatggccagtttatgacagagtatgttgtcactcgctggtatcgtgcaccggagctcttgttatgctgtgacaattacggaacctctattgatgtctggtcagtagggtgcatttttgctgagattcttggtagaaagccaatcttccctgggactgagtgt

SEQ ID NO: 187705 - DNA, 243 bp, Glycine max
cctctgtccaagctatctatgtgcctgctgatgacttgacagatcctgctcctgctaccacttttgctcacttggatgccacaacagtgttatcacgacagatctccgagcttggtatctatcctgctgttgaccccttggattctacatctcgtatgctttccccccttattttgggtgcggatcactatgaaactgctcgtggtgtacagaaagtacttcagaactacaagaatcttcaag

SEQ ID NO: 187706 - DNA, 200 bp, Glycine max
gggcagcactagcagctatgtttcaagcagcagcagcagcaaatggctgggcttcgtggcggccgtgtggattcaatgcatctccggcaacaactacactttctcaaactactccgacgccctcaaatccctcatgcacctcactcagctccaactcaacaaccttctccgtcgctaaaaaacgttggaaaagcctttgg

SEQ ID NO: 187707 - DNA, 246 bp, Glycine max
gaaagatggaggggaaggagcaggatgtgtcgttgggagcgaacaagttccccgagagacagccaattgggacggcggcgcagagccaagacgacggcaaggactaccaggagccggcgccggcgccgctggttgacccgacggagtttacgtcatggtcgttttacagagcagggatagcagattttgtggccacttttctgtttctctacatcactgtcttaaccgttatgggagtcgccgggg

SEQ ID NO: 187708 - DNA, 199 bp, Glycine max
atcttctccgatctcctcaaactctatcaacgcagaaccaagcctctatcaccatggggaagacacatggaatgggagctgcccgcaagctgaagtctcaccgtaggagacaaaggtgggctgacaagtcatacaaaaagtctcatctgggaaatgaatggaagaagccttttgctggttcatcccatgccaagggtat

SEQ ID NO: 187709 - DNA, 251 bp, Glycine max
ctatcccatggttttggtccaagtcccaatgtacaacgaaagagcggtttatcagctatcaatcggtgctgcttggcctttcttggccttcagacagaatcatcatacaagttcttgatgattctactaacccaacaatcaaggagctggtgcaaatggaatgtagtagatgggcgagcaaaggggtgaacataaagtacgaggtgagggacaacagagacgggtacaaagcaggggctctgaaagaaggc

SEQ ID NO: 187710 - DNA, 197 bp, Glycine max
atcggaactctttgactgctccagtggcagttccaagcacaagaagcgcaacaattgcagacggtggaggtgaaagtgaagatggactgcgaaggatgcgagaggaaagtgaggaaggcggtggaggggatgaaaggcgtgaaccaggtggatgtggagcgtaaggccaacaaagtcactgtggtcggctacgtcga

SEQ ID NO: 187711 - DNA, 208 bp, Glycine max
ggcatcgatcaaaaccacggatatacattggatgcatgaacatctgggcctgtcctatcccaaaaaggggtaaggtaccatgaacctgagtactggaagtttggagaggctggaaacagatacttccgtcatgccacaggacagttgtatgccatttcaaacgatttggctacatacatatcaattaaccagattgttcttcaaaagt

SEQ ID NO: 187712 - DNA, 249 bp, Glycine max
gaacaagttcaacggcacgaatatcatgttgtttggagcgacccgagaaaactctgtaaacatgctggtttaccaggacctccctaacaggtgatgaagcactctccgactccttccgttacaaggaaattgagaatggaatgctgtgggaagttgacgggaagtgggttgttaaaggagcagttgatgtagacattggtgcaaacccttctgctgagggtggaggagaagatgagggagttgatgatg

SEQ ID NO: 187713 - DNA, 210 bp, Glycine max
gttaggtagcaagcataagtgtctaaccttagaaacatatctgctacatatcgtgtgcattttggaattgtgccactaaaattctattcatctatggctgcctcatcttatgctatgcaatcaatccttgcaaaccctatgatccgcatttccagcgggtctagggagaaccattttggtgttcctgcttatcacatgagaaggaatgtt

SEQ ID NO: 187714 - DNA, 181 bp, Glycine max
ttcggctcgagcgtaatgtggatcttgaggtttaaatttatccgccagacagtactagatgtatgctacccgatggatgttgatcaacccattgatccaaatgaaccgacatactgtgtttgtcatcaggtatcttttggagatatgattgcttgtgacaatgaaaattgccaaggaggtg

SEQ ID NO: 187715 - DNA, 203 bp, Glycine max
ctcgagccgctcgaggcttttaaagggttgcgtgaaatcgggactggggttttgctgtccgttggaggtgctattttcatcaatgtgtttctcagtcagagtactcgtcccggaaagtttccatctatactttttccaattgaaattaaaaatatccaacgcggcaaacacggcagtgacactggagtctacgatactgaagg

SEQ ID NO: 187716 - DNA, 256 bp, Glycine max
  unsure (1)..(256): unsure at all n locations
attcttggttacactgaagatgatgtggtctccaccgactttgttggtgataacagatcaagtatttttnatgcaaaggctggaattgcattgaataagaattttgtgaagcttgtctcttggtatgacaacgagtggggatacagttcacgtgtcattgacctgcttgnaatcgttgccaagaagtctttnaaatnagggngntccaaaaattnaggggcgggccaaaccngcaattaagtncccncccnaaaaa

SEQ ID NO: 187717 - DNA, 216 bp, Glycine max
ggcactttagccggccaacttttctttggatggcttggtgacaagttgggaaggaaaagggtttatggctctcaactcttatgcttatggttctgtgttccattgcctcgggactctcttttggcgacacccctaagggtgtcatggccacactttgtttcttcagattctggcttggctttgggattggtggtgactaccctctatcggctacaa

SEQ ID NO: 187718 - DNA, 207 bp, Glycine max
ggacattctaggaagatacgatgcagagtttgcaaaaatcctcacaaaagacgcttagaaattcgttgctgagctgcaacgtgagttcaggagcgatatcaagcatgcattagagagcagaagagaggcaaagaagaagtacaatgaagggactcttccggggtttgatcctgccaccagtcacattagagaccaggagtggctgtg

SEQ ID NO: 187719 - DNA, 187 bp, Glycine max
tctctctctctctctctagaaaccctattgcacgttttgcaatcgaactcgacaatggccaacagcaacctccctcgaagaatcatcaaggaaacgcagcgtttgctcagtgagccagcacctggtattagtgcctccccctctgaagagaatatgcgatatttaaatgtgatgatcctggggccaa

SEQ ID NO: 187720 - DNA, 257 bp, Glycine max
cttgggtaggcctggtggtattgctgtgtttgattgtcacggccatcgccgaacaatgcggtcgtcaagctggcgggcagacatgtcccaacaactatgctgcagccagtacggttggtgtgggaacacggaggaatactgttccccttctaggaactgcaagagcactggtggggaggcggcggcggtggcagtggcgcggcggcggtgaaagtgttctaatgtcgggccacatatcattactatgagccagagca

SEQ ID NO: 187721 - DNA, 267 bp, Glycine max
atataacccaggttgcgcttgttcatggaatttcaatgggtggaggtgcagctttgatggtcccattgaagttctcagttgtaacagaaaaaactgtttttgccactcctgaagcaagttttggatttcatattgattgtggcttctcatactaccactatcgtttaccagggcatttaggagaatacttggcacttactggaggaacgttgagtgggaaggaaatagttgctggtggactggcaacccattttgtcccttttgaga

SEQ ID NO: 187722 - DNA, 272 bp, Glycine max
taggattcatctgaaagcagctccaaggaggaaagcgaagatgaagatgctgataaaagtgaagatgaagaaaaaaagcctaagacaaagacagtgaaggaaacaacttatgagtgggaacttttaaatgatgtgaaagctatatggctgaggaatccaaaagaggttacagaagaagaatacaccaaattctaccactctcttgccaaggatttcagtgatgagaaacctttagcatggagtcatttcactgctgagggtgatgttgagtt

SEQ ID NO: 187723 - DNA, 264 bp, Glycine max
atgaaatcccttgttgccttctgacccttaccagatagctcaggctagattctgggctgactttgttgacaataaggtacccttctgttcttcaagctttttatgctttgattgttacttgtaattcctttaccattgattttgtattatgcatttagcgtttgatgatgtaatttggttgttttattcccatgttgctccctatttttaactcttacccgtatctagatgtagtatggactatgagatatgtttaatccaagg

SEQ ID NO: 187724 - DNA, 267 bp, Glycine max
gtagcctgcttgattgacacaggcgatgaactccttgtcactgaattaatgtttaatggtacttttaatgaccttgaccatcatcaagttgctgcccttgcaagttgtttcataccaggagataagtcaactgagcagatacaattgagaacagagcttgctaggcctctgcaacagcttcaagatagtgcaagaaggatagctgagatacaacatgaatgcaaattggatataaatgtgaatgagtatgtggattcaaccgtaaga

SEQ ID NO: 187725 - DNA, 266 bp, Glycine max
tgatccgagaaaaactctgtaaacatggcggtttaccaggacctccttacaggtgatgagcttctctctgactccttccgttacaaggaaattgagaatggaatgctgtgggaagttgaggggaagtgggttgttaaaggagcagttgatgtagacattggtgcaaacccttctgctgagggtggaggagaagatgagggagttgatgatgcagctgttaaggttgttgacattgttgacacattcagacttcaggagcaacccgc

SEQ ID NO: 187726 - DNA, 260 bp, Glycine max
ttcgagccgctcagacatggcatctcaaggtttgtgtccttcgataaaaaatattcatcttatggactctgaagggaagcgtgtggcagtcaagtattactcagatgagtggccaacaaacaatgcaaagttagcttttgagaagtttgtaattactaagactgttaagacaaatgctcgtacggaagctgaggtaacactacttgagagcatatcattattgacaatttgtaaagaccgcattctttgtcacggtggtg

SEQ ID NO: 187727 - DNA, 272 bp, Glycine max
tctacccgccgctcgatgggaattgcgcttcaaggcgtctcgtagggctaatccgcctcacgagggtcaccaacggcacgtgcctttggggggccgaggccccctactgctggtcggcaaacggacggcgggcgcacgcgtcgcttctagcccggattctgacttagaggcgttcagtcataatccaacgcacggtagcttcgcgccactggcttttcaaccaagcgcgatgaccaattgtgcgaatcaacggttcctctcgtactaggttg

SEQ ID NO: 187728 - DNA, 272 bp, Glycine max
cttcgagccgtccttaagctcatcaatgccaagaacaccatggaaattggtgtctacactggatattcacttcttgccaccgctctcgctcttcctgaagatggaaagatcttggccatggatattaacagggagaattatgaattgggtttgccagtaattaagaaagctggtgttgaccacaaaattgaattcagagaaggtcctgctctcccagttcttgatgaaatggttaaagatgagaagaaccatgggagctatgacttcatctt

SEQ ID NO: 187729 - DNA, 274 bp, Glycine max
ttcgagccgctctcttcaaaatggccgttaccttctcaaatctccacacagaatcaggtctcttgtccctcgacgacttcctctctgggaaggtctacgtttctggggatcagttcacaaaggacgacatcaaagtgtatggtgctgttttggagaagccaggtgactcttttcccaatgctgccaagttgtacgaggttgtctcatctcagcttgctgcaagcttccccggcaatgctcaaggggtgagattcagtggcaaagcttctgctcc

SEQ ID NO: 187730 - DNA, 276 bp, Glycine max
gggagctctgccgcctccaacaaaacagagttcagaacacaaaccctcgaaccgaacgtttttgagggttgatagagcacgatggttcagtacaattttaagaagattaccgtggtgccaaatgggaaggatgtggtcgacattatcctctctcgcacccagcgtcagacaccaaccgttgtgcacaaaggatatgcgatttcacggctgcgccaattctacatgcgcaaagtgaagtatactcagcagaattttcacgacaagctctccaccata

SEQ ID NO: 187731 - DNA, 246 bp, Glycine max
cgtaagaactcggctcgatctcgagccgattcggctcgagggtgattggaatggtgctggtgcattcacaaactacagcaccaagtccatgagagaagatggtggctatgaagtgatcaaagcagcaattgacaagttggggaagaagcacaaggagcacattgctgcttatggagaaggcaacgaacgtcgtttgacaggacgccacgaaaccgctgacatcaacaccttcatatggggagttgc

SEQ ID NO: 187732 - DNA, 270 bp, Glycine max
cactgtgtgtgagggtgtgtcttccataatctctcttaatggaacagttgaagccaagtgctgttaactcttctcctctcactccactcaccttcttggacagagcagccaccgtttacggcgatgtcccttccgttgtttataacgacacaaccttcacgtggtctcagacgcgccgccgatgcctccagctggcctctgccctcgcctccctcggcatcggccgcagccacgtcgtctccgtcgtggcccccaacatccccgccatgt

SEQ ID NO: 187733 - DNA, 270 bp, Glycine max
tgccaaaaaggcctataaaggtatatatataccttcttttttttctgatcaggattcaaaccctagatcagttttaattagtttcctagttacattcatagtgtgcaagaatgggaaacagcttaaggtgttgtttggcttgtgttcttccatgtggagctctagacttgattcgaatagtccatttgaatggctatgtggaagagattacacgtccaatcacagcaggagaggttctcaaagcaaaccctaaccatgttctaagcaaac

SEQ ID NO: 187734 - DNA, 268 bp, Glycine max
gtaagattacgcgggatagggatcgtgatattagtgaaaaggttgctcttggtatggcctctactaaaccagggactgaggttatgtatgatgagagactgtttaaccaggataagggaattgcgtctgggtttgccaccgatgatcagtacaatgtgtatgagcatgggctgtttactgcccagccaacgctgtccactttgtataggccaaagaagaatcttgatgatgagacttatggaggtgctgatgagcagttggagaagat

SEQ ID NO: 187735 - DNA, 269 bp, Glycine max
ctactactcactcactgcagatctcaattgcatcgctgtccatggctaccatcgttagcatcaaggcccgccagatcttcgacagtcgtggcaatccaactgtcgaggtggatttgacttgctccgatggtacttttgccagagctgctgttccaagtggtgcatccactgggatttatgaggcccttgaattgagagatggaggatctgactaccttggaaagggtgtatcaaaggctgttgacaatgtgaacaccgtcattggccct

SEQ ID NO: 187736 - DNA, 281 bp, Glycine max
aaagctcgatctcgtgccgctcgagccgcaaaaatctcccttctaaccttattcttcttctcttccttcaccatcattgcgcttgcaattgttcctcaaaacgaaaccttcaaatttgagaactcaggtgaacttggaccctacatcgttgagtacggtgcagattacagaatgataagcatcttcaactctccattccaagttggtttctacaacaccaccccaaatgccttcactctagctttgcgtgtagggctccaacgctcggagcagctatttcg

SEQ ID NO: 187737 - DNA, 271 bp, Glycine max
  unsure (1)..(271): unsure at all n locations
tgntactacttctattgagtctctctgtcgtggctattcctcagaatttgcttcatacttccattggtgccggtcatggaggtttgatgataaaccagattatgcttatttgaaaagacttctacgtgaccttttcattcgtgaaggattccagtttgattatgtctttgattggaccattttgaaatatcagcaatcttcaagtgccactgcccctgcccgtgctattggtccggccgctggaccaagttcaggtgtgccaccactggtt

SEQ ID NO: 187738 - DNA, 273 bp, Glycine max
ttcgagccgagaaagctaagatcgagctgtcttcaacgtctcaaactgagatcaacctgccattcatcactgctgatgcatctggtgcaaagcatctgaacataacattgacaagatcgaagtttgaggctttggtgaatcacttgattgaaaggaccaaggcaccatgtaaaagctgcttgaaggatgctaacatctctatcaaggatgttgatgaggttcttcttgttgtatggatgactcgagttcctaaagtccaagaggtggtttcag

SEQ ID NO: 187739 - DNA, 260 bp, Glycine max
  unsure (1)..(260): unsure at all n locations
acagtgaaagtagctctgtgctgtgtggtggttatgctactaaccctctcagatgcacagctagataactctttttacaaggacacgtgtccatgagtgcattctattgtgcgtgaagttgtcagaaatgtttccanatctgatccccgcattcttgccagtctcataaggctccactttcatgattgtatcgttcaagggtgtgatgcatcaattctgttgaacgacacagctacgatcgtgagcgagcanagtgcacc

SEQ ID NO: 187740 - DNA, 266 bp, Glycine max
gtgatgaccaagacaaccttgtgccacctgcaaaagcacaagtagtgggatggccaccggttcgatcatataggaagaatactctacaacaaaagaaagaggaacagggtgaagggtctgggatgtacgtgaaagttagcatggcaggtgcaccttacttaaggaagatagatctaaatgtttacaagagctacccagaacttctcaaggccttgggaaatatgttcaagtgcacatttggtgaatattcagaaagggaagggtac

SEQ ID NO: 187741 - DNA, 267 bp, Glycine max
taaggcacttaatgaacttgttattcttccaatgagaaggccagagcttttctctcgtgggaatctgttacggccctgtaaaggaatattactttttggtcctcctggcactgggaaaacccttctggccaaggcacttgcaaccgaagctggtgcaaattttatcagcataactggttcgacccttacttcaaagtggtttggagatgctgaaaaactaaccaaagcgcttttctcatttgccagcaagcttgctcctgtcattgt

SEQ ID NO: 187742 - DNA, 254 bp, Glycine max
  unsure (1)..(254): unsure at all n locations
aattctcctctcacccttataaaaacacttcattttaactcccanttttgcattantcacctatctatctatcccntctatcttttctaacatggctgctgggactggactctttgcagagattttggatggagatgcgtacaagtactatgctgatggagtgtggaagaaatctgcttctgggaaaagtgtttccatcatcaaccccactaccannnnnnctcaatacaaagttcaagcttgttcacaagagg

SEQ ID NO: 187743 - DNA, 256 bp, Glycine max
gtaagcgtgtggggtaacacgcccttggcgacggtggatcccgagatccatgacctcatcgagaaggagaagcgccgtcaatgccgcggaatcgagctcatcgcctccgagaacttcacctccatcgccgtcatcgaggccctcggcagcgctctcacgaacaaatactccgagggcataccgggcaaccgctactacggcggcaatgaatacatcgaccagatcgaaaacctctgacgctcacgcgccctccaag

SEQ ID NO: 187744 - DNA, 271 bp, Glycine max
acagcacaaagcgggttactgtctgttcaagctaccatctctctctctctttcttagtgcctccttgccagaagttaaaatggcccaagaaactttcctattcacatctgaatcagtgaacgaggggcaccctgacaagctctgtgaccagatctccgatgctgtgctcgatgcatgcttggagcaggaccctgacagcaaggttgcctgtgaaacctgcaccaagaccaacatggtgatggttttcggagagatcacaaccaaggccaac

SEQ ID NO: 187745 - DNA, 273 bp, Glycine max
gagatgtctctgctctcagatctcatcaaccttaacctttccgataccaccgagaaggtgatcgcagagtacatatggatcggtggatcaggaatggacctgaggagcaaagcaaggactctcccaggaccagttagcgacccttcagagcttcccaagtggaactatgatggttccagcacaggtcaagcttctggtgaagacagtgaagtgattttatacccacaagccattttcagggatccattcagaaggggtaacaatatcttggtt

SEQ ID NO: 187746 - DNA, 275 bp, Glycine max
  unsure (1)..(275): unsure at all n locations
agtccctccttcctctgccttataattcttgtgaacctttaagtgagtagcatntaaagtgcaccagcaaacgtgaagccaagccattatgctgcacccttcaataggagtgtttttccttctggttttctatttggaataggctctgcagcttaccagatagaaggagcagcagctatagatggcagaggaccaagtatatgggacacctatactaaacagcaaccagggaagatttgggatcatagtgatggaagtctagcaattgattttta

SEQ ID NO: 187747 - DNA, 270 bp, Glycine max
atgggaattgcgcttcaaggcgtctcgtagggctaatccgcctcacgagggtcaccaacggcacgtgcctttggggggccgaggccccctactgctggtcggcaaacggacggcgggcgcacgcgtcgcttctagcccggattctgacttagaggcgttcagtcataatccaacgcacggtagacttgcgccactggcttttcaaccaagcgcgatgaccaattgtgcgaatcaacggttcctctcgtactaggttgacttactattgcg

SEQ ID NO: 187748 - DNA, 265 bp, Glycine max
cggctcgagcataaactaatccagaaaatgagcagcgtcgctggaaaggtggtgtgtgtcaccggcgcttccggttacattgcttcctggatagtcaaattcctcctcaatcgcggctacaccgttaaggccaccgttcgcgacacaagtgatccgaaaaaaataaaccacttggttggcctcgacggtgctaaggagaggctgcacctctacaaggcgaatcttctcgaagaaggttcctttaactctgtcgttcaaggttgcc

SEQ ID NO: 187749 - DNA, 267 bp, Glycine max
ttcgtgccgtctccccctctgcgtttctgacagtgttactgtgtgtgttttccgcggaaaatctaaatgggtatcattgaaaagatcaaagaaattgaagccgagatggctcggacacagaaaaataaagtcacagagtatcatcttgggcagctcaaggctaaaatagcaaaattaaggacacaattattggagcctccaaaaggttctagtggaggtggagaaggatttgaagttacaaaattcggtcatggacgtgttgcactg

SEQ ID NO: 187750 - DNA, 266 bp, Glycine max
cgtctctctctctctctcgccatggctatggctatgcaaagcggaatcggagtctccaagatcctcatcatagcatgagcaggttacaccggcaccgtcctcatcaaaaacggaaaactctcggatttaatcggcgagcttcagttgctggtgaagggattggaaaaatctggggagcatgctgaaggtgaaggtgaatatgctgatgccatagctgctcaggtgcgtcgcctggcgaatgaagttcggcagctagcatcaaacag

SEQ ID NO: 187751 - DNA, 269 bp, Glycine max
gtgacttcaaacaccgccatgagataccccacttgcattaccaggttggggttacaccagagaaagtagaagttccaagaagcttggttgatgaagaaatgcaggagaaactgaaagcgatgccaaaagaaaaccagccaaacactcctgttggacctgatctcaaatggagatacttttggaggatcggtcctcgaccgtcaaatactcgttttcaggaacttaatgctgagccagtaatacctgaaggtttccctgaatggaaagaa

SEQ ID NO: 187752 - DNA, 273 bp, Glycine max
gattatactgctctttgaggcaaatgcttgaggttggttatttccatgccgatcctcatccaggaaaccttgttgcaataaatgatggatctcttgcatattttgactttggaatgatgggggatattccaaggcattaccggattgggcttattcaaatgattgtgcactttgttaatcgtgattctctgagcttatctcatgactatctttctttgggatttattcctgaagggattgacacacattcagctactgatgcgctgcaagcat

SEQ ID NO: 187753 - DNA, 271 bp, Glycine max
ttcagcttcagttcgtttttgttgatcctgtgaacttatggctgacggggtggttctgttggatacatgggccagcatgtttgggatgagggttaggattgcattagctgaaaagggtgttgagtatgaatacaaggaagaaaatctcaggaacaagagtcctttgcttttgcaaatgaacccaattcacaagaaaattccagttctgatccataatggcaaaccaatttgtgaatctgcaattatagtgcagtacattgatgaggtctgg

SEQ ID NO: 187754 - DNA, 270 bp, Glycine max
ttgcaatggcttcaagtcaggaggaggtgacccttttgggagctactggaagcccatttgtgtgcagggttcatattgccctcaagttgaagggagttcaatacaaatatgtcgaagaaaatttgaggaacaagagtgaactgcttctcaaatccaacccagttcacaagaaggttccagtgtttattcacaatgagaagcccatagcagagtctcttgtgattgttgaatacattgatgagacatggaagaacaaccccatcttgcctt

SEQ ID NO: 187755 - DNA, 265 bp, Glycine max
ttacaactatggctagcgatggcagcgaagagttcaggctagtatcaccggcgttcaaaaacggggggaagttaccgaggcactacaccgacgatggtcagggtacgaagaagaacatatcccctccattggagtggtataacctcccggaggggacgaagactcttgccctcgtggtggaggatattgatgcgaccgattctggtgggcccatggtgccatggactcactgggtcgtcgcaaacatcttggccacggtgaaggg

SEQ ID NO: 187756 - DNA, 261 bp, Glycine max
gctgtcactgcagtgcgggtgagggttgagtgtgggcttctgactgaagcatttatgcatcagagaatgatctgcaccaaagtgaatgaaaagaatttcaataaaacagcatctgggaatacttctgagaagcaaaaaggtcaatgtaataagtgggtggagtggatggaggtcctggtgactgagatttgttgcctctgtattaggaggaactggtggatcgaatgctagaattgccatggaattctgaggtagagaagt

SEQ ID NO: 187757 - DNA, 267 bp, Glycine max
  unsure (1)..(267): unsure at all n locations
ctcttagggagctgcttttcactncctcctggtgttcttcaatatctcagtggtgtcatcctctttgaggaaaccctctaccagagcacagctgcaggcaagccctttgtgaatgtcttgaaggaagctggtgtgcttcctggcatcaaggttgacaagggcacagtcgagcttgctggaactaatggagaanccaccactcagggtctagatggccttggtcagcgttgtgccaagtactacgaagctggtgcacgttttgccaaa

SEQ ID NO: 187758 - DNA, 269 bp, Glycine max
ttagacgctgtcaatctcatatgcggtgctaaaacgcagtctaatccggaaaatacagtgggagttctcacaatggctgggaaaggcgttcgtgttttggttacccctaccagtgatctgggcaagatcttagcctgcatgcatggactagatataggtggtgagatgaacctagctgctggcattcaggtggcacaattggctcttaagcatcggcaaaataaaaagcaacagcagaggattattgtctttgctggaagtcctgtcaa

SEQ ID NO: 187759 - DNA, 272 bp, Glycine max
ttcgagccgaaaaaagaagagcaattttccctcaccaaagaagaagaagcaaacaatggccgatcaacttaccgatgaacagatctccgagttcaaggaagccttcagcttgttcgacaaggacggcgatggttgcatcacaaccaaggagcttggaactgttatgcgttcattggggcaaaacccaactgaggcagagctccaggacatgatcaatgaagtggatgctgatgggaatggtaccattgacttccctgagttcctaaatctca

SEQ ID NO: 187760 - DNA, 267 bp, Glycine max
gttccagaacccttcaaaactctctcttctctctttcttcgatcgcttcgcctgatattctttttggctgagatcaagcaaaaatgagcgtggttggatttgattttggtaatgagagctgcattgttgctgtcgcaagacaaagggggattgacgttgtgctcaacgatgagtcaaagcgtgaaacacctgcaattgtatgctttggtgacaaacagcggttccttgggacagccggggctgcttctactatgatgaacccaaaga

SEQ ID NO: 187761 - DNA, 264 bp, Glycine max
tcttagggagctgcttttcactgctcctggtgttcttcaatatctcagtggtgtcatcctctttgaggaaaccctctaccagagcacagctgcaggcaagccctttgtgaatgtcttgaaggaagctggtgtgcttcctggcatcaaggttgacaagggcacagtcgagcttgctggaactaatggagaaaccaccactcagggtctagatggccttggtcagcgttgtgccaagtactacgaagctggtgcacgttttgccaa

SEQ ID NO: 187762 - DNA, 264 bp, Glycine max
cttttcacttggaagttcattcaatacaagcaccgtgccgtgttcgacgtcatgggctattgtgtcacttcatccaaaggtgctgctgaaaccctcaagttcaacatggccttaatcctgttacccgtttgcagaaacaccataacttggctcagaagtaagaccaagttaggcatggctgttccttttgatgacaacatcaactttcacaaggtgatagcttttggcattgcaattggggttgggatacatgcaattgcacat

SEQ ID NO: 187763 - DNA, 265 bp, Glycine max
gttcccagtactttaattgatttctgaatatcatcacttaatttgaaggaaagatggtgagcgtagctgagatccgccaggcacaaagggcagaaggcccagcaaccatccttgccattggaactgcaaacccaccaaactgtgttgatcagagcacctatcctgactactacttcagaatcaccaacagtgagcacatgaccgagctcaaagagaaattccagcgcatgtgtgacaagtctatgatcaagaggagatatatgta

SEQ ID NO: 187764 - DNA, 271 bp, Glycine max
tgttgctccttcgccacaactctctgccaacatgggtatctccagagattctatgcacaagaggcgtgccactggtggcaagaagaaggcctggaggaaaaagagaaagtatgagcttggtcgccagcctgctaacactaagctgtcaagcaacaagacagtcaggaggatccgtgttagaggtggaaatgtgaaatggagggcattgagattggatactggaaattactcctggggaagtgaagctgtaactcgcaagactcgtgtacta

SEQ ID NO: 187765 - DNA, 266 bp, Glycine max
gatgcctatgttggtgatgaagcccaatccaaaagaggtattcttactctcaagtatcccattgagcatggtatagtcagcaactgggatgacatggaaaagatctggcatcacacattttataatgaacttcgtgttgcccccgaggagcacccagtgcttctcactgaggcccccctcaacccaaaggccaacagagaaaagatgacccaaatcatgtttgagaccttcaatgtgcctgccatgtatgtggccatccaggctgt

SEQ ID NO: 187766 - DNA, 266 bp, Glycine max
gttactgtctgttcaagctaccatctctctctctctttcttagtgcctccttgccagaagttaaaatggcccaagaaactttcctattcacatctgaatcagtgaacgaggggcaccctgacaagctctgtgaccagatctccgatgctgtgctcgatgcatgcttggagcaggaccctgacagcaaggttgcctgtgaaacctgcaccaagaccaacatggtgatggttttcggagagatcacaaccaaggccaacgtggactat

SEQ ID NO: 187767 - DNA, 265 bp, Glycine max
attagcactggtcatgatgcaattgtgctgaagagtggttgggatgaatatggagttccctatggcaaaccaacctcaaacgtccacatcaggggtgtttatctacaatcgtcatctggtgctggcctagcgtttggaagtgagatgtctggaggcacatctgatataattgcagagcagctccatattaccaactcaacttttggcattgaactgaagacaactaggggtagaggtggctacatgaaaaacattttcatttctg

SEQ ID NO: 187768 - DNA, 265 bp, Glycine max
tacaccctgcttcgtgaatcttagtgcatcaagatctctgtctctctgcaatcgaaaatgagcaagggaccgggtctcttcaccgatatcggcaaaaaatccaaagatcttttgactaaggactacagctccgatcagaaactcaccgtttcctcctacagcgtctccggagtgaccctcacttcaacatctgtgacgaaaggaggactctcaacaggggatgtggcagcactgtacaagtataagaacatgttattgatgttaa

SEQ ID NO: 187769 - DNA, 261 bp, Glycine max
  unsure (1)..(261): unsure at all n locations
atccccatctgatgtgcttgctgttgatatgatgtaggcaccgaagttgtctgagggaagctctgaaatgacacggaaggtttccaaaacatcggtgatttcttctgttttgggaaggtcatggccaaagagagggcgctttccactgagttcagacaanagccactcctgcctcttttcctcgggccactctcggtatgatccaatgtctaagtgttttgtgatgcatccataacatcagtgtgnctatctgactctgac

SEQ ID NO: 187770 - DNA, 255 bp, Glycine max
gtggtgaagaacaagagctcaaatcaaatcgaatcgacaaaagaaagaaagatcatattcatggcgatggcaagcctggctcgacggaagggttacgccgtcgttttgtcgtcgaggtcgtcgttttgtctgacaagctggaggggattcgcgtccggatctgacgaaaacgacgtcgtcgtcatcggcggcggtcccggcggctacgtggccgccatcaaagccgcgcagtcggtctgaaaaccattgcatcga

SEQ ID NO: 187771 - DNA, 260 bp, Glycine max
caaaggacagggtgaaaccatctcccttgcctgatagctggaaactgcaagaaatatttgctactgggattgtacttggaagttacttggcgctgatgactgtcatattcttctgggcaatgaaagaaaccgatttcttccccgacaaatttggagttagacacttgactcatgatgaaatgatgtctgctttgtatttacaagtcagtatagtcagccaggctttgatatttgtaacccgttctcgaagctggtccttt

SEQ ID NO: 187772 - DNA, 268 bp, Glycine max
gtgagattgcggaatattcttgggagtggcatgtcacataagatgtgggatattcttgttgagcacgcaaagagctgtgttctcagtggaaaactttacgtatactatcctgaagatgcaagaactgtgggtgttgttttcaataatatttatgaattaagtggcttaattgccaacgaccaatattactcagctgattctctctctgagaatcaaaaggtttatgtagacacattggtgaagaaggcatatgataattggatgcatg

SEQ ID NO: 187773 - DNA, 264 bp, Glycine max
atggcgggtacggtttcgacttgtttcttcttcgtgtttcttctttctctccttcttccttttcagatctccgctgaggaatcctcggagaaggagttcgtactcacattggatcactctaactttcacgacactgtcagcaagcacgatttcatcgtcgtcgagttctacgccccatggtgtggtcactgtaagaagcttgctccggagtatgagaaagctgcttctatcttgagtagtcatgatcctcctattgttttggct

SEQ ID NO: 187774 - DNA, 261 bp, Glycine max
gttgacgatggcgtttcgggtgcgaaccctgacctccgctctctctttcttctctctctcttgtccatcgcttccgccaatgtcttcttcgaagagcgtttcgatggcattacttttccaggatcaaggtttttacttcgtgtctgagcctcgatctgaaaagcttcgatggttcgatttgtgttttgagttggaaatcgagacgggtgggaaaatcgatgggttaaatcagattggaaaaaagatgagaacgtggctggg

SEQ ID NO: 187775 - DNA, 263 bp, Glycine max
ctactactcactcactgcagatctcaattgcatcgctgtccatggctaccatcgttagcatcaaggcccgccagatcttcgacagtcgtggcaatccaactgtcgaggtggatttgacttgctccgatggtacttttgccagagctgctgttccaagtggtgcatccactgggatttatgaggcccttgaattgagagatggaggatctgactaccttggaaagggtgtatcaacggctgttgacaatgtgaacaccgtcatt

SEQ ID NO: 187776 - DNA, 261 bp, Glycine max
attttaaggttgagtgtcctaatgtgaagtacaccgagactgagattcagtccgtgtacaactacgaaaccaccgaacttgttcacgagaacaggaatggcacctatcagtggattgtcaaacccaaatctgtcaaatacgaatttaaaaccaacatccatgttcctaaattaggggtaatgcttgtgggttggggtggaaacaacggctcaaccctcaccggtggtgttattgctaaccgagagggcatttcatgggcta

SEQ ID NO: 187777 - DNA, 264 bp, Glycine max
tatgcatcagcagctgtctctattttcagactcacgcgtgaccagctcaacacactgaaagccaaatccaaagaagatggcaacacaatcagctatagttcttatgagatgttggcgggtcacgtgtggcgaagtgtaagcaaagcaagagcacttcctgatgatcaagaaaccaaattgtacattgcaactgatggtaggtcaaggttgcagcctcccaccccacccggttactttggcaatgtgattttcacaaccacacct

SEQ ID NO: 187778 - DNA, 259 bp, Glycine max
cgggatatcaagcctcaaaatctattagttaatccacatactcaccaggtcaaaatatgcgactttggaagtgcaaaagtcttggtaaaaggcgaaccaaatatatcgtacatatgctctagatattatagagcacctgagcttatatttggagcaactgaatatactacagctattgacgtttggtcagttggttctgtattggctgagcttatgcttggacagcccttgttccccggtgagagtggagttgatcagc

SEQ ID NO: 187779 - DNA, 261 bp, Glycine max
tctcgagccgctcgagccgattcggctcgagaaaaaaggacattcattcatctatggctacacttattgcactcagcaaccactctccccaagaagatgctgaagctctcagaaaggcttttgaaggatggggaactgatgagaacactgtcatagtaattttgggtcatagaactgtgtatcagaggcagcaaatcagaagagtttatgaggaaatttaccaggaggatcttgtgaagcgcctagagtctgagatcaaag

SEQ ID NO: 187780 - DNA, 253 bp, Glycine max
cctcgagccgaatcggctcgaggaagatagcagatggaggaaatactccatacatattcagcacaaacaatttcgtctggacgcagacatgggagtttgatcctgaagcaggcagtccagaggaacgggcccaggttgaagcagctcgtcagcatttctaccacaaccgcttcaacgtcaagccctgcgctgacctcctttggcgttttcaggttctcagagaaaataacttcaaacaaacaattcctcgtgt

SEQ ID NO: 187781 - DNA, 265 bp, Glycine max
gagatcccctttttctcctaagaaaagccatggctaagggtcccggtctctactctgacatcggcaagaaagccagggatctgctgttcaaggactaccacagtgaccagaagttcaccatcaccacctactcacccactggagttgctataacagcatcaggaaccaggaaaagtgaactgtttgtggctgatgtcaacacccagttgaagaacaaaaacatcactacttgactcaaagttgatacagattctaatctcttcac

SEQ ID NO: 187782 - DNA, 264 bp, Glycine max
cgtgcttcttactgtaaccattattgggaggaacaatttagaaagatacatgttttggagttttctcgagatcggaaaatgatgagtgtcctttacagccggaaccagatgcatgttttgttctcaaagggtgccccagaaagtataatatctagatgtacaagcattctgtgcaatgatgatggttccattgtgtcacttaccgctgatattcgagcagagctggactcaaggttccacagttttgcgggaaaagaaacatta

SEQ ID NO: 187783 - DNA, 263 bp, Glycine max
gtgtgagtgagttcattgacaagcctgaaatgacaactatgctgacaaatgagcatggtctgagtttgaacctcaaggagactgagctttgcctcggtttgcctggcgggggctctgaagtggaaactccaagggccactgggaagagagggttctctgagaccgttgatctgaagcttaatcttcagaccaaggaagatctgaatgagaatctgaagaatgtctcaaaggagaagactctccttaaagatcctgctaagccg

SEQ ID NO: 187784 - DNA, 259 bp, Glycine max
gcataacctaaacctatctttcttctctctctgtgtgtgcgcttcaacggcaaccagaagcagccatggccactgcaaggactgtgaaggatgtttcacctcatgagttcgttaaggcgtactcctctcacctcaagcgatccggcaagatggagctgccagagtggactgatattgtgaaaactgcaagatttaaggagttggctccttatgatcctgactggtactatgtcagagctgcttccatggcaagaaagat

SEQ ID NO: 187785 - DNA, 262 bp, Glycine max
tctcgagccgctcgagccgctcgagccgtgcataccttaggtcttccgaattcgaagttaaattgcaagaacgctaaggacaaggctcagatcaacattgtggtggttggtcatgtggaccctgaggaggcaaccaccattaacgagctgaagaagcctgttgtggagaaagaagctccagggcatgccatatgagggcatgcacgtacggcctcggaggggaaccagaaaattatgttaacaaaataatctggaaccctaa

SEQ ID NO: 187786 - DNA, 261 bp, Glycine max
atatgcttgtctcaaagattaagccatgcatgtgtaagtatgaactaattcagactgtgaaactgcgaatggctcattaaatcagttatagtttgtttgatggtatctactactcggataaccgtagtaattctagagctaatacgtgcaacaaaccccgacttctggaagggatgcatttattagataaaaggtcaacacaggctctgcctgttgctttgatgattcatgataactcgtcggatcgcacggcctttgtgc

SEQ ID NO: 187787 - DNA, 257 bp, Glycine max
ggcaggtgctctggttcaagtctatacagatggaactgttttagttacccatgggggtgtcgaaatggggcaaggtttgcataccaaagttgcccaaattgctgcttcagctttccatatccctcttagttctgtctttatatcagatactagtactgacaaggttcctaatgcttctccaacagcagcttctgcaagttctgatatgtatggagcagcggttttggatgcatgtgagcaaataatggaacgcatgg

SEQ ID NO: 187788 - DNA, 261 bp, Glycine max
tcttgtgcctgactggcagataagtgagtgtgtagcaatctggtggaggccaaatcttgaaaccataatgtatccatactgccctcctcatataacaaaacccaaggagtgcaaaaagcttttccttgttcatttatctgagagggaatactttgcagtgcccaaaaatttaaaacttcttgctgttccattgtttgaactctatgataatgttcagagatacgggccagttatatccactattcctcagcagctatccag

SEQ ID NO: 187789 - DNA, 263 bp, Glycine max
ggtgcccataatatttctctaaacgttgcttaggcatcagcaaacccaagctcggaaagcttttggtgagcctcagcgtaatcagcaaagaaggcatcttcgtccgctgcatatttatcaacgagagggcggaatacagggtcagacaaaagagccttgtcagaaggtagctgaaggagaccttccttctcaccactcaacaactccgtacactatgagttgtcgaaaatacgaggattagaggtccagggaccctcaaatcc

SEQ ID NO: 187790 - DNA, 258 bp, Glycine max
taggcttttgtcttactctacttttcttcttctttctgtgtatcgtatcgtattggagagaagagatggcgacgagggtcgtggcggaacagaagccgaagacgaagattgtgtgcacgctggggcccgcatcgcgctctgtcccaatgatcgagaagcttctgcgggcgggcatgaacgtggctcgcttcaacttctcccatgggtcccacgagtaccaccaggaaaccctcgacaacctccgagccgccatggaga

SEQ ID NO: 187791 - DNA, 260 bp, Glycine max
ccgggatccaggtcggaaactcctgctagggaactctactgcctcgaacatggcatccagcccgacggcatgatgccttctgactccaccttcggtgtagcccacgacgccttcaacaccttcttcagcgaaaccggatctggcaagcacgtcccccgtgctgtcttcgtcgacctcgaacccaccgtcatcgacgaggtccgctgcggcacctaccgtcaactacttccaccccgaacaactcatctccggcacagaag

SEQ ID NO: 187792 - DNA, 257 bp, Glycine max
caaaatcccagttgggtgagattctaacaccagctgcttgcaccattgtttcttcgctcaaaaacgataatgtcgactcctatgtactatctgagtccagcctctttgtttatgcctacaagatcatcgtcaaaacctgtggtactactaagctattgcttgcaatcccacccatattgaagttcgctgaaatgctttcccttaatgttaagtctgtgaattacaccaggggaagtttcattttccccagtgctcag

SEQ ID NO: 187793 - DNA, 258 bp, Glycine max
gtttctctcttgaggttaattattattattattgagtattgagcatggaggcgccatctctcaccaaacccaacgacccaacaaaaccttccaacacttccagcacccttagtctggagggggggccgggcgaacgagcccactccgaaaaatgtttgcggtggcgtccatcgccgccggcatacagttcgggtgggctctgcagctgtctctcttaaccccctacgttcagctcttaggagtcccccacgcggcggc

SEQ ID NO: 187794 - DNA, 258 bp, Glycine max
tttcggggtcaggaatctgcgcgaagagggtagttgtggacgcgcggcaccacatgctggggaggctggcatcgatcgtggcgaaggaacttctgaatgggcagaaggtggtggtggtgcgctgcgaggagatttgcatctccggtgggctcgtcaggcagaagatgaagtacttgcgtttcctccgcaagcgcatgaacaccaagccctctcacggccccatccatttccgtgcacccggcaagatcttctggcgca

SEQ ID NO: 187795 - DNA, 261 bp, Glycine max
gtttgggctattggatacctgaagggttcacgtcgggtcgtgataggctatgatgaaggtactattatggtcaaacttggccgagaagaacctgtagccagcatggataacagtgggaaaataatttgggctaagcataatgaaattcaaactgtcaatataaggagtgtaggagcagatgtggagattgctgatggagaaaggttaccattggctgttaaggagttgggcacctgtgatctctatcctcaaagtctaagg

SEQ ID NO: 187796 - DNA, 257 bp, Glycine max
atctccacgaagacaaacctctgttctcaactgtgtttctttacctctcacctactttcagaccatacccagattgactaggctgagaagatgcagcagacaccgcctatgattcctatgatgccttcgttcccacctacgaacataaccaccgagcagattcaaaaataccttgatgagaacaagaagctgattctggcaatattgacaatcaaaatcttggaaaacttgcagaatgtgcccagtaccaagctcag

SEQ ID NO: 187797 - DNA, 259 bp, Glycine max
actggatccaagctaaaggaatgttatggtaaaacttcgtttgaaacgatgtggtaaaaagcaacgtgcgacttgaaagacatgattagattagctgtggattcttacatccgccattttttctagtatatagaaatgaacatgctcttgactcgacatcgtttgttctgttccactagaacttattgttttggggacgggaaagcagttgatgatgtaagttgatgatgtaaatagtacatgatggagctcgagttta

SEQ ID NO: 187798 - DNA, 255 bp, Glycine max
tgttcccaaattctccccaagagataaaatgtctctaatcccaaacttcttcggtggccggagaaacaatgtgttcgatcctttctcactggacgtgtgggatcccttcaaggattttcctttcccaaatacgctttcttcagcttccttccctgaattttctcgggaaaattcagcatttgtgagcacccgtgtggactggaaggagaccccagaggcgcacgtgttcaaggcagatattccaggactgaagaa

SEQ ID NO: 187799 - DNA, 254 bp, Glycine max
gagagaacaactgttactcacacacgccatgggtatgtaaatgaatggtttttgagcaacagcagttaaaagagaaaagggattcagcgaagatgacatcggttggtgtggcaccaacttcgggtttgagagaagccagtgggcatggagcagcagctgcggatagattgccagaggagatgaacgatatgaaaattagggatgatagagaaatggaagccacagttgttgatggcaacggaacggagacagga

SEQ ID NO: 187800 - DNA, 259 bp, Glycine max
aaatttcttcacagctgttgttaatattacatgcttttgaagcaactttggaagagaggctgaaaaagcttattcccaagagcaaggatgagatcctcagcttgtcttggatgactttggccatgcaggcactttgtgagagtcataatgacattaaaaccctcataacagagcttgagcttcctgtacatgattgggatgagaaatggatagatgtgtacttggacattagtgtgaagttactagatatatgcattgc

SEQ ID NO: 187801 - DNA, 250 bp, Glycine max
cgtgccaatggttcagcagggacaacagggacagcgtcccggtggaaggcgtccaggtgcagttcagcagtcccagcagccagttcctatgatgccacagcagatgcttcctaggggacgtgtctatcgttatcctcctggtaggggtattcctgatgttcctatacctggggttgctggaggtatgttttctgttccatatgatgtgggtgggatgccgctgcgtgatgcatcaatctcccagcaaata

SEQ ID NO: 187802 - DNA, 259 bp, Glycine max
atctttctctaaaacattaattgaactctccattccttaaattttaccaacgagctagttccgacacagacaaagcattggcaaagactgagttagaggtgactgttgagagcaagaacaaagaactaaagcacctgggatttgtgaggattgctgctattcaaacttttgtgattgtgtcaaatctgtatgagtacgcaaagcagaattctgggcctttgagatccgctgttggaacggttgagaacactgtaaccac

SEQ ID NO: 187803 - DNA, 247 bp, Glycine max
tgggttactgtctgttcaagctaccatctctctctctctttcttagtgcctccttgccagaagttaaaatggcccaagaaactttcctattcacatctgaatcagtgaacgaggggcaccctgacaagctctgtgaccagatctccgatgctgtgctcgatgcatgcttggagcaggaccctgacagcaaggttgcctgtgaaacctgcaacaagaccaacatggtgatggttttcggagagatcac

SEQ ID NO: 187804 - DNA, 196 bp, Glycine max
gcgaatggctcattaaatcagttatagtttgtttgatggtatctactactcggataaccgtagtaattctagagctaatacgtgcaacaaaccccgacttctggaagggatgcatttattagataaaaggtcaacacaggctctagctgttgctttgatgattcatgataactcgtcggatcgcacggcctttgtg

SEQ ID NO: 187805 - DNA, 256 bp, Glycine max
gtgcagagcagagagagacgcagccatggggcgaagacccgcgaggtgttataggcaaattaagaacaaaccataccccaagtcacggttttgccgtggtgttcctgatcccaagatcaggatttacgatgttggtatgaagaagaagggtgttgatgaatttcctttctgtgtccatctggttagttgggagaaggaaaacgtttctagtgaggccctggaagctgctcgtattgcttgcaacaagtacatggcc

SEQ ID NO: 187806 - DNA, 300 bp, Glycine max
gcgaagtcgtaggagatggagaacatgcagagcttctggcaattgggcgatgaactccgtggacactcaaaagcatcggaggatcacaaatggttaatggttgcttcgaaattggcggaacagacaagattgaagggggagcgtgtgaacaaccttgatctttcaaagggccccattgaaacaaggtcaagggataaatttgggttccaggaagagaacaaatttgattctcttaacttaagcatgttgaaccaggactctaaatttactgagaatgtgagcaaaagctcgcttcgaaat

SEQ ID NO: 187807 - DNA, 313 bp, Glycine max
cacgcgtacgcaggctcagcaatcggtgtgatattggagtgagagcacttgcttcacatcccatgaaagcagataagaaaggcatgggagagaagcaggtccccataaatattgatgggacaaggatcagtgatggggaatggctctatgcagacactgatggaattctgatctctcgaacagagctgtctgtttgatttcaattcatgaatacttcatgtaaggactatatttatgggcagcacacgacctagtatagtgcagttcggtacttgtgttcttgacccggttccttgcttccacaaaattataa

SEQ ID NO: 187808 - DNA, 290 bp, Glycine max
gtggaatatgggctgacactgtgggaggaaaacaggtattgggatttggcgtggtttggtggtctgttgcgacggccctcactcctatagctgccaaacttggattgcctttcctactagttgctcgtgcattcatggggattggtgagggtgttgctatgccagccatgaataatattctgtcaaaatgggttcctgtgtcagagagaagtagatcactagcgctggtctacagtggcatgtatcttggatcagtcactggactggccttttctcccttcctaattcat

SEQ ID NO: 187809 - DNA, 277 bp, Glycine max
cggctcgagctaagccctctcttgctcgggattttactctcacgagattagagattgaagacggtgtctgacgcgagcaagaagaaggctacacagaagaaggcggcggcagcggccaagagaggaggcaaagcagcagctgcttcgtcgaaaacgacgtcgtcggagaaggccgccgacaagcttgccaacggaattggggaaattcagacatccggtcgaacctgcaccggtgtcctctgctcgcatcctctttccagggatattaggatagaat

SEQ ID NO: 187810 - DNA, 292 bp, Glycine max
cttatggtggatacctaggcacccagagacgaggaagggcgtagtaagcgacgaaatgcttcggggagttgaaaataagcgtagatccggggattcccgatataggtcaacctttcgaactgctgctgaatccacgggcaggcaagagacaacctggtgaactgaaacatcttagtagccagaggaaaagaaagcaaaagcgattcccgtagtagcggcgagcgaaatgggagcagcctaaaccgtgaaaacggggttgtgggagagctatacaagtgtcgtgctgctaggc

SEQ ID NO: 187811 - DNA, 299 bp, Glycine max
actcgagccgaatcggctcgaggaacgggcttggcggaatcagcagggaaagaagacccagttgagcttgactctagtccgactttgtgaaatgacttgagaggtgtaggataagtgggagctggaaacagcgaaagtgaaataccactacttttaacgttattttacttattccgtgaatcggaagcggggcactgcccctctttttggacccaaggtcggcttcggcaggtcgatccgggcggaagacattgtcaggtggggagtttggctggggcggcacatctgttaaaagataa

SEQ ID NO: 187812 - DNA, 290 bp, Glycine max
gtaattggtttgagagatgtaattcctccacccttgcgtagagagtttaatgatgtctacatagccactgaactcatggatactgatcttcaccatatcattcgctccaatcagaatctgtcagaggagcactctcaatacttcttgtaccagattcttcgtgggcttaagtatatacattctgcaaacgtaatccatagagatttaaaaccaagcaacctgctgctaaactcaaattgtgacttgaagattattgattttggtcttgcgagaccaactttggaaagtga

SEQ ID NO: 187813 - DNA, 305 bp, Glycine max
cacccctataagagaattcaagaatttagaatcaattggagttccttttccgaagaggcaaccgatgaggatatactcaagcctatggaacgctgatgattgggccacaaggggtggacgcatcaaaaccgattggtccaaagctcctttcactgcatcctacagaaacttcaacgctaacgccttgtgtttggaacaagaggaaaatccacatgcagatcaaattcaccatcctctaatgcatggctatcacaagagctggattccactgctcagcaaaggctgagctgggtgcagaagaatta

SEQ ID NO: 187814 - DNA, 302 bp, Glycine max
cggtgacttcaaccgggttttcctcataggagacagttctggcgggaactcggtgcatgaggtggccgcgagggccggttcagcggacctaagcccggtccgggtcgcggtggcaattccggttcaccccggttttgtccggtccaaccagagccggtccgagatggaaatgccacagacaccgtttttaacgttggacatgctggacaagttcttagccttggcgcttcctgttgggggccaccaaggaccacccctttacgtgccggatgggtgaggcggcaccgcaactcgaagggctg

SEQ ID NO: 187815 - DNA, 285 bp, Glycine max
ggctgaatctcagtggatcgtggcagcaaggccactctgccccggtggctccttccttccttcgccatggcgttctacgtgctctcgcgtcgtttatcagctggatccaactcaacgacgctcctcgccctgcgttttgcttcctcttccagatccttctcctcttccttcagggaagaaagagatacctttggacccattcaagttccctccgacaaattatggggagcacaaactcaaagatcgttgcagaacttcgacatcggtgggccccgcgaacgcatg

SEQ ID NO: 187816 - DNA, 292 bp, Glycine max
agttgagctagtgtcattagataaagagaaggagtcctgggatctgaacactggagagaaacttgaagctgctggtaagaagaaagaagagggaaatgtcttgtttaaagctagtaaatatgcaagagcttccaaaagatatgaaaaggccgtgaagtacatagaatatgattcctcctttggtgaggaggagaaaaagcaggccaagaccttgaaggttgcctgcaatctgaacaatgctgcttgcaagttgaagttaaaagactacaaagaagcagagatattgtgtact

SEQ ID NO: 187817 - DNA, 289 bp, Glycine max
gccagtagtcatatgcttgtatcaaagattaagccatgcatgtgtaagtatgaactaattcagactgtgaaactgcgaatggctcataaaatcagttatagtttgtttgatggtatctactactcggataaccgtagtaattctagagctaatacgtgcaacaaaccccgacttctggaagggatgcatttattagataaaaggtcaacacaggctctgcctgttgctttgatgattcatgataactcgtcggatcgcacggcctttgtgccggcgacgcatcattcaa

SEQ ID NO: 187818 - DNA, 291 bp, Glycine max
ttttggctggatcgaagatcattgaagtggacaacaatgtaagggaggatcgtgctctcttaaatggtgcacagatcctacttggcattttgatagctgttggtgaggcagttgcatatgttctttctggaatgtatggtagtgtgggtcaacttggagtgggaaatgccatcctcatattcctccagctatgttttgcgggtattattgtgatatgtttggatgagctccttcaaaaaggctatggcattggatctggaatttctctgttcattgccactagtatatgtg

SEQ ID NO: 187819 - DNA, 295 bp, Glycine max
aaaaaagcaaaacagagagaacaactgttactcacacacgccatgggtaaatgaatggtttttgagcaacagcagttaaaagagaaaagggattcagcgaagatgacatcagttggtgtggcaccaacttcgggtttgagagaagccagtgggcatggagcagcagctgcggatagattgccagaggagatgaacgatatgaaaattagggatgatagagaaatggaagccacagttgttgatggcaacggaacggagacaggacatatcattgtgactaccattgggcggtaga

SEQ ID NO: 187820 - DNA, 289 bp, Glycine max
ctctctcacacccttcatttacacacaacggaatcattatgctttctgctaacacttttgctttttcttcatggctttctttctctgtgctattttaatcttgatggtcacttctagtaatgcctattggccaccttcacctggctactggccaagttccaaattcaggtccatgagtttttacaaagggtttagaaacctctggggccctcagcaccaaagcctagaccaaaatgcattgacaatctggcttgatagaacctcaggaagtggattcaagtcagtaagg

SEQ ID NO: 187821 - DNA, 296 bp, Glycine max
gagagctcttcctccctttctcacagcaatggccgccgcagcacgccctctcgtcaccgtgcaggccctcgacggtgacatggcaaccgatgcctccgccaccgttcccatccctgacgtcatgaaggcatctatccgccccgacatcgtcaatttcgtacactcgaacatctccaagaacagccgccagccatacgccgtcagtcgtcgcgctggtcaccagacctccgccgaatcctggggtaccggccgagccgtctcccgtatcccccgtgttaccggcggcggaaccaccg

SEQ ID NO: 187822 - DNA, 296 bp, Glycine max
gcgcacgtagcagtaactcgtggaattgctagcaatggcgaggatcaaggtttacgagctgaggcagaagacgaaggctgatctgttgaatcagctgaaggacctcaaggccgagcttgccttgcttcgtgttgctaaggtcaccggcggtgcacctagcaagctctctaagatcaaggtggtgaggttgaacattgcccaggttttgacggtgatttctcagaagcagaaggccgcgttgagggatgcctacaagaacaagaagtacttgcctctcgatctccgccctaagaaga

SEQ ID NO: 187823 - DNA, 294 bp, Glycine max
agtacgatctcggtgacgagatcggcggcaaaccgggggattgtagtgcggaggctggactggcggaaggctctgtgagcgacgcgcgataactgagagaatgttcagcttaatggacgggtatctgaagaacgatcctctcaatctgcaaaaggatatactgaatcatgttgagtacacacgtgcaaggtcacgctttaactttgacaattttaaagcgtatcaggctttgtcacacagtgtaggatacaggttgattggacgcatgcatgatactcatgtttacgtcaagag

SEQ ID NO: 187824 - DNA, 290 bp, Glycine max
  unsure (1)..(290): unsure at all n locations
gatncntttgggcnaagaacatctcaatatagaggtgtaacaaggcataggtggactggtagatatgaagctcatctatgggacancatctgcaagaaagagggcnnangaatganaggaaggcaagtttatgctagggggttatgntatggaagaaaaagcagcaagagcttatgatntggnngcnctcaagtattggggaccctcctctcatgtnaatttcccattgganaattatcaaaacgancttgaggaaatgaagaacatgacgagacaagaatatgttgctc

SEQ ID NO: 187825 - DNA, 227 bp, Glycine max
gttgaaagtagcaaagatgtgtcctttcgggcaaaagggtcaaaagatataggggactatggtggttatgcagaagaatgtgttggatatcaacggcatcaccagtgttggatggatcgttgaccaaggcttaggcttcataggaagtgcggtcgatgcacttacttttgcagccaccataatctccatccagttgattagtgctaccaaggctgatggtgggaaag

SEQ ID NO: 187826 - DNA, 286 bp, Glycine max
agaaaagagaggaattggatctggaggagaagattaaacagcatgagcaggaggtttctactacgatgaatgcttttcacatcatttcgctctcggaggggttcgatttgtcgcagttgttcgaggaaaagaagagagaagagaaagagttacggtttgcgaccacggcgccccgcgagcagcgtgatttcgagattggaagatttggcgaaggcggtgaagttcgacgtgaagaagagcgagactaaggtgaggttgcagggtcaagacaagggcgaaaaggtaa

SEQ ID NO: 187827 - DNA, 281 bp, Glycine max
attagatagaaaaatagagattccattgccaaatgaacaatcaaggatggaaattctcaagattcatgctgctgggattgctaagcacggtgaaatagattatgaagctgttgtgaagcttgcggagggctttaatggagctgatcttcgaaatgtgtgcacggaagctggaatggcagcaattcatgcagaacgtgattatgtgatccatgaagattttatgaaggcatgttagaaactgaatggtgcaaagaaactcgaatccagtgctcactacagtg

SEQ ID NO: 187828 - DNA, 291 bp, Glycine max
atgtgagtgcaatggccttccagaggtggctgagtattggaaacaagtgatcaagatcaatgattatcagaagagccgatttgtgaaccgtgttgttgcatcaatgttcaacacagtttcaaacaaaaagattgctattctgggatttgccttcaagaaagacactggtgacacaagggagactcctgccattgatgtatgccaggggctactaggtgataaggccaacctgagcatatacgacccgcaagtaaccgaggaccagatccagagggatctatccatgaacaa

SEQ ID NO: 187829 - DNA, 288 bp, Glycine max
gtcgaacttgcgtcccttcaaacatcgtttctgactctggatgaggccatcaagaccacgaatcatagggttaacgctctggaaaacgtggtgaagccgcggttggagaacacgattagttacatcaagggagagctggacgagctggagagggaggatttcttcaggctgaagaagattcaggggtataagaagagggagattgagaggcagatgctgcagcagaacaactccaagcttgacactaatctccctttgcgcaaaggtctttcctacaattctgctcac

SEQ ID NO: 187830 - DNA, 293 bp, Glycine max
agtcgaggctccctgagagagctcgtcgcggcggttgcagaagaagattgcaagatgaagttcaacatcgcgaatcccaccactggatgccagaagaagctcgagatcgacgacgatctgaaactgcgagcattttgggacaagaggatctcacaggaggtcatcggagatgcactcggtgaggaatttaagggctatgtcttcaaaattaccggaggttgtgacaaacaaggatttccaatgaagcagggagtgctgactcctggtcgtgttagactgttgcttcacagggg

SEQ ID NO: 187831 - DNA, 225 bp, Glycine max
gctggggtatcttagtgtaacttctggggctagtcctgtgtctcgtaagatagggatagatagcactgtgcagggtctggttgacgagtttgaggacgaatgccatgcctgtgaaaggtggatgtgatgtctaagctgcggcagcgattgctgctgtgaatcatgagttgactaggcaaatgattccgcgaacaattgatatagttggacctggtggtgtgttgt

SEQ ID NO: 187832 - DNA, 289 bp, Glycine max
  unsure (1)..(289): unsure at all n locations
agaattggccgtttggtagccagagtggctctgcagagagacgatgttgaactcgttgccgttaacgaccctttcatcaccaccgattacatgacatacatgtttaaatacgacagtgttcatggacactggaagcatcacgatgtcaccgttaaggacgagaagacccttctcttcggtgacaagccagtcactatttttggacacagaaaccctgaagagatcccatgggggtcaactggagctgacatcattgttgagtccaccggagttttnaccgataaggaca

SEQ ID NO: 187833 - DNA, 288 bp, Glycine max
aaccaataagtatttctcatttttatggctcttgccctgaagtcaagttgcttattgcaattgaagaaacctgaggctggtttcaatgtttgtatttcatctaagaaagctataatctccgtgaaaagatacactccggtggccgctatcaggatcattgacgcagtgggactctctgcaacattcaccagattgaaaaaagaaggaaaagtggctttcatcccatatatcactgctggtgatcctgacctttcaaccactgcagaagcactgaaattgcttgattca

SEQ ID NO: 187834 - DNA, 288 bp, Glycine max
agcaggtcgccgcgagcatgctcaagtgtggcagaggaaaggtttggattgaccccaatgaagtcaacgaaatctccatggccaattctcgccagaacataaggaagctggttaaggatgggtttatcatcaggaagcccaccaagattcactctcgctcacgtgctcgtcgaatgaaggaagccaagaggagaggacgtcactctggatacggtcaacgtaagggtacaagggaggcaaggcttcccactagaattctatggatgaggagaatgcgtgtgctcagac

SEQ ID NO: 187835 - DNA, 291 bp, Glycine max
attcttcaccaaaacttcgcaaagaaacactatacatccatggcaactgctggcgtgcaagaagttcgtgttccccctctaacttccacctctgagccaccttctctctttgacggaaccaccaggttgtacatcagttatatttgtccctatgcgcagcgtgtttggatcactcggaactataagggactacaagacaagatcaaactggttcctattgacctacaaaacaggcctgcttggtataaggagaaagtctaccctgataacaaggtgccatcattggagcac

SEQ ID NO: 187836 - DNA, 272 bp, Glycine max
aaagtctagtaaagaaacatgagcgagaaagagtaacatggggtgtttatagtgaagaaatgagaaggatatgccatatagcagggcctatggtggcagtgcgttcttcacaatatttgttgcaagttgtctcaactatgatagttggtcatttgggtgaactctatctctctagcgccgcccttgccatttctctatcaggggtcactggtttcagtcttcttatgagaatggctagtggactggaaacaatttgtggacaggcttatgga

SEQ ID NO: 187837 - DNA, 174 bp, Glycine max
gagaatatgaagttgtttgtattctttgttgctgcagtagttttggtagcatggccatgccatggcgcaggctaccaaaggttccctctccgaatgaaaactggctatggtgagcgttcttcggaggtaaaatgcgcaagttttaggcttgctgtggaagcacacaacatccga

SEQ ID NO: 187838 - DNA, 283 bp, Glycine max
tgcatgcttggagcaggaccctgacagcaaggttgactgtgaaacctgcaccaagaccaacatggtgatggttttcggagagatcacaaccaaggccaacgtggactatgagaagattgtgcgtgacacatgcacgaacattggttttgtctctgatgatgttggtcttgatgctgacaactgcaaggtcctcgtcaacaatgagcaacagagtcctgatattgctcaaggtgtgcactgccacctcacaaagaggcatgaggagattggtgctggtgaccaa

SEQ ID NO: 187839 - DNA, 283 bp, Glycine max
aatagcggccataacccgcctcctaaatcgcacctcttccctctcttccgtggcgcgtggattctcatctcacgcatcgccgccgcgcaaggaggagaggaatgtccagtgggtgttcatgggttgccccggcgtcggaaaaggcacctacgccagtcgcctctgcaacctcctcggcgtccctcacatcgccaccggcgatctcatccgccacgagctcgcctccaacggccccctttcttcccagctatcagaaattgttaatcaaggaaaattggtgtca

SEQ ID NO: 187840 - DNA, 287 bp, Glycine max
ctgtgtttgtgtttgtattttctctcacctgaaaatgtcttgctgcggtggtaactgtggttgcggatactcctgcaagtgcggcaacggctgcggaggctgcaagatgtacccagacttgagctacactgagtcaaccaccaccgagaccttggtcatgggagtggcacctgttaaggctcaatttgagggtgctgaaatgggtgtgcccgctgagaacgatggctgcaaatgtggaccaaactgctcctgcaacccctgcacttgcaagtgaggtgttgggagag

SEQ ID NO: 187841 - DNA, 289 bp, Glycine max
aggggatatggcgaaattggtagacgctacggacttaattggattgagtcatggtatggaaacttaccaagtgagaactttcaaattcagagaaaccctggaattcacaaagggcaatcctgagccaaatcctgttttccgaaaacaaagaaaagtaaataaagtgataataaaaaagggataggtgcagagactcaatggaagctgttctaacaaaaggagttgacgatttttcctttttgcattaggaaaataatagaatccttccgtcaaaattccaggaatggat

SEQ ID NO: 187842 - DNA, 291 bp, Glycine max
aggggagaaaactgcagctgctaacaacaattcagtgagaggctttgaagtaattgatgctatcaagtctgaggtcgagaaaatatgccctggtgtggtctcatgtgctgatatcttggacattgcttctcgtgactctgttgttcttcttggagggccattttggaaagttagacttggaagaagggattccagaactgccaactttactgctgctaacactggtgttattccacctcccacatctagcctcaccaaccttatcacaaggtttcgagatcaaggactctc

SEQ ID NO: 187843 - DNA, 278 bp, Glycine max
atgataaggtgatcatagagcatattataagagagtgaaaactaatggaggttggaatcaagaaggagaacatggggtttgaggacactgagttaaggcttggactgcctggaaacggaggcactgaagaagtgatcatcaggaagaggggtttcacagagactgaaactggtcatgaagatgagtctgccaccactgtggatttgatgcttaatcattcatctaaggaggcagcaaccactgctgctgctgctgcagatccagctgataagcacaag

SEQ ID NO: 187844 - DNA, 283 bp, Glycine max
gtaagcttttctttgcattttgggtgatcatccatctataccctttcctcaaaggtctcatggggcgccaaaacagaacaccgaccattgtggtggtgtggtccattcttcttgcatccattttctcactcttgtgggttagaattgatccattcaccacaagggtcactggtcctgatgttgaggagtgtggcattaactgctagaagaccaaaagacaggtttaatgtattgtgttttgggttgtaattatagttattgttttgtagctgttatattttgg

SEQ ID NO: 187845 - DNA, 279 bp, Glycine max
ggcgcctgtactggcacctggatcagatagaggaattgagtgcagaatggcttccttttatgcaggtttcccagagacagtgcctcttcgaactgtcaataggcaatgttcatctggacttcaggaggtttctgacgtagctgcttatataaaagctgggttctatgaaattgggattggggctggattggagtctatgacagtagatcgtgtgaataggcttcgcaacattaacccaaaggtaggaacctttgcagagcacgggattgtcttcttcca

SEQ ID NO: 187846 - DNA, 281 bp, Glycine max
aaaacatcgaaagagagaggcatggccgagcaaaccttcatcatgatcaagccagatggcgttcaaagaggccttattggcgagattattagcagatttgagaggaagggtttttacttgaaagggttgaaactcgttactgtggaccgtccttttgctgagaagcactatgctgatttgtctgcaaagcctttctttagtggtttggtggattacattgtctctggccctgttgttgccatgatctgggagggtaagaatgttgttacaactggccgaaa

SEQ ID NO: 187847 - DNA, 283 bp, Glycine max
aaaaagagagagtggaaaagatggcgcggttgatcacagtggtgtggtgcgcggtggcggtgctattatgcgccgcggccggtgcgtcgtgggtggaggaggcggcgaacccgatacgaatggtgtctggcgtggaggcggaggtggttcgggtgatcggggagtgccggcgtgcgttgaagtttgcaaggttcgtgagcaggttcgggaagagttaccaaagcgaggaagagatgaatgagaggtacgagatattctcgcagaatctcaggttcatccgctc

SEQ ID NO: 187848 - DNA, 270 bp, Glycine max
attgcatgctaaatgggactggagctaggagaaattaagataaagcgttttgatgatggtgagatatatgtacagctgacagaaagtgtcatggggtgtgatgtgtttattgtgcagcccacatgtcctcctgcaaatgagaatcttatggagcttctcataatgattgatgcctgcaggagggcttcagccagaaatattactgctgtcattccatattttggatatgccagagctgataggaagaacaaaggacgtgaatccattgct

SEQ ID NO: 187849 - DNA, 161 bp, Glycine max
agaaaatcctcacccattttcttcgtagccaaacactctgaaattctcagttatgtcgtggcaagcgtatgtggatgatcacctactgtgtgaaatcgaaggtaaccacctcactcacgccgctatcatcggccaagacggaagcgtttgggctcagagca

SEQ ID NO: 187850 - DNA, 285 bp, Glycine max
cacacagagacgaggaagggcgtagtaagcgacgaaatgcttcggggagttgaaaataagcgtagatccggggattcccgatataggtcaacctttcgaactgctgctgaatccacgggcaggcaacagacaacctggtgaactgaaacatcttagtagccagaggaaaagataggcaaagcgattcccgtagtagcggcgagcgaaatgggagccacctaaaccgtgaaaacgggttgtgggagagctatacaagtgtcgtgctgctaggcgaacaggcagaga

SEQ ID NO: 187851 - DNA, 275 bp, Glycine max
atgggacctgctgtctttgagcagatacaacttaatattggaaatcctgataagtctattatattacggtcttccagctcaagggttgagtttcctggatatcgggcagtttttacggacattgttactgaagctgttcaagataaagacagtgatgaattcagccgtgatcaaacatttggagtactaaattccttgaagacaggggatccattacatgtggttcagactgaacctaatcagcaccatacacaaccaccaccacggtactctga

SEQ ID NO: 187852 - DNA, 277 bp, Glycine max
cgatggtgttctacttcaaagcgcgccctgaagccggcgatttcaccatcttcatgggcctcgacaagttcgagaacgaggaactcatcaaatacggttttcccgaagacatctggttccatgttgataaaatgtcttcagcccatgtctatgtcaggctgcacaaaggccagactctcgatgacctgagtgaggctttactggaagattgtgctcagcttgtcaaagcaaattcaattcaaggaaataaagtgaacaatgttgatgttgtttacac

SEQ ID NO: 187853 - DNA, 274 bp, Glycine max
ggaagatcttcctgggaaagaggtaaacgtgctgaagggtcacgagggtggcgtgttagccgcgaggttcaacggcgatggcaattatgttctgagttgcggcaaagaccgtaccatacgcctttggaatcctcaccgtggcatccatatcaagacctataaatcccacgctcgcgaagtccgcgatgtccacgtcacacaggacaactccaagctatgttcctgtggtggagatcgacaaatattttattgggacgttgcaactggacgtgta

SEQ ID NO: 187854 - DNA, 276 bp, Glycine max
tctttccttccctctttttccgaatctgaatcgaaatggcttcggagactgagacgtttgcttttcaggccgagatcaaccagctcctcagtctaatcatcaacaccttctacagcaacaacgatacaattcttcgtgagctcatcagcaatgcctctgatgctttggacaagattcgctttgagagtcttacagacaagagcaagcttgatgctcagccagagttgttcattcacattattcctgacaagaccaacaacacattgtctatcattg

SEQ ID NO: 187855 - DNA, 274 bp, Glycine max
ctcagccatgtcggtggttccttgcaattgcaaccacaccacagagaaagataaccttagtggtgaaagtgagagctttcacaagttttttgagtgctggatttctgagcaaaaacaacatctgaaggaccttttagctgctgaatcaacccagctaattagtgatgaggagcttcaggcactgaatgataaggtggttgagcattatgagtactactacaaggccaagtcaaggtgtgcaaagcaagatgtattggccatgctgtccccaaca

SEQ ID NO: 187856 - DNA, 276 bp, Glycine max
gaaggctaaagggagatgagaagaaggccaggaattggaggtttgcagacgcatgccgctgcaagggatcaattccgtttgctgggtgaaaatgtcgcaaagatcagaaccgatttgatgaaggagcagcttgccacctttcgctctcagctcgaagatttcgctcgcaaacacaagaatgacatccgcaagattcctgcattcagatcacagtttcatgaaatgtgtgctaaagttggagtagaccccttggcctcaaacaagggtttctggtca

SEQ ID NO: 187857 - DNA, 268 bp, Glycine max
gtaagccgccatggtgaagtactcaagggagcctgacaatccaaccaagtcttgcaaggctagaggcgccgaccttagggttcattttaagaacactagggaaactgcctttgcaatcaggaagttgcccttggttaaagctaaaaggtacttggaagatgttcttgcgcacaagcaggccattccattcagacgtttctgtcgtggtgttggaaggacagctcaagcaaagaatagacactctaatggccaaggaaggtggcctgtc

SEQ ID NO: 187858 - DNA, 279 bp, Glycine max
agccatggggcggagacctgcgaggtgttataggcaaattaagaacaagccataccccaagtcacgtttctgccgtggtgttcctgatcccaagatcaggatttatgatgttggtatgaagaagaagggtgttgatgagtttcctttctgtgtccatctggttagttgggagaaggaaaatgtttcaagtgaggccctggaagctgctcgcattgcttgcaacaagtacatggccaaatttgctggaaaggatgctttccacttgagagtcagggtgca

SEQ ID NO: 187859 - DNA, 279 bp, Glycine max
aatcattctgtcaaaccacccatgttgcagaggggggtgctcaggaccaactgcatagactgcttggatcgcactaatgttgcacaatatgcatatgggttggctgctcttggccaccagctccatgctctgggagttattgaccacccaaaaattgatcttgatgaccctgtagcagatgatttgatggggttttatgagcggatgggtgatacactcgcacatcagtatggtggttctgctgctcacaacaagattttctctgagaggaggggccat

SEQ ID NO: 187860 - DNA, 274 bp, Glycine max
gcatgcgtttggtgatcaatatcgggctactgacactgtaattaaaggagctggaaagctgaagctggtgtttgttccagaaggccaaggtgaggaaactgaattcgaggtttttaacttcactggtgaagggggtgtttcattggctatgtacaatactgatgagtctattcgttcttttgccgaggcttctatggcaactgctttagagaaaaagtggccactttatcttagcaccaaaaatacaagtctcaagaaatatgatggaagattc

SEQ ID NO: 187861 - DNA, 275 bp, Glycine max
ggtgattggagctgtgcagggcatgatgactggacttgtatgcatcaccccaggggcagggcttgtgcaatcatgggctgctatagtgatgggaatattatctgggagcattccatgggtgactatgatgattttgcataaaaagtcaactttgctacagaaggtagatgacacccttggtgtgtttcacacacatgctgtggctggccttttgggtggtctcctcacaggtctattagcagaaccagccctttgtagacttctattgccagtaa

SEQ ID NO: 187862 - DNA, 268 bp, Glycine max
gctcattggaaagaggtcatttatttcaatgtcttatgaagaacataagcgccttaggcgtttgacatcctcttcaatcaatggcatggaagcactgtccctctacttgacatatattgaaaaaaatgtgaaatcttccttggagaaatgggccaacatgggacaaattgagttcttaactgagatcaggaagcttactttcaaaatcattatgcatattttccttagctcagagagtgaacatgttatggaggctttggagagggat

SEQ ID NO: 187863 - DNA, 271 bp, Glycine max
ctatttctaactaattattgtgcttattattattgttgagaaagaaaagaatggcaaagttaataaaattctttgagttgaacacaggggccaagattccttctgttgggttaggcacttggcaagctgagcctggtgttgtagccaaagctgtcaccacagccattctggttggatacaggcatattgattgtgctcaagcgtataacaatcaagcagagattggttctgctcttaagaagctttttgatgatggtgtggtgaagcgtga

SEQ ID NO: 187864 - DNA, 277 bp, Glycine max
aaaactacagagtcatgacaacaatgaaatatatgaaaaggttgttaaaattcttgaaacatattggttggaagaagaagatgagacactaccttcaggaaatggtgctcaacctggtttcaatttcggaaacaatgagcttcccgtcccatctggtggattcaacttcagctgaagactttttcttaaaaggggctttttggagccatataggggtttgtcccgggtgggcgtgtgtgttgggataaacgtctggagagtcaaccattgcaccttg

SEQ ID NO: 187865 - DNA, 276 bp, Glycine max
gcaaagctcccaagatacaaagactggtcactcctcttacgctccaaagaaagcgggcaagaattgctgataagaagaagaggattgccaaggcaaaatctgaggcagcagagtaccagaaactccttgcctccaggttgaaggagcagagagaccgccgcagtgagagtttggccaagacgagatccaagctttccagtgctgctaaggcagcagctgtataagctgctttcgatagagagatatggtgaagtttaatcatcatatgtagttttt

SEQ ID NO: 187866 - DNA, 269 bp, Glycine max
ctcgagcgattcggctcgactctggatctcgtctcgatcgaccgatctcgaacatgagcactggggagcttctcaacatcgaacctctcgaactcaagttcccctttgagctgaagaagcagatctcatgttctcttcaattgtccaataagaccgatagctatgtggccttcaaggtgaaaacaaccaatccgaagaagtattgtgttcgtccgaacactggtattgtcacgccacgatctacgtgtgatgttatcgttaccatgcaa

SEQ ID NO: 187867 - DNA, 278 bp, Glycine max
ggaaaaagggtggcaagaagaaggcagctgatccctttgccaagaaggattggtatgacattaaggccccttctctttttcaagtgaaaaatgttggcaaaaccctcgtctctcgtacgcagggtaccaagattgcttctgaaggacttaaacatagagtgtttgaggtctccttggctgatcttcaaggggatgaggatcatgcattcaagaagattaggttgagagctgaagatgtgcaagggaagaatgtcctgacaaatttctggggaatggat

SEQ ID NO: 187868 - DNA, 243 bp, Glycine max
agatgggttaggaaaaggttcatatcagtattgtggtcattggccatgtcgactctgggaaatccactaccactggtcacttgatttacaagcttggaggcattgacaagcgtgttattgagaggtttgagaaggaagctgctgagatgaacaagaggtctttcaagtatgcctgggtgctggacaaacttaaggctgagcgtgaaagaggaatcaccattgatattgctttgtggaagtttg

SEQ ID NO: 187869 - DNA, 266 bp, Glycine max
cacaaatctgggtatagtggagtagtagggtttttgcgtttgagagagaagaagcatgagcaggagtttgggaattccggtgaagctgctccacgaggcttcggggcacgtggtgacggtggagctcaagagcggagaactctacagaggaagcatgatcgagtgcgaggacaactggaactgtcaactcgagagcatcacctacactgccaaggatggcaaaacatcgcaacttgagcatgtgtttattcgaggcagcaaagtca

SEQ ID NO: 187870 - DNA, 271 bp, Glycine max
caacagtcctgcctcacttgttggctcccctgcaaacccttggtcaaagtggggttctcctattgggaaagctgattggtcagtaaatggagactcccttggtcgtcagatgcgaagatcatcctcgtttgagcgcaagaacaatggggaagagcctgatctctcttgggtccaatctctggtgaaggagtccccacctgagatgatcaaagagaagtttgcatctcctatgcctactgcatctgctgatggaccgattcaattcccaatt

SEQ ID NO: 187871 - DNA, 281 bp, Glycine max
ctcgagccgctccgcaccagtttcaccgcacgaatatcttgtagtttggagcgatccgacaaaaactctgtaaacatgttggtttaccaggacctccttacaggtgatgagcttctctctgactccttccgttacaaggaaattgagaatggaatgctgtgggaagttgaggggaagtgggttgttaaaggagcagttgatgtagacattggtgcaaacccttctgctgagggtggaggagaagatgagggagttgatgatgcagctgttaaggttgttga

SEQ ID NO: 187872 - DNA, 272 bp, Glycine max
ctcgagccgcttggctgtggtgttggctttgctaatcaggccgtgccagtgttcctctctgagatagcaccttcaagaatacgaggagcattgaatatattgttccagctcaatgtcacaattggcattctatttgctaaccttgtcaactatggcaccaacaaaatcaaaggtgggtggggttggaggctatctcttgggttggctggtatcccagcagttctgctaactttgggagccttgttcgtggtggacaccccaacagtttgatt

SEQ ID NO: 187873 - DNA, 124 bp, Glycine max
tcgagcagagagaaagagaaatgggagaacgaaaaggaatcccaattgctctggggctcttggcgatgctcctcttcttcattgcttcttcctcttcctctcacctcgttcgtgcttccgatga

SEQ ID NO: 187874 - DNA, 272 bp, Glycine max
gggtcaccgaaaatcatcctcatcttgtccttcctgctttgcgcaaatcacttaaaactcttcaactagagtacttggacctgtatctcatccactggcccctgagttctcagccagggaagttctcatttccaattgaagtagaagatctcttgccttttgacgtgaagggtgtgtgggaatccatggaagagtgccagaaacttggcctcaccaaagccattggagtcagcaacttctctgtcaagaagcttcagaatctgctctctgtt

SEQ ID NO: 187875 - DNA, 263 bp, Glycine max
tgatccgctccgagagctagaagaaatcaacgatgcctcgctatgatgataaatatggtaatacccgcctctatgttggacggttgtcttcgaggactcgttcccgtgacctggagcgtgtcttcagcagatatggaagagttcgaggcgtagatatgaagaatgatttcgcctttgttgaatttagtgatcctcgagatgctgatgatgctagatacaacctggatggtcgtgatgttgaaggaagtcgtattattgtggaa

SEQ ID NO: 187876 - DNA, 269 bp, Glycine max
ggcgtgttgctgcttacatttataagaaagctggaagatggaagcagtccattgctttgtcaaaaaaagacaatctttacaaggactgtatggaaacttgctctcaatctggtgaccgtgaactctcggaggatttgcttgtttactttattgagcaggagaagtcagaatgttttgcatcttgcctctttgtctgttatgatataatacggccagatgttgctcttgagctagcttggatgaacaatatgattgattttgctttccca

SEQ ID NO: 187877 - DNA, 271 bp, Glycine max
actcgagcgattcggctcgacggcctcgagctcaagaaagagctctcgggtgtttgtagggcttgcttttctgctgatgctgtaaatacgcatgttgattttgtaagggagtacaaacaggattttgaacgtgatcttgatccagaaagcactgctactttcccatccactttgtctcaactgactgagcggttgaaacactggaaaaatgttcttcaaagcaatgttgaggataggtttccagcagtattaaagttggaagaagaaagca

SEQ ID NO: 187878 - DNA, 198 bp, Glycine max
cgagcgaatcggctcgaggcgaaatgcgatacttggtgtgcattgcagaatcccgtgaaccatcgagtctttgaacgcaagttgcgcccgaagccattaggccgagggcacgcctgcctgggtgtcacacatcgtttccccaacgcaaacatgttacaatgttgctgcgcggggtgtatgctgacctcccgcgagcac

SEQ ID NO: 187879 - DNA, 277 bp, Glycine max
ccgtcacaatgcagctagctgtggcggccaacgctgtcgtttcaccgtcgccgttccgacctcatccccttctccggtcatccttctccggcgtctccgttaagctcactccccaatccataacgttttcacgcttgaagcccctcaccgtcttcgccgccaccaagaaggccgtcgctgtcctcaaggggacctccgccgtcgaaggcgtcgccactctcatccaagaagacgatggcccgacgacagtttctgttagcatcactggccttactcc

SEQ ID NO: 187880 - DNA, 274 bp, Glycine max
cctccctttctggctttctctctctaaaactatcatgtcctccaccgcggctcccgtccttcccatatccaacccccaaaccaccgccgcaagctcggcgccatcgaggctccggcgaacaacccggccttccgcgccttcatcaacaacctctccgcgtccctccgacacggcctcgaccagcgccgcccgtggtcggagctcggggaccgctccgcgttctcgaagcccgagtccttctccgaagccaccctccgcgtccgcaagaacttct

SEQ ID NO: 187881 - DNA, 198 bp, Glycine max
ctcgagccgctcgagccgatttctaactaattgtgcttatccttcattgagagaaaaaatggccaaatcacatcaaattctttgagttgaacacaggggccaagattccttctcttgggttagggacttggcaagctgaacctggtgttgtagctgaagctctcaccacagccattcaggttggatacaggcatattg

SEQ ID NO: 187882 - DNA, 272 bp, Glycine max
gtgcccgtactgttcggcggcgcaggggcgttgcgccaccacgagtagcgggcgttcgatcacggaatgcacgtcttgcgggcgcgtggtggaagagcgacagtcgcatccccaccacgtgctccacgtgcgcgcccaggacaaccctctgtgtctggtcacatcggatctcgctctccccgcgctcaatcaaaacaacgaggaggaggaccctttcgagcccacgggcttcatcaccgccttctactcctgggccctcgagcccagcccac

SEQ ID NO: 187883 - DNA, 269 bp, Glycine max
atctgttcctccctatgatgttccattttctggaggatcagcatatcactacaactatggtagtcgcctttctgctgggagtccttatagaccgttgcatttatctggaccaacaccctacactggtggaccagtgatgggaaatggtgggatatatggaatgccccaactgttggatcgatatggcctgggcgtgcctattggacctgggacaatgggtgctaggccaggatttttccatgatgacaagtcacagaaaaaagatgcaa

SEQ ID NO: 187884 - DNA, 266 bp, Glycine max
ctcgagccgctcgagccggaaacttccccctccagttctccagtttgttgaggtgtcatatggttataatcctgataatctcatctacaagaacattgactttggggttgatttagactctagggttgcactggttggacccaatggtgctgggaagagtacactactgaagctaatgacaggtgacttgatgcctagtgacggcatggtaaggcgtcataatcatcttcgaattgcacaatatcaccagcatttggcagaaaagc

SEQ ID NO: 187885 - DNA, 270 bp, Glycine max
gtggattccaggaaggtattcctatagatcctaagagaaaagccaacatgaagaagagggatctatctattgctaagatttctgatgctgaactagaagttgaggttgagaaactgaagcaacaggttttggaagctaaggaatcttctcctgttcctccaaaactagatctggatgagatgctaaagcaactgacaagggaggttgatctagaatactctgaggcagttaaagccacgggcttgacagacagtttgttgaaactaaggg

SEQ ID NO: 187886 - DNA, 215 bp, Glycine max
ctcgagcgattcggctcgagcggctcgagctcgacgcttactgcatgcttctgttgattgccaaaagaaacttgtactggactgacttccagctagcaatcttgaaactgcaactgcaaaagggaatcatgatgcttataaggctgcttggaagttattgaagggtgctgatggtgttcttgttcctggagggtttggggatagaggagtgcaag

SEQ ID NO: 187887 - DNA, 275 bp, Glycine max
ctggacgcgctcgagccgaatcggctcgaggcgcttctctcactcactcactcttcttctaccaccttcgcgtggttttctttctcgaactcgaacgcagatgcgtgagattcttcacatccagggagggcaatgcgggaaccagatcggagccaagttctgggaggtggtgtgcgcggagacgggatcgattcaacggggaggtaccaaggggacaacgagttgcaactcgagcgagtcaacgtctactacaatgaagcgagttgcggaaggtt

SEQ ID NO: 187888 - DNA, 276 bp, Glycine max
aacacaactccactcttagctgccattggtttttcttcttccatttctcttcctttctaagcttttttcgattacccatttggagattctgtcctaatggctcttgctccttccaaagtttcctccttttccgggttttctcccaaacccagtgttggggatgctctgaaaaacccaacttgctctgtttctctgagctttgcgaatgtgaaacttggaagcagaaaccttagggtttgtgcctcaactgtgcctctctcaggggtgattttcgaa

SEQ ID NO: 187889 - DNA, 275 bp, Glycine max
ggttccttcacatgtcttgatgggcatccagcatagtactacttttgcttcattatctccacttggtgaagcatgctcaagaaaagacttgactgccatacaagaagttctggaaagtattggctataaagatgacgaaggagtggcaaatgagttatcatttcacatgtggactgatcaaatgcaggacacattaaattgcaagaaaaagggagatgttgctttccggcagaaagattttagactggcaattgagtgctactcgcagttcatag

SEQ ID NO: 187890 - DNA, 263 bp, Glycine max
gtgtcatttacgcttctcttctctgcagcaactatgcctaaccctaaggtcttcttcgacatgaccatcggcggtcaatctgctggccgcatcgtgatggagctctacgccgacgtcactccccgcaccgccgagaacttccgcgcgctttgcaccggcgagaagggcgtagggcggagcggcaagcccctccactacaagggctcgtccttccaccgcgtgatcccgagtttcatgtgtcagggtggcgacttcaccgccgg

SEQ ID NO: 187891 - DNA, 274 bp, Glycine max
ctgcacgctctgcttccagcgagtgttctttcttcgtttcaacaccttaatttgcacacgctgcttcttctgcttgagaaatggcacaagaaacctttctattcacatctgaatctgtaaacgagggtcaccccgacaagctgtgcgaccagatctctgatgcagtgctcgatgcgtgccttgaacaggaccctgacagcaaggttgcctgtgagacatgcaccaagaccaacatggtcatggtctttggagagatcacaaccaaggccaacgt

SEQ ID NO: 187892 - DNA, 270 bp, Glycine max
aattagggctactaaaagtcatggttgtgcaagggaaaaggttggtgatccgggatttcaagaccagtgatccttatgtagtactcaaactagggaatcagactgcaaagaccaaggtaattaatagctgcttgaatcctgtttggaatgaagagctgaatttcactctgacagaaccattgggagttctgaatttggaagtgtttgacaaagatcttttgaaggctgatgacaagatgggaaatgctttcttgaaccttcaaccaatag

SEQ ID NO: 187893 - DNA, 271 bp, Glycine max
cgaggttatactctctctctctttgtcgcttggatcactgatctcatctcaattttcagatatgtcgacatctgataagccagaagtggtggaaaggggtagcaaggatgaaaaacacaaggaagatgatcaagaggaggggaagggtggattcattgagaaggtgaaggatttcattcatgacattggtgagaagattgaggaagctattgggtttgggaagccaactgctgacgttactgcgattcacattccatcgattaatcttcac

SEQ ID NO: 187894 - DNA, 270 bp, Glycine max
gaagatggcaggaaagaaaatcccagatgtgttgctgaattcaggacacaaaatgccagttataggcatgggaacttcagtggagaatcgtccatcaaatgagacccttgcttctatctatgttgaagccattgaggtgggttaccgtcattttgacactgctgcagtgtatggaacagaggaagccataggcctagccgtggccaaagccatagacaaaggccttataaagagtagagatgaagttttcatcacttcaaagccttggaa

SEQ ID NO: 187895 - DNA, 259 bp, Glycine max
ctagccgcagcacgaggagcagcctcaggaggagaaggatgtctcacaggaagttcgagcacccaaggcacggttcactgggatttcttcccaggaagcgtgctgctcgtcacaggggaaaagtgaaggcattccccaaggatgacccatccaaggcacccaagctcactgcattcttgggttacaaggccggtatgactcacattgttagagaggtcgcgaagccaggatcaaagcttcacaagaaggaacttgtgag

SEQ ID NO: 187896 - DNA, 274 bp, Glycine max
ctttatcacacccaattcagatcccatctatattgcttatcatgcatgaggaatggggagttccagttcatgatgacaagatgctgtttgaacttttagttttgagcggtgctcaagttggatctgattggacctcaaccttgaagaaacgcctagatttcagggctgcattttcagaatttgatgcagaaaccgtggctaacttgactgataagcaaatgatgtctattagttctgaatatggcattgacataagcagagtccgaggagttgt

SEQ ID NO: 187897 - DNA, 304 bp, Glycine max
tccgtattcggctcgatgcatcttcataatcacgtgtcaaaattcttggccaacagctttcttgttaattcctcttgcttggttaaacatttggtaccggggttattttcttgcttcatctcgcgagttaactcgtctggattcaattacaaaagcaccagtgattcaccatttctctgatagcatttccggggtcatgacaattcgcgcattcagacagcagaaggcattttgcggagaaaacattatacgggtgaatgctaatttgagaatggatttccacaacttcagttccaatgcgtgg

SEQ ID NO: 187898 - DNA, 283 bp, Glycine max
tggagggtgcagatgttgttataattcctgctggtgtgcccagaaagcctggaatgactcgtgatgatctttttaacatcaatgctggcattgttaagacactgtgtactgctattgctaagtactgccctcatgcccttgttaacatgataagcaatcctgtgaactccactgttcctattgctgctgaagttttcaagaaggcaggaacgtatgatgagaagagattgtttggtgttaccacccttgatgttgttagggcaaaaactttctatgctgggaa

SEQ ID NO: 187899 - DNA, 236 bp, Glycine max
ttagcactgcaatgtcttccatattgctgctagttggaatgttatcgtccattacagttgcacaatccataggagtttgctatggagtaatccgtaattaatctaccatcaaggcaagaagttgtggacttgtataaaacaaatgggataggtagaatgcgtatatattatccagttgaagaagcaccccaagcccttagaggttcaggcattgagttgattatggacgtggctaa

SEQ ID NO: 187900 - DNA, 276 bp, Glycine max
tacaaatggagcaggagatgcttttgttggaggatttctttcacaattggttaagcataagcccattgaagaatgcattagagctgggtgttatgcagccaatgttatcatccaaaggcctggctgcacatacccaccgacgcctgattttcattgagtgattcctactttttctgttactgctatgaatttttttctttttatcattgagaaggattttaatagccacactctaactggtgtggggttttttaaccccccggctagggaaaacag

SEQ ID NO: 187901 - DNA, 280 bp, Glycine max
gcatcttcctccatagtccatttccttcgtctgagatataccgaacccttcctgttagggatgaacttcttagagctcttctgaattctgaccttattgggtttcatacttttgattatgccaggcatttcctctcctgttgcagcagaatgcttgggcattcttaccaatccaagcgtggctacatttgccttgagtactatggaagaacagtaagcattaagattcttcctgttggtattcatataggtcagctccaatctgtcatgagtcatcccga

SEQ ID NO: 187902 - DNA, 286 bp, Glycine max
ggtgattggagctgtacagtgcatgatgactggacttgtatgcatcaccccaggggcaaggcatgtgcaatcatggactgctatagtgatgggtatattatctgggagcattccatgggtgactctgatgattttgcataaaaagtcaactttgctacagaaggtagatgacacccatggtgtgtttcacacacatgctgtggctggcctattgggtggtctcctcacaggtctattagcagaaccaccctatgtagattctattgccagtaacaattcaaggggt

SEQ ID NO: 187903 - DNA, 281 bp, Glycine max
gtctcccccttagcattttcaatcctttttttgtccttcaccatagaactcttcattggcattgcttcagcagcacaagaaccagtgcttgatacctcaggccagaagctgagaacaggtgtcaagtactacattctaccagtcttcagaggcagaggtggaggcctaacagtttcaagcagtggcaacaacacatgccccctactttgtggtgcaagagaagcttgaagtctcaaagggcaccccagttaccttcacacctgtaatgccgaaagtggtgt

SEQ ID NO: 187904 - DNA, 290 bp, Glycine max
cgagtttcacagcagcaatggtgtacgtcaaggctcagaaatcaaaagcctacttcaagagatatcaagtcaagttcaagagaagaagagagggaaaaaccgattaccgtgccaggattcggtttgttaatcaggacaagaacaaatataacactccgaaataccgatttgttgttcgctttagcaacaaggacattgttgcacaaataatatctgctagcattgctggcgatattgttcttgctgcagcatatgcacatgagctgccacgatatggtcttgaagtaggg

SEQ ID NO: 187905 - DNA, 281 bp, Glycine max
caaattaagatggaggggaaggagcaggatgtgtcgctgggagcgaacaagttcccggagagacagccgattgggacggcggcgcagagccaagacgacggcaaggactaccaggagccggcgccggcgccactggttgacccgacggagtttacgtcatggtccttttacagagcagggatagcagagtttgtggccacttttctgtttctatacatcactgtcttaaccgtcatgggagtcgccggggctaagtctaagtgcagtaccgttgggattca

SEQ ID NO: 187906 - DNA, 280 bp, Glycine max
gcaacgccctcgacctattctcaaactttaaataggtaggacggtgcggctgctctgttgagccgcgccatggaatcgagagctccaagtgggccatttttggtaagcagaactggcgatgcgggatgaaccggaagctgggttacggtgcccaactgcgcgctaacctagaccccacaaagggtgttggtcgattaagacagcaggacggtggtcatggaagtcgaaatccgctaaggagtgtgtaacaactcacctgccgaatcaactagccccgaaa

SEQ ID NO: 187907 - DNA, 271 bp, Glycine max
ggagggtacggcaacatgttgagaaaatatggcttatccgttgataacgtcatcgacgcgcaaattgttgatgtgaaaggaaatcttctaaacagaaaaacaatgggggaagatctgttctgggctattagaggaggtggtggagcgagttttggtgtcattttgtcgtttactattaaactcgttccggtgccggaaacggttaccgttttccgcgttgagaagactcttgaaacgaatgtcactgccactgaccttgtcgtgcagtggc

SEQ ID NO: 187908 - DNA, 270 bp, Glycine max
ggattatttaggccgtgaatgtccagagcctttaaaggaaattcttgttctgtgtgagaatcgttgtgtactttttgataacaagactaaggatgaagggaagcgctttggacaagttcaacaacttctctcttttgtaaacatggttttatctcgtaatggtggacgaccttatacagatgagttatttactcaactgaagaagggagcaatggagctgcataaccaacaaagagaggttgattctttaaaaggatattccaaaggaga

SEQ ID NO: 187909 - DNA, 266 bp, Glycine max
taaagattaagccatgcatgtgtaagtatgaactaattcagactgtgaaactgcgaatggctcattaaatcagttatagtttgtttgatggtatctactactcggataaccgtagtaattctagagctaatacgtgcaacaaaccccgacttctggaagggatgcatttattagataaaaggtcaacacaggctctgacctgttgctttgatgattcatgataactcgtcggatcgcacggcctttgtgccggcgacgcatcattc

SEQ ID NO: 187910 - DNA, 298 bp, Glycine max
tgagattctttgtttgctaccttctctcggaaaaatggttacgttcaggtttcaccagtaccaggtggttgggagggctcttcccacggaagcagatcagcaccccaagatctaccgaatgaagctctgggccaccaacgaggttcgcgccaagtccaagttctggtattttctgaggaaactgaaaaaggtgaagaagagcaatggccaagtgcttgccatcaacgagatttttgagaagaacccaaccaaaattaagaactatggtatatggttgcggtatcagagtaggactggt

SEQ ID NO: 187911 - DNA, 277 bp, Glycine max
tttcatttccgcttcaagttacctatgaggctctgggttggttcgccttcgtttcctggtccatcagtttctatcctcaagtcatcttgaattttcgcaggaagagtgtggttggactcaacttcgatttcgtggtgctaaatctgaccaagcacagttcctatctcatatacaacgcttctctctacttcagctctgctattcagatgcagtactttgagaaatacggttatggagagatgatacctgttgctgcaaatgatgttgctttctcgat

SEQ ID NO: 187912 - DNA, 280 bp, Glycine max
gagggagagtgttgacgctccatcaagatgggtatttctagggattccatgcacaagaaaaaagcaactaagtggcaagaagaaggcatggagaaagaagagaaagtatgtggttgggcgtcaggccgcaaacaccaagttatcaagcaacaaaactatccggaggattcgtgttcgaggtggcaatgttaaatggagggcattgaggttggataccggcaattactcatggggtagtgaagcagttactcgcaagactcgtattctagatgttgtttac

SEQ ID NO: 187913 - DNA, 279 bp, Glycine max
gtaaaaactacaaatcataatcagtcataacttcggcgacttctcgatattatttttactgacagagccaccgacagagccggctaatcccgtgacggtttgagactggccgacaagtacaacctgaagaaccccgccgtgaagcggatcctccaggaggttcaggagatgcagtccaacccatccgacgatttcatgagatcacctactagaggaaaatatatttgagtggcaatttgcgattagagggcctcgagataaggaatttgagggtggtat

SEQ ID NO: 187914 - DNA, 273 bp, Glycine max
tagatcttatggattatgtgaaggaaagatgtgagataggtgaagctttggatattggtgaggcttcctttacaactgtgcttaattccatatcaaacactttcttctcaatggatttggcttattacacttctgataagtctcaagagttcaaggacatcgtttggggtatcatggaagaagctgggaggcctaatgttgtggactttttcccaatctttcgcctgcttgatccacaaggtgtgcggagaagaatgaatggttattttggaa

SEQ ID NO: 187915 - DNA, 261 bp, Glycine max
tgttgctcctatagccggcgctcaacaacatggcggacaaggcagtcaccatccgaaccagaaagttcatgacaaacaggcttctctccagaaagcaattcatcgttgatgtccttcatccagggagggctaatgtttccaaggctgaactgaaggagaaattgggcagaatgtatgacgtgaaagacactaacactgtatttgtcttcaagtttcgaactcattttggtggtggcaagtccactgggtttggtttgatct

SEQ ID NO: 187916 - DNA, 263 bp, Glycine max
ttagaaattaaagatatatcattccacaacacaaattaaagttagtgagacgtacccttattatggccaaagaaggtcttggacttgaaatcactgagctaaggttgggtctacctgatgcggagcatcaagtaagtgtagtcaataagaaaaatgagaagaagagggcattctcggaaattgatgatggtgttggagatgaaaatagctcctccggcggaggcgaccggaaaatggagacgaataagagtcaagtggtgggg

SEQ ID NO: 187917 - DNA, 272 bp, Glycine max
gctgcaatggcttcaagtcaggaggaggtgacccttttgggagctactggaagcccatttgtgtgcagggttcatattgccctcaagttgaagggagttcaatacaaatatgtcgaagaaaatttgaggaacaagagtgaactgcttctacaaatccaacccagttcacaagaaggttccagtgtttattcacaatgagaagcccatagcagagtctcttgtgattgttgaatacatgatgagactggaagaacaacccacttgcctctgat

SEQ ID NO: 187918 - DNA, 288 bp, Glycine max
catacctcaacgaagaggttaaagagacggcaacactttgctgtccgccttgaccgagcagagcttcgtcttggccctcgattttgccctaaagtactctcagtcacaacagacaccgtcgtcgtcgtcgtcgtcatcaatggcaccgaagcagaccaaggctgagaagaagatcgcttacgatgcgaagtgtgcgacctaatggaggagtacggccagatcctcgttgtgaactccgataacgtgggatcgaaccagctccagaacgttgcgcaagggtctccgtgg

SEQ ID NO: 187919 - DNA, 274 bp, Glycine max
ggcacggatagtttcttctgtattgcaaactgatttatagtcagaacatgttttgatgtcagataaacacaatatagagaatgaacaaaataatcagcttagaaatcaagttgcacaacttttacggttagagcaggatcagacattgcagatacaagagcaagattcaaccatccaaagtttgcaggctaaaattagactcttgaaactcaactcaatgcagatattaaatctagtgaatctaggtcaacattgtctccgagccagatttgct

SEQ ID NO: 187920 - DNA, 275 bp, Glycine max
gaaccgtggaaacttcaaccgggcaacaagtacttcttcaccagaaaccactccaccatcgtcgacttcgccatcggcaaaaagtatgtttctggaaatggattccacataatcggggctataacggatagtccttgtctcaaactcaagcctgtcaccaaggttgttaaggctgggattttggaggttggtgtccaaacctatggaggaggcttgtggcacacatggtttgatcgagacttgaccgtggcggggaaggtcattgtgcaggaaga

SEQ ID NO: 187921 - DNA, 280 bp, Glycine max
gatatcccaacatcacaagtttacgtgaatttttcattgccaaataccaagaaaattctccaagttttaaacttgcccagaggaactttgttgaaagtatggccggatattccctggtttgctacctcctgcaggtgaaggataggcataatgggaacctcttaatggatgaagaaggccatattatacatattgattttggcttcatgctttctaattcacccggtggtgttaattttgaaagtgcacctttcaaattaacccgagaacttcttgaggt

SEQ ID NO: 187922 - DNA, 280 bp, Glycine max
cttcgttgcttggtgatgtccctttctgttctcttcactcttggtcttgcgagagaaagccatgccagagacgaagatttttggcatgctgtttggccaaacactcccattccaagttcattgcgagatcttctaaagcctggccctgtaagtgttgaaatcgatgatcaccctatgcaaattgaagaaacacagtacccgtaaaccttcttctataaagaagaccttcatccaggcaaaacaatgaaagtacaattcagcaagcctcccttatcaacaa

SEQ ID NO: 187923 - DNA, 274 bp, Glycine max
tttctattctaagattttgagaatgtctagctgtgggtgtggaagcagctgcaactgtggcagcaactgcggttgcaacaagtactcttttgacttgagttacgttgagaagacaaccacagagactctagttttgggtgttgggcctgtgaaggccaattggagggtgctgaaatggatgttgcatctgagaacggtggctgcaactgtggatcaagtctgcacctgtgacccatgcaactgcaagtaaggtcaagatgtataaccttgaagc

SEQ ID NO: 187924 - DNA, 266 bp, Glycine max
tcccctcataaaaaaaacctaccaatggctcgcgcaaaggcagagaagaagcccgcggagaagaagccggcagagaaggccccagcggagaagaagccgaaggaagaagaagatatcgaaggaaggaggaagcgagaagaagaagaagagaacaaagaagagcgttgagacctacaagatctacatcttcaaggtgttgaagcaagtgcaccccgacatcgggatctccagcaaggctatggggatcatgaacagttcataaacga

SEQ ID NO: 187925 - DNA, 273 bp, Glycine max
gggaaaaagacaaataaaatgggttccgataataccaacttggagttcttgaaggagatcggtttgggctcctccaacattggttcttacattaatggccaatggaaagccactggttcttctgtcacttctgttaatccttctaacaatcagagcatagctcaagtgactgaagcgactttgcaagattatgaggagggattgcaagcttgcagtgaagcagccaagacatggatgactattccggcaccgaagagaggtgagattgtgaga

SEQ ID NO: 187926 - DNA, 284 bp, Glycine max
ttacactcttcttcatattcttcttcttcttgttcttgttctatctgtgacgagcatcatggcctcgagagcagtgctattgttggctatgtgtgtgcttccggccatggttgtggccattcgcccagcaaagaaccctttttgcgtgaagggtcgcgtctactgtgacccttgccgtgctggttttgagacctcagcaaccacctacattgccggtgctgagattatgttgcaatgcaagagcagggttagcaacgaggttgtgtacaccaagaaggggtaca

SEQ ID NO: 187927 - DNA, 288 bp, Glycine max
gcgggttactgtctgttcaagctaccatctctctctctctttcttagtgcctccttgccagaagttaaaatggcccaagaaactttcctattcacatctgaatcagtgaacgaggggcaccctgacaagctctgtgaccagatctccgatgctgtgctcgatgcatgcttggagcaggaccctgacagcaaggttgcctgtgaaacctgcaccaagaccaacatggtgatggttttcggagagtatcacaaccaaggccaacgtgggatatgagcagattgtgcgtga

SEQ ID NO: 187928 - DNA, 288 bp, Glycine max
cttttacatcagatacataaaggaattcctataataggagctggtgctgggacaggtatatctgccaagtttgaagaagctggaggggttgatctaatagtattgtacaattcagggcgcttccgaatggctggaagaggttcattagctggattattaccttttgctgatgctaatgctgttgttctcgacatggccaatgaagttttgccagtggtaaagaaggttccagttcttgctggtgtatgtgcaactgatcccttccgtcgaatggattacttacttaaa

SEQ ID NO: 187929 - DNA, 271 bp, Glycine max
ctagctcgtcattcagctctaccttcaactcgtgttctgtgattgtgtttgttttttctctcacctgataatgtcttgctgcggtggtaactgtggttgcggaagctcctgcaagtgcggcaacggctgcggaggctgcaagatgtacccagacttgagctacactgagtcaaccaccaccgagaccttggtcatgggagtggcacctgttaaggctcaatttgagggtgctgaaatgggtgtgcccgctgagaacgatcgctgcaaatgt

SEQ ID NO: 187930 - DNA, 273 bp, Glycine max
cagctggcagtgcttttgggcctttcaacttttttcacaatggcagatgattcaatcactactctttggccttggaaggttcgtgagttggctgaaaaggtgtctgaaaacggtgtcttcagactactccgaagtgatgttactcggttccttaccacaatacttattggcacaacggtggtcaatattggggcaactgctcttgtcactgaagcagcaatgctatgtttggtgcagctggtgtcagtgcagcaacaggagtgatgactgttg

SEQ ID NO: 187931 - DNA, 275 bp, Glycine max
tgtgttatgcagccaatgttatcatccaaaggcctagctgcataactcccagctctaatgcactcttcaatgggcttatgcttaaccaattgtgaaagaaatcctccaacataagcatctcctgctccatttgtgtcaactaatttctctttaggtaacggtatcacggggtaaattttcacttttccatcctcggcaacgcaaacaggatctgcaccttcggtgatacacgtaatccttttatgtgtttccgatgactttggcaactgagaaat

SEQ ID NO: 187932 - DNA, 277 bp, Glycine max
gtaaggtacctctatattggggaattactgctgatggctacgtagcatttgccgatgatgcagaattgcttaaaggtgcttgtggcaagtcacttgcttctttccctcaaggatgtttctactctacagctgttggaggattgatgtgctatgagaatcctaaaaataagattactgcagttcctgctaatgaggaggaaatctggggagcgactttcaggtggtaaggccagccagtgtcgtagccagacaatagattttaccttctgctggtgag

SEQ ID NO: 187933 - DNA, 278 bp, Glycine max
gggaggcaaggcttcccaccaagatactctggatgagaaggatgcgtgtgctcagacggttgcttcgtaagtacagggaatcaaagaaaattgacaagcacatgtaccatgatatgtacatgaaggtgaaaggtaatgttttcaagaacaagagagtcttgatggagagcattcacaagtctaaggctgagaaggcaagagagaagactttgtctgatcagtttgaggctaagcgtgcaaagaacaaggctagcagggaaaggaaaatgctcggaggg

SEQ ID NO: 187934 - DNA, 287 bp, Glycine max
ggctaatccgcctcacgagggtcaccaacggcacgtgcctttcgggggccgaagccccctactgctggtcggcaaacggacggcgggcgcacgcgtcgcttctagcccggattctgacttagaggcacttcagtcataatccaacgcacggtagcttcgcgccactggcttttcaaccaagcgcgatgaccaattgtgcgaatcaacggttcctctcgtactaggttgaattactattgcgacactgtcatcagtagggtaaaactaacctgtctcacgacggtcta

SEQ ID NO: 187935 - DNA, 261 bp, Glycine max
aagcacaagttgcccttaggtggggactgcaaacaggtcatagtgtgctgcctaagagcactaatgagtccagaatcaagggaaactttgatgtgtttgactggtctattccagaagaagtgatggataagttcactgaaattaagcaggatagactaattaagggcactttttttgttgacgagacctatggtgcctttaagaccgttgaagagctttgggatggtgagatctgagcaatatgcttcatagagatgttga

SEQ ID NO: 187936 - DNA, 264 bp, Glycine max
tctcgagccgaatcggctcgaggcggattaaggagtacagacagaaggttgaattggagctattgaacatctgtaatgatgatatgagaatgattgatgagcaccttatcccttcggctgcagctggtgaatccactgtgttttactataagatgaaaggagcttattatcgatatcttgctgaatttacgtcaggccatgagcagaaggaagctgctgatcgatctatgacagcatctgagtctgctaccggtgcagcagagg

SEQ ID NO: 187937 - DNA, 274 bp, Glycine max
tattctattctaagattttgagaatgtctagctgtgggtgtggaagcagctgcaactgtggcagcaactgcggttgcaacaagtactcttttgacttgagttacgttgagaagacaaccacagagactctagttttgggtgttgggcctgtgaaggccaattggagggtgctgaaatgggtgttgcatctgagaacggtggctgcaactgtggatcacgctgcacctgtgacccatgcaactgcaagtaaggtcaagatgtataaccttgaagc

SEQ ID NO: 187938 - DNA, 267 bp, Glycine max
cttttgttgttctgtgtttgtgtttgttttttctctcacctgaacatgtcttgctgcggtggtaactgtggttgcggaagctcctgcaagtgcggcaacggctgcggaggctgcaagatgtacccagacttgagctacactgagtcaaccaccaccgagaccttggtcatgggagtggcacctgttaaggctcaatttgagggtgctgaaatgggtgtgcccgctgagaacgatggctgcaaatgtggaccaaactgactctgcaac

SEQ ID NO: 187939 - DNA, 273 bp, Glycine max
cagaaggtgaaattttttcagcagaggatgctgacagtgcagagactgaaggagctgcaagataaaaggaaggagccttttacatatggacaggcaaagaggttgcagacatacttggagctcatgctgctcttttcgaggagcactattacatcaagcaatcaggtaactgtaacctatctggactgagtgatcctcacgatgaattcacgggaaagaatgtcctgattgagcgacaggaaacttcagaactggcatcaaaatatggcatgt

SEQ ID NO: 187940 - DNA, 275 bp, Glycine max
ttaagtgcaggaaactatcaactcatgagaaactggcacttaagaaaaatttaagcagactgaatggtggcaatctcctcaaggcaatgagcataattcatgagattgacccaaccttccaacatgatgctccacaggtcgaccttgaccttgatcgtcagagtgacttcatactgtggaaactaaacctttttaccaaagaagcactggaagatcaagacaaagctgctgctgaggagatggctgttaaccacaacgttaacactgaggaccag

SEQ ID NO: 187941 - DNA, 272 bp, Glycine max
ttggcctagcagctttgatatcctacaaggtcattcaaaagccacaatgcttttgatagcaaacaatgctgcccaagggattttatcctctttcttcttcaaatatgcagatacaattttgaagaagtactcatcaacagtagcaacaatcttcaccggtatagcatctgctgtactatttggacatactttaacaatgaacttcgttattggactttctattgtgtttatctcaatgcaccaattcttttcgccactttcaaaagttaaag

SEQ ID NO: 187942 - DNA, 287 bp, Glycine max
tttcaaagacactatttgttgggaacttgccatttagtgttgagagtgctgacgtggaagggttcttcaaggatgccggagaagttgttgatgttcgttttgctacagatgatactgggaagtttaaaggatttggacatgttgagtttgcaacagcagaggctgcccaaaatgctcttgggttgaatggacaacaattgtttaatcgtgaactccggcttgatttagctcgggaaaggggtgcatatacccccaacagcagcaactggaacaactcatcccagaaa

SEQ ID NO: 187943 - DNA, 276 bp, Glycine max
gcggggaacaagttccggatgtcgctgggtctgccggtggcggcgacggtgaactgcgccgacaatacgggggcgaagaacctctacatcatatcggtgaaagggatcaaagggcgtttgaaccgtctcccctcggcttgcgttggcgacatggtgatggccaccgtgaagaaggggaaacccgatctgaggaagaaggttttgccagctgtcattgttcgccagcgcaagccatggcgccgaaaggacggcgtctacatgtatttcgaagataat

SEQ ID NO: 187944 - DNA, 275 bp, Glycine max
ctcgagccgctcgagccgctcgttttacagagacacgtgtcccaaggttcactccattgatcgcgaatacgtgaggaacgtttccaagaaagatccccgcatgcttgccagtctcattagacttcactttcatgactgttttgttcaaggatgtgacgcatcagttttgttgaacaacactgccaccatagagagtgagcaacaagctctgccaaacaacaactctctaagaggtttggatgttgtgaacgacatcaagacagcagttgaacagg

SEQ ID NO: 187945 - DNA, 273 bp, Glycine max
agaggtcatagacacaacacaagacatgtctgttgttgagtcaggtgaacacaacaacatcagaggagtacctactcatggtggacgctatgttcagtacaatatctatggcaatctctttgaagtttccagaaagtatgtccctcctattcgccctgtgggtagaggcgcttatggtattgtttgcgctgctgtaaatgcagagacaggtgaggaagttgccattaagaagattggcaatgcatttgataacagaatagatgccaaaaggac

SEQ ID NO: 187946 - DNA, 270 bp, Glycine max
ccttctctgtctctgtttgttcttctcactttatattctctctctgtgtatatctcttcactcttattattccttctcttctcaacgacgatggaggacccatcagcagcaacaacgttgttgctgaacagcgaatattcgaggctgttcgtcgaggacacggacttgtacaatcgcattgtgttgggaaccctcttgccgcacttcgtgtggggcccactcccgcacttcctccagacgtggcttcgcaattacctcggcggcgtcctc

SEQ ID NO: 187947 - DNA, 269 bp, Glycine max
atcaccctgaagagttcggacggtgaggccttcgaggtggaggaggcggtggcgctggagtcgcagacgatcaagcacatgatcgaggacgactgcgccgacagtggaatccctctccccaatgtcaccagcaagattctggcgaaggttatcgagtactgcaagaagcacgttgaggcgaacagtgctgatgagaagcccagtgaggatgtgctcaaggcttgggacgtggatttcgtcaacgttgatcaggccactctcttcgatct

SEQ ID NO: 187948 - DNA, 144 bp, Glycine max
ggccgcccttttttttttgttttaaattggtaaatatggaacaagggcaaaagatttattaaacccggtaagggccaacaacgtaggtacgtggagtgccttgggggacttacccacttaacataaagtgcctttaccaaacat

SEQ ID NO: 187949 - DNA, 274 bp, Glycine max
cttgagtgctgtggacgacctaaattactaggccaacagaaactaacctataatgggttagacatgggattttcctcatacgatagttattggagagaaatcagaaaaatttgtgttgtccatgtccttagctccaaacgtgtccaaagctttacctcaataagacattttgaggtcaagcagatgataaaaaaaatatctaggcatgcctcatcttcaaaagttacaaatttaaatgaagtgcttatatctcttattagtactattgtatgta

SEQ ID NO: 187950 - DNA, 270 bp, Glycine max
atggacaggactggggcaggaaggaaccagagataatatgtcgacatatcgatcatgtcaatatgcttggtctcaataaaactgcacttagacttcggtttttgataaattggcttgttacctcattactgcaactgaagttgcctgcttctgatgggtgtgaaaaagcaagtcttgtccaaatctatggtccaaaaatcaaatatgaaagaggtgcagctgtggctttcaatgtgagagacagaagtagggggctaatcaatccagaga

SEQ ID NO: 187951 - DNA, 269 bp, Glycine max
agctcaccgacgaacagatctctgagttcaaggaagcctttagcctcttcgacaaggacggcgatggttgtattaccaccaaggaacttgggactgtgatgcggtcgcttgggcagaacccaactgaggctgagctgcaggacatgataaatgaggttgatgctgatgggaatggtaccattgatttcccagaattcctcaatctcatggcgcgcaagatgaaagacactgattcagaggaagagctgaaggaggctttccgtgtgttt

SEQ ID NO: 187952 - DNA, 271 bp, Glycine max
  unsure (1)..(271): unsure at all n locations
anggtggatacctaggcacccagagacgaggaagggcgtagtaagcgacgaaatgcttcggggagttgaaaataagcgtagatccggggattcccgatataggtcaacctttcgaactgctgctgaatccacgggcaggcaagagacaacctggtgaactgaaacatcttagtagccagaggaaaagaaagcaaaagcgattcccgtagtagcggcgagcgaaattggagcagcctaaaccgtgaaaacggggttgtgggagagctataca

SEQ ID NO: 187953 - DNA, 275 bp, Glycine max
aggacattcattcatctatggctacccttattgctcccagcaaccactctccccaagaagatgctgaagctctcagaaaggcttttgaaggatggggaactgatgagaacactgtcatagtaattttgggtcatagaactgtgtatcagaggcagcaaatcagaagagtttatgaggaaatttaccaggaggatcttgtgaagcgcctagagtctgagatcaaaggagactttgagaaagccgtgtaccgatggatactggaacctgcagatcgt

SEQ ID NO: 187954 - DNA, 269 bp, Glycine max
ccgggatcatccacaagattgaggagaccctccatgtgggagggcacaagaaagaggagcacataggagaacaccatggtgagcacaaaggtgaacacaaaggagaacaccatggtgagcacaaaggtgcacacaaaggagaacaacaccatggggagcacaaggagggacttgtggataagatcaaggacaagatccatggtgatggccatgacaagggtgagaaaaagaagaagaaggacaagaagaagaaggagcatggacatgac

SEQ ID NO: 187955 - DNA, 270 bp, Glycine max
gttgtgatcttcctcttcctcgtacacaggtgagggactgaaaggtagcaatggcgaccaggaacttggaaaagatggcatccattgatgcacagcttaggcaattggctcctgccaaagtgagtgaggatgacaaactgattgagtatgatgctcttctgctggatcggttccttgatatccttcaagatttacatggggaggatctgaaggaaacagttcaagaagtgtatgaactttcagctgagtatgaaggaaagcatgaccctt

SEQ ID NO: 187956 - DNA, 270 bp, Glycine max
gtactacaggtattgtgcttgattctggtgatggtgtgagccacacggtgcccatatatgaagggtatgctcttcctcatgcaattcttcggttggaccttgctggccgtgatttaacagagtacttggtgaaaatccttaccgagagaggatactccttcagcacctctgccgaaaaggaaattgtccgtgatgtgaaggagaaattggcatacgtggcccttgatttcgaacaagaaatggagactactaagagtagttctgcagtgg

SEQ ID NO: 187957 - DNA, 270 bp, Glycine max
ctacaagtgaagtcagtgtttccttgacattggatccatcaaagctatggagcagagagctaattcagcaggaacttgaccatgttgtagaagaactcgagaaaatcgctgtggtgaatctcctgcagaatagatccatcatctctctcattggaaatgttcagagatcatcactaatattggagaaggttctgtattatgctccctttatttaaattagttcatatcctaactttcacttatgtataaagatttactgaatttattaca

SEQ ID NO: 187958 - DNA, 266 bp, Glycine max
atcctccatggcctccaccaaggaacgcgataactttgtctacaccgccaagctcgccgaacaagccgaacgctatgaagaaatggtggaagcaatgaagaatgtggcgaactgaacgtggaattgacggtcgaggagcggaaccttctgtcggtagggtacaagaacgtggtgggtgctcgtagggcttcgtggaggattctatcgtcgattgaacagaaagaagaagctaaagggaacgatgtgagtgtgaagaggataaagga

SEQ ID NO: 187959 - DNA, 298 bp, Glycine max
aacgtaggaactcagctcggctcgaagtgatttctcagcgcgtaaagcatggctttgttggtggagataaccacgagtggtcgcgagtacaaggtcaaggacctttcccaggccgacttcggccgcctcgagatcgagctggccgatgttgagatgcccggcctcatggcctgtcggaccgagttcggcccctcccagcccttcaagggggcccgcatcaccggctccctccacatgaccatccagaccgccgttctcattgagaccctcaccgcccttggcgccgaggaccgctggt

SEQ ID NO: 187960 - DNA, 272 bp, Glycine max
tattttcttctctcatggcttcagattccaaaaaggatttccctgctgatgacaaagctggaacagcagagaataaagcatccaaagatgaaacgtcatctaaagattctccagcagcacaaagagctactacagctacttctggacctgcaactggttttccaggcaacccttttgatttctctgcaatgtctggcctgctcaatgatccaagtatcaaggaattggctgaacagatagcaaaagatccatcattcaaccagatggctgag

SEQ ID NO: 187961 - DNA, 268 bp, Glycine max
accattcgcaccaacgttgctggtactttaacattggctgatgtcagcagagagcatggaatcttgatgataaattatgctactgggtgcatatttgagtatgacaaagctcatccagagggttctggcattggctttaaggaggaagacaaacccaacttcattggttctttctattccaaaactaaggctatggtcgaagagctcttgaaagaatatgacaatgtgtgcaccctcagggttcgcatgccaatttcatctgacttga

SEQ ID NO: 187962 - DNA, 270 bp, Glycine max
ggtaaacagaagcacacactacacagttaccaaaatcaggttcaaacgcacagatctgggagaagagaagaagaagaagaagaagatgggacaggatcagaaccagagatcgctgatctacgcgttcgtgtctcgcggcacggtgattctcgccgagtacactgaattcagtggcaacttcaacacaatcgcgttccagtgcctccagaagctccctgcctccaacaacaagttcacctacaactgtgacggccacaccttcaactacct

SEQ ID NO: 187963 - DNA, 268 bp, Glycine max
cctcactgcaaagaacctcagcaagcatataagaaactagatctttggagattgcctgaaattcttgttgttcatttgaagaggttctcatacagccgctacttcaagaacaagctggaaacatttgttgatttcccaattaatgatctggacttatcaacatatgtagcccacgggaatagccagtcttccaaccgctatgtgttatatgcaattagttgtcattatggagggttaggaggaggtcactatacagcatttgtccgtt

SEQ ID NO: 187964 - DNA, 265 bp, Glycine max
gtgcctgtgggacgggttgagactggtgtcttgaagcctggaatggtggtgacttttgcaccaactggactgacaaccgaagttaagtctgtggaaatgcaccatgaagctctcacagaggctcttcccggtgataatgttggattcaatgttaagaatgttgctgttaaggatctcaagcgtggttatgttgcctcgaactcaaaggatgatcctgccaaggaggctgctaacttcactgcccaggttatcatcatgaaccatc

SEQ ID NO: 187965 - DNA, 268 bp, Glycine max
actggcttctaacgcctcctggtactcctctttttccttctttggaaatggaaagtcgaaagactgttatgagtcagcttggtactccaaccacacgtcctgtagcattaaaatccaggttggcaaatcatcaatcagagcctgctgggaggactaatttagtatctaaacaacctacttcctctcctgggttgagctcttcaagtggtgggactaggaggccttcatcatcagggggtccaggatcacgacctgcaacacctactgg

SEQ ID NO: 187966 - DNA, 267 bp, Glycine max
cttctctttgtgttcctaaaaaacacacagcacaagtagacaaacacaaaggaacaaattgcaagttgagaaaattaacatggaaaacagtgacatttcctctgccccactttctcactcccccactaattcctcttcttcctcaccaacaccaccttcacctcctactgttgtgatgagtccttgtgctgcatgcaagattttgaggagaagatgtgctgagaaatgtgtcttggcaccttattttcctccaactgaacctgccaa

SEQ ID NO: 187967 - DNA, 265 bp, Glycine max
gccgtattctttctatatatcagatgaggagctcctcgtgccacttgaaacatacttgttgaaaaacaaagcctcggtggagaaggcattgcctatagtttgtcaacctcaagctattttccggattcgtcctgtgaatcgctgtacggcaactatttctggtcatgctgaagctgtactaagtgttgccttcagtcctgatgggcgacaactggcaagtggttctggtgatactgctgttcgattttgggacttgaccactcag

SEQ ID NO: 187968 - DNA, 266 bp, Glycine max
  unsure (1)..(266): unsure at all n locations
taaattacctggccatgatgagtcatataatcctcctctagagtacattccaacccacgtagaattaannccnancaantgatgtttgaggaagaccgccccaagtccataccttaaaggtttgcatctatgaggagcattcctgcatatgagaatgctatgaaagactgctttgaacggtgtttggatttgtacttgtgccctcgagttcggaaaaaacgcctcaatattgatcctgaatctttaaagccaaagcttccaagtcg

SEQ ID NO: 187969 - DNA, 266 bp, Glycine max
ggggccagccaaagtcaaagattacccacttgatcttctgcaccactagcggtgtggacatgcctggtgctgattaccaactcaccaaacaattgggccttcgcccttaaatgaagaggtacatgatgtaccaacaaggttgctttgcaggtggcacggttcttcgtttggccaaggatttggctgagaacaacaagggtgcacgtgtgcttgttgtctgctctgagatcactgcagtcacattccgtgggccaagtgacactcac

SEQ ID NO: 187970 - DNA, 267 bp, Glycine max
gctgattggtaatatgcagacatatctccaatcaactactgttcgcttagaagagtggagggtgaaaagaactgatacagagcaatggatgcatcacaggcaactacctccagagctaagagaatctgtgcgtaaatatgaccaatacaaatggctggctacacgaggagtagatgaagaagctcttctcaaaggacttcccgtggatcttcgtagagacatcaagcgccacctctgtctcgatctagttcgaggagtgccattatt

SEQ ID NO: 187971 - DNA, 264 bp, Glycine max
ggaggacgtgccgttgccggcgctctttgagcaagcccgcaagatccacaactcagccaccgccaccgcctccgccgccgaccaggttgtgaagaaggggtgcgaggctctgcatagatgcgaggacatggtcaataacctaggtttgttctctcccaacgagaccaaagaagatatcagcaccaccaatctcaagtacattctggtgccattttatcttgcggagttgacagaaaaattagcacaggatgacaggatacatat

SEQ ID NO: 187972 - DNA, 264 bp, Glycine max
aaaaccaattgcatcactctcgtccgttaccgccgctgccctagaccaccgcaagcgacgtcgcacaccgccttcatccgttaggagaaaaatgagtcgaggaagtggaggtggatacgatcgtcacatcactattttctcccctgaaggacgtctctttcaagtggagtatgctttcaaggctgtgaaggctgcaggaatcacctcgattggtgtccgaggaaaggattcaatttgtgtcgttactcagaagaaggttccgga

SEQ ID NO: 187973 - DNA, 262 bp, Glycine max
gaaaatgttagtggagaagcagttgttgaggcctggcaccggtcccaagccaattcccggtcagaacgtcaccgttcactgcactggtttcgggaagaacggtgacctttctcagaaattctggagcaccaaggatcctggccaggaccctttcactttcaaaatcggccaaggttctgttatcaaaggatgggatgaaggtgtgcttggcatgcaaattggtgaagttgctcgtctccggtgctctccggattatagttat

SEQ ID NO: 187974 - DNA, 265 bp, Glycine max
gttgattgagaggctgatttatgctgagggtgctgaaaatggcttggagttcacaattgtgaggccttttaactggattggacctcgaatggatttcattcctggcattgatggtccaagtgagggtgttcctcgggttcttgcatgctttagcaataatcttctcagaggagagcccctcaagcttgtggacggtggccagtcccagagaacctttgtttacattaaagatgctattgaagctgtcttgctgatgattgaaaac

SEQ ID NO: 187975 - DNA, 266 bp, Glycine max
ctctactctactgcttcaccttctgctctagaaaattcagtggtgatacatggcttcggctactctctctgtagccaaaccagcccttcaggcaaatgggaaaggcttctctgaattctctggcctccgcagctcatcaggcttccttcccttttctagaaaatcttcagaggatttccattctgtcattgccttccagacctatgcagttggaagcagtggaggatacaagaagggtgtgacagaagcaaaactgaaggttgcca

SEQ ID NO: 187976 - DNA, 266 bp, Glycine max
gcagatctctcagggcttgcatcttctcagttgtgaagatgtacacatcaaggaagaaaatccacaaggataaggatgctgaaccaactgagtttgaagagtcagttggacaggcattgtttgatctggaaaataccaaccaggagcttaaaagtgatctgaaggatttatacataaactcagctgtgcaagttgatgtttctgggaaccgcaaggctgttgttattcatgtcccttacagattaaggaaaggtttccgtaagatt

SEQ ID NO: 187977 - DNA, 220 bp, Glycine max
gtcgattccggcagccgctacctctccgcctcctggggcgcggatccagtgggagaagcaggtccgcacctccgcccagatccaccgtcaaggcggcatgtccgtcctcgtcaccggcgctgccggcttcgtcggctcccacgtctccctcgcgttacaacgacgcggagacggcgtcgtcggactcggcagcttcaacggctactactatccgtctctg

SEQ ID NO: 187978 - DNA, 267 bp, Glycine max
ctaaattctctgtctacttcaccaagcacttttggttgcagctttggttaatttccaatatggtgtttcctctcctatctatctttgctttactcaatcttgcagtggtggcaacccatgcagaaaccttgccccctgaagtttactggaagtcgaagcttcccaccactccaatgccgaaagccattacagatatccttcacccagatttggcagaagacaaaagcacctctgtggccgtaggaaaggggggcgtaaacgttaacg

SEQ ID NO: 187979 - DNA, 270 bp, Glycine max
tctttgtatccttcctagtgctgcttcttgcagcccttatccacatgcctcaagggcttgctacttactacaaaccaattaagacgccaccagtgtacaagcctccagtgtacaagccaccagtgtacaaaccaccggtttacaagccaaaaccaccggtttacaagccgaaaccaccggtttacaagccaccatataagaagccaccatacaagaaaccaccttatggaaagtaccctccagtagaggacaacacccatgcctaaagca

SEQ ID NO: 187980 - DNA, 267 bp, Glycine max
tcgatctctatctacgaaggagcggaataaaacccttgtctctgtgattaagagaatggcttcagatcggaaacttcacacttttgaggaggtggcaaagcacaaccagaccaaggattgctggctcatcatttctggcaaggtgtatgatgtcacccctttcatggaggatcatcccggaggtgatgaggttttgttatctgcaacagggaaagatgcaaccaatgactttgaagatgtggggcacagtgattctgctagagatat

SEQ ID NO: 187981 - DNA, 270 bp, Glycine max
tcgactcgagcgattcggctcgagcgaggagcagcctcaggaggaccaggatgtctcacaaccagttcgagcacccaaggaccggttcactgggatttcttcccaggaagcgtgctgctcgtcacaggggaaaagtgaaggcattccccaaggatgacccatccaaggcacccaagctcactgcattcttgggttacaaggccggtatgactcacattgttagagaggtcgagaagccaggatcaaagcttcacaagaaggaaacgtgtg

SEQ ID NO: 187982 - DNA, 262 bp, Glycine max
gtgagaggggtgctaagatcaccttggctgagtcactgcctaaggtgcagctcacaaggattgatcttgagtgggtgcatgtggtgggggaagggtgggctagtcccttgaaagggttcatgagggaggatgagtatcttcagagtttgcatttcaattcccttagggtcaaggatggttctgtggtgaacatgtcccttcccattgttttggccattgatgatgagaccaaagagagaattggatcctcttcccatgtggg

SEQ ID NO: 187983 - DNA, 260 bp, Glycine max
ctcgagcgcttgggtaggcctggtggtattgctgtgtttgattgtcacggccatcgccgaacaatgcggtcgtcaagctggcgggcagacatgtcccaacaacctatgctgcagccagtacggttggtgtggaaacaccgaagaatactgttccccttctaagaactgccagagcaactgctggggaggcggcggcggtggcggtggcggcggcggcggtgaaagtgcttctaatgtccgcgccacatatcattactatg

SEQ ID NO: 187984 - DNA, 263 bp, Glycine max
ctgagacggggtcattctcagagattctcacggtattgctcaggtcaatagcgtcactggcagcaaaatccttcgcatcctcaaagctcacggacttgcgcctgaaattccagaggacctgtaccatttgattaagaaggcagtttcaattaggaagcatcttgagaggaacaggaaggacaaggactccaagttcaggttgattcttgttgagagcagaatccaccgacttgctcgctattacaagaagactaagaagctcc

SEQ ID NO: 187985 - DNA, 268 bp, Glycine max
gatgtatttaacaagaactatgacttcccaaagcctaatttgaatccacttgtcaagttactagcaactggccttgcaggctatgaaggagaaaagtggagcaagcacagaagaataatcaaccctgctttcaatttagaaaaattgaagatcatgttaccattgttcctccaaagttgcaatgatctggttagcaaatgggaaggaatgttgtcttcagagggatcatgtgaaatggatgcatggcctttccttcagaatctgacta

SEQ ID NO: 187986 - DNA, 267 bp, Glycine max
cttgccgctaagaagaagcctgagaaggtcacgaatccgttgttcgagaagcgtccgaagcagttcggaatcggaggggcgttgcctccgaagagagacttgactaggttcgtgaagtggtgaaagaatgttcaaattcagaggaagaagaggattctgaagcagaggttgaaggttcccccagctttgaaccagtttaccaaaactcttgacaaaaacctagcaacaagtctgttcaagttgcttctgaagtacaggcccgaggac

SEQ ID NO: 187987 - DNA, 266 bp, Glycine max
gcagatgtggatcccagaggctgcgccgcactggatcattccctcaaatccctagaccgccggatctctccctacgtctcctccgaccgcacaatctgggccgacgccgccgattctgctgccttcctcgacgccgtggacgagctcgtcgccgtcgtcgccgagtggaaccacctcgcctccgacaagtccgtcgccgcctgcctcgtccgcgccgaggacatgctccagcacgccatgttccgcctcgaggacgagttccgctc

SEQ ID NO: 187988 - DNA, 266 bp, Glycine max
gcagctgctgttattcgcaccgcaaacaaacagtgagccatggccgtcggaaagaacaagcgcatctccaaagggaaaaagggtggcaagaagaaggcagctgatccctttgccaagaaggattggtatgacattaaggccccttctctttttcaagtgaaaaatgttggcaaaaccctcgtctctcgtacgcagggtaccaagattgcttctgaaggacttaaacatagagtgtttgaggtctccttggctgatcttcaagggga

SEQ ID NO: 187989 - DNA, 263 bp, Glycine max
gcgacctatacccggcggtcggggcaaggaccaagccccgatgagtaggagggcgcggcggtcgctgcaaaacccagggcgcgacccggagcggatcgttcatcggtgcagatcttggtggtagtagcaaatattcaaatgagaactttgaaggccgaagaggggaaaggttccatgtgaacggcacttgcacatgggttagtcgatcctaagggacgggggaagcccgtctgatagcgctctatgcgcgtactccgaaaggg

SEQ ID NO: 187990 - DNA, 262 bp, Glycine max
tctctctctctctctctctctgcggaaaccggaatatctcagttctctgatcagatccatccgacgtcgtttcagtgataatggctccgttcagcggcgatgagacggcaccgtttttcggcttccttggagccgcagctgccctcgtcttctcctgtatgggagctgcctatggcacagcgaagagtggcgttggcgtggcttcgatgggtgtgatgagaccagagctggtgatgaagtctattgtccctgttgttatggc

SEQ ID NO: 187991 - DNA, 260 bp, Glycine max
cggaagatgagggctgtgaccgttttcctgtgggtatgcgtgttcttgctgtggatgacgacccaatttgcctgtaggtgttagagaatctccttcgcaaatgccagtatcatgttactacaactaatcaggcagttgaagcgctgaaaatgttgagggaaaacagaaataagtttgaccttgttatcagcgatgtgaatatgcctgacattgatggatttaagctccttgagttggtgggacttgaaatggacctacct

SEQ ID NO: 187992 - DNA, 260 bp, Glycine max
ctcgagcggttagaatggctgctgctattgaaatccccacaatagtgtttccaaactcctctgcccaacagaggatgccagtggttggaatgggatctgcccctgacttcacatgcaagaaagacacaaaggaggctatcattgaggccgtgaaacagggttacagacacttcgacactgctgctgcttatggctctgaacaggctctcggtgaagctctcaaggaagctatccatcttggcctcgtctcccgccaagac

SEQ ID NO: 187993 - DNA, 267 bp, Glycine max
gtttgtgctgccggtaacttgaaccaagactttcagcttacgtggggagatggtcgtgctaaaatactcaacaacgaaaatcttctcactctctcccttgacaaggcctctggctctggcttccaatccaaaaacgaataccttatatggcaagattgacatgcagctcaagctcgttcctggaaactctgctggcactgtcaccgcctattatctgtcttcaaaaggatcaacatgggatgagattgacttcgagttcttggggaa

SEQ ID NO: 187994 - DNA, 264 bp, Glycine max
cggctcgaggtaagtatgaactaattcagactgtgaaactgcgaatggctcattaaatcagttatagtttgtttgatggtatctgctactcggataaccgtagtaattctagagctaatacgtgcaacaaaccccgacttctggaagggatgcatttattagataaaaggtcaacacaggctctgcctgttgctttgatgattcatgataactcgtcggatcgcacggcctttgtgccggcgacgcatcattcaaatttctgcc

SEQ ID NO: 187995 - DNA, 262 bp, Glycine max
ctttatagtttactattgaaagatgggtttgaaaatggcaatactgatcctaggcctgctggccatgttccttttggtctcctcagaggtggcatccgcgaattcaaaagaggtgacaaatggagttgaagatgccaaatatcctggtggaggctatggtgggggttacccaggcaatggcggtggtggctatcctggccgtggtggtggctaccctggtcgtggtggtggctatccaggtcgcggtggtggttaccctggt

SEQ ID NO: 187996 - DNA, 263 bp, Glycine max
taggcggatccttctttggttctcagaatattggttcatctgctcttgaatatggcagatcattgaaaagacttggctcgtcatatttgggtgcagaggatgacactgatggcaagcaagatgaatcttcatcaagtttcagacagggagatggggaggataatattgttcctaagagtttccctgtttgtgatgatcgtcattcagagttgattccctgcttagatagacaccttatctatcaaatgaggatgaagctggac

SEQ ID NO: 187997 - DNA, 262 bp, Glycine max
gcttcatttaacatcattcctagcagcactggagctgccaaggctgttggaaaagtcctccctgctttgaatggaaaattgactggtatggcattccgtgttcccactgtggatgtctctgttgttgacctcacagtgaggctggagaaggaagcctcctacgatgaaattaaaaatgctatcaaggaggaatcagagggcaagttgaagggaattcttggttacactgaagatgatgtggtctccaccgactttgtgggcg

SEQ ID NO: 187998 - DNA, 261 bp, Glycine max
ggcctctatgggcctcaaagaagggcccattttcttctttgctattgggctggcccactacatagtcatgtatgtgaccctctaccagagacttccaacaaatgagacactcacaaaagaactccatcctgtgttctttctgtttgttgcagcaccaagtgttgcttccatggcttgggccaacattcagggttccttcgattatggatctcggattgcctatttcattgccctctttctttatttctcattggctgtccg

SEQ ID NO: 187999 - DNA, 258 bp, Glycine max
gtccttgttttcttcgttgctacaattttggtagcatggcaatgccatgcgtacgatatgttccctctccgaatgaacactggctatggtgcccgtactccggaggtgacatgcgcaagttggaggcttgctgtggacgcacacaacatctttggctttgagaccattcctgaagagtgcgttgaagcaacaaaggaatacatccatggcgaacaatatagatcagactccaaaacagttaaccaacaagcttacttt

SEQ ID NO: 188000 - DNA, 260 bp, Glycine max
ggcacttctccaatctcaacaactttcgtgtagtgcactgttttgctatagtaacccattaattaaaccgacctacgtagtagccatgaagagaggcagagaagagagtaagttagacatggctaattgcttgatgctattgacgaaagttggagagagtgaaaccaattacccaatatcaaagggtagtgatattggtgatttcaagtgcaagacttgcaatagaaggttctcttcttttcaagcccttggtggccata

SEQ ID NO: 188001 - DNA, 264 bp, Glycine max
cttgggcagatcatgttcatcatatctatccttgggcctctgctttgcactacgcaaataccccagaggccctctgcagttacaaaaacagcagggattgtgtagattacaaaaaaggaattaaggggcgatgtgttgtggctgcgattaacaattacacaacgcagctccttgaatatggcagtgacactaaatctagatataacctcacgcaatctctattcttcctttcacattttatgggggacatccatcagcctctac

SEQ ID NO: 188002 - DNA, 264 bp, Glycine max; identical to SEQ ID NO: 118170

SEQ ID NO: 188003 - DNA, 255 bp, Glycine max
gcacaaggtgcgttctggattcgagggtccctggacctctaatcctcttattttcgacaactcatactacatggtcttgttgagtggtgagaaagaaggcctccttcagctaccttctgacaaggcacttttgtctaaccctgtgttccgccctcttgttgagatatatgcatcggtatgtatttcgtaatattttgcataacattgaatttttggaatgtagaacatttcttgatgtatttgatttggtaatga

SEQ ID NO: 188004 - DNA, 268 bp, Glycine max
cggctcgagataggaagagagacaaggagagagaccatggggacaaggatatgaagagagatacggagagagacagagatcgcaatcgtgaccaagaaagggacagaagggaccgtgggagtgaggctgagcaggaacagcgaacagaagtagatctgataggcttcgaactgatctggatgacaaagacagagaggcaagtcgtgacagggagtatagagatagagaaagaagtcgggataaggattacaaagacagagaaagggtg

SEQ ID NO: 188005 - DNA, 258 bp, Glycine max
gtgacttgttcgttcccaatgaaagaaaagatgttattacttccacagcttgttgggctgctatgttgggattgcttgttggattggggtttgtaatgggtccaattcaacttcttaagctttatggtgttccctatgttatattcgttatgtggttggatttggtgacttatttgcaccatcatggccatgaagacaaattaccttggtaccgtggaaaggaatggagctacctcaggggtggtctaactactcttg

SEQ ID NO: 188006 - DNA, 251 bp, Glycine max
cccttcccttcgactccacggctcagatccgatgagtttgggaaaccctaattcattcctctttgcttctatctctattaccctaacaccagtgatggcaggtttagctccagaaggatcgcagtttgatgctcggcaatatgactctaagatgaatgaattgctttccgctgatggacaagaatttttcacttcatatgatgaagtctatgatagttttgatgcggtgggccttcaagaaaatcttctca

SEQ ID NO: 188007 - DNA, 257 bp, Glycine max
ctccgcaccagtttcaccgcacgaatatcttgttgtttggagcgatccgagaaaaactctgtaaacatgttggtttaccaggacctccttacaggtgatgagcttctctctgactccttccgttacaaggaaattgagaatggaatgctgtgggaagttgaggggaagtgggttgttaaaggagcagttgatgtagacattggtgcaaacccttctgctgagggtggaggagaagatgagggagttgatgatgcagc

SEQ ID NO: 188008 - DNA, 257 bp, Glycine max
cgacgaggtttcttcatgcaacatttttgttgttaagggtaacgttatttcaactccagctattaaagggacaatcctacctggcattactcgcaaaagtataattgatgttgctcgaagccaagggttccaggttgaggagcgattagtgtcagtggatgaattgctagatgctgacgaggtcttctgcacgggaacagctgtggttgtatcacctgttggcagtattacttatcttgacaagagggtagcatatg

SEQ ID NO: 188009 - DNA, 257 bp, Glycine max
cggcaaagaggactctctcttccactgctcaaaccaccttagagattgattccttgtacgagggtattgacttctacacaaccattacctttacccgttttgaagagctaaacatggatttattcaggaagtgcatcgagcccgtggagaagtgtttgcgggatgccaagatggataagagtaccgtccatgatgttgttcttgttcgtggttctactaggattcccaaggttcaacagttgttgcaggacttcttc

SEQ ID NO: 188010 - DNA, 254 bp, Glycine max
gcttctgcagcccccgcgccgccagagaactcgctctgtcgataatctatgcagcgtgcttggaggggatggacccggttcggctcttcgagaaacggatgaatgcccgacgagaagctgggtataaatttaatgaggaaaagttgttggagtataatcatatgagttttggagggtcgcctgttactgttggatcggatgaagaagcaaatgagcttctgcggcacattgaagaagagtctgccattgaagca

SEQ ID NO: 188011 - DNA, 254 bp, Glycine max
ggcatctgtgtgagtttacgggccttgacgttgaaatggagatcaagaagcattactttgaggttatggatttagtcgatagattgtttgttgcaatgtttgacagtttgaaccagaattgtaagaaggatctggaagctgtggggtctcagtacccatttgaacctttaaagtatctgcggaagacactacggcttacatatgaagaagggattcagatgctcaaggatgttggagtagaaattgaaccttat

SEQ ID NO: 188012 - DNA, 259 bp, Glycine max
caggcggtgggacccaccgggttacccgttgataacaggcgcgtggatttcaacatcatttctggcacgtccatgtcgtgccctcacgtgagcggcttagccgcgctgatcaagtcggctcaccctgattggagcccagccgcggtccgatcggctcttataacaacggcttacacagtttacaaaaccggtgagcagctgcaagacagcgcaacgggaaagccctccacgccgttcgatcacggttccggacacgtgg

SEQ ID NO: 188013 - DNA, 261 bp, Glycine max
gttcatgccctcaaacccaaccccaagtcccacatccaggagaattggaggatcctcgatttcttctcccaccatcccgaaagccttcacatgttctccttcttattcgacgacgttggtatccctcaagattacaggcatatggatggcttcggtgtcaacacctacacccttatcaacaaggccggcaaagcactctatgtcaaatttcattggaagaccacctctggcgaaaagtctcttttggacgacgaggccatc

SEQ ID NO: 188014 - DNA, 258 bp, Glycine max
cccagagctccttcgcctcatcgatagtttcaagtctcgttttgacaatggtgagggttagtgtgttgaatgatgctctgaagagcatgtacaacgccgagaagcgcgggaagcgccaggtcatgattaggccatcctccaaggtcatcataaaattcctattggtcatgcagaagcacgggtacattggtgagttcgagtatgttgatgaccacagggctgggaaaatcgtggttgaattgaatgggcggctgaata

SEQ ID NO: 188015 - DNA, 243 bp, Glycine max
aaatctctctctacaaaacttagctctgtttttaattattccttgcattctcttgtattaagatggaagcaactaccatcaccaatgggagcccaaacggttcgttttgcttatccactactaagggaagtagtgatccgttaaactggggagcggcagccgaggcgatgaaggggagccacctggacgaggtgaaacgcatggtggccgaataccacaaaccggtagtccagctcaacggaa

SEQ ID NO: 188016 - DNA, 142 bp, Glycine max
caagactagagatttccaacttacctggaggtcaagaatattctgagaaagccgcgaaattctgttacggcgttaacttcgagatcaccgttcgcaacgtggcagcgctacactactccgccgtgttcctccagatgaccga

SEQ ID NO: 188017 - DNA, 254 bp, Glycine max
ctcaaaattcccctccacactcattctcccaccattttccctttctctctctcattctcttctccatcgcgcgtaagaaacacattttagttgctactaatgggaactgttgaagctgcaaacaaggatgcaaatggaagtctcctagagaaaaatccttcagttgtttttgtgttaggtggcccaggaagtggaaagggtacccaatgtgcaaatattgtccaaaattttgggtatactcatctcagcgctgg

SEQ ID NO: 188018 - DNA, 253 bp, Glycine max
aaatatgggggatttctcaaacctgaaatagtggaggacttccgtaactatgctgacttttgcttcaagacatttggtgatcgggtgaagcactgggtaaccctaaatgaaccatatggctacagcgtgaatggctacagtggtggaaattttgcaccaggtagatgttctaactacgttggaaaatgccctgctggtgattcttccaccgagccctacattgttaaccaccacttaatacttgctcatggag

SEQ ID NO: 188019 - DNA, 256 bp, Glycine max
atttagggttttgttttgctgctgcctccgttccccccttctcataaacaacgcgttttctcttctgcttcgtatctattctttgcttttcgttttggttgattcaaggccttcacagcattcgttgcggcattttaatcgatttatccaagcaggactgaatgaactaatggagtctaaaggtgggaaaaagaagtctagtagtagtagtagtaaatcattgttctacgaagctcccctcggatacagcattgaa

SEQ ID NO: 188020 - DNA, 265 bp, Glycine max
ctttagtttctccaattttctttctcaattctcaacaatggccactacaacacaacttcacttaccccctggattcagattccatccaacagatgaaacagtcgtcatccactacctttgtcgcaaatgcgcttcgcaacatatcgcggttcccataatcgccgaaattgatctgtacaagtacgacccttgggaccttccaggaatggctttgtacggagagaaagagtggtattttttcacgccgagggaccgcaagtacccg

SEQ ID NO: 188021 - DNA, 271 bp, Glycine max
tgaagtctgctatgtgtgcagtggtggttgtagcacttcttcttctggcggaggtggggcccatggctgaggctgtgacatgcaccccaacagagttgagtccgtgtcttccagcaatcacttccggtgctaaaccttccaatgcttgttgcacgaagctgaagcagcaaaaaccatgcttatgtggctacctcaaaaacgctagcttgaagcagtatgttaactctcctaatgcccgaaaaacggtgcttcttgtgggattccctttcca

SEQ ID NO: 188022 - DNA, 252 bp, Glycine max
ctcaagagcagtgttattgttggctatgtgtgtgcttccggcgatggttgtggccattcgcccagcaaagaaccctttttgcgtgaagggtcgtgtctactgtgacccttgccgtgctggttttgagacctcagctaccacctacattgctggtgctgagattatgttgcaatgcaagagcagggttagcaacgaggttgtgtacacgaagaaggggtacaccgactcaaccggagcatacacaatgtacgt

SEQ ID NO: 188023 - DNA, 271 bp, Glycine max
gcgaaaatggcggtgattttttcaagtgcaataccaggaggggcagcaccagcagcaatcgagcaagtgcagtgcttcgggcggaagaagacggcggtggcagtgacctactgcaagcgcggccgaggcctcattaagatcaacggctgcccgatcgagctggtggagccggagatcctccgcttcaaggccttcgagccaatcctcctcctcggtcgccaccgcttcgccggcgtggacatgcgcatccgcgtgaagggcggcggtcaca

SEQ ID NO: 188024 - DNA, 276 bp, Glycine max
ctgataactctatcggcacaagaaacaaaaagtttcggttaggagttaaatttctgcaatctacttccgttagcgttagcgttagggaaggcagaagtgaagccttcagggttaaggataaacgcggagagccgtacaagaaacgcgaccgtccctcgttgaatgatgaggtatggtgtctgaagaatataagaagaaacggtgatcttcacaaggatcttttgaagaataaaataaaaactgtcaaggatcttttgcgcttgaacacaatcggtt

SEQ ID NO: 188025 - DNA, 271 bp, Glycine max
attatcagtgagctgtgtgtcgctctggatcggctgctgattctcagattgtctctgactatgtgcgctacttccttcaccaacacacgatacaacttggacaacctgcgacagttaaagttgctgcaaaccttgtccggcttctcgcatataacaataagaatttcttacagaccgggttaattgttggtggttgggataaatatgaaggtggacaaatttatggagttcctctgggtggaacaatagtacagcaaccttttgctatcgg

SEQ ID NO: 188026 - DNA, 276 bp, Glycine max
aataatttgtaaaaactatggctagcgatggcagcgaagagtttaggctagtgtcaccggcgttcagcaacgaggggaagttacctcggaactacactgacgagggccagggtgcgaagaagaacatatcccctccgttggagtggtacaacctgccggaggggaccaagaccctcgccctcgtcgtggaggatatcgatggatccgattcagatgggcccatcatgccatggacccactgggtcgtcgcaaacatcccggccacggtgaagggcc

SEQ ID NO: 188027 - DNA, 273 bp, Glycine max
aagcaaaacaacattaccagggattcttctcaccagatgaagttcatatttttggctatgcaaggacaaaaatctctgatgacacattgagaaaccggttgcgcggctatcttgttccaaagaaaggtgcttccccccaacagttggaggatgtagagaagtttttacagctgatcaaatatgtaagcggctcttatgattctgaggatggcttccgcctgttggataaagagatttcagagcatgaatatttgaaaaacagtgttgagggtt

SEQ ID NO: 188028 - DNA, 271 bp, Glycine max
agggtctttgcttgattttggagatgtctctgctctcagatctcatcaaccttaacctctccgataccaccgagaaggtgatcgcagagtacatatggatcggtggatcaggaatggacctgaggagcaaagcaaggactctcccaggaccagttagcgacccttcagagcttcccaagtggaactatgatggttccagcacaggtcaagctcctggtgaagacagtgaagtgattttatacccacaagccattttcagggatccattcag

SEQ ID NO: 188029 - DNA, 272 bp, Glycine max
aaagtccctgaaaagtcctagaagtgctgtttgcaaaactgccattatgacatctgcagacattttcagtgcatataatgatcgtatactagattcattggaccctctcctagtacaacttcttctcaaggcttcacaagacaaacgctttgtatgtgaggcagctgaaaaagccttgatagcaatgactacttggatttcccctatttctttattgccaaaattgcaaccatgccttaagaataagaatcctcgtatccgtgcaaaggcat

SEQ ID NO: 188030 - DNA, 239 bp, Glycine max
cagaggctgaaaacatacaaggccaaattggttgtgttcccaagacgggcacacaaggttaaggctggtgattctactcccgaggagcttgcaaatgcaacacaagtccagggtgctttcttgcctattgtgagggagaagccaactgttgaacttgtaaaggttacagatgacatgaaggcatttaaagcttattacaagcttcgtcttgaacgcacaaacaaacgccatcatggtgc

SEQ ID NO: 188031 - DNA, 271 bp, Glycine max
gaagctgctcacagttccagaaccccttctggaatttcaaaaactagtccttcatctgttccttccaacttatctattgtgtcatatagtgaagcaagtgatttctcaaatcttccaacaccaaggtctgagggcgaaatcttgtcttccccaaatcttaaggcctttaccttcaatgagctaaagaatgccaccaggaactttcgcccggacagtcttcttggtgaagggggatttggttatgtttacaaggggtggattgatgaacaca

SEQ ID NO: 188032 - DNA, 276 bp, Glycine max
  unsure (1)..(276): unsure at all n locations
acttctgctacccactctcttcttccaagtccaancacgcttcntctcnnacagtcatgggcaaggtcaagatcggaatcaacggatttggaagaattggnccgtttggttgccagantcgctctgcaaagagacgatgtggagctcgttgccgttaacgaccctttcattaccaccgattacatgacatacatgtttaaatacgacagtgttcacggacactggaagcatcacgatgtcaccgttaaggacgagaagacccttctcttcggtgac

SEQ ID NO: 188033 - DNA, 274 bp, Glycine max
atgggttcaacaggtgagactcagattactccaacccatgtatctgatgaagaggcaaaccttttcgccatgcaactagccagtgcctcagtactccctatggttctcaaatcagctcttgagcttgatctgttggaaatcatagccaaggctggccctggtgttcacctttccccctccgacattgcttctcggctcccaacacacaaccctgatgcacccgttatgttggaccgtatattgcgcctcttggcttgctacaatatcctctctt

SEQ ID NO: 188034 - DNA, 269 bp, Glycine max
gttctttgttggcgaatactcactcacgcgtttgtagttgcaggctctaatcagatcccaaatgatcaactttgtgcttctcattagtcgccaagggaaggtgagattgacaaaatggtactcaccttattctcagaaagaaaggagtaaggtaatccgtgagctcagtggaatgattctatcccgtgcgcccaagcaatgtaattttgtggaatggcgaggacataaagttgtttataaaaggtatgctagtctctatttctgcatgt

SEQ ID NO: 188035 - DNA, 269 bp, Glycine max
gtattgggagctctcgttgtttcggagttagggaccttacgcagccatggccactgctacgaatgccgccgccgccccaccacgccagctctcccagaaggaagctgacatccagatgatgttggccgccgacgtccacctcggcaccaagaactgcgacttccaaatggaacgttacatcttcaagcgccgcaacgacgggatttacattattacccttgggaagacgtgggagaagcttcagctagcagctagggttatagttgcaa

SEQ ID NO: 188036 - DNA, 266 bp, Glycine max
aaacaagtggttttgccccgtgttcatggattagcacttaaaacaacagttgcgacggttagagtcaatgcgctgttgtgcctaggagacatggttaatcaacttgataaacatgctgtcttggacatcttgcaaactattcaacgctgtactgctgttgaccgctcccctccaacccttatggggtaccctaggggttgcaaattctattttcaagcagcaaaatagaagagaaccgaggagtggctgtgactgattctggaacg

SEQ ID NO: 188037 - DNA, 273 bp, Glycine max
atttctctctgaaacccacttcaccgcatcaatcgcgttggacggcgtactcctcggcatatgcaaccctctccacgaaaaacaaaaagtcgtcgacgacgctttcttgcaaaaatacggtatcaagttgaacgatgcgattctcgctgaggataagcacaaacctatgtatgaagaattggctaacaatcctaatgtggagtacattgctggaggtgctactcagaattcaatcagggttgctcagtggatgcttcaagcaccaggtgccac

SEQ ID NO: 188038 - DNA, 267 bp, Glycine max
ggggtctcacatggggttgttgctcttcttttgttcttccatgctttttgctgccttcgctgctgcctcctccagaaacttgcccataataccctttgatgaaggctacgcgcccttgtttggggacagcaacttggtcatccatagggatggcaaatcggttcatctttcactcgatgagagaacaggttcaggatttgtgtcgcatgatctttaccttcacggatatttcagcgcttctattaagttgccttctgactacactgc

SEQ ID NO: 188039 - DNA, 274 bp, Glycine max
gtttgggagaaattagaattcttggtgctttaaaacacccttgcatagtggaaatgtacggacaccaaatttcatgtcaatggtctgtctcagctgatggtaatcctgaacaccgtgtattaagatctgcaatttttatggagtatgtggaagggggctccttaaaaaattatctggagaagctgtcagaagctggtgaaaagcatgttcctgtggagttggctttgcatatcgccaaagatgtctcatgtgctttgtcagagctgcactcaaa

SEQ ID NO: 188040 - DNA, 268 bp, Glycine max
cttttctatttaattcctaaaatcccattcttcttcgctcatacctctgcactgccatcatccccaacttcctcacaaggttacaagtactaaagagttgtgccaccatgtcggacgatgaaagggaggagaaagagttggatctctcttctgccgaagttgtcaccaaatacaaaaccgctgctgagatcgttaacaaggccttgaagctagttatttcagaatgtaaaccaaaggcgaagattgtggatatttgtgagaacgggga

SEQ ID NO: 188041 - DNA, 268 bp, Glycine max
gtagggtgcaatattcaaccaaaatcggaggaaatgaaattggtgttcgacaagtttgacaccaacaaagatggcaagattacccttgaagagtacaaagcagctatgaggacaatggggtggggaatcgaaggcactgaggctgatgagtcttttcaggtcatggactctgatggagatggcttcattgacttcaaagagttcatggacatgttcaacgtggaggagacggtgaaagagacggagatcaagagtgcttttcaagtgt

SEQ ID NO: 188042 - DNA, 269 bp, Glycine max
atcaaagcccacagatagacctgttccaaatgcaactttacaagttactggtgctgttggttggcggagagaagggcttgtgtacaaaaagaatgaggtcttcctggatattgtggaaagtgtaaatcttctaatgtcttcaaaaggtagtgttctgcgttgtgatgtcactgggaagattctcatgaagtgctttctttctggaatgcctgatttaaagttgggtttgaatgacaagattggtcttgagaaagaagcacaacttaaat

SEQ ID NO: 188043 - DNA, 270 bp, Glycine max
ctaggaaacgctatctatggctttttacggaggcgcgaaacgcgtttgtgtatccataaggcactattgttcgaattcagcgtcagagaaggtgaatctgataaagcagctgagagagagaacaagcgcagctatgaaggacgtgaaagcggctctggtggattcgaattgggacatagaggaagctcagaaggaactgaggaaaagaggcaaagttttggcgtccaagaaatcctctcgaactgcctcccaaggcctcctcgctctcgc

SEQ ID NO: 188044 - DNA, 270 bp, Glycine max
cgcttctcgaaccctactttcttccgcggtgattgcatttgaattcctgtaatggcgattgataatatttttaaaaatgaagctagtgaagaaaaaggagagcgtgccagaatggcttcttttgttggagccatggctattgctgacttagtgaagacaaccttggggccaaagggaatggataaaattttgcagtcaacaggtagaggacgtgaagttactgtcacgaatgatggcgctacaatcttgaagtccctccatattgataac

SEQ ID NO: 188045 - DNA, 269 bp, Glycine max
ctgaatactagatatgacctcaaaataacaagggtcaaggtcggccagtgagacgatgggggataagcttcatcgtcgagagggaaacagcccggatcaccagctaaggcccctaaatgaccgctcagtgataaaggaggtaggggtgcagagacaaccaggaggtttgcctagaagcagccacccttgaaagagtgcgtaatagctcactgatcgagcgctcttgcgccgaagatgaacggggctaagcgatctgccgaagctgtggg

SEQ ID NO: 188046 - DNA, 262 bp, Glycine max
  unsure (1)..(262): unsure at all n locations
ctcagccacagccacaacacacaaacacaaacccttcgttcctctctacgttcccttcttcaattcgatcaaacacagaatagtacttttttattatgatggccgtggcccgaaaggaaatggaccggatcaagggcccgtggagcccggaggaggacgaggctcttcagaagctcgtnaacgnaatgggcccagaaactggtcctcatcagcagtccattcggggcggtctgggaatctgcaggntcganggtgcaccatt

SEQ ID NO: 188047 - DNA, 269 bp, Glycine max
tgttcatagggacatcaaggccaataatgtgttgctggataaagatctcaaccccaagatatctgattttggattggcaaggcttaatgatgaggacaaaacccatttgagcaccagaatagctggcacttatgggtacattgctcctgagtatgcaatgcatggttatttgacggacaaagcagatgtttatagttttggaattgttgcattggaaattgttagtgggatgagcaacaccattagccagcctacggaagaatgtttct

SEQ ID NO: 188048 - DNA, 269 bp, Glycine max
aaagaatgaggcaatcaaggatgttggtgagcgcaatccaagaggcaatggtgaataagctgaaggaaaaagacgaagagattcagcgtatggagaagctgaattgggcccttcaagaaagagtcaaaagcatgtgcatggagaaccaaatttggagggaattggcacaaacgaacgaagccacagccaactacctaagaagcaatttggaacaagtcttggcacatgtcggcgaggaacgcgccaccgcggccgaggtggccgatgat

SEQ ID NO: 188049 - DNA, 270 bp, Glycine max
  unsure (1)..(270): unsure at all n locations
gttcttcttcttttgttgttctgtgctcccctntgtcttttctctcacctgaaaatgtcttgctgcggtggtacccgtggttgcggaagctcctgcaagtgcggcaacggctgcggaggctgcaagatgtacccagacttgagctacactgagtcaaccaccaccgagaccttggtcatgggagtggcacctgttaaggctcaatttgagggtgctgcaatgggtgtgcccgctgagaacgatggctgcaaatgtggaccaaactgctcc

SEQ ID NO: 188050 - DNA, 266 bp, Glycine max
ggccgcccttttttttgtcgtttcctttttctcaacatttcttcatttaggtttttgtggccataatgtgatgatcacttggccatcatcaccttaacgaactcctcgtagtttatttggccatcgccatcaacatcggcctcgcgaatcatctcatcaacctcttcatcggtcgagttctccccgaggttggtcatcacatggcggagctcagcagcagagatgaacccattctggtccttgtcgaaaacccggaatgcctcttt

SEQ ID NO: 188051 - DNA, 254 bp, Glycine max
caggtgaatgtgaacactgaacaacaaagatgggtgccgtgacctcttcaatggcggccaagctggcgttcttccctccttctccgccgtcctacaaggtgctgaaggaggaggccacggggctgctgctgatggacccgttcccgcaccgcgagaacgtggaggtcctgaggttcccgacccgccgcggtaccgagatcgtgggcattcacgtgcgagcacccatggcccacatccacctgctctactcgcac

SEQ ID NO: 188052 - DNA, 263 bp, Glycine max
gttcactttcactttaccaactcctaacaatttctctctctttccttcttcaccgcatcaatggcgtcggacggcgttctcctcggcatgtgcaaccctctcctcgacatctctgccgtcgtcgacgacgctttcttgcaaaaatacggtatcaagttgaacgatgcgattctcgctgaggataagcacaaacctatgtatgaagaattggctaacaatcctaatgtggagtacattgctggaggtgctactcagaattcaat

SEQ ID NO: 188053 - DNA, 267 bp, Glycine max
attcattcttacatattgcttaattttatctgaattttgaaacaccttctgaatggcgttttcaagagttgcattgttaatatgcacggtaattgggtattttgtgattgcctctgcgggcaatttttaccaagattttgatatcacttggggagatgggcgtgctaagatactcaacaatggcgagcttctcactctgtctcttgacaaagcctctggctcgggtttccaatccaagaacgaattcacttgtagtaaaattgatat

SEQ ID NO: 188054 - DNA, 270 bp, Glycine max
ggtgttgttactgctgctcttttctcttttcttttctctttagttctctcttcccctttctttttctttttcttcttcttctgagcctgtttaagcttttcttccattaacatattatcataatgtgtggtattcttgctgttcttggttgttctgatgactctcgagccaaaagggtccgcgtgcttgagctctctcgcagattgaagcaccgtggccctgactggagtgggctccatcaacatggtgactgctttttggcacatcaac

SEQ ID NO: 188055 - DNA, 271 bp, Glycine max
attcgcactgcaaacaaacattgagccatggccgtcggaaagaacaagcgcatctccaaagggcaaaagggtggcaagaagaaggcagctgatccctttgccaagaaggattggtatgacattaaggccccttctctttttcaagtgaaaaatgttggcaaaaccctcgtctctcgtacgcagggtaccaagattgcttctgaaggacttaaacatagagtgtttgaggtctccttggctgatcttcaaggggatgaggatcatgcattca

SEQ ID NO: 188056 - DNA, 253 bp, Glycine max
agagagcgcgtcttaataaacgctcttctctgaaaacccccatttcttttcttctttcttcttctctttcgcttcttcgatcttcgatcttcgtcgctgaaaatgagagagtgcatttcaatccacatcggatacgatataaagaaagttggacacgcctgctgggatctttactgccttcgttacggcatgcagcctgatgggcagctgccaagtgatcaggtcgcttgtggatgtgatggtgctttcaaca

SEQ ID NO: 188057 - DNA, 271 bp, Glycine max
aaacgcccctctctctcctccaatggccgaccagctcaccgacgaccagatcgccgagttcaaggaggccttcagcctcttcgacaaggacggcgatggttgtattactactaaggaacttgggactgtgatgcggtcactagggcaaaacccaactgaggcagaactgcaggatatgattaatgaggttgatgctgatggcaatggaaccatcgacttcccagagttcctcaacctgatggctcgcaagatgacagacaccgactccgag

SEQ ID NO: 188058 - DNA, 271 bp, Glycine max
ccgcaacccattttgcatctaacccttttgtcattaataatctctctgaccactctttccttggtcgatgccgccgatcccacatttggcttcacccctcttggattatctagtagctcaaacttgcaaatccaaaagccttacgacgttgcagtcaacgagcgctacagcttttcaaatggagtgcacagattttgggtatactccacggacaagcctcatatgcaaggcagcaatacgaagccacgaactgagattcgtatcgctggat

SEQ ID NO: 188059 - DNA, 294 bp, Glycine max
cttgtgattacaaaaatcagaatttggccgttcgagttgaagaatcaagcaagaagcctgattacttggcaattaaatttttgtatcaagggggacaaacagagatagtagccgttgatgtggctcaggttgggtcttcaaactggagcttcatgagcagaaaccacggggcagtatgggacacaagcagggtaccccaaggcgcattgcaatttaggttagtggtaacggcagggtatgatggcaagtggatttgggcaaagaaggtcctacctgctgattggaaaaatggac

SEQ ID NO: 188060 - DNA, 291 bp, Glycine max
tgttgagggtggttccttctctgcaaaggactaccatgatcctcctccagcaccgttgattgatgctgaggaactcacacagtggtccttctacagggctttgattgctgagttcattgccacaatgctcttcctttacatcacagtgctcactgtgattggttacaagagccagagtgatgtaaaggctgggggtgatgtgtgtggtggagttggcattcttggcattgcttgggcctttggtggcatgatcttcattctggtgtactgcactgctggaatctcaggggg

SEQ ID NO: 188061 - DNA, 292 bp, Glycine max
gtaagggcggtgcagtgcttcaaacccctttttctcttctcatttcctttcatcactctcttgcttcttttcttcttctcgcaattttccattttcacacttttagcgtaagaacatcttttaatggcgtcccaaatccgtgagtggtctggaatcaatacattcgcacctgctacccagactaagttgcttgaactcttgggaaatcttaaacaagagaatgtgaactccttgactatacttgtgatgggaaaaggaggtgttggaaaatcttcaactgtgaactccatca

SEQ ID NO: 188062 - DNA, 285 bp, Glycine max
ggaatctgttgttccatggaagaaagactcagactcagtgcattcgctcctacagtctgatcccaatggtgatagagcactcttcccgaggtgagagggcatacgacatcttctcgcgccttctgaaggagcgcattatctgcatcaacggacccatctccgacgacactgcccacgtcgtcgttgcgcactcctcttcctcgaatccgaaaatccttccaaacccatcaacatgtacctcaattcccccggtggcgccgtcaccgcaggcttgctatttatgat

SEQ ID NO: 188063 - DNA, 287 bp, Glycine max
gcagggctctcttctgctttgcattctccgccatcatcatgcaatcgcttcactctcccaccctccgcgcttctcccttggaccctcttcgtggccccaacaatgccgccgccaaccgccgctcctccagcgccaagcgcgtgttcttcgtctccgccacggtggcgccgaaggtgtccgccccgcagcgacagaaggaccccaagaagcgcgttgtgatcaccggaatgggcctcgcgtcgccggatcataccacgtggagggttactacgagaagctcctcgccg

SEQ ID NO: 188064 - DNA, 286 bp, Glycine max
cagaagcctaagcctcaaacatggcgagagggttaaagaaacacctgaagaggctcaatgctccaaaacattggatgcttgacaagcttggtggtgcctttgcacccaagccatcatctggaccccacaagtcccgggagtgtcttcctctgatcctcatcctacgaaacaggctaaagtatgctctaacatatagagaagttattgccatcttgatgcagcgccatgttcttgttgatggcaaggttaggacagacaagacataccctgctggtttcatggatgt

SEQ ID NO: 188065 - DNA, 285 bp, Glycine max
gcacacccccacttcaccaatttagctcctttttcataaaaatccttgctttccctgttgggtctgtttcattttcatcttctggttttggatcatctagcaccagacagacatggctcttgagtctgctcctgcttcagctgacatcagaggagttcacactcatggtggacgctatgttcagtacaatatctatggaaacctctttgaggtctctaggaagtatgttcctcctattcgccctgtgggaagaggagcatatggtattgtttgtgctgctgtaaa

SEQ ID NO: 188066 - DNA, 285 bp, Glycine max
ggggtttcaacctgagtttttcactgttttatttgccatccctcgaatggccgggtatcttggcacattggcgagattccttggatgattcctgatacaaatattatgagacctcaacaggttatttcctttccttaaatcatttctctggttatatcatgatcttgcatattggcataatcattcttggttaatgtgtgctgatatgcttgtacgtatgatgtgctgatattcttagttgtatcggtgaggctgaattatatctttagcaatgggaaatatttg

SEQ ID NO: 188067 - DNA, 285 bp, Glycine max
gaaatggagaactttccagttgttgacatgggaaacctgaataatgaagagagatcagcaaccatggagataatcaaagatgcctgtgagaactggggtttctttgagttggtgaaccatgggatatccatagagttgatgatggacaccgtggagaggatgacaaaagagcactacaaaaagtgtatggagcaaaggttccaagaaatggtagcaagcaaaggcttggagtctgctcaatctgaaatcaatgatttggactgggaaagcactttctttttgcgc

SEQ ID NO: 188068 - DNA, 299 bp, Glycine max
ctcgagccgattctctccattgccatcacaaaccctacgcttcggttatctaatccaaaaccagatccaaatccaaatccaagacgatgtcgtatcgaccttccgccaacgccaggacctaggttcgtcggaaccgctacaaggtcgccgtggacgccgatgaaggtcgccgtcgccgagaggataccatggtggagatccgatagagccgtaaggaagatagtttgcagaagaagagacgcgagggtctccaatcgcagcagattccttcgtcacttcactctactgtaatagagaag

SEQ ID NO: 188069 - DNA, 290 bp, Glycine max
ggtttctcatgtgggaagagagaaattgatgttggctcctggacttataagtgccttggcttccactctagacactggtgagcccatagagcaggagcaagctgcttcttgtctcctaattttgtgtaacaggagtgaggaatgttgtgagatggtcctgcaagaaggggttagacctgcattggtgtcaatatcggtgaatgggacctcgagaggaagagagaaggctcagaagctcttgatggtcttccgagagcagcgacaacaagaccattcacctgttaagactg

SEQ ID NO: 188070 - DNA, 288 bp, Glycine max
ggaggaatatgtggaaattcctagtgattctgggattacattcaatgaacaaccattaatgaaagcattgcagattgctgaaaaggctagggatgctattcttagcgggaaatttgatcaggtacgcgtcaaccttccaaatggtgacatggtggggcatacaggtgacattgaagcaacagttgtggcatgcaaggcagctgatgctgctgtgaagatgattcttgatgcaatagagcaagtgggtggaatttatgttgtcacagctgaccacgggaatgctgagga

SEQ ID NO: 188071 - DNA, 289 bp, Glycine max
gttggagcctagagtggaggagagagatgggttctgggttttgaaggaagagtacaggggaggcatcaggcctcaggaaaaagtgaagcttgagaaagaccccatgaagctctttatggaaggtgggattgaggacttggctaagatgtcccttgaggaaattgagagctccaagcacaccaaggatgatattgatgttagactcaagtggcttggcctttttcataggagaaagcagcattatggtagatttatgatgaggctgaagcttccaaatggggtgacaaca

SEQ ID NO: 188072 - DNA, 284 bp, Glycine max
gctttatttgtttatgcctgattacagactagctcaaagactatcagcaagctggcacatccaaatgctccccttggatatgggttgtgtttcctgaaccttgcttttgatggatttaccaatgcaactcaggattctttaaaagcaaggtatccaaaaacaagtgcttgggatattatgctgggcatgaatttatggggaaccatatacaatatgatttacatgtttggatggccccgtgccagtggatttgaggcagttcgcttttgccagcagcatccaga

SEQ ID NO: 188073 - DNA, 282 bp, Glycine max
gaaagatcggcgatgactgcctccaaggatcgcgagaacttcgtctacatcgccaaactcgccgagcaggccgagcgttacgaagagatggtggaatcaatgaagaacgttgcgaatctcgacgttgaactgacggtggaggagcggaatttgctttctgttgggtacaagaatgtgattggtgctcgcagagcgtcctggaggatcctgtcttccattgagcagaaggaagaaacaaaagggaacgagttgaatgcgaacggattaaggagtacagacaga

SEQ ID NO: 188074 - DNA, 287 bp, Glycine max
tatggctgacttgttggaatggtcaaagcaagataagaaacgaatgcttcatgtcgtctaccgtgttggtgaccttgatcgcaccatcaaattttacacagaatgtttaggaatgaagcttttgaggcaaagagatatcccagaggagaaatatgctaatgcttttcttggatttggccctgaagaatcccattttgttgttgaattaacatataattatggggttacctcgtatgacattggcgatggctttggacattttgcaattgcaactcaggacatttata

SEQ ID NO: 188075 - DNA, 282 bp, Glycine max
tttgcttcttgaggccaacaggctcctgagggcgggtggctactttgtctgggcagcacagcctgtttacaaacatgaagagacccttcaagaacaatggacagaaatggagaacctgacagctagcatttgttgggaacttgtacgaaaggagggctatattgctatatggcggaaacctttggacaatagctgctaccttggtcgagacattgatgcgcatcctccattatgtgagtccaatgatgatcccgataatgtttggtatgttggtcttaaggc

SEQ ID NO: 188076 - DNA, 282 bp, Glycine max
cttcactttctctcgtttcaatcgaaaaaaatcatgggcagaaaattcttcgtcggtggcaactggaaatgcaatgggaccactgaggaggtgaagaagattgttactactttaaatgaagctaaagtccctggagaagatgttgtagaagttgttgtgagccctccttttgtgttccttccttttgtaaaaagtttgctgcgccctgatttccatgtctcggcccaaaattgttgggttcgcaaaggtggtgcttatactggagagttagtgctgaaatgc

SEQ ID NO: 188077 - DNA, 284 bp, Glycine max
aagaagttggcggtggtgagtttgagcatctccctgaaggttgcatagcgaatatagtttcgttcaccactcctccagatgcctgcgttctctctttggtctcttcctccttcagatctgcctcagtaaccgacttcgtatgggaaaggttcctcccctccgattatcaggctatcatttcccaatcttccaagccctccactctcaccaattactcttccaagaaggacctctacctccacctatgccataaccccctcctcatagacgctggtaaaaagagc

SEQ ID NO: 188078 - DNA, 291 bp, Glycine max
ggaattactgatgaagatgctgcaaaggttgttgatggtttggctctcaaagtggctgatagaaataagtcgattgaacaagtgaagaatttgtataaactttttgttgattgtgactgcacccttttggaaatcaatcccattgcggagacagctgataaccaattggtgtatgctgatgctaagttgaattttgacgataatgctgcatatcgccagaaagagatatttgctctccgtgatacaacacaagaggaccctcgagaggtgactgctgcaaaggcagactta

SEQ ID NO: 188079 - DNA, 282 bp, Glycine max
ctatcctggagtgtgtttattgtctggcttgcgctcgttgggtttggaagaagtgtttgtacactgcaggctatgagagtgaaaattggggcctggctacggcacaagaatttgagcctgtgcctcggatctgtcggctgatcttagctgtctatgaagacgatattcgtaaccctcaatgggctcctcaaggaggttatggcattaatccggattgggttatcttgcgtaaggactatgacgataaccaaggtcgtgttactccgtacatgatataccttg

SEQ ID NO: 188080 - DNA, 286 bp, Glycine max
ggaagaatactggcattgaccagggataaggacctttctttaaagaatgttagacatttcatattggatgaatgcgacaagatgctggaatcattggatatgaggaaagatgttcaagacattttcaagatgactccccatgataagcaagttatgatgttctcagcaacactcagcaaggaaattcgcccagtctgcaagaaatttatgcaagatcctatggaaatttatgttgatgatgaggccaagttgacacttcacgggcttgtgcagcactacatcaaat

SEQ ID NO: 188081 - DNA, 296 bp, Glycine max
atttggtgttccatttttcttcctccatctttatcttaaacataacttgaactctccattccttaaattttagctacgagctagttccgacacagacaaagcaatggcaaagaccgagttagaggtgactgttgagagcgagaacaaagacctcaagcacctggggtttgtgaggattgctgctattcaaacatttgtgattgtgtcaaatctgtatgagtacgcaaagcagaattctgggcctttgagatccgttgtaggaacggttgagaacactgtaaccaccattctcggtc

SEQ ID NO: 188082 - DNA, 286 bp, Glycine max
gcgggtgaggtagaacccttccacggtggtgactgcgcgatgggtgcctacaagtatgtttcagagctatggcgcaagaagcagtctgatgtcatgcgcttcttgcagcgggtgaggtgctgggagtataggcagcaaccttccattgttcgcttgacaaggtcgacccgccctgacaaggctcgtcgcttgggcttcaaggctaagcagggctatgtgatataccgtgttcgtgttaggaggggtggccgaaagaggccagttcccataggtattgtttatggga

SEQ ID NO: 188083 - DNA, 285 bp, Glycine max
gtcttcatcgccgaagatcaagatcctcctccaataactcattatctagtaattctccaagtccaagatcccccatgtcaaacaatggagagatcactgggctaatggaggcttttcgtcactttgataatgatggagatgggaaaatctcggcctatgagctaaggtcatattttgggtccattggggatcacatgtctcatgaggaggctgaaggggtcatccatgacctagattccgatggggacaacttgttggacttcaaggatttcaccaagctcatga

SEQ ID NO: 188084 - DNA, 281 bp, Glycine max
caaaatggtcatggttctagccgtagtcctcatgatactgggaagactagccctgaaaatggacttggctccggaagtcctgatgaaaaagggaatcccagcccttacaatggttatggagggagcccaaataatatgcctgatcccagggacagtcccaactatggcggtcctgaaagtcccatgcatgaaagataccgcagccagtcaccccctgcagaagaatgattgcagtctttgatgaagaagccggaagggccaactgattgtagttctgtttc

SEQ ID NO: 188085 - DNA, 283 bp, Glycine max
cagggtaggaagatttgtgatgggtggaagttctattggtgatgactgggagctcacttcctcatctaacgagggtcggacagtggtcttagttggacgaactggcaatggcaagagtgcaacaggtaataccattcttggaaggaaggtcttcaagtcaagggctagctcctctgctgtatccacctcatgtgaattgcagacaacagaattaaacgacggacaaattgttaatgttattgacaccccaggattatttgatttgtctgtcggatctgagttt

SEQ ID NO: 188086 - DNA, 281 bp, Glycine max
ctcactcactgcagatctcaattgcatcgctgtccatggctaccatcgttagcatcaaggcccgccagatcttcgacagtcgtggcaatccaactgtcgaggtggatttgacttgctccgatggtacttttgccagagctgctgttccaagtggtgcatccactgggatttatgaggcccttgaattgagagatggaggatctgactaccttggaaagggtgtatcaaaggctgttgacaatgtgaacaccgtcattggccctgctttgattggcaaggac

SEQ ID NO: 188087 - DNA, 286 bp, Glycine max
ctcgagccgtttttttttttaatttaaaatgacacgaatttcattgacaagtcaaattcagactgcagtagacttctaaacaacaagctcaagcacaactctatataacaattattacagatacgtttgaagtttcaaaaccaaacacagcaacaatactattaagctgttatatctactaactagattcatcaccacctaataaaagaaaactaaagagtagtgtcgatgcaaaatggccaaatcagcttgggttgttctactcaaccttaacactgatcacgtc

SEQ ID NO: 188088 - DNA, 286 bp, Glycine max
  unsure (1)..(286): unsure at all n locations
atgggatatggtgagaatgatatcaccttagtatcttttcaatcagtctccaaaggctatcacggggagtgtgggaaacgaggaggttatatggaggtgactgggttttctgcagaagtgagggaanaaatatataaagtggcatctgtcaacctttgctctaatatctctggtcaaattcttgcaagcttggtcatgagtccacccaaggttggagatgagtcctatgactcatcatggctgagaaggagaatattttggcgtccctgccaggcgtgcaaagaca

SEQ ID NO: 188089 - DNA, 296 bp, Glycine max
gattaatcactataattgactatgaatatgccagttataatcccattgcatatgacctcgcaaatcatttttgtgaaatggtggcagattaccacagtgacacacctcatgttctgcgactacacgaagtatccaggactagaggaacgtcaaagatttatccgcaactatctgagttctgaaggcaataaaccaagcaatgctaaagtgaaccagttagcgaaagctgcagaggaaatacactcttgcaaaccatctattttgggggttgtggggacttatttcgagttatgtga

SEQ ID NO: 188090 - DNA, 282 bp, Glycine max
aaagaaccgtgcgctgggcagcaccaagaaaaaccccaggtgcgcaccgacggcaacgaactcttgcggttccactgcaccaccttaacgtgcgcactgggtgcacgtggctcttcctccctctgcgcctccgtacccggctgcagcgtctgcaccatcatcaggcacggtttccaaggcgggtgcggcggcggtggagaccacgcgagggcgaagggcgtgagaaccaccgccagcagcggtcgggcccacgactctgtggtgtgcggtgacgccacgcgc

SEQ ID NO: 188091 - DNA, 284 bp, Glycine max
  unsure (1)..(284): unsure at all n locations
aaaagacggtgtttgggtttcacagacagacacacactcggttctgccttcacacaacatttgtcttcgtancctnnttctcctaagaaaagccatggctaagggtcccggtctctactctgacatcggcatgaaagccagggatctgctgttcgaggactaccacagtgaccagaagttcaccatcaccacctactcacccactggagttgctataacagcatcaggaaccaggaatagtggactgtttgtgggttgttgtcaacactcagttgaagatcaaa

SEQ ID NO: 188092 - DNA, 287 bp, Glycine max
atgaaggtctcccccttagcattttcaatccttttattgtccttcaccatagaactcttcattggcattgcttcagcagcacaagaaccagtgcttgagacctcaggccagaagctgagatcaggtgccaagtactacattctaccagtcttcagaggcagaggtggaggcctaacagtttcaagcagtggcaacaacacatgcgccctctttgtggtgcaagagacagcttgaactctcaaagggcaccccagttaccttcataccctacaatgacgcaagtggtg

SEQ ID NO: 188093 - DNA, 284 bp, Glycine max
atgaaggtctcccccttagcattttcaatcctttttttgtccttcaccatagaactcttcattggcattgcttcagcagcacaagaaccagtgcttgacacctcaggccagaagctgagaacaggtgtcaagtactacattctaccagtcttcagaggcagaggtggaggcctaacagtttcaagcagtggcaacaacacatgccccctctttgtggtgcaagagaagcttgaagtctcaaagggcaccccagttaccttcacaccctacaatgccgagagtgg

SEQ ID NO: 188094 - DNA, 281 bp, Glycine max
ctccgtttctcgccaaacaaacacaaaatggctgccttcagcggcgacgaaaccgcacctttctttggcctcctcggagccgccgctgccctcgttttttcctgtatgggagcggcgtacggaaccgcgaagatcggcgtcggggttgcgtcgatgggcgtgatgaggccggagctggtggacaaatcgatcgtgccgattgtgatggctggtatgttgggtatctacggtttgatcattgcggttctcataagtacgggcattaactctaaggccaaatc

SEQ ID NO: 188095 - DNA, 281 bp, Glycine max
ccggcgacgcatcattcaaatttctgccctatcaactttcgatggtaggatagtggcctaccatggtggtgacgggtgacggagaattagggttcgattccggagagggagcctgagaaacggctaccacatccaaggaaggcagcaggcgcgcaaattacccaatcctgacacggggaggtagtgacaataaataacaataccgggctcattgagtctggtaattggaatgagtacaatctaaatcccttaacgaggatccattggagggcaagtctggt

SEQ ID NO: 188096 - DNA, 286 bp, Glycine max
gggattctcgccattgacatctacttccctcccgcttgcgttcagcaggaagcattggagactcatgatggtgccagtaaagggaagtataccattggacttggccaagactgcatgtcattctgtaccgaagtagaagatgtcatctcaatgagtttgacagtggttacttctcttcttgagaagtatgggattgatcctaaacaaatcggtcgtctggaagttggaagcgagaccgtgatagacaaaagcaaatccatcaagacattcctgatgcagatcttcg

SEQ ID NO: 188097 - DNA, 287 bp, Glycine max
agccatcacaattgaaagggtccgtagtgactggccacgatgccattccgaattggatgatttcggggtgcgttgaatacataaaatcaggacaataacagggtgacatgttactagttgtggcggagggtgactatgcagttagacttggcaatgaagcttccattaagcagaagctgaagctgattaaggggtccttctactccatcaccttcagtgccgctcgaacctgtgcacaagaggagaagctcaacgtgtcagtggttccaaccactgagaagagggat

SEQ ID NO: 188098 - DNA, 291 bp, Glycine max
ggcgaactgttcccgctgctgttccggccattgtcttcttgtctggtgggcagagcgaggaggaggcaaccctcaacctcaacgccatgaacaagtcccagggaaagaagccgtggtccctttctttctcttttggaagggcacttcagcaaagcactctcaaggcatggggtgggaaagatgaaaacattaagaaggctcaggatgctttatttgccaggtgcaatgcaaactcacatgcaatttgggaattacaaaggtgatgctacccttgctgagggtgctccgatt

SEQ ID NO: 188099 - DNA, 283 bp, Glycine max
gcagcttcatctgtttttctgcatcggcgtgaacaatggcgacgtacgctgcgatgaagcccaataagcctggcttggaggagtcccaagaacagatccacaagataaggatcaccctttcctccaagcacgtcaaaaatctcgagaaggtttgtggggacttggttcgtggtgcaaaggataagaggctcagggttaagggacctgtcaggatgcccactaaggttcttcacatcactaccaggaagtccccctgtggtgaaggtagcaacacatgggacag

SEQ ID NO: 188100 - DNA, 249 bp, Glycine max
ctcgattctgttcaaccatgcgttggtatttggagtgataactgttcatcaaggtctcgcataagatggacgttcattctggcaggatctcgaatgatatatctggctgtgatattaatcggatgttctgctgagaatggatatgtattacgtgatacacatgagtgttactgagcatttaaagggttccgaacaagggctgctcgtgtatgtatacttgggttctctatgcatgaccttgctaacaac

SEQ ID NO: 188101 - DNA, 285 bp, Glycine max
gcagggcgtcacaaccaacccctctcaaactatttttctatttcgctgaagttgctccgccaaaggccacatattggtctggcactgatggaggccaaattttttcgctttctcaagattgtgggtgttggatacaaagctagagctgaagctgcgggtcgtctattgtatctcaaattggggtacagtcatgaggtggaattaactgttcctcctgctgtccgtgttttctgcttcaaaaacaatgtaatttgctgtactggaatagacaagcaaagggtgcac

SEQ ID NO: 188102 - DNA, 286 bp, Glycine max
aagaagttgtcctacatctcagttccttctcagatcatcaactccatctcatcttcttctcttcaatctctgcttgaatctcccaagaagtgtgcaagacactccacatccttcacctttgtcaagtgcatatggtcaacattcttcgttttcactctcttgatacttgctttctttgccatgctcaagtttcgtctcaatctttacacctcttttcctccatcatccatgtgcaacctcagtagacccctcaaaatctaatcttggacagcactgtggtgatgat

SEQ ID NO: 188103 - DNA, 283 bp, Glycine max
ctgactacgttttgctctacgcctctccctctctctcaaaaatcgttctcttcgattttagggttttgttttgctgctgcctccgttccccccttctcataaacaacgcgttttctcttctgcttcgtatctattctttgcttttggttttcgatgattcaaggccttcacagcattcgttgcggcattttaatcgatttatccaagcaggactgaatgaactaatggagtctaaaggtgggaaaaagaagtctagtagtagtagtagtaaatcattgttcta

SEQ ID NO: 188104 - DNA, 279 bp, Glycine max
gactcattgttcttctcccaggttatttagaaaagcaaaatggtgaagatttgctgcattggtgctggagatgtggggggtcctactatggcagtcattgcacttaagtgcccatccattgaagttgctgttgttgatatctctaaatcccgcattgcagcctggaacagtgaccagcttcctatctatgaacctggccttgatggtgttgtgaagcaatgccgtggcaagaacctcttcttcagcactgatgttgaaaagcatgtctttgaggctgac

SEQ ID NO: 188105 - DNA, 282 bp, Glycine max
gtcagtttcgtgggtgagaggcaagtgcgtcggtaagggcgcgtttggggttgtcaacgtggcggtttcgaaaagagataatcgcgttttcgcggtgaagtccgtggattgcggaagggggctttctggtcaggtggaggcgttggagaacgagattgggattctgaaacgagttacctcgccgcacgtggtggcttatatcggcgacgatgtcacgtgcgagggaacggcgtcgttcaggaaccttcatttggagtacatgccaggtggcaccgtcgctga

SEQ ID NO: 188106 - DNA, 288 bp, Glycine max
cagaagcctaagcctcaaacatggcgagagggttaaagaaacacctgaagaggctcaatgctccaaaacattggatgcttgacaagcttggtggtgcctttgcacccaagccatcatctggaccccacaagtcccgggagtgtcttcctctgatcctcatcctacgaaacaggctaaagtatgctctaacatatagagaagttattgccatcttgatgcagcgccatgttcttgttgatggcaaggataggacagacaagacataccctgctggtttcatggatgttg

SEQ ID NO: 188107 - DNA, 316 bp, Glycine max
gcacgcgtagtaactcatatctccctcgagacagaagagaagaggcgcacgtgagcagtaactcgtggaattgctagcaatggcgaggatcaaggtttacgagctgaagcagaagacgaaggctgatctgttgaatcagctgaaggacctcaaggccgagcttgccttgcttcgtgttgctaaggtcaccggcggtgcacctaacaagctctctaagatcaaggtggtgaggttgaacattgcccaggttttgacggtgatttctcagaagcagaaggccgcgttgagggatgcctacaagaacaagaagtacttg

SEQ ID NO: 188108 - DNA, 294 bp, Glycine max
gaggagaggtcgcaaacgcaaaaatggtgaagtttctgaaaccaaacaaggccgtcattgtccttcagggacgctacgccggcaagaaagccgtgatcgttcgaaccttcgacgaaggaactcgcgagcgcccctacggccactgtttggtggcggggataaagaagtaccctgcgaaggtgatcaagaaggactcggcgaagaagacggcgaagaagtcgcgcgtgaaggcgttcgtgaagctcgtcaactaccagcacctcatgcccacgcgctacacgcttgacgtggact

SEQ ID NO: 188109 - DNA, 287 bp, Glycine max
cgaactttcagcaatggtaccagaatattggctaacggaaggtgggcagagtgctactggtgcattattggatcatataattgaaaaccatgctgcttctgcacgccttgcaaatcaagctgctacccaaaagatttcattgtttgagcttctgaacaagatgttggaaacaatgatagttgagctgaacctatcctttattgctgccttgactgaagatgtacatgttcttcctgacttccatgggaataggtcacccattgcagatccaaaagcaaaaggagtca

SEQ ID NO: 188110 - DNA, 290 bp, Glycine max
ggaagagggaggaaaagcccccaaaatggtcacggttctagccgtagtcctcgtgatactgggaagactagccctgaaaatggacctggctctggaagtcctgatgaaaaagggaatcccagcccttacaatggttatggagggagcccaaatactgtgcctgatcccagggacagtcccaactatggtggtcctgaaagtcccatgcatgaaagataccacagccagtcaccccctgcagaagaatgattgcagtctttgatgaagaagccggaagggccaactgattg

SEQ ID NO: 188111 - DNA, 288 bp, Glycine max
ctctaaaacattaattgaactctccattccttaaattttaccaacgagctagttccgacacagacaaagcaatggcaaagactgagttagaggtgactgttgagagcaagaacaaagaactaaagcacctgggatttgtgaggattgctgctattcaaacttttgtgattgtgtcaaatctgtatgagtacgcaaagcagaattctgggcctttgagatccgctgttggaacggttgagaacactgtaaccaccgttcttggtcctgtctgcaacaaattcaaggact

SEQ ID NO: 188112 - DNA, 287 bp, Glycine max
gcagtaccggagcagaacggtgttcgaagacgcgagtcctgagttggtgagggatttcttttgggatgatgagttcaggttgaagtgggatgacatgcttatacatgcttccaccatacaagagttagagctcactggaacaatgatggtgcactgggtgcgcaagtgacagagagtatataattgggaggcgaatttgggacgcaggacgaatttatgactgtgtcactaagggagtaccttgcacctccatgccaaggcataataaatctaaacgagttgattta

SEQ ID NO: 188113 - DNA, 287 bp, Glycine max
gccagtagtcatatgcttgtctcaaagattaagccatgcatgtgtaagtatgaactaattcagactgtgaaactgcgaatggctcattaaatcagttatagtttgtttgatggtatctactactcggataaccgtagtaattctagagctaatacgtgcaacaaaccccgacttctggaagggatgcatttattagataaaaggtcaacacaggctctgcctgttgctttgatgattcatgataactcgtcggatcgcacggcctttgtgccggcgacgcatcattc

SEQ ID NO: 188114 - DNA, 287 bp, Glycine max
gcaaaatggatccgtaacctcgggaacaggattggctctgagggctgggcacgggggtcccagtcccgaacccgtcggctgtcggtggactgctcgagctgcttccgcggcgagagcgggtcgtcgcgtgccggtcgggggacggattgggaacgggcacttcggggcctcttccccgggcgtcgaacagtcaactcagaactggtacggacaaggggaatccgactgtttaattaaaacaaagcattgcgatggtccctgcacatgttgacgcaatgtgatttctg

SEQ ID NO: 188115 - DNA, 290 bp, Glycine max
tgaggtggtggtgatcataatcccttgggttctggaggaaatgatggagaaaggcatggagtggaagaatattacaagaaaatggttagggaaaatcctggggatcctttgtttctgaggaattatgccaattttttgtatcagtgcaaacaagaccgtgaaggagcagaggagtattattcccgtgccatacttgcagacccaaatgatggagaggttctatcacagtatgggaagttagtttgggaactacatcacaaccaagaacgtgcctccagctattttgaaag

SEQ ID NO: 188116 - DNA, 183 bp, Glycine max
agacgcttcagaggatgttcgcgggtgcaggtggagcgctgggccatcccccaccggattcccccaccctcgattcctccgagcaggtctacatctcctccctcgcccttctcaaaatgctcaaacacggaagagctggggtaccatggaagtgatgggtctgatgttgggggagttcgtgga

SEQ ID NO: 188117 - DNA, 291 bp, Glycine max
ctcacctcttcttgctcttccataagataccgtgatgatgtgcaagaagtgtgtcctcttaatgaatctcattggactgatctagagtattgcaaacgctataagctgtggtatacatatgcaaagacaatagcagaaagagaggcttggaggattgcaaaagaaaatggcatggatctagtggtggttaatccctcttttgttgttggtcctctgcttgcaccacaaccaactagcacactgctcttgatactaagcattgtcaaaggttaggatcacgtgatatgcgcg

SEQ ID NO: 188118 - DNA, 283 bp, Glycine max
gaaaatggtttcggggtcagggatctgtgccaagagggtaattgtggacgcacgacaccacatgctggggaggctggcatcgatcgtggcgaaagaacttctgaatgggcagaaggtggtggtggtacgctgcgaggagatttgcatctccggtgggctcgtcaggcagaagatgaagtacttgcgtttcctccgcaagcgcatgaacaccaagccctctcacggccccatccatttccgtgcacccggcaagatcttctggcgcaccgttcgtgggatgata

SEQ ID NO: 188119 - DNA, 288 bp, Glycine max
ccttgatctcaagaggggtggaaatggcaggttcttgaagactgctgcatatggacactttggcagagatgaccctgacttcacatgggaagtggtgaagccactcaagggggagaaggtacctgcttaactaaaaggggttccaacactcttggcaagggacttttgcactactactggcttcttattatctgattgctaaaattttctctatgtttccttccctcatactcaattctgtttttttttttctgtatttttttatgaatttcccccttttttttgtgt

SEQ ID NO: 188120 - DNA, 288 bp, Glycine max
gctcctgctcgtgttggtttggttgctccaattgatgtcgttgttcctcctggcaacacagggctcgatccctctcagacctctttcttccaggtgcttaacattcctaccaagattaacaagggtactgtggaaatcattacacctgtggaactcattaggaagggagacaaggttggatcttctgaagctgcattgcttgccaagctaggcataaggcccttctcatatgggcttgtggttctctctgtttatgataatggttcagtgttcagccctgaggttctt

SEQ ID NO: 188121 - DNA, 285 bp, Glycine max
gaaacagtgtgatgaaaatgaaggtccttgttttcttcgttgctacaattttggtagcatggcaatgccatgcgtacgatatgttccctctccgaatgaacactggctatggtgcccgtactccggaggtgaaatgcgcaagttggaggcttgctgtggaagcacacaacatctttggctttgagaccattcctgaagagtgcgttgaagcaacaaaggaatacatccatggcgaacaatatagatcagactccaaaacagttaaccaacaagcttacttttatg

SEQ ID NO: 188122 - DNA, 289 bp, Glycine max
attccctctctcactccttcatctacgtaatttccttccttcctttctttctttctttctttctttatcttctcatttttctcaatacaatttttttctttctttctcaagttttgctacttttctcttcttaaccatagttcacatattatatcatcacatatcatagtgatatcatatcacaatgtgtggcatacttgctgtgcttggttgctctgattcatctcaagccaaaagggtccgcgtccttgagctttctcgcagattgaagcaccgtggtcctgactgg

SEQ ID NO: 188123 - DNA, 289 bp, Glycine max
gggatcgaagccggggagcggaggtgcggcgtcggcgcagaacgaagccatagaccggcgagagcgtctccggcgactggctctggagaccatagacttggcgaaggatccctatttcatgcgcaaccacctcggaagctacgaatgcaaactctgtctcactctccacaacaacgagggtaactacttggcccacactcagggcaagcgccaccaaaccaacttggccaaacgtgccgctcgcgaggccaaggacgcccccgcccagccccaaccccacaagcgcaaa

SEQ ID NO: 188124 - DNA, 263 bp, Glycine max
ctctctctctcccttttcttgaaacttccctctttcctttaaggattccctcctaatttggtgggattatccctcatcagcattgccattccctgtttcactcaccacattgaagacatggaaaagcttattcgcatgttccctttgctccttgttcttcttctgtgccccaattttgcttttgctggccatgactacggccaagctcttagcaagagccttctgttctttgaagctcagagatctggttaccttcctcacaa

SEQ ID NO: 188125 - DNA, 148 bp, Glycine max
gaagatggtgcgctgctgtcggtgcttcgcctgagtctcattccgtttgcgccactatcacaggttgtgctgaggttactggttctgaagaattcagagtttatcaggacaatggtatatggatcacgggtgactctgaagttaatat

SEQ ID NO: 188126 - DNA, 290 bp, Glycine max
cttgctaccaacactgagcttaaccgagcttcgcaaagatgaatcgggaaaagttaatgaagatggccggttcggttagaactggaggaaagggtactgtgagaagaaagaagaaggctgtccacaagacaacaaccacagatgacaaaaggcttcagagcaccctgaagagaataggggtgaatgccatccctgctattgaagaggtcaatatctttaaggatgacgtagttatccagtttctaaatcccaaagttcaagcatccattgctgctaatacttgggttgtc

SEQ ID NO: 188127 - DNA, 287 bp, Glycine max
gttggaatcccaaattcatttctgtttctcattctcaattcttcttctattctcattctgatttgccacacacgcagagaggtccgaaaatagtgggacttgattcactggaggtggacaaagatggctttcaacgcagctgcttgtgctgagagagcaactagtgatatgctcattggtccagactgggcaatcaacatagacttgtgtgatatcattaatatggaccctgggcaagccaaggatgctttgaagatactcaagaagcgtttgggcagtaaaaatcc

SEQ ID NO: 188128 - DNA, 288 bp, Glycine max
tgctccccaaggaaagaagcagagtgtttcttttgaaatcagctagaaaagatgtcaggtgaagaggtagctgttgcagctgaggcacctgctgcttcaattacaggtgagccaatggacatcatgactgctctacagcttgtgctgagaaaatctctggcctatggtggtcttgcacgaggtcttcatgaaggtgctaaggtgatcgagaagcatgctgcacagctctgcgttctagcagaagattgtgaccaacctgattatgtgaaactggtgaacgctctttgt

SEQ ID NO: 188129 - DNA, 285 bp, Glycine max
cgcctagccattgatttggaaaagtccaacttcaaggatgagtaagcttcagagtgatgctctaagagaagctatctcaggaatcatggctgattccaaggaaaagaacaggaaatttgtggagaccattgaactccaaattgggttgaaaaattatgatccccagaaggacaagcgtttcagtggctctgttaagttgcctcatattcctcgccccaagatgaagatttgtatgcttggagatgcccagcacgttgaggaggctgagaagataggattggacta

SEQ ID NO: 188130 - DNA, 281 bp, Glycine max
ctcgagcctggaaaaccctaagagctgaagggaactccgatcttgttccctctcttctctacgccttgtgccttcacctcatatctaccttcaaccaccgctgatgatgatcatgtgtacgacacttacggcgataagcttcaatacggtgtcaattattctcgtgttgccagtgataagaggacatggcggtggtatacaagtagcaaaagcatgaaacgaaacttgccctctgactgttgtgcaatctggcaacgagctctctgaggggttaccgataa

SEQ ID NO: 188131 - DNA, 286 bp, Glycine max
gtagtcatatgcttgtctcaaagattaagccatgcatgtgtaagtatgaactaattcagactgtgaaactgcgaatggctcattaaatcagttatagtttgtttgatggtatctactactcggataaccgtagtaattctagagctaatacgtgcaacaaaccccgacttctggaagggatgcatttattagataaaaggtcaacacaggctctgcctgttgctttgatgattcatgataactcgtcggatcgcacggcctttgtgccggcgacgcatcattcaaa

SEQ ID NO: 188132 - DNA, 286 bp, Glycine max
acactgcgattttcttcgaaatgattctcattctcacccttgtcttcaagaccccactgagaaaactcgtcatcgtttccctcgatcgtgtgaagcgcggtcgcggccccgtggtggtttccaccgtgggcgccacattggtggtggttctcgcgtcgagcctctacagcatggccaagatccagcaacgcaccctcgaggccggcatagtcaaccccaccgaccaagtcctcatctccaagcacatgctcgaggcttctctcatggggtttgtactgttcctctc

SEQ ID NO: 188133 - DNA, 289 bp, Glycine max
cggctcgccgcgagcatgctcaagtgtggcagaggaaaggtttggcttgaccccaatgaagtcaacgaaatctccatggccaattctcgccaaaacataaggaaactggttaaggatgggtttatcatcaggaagcccaccaagattcactctcgctcacgtgctcgtcgaatgaaggaagcctagaggaaaggacgtcactctggatacggtaagcgtaagggtacaagggaggcaaggcttcacactaaaattctatggatgaggagaatgcgtgtgctcagacgct

SEQ ID NO: 188134 - DNA, 286 bp, Glycine max
gatttacatatagctagtatcattttacatgaaattcaaacagcaataactcaacaagacacaagttgttcaagctatatccgtaaataagtctattttgaagcagaaagactttcatagcgggctttgaagtaggcaaaaagtgggtctctaggaggaaggacttcgtgcacaatagggtggttaaggaattcttggctccatttgtagagtataggaaatttctcactggtgaataactgcaaccctgctatttcctgaaaaattgggatccaaaatgctatga

SEQ ID NO: 188135 - DNA, 285 bp, Glycine max
gcgcagggaacacaagcacgggtgtggagtggcacgtgcgacctccaaaccctaagaaccccatcgtcttcttcgatgtcaccatcggtaacattcccgccggtcgaatcaagatggaactcttcgccgatattgcccccaaaactgccgagaatttcaggcagttctgcactggggagtacaggaaagcaggactgcctgttggttacaagggttgtcaatttcatagagttattaaggatttcatgattcaggcgggtgattttgtaaagggagatggtagtg

SEQ ID NO: 188136 - DNA, 284 bp, Glycine max
ctcaccactccctccactctctttctctagtcctgttatttctcagcgcgtaaagcatggctttgttggtggagaaaaccacgagtggtcgcgagtacaaggtcaaggacctttcccaggccgacttcggccgcctcgagatcgagctggccgaggttgagatgcccggcctcatggcctgtcggaccgagttcggcccctcccagcccttcaagggggcccgcatcaccggctccctccacatgaccatccagaccgccgttctcattgagaccctcaccgcc

SEQ ID NO: 188137 - DNA, 286 bp, Glycine max
atgagtgtcgtcaccatgcattcagtgactaccagctgcttgatgatattgttggccttatcctccactccgctctcctagtcccgtacttttcatggaaatacagccatcgccgtcaccactccaacacaggttctcttgagcgagatgaagtatttgtgccaaagcagaagtccagtatcatgtggtactctaaataccttaacaatccaccaggcagagtcctcactcttgccgtcaccctcacgcttggttggcccttgtacttggcttttaatgtttctgg

SEQ ID NO: 188138 - DNA, 286 bp, Glycine max
cggctcgagggaacgtgacaatggtggcgacgaacgtgaaggcagaaaccatgtctctgatggacaagcgagcgccttggaggctgagatgaactccatcatcgcccgcctctcccagcccggcgctcctggcctctccggaaatctcgtcgactctgagggttttccccgttccgatatcgacatccccgttgttcgagccgaacgacgtcgcctggcagagctgcgcagtgaccacaacgaagtaactgagaaaattaacctaaatattcagattctccattcg

SEQ ID NO: 188139 - DNA, 285 bp, Glycine max
ccggcattttcaaataccacccgaggctcgtaatatctccgtggaattgaaccactttttggtcaattctggcaatggaagcgccttgcaggccggcgaagggagcgtggcggccgaggagagaatggaggaggtgccaaaggcgtgtgacaatgtcaatggtgtggcagaggatgagacttcacagaagaaggaggatgtagaaaagggtagtggcaatgatggggacttttttgattgtaacatctgtttggacctggctagggatcctgttgtaacttgttg

SEQ ID NO: 188140 - DNA, 280 bp, Glycine max
atgatggcatcattgccacctacccttctcatccatctcttcgtgtgcccttcatagacatggccaagttggtcaacgctgacacacatcaaaaagaagagcttcgtaagcttcatcttgcttgcaaagactggggtgtctttcagctggtaaatcatggactttcaatcacatcccttaagaatatggggaatcaagttaaaagattttttgaacttcctttacaagagaagaagagatgggcacagagaccaggaactcttgaaggctatggccaagc

SEQ ID NO: 188141 - DNA, 288 bp, Glycine max
atgtcttcagtttctatccagatgaacgattttgcaatggatttgaagaagtgttgagtcagtatagggaaattgttcctaatattcgacttgcaggtcctacttcatttgcaccaattgttgaaatggccatgacaatagttgagcagagtggaggccagtaccatgttttggtgatagttgcagacggccaggtaacaagaagcattgacactgagcgtgggaggctaagtccacaggagcagaggactgtggatgccattgttgaggccagtaaatttcctcttt

SEQ ID NO: 188142 - DNA, 285 bp, Glycine max
attgcattcggacgcttggatgattctttcagtttaacctcaatcaaggcctatattgctgagttccattcaaccttgctctctgtttttgccggtgttggttcagccatagcctatggtaagttgacatcagatgcagcacttgatcctgctgggttactggcagttgctatttgccacggttttgcactctttgttgcagtttctgttggtgccaacatctctggtggccatgtcaaccctgctgtgacttttggattggctcttggtggccacatcaccatc

SEQ ID NO: 188143 - DNA, 246 bp, Glycine max
cgtcagacctcaccggatagaccatcacgcttgaggtggaaaactctgacgacatcgacaacgtcaaggccaagatccaggacaaggaaggaattcccccggatcagcaacgtctcatcttcgccggaaagcagctcgaggacggccgtaccctcgccgactacaacatccagaaggagtcaacccttcaccttgtccttcgtctccgtggtggcatgcagatcttcgtcaagactctcactggca

SEQ ID NO: 188144 - DNA, 283 bp, Glycine max
aaactcccagatggacgtgaagttgccgtgaagcgcttatacgagcacaactggaagcgagtagaacagttcataaacgaagttaagatcctcacacgtttgcgtcacaaaaatcttgtgtcactctacggctgcacttcacggcacagccgtgaactcctacttgtgtatgaatacatttcaaacggcactgtagcgtgtcatctccatggtggattagcgaacctggctccctaccatggtctacacgaatgaaaattgccgtagagactgctagtgcatt

SEQ ID NO: 188145 - DNA, 285 bp, Glycine max
acccaactaaccctaattcaacttttccgatctgatcacttcgagtaaaaattccaaatgagtcgggcacaggatgcaaaccaatcattcttcccttttggaaatccttttaggatgatatcacctaaaagccctaaaatttcttcacagctgttgttaattctacatgcttttgaagcaactttggaagagaggctgaaaaagcttattcccaagagcaaggatgagatcctcagcttgtcttggatgactttggctatgcagtcactttgtgagagccataat

SEQ ID NO: 188146 - DNA, 283 bp, Glycine max
agtgtatgctatggtgagctttgaatggaaagtggagaagttcttttggttcttctttgtcagcttcttctctttcttgtacttcacatattatggaatgatgactgtgtccatcacaccaaaccaccaagtggcatcaatctttgcagcagcattctatggactctttaatctcttctctggtttctttatcccaagaccgaaaattcctaaatggtgggtgtggtattactggatttgtccagtggcatggacagtgtatggattaattgtctctcaatat

SEQ ID NO: 188147 - DNA, 283 bp, Glycine max
aatcacccttgaggtggagagttcagataccatagataatgtaaagtccaaaattcaagacaaggaagggatcccaccagaccagcaacgtctcatttttgctggcaagcagcttgaggatggacgtacacttgctgattacaacattcagaaggagtccactctacacttggtgctccgtctccgtggtggaatgcaaatctttgttaagaccttgaccggaaagacaatcacccttgaggtcgagagctctgacaccattgacaatgttaaggctaagatt

SEQ ID NO: 188148 - DNA, 285 bp, Glycine max
  unsure (1)..(285): unsure at all n locations
gcagatgcntcgggaaatgccccaggccgcatcgaagttggtggtaaacctcctgaagtgaaggaaaaattacctattcaaaagatcaaaaggaagtgctantggtngtaatttgaatatgtggattacagggaanaataatgancctggtaaaataccangagaatctgctaatgggattcattccanaagtggtnagagtgcaagtnacggaactagtgaaggaagtgatgagaactcccagantgattctcaattganatcaagggagaggcaggactcttt

SEQ ID NO: 188149 - DNA, 288 bp, Glycine max
ctcgagccggacgacggcaacctcaaggtcaccgacttcagcctcagcactttctccgagcacctccggcacgacggcctgctgcacactacgtgcggcacgccggcctatgtcgcgcccgaggtgattgggaaaagaggctacgacggcgccaaggccgatatttggtcttgtggcgtaatcctctacgtacttcttgctggttttttacccttccaggatgacaacctggtggccttgtacaagaaaatttaccgcggtgacttcaagtgtccgccgtggttctcc

SEQ ID NO: 188150 - DNA, 176 bp, Glycine max
cttttaccagaatcatcgcctgtatgttaaaagccgaaacgatgaacagctgagggattctggaaaagcaaactccgtaagtggttgtgagcctgataataatgcaaatggaaaggcaattttaccttgtggtcttatagcttggagcttgttcaatgatacatatagcttcccac

SEQ ID NO: 188151 - DNA, 284 bp, Glycine max
gcggacgtcacggcgaacttgcaagcagcaaccaccgcatccaccccttacgcgctcttcaccaatctccctctcctctccgctttcctctccttcgctctcgcacagttcctcaagatcttcacctcctggtataaggaaaagagatgggattctaaaacgctgcttgattcgggtggaattctttctttacattctgctacattttcggctctggctgttgctataggtctccaagaaggggcaggatcaactacttttgcagttgccgtggtcttggcgtg

SEQ ID NO: 188152 - DNA, 146 bp, Glycine max
cagagaaatccttcatgttcaagctggtcaatgtggacaccaaattggatgcaagtgtttggatgagatgtgtgattagcaatggattgatgtcacttgatattacatatgatactagtcattacaatttgtgtgggttaacgtgt

SEQ ID NO: 188153 - DNA, 292 bp, Glycine max
tctccagccgattcggctcgagatcgatcacgccctattttctgatctaacttctgtagataacgcaaacgctctcataacaacgggcctcattagccccaacctttctcataactggcaccactattgtcggtttagttttccaggatggtgtcattcttggttgctgatactacggcaactgaaggacctatagtggctgataaaaactgtgagaaaattcattatatggcacccatcatatattgctgaggagcaggcacagctgctgatacagaggctgtaacagaca

SEQ ID NO: 188154 - DNA, 282 bp, Glycine max
gtggactgacatgctacaatggaggaaggagtttggtgctgatactattgtgcaggattttgagttcaaggagttagatgaagtcgtgaagtattatccacatggccatcatgagatcgacaaggagggaaggcctgtttatattgaaagacttggaaaggtcgatcctaacaaacttatgcaagttacaactttggatagatatgtgaagtaccatgtgcaggagtttgagaaagcttttgcaatcaagtttcctgcttgctctattgctgccaagaggca

SEQ ID NO: 188155 - DNA, 283 bp, Glycine max
tgtgagcctttctttcaggttcttaacttgatcagtgtgcagtgtccaaatcataagggtagttgcaaattgcaatggctaagcatgatgttgagggtggttccttctctgcaaaggactaccatgatcctcctccagcaccgttgattgatgctgaggaactcacacagtggtccttctacagggctttgattgctgagttcattgccacaatgctcttcctttacatcacagtgctcactgtgattggttacaagagccagagtgatgtaaaggctggggg

SEQ ID NO: 188156 - DNA, 277 bp, Glycine max
tgtatatacgtaactagaaggaacacggatcaattttcatcctctgttaaggaggcaaaggaaaaaggtttgaacttgtagccatcaccgctgtagaatttattctgaaattctacccagtgaagacgcaaggcgtgaagaaaagcgctgagagtctccatcattagtagtataaaggcagttgcaaaggcaaaaacagctagccccactaaccgaatgacaagattgtcatacccccaagcaagtaacaggactttctcataaaaaacggtggaaa

SEQ ID NO: 188157 - DNA, 164 bp, Glycine max
ctgagtattggatacgctatgttttgtgtatggaagccagtggacgcatggatcttgcaaataatgttcttgctcgggcaacccaagtctttgtaaggggccaaccagggatacctatttttggtgcccggttcaagggccaacctgaggtatagattgggcca

SEQ ID NO: 188158 - DNA, 294 bp, Glycine max
ctgctctttgaagaaagaagggtctttgcttgattttggagatgtctctgctctcagatctcatcaaccttaacctctccgataccaccgagaaggtgatcgcagagtacatatggatcggtggatcaggaatggacctgaggagcaaagcaaggactctcccaggaccagttagcgacccttcagagcttcccaagtggaactatgatggttccagcacaggtcaagctcctggtgaagacagtgaagtgattttatacccacaagccattttcagggatccattcagaaggg

SEQ ID NO: 188159 - DNA, 292 bp, Glycine max
accataggttactactcttcgccttttcctttgcaattgttaccaaacaattcatgcttagcccttacaagcaagcattaacaacaatgaagaaagtagtgttaaaggtgggcttacatgatgatagaatcaagcgaaaagttatgagaacagcatctggtctttcaggggttgaatcagattctattgacatgaaagacgagaaaatgaccttattaggaaacattgatccagtgaatgcagtgtgcaagctacgaaagtgttgtcaaactgaaatagttacagttggtcc

SEQ ID NO: 188160 - DNA, 288 bp, Glycine max
gctttatttgtttatgcctgattacagactagctcaaagactatcagcaagctggcacatccaaatgctccccttggatatgggttgtgtttcctgaaccttgcttttgatggatttaccaatgcaactcaggattctttaaaagcaaggtatccaaaaacaagtgcttgggatattatgctgggcatgaatttatggggaaccatatacaatatgatttacatgtttggatggccccgtgccagtggatttgaggcagttcgcttttgccagcagcatccagaggca

SEQ ID NO: 188161 - DNA, 285 bp, Glycine max
ctggaaatgcctccctagaagaggttgtgatggccttgagatgcggagacatgtcaatggcaatctctacactggaattaatacgaagcacatctttctgacgagcaggatggtcgaagagtacactggtttgcagttacagccacacaaggctcttgtgggagctaatgccttcgcccatgaaagtggcatacatcaggatggaatgctaaaacacaaaggtacatatgaaataatatcacctgaggacattggacttgaaagaaccaatgaagctggtattgt

SEQ ID NO: 188162 - DNA, 287 bp, Glycine max
tattggctctgagggctgggcacgggggtcccagtcccgaacccgtcggctgtcggtggactgctcgagctgcttccgcggcgagagcgggtcgtcgcgtgccgatcgggggacggattgggaacgggcccttcggggcctcttccccgggcgtcgaacagtcaactcagaactggtacggacaaggggaatccgactgtttaattaaaacaaagcattgcgatggtccctgcggatgttgacgcaatgtgatttctgcccagtgctctgaatgtcaaagtgaagaa

SEQ ID NO: 188163 - DNA, 285 bp, Glycine max
ccgaaccctcgatcactctcacgcgctcctatattcgctcctccaccgtcgctctctcgaacaaccacaacaccatcttcatcacatggcaaacgcagcatctggtatggcagtccatgatgactgcaagttgacgtttctggacctggaggcaaaaaggacacaccgtttcatagtgttcaagattcaggaccagcaggagcaggtcattgtcgagaagcttggtgagcctgcacatggctatgaaggtttcactcgccagcttcctgctgacgggtagcgtta

SEQ ID NO: 188164 - DNA, 286 bp, Glycine max
gaggattccctcagaaaggcatttcttttggctgattcagctttggccgatgattgcagcgtgaatagttcatcaggcactacggcccttactgctttgatatttggaaggcttctaatggtggccaatgctggcgactgccgagcagttctctgtcgcaaaggagaggccattgacatgtctgaagatcacaggcctatttatctatcagagcggaggcgagttgaagaattgggtggctacatagaagatggttatctgaatggggttttatcagttactcgag

SEQ ID NO: 188165 - DNA, 293 bp, Glycine max
agcacattaccagatggacaagatattgcagtcaaaaggctttcacaaacatctacacaaggattaacagaatttaagaatgaagttatatattgttctaaacttcaacatcgaaatcttgttaaagttcttggttgttgcatcaatgagcaggagaaattactcatctatgagtacatgccgaacaaaagcctagacttctttctttttgattcatctcaaagcaaacttttagattggtccaagcgattgaacataataaatggaattgctcgaggacttcattatcttca

SEQ ID NO: 188166 - DNA, 293 bp, Glycine max
tcatcgttcaacatattctcaccatctcagtcatgggcctgctatcttgttttaggtctaccgtcctgagaaaatgttccaaaggaagctctggcatgtcaagattcctgtatacgaacaattttcaacgaaacttgatttcgtctggtggcaatgaatcgtattatgggtattttaacaggagatcatacacttcactttatatgggaactggaactgtgggtgggattacaagtgctagaatcagggtgccaaatgtaggatgtgaaggattcatgtgctcaagtcatctg

SEQ ID NO: 188167 - DNA, 288 bp, Glycine max
agcgattttaaaagatgagtaagcttcagagtgatgctttgcgtgaagccatttcaggaatcatggccgattccaaggagaagaatcgcaaatttgtggagaccatcgaactccaaatcgggttgaaaaactacgatccacagaaggacaagcgtttcagtggctctgtcaagctgccccacatccctcgccccaagatgaaaatttgcatgcttggtgatgctcagcatgttgaagaggcggagaagataggactggactggatggatgtggaagccctgaagaagc

SEQ ID NO: 188168 - DNA, 283 bp, Glycine max
cacaaagcgggttactgtctgttcaagctaccatctctctctctctttcttagtgcctccttgccagaagttaaaatggcccaagaaactttcctattcacatctgaatcagtgaacgaggggcaccctgacaagctctgtgaccagatctccgatgctgtgctcgatgcatgcttggagcaggaccctgacagcaaggttgcctgtgaaacctgcaccaagaccaacatggtgatggttttcggagagatcacaaccaaggccaacgtggactatgagaaga

SEQ ID NO: 188169 - DNA, 186 bp, Glycine max
ctgatgaaccacatcgaggaattgaagttcgcgtcgaaatcgctgcagcggcaatcgcgtaagtgcgaggaggaggagaaatcggacaagcagaagatgaagaaggcggtcacgaaaggctgcatggccggaacgcacatctacgcggcgaaagcgatccgtgagcgccacggagcagatgaacta

SEQ ID NO: 188170 - DNA, 288 bp, Glycine max
  unsure (1)..(288): unsure at all n locations
atggtgtcttctgcnttacctatgatttgagggctggagaagagacaagatcctggnagaaattnattancatngcagttntacatgtgctgctggaatgattgcaaatcatnctncttttccaagcntgcntctggtgaagtntttngnccngatcaacctattgntctcanattattgggatcanaaaggtcaatncaagctcttgaaggtgttgcaanggattggaggantctttgtntccttgttganggaagttagnattggnatngntcctatggaagtgtg

SEQ ID NO: 188171 - DNA, 259 bp, Glycine max
cgaaagtatccatgcttgatcaggtccagcactctaccatcatggtcaatgctaatggccaggtccatctccgtgactggcgtatctggtattaggacttatgaaggaggatactgccaccccacgttgtgccaaggatactcttttgggagttactccaatgctgcattgcaatatcgtgtgtatgacctcatgccaagctactatggactagtctgctgctgcaagaactgcctctcccgtctatgatgctgctcca

SEQ ID NO: 188172 - DNA, 287 bp, Glycine max
tgcgtttcagcactgtcactgagtccttctgttgcgggggaagggcaaaataatggccttgttatgaacttctacaaggaatcatgccctcaggctgaagacatcatcacagaacaagtcaagcttctctacaagcgccacaagaacactgctttctcctggctcaggaacatcttccatgactgtgctgttcagagttgtgatgcttcactgttgctggactccacaagaaggagcttgtctgagaaggaaacagatagaagctttgggttgagaaatttcaggta

SEQ ID NO: 188173 - DNA, 290 bp, Glycine max
gcttgcacgaccacagttgcgaagaccatgactgttcctctaactggtctctctacaaacacatcgacctctccaaggtaactgctttgaatgaggcaaatccaggaagtgttaagtcagttttcaaagcttgggaagagcgtctggattcttctggggttcacttggaaagcaatgagggtgatcctgagttacttgtcatcattccatttacttcagatgtcaagattaagagcatatccatagttggtggagctgatggaacaagtccttccaagatgagagtgttc

SEQ ID NO: 188174 - DNA, 287 bp, Glycine max
cttagcagccaacacctatgccttttcttccaggagattctccatgaagcaccaaaagaacagtaagagaaggttttctttgttcactgttagacctgattctgatgactctgactgcaatgaggaagagtgtgccccggataaggaagtagggaaggtcagtgtggaatggtatagctggggagaagacaaaagtagtgggcacattcccacctcgtcgtaagccgggttggactggctatgttgagaaggacactgctgggcagacaaacatatattcagttgag

SEQ ID NO: 188175 - DNA, 286 bp, Glycine max
tctcccccaagaaattcaacagagttttgattaacttgaaattgttcaacaagaaatggagaattcattgggaaagtacggaaaagagcttaatctcgaggctacagagttgaggttggggttgcctggaagcgatgagcctgagaaacgttctgctgttagaagcaacaagagatcttcaccagaagcaagtgaagaagagtgcataagcaagggcaacatgaattcttctgatggttctgatatcacaagtgatgaccaagacaacgttgtgccacctgcaaag

SEQ ID NO: 188176 - DNA, 284 bp, Glycine max
ctcgagccgggcctcaagagcagtgttattgttggctatgtgtgtgcttccggcgatggatgtggccattcgcccagcaaagaaccctttttgcgtgaagggtcgtgtctactgtgacccttgccgtgctggttttgagacctcagctaccacctacattgctggtgctgagattatgttgcaatgcaagagcagggttagcaacgaggttgtgtacacgaagaaggggtacaccgactcaaccggagcatacacaatgtacgtggatgaggatcacgcagatc

SEQ ID NO: 188177 - DNA, 285 bp, Glycine max
aggctcgaggaatccattgaagagaatgtgcagcggaaaattcacttttgactctgaaaggtatcgccttgaggcccttcctcttgatgttctgattagggtgttgtgtggtgtcgatcatgaagatttggagcaacttgttcgtgtctcaaaaactgttagagaagcggctgagattgctaggagaatgcattttgagtatagcactccaaagaaggtaacttttgctcttcctaaaccgtttgatatagagggtgctggtgggtttgaggaaattgatactcc

SEQ ID NO: 188178 - DNA, 286 bp, Glycine max
  unsure (1)..(286): unsure at all n locations
tctgcacccaccattactcaacactgccactcttcaatcacactaatggctgtcaacttctcagatcctcacaccgtagcaccaacacgnatccctcgatcagttcctttctggtaaaacctatatctctggggatcaattgacaaaggatgatatcaaagtgtatgcagctgttgtggaaaagccaggagactcttgtcctaatgctgctaagtggtacgatgccgtctcatctcaacttgctccaagcttccctgggcacgctcaaggggtaagattcagtggc

SEQ ID NO: 188179 - DNA, 287 bp, Glycine max
cggatgataagtgtagagttcaaggtcattgagaccgatcctggggagcattgtgttgttgctccagacactgggattttctgtgacggggagcctttgaaaagagaggatgtagaaagtatggacgaagttgggtatgatgatgtgggtggtgtcaggaaacaaatggctcagattcgtgagttggttgagcttccattgatgcatccacagctttttaaatcaattggtgtgaagcctcccaagggaattttactttatggacccccaggttctgggaagacatt

SEQ ID NO: 188180 - DNA, 287 bp, Glycine max
ataagataggagagctagactgcaggctcagtttgctccaatgcgacctgttggaatgccaccatctgttggtcctcgtgtgccaatgtatcccccaggtggtccaggtattggtcaacaattattttatagccaaggccctcctgctatcattccttcccagcctggatttggctatcaacaacaacttatgcctggtatgaggccaggtgcagctcctgtgccgaattttttcgtgccaatggttcagcagggacaacagggacagcgtcacggtggaaggcgtc

SEQ ID NO: 188181 - DNA, 291 bp, Glycine max
atggaagctaagactaagccttggctggacctatctcttcttctattggctgcatattgcatgcaacaatgtgtccatggacaatcgcagcaaacaccttgcatgttcatctttggaggctatttatctgacaatggaaataacaacaaccttcgaacatattcaaaatccaattacagaccatatggcatctacttcccagcaggcacaactggtagatttaccaatggactaacgcaagctgacataattgctgagcttttgggatttacggaacgcatcccacccaat

SEQ ID NO: 188182 - DNA, 290 bp, Glycine max
actcgagccgaatcggctcgagattcttctttcagcaactcataactggggtcagctattgccatgctatgcaagtatgtactcgggacttgaagcttgaaaacactttgctggatggaagcccggcacctcgtttaaagatatgcgattttgggtactccaagtcttcagtgcttcatcagtaaccagagtcaactgtgggaactcctgcatatattgctccagaagtattgctgaaacaagagtatgatggcaagcttgcagatgtctggtcatgtggagtaacctta

SEQ ID NO: 188183 - DNA, 225 bp, Glycine max
gccgctcgcagccgcatcgatcggctcgagctactcactcaatgcagacctcaattacttcgctgtccatacctaccatacttagcatcaatgcacgccagatcttcgacagtcgtggcaatccaactgtcgaggtggatttgacttgctccgatggtacttttgccagagctgctgttccaagtggtgtatccactgggatttatgaggcccttgaattgagag

SEQ ID NO: 188184 - DNA, 281 bp, Glycine max
aaggttcagtgttgccaacatcaccttcagggggaagcacagattccttaggtgcaagcagatcaactccttcagtttctggaataaatacctctaattttgcttctcgaagtggctatgctttattggatccaacatgggctgcacaggacaatacctccacagccattgggaatgtggtggccttgcttcattccttcttcagtaaccttccacaagaatggcttgataggaccaatgttattatcaagcaacttcggccagtaacatcagtcagcatg

SEQ ID NO: 188185 - DNA, 286 bp, Glycine max
aaggacctggtttcttctctgagatcggcaagagaggcagagatatcctcacgaaggattacaattccgatcaaagattcaccatctcctcctccaccaactccggtaccaccctgaagtcaacactggtgaagagtagaggactttcctctggtgatgtggctgcagaatttaagtataagaacaaggcggttaatgtcaaagttgatactgaatcaaatgtgttgacgacattcactgtctctgatgttgtgccatccgcgaaaaccattgcttctattcgtct

SEQ ID NO: 188186 - DNA, 283 bp, Glycine max
gcgcaatcgtcttctgcttcaaggaaggagagcttgttattctctatcaacaaggaaaatgtcaggtgaagaggttgttgttgcagctgagccagctgctgccatcccaggcgagcctatggatatcatgactgccttgcaacttgtgctcagaaaatctctggcttatggtggtcttgcacgaggccttcacgaaggggcaaaagtgattgagaagcatgctgcacaactctgtgttctagcagaagactgtgaccagcctgactatgttaaactggttaag

SEQ ID NO: 188187 - DNA, 282 bp, Glycine max
gcggtgcggcgatcctagcactctcttctgcagctttcgccgacagcttcattcaccatggctgagcaaaccgagaaggcattttttgaaacaaccaaaagtgtttctcagctcgaagaaaactgggaagggaaagagacccggaaagggtgggaaccgcttttggaaatccattgggcttggatttaagactcccagggaagccatcgaaggaacctacattgacaagaagtgccccttcactggcaatgtttccatccgtggccgtatcttggctggaac

SEQ ID NO: 188188 - DNA, 252 bp, Glycine max
agggcgactcctcgagacaccaggggttcaccaggggccagcctgtttcgacgctctaggtgcgaactcatagaatccgctggcttcccctactgcatcaccagtggcttctccatcgccgcttccaggttggctctgcccgacaccggcttcatctcctacggcgaaatgctggagcagggccaactcatcacccaagccgtttccattcccgtcattggcgacgccgacaacggctacggcaatgccatg

SEQ ID NO: 188189 - DNA, 289 bp, Glycine max
gctcactgtgattggttacaagagccagagtgatgtaaaggctgggggtgatgtgtgtggtggagttggcattcttggcattgcttgggcctttggtggcatgatcttcattctggtgtactgcactgctggaatctcagggggtcacataaacccagcagtgacatttgggctcttcttggctcgcaaggtgtctttgattagagcaataatgtacatggtggctcagtgcttgggagccatatgtggagttgggttggttaaggccttccaaaaggcttactacaac

SEQ ID NO: 188190 - DNA, 270 bp, Glycine max
atcgagccggcaaaatctaccaatctcaaacagtgcaaaaacactgcgaaatattttcaaccgcaaaataaataacattaaatttccaaaattgccataatcaaccatagctgaacagaagaagtcagtaaccatcgtcgtgagcggagatccataataatacagttacaaattgcaataacacactcattgtggttatcgaaatttgatcgcagcgtcgagaagaatgggaagtttgggagcgattctgaaacatccaggagactttta

SEQ ID NO: 188191 - DNA, 280 bp, Glycine max
gcttgatctcatctagaaagacaaatgaagccatcgagatccttaagctcatgtcttccacattcttgattgcactttgccaagcaattgacttgaggcatttagaggagaatttgaaaaactcggtcaagaacaccgtgagccaagtttccaaaaggattcttaccacaggtgtcaatggagaactccatccttcaagattttgtgagaaggatctactaaaagtggttgatagggagtatatattttcctacattgatgacccctgcagtgctacata

SEQ ID NO: 188192 - DNA, 282 bp, Glycine max
caaatacgcattatattactagttttaatttgttttgtcgtttgcttctttctttgattaatgatgactagctttaaggttgcatgtgtggttgcgatgatgtgcatggttgtagccatgagtgttacacccatggcacaggccgcaatcacgtgcgggcaggtcgccggcgacgtgtctccgtgcctcagttatcttcgaagcggcggaaaaccatcggacgcctgctgcaacggagtgaagtcactcagcggtgcggcaaagaccaccgccgaccgccag

SEQ ID NO: 188193 - DNA, 287 bp, Glycine max
actcgagccgattcggctcgagattccccttatctttctctcttacctctccccgcccaaaccctaactccctaccctataccgctttctctcatccatcatgaaaggaggaaagtccaagaccgaatctaagagagccgatgccaaacttgctgtgaataagaagggcgccgccaccaagactaggaaacccgccggaaaggggaaggcagcgaaagatcctaacaagccaaagaggcctccaagtgctttcttcgttttcatggaggaattcaggaaggtgttca

SEQ ID NO: 188194 - DNA, 289 bp, Glycine max
gaccttagattgttttactgttagcaccattcctaggtaccatctgcaccagcctttctccttcttcttcaatcagtggcagcaacctcaacatcagtcttctactcaaatctccattctctcaaccctcaacctttctcttcctcactctccttcttcagaaatgtccattgcaacctctcattccctacctcttctaaaccctcacgtggagttgttgccatggctggatctggcaagttctttgatggtggcaattggaagtgtaatggcggcagagactccatca

SEQ ID NO: 188195 - DNA, 285 bp, Glycine max
atctacgccagcttttagtggggttggtgaccgcattcaggcatgttggtgatgagatcaatccaaaattggcacaatctgaggctgaaattcttcatgatgctgtaaaagagaagaagggtagctatgaagagaccattagggtcttgactacaaggagcaggacccaacttgttgcaactttcaaccgctacagagagatccatggcacttccatctctaagaaattggtggatgaaggatctgatgagtttcagagggcattgtacactgccattcgtgcca

SEQ ID NO: 188196 - DNA, 284 bp, Glycine max
aaaaaattgaatattcacttgagaaaacaaaggattcaagcctacctcccatcataaatgccattgaaatttacagagtaataaacttccagcaatcagatacacacctaggagatgttgacgcgattgcaaccatcaagtcagtttatgggatgacaagagattggcaaggtgatccatgctcccctgtagcctacttgtggaatggtttgaattgtacttaccgcggaaatgagaacccgagaatcacaactttgaatttatcttcaagcgaattgtcagga

SEQ ID NO: 188197 - DNA, 275 bp, Glycine max
acgccgatgaggatgaagcgagaggtagcacccaaatcttctctatgcaccgagacagctctcaagcagcaacaaccaaaacccgagaatccccctcaagaatacgaagaagtcgaagaggaagttgaggaagaagaggtagaggaagaagtcgaagaggaagaagaagaagaagaggaggacgaggaagaagacgaggaagaggaagaagaagacgaagaagaagacgacgtcgtcaaacaacagcagcagcaacagcaagacgaagacgacat

SEQ ID NO: 188198 - DNA, 289 bp, Glycine max
atttttgtgtgtcgcttcttcgtaggtgcagctgcaatggtgaagggacgccaaggagaacgtgtcagactctacgtgaggggtacaatccttggatacaaaaggtccaagtcaaaccagtatccaaatacatccctgatccaaattgagggtgtgaatgccaaagaagaagtagcatggtatgctggcaagaaaatggcctatatctacaaggctaaggtgaagaagaatggaagccattaccgctgcatatggggcaaggttacaaggcctcatggtaacagtggta

SEQ ID NO: 188199 - DNA, 290 bp, Glycine max
aaaaacctgcatgaaatcatcttcaatcataattaacaccatccaagaattggaaagtgaagttctcaatgcccttatggctcagaacccaaatatatataacattggtccacttcaattgttaggaaggcattttcctgataaagacaagggcttcaaggtgagtgggtcaaatctttggaaaaatgactcaaaatgtatccaatggctagaccaatgggaaccttcctcagtcatatatgtgaattatggaagtattactgtgatgtccgaggatcatttgaaagaat

SEQ ID NO: 188200 - DNA, 287 bp, Glycine max
ggaccctaccaaggttgacagaagtggtgcctatatcgtgaggcaggctgcaaagagtgttgtggcaaatggccttgccagaaggtgcattgtccaagtttcctatgccattggtgtccctgagcccttgtcagtgtttgtggacacttatggaactgggaagattcctgacaaggagattcttcaaattgtgaaggagaatttcgacttcagacctggaatgatcaccattaacttggaccttaagaggggtggccataggttcctcaagacagctgcttatggac

SEQ ID NO: 188201 - DNA, 283 bp, Glycine max
gttcccaccatcaagtacttaactggtcatggagccaaagtgatcctttctagccacttgggacgtcctaaaggtgtaacacctaaatacagtttgaagcctcttgtgccaaggctgtctcaacttctcggaattgaggttacgatggcaaatgactctattggggaggaagttgagaagttggttgcacaacttccagaaggtggtgttttgcttctagagaatgtgaggttctataaggaggaagagaagaatgaccctgagtttgcaaagaagttggctt

SEQ ID NO: 188202 - DNA, 286 bp, Glycine max
ggatcgagctccgtaccagtttcactgcataaatttgagagaaaactctgcaaacatgttggtttatcaggacctccttacaggtgatgagcttctttcggactccttccgttacaatgaaattgagaatggaatgctgtgggaagttgaggggaagtgggttgttaagggagcagttgatgttgacattggtgcaaacccttctgctgagggtggagaagatgagggagtcgatgacgcagctgttaaggttgttgacattgttgatacattcagacttcaggag

SEQ ID NO: 188203 - DNA, 273 bp, Glycine max
atttcttctagccatggacgataagctcatactgcggttagaatcggcggtgttgcgcttggagtcgctatcctccggactccacccctccgcttcactatccggcggcgctcacgctttcgatgcggcgctcgatccctccgtcgtcgacttcgtcgatctgatcgaccagtacgtcggtagggtttccggcgctgcagatgttatcggaggacaggtcttgggtgtcaccaatctggtgcaggaagctttcaatgttcagagagagctttt

SEQ ID NO: 188204 - DNA, 273 bp, Glycine max
gctttttggagggttgacatggaagaacggtatgagccattgaaggagcttggtgctgggaattttggtgtggcaaagttggcaaaagactagaaaactggagagcttgttgcggtcaaatacatagagacgggcaaaaagattgatgagaatgctcagagggagataattaaccaccgatctttaaggcatccaaatataatcaggtctaaagaggtgctactgacgcctacacatttagctatcgtcttggagtatgcttcaggtggtgaa

SEQ ID NO: 188205 - DNA, 198 bp, Glycine max
gttcggcggggaacaagttcaggatgtcgctgggtctgccggtggcggcgacggtgaactgcgcacgacaatacgggggcgaagaacctctacatcatatcggtgaaagggatcaaagggcgtttgaaccgtctcccctcggcttgcgttggcgacatggtgatcgccaccgtgaagaaggggaaacccgatctgagg

SEQ ID NO: 188206 - DNA, 270 bp, Glycine max
cgagtataggcatgatggacagtgcctactttgtcggcaggaaccagattctgacctggatcaacaacaggctccacctcaatctctcacgcattgaggaggctgcatctggggctgtgcaatgccagatgatggatatgacgtttccaggggttgttccaatgcacaaggtgaactttgatgcaaagactgagtatgatatgatccagaattacaaaattctgcaggacgtgttcaataagctgaaaattgacaaacatgttgaagtta

SEQ ID NO: 188207 - DNA, 272 bp, Glycine max
gactgctatagccttcctgtttatccttctaatcacttatacaggcacaacagatgcacaatccggggtatgttatggaagacttggcaacaacttaccaacccctcaagaagttgtggccctctacaatcaagccaacattcgcaggatgcgaatctacggtccaagcccagaagtcctcgaagcactaagaggttccaacattgagcttttgctagacattccaaatgacaacctcagaaacctagcatctagccaagacaatgcaaaca

SEQ ID NO: 188208 - DNA, 271 bp, Glycine max
gcaagttctgctacactcttgaaagaggccatccatgtaattagttgtggttatgaagataagacagaatgggggaaagaggttgggtggatatatggctcagttaccgaagatattttaacaggtttcaagatgcattgtcatggttggagatctgtatactgcatgccaaaaaggcctgcttttaaaggttcagctcctataaatctctcggatcgtctgcatcaagttcttcggtgggctcttggatctgttgagatctttttcagta

SEQ ID NO: 188209 - DNA, 279 bp, Glycine max
  unsure (1)..(279): unsure at all n locations
caaacacaccacagcaccaaactagttggctcaattctctttgaatggctttggaggctttgaattcaccaacagcagccaccactcccttccgtggttaccaagaagaggaggaggaggttgaccttcacctacgcgagccttgggccaagagaaaacgctccaaacgacctcgttttgagtncggaggaagagtacttggctctttgcctcatcatgcttgcacaaagcggtaacaacaacaacacccaattaccgtcttcgtcacagtcacacaaa

SEQ ID NO: 188210 - DNA, 274 bp, Glycine max
actcgagccgaatcggctcgagcggctcgaggaacaagcctcaggtaagccaaagccatggataagcataacaatgttatccccaacggacacttccgtaagcactggcagaactatgtgaagacctggttcaatcagccagcacggaagacaagaagacggttggctcgtcagaagaaagctgtgaagattttccccagacctacagctggacctcttagacccattgtacatggtcaaactttgaaatacaacatgaaagtgagagctggaa

SEQ ID NO: 188211 - DNA, 273 bp, Glycine max
aaccaaaccgacgtcgctctgagcatcacaaagctcctgttgtcgaaaaacgctcgggacagtaacctcgtgtactcgccgctgtcgttgcacgttgttctgagcatcatcgcttctggctccaagggccccacactcgatcagcttttcttcttcctccgatccaagtccaccgaccatctcaactccttcgcctctcagctcgtcgccgtcgtgctctccgacgccgctcccgccggcgggcctcgcctctccttcgccgacggcgtgtgg

SEQ ID NO: 188212 - DNA, 267 bp, Glycine max
gcttgttcatgagcaaggttaacaagcctccaatttctttgtcaaggttaattaagtatacaaaggggaaggaggataaaattgctgtaatagtggggactgtaactgatgatatcagagtatatgaagttccagcattgaaaattacagcactcaagtttactgagagagcacgtgcaagaatagaaaaggctggtggtgaatgcttgacatttgatgagcttgcccttagggctcctttgggacagaatacggtccttcttagag

SEQ ID NO: 188213 - DNA, 271 bp, Glycine max
ggcattcaagggctatttccttctcggcctcgttactcttgttcttgttaaatcttccaaagttacatgcgaattagaatcagttaatacagtttcacccattattgacatttcactcaatcggaagagtttcccagaagggttcatatttggggcgggatcttcctcgtaccagttcgaaggggcagcaaaggaaggtggtagaggaccaagtgtatgggataccttcacccataattatccaggaaagatcatggatagaagcaacgga

SEQ ID NO: 188214 - DNA, 275 bp, Glycine max
tgtttctctctctctctctctctcatggcgaatctagcacacttctccaagagagccctaagaagcgcacacgcgctcgcaaggcaccacgtgcagccgcagctgctggcagcggaacgcgcttttgcgacggaggcggcgaaatcgatatccccgtcggcggatcgcgtgaagtgggactaccgagggcagaggaagataatcccgttagggcagtggctccccaaagtggccgtggatgcttacgtagcacccaacgtggtcctcgccggcca

SEQ ID NO: 188215 - DNA, 238 bp, Glycine max
gcaaattcaaaggaggatctctcttgcgtcttctctaggttttcgctatggcgtcgaagcgaattttgaaggagcttaaggatttgcagaaggatcctccaacatcttgcagtgccggtcctgttgttgctgaagatatgttccattggcaagctacaattatgggtcctccagacagtccctatgcaggaggtgttttcctagtgaccattcatttccctccagattatccctttaa

SEQ ID NO: 188216 - DNA, 271 bp, Glycine max
tgtttgtgtaactctcacacagacaagtcacaacaataagtttctgttgttccaatggcatcagcaacaccccttttgaaagatgagctggacatcgtgatcccaacgatcaggaacctggatttcttggagatgtggaggccattctttgagccttaccatcttattattgtgcaagatggagacccttcaaagatcatcaaggtccctgaaggctttgactatgagctctacaaccgcaatgacatcaacaggatcctttgccccaagg

SEQ ID NO: 188217 - DNA, 269 bp, Glycine max
gcttccattgtgctcactcatctcttacaacgaaaccctcttcatcttgttctatctgtgacgagcatcatggcctcaagagcagtgttattgttggctatgtgtgtgcttcctgcgatggttgtggccattcgcccagcaaagaaccctttttgcgtgaagggtcgtgtctactgtgacccttgccgtgctggttttgagacctcagctaccacctacattgctggtgctgagattatgttgcaatgcaagagcagggttagcaacga

SEQ ID NO: 188218 - DNA, 265 bp, Glycine max
ctcactttctcgctcgccaaacgcccctctctctcctccaatggccgaccagctcaccgacgaccagatcgccgagttcaaggaggccttcagcctcttcgacaaggacggcgatggttgtattactactaaggaacttgggactgtgatgcggtcactagggcaaaacccaactgaggcagaactgcaggatatgattaatgaggttgatgctgatggcaatggaaccatcgacttcccagagttcctcaacctgatggctcgc

SEQ ID NO: 188219 - DNA, 265 bp, Glycine max
gcagtttacaactttggggactcaaactcagacactggaggcatatcagcttcatttgtgccaattcctgcaccttatggcgagggcttctttcacaagccttctggaagggactgtgatggccgtctcattgtagatttcatagctgagaagctaaacttgccatacttaagtgcttatctgaattcccttggaaccaattaccggcatggggcaaattttgccactgggggatccaccattaggaagcagaatgaaaccatat

SEQ ID NO: 188220 - DNA, 267 bp, Glycine max
  unsure (1)..(267): unsure at all n locations
gggagccgtagcagcggaagctctagcttgggtagcgaatcacaatggcgagaggattaaagaagcatctgaagaggcttaatgccccaaagcattggatgcttgacaaactgggtggtgcatttgctcctaagccctcatctggaccacacaaatcgagggaaagcctgccactcatactcattttgcgaaaccggctgaagtatgctctaacataccgtgaagtcattgctattctgatgcagcgacatgtctntgttgatggca

SEQ ID NO: 188221 - DNA, 269 bp, Glycine max
attcagaggcctgaaacccagagagcacgctgcactcaaggactgcgccgaggaaatcagcgacagcgttgaccgcctcagccggtcgctgaaggagctcaagctatgtaaggttaagggtgaggacttcacgtggcacattagcaacgtggagacatgggtcagttctgctttgaccgatgagagcacttgcggcgatggattctccgggaaggcgctgaatgggaagatcaaggactctattagggctaggatgctcaatgttgctc

SEQ ID NO: 188222 - DNA, 262 bp, Glycine max
aacccctctcttttcttttcttcagttcggtggaaggagccgtagcagcagcggaagctctagcttgggcagcgaatcacaatggcgagaggattgaagaagcatttgaagaggcttaatgccccaaagcattggatgcttgacaaactgggtggtgcatttgctcctaagccctcatctggaccacacaaatccagggaatgcctgccactcatactcattttgcgaaaccggctgaagtatgctctgacataccgtgaag

SEQ ID NO: 188223 - DNA, 265 bp, Glycine max
cgccaaacgcccctctctctcctccaatggccgaccagctcaccgacgaccagatcgccgagttcaaggaggccttcagcctcttcgacaaggacggcgatggttgtattactactaaggaacttgggactgtgatgcggtcactagggcaaaacccaactgaggcagaactgcaggatatgattaatgaggttgatgctgatggcaatggaaccatcgacttcccagagttcctcaacctgatggctcgcaagatgaaagacac

SEQ ID NO: 188224 - DNA, 265 bp, Glycine max
gcagcctcaggaggagaaggatgtctcacaggaagttcgagcacccaatgcacggttcactgggatttcttcccaggaagcgtgctgctcgtcacaggggaaaagtgaaggcattccccaaggatgacccatccaaggcacccaagctcactgcattcttgggttacaaggccggtatgactcacattgttagagaggtcgagaagccaggatcaaagcttcacaagaaggaaacttgtgagcctgttacaattattgagacccc

SEQ ID NO: 188225 - DNA, 265 bp, Glycine max
atatggatggggaactacacataatgttatttccgttcccaggtcaggggcacttgataccaatgagtgatatggcgagagcatttaatggaagaggggtgaggacaaccatagtgaccactccactcaacgtagccactattcgtggaacaataggaaaagagacagagacagatatagaaatcctgacggtgaaattccctagtgcagaggctggtttacctgagggatgcgaaaatacagagtcaatcccctcccctgactt

SEQ ID NO: 188226 - DNA, 267 bp, Glycine max
  unsure (1)..(267): unsure at all n locations
ctctgtctctacaaaacttagctctttttnttaattattccttgcattctcttgagttcagatggaagcaactaatggccaccaaaatggttcgttttgcttgtccagtactaagggaagtgatccgttaaactggggagcggcggcggaggcgatgaaggggagccacctggacgaggtgaagcgcatggtgtccgagtaccggaagccggtggtccggctcggcggcgagacgctcaccatcgcccaggtggccgccgtggctgg

SEQ ID NO: 188227 - DNA, 271 bp, Glycine max
  unsure (1)..(271): unsure at all n locations
gctggctgcacccggctcagtatcggacacgcctctgcaaagatggcaccagttgcaatcgaagggtgtgtttttttgctcacactgcagaggagcttcgtccgctgtatgtgtccactggatctgctgccccttcgccccgttcatctgcttcaggtcctaatgtcatggacatggctgctgccatgancctttttccgggatcgccttcatcgggctcttccatgtcgccgtcccactttgggcagccaatgtccccatctgcaaatgg

SEQ ID NO: 188228 - DNA, 268 bp, Glycine max
caaacttctaaatctcttctgccatggtccgaggatctaaagatcgttggaagatgcatagattccatagcttctaaaactagtgtggacccagcatacatcacttggtcttacacttgtaataggaaattaaccgaacctgataaaattgtagaggacaagatgacatttctagagaaaattgagtctgttcctaaggattggtggggtgaagacatatgtgagctggacattgatctttacaaacgagtaatggttgctgtggaga

SEQ ID NO: 188229 - DNA, 267 bp, Glycine max
ggggtattgagattgagattcaagtaatggggaagagcaaggttcttgtggtggggggaactgggtacatagggaggaggatagtgagggcaagcctggcactgggccatgagacctatgtggttcagaggccagagttgagcctccagatagagaagctgcagaggctcctctccttcaagaagcaaggtgctcatctcattgaggcctctttcaatgatcacaagagccttgttgatgctgtgaagcaggttgatgttgtcatca

SEQ ID NO: 188230 - DNA, 266 bp, Glycine max
atgaattcgtaagatcgaagcaatagcctttttctctgccgccactggtttcgatcccacacccacaaacgcataccctccatcctttgaatgctcttgcgttttcctttcactacctcattcctaactcacacacacacaacgggtgatatcaatgtcgactcctgctaggaagaggctcatgagagatttcaagaggctgcaacaagacccgcctgcaggaatcagcggggcacctcaggataacaacataatgctgtggaacg

SEQ ID NO: 188231 - DNA, 263 bp, Glycine max
atttcaatgtccggcttttgtacgaggcattacagtgtgtggaggaactaaaagctccagcttattaccctgagtttgtcaaggaagctatttcccttgctctagataaaagtccgccatgcgctgaacctgttgccaatctttttgaatatctgttcattaagaagattctttcagccagagacatagggactgggtgcatgttatttgcttctctgctggatgatatcggcatagatttacctaaagcaccaaataatttt

SEQ ID NO: 188232 - DNA, 260 bp, Glycine max
ctcgagccgcttttatcgaacaagagacatgatagtaacgaatttgggtgctaaaccacttgtaattcagttaccaattggttcataggataactttaagggagttatagaccttgttaggaataaggctatagtttggtctggagaagagctgggtgccaagtttgatattgtagatgttccagaagatcttcaagagcaggctcaggaataccgagcccagatgatagaaaccatagttgagttcgatgaccaggcta

SEQ ID NO: 188233 - DNA, 260 bp, Glycine max
tcaactattaatgctctggttggtaaaaaaaggacaggtgtcacctctactccagggaagacaaagcatttccaaacgttaattatttccaacaaactgaccgtttgtgactgtcctggattagtttttccatctttctcaagctcaaggtataggatgattgcttgtggagtgttgcctatagataggatgactgaacacagggaggctgtccaagttgtagctgataaagtttcaagacatgtcattgaggagattta

SEQ ID NO: 188234 - DNA, 261 bp, Glycine max
agcagcctcaggaggagaaggatgtctcacaggaagttcgagcacccaatgcacggttcactgggatttcttcccaggaagcgtgctgctcgtcacaggggaaaagtgaaggcattccccaaggatgacccatccaaggcacccaagctcactgcattcttgggttacaaggccggtatgactcacattgttagagaggtcgagaagccaggatcaaagcttcacaagaaggaaacttgtgagcctgttacaattattgag

SEQ ID NO: 188235 - DNA, 258 bp, Glycine max
aaaaaaagacaacccagagatcgcgtcttaataaacgctcttctctgaaaacccccatttcttttcttctttcttcttctctttcgcttcttcgatcttcgatcttcgtcgctgaaaatgagagagtgcatttcaatccacatcggccaggctcatattcaggttggaaacgcctgctgggagctttactgcctcgaacacggcattcagcctgatgggcagatgccaagtgacaagaccgttggtggaggtgatgat

SEQ ID NO: 188236 - DNA, 260 bp, Glycine max
cgcttcttctctcgcattccgtggagatctagtgctgccaaacctcgctgaaaattagggtttcgtttcggaggtagacgaagatgttcggaagggcaccgaagaaaagcgacagcaccaggtactacgaaatcctcggcgtttcgaagaacgcttcgtcggatgatttaaagaaggcttacaagaaagccgccattaagaaccaccctgacaaaggcggtgatcctgagaagttcaaagagcttgctcaagcctatgag

SEQ ID NO: 188237 - DNA, 264 bp, Glycine max
aagaagatcaccctgaagagttcggacggtgaggccttcgaggtggaggaggcggtggcgctggagtcgcagacgatcaagcacatgatcgaggacgactgcgccgacagtggaatccctctccccaatgtcaccagcaagattctggcgaaggttatcgagtactgcaagaagcacgttgaggcgaacagtgctgatgagaagcccagtgaggatgtgctcaaggcttgggacgtggatttcgtcaacgttgatcaggccact

SEQ ID NO: 188238 - DNA, 267 bp, Glycine max
gagatacactaagttatcctcataaatacactctaattaggtggcaagataagtgtctaaccttagtaacattgccacatattgtgttcattttggaattgtgccactaaaattctattcaattcatctatggctgcctcttcttatgctatgcaatcaatcctggcaaaccctttgatccgcatttccagcgggtctagggtgaaccaatttggcgttcctgctttgcacatgagaaggaatgttggcctgagagttaggtccatg

SEQ ID NO: 188239 - DNA, 266 bp, Glycine max
aaactttaatgtggacaacgttcgtgttgcaaagctcttgggagggggcttgcataacagtactgtagttcgaggattggttctgaaaagtgatgctgtcgggactataaagcaagcagaaaaggcgaaggttgctgtgtttgctagtggtgttgatacatctgcaactgagactaaaggaactgtcctcatacatacagctgtgcagctagaaaattattcaaaaactgaagtattagtagtagaggagctcatcaaggcagtag

SEQ ID NO: 188240 - DNA, 257 bp, Glycine max
gttaggttctgcacgctctgcttccagcgagtgttctttcttcgtttcaacaccttaatttgcacacgctgcttcttctgcttgagaaatggcacaagaaacctttctattcacatctgaatctgtaaacgagggtcaccccgacaagctgtgcgaccagatctctgatgcagtgctcgatgcgtgccttgaacaggaccctgacagcaaggttgcctgtgagacatgcaccaagaccaacatggtcatggtctttg

SEQ ID NO: 188241 - DNA, 256 bp, Glycine max
ggtcaatcctcacactcaccagcttaagatttgtgactttgggagtgcaaaagtcttggtcaaaggggaaccaaacatatcttacatctgctctaggtactatagagcacctgaacttatatttggtgcaactgagtacaccacggccattgatatttggtcagctggttgtgtacttggtgaactaatgcttggccagcctctattccctggtgagagtggagtagatcagcttgttgaaattatcaaggtttta

SEQ ID NO: 188242 - DNA, 249 bp, Glycine max
gaagctctctatttggctttacagtcatcacagacactaaaggagaggaatattttacatacaaatggaatagccctgaaaaagtgaggtttcagataacttgggatgggtttgagaagaagttcgtgttggatgcagatgggaaacaatggaataggacacagtttgagccttttgatgactgtgagaagtataacttttgtggtagttttgcagtgtgtgatacgggtaattctcctttttgtagtt

SEQ ID NO: 188243 - DNA, 260 bp, Glycine max
ctcgagccgtgagacaacacctatattgccagggattcctagaatacacaagctggagattgagggaatgggatttcataccaatctctatgctgttcgtggcatttacagtggtgggaaggaaggcaaaagtagagttcaatggcttagatcaatggttggaagtcctgaccttatctctataccaggagaaactggcagaatgtatgaagcgaatgttgatgatgttggctataggctggtggccatctatactcctg

SEQ ID NO: 188244 - DNA, 256 bp, Glycine max
gtgggcaatgggtgctataatggctgagcttttctctcttcgtcctcttttcccaggtgccagtgaagcggatgagatttacaaaatatgtggtgtgataggcaatccaacctttgaatcatgggcggatggactcaaacttgcaagggatattaactaccagtttccacagcttgccggtgtacatctttctgctttaattccgtctgctagtgatgatgcaatcagccttattacatcactttgctcctgggat

SEQ ID NO: 188245 - DNA, 264 bp, Glycine max
agaagttcctgcgaaaattccttctcagcaagtgcctagcttcacatcctcttgggcagttgatgacttgttggaattaacagactttgaatcaccagacaaagttcagaagcaatcccttgagtttggagaacttgaatggctagcagatgtaggcctttttggtgaacagtttcctcatgaagctttagcggcggctgaagttcctcagcttccaatgactagcagtgttggctcacacaaagcccccaaatccttgttgtc

SEQ ID NO: 188246 - DNA, 264 bp, Glycine max
gattaatatctctaaactataactccattagcctctctcagtctcaaacatatatacttttactagctaggcatggttgagcttcggttaagcataagggctctgcaattgccaacactattgattctgtgtttcttcctcattttggggaattttcacaaagctgaggccataattagacatcacaaatgggaggtaaagtatgagtttaggtcccctgattgctttaagaagctggttattacaatcaatggcaaaactcca

SEQ ID NO: 188247 - DNA, 284 bp, Glycine max
cacaaagcaatgggcggtatactttctgcgcttcttggcggcgacgcggcggcggcggcgtcttcgccggagagttctacttctagagtctcctccttccactcgtcgccgcgctggcagctctacttcaacgagatcaaagataccgataagctcgttgtgatagatttctcggcgtcgtggtgcggtccttgcaaattcatagagccagcgattcacgccatggccgacaagttcaacgacgttgacttcgtcaagatcgacgtcgacgaattacctgatgt

SEQ ID NO: 188248 - DNA, 242 bp, Glycine max
tggaacttgaaaccttgcagtgtttacagacactaacagagcacacatctgttgtgatgtctgttctctgctgggaccaattccttttatcttgttcattggataaaacagtgaaggtatggtatgctactgaaagcggcaacttggaagtgacatatactcacaacgaagaaaatgtatttgttaatttaattactttttcccctggatagttgtttctattttaatatgatattgcttgt

SEQ ID NO: 188249 - DNA, 275 bp, Glycine max
attgaatatgtctccgtcgttggatcttcctcccaagggtggcttcagttttgatctatgccgaagaaacgcaatgcttcaaaacatgggcctcaaagccccaacctttctcaaaactggcaccactattgtcggtttagttttccaggatggtgtcattcttggtgctgatactagggcaactgaaggacctatagtggctgataaaactgtgagaaattcattatatggcacccaacatatattgctgtggagcaggcacagctgctgataca

SEQ ID NO: 188250 - DNA, 280 bp, Glycine max
  unsure (1)..(280): unsure at all n locations
gtgaaagttgaagaaacaatggcgtatgctaatgctgcttcaactagcccaacaacatcttcaaacctctccccgcaacccatggaanggttgcacgaggtgggtccccctccgtttctcaccaaaaccttcgacgtggtggaagacccatccaccaacgacatcgtttccgtggagcagatcccgcaacagtttcgtcgtttgggactctcacaagttctctaccaccatcctgcctcgctacttcaagcacaacaatttctncagcttcgtacgacaa

SEQ ID NO: 188251 - DNA, 283 bp, Glycine max
caacaatggtgccgcaacccattttgcatctaacccttttgtcattaataatctctctgaccactctttccttggtcgatgccgccgatcccacatttggcttcacccctcttggattatctagtagctcaaacttgcaaatccaaaagccttacgacgttgcagtcaacgagcgctacagcttttcaaatggagtgcacagattttgggtatactccacggacaagcctcatatgcaaggcagcaatacgaagccacgaactgagattcgtatcgctggata

SEQ ID NO: 188252 - DNA, 273 bp, Glycine max
ggcctcaagagcagtgttattgttggctatgtgtgtgcttccggcgatggttgtggccattcgcccagcaaagaaccctttttgcgtgaagggtcgtgtctactgtgacccttgccgtgctggttttgagacctcagctaccacctacattgctggtgctgagattatgttgcaatgcaagagcagggttagcaacgaggttgtgtacacgaagaaggggtacaccgactcaaccggagcatacacaatgtacgtggatgaggatcacgcaga

SEQ ID NO: 188253 - DNA, 273 bp, Glycine max
agcaccttcagtgtttattggcctgatatctggattagtgtttacaatgctcgtcgaccaatgaagcaaaggtatcattataatgttgctgatgtgcggctggcccaacacattgataaaggaaatgaagatggtttatttatcagcagtgtggcttcttgttctaatctttgggcactcattatggatgctggcactggtttcaccgcacaagtttatgaactgtctccccacttccttcacaaggaatggattatggaacagtgggagaag

SEQ ID NO: 188254 - DNA, 273 bp, Glycine max
gggaaaagttgcctccttctgcgtttctccgatggttctttcaccactagtttcatcacaactataggcattgattttaagataagaaccattgagcttgatggcaaacggatcaagctccaaatttgggatactgcagggcaggagcggtttcggacaattacaactgcttactaccgtggtgctatgggcatattgctagtctatgatgttacagatgaagcatcatttaacaatatcaggaattggattcgctatattgagcaacatgct

SEQ ID NO: 188255 - DNA, 278 bp, Glycine max
  unsure (1)..(278): unsure at all n locations
tgtgggtggagaggatctgatagaacagataaaagcaggattcatggagtttgataaactaattgcttctccagatatgatgcctaaggttgctagcctagggaagattctgggaccaagaggactgatgccaaacccaaaagctggcactgtaacacccaatattccccaggctatagcagaattcaagcagggaaaagttgaatacagggcagacaaaactggaatcgtgcacttaccttttgganaagctgactttccagaagaggatcttcttg

SEQ ID NO: 188256 - DNA, 277 bp, Glycine max
  unsure (1)..(277): unsure at all n locations
aagctcatggtcacagatctttcgtgccatcaagagttaccgaacccaaccatgaaacaacaacctaggatgcancccgtgtnccgatttgtgggcttgagtttgctattggacaagctttgggagggcacatgagaaagcatagaactgctattaatgatggcttgttgtgtggtaaaccttcttcttcgttgtccatcttgaaggaatcatcgaaagatggtgatcaaaagttgaatttgcgcttggacttgaacttgacgccattggaggagga

SEQ ID NO: 188257 - DNA, 276 bp, Glycine max
ctggctctgttccgtcgatgacgatggcgtttagggtgcgaaaccctgacctccgctttctcattcttctctctctcttgtccatcacttccgccaaggtcttcttcgaggagcgtttcgatgacggatggggaaatcgttgggttaaatcagattggaaaaaagatgagaacctggctggggagtggaaccacacctctggccaatggaatggagacgctaacgacaaaggtattcaaaccagtgaggattacagattctacgctatttcagctc

SEQ ID NO: 188258 - DNA, 280 bp, Glycine max
tggattcccttagtaacggcgagcgaaccgggaaaagcccaccatgaaaatcggtcgccctcggcgtccgaattgtagtcgggttgtttgggaatgctgccccaatcgggcggtaaattccgtcctcttcggcgccgactggggctcgatcgacctctccatcaacactgaccccaactccgacgaagacgccgtcagcgccgtcaacagtaacgaccacgccaacgccggcaacagcaaacgcaagctcgaggacgacttcgacgccttcacggcgtcg

SEQ ID NO: 188259 - DNA, 283 bp, Glycine max
ctcttcttgtttctcctgcaatcaacgacacccccccaaaaatgacaggagagacagtgaacccaaaagcttaccctttggccgatgcgcaactcgcaataacaatactggatcttgtgcaacaagctgccaactacaagcaactcaaaaagggtgctaatgaagcgaccaagacactgaacagaggcatctctgagttcgttgtgatggccgcggacactgagcctcttgagattcttctccatcttcctctcctagctgaggataagaatgttccctatgt

SEQ ID NO: 188260 - DNA, 270 bp, Glycine max
ttcgagccgattcggctcgacgtgaattttacaaactgcaaatcaaggctttgtttaataatctctcaagaggacatatatgaagtatcaaggatgtcagttgaaactggcccttatgtttttcattatattatagaaggacgggtctgttacttgacaatgtgtgatcgtgcataccctaagaaactagcctttcaatatcttgaagagctcaggaacgagtttgagcgtgttaatgggtctcaaattgaaactgctgcaagaccttat

SEQ ID NO: 188261 - DNA, 264 bp, Glycine max
gggaggttcaccactggcagagttgaggagttcattcatgccaaaacactctcagctgcggacctccgtgaccctgaaatatctgctttgatagcatctaagatgagggagtttcacaatcttcatatgcctggtgcaaagaaggctcagctttggcagagaatgaggaagtggcttagtcatgccaaaagtttgtgctcccctaaagaaaccaaagattttggcctggacaatctagatgctgaaataaatatgcttgtggag

SEQ ID NO: 188262 - DNA, 267 bp, Glycine max
gcggccgtaagataaataattgaggtcaatagaaataaaatcttgtcgccatctcttctctcttttcgccggggaattgcttacaagctttttgttggagctagcttcttgacactaggattgtccttctacaccacagagaatgcattatcagaggcattctccaattacgggcaagttattgaagccaaaattgtaacagatagggtgtcagacagatctaagggatttgggtttgtcacctttgcttctcaagacgaggctgag

SEQ ID NO: 188263 - DNA, 271 bp, Glycine max
gggagcttgaacatgttaaggagatcattaagtggggtactgattattttctcaagagtttcaatagtactgctgacaccatcaccacccttgctgctcaggttgggcttggagatacttccggtggtgacagtccgaatgaccactattgctggatgcgcccagaggacatggactatgaccgccctgtgactgaatgccatagttgttctgatcttgcagctgagatggctgctgccttggcatctgcttccattgttttcaaggacaa

SEQ ID NO: 188264 - DNA, 275 bp, Glycine max
atgagtgtggtcaccatgcattcagtgactactagctgcttgatgatattgttggccttatcctccactccgctctcctagtcccgtacttttcatggaaatacagccatcgccgtcaccactccaacacaggttctcttgagcgagatgaagtatttgtgccaaagcagaagtccagtatcatgtggtactctaaataccttaacaatccaccaggcagagtcctcactcttgccgtcaccctcacgcttggttggcccttgtacttggctttt

SEQ ID NO: 188265 - DNA, 275 bp, Glycine max
  unsure (1)..(275): unsure at all n locations
tctctctcncctccgccatggctgaggataaggagatgtctactctgtcatcaatgggaatgattccctaagtggacacatcatatctacaactattggaggcaaaaatggggaacccaaacagactattagttacatggcagaacgggttgtaggaactggatcatttggaattgttttccaggcaaaatgcttggaaactggggaggcagtggcaattaaaaaggttttacaagacagatgatacaagaatcgtgaactacagttaatgcgtg

SEQ ID NO: 188266 - DNA, 274 bp, Glycine max
tctcgagcgaattcggctcgagatggccgtgatttgggaggagtagaccctctatgaatacttgctcaaccccaaaaagtatattccaggaacgaagatggtatttcctggtcttaagaaacctcaggaacgtgcagatcttattgcatatcttaaagaatctactgcttaatgattaaattttcatacagttatgcactttgcttcaaagttctggagatttagttttcagacatttaattctgtggtgcagtaaatactgtatcaacaaata

SEQ ID NO: 188267 - DNA, 280 bp, Glycine max
atggcagcttctttatgcatcctcagggtctttatataagtttgaaagagaagggaaagatccgtgaagtactaaggaattggcctgagaagaacattcaagtcatagttgtaactgatggagaacggatcctgggtcttggggatcttggttgtcaggggatgggaataccagtgggaaaactttctttatatacagcacttggaggagtccgccctatcagcttgtttacccattacaattgatgtgggcacaaacaatgagaagctgctgaatgatg

SEQ ID NO: 188268 - DNA, 276 bp, Glycine max
cagaacaacaatggcgacacttaaggttcctcagcctcttccccccgttgcagatgattgtgagcagctccgaaaagccttctcaggttggggaactaacgaggagctgattgtatcgatcttggctcataggaatgctgctcagaggaagcttatcagagaaacttatgcccagacctatggagaagatctcctcaaggccttggacaaagaactcacgagtgattttgagaggctggttcatctttggacacttgattctgctgaacgtgatgc

SEQ ID NO: 188269 - DNA, 282 bp, Glycine max
tgcagaaaaatcccctgaactacactcaggtgtctgtcttggcagatgacattctaaagaatgtggagtatgacgcattaaggattgttttcaacaaatttcattctgttgtacaatttttgccaacagttgcaactgtactgtctcctgaggttattgagagagaggctgaatcaggaggaaagcttggggaattggattcatatgagattgaaggtggcgagacaaaagctgaaattcttcagaatctggctgagttccagttttcttgtgtcatgtaca

SEQ ID NO: 188270 - DNA, 239 bp, Glycine max
aaactgcagaagcgcctctccgcaagcgtgctcaagtgcggcagaggaaaggtttggcttgaccccaatgaagtcaacgaaatctccatggccaattctcggcaaaacatcaggaagttggttaaggatgggtttatcatcaggaagccaaccaagattcactcccgctcacgtgctcgtaggatgaaggaggcaaagaggaagggccgccactccggttatggtacacgtaagggtac

SEQ ID NO: 188271 - DNA, 272 bp, Glycine max
ggcgttacaaaatcattggaggtattgctcgaggtcttctctacctccatgaagattctagactgcgtattatacatcgtgacctcaaagcaagcaacattctcttggatgaagagatgcatcctaagatatctgattttgggatggcaagattggttcacatggatcagactcaggaaaatacaagtagaattgttgggacctatggatatatggcacctgagtatgcaatatatggtcaattttcagcaaaatcagatgtttttagtttt

SEQ ID NO: 188272 - DNA, 245 bp, Glycine max
atctttctttctcttcctgcagaagctatccgtgttacttgttcccaagtctccaacaagcaaagtacatggttgatttggaaatccaggtccccagcgcattcgacccgtttgccgaggcgagagaatcagatgcccccggggcaaaggagtatgtgcacatacgaattcagcagaggaatggaaagaagagtctgacaacagtgcaagggctgaagaaggagttcagctacgagaagatcctc

SEQ ID NO: 188273 - DNA, 269 bp, Glycine max
aaaccctagagaggaggaagagagagcgtgcaagttccggccaccaccgaccatgacattcaagcgcaggaatggaggtcgcaacaaacacggccgcggccacgtcaaattcatccggtgctccaactgtggcaaatgctgtcccaaggacaaggccatcaagaggtttctggtgaggaacattgttgaacaggctgcagtcagagatgtgcaggaagcttgtgtctatgaacaatatactcttccgaaactctatgtgaagatgcagt

SEQ ID NO: 188274 - DNA, 259 bp, Glycine max
  unsure (1)..(259): unsure at all n locations
cgctcgccggcatcgtctccggtcccggcggacctctcccggcggtccctgcgaacctacaactggggcggacccgtttgggagatacgagtccaggcatccgcccaggtccggtcccgaaacgggttcgccgtgttggtcaccggcgccgccggttttgtaggcacccacgtctccggggcgcttaagcgtcggntgacggggagcttggacttgacaatttcaatgactattatgacccttcacttaagcgtgcacg

SEQ ID NO: 188275 - DNA, 271 bp, Glycine max
aaaccccgacttctggaagggatgcatttattagataaaaggtcaacacaggctctgcctgttgctttgatgattcatgataactcgtcggatcgcacggcctttgtgccggcgacgcatcattcaaatttctgccctatcaactttcgatggtaggatagtggcctaccatggtggtgacgggtgacggagaattagggttcgattccggagagggagcctgagaaacggctaccacatccaaggaaggcagcaggcgcgcaaattaccc

SEQ ID NO: 188276 - DNA, 265 bp, Glycine max
  unsure (1)..(265): unsure at all n locations
atcttcttcttcctctttcttagttctcttctttctctacaccgcacgccgaaaccactgncggaaaaggagagggtctgtcatcggaatcgatctcggaaccacctactcttgcgtcggtgtgtggcaacataaccgcgttttcctcaacgccaacgaccaagggaacagttccacgccgtcttacgtctgattcactgacaccgatcgtctcatcggtgatgcggccaagaatcacgtcgccatgaaccccatcaacaccgtc

SEQ ID NO: 188277 - DNA, 279 bp, Glycine max
agcaaagcagatgaaggttgatgtagatgaataccttaagacaaggcaacagagttcgccgtttttatctgaactgaaggataagctgcttctctcacccaatgaagcagcttctgctgggactcgatataatgtgccgttaattaactcacttgtgctatatgttggaatgcaggcaatccatcagcttcagggacgaactccccatactcaaacatcagcaaatgctttccccttagccgtattttctgttggtgctgcattggatattttccagac

SEQ ID NO: 188278 - DNA, 278 bp, Glycine max
aagcgattcatcgatcgatcgatggctcttgtaggagttgaactgaagcatgcggcggagggcgtaccggaggcgaattgctccgccaagcccaccaagcagggcgagggcctccgccactactattctctcaacatccacgagtatcagctccttcttcgccaaaagactcataacctcaaccgtctcgaggctcagagaaacgacctcaattctagggtgaggatgctgcgcgaagaattacagcttctgcaggaacccggctcttatgtcggtga

SEQ ID NO: 188279 - DNA, 302 bp, Glycine max
agcactcagctcgacttcagcaagaaaactcagaaaaactctgaagaagagttcgttgctttctgcttcactgcgaagatgaacggaggcccatctggtttcacaaatgctcccgtcacaagggctttcatcatcacttcggcgcttttcacaatcttctttgggatccaaggccgtttcagcactctggggttgtcgtatcaggatatttttggaaagcttcgcctttggaagttgatcatttccatattttccttctcgtcaacaccagagttgatgtttggattgtatcttctatatta

SEQ ID NO: 188280 - DNA, 265 bp, Glycine max
ctgaagtcatccccgagtcacacgaagatgatccaaagattgaggagcatttgcaacatttacgtggggtgcagccatttggtgagaactctgttggtatgtggtctatgcccacgtttaggtcgcaaaacgaagatagtgtgtactattggaccttctaccaatacgagggaattgatttggaagctggctgaggctggcatgaatgttgctcggttgaatatgtctcatggagaccatgcttctcatcagaaagttattgact

SEQ ID NO: 188281 - DNA, 270 bp, Glycine max
agcaatttgatgcggcgcggggtttagacttgagtgtgcattctgagaggagagaagagaagatggggaagaagacgaagaaacccggcaaaggcaaagagaaaaccgagagaaaaaccgcgagagccgaagagaagaaagctcgcagggaaaccaagaagctctctcccgaagacgacatcgacgccattttgttgagcattcaaaaagaggaagctaagaagaaggatgtccaagtcgacgacaacgttcccgcgccttctcctcgct

SEQ ID NO: 188282 - DNA, 267 bp, Glycine max
atccacacaatgcttcttcgaccaccatgccctcaccactccaaccagagcttcatcacagcgcttagttgagagcaccaaaccaaaccacattgtttgcaaggcacaaaagcaggttgtccaagagggtgaggacactactaacattgtctctcgcaggttggccctcactgttctcattggtgctgctgctgttggctctaaggttgcacctgctgatgctgcctatggagaagctgccaatgtgtttggaaagccaaagacaaa

SEQ ID NO: 188283 - DNA, 270 bp, Glycine max
gaaaagctcttccatgactgctatagccttcctgtttatccttctaatcacttatacaggcacaacagatgcacaatccggggtatgttatggaagacttggcaacaacttaccaacccctcaagaagttgtggccctctacaatcaagccaacattcgcaggatgcgaatctacggtccaagcccagaagtcctcgaagcactaagaggttccaacattgagcttttgctagacattccaaatgacaacctcagaaacctagcatctag

SEQ ID NO: 188284 - DNA, 269 bp, Glycine max
gtgtacactgcatacgttagaaccggttcggtgttgaagggcggaacggactctaagatcgggctgaagctgtacgacaagtacggctactacatctacattaaaaacctcgaagcatggggcggcttgatgggcaagggctacgactacttcgagcgcggcaacctcgacatcttcagcggaaggggaccctgtcttgacggacccgtctgtgccgttaacgttacttctgacggatcgggttctcaccacggctggtaccttaacta

SEQ ID NO: 188285 - DNA, 271 bp, Glycine max
gctgtgacttgttttgagttcaatcaaatcgcattggtatctgaaatcaggaaagatggttagcgtactgcagatcaggcaggcacaaagggcagaaggcccagcaaccatccttgccattggaactgcaaacccaccaaaccgtgttgatcagagcacctatcctgattactacttcagaatcaccaacagtgaccacatgacagacaacccaaagaaattacagcgcatgtgtgacaagtctatgatcaagacgagatatatgtaccta

SEQ ID NO: 188286 - DNA, 274 bp, Glycine max
  unsure (1)..(274): unsure at all n locations
gtttttgaagtatagagatggcagagacattcctatttacctcagagtcagtgaacgagggacaccctgacaagctctgtgaccanatctctgatgctgtcctcgacgcttgcctcgaacaggacccagacagcaaggttgcctgcgaaacatgcaccaaaaccaacttggtcatggtcttcggagaaatcacgaccaaggccaatgttgactacgagaagatagtgcgtgacacctgccagaacatcggctttgtctcaaacgatgtgggact

SEQ ID NO: 188287 - DNA, 275 bp, Glycine max
tggggcttcaatgacctgtgctggttgccagggtactggcatgaaggtgtctattaggcaccttggtccttctatgattcagcaaatgcagcatccttgcaatgagtgtaagggtactggagagacaatcaatgacagagacaggtgccaacagtgcaagggagagaaggttgttcaggagaagaaagtacttgaagttgttgtggagaagggaatgcagaatggacagaagattacattccctggtgaagctgatgaagcctgatacagtcaca

SEQ ID NO: 188288 - DNA, 275 bp, Glycine max
ggcgagctctggactttatgtttggctggtttgctaatcccattacatatggtgactatcctgagagtatgagatctttagttggttctagactccccacattcaccaaagctcaatctgaaagtctcaaaggttcatatgattttcttggtataaattattacacctcaaatttcgtggaatatgctccaccaaccaccactaacaagacctatttcactgatatgctagccaaactttcttcgaccaggaatggtgtacccattggcacaccg

SEQ ID NO: 188289 - DNA, 278 bp, Glycine max
caacaatgaacgacttgttctccggttccttctcccgcttccgcagcgaccagtcctcaccggaccgccaccacgacatcgagatgggcgccaccgcctccagcggcggtcgcggcggcgaggtgaaccttgacaagttcttcgaggacgtggaaggcgtgaaggaggaactaaaggagttggaaggtttggctcagagtctaaggagcagccacgagcagagcaagacgctgcacaacgcgaaggcggtgagggacctgcgcgcgcgcatggacggc

SEQ ID NO: 188290 - DNA, 266 bp, Glycine max
  unsure (1)..(266): unsure at all n locations
ggttcagcaagatatccgaaggggtccctggacagaacaggaggactacaaattggtgtattttgttggcatgttcggagatcgtagatgggactttatagcaaaggtatcaggtttgaaggtggagggagactgtaaataaaataggtttgaatagaacaggtaaganttgcagattacggtgggttaattacctccaccccgatctcaaacgagggaagctcacaccccaagaacaacacctcgtcatggaccttcattccaaa

SEQ ID NO: 188291 - DNA, 265 bp, Glycine max
gctccgctccaacacagggcgaaattacggagttccttcacgtgcagggagggcaatgcgggaaccagatcggttccaagttctgggaagtggtgtgcgacgagcacggcatagatccgacggggaagtacgtcggaaactcagatctgcaactcgagcgcgtgaacgtctactacaatgaagcctcgtgcgggcgcttcgtgccacgcgcggtgctgatggacctggagcccggaaccatggacagcgtgcggaccgggccgta

SEQ ID NO: 188292 - DNA, 265 bp, Glycine max
ctttatgcaagatatgcttgaaactgcatcaatattaaagggagctactgacaagtccttgataatcattgatgagttgggacgtgggacatcaacttatgatggatttggtttagcttgggccatttgtgagcatattgttgaagtaatcaaagcacctactttgtttgccacccactttcacgaattgactgcattagcccttgaaaatgtaagcaatgattcacagaagcaaattgttggtgtggcaaactatcatgttagt

SEQ ID NO: 188293 - DNA, 266 bp, Glycine max
agatgcttccaaggggacgtgtctatcgttaccctcctggccgcaacatgcaagatgtcccacttcaagttgcagctggtggaatgctgtcggtcccttatgacatgggaggtctgccaatgcgcgatgctgtgggacagccaatgcccattcaagctttggctacagccctcgcaaatgctccaccagaacagcagaggactatgctcggtgaagctttatacccacttgtggatcagctggaacatgattctgctgcaaaggtt

SEQ ID NO: 188294 - DNA, 270 bp, Glycine max
gccagccctggggataatgggtaattgtctagattcttcagctaaagtagaagcagctcacagttccagaaccccttctggaatttcaaaaactagtccttcatctgttccttccaacttatctattctgtcatatagtgaagcaagtgatttctcaaatcttcccacaccgaggtccgagggtgaaatcttgtcttccccaaatcttaaggcctttacctttaacgagctaaagaatgccaccaggaactttcgccccgacagccttct

SEQ ID NO: 188295 - DNA, 272 bp, Glycine max
  unsure (1)..(272): unsure at all n locations
ttccacncacaccncaacannnctctctctagatctctgtttcttcttnttctccaaccttcgtttcaccacanacacttacatnacttngtcgaaatgggctccaccaattgagaccccaaacaaggtttccagctatcaacagtccccaaaccctcgtcttaacgagaggattctttcatccatttccaggagacacgttgctggcacacccgtggcacgatcttgagataggacccgaagctccaaagatcttccactgtgtggtcgaa

SEQ ID NO: 188296 - DNA, 272 bp, Glycine max
gttagaagtgctacaatacaaacaatggcagctactcaggaagatgtgaagcttttgggtattgtgggaagcccatttgtgtgcagggtccagattgcccttaagttgaagggagttgaatacaaatttttggaagaaaatttgggcaacaagagtgatttgcttctcaaatacaaccctgttcacaagaaggttccagtgtttgttcacaatgagcagcccatagcagagtctcttgtgattgttgaatacattgatgagacatggaagaa

SEQ ID NO: 188297 - DNA, 283 bp, Glycine max
ggcaaacttgggatacagctatagcgtagttggtggagttgggttgccagacacagtggagaagatcacattcgaatgcaaattggctgctggcgccaacggagggtctgctgggagctaactgtcaaataccaaaccaaaggagatgctcagcccaacccagacgacctcaaaattggcaaagtcaagtctgatgctcttttcaaggccgttgaggcctaccttttggccaatcctcattacaactgatccaattcgatcttcagtattcagtgatctgcaa

SEQ ID NO: 188298 - DNA, 279 bp, Glycine max
gtatctctctgaattgactagcttaaatggctggtcctaggattgcccatgctaccttgaaaggtccgagtgtggttaaggagatcataattggaataacacttggcttagctgcggtggtgtgtggaagatgcaccactggaatgaacagaggaaaaccaggaccttctacgatttactggaaaagggtgagattactgttgttgcagaggaacagtgaaaatgttcttgttttgttgcctatgctctccatttataggcttttttttcccgtgttat

SEQ ID NO: 188299 - DNA, 281 bp, Glycine max
gtttgctaccttctcccagaaatggttacgttcaggtttcaccagtaccaggtggtcgggagggctctcccaacggaagcagatcagcatccgaagatctaccgaatgaagctcatggccaccaacgaggttcgcgccaagtctaagttctggtattttttgaggaagctgaagaaggtgaagaagagcaatggtcaagttcttgctatcaacgagatttttgagaagaacccaaccaagattaagaactacgggatatggttgcggtatcagagtaggac

SEQ ID NO: 188300 - DNA, 281 bp, Glycine max
ggctgctgctattgaaatccccacaatagtgtttccaaactcctctgcccaacagaggatgccagtggttggaatgggatctgcccctgacttcacatgcaagaaagacacaaagaggctatcattgaggccgtgaaacagggttacagacacttcgacactgctgctgcttatggctctgaacaggctctcggtgaagctctcaaggaagctatccatcttggcctcgtctcccgccaagacctctttgtcacttccaagctttgggtcaccgaaaatca

SEQ ID NO: 188301 - DNA, 281 bp, Glycine max
gcaagttctgctacactcttgaaagaagccatccatgtaattagttgtggttatgaagataagacagaatgggggaaagaggttgggtggatatatggctcagttaccgaagatatttaacaggtttcaagatgcattgtcatggttggagatctgtatactgcatgccaaaaaggcctgcttataaaggttcagctcctataaatctctcggatcgtctgcatcaagttcttcggtgggctcttggatctgttgagatctttttcagtaggcattgtccc

SEQ ID NO: 188302 - DNA, 283 bp, Glycine max
gttcggttcaacgccgtgtattcgtccccgctggatcgggcgcggtccacggcggtgtcggtgtgcaaggaagtcaatttttcagaggaacaaattcaatccacagatgctcttgcgagattagtcaagggaattgggaaggctgccttcgatcagaaatatatactcccgaaattcagggcttaattgacaggttccagccagattttactgcaccttctggtgaatcacttagacaagtagaattccggatgattcacttcttaaatggaactgtccttgc

SEQ ID NO: 188303 - DNA, 284 bp, Glycine max
aacatatatatagcaagcatggcagtcacactctacgaccttagctcttcctctgggttgaacaaacttgatgagtaccttctcccacgcagttacatcaccgggtaccaagctacaaggatgatcttactgtttatgcagctttgccaactgctccatcagatgaatatggaaatgtttccaggtggtacaagcacattgatgctttgttgagaatctctggtgttactggcgagggatctggtgttattgttgagggatctctagttgcagagccagttgca

SEQ ID NO: 188304 - DNA, 285 bp, Glycine max
taattattgtgcttattattattgttgagaaagaaaagaatggcaaagttaataaaattctttgagttgaacacaggggccaagattccttctgttgggttaggcacttggcaagctgagcctggtgttgtagccaaagctgtcaccacagccattctggttggatacaggcatattgattgtgctcaagcgtataacaatcaagcagagattggttctgctcttaagaagctttttgatgatggtgtggtgaagcgtgaggacttatggatcacctccaaactc

SEQ ID NO: 188305 - DNA, 282 bp, Glycine max
atcgagccgctcgagcagtccccattgtccgcttccgcaacgaaataactctaccgtgcccaacgataagacggtttctcagagcaggagcaatgtcttccccttatctacctgccaaactgactcacttgctctcgcaactgaggccaaagacccatctgaggccatctccattctttatcgggtgcttgatgatccttcttcttcaccagatgctctgcgtatgaaagagcaagcaatcacaaacctcactaagcttctcactgatgagaataggggaga

SEQ ID NO: 188306 - DNA, 282 bp, Glycine max
aatcggaggagcatactcaaacagagaccatccatggacggtgattcctcttggagtgctcgtctctcttccgcttccaggcgctaccaatccgctcttcaatctcgatcagacatgttcatgggttttgatgaaaatgatggggacgatgatataagggaggagtttctctgcccattttgttctgagtattttgatatcgttggattatgctgccacattgacgaagagcatccaatggaggcaagaaatggggtatgtcctgtttgtgcgttgagggtg

SEQ ID NO: 188307 - DNA, 276 bp, Glycine max
cggctcgcacacactactaatacagctttctggagatggcttcaactgtctcttacatgcttctacttccccttctagtgatggttgcctttgctggggacttaaacaaagacttgacatcacatggggagatggccgctccaagatactaaaccatggagagtaactcactctttcattggacaaagcatctggctcaggttttcaatcaaagaatgagtatctctttgggaagattgacatgcagctcaagcttgtccctggaaactctgctgg

SEQ ID NO: 188308 - DNA, 281 bp, Glycine max
ctcgagccgcgccggtccagaagcagacccgggccgggcagaggacccggttcaaggccttactcgtcgtcggagacaacaacggccacgtcgggctgggcgtgaagtgcagcaagaactggcgacagctattcgtggcgcgattattctggcgaactgtctgttatccccgtgaggagggggcactgggggaacaagatcgggaagccccacaccgtcccgtgcaaggttacggggaagtgcggctccgttaccgttaggatggttcccgcgccgagagg

SEQ ID NO: 188309 - DNA, 283 bp, Glycine max
caagaactgagtgtgtatgagatcaatgagagacatcgtggaagccctgcttatcttagattgagccagaaaactgtcaattcccttggtgatctagtccccttcagcaacaaggatgttactttttggtctttgtttaatactacctgcaaattttatgagcctttgttcattttacatatgaacttttattagtagtgaaagcataactttttgtattttcttttttcatttcaccttattatatttaatttaaaattccagtcatgggtttaagctaaaa

SEQ ID NO: 188310 - DNA, 287 bp, Glycine max
gaaccctcgatcactctcacgcgctcctatattcgctcctccaccgtcgctctctcgaacaaccacaacaccatcttcatcacatggcaaacgcagcatctggtatggcagtccatgtgactgcaagttgaggtttttggagctgaaggcaaaaaggacacaccgtttcatagtttttaagattgaggagcagcagaagcaggtcattgtggagaagcttggtgagcctgcccagggctatgaagatttcactgccagccttcctgctgacgagtgccgttatgctg

SEQ ID NO: 188311 - DNA, 286 bp, Glycine max
aaaatttctcatcgacgatggcgaataccttacaacgcgcccttcgcgccaccatggcccggccgttctccaccggcgcattggccgaaattaagcgaggcgagatcggaatggttctggaattcctgaagaacaccttcgtaggagggttctaatttactctcctgctagaactgcatctcaacaaggatctggaaaggttggaagatggaagatcaacttcttatcaacccaaaagtgggaaaatccactgatgggctggacatccactggggacccctactct

SEQ ID NO: 188312 - DNA, 286 bp, Glycine max
gtttgctaccttctcccagaaatggttacgttcaggtttcaccagtaccaggtggtcgggagggctctcccaacggaagcagatcagcatccgaagatctaccgaatgaagctctgggcaccaacgaggttcgcgccaagtctaagttctggtattttttgaggaagctgaagaaggtgaagaagagcaatggtcaagttcttgctatcaacgagatttttgagaagaacccaaccaagattaagaactacgggatatggttgcggtatcagagtaggactggtta

SEQ ID NO: 188313 - DNA, 171 bp, Glycine max
aaacaagtatctatcagcacttggtgatgttatttctgcccttgcatccaaatcagcccacatacattacaggaactcaaagctcacccatatactccagagctcgttaggaggtgaatgaagaacttaatgtttgtccagataagtccaagtgcagcagacttaacagag

SEQ ID NO: 188314 - DNA, 281 bp, Glycine max
tcctgccagtagtcatatgcttgtatcaaagattaagccatgcatgtgtaagtatgaactaattcagactgtgaaactgcgaatggctcattaaatcagttatagtttgtttgtggtatctactactcggataaccgtagtaattctagagctaatacgtgcaacaaaccccgacttctggaagggatgcatttattagataaaaggtcaacacaggatctgcatgttgctttgatgattcatgataactcgtcggatcgaacggcctttgtgccggcgac

SEQ ID NO: 188315 - DNA, 276 bp, Glycine max
ctcgagccgcttgtattcttcgttgctacaattttagtagcatggcaatgccatgcgtacgatatgttccctctccgaatgaacactggctatggtgcccgtactccggaggtaaatgcgcaaattggaggcttgctgtggaagcacacaacatctttggctttgagaccattcctgaagagtgcgttgaagcaacaaaggaatacatccatggcgaacaatatagatcagactccacaacagttaaccaacaagcttacttttatgccagagacc

SEQ ID NO: 188316 - DNA, 274 bp, Glycine max
gcatgcgtcatggttatgtcccttacagattgctatttatggtaaaagctttaaccattcagctagagatgcatgggagttatttcagtcaactggggttgaagcacttgtggcgtatgattgttctggtgctgttcttctaatgggcactgtttttggtgggctgattactggaacttgctctggtgtttgggcatgggttaaatggaaagacagagttattatgattggatacacaaccatgctgatggggatggtactggttggattggcc

SEQ ID NO: 188317 - DNA, 279 bp, Glycine max
gttaaagagacggcaacactttgctgtccgccttgaccgagcagagcttcgtcttggccctcgattttgccctaaagtactctcagtcacaacagacaccgtcgtcgtcgtcgcgtcatcaatggcaccgaagcagaccaaggctgagaagaagatcgcttacgatgcgaagctgtgcgacctaatggaggagtacggccagatcctcgttgtgaactccgataacgtgggatcgaaccagctccagaacattcgcaagggtctccgtggcgactccgt

SEQ ID NO: 188318 - DNA, 276 bp, Glycine max
ctgccagtagtcatatgcttgtatcaaagattaagccatgcatgtgtaagtatgaactaattcagactgtgaaactgcgaatggctcattaaatcagttatagtttgtttgatgtatctactactcggataaccgtagtaattctagagctaatacgtgcaacaaaccccgacttctggaagggatgcatttattagataaaaggtcaacacaggctctgcctgttgctttgatgattcatgataactcgtcggatcgcacggcctttgtgccggc

SEQ ID NO: 188319 - DNA, 285 bp, Glycine max
tatcgagccgaatcggctcgaggaaaatttgccccaagatggttacaccaagagacttcttagaggggacttggacttgagtattaggaaggaggctcttgattggatttggaagaaggcaaaagttggagtatgcaactgttagctgtagcatgtttgtcaattgctgccaaaatggaggagattaaagtgcctccttgtgtagatttacaggtattgtagaatcttactacccaagattgtcaaatatacttttgggttggcatctacattttcctctgattt

SEQ ID NO: 188320 - DNA, 284 bp, Glycine max
gagaatatgaagttgtttgtattctttgttgctgcagtagttttggtagcatggccatgccatggcgcaggctaccaaaggttccctctccgaatgaaaactggctatggtgagcgttcttcggaggtaaaatgcgcaagttttaggcttgctgtggaagcacacaacatccgagcattaaaaaccattcctgaagagtgcgttgaaccaacaaaggactacattaatggcgaacaatttagatcagactctaaaacagttaaccaacaagctttcttttatgc

SEQ ID NO: 188321 - DNA, 276 bp, Glycine max
agccatggttctcaaaaccgaactatgccgattcagcggtgccaagatctacccagggaaaggcatcagatttgttcgtggtgattctcaggttttcctgtttgctaactcgaatgtaagaggtatttccacaacaggttgaagccatcaaagctcacctggactgcaatgtacagatagcaacacaagaaggacattgctcaagaagctgtgaagaaaagaagacgtgctgccaaaaagccttactccaggtccattgtcggtgcaatttggaag

SEQ ID NO: 188322 - DNA, 280 bp, Glycine max
  unsure (1)..(280): unsure at all n locations
gctggattatgttcagtctgtggtgaagaaagttttgggactggttctgaccatattcgtgagaaagatggaatctgggcagttttggcctggctatctatacttgcatatagaataaagatnaacttgaagacaagcttgtcactgttgaagacatagttcgccagcattgggctacttatgggcgccattattatactcgatatgactatgaaaatgtggatgcaggtgcagnaaaggaactgatggcatatttggtcaagctgcagtcctcactttc

SEQ ID NO: 188323 - DNA, 282 bp, Glycine max
tgtccctccttcctctgccttataattcttgtgacccttttagtaggtagcattgaaagtgcaccagcaaacgtgaagccaagccattatgctgcacccttcaataggagtgttttccttctggttttctatttggaataggctctgcagcttaccagatagaaggagcagcagctatagatggcagaggaccaagtatatgggacacctatactaaacagcaaccatggaagatttgggatcatagtgatggaagtctagcaattgatttttatcaccggt

SEQ ID NO: 188324 - DNA, 279 bp, Glycine max
aaaagttgttcgagatggcacgtacgaagcaaactgctcgtaagtccacaggaggaaaggcacctaggaagcagctcgcaaccaaggctgcacgtaagtatgcaccaactactgtggtgtgaaaaagccacatcgttatcgtcctggtaccgttgctcttcgtgagattaggaaataccagaagagtaccgagcttttgatcaggaagctccccttccagaggctggttcgtgaaattgctcaggacttcaagactgatctgcgtttccagagccatgc

SEQ ID NO: 188325 - DNA, 281 bp, Glycine max
  unsure (1)..(281): unsure at all n locations
acactacaccgatatttccaccaaacccgtttgcacntgttgtttgcgaataaatggcgactaagaggagcgtgggaacgttgaaggagggtgatttgaaggggaagagggtattcgtgagggtcgatctgaacgtgcctttggatgacaaccttaacatcaccgatgacactagagtccgtgctgctgttcccaccatcaagtacttgactggttatggtgctaaagtgatcctttctagccatttgggacgtccaaaaggtgtaacacctaaatacagt

SEQ ID NO: 188326 - DNA, 281 bp, Glycine max
aagctcttccatgactgctatagccttcctgtttatccttctaatcacttatacaggcacaacagatgcacaatccggggtatgttatggaagacttggcaacaacttaccaaccctcaagaagttgtggccgactacaatcaagccaacattcgcaggatgcgaatctacggtccaagcccagaagtcctcgaagcactaagaggttccaacattgagcttttgctagacattccaaatgacaacctcagaaacctagcatctagccaagacaatgcaaa

SEQ ID NO: 188327 - DNA, 277 bp, Glycine max
tctcgagccgcggctcgactacacagcttcccttctccaacatgacaaacgacagcgttcacagtcatttcttcttcgataccctcttcacatgccttctctctgctacttccacgatgaccatattttcctaccgagtcaactccatgacgatgactcagtgagttgcactgcaaccgacccaagccttaactacaagccggtgatcggaatcctgacccaccccggcgacggtgcctctggccggctcagcaacgccaccggggtttcttacatc

SEQ ID NO: 188328 - DNA, 282 bp, Glycine max
ggagcccgcgggcgagttctatcgggtaaagccaatgattagaggcatcgggggcgcaacgccctcgacgtattctcaaactttaaataggtaggacggtgcggctgctctgttgagccgcgccatggaatcgagagctccaagtgggccatttttggtaagcagaactggcgatgcgggatgaaccggaagctgggttacggtgcccaactgcgcgctaacctagaccccacaaagggtgttggtcgattaagacagcaggacggtggtcatggaagtcga

SEQ ID NO: 188329 - DNA, 276 bp, Glycine max
  unsure (1)..(276): unsure at all n locations
ctcgaggcaatcttggaagggggtgtagcattcaacagggttcattccatgcactcatttgtcatancagcagttgatcctaggttcaatgatgttttcaacaaagctatgttaaccttactactatagtcatgaagagggttcatgagttttacgaagggtttaagaacattaataggcttgtggatgttggtggtggtcttgggatcaatctcaatctaatcacttctaaatatccacatgttcaaggtgttaattttgacttgccacacaaca

SEQ ID NO: 188330 - DNA, 265 bp, Glycine max
ctaaaagagatctttttctgctctttgaagaaagaagggtcattgcttgattttggagatgtctctgctctcagatctcatcaacctcagccaacacgatgcaaccgagagggtgtcgacgagtacatatggatcggaggatcaggaatggacctgaggagcaaagcaaggactcacccaggaccagttagcgacccatcagagcttcccaagtggaactatgatggttccagcacaggtcaagctccaggtgaagacagtgaag

SEQ ID NO: 188331 - DNA, 284 bp, Glycine max
gtgatttggagtttggagcgactgaactaatcattaatttgcactcgctgtttcagcttcatcacccttcttttgcatcatttatatctcttgagaaatggcacaagaaaccttctattcacatctgaatctgtaaacgagggtcaccccgacaagctgtgcgatcagatctctgatgcagtacttgatgcgtgccttgaacaggaccctgacagcaaggttgcctgtgagacatgcaccaagaccaacatggtcatggtcttcggagagatcacaaccaaggc

SEQ ID NO: 188332 - DNA, 287 bp, Glycine max
gaagccacttgagagaaaatggcggtgcctctgctctcaaagaagatcgtgaagaagagggtaaagaagttcaagaggcctcagagtgacaggaaaatttccgtcaagactaactggcgcagaccaaagggtatcgattctcgtgttaggagaaagttcaagggatgcactttgatgccaaacattggttatggttcagacaagaagacccgccactatctccctaatggtttcaagaaatttgttgttcacaatgtgaaggatttggaactgctcatgatgcacaa

SEQ ID NO: 188333 - DNA, 279 bp, Glycine max
gtccttgttttcttcgttgctacaattttggtagcatggcaatgccatgcgtacgatatgttccctctccgaatgaacactggctatggtgcccgtactccggaggtgaaatgagcaagttggaggcttgctgtggaagcacacaacatctttggctttgagaccattcctgaagagtgcgttgaagcaacaaaggaatacatccatggcgaacaatatagatcagactccaaaacagttaaccaacaagcttacttttatgccagagacctcgaagtc

SEQ ID NO: 188334 - DNA, 275 bp, Glycine max
aatgaaggtccttgttttcttcgttgctacaattttggtagcatggcaatgccatgcgtacgatatgttccctctccgaatgaacactggctatggtgcccgtactccggagtgaaatgcgcaagttagaggcttgctgtggaagcacacaacatctttggctttgagaccattcctgaagagtgcgttgaagcaacaaaggaatacatccatggcgaacaatatagatcagactccaaaacagttaaccaacaagcttacttttatgccagaga

SEQ ID NO: 188335 - DNA, 275 bp, Glycine max
atttctcttcctcctcactcaaacttcccatctctacgccgttcctaccaaatggatgcaacaatggagttttggggtgttgaggttaaggttggtcagaacgtgacagttacccaatggatcctgtggattcatacatacacatatctcaggttgcgctcggagatgcgaaaaaggagaaacctaatgagtctgtggttttgtatttgaaagttggtgaacagaagattgtcatgggaaccctttctagggatggcattcctcatctatcgttg

SEQ ID NO: 188336 - DNA, 276 bp, Glycine max
gttatcttgagaaacattattcccattgctatatattatggctagcatgaaggttacatgggtggttgtgatcatgtgcatggccgtggtgggtgcaccgatgatggcgcagcaatgacatgcaatgatgagacggtgaacatggcacagtgcctatcctacctgatgcagggaggaacaccttcaacactttgctgcagcggagtcaagaacattcttggctctgctgtcaccaccgttgacaaacaaactgtgtgcaactgtcacaaggcggat

SEQ ID NO: 188337 - DNA, 276 bp, Glycine max
gtttgttaattctctcacctgaaaatgtattgctgcggtggtaactgtggttgcggaagctcctgcacttgaggcaacggctgcggaagctgatagatgtacccagacttaggtacactgagtcaaccaccaccgagaccttggtcatggcagtggcacctgttaaggctcaatttgagggtgctgaaatgggtgtgcccgctgataacgatggctgcaaatgtggaccacactgctcctgcaacccctgcacttgcaagtcaggtgttgggagag

SEQ ID NO: 188338 - DNA, 280 bp, Glycine max
caaagcaaagctcatccttgagttgacaaatggcagcagcttcttccatggctctctcatccccatccttggctggcaagtacgtgaagctgggcccatcagccccagaagtggaagggtgagcatgaggaagaccgtcaccaagcaggtctcctcaggaagcccatggtacggcccagaccgagtcaataacttgggcccattctctggcgagcccccgtcctacctgaccggtgagttcccaggcgactacggctgggacactgctgggctttccgca

SEQ ID NO: 188339 - DNA, 278 bp, Glycine max
aaccaacctaccttttgcaatctcaattcaatggcgtcctctctcattgcgaacgcttcctctcctcttccctcctctccaggtccctccttcgccccgccgcttccgcttccaccgctctttcaacaccaacgccatgcgccagtatgacaaccgcgccgacgaccacagcaccgacatcgatcgtcactccgaacgctctttccctagcactgcgcgccgcgacgatatcttctcagatgtgttggatccattttttccgactcggagtttgagcc

SEQ ID NO: 188340 - DNA, 278 bp, Glycine max
atcggacatggctaagtatcattcaagtgggaaaagctcttccatgactgctatagccttcctgtttatccttctaatcacttatacaggcacaacagatgcacaatccgggtatgttatggaagacttggcaacaacttaccaacccctcaagaagttgtggccctctacaatcaagccaacattcgcaggatgcgaatcaacggtccaagcccagaagtcctcgaagcactaagaggttccaacattgagcttttgctagacattccaaatgacaa

SEQ ID NO: 188341 - DNA, 281 bp, Glycine max
gttaggttctgcacgctctgcttccagcgagtgttctttcttcgtttcaacaccttaatttgcacacgctgcttcttcagcttgagaaatggcacaagaaacctttctattcaatctgaatctgtaaacgagggtcaccccgacaagctgtgcgaccagatctctgatgcagtgctcgatgcgtgccttgaacaggaccctgacagcaaggttgcctgtgagacatgcaccaagaccaacatggtcatggtctttggagagatcacaaccaaggccaacgt

SEQ ID NO: 188342 - DNA, 282 bp, Glycine max
aacgctactacttcactttcatcctttgctccagaaaattaactagctaggatggtgagtgttgaagagattcgtaaggcgcaacgtgcagaaggccctgccactgtcatggctatggcaccgccactcctcccaactgcgtggatcagagtacctatcctgactattatttccgcatcaccaacagcgagcacatgaccgagctcaaagaaaaattcaaacgcatgtgtgataagtcgatgattaagaagcgatacatgtacttaaacgaagagatcctga

SEQ ID NO: 188343 - DNA, 284 bp, Glycine max
gctgtctttaaggtcaacaacagattataacacatacctcacaatggtttttccaaaaccctcttctgaatctgacctctttctttattccaactttgcttctcgctatgccaggactctcttcccaggttcagcatgccagaaaactccatgccaaaggaggctgcgtaccagaacatacacgatgagttgcagcttgatgcaattccaaagctgaacttggcttcctttgtgaccacttccatggaagaagagtgcaacaagctcatcatggaatccatcaa

SEQ ID NO: 188344 - DNA, 275 bp, Glycine max
cgggtaccaagctacaaaggatgatcttactgtttatgcagctttgccaactgctccatcagatgaatatggaaatgtttccaggtggtacaagcacattgatgctttgttggaatctctggtgttactggcgagggatctggtgttattgttgagggatctctagttgcagagcctgttgcaactccccctgctgcagacacaaaggctgctgttgctgaggatgacgatgatgatgatgtggatttgttcggtgaagagacagaagaagagaa

SEQ ID NO: 188345 - DNA, 276 bp, Glycine max
aaggccagtccttccacttctccccctccaaacccggtaagtcccctagcgaggacacgcgcctccacgaggagatggccgtcgatctcatcgaggccaagcccggcaacaaatcctggacgtgggctgcggcgtgggcaggcccatgcgggccatcgcggcccactcccgcgcgaacgtggtgggcatcaccatcaacgagtaccaggtcaatcgagcaaggatgcacaacaagaaggattagttggactctctctgcgaggtcgtgtgtgggaa

SEQ ID NO: 188346 - DNA, 267 bp, Glycine max
attcatctgttacttgtgttcctgtcatcatccacttacctttcgaccgtgttcagctccgaggaggaacaattctatgccagagaaattctcggagcagcacagaaggagaggaatggttagtttcagtaaggagaaagattcacgaacacccagaacttgctttccaagaatacgaaaccagttctcttatacgcagtgaactcgacaagcatggcatatcttacacatacccagttgccaaaaccggcatagtggctcatcttg

SEQ ID NO: 188347 - DNA, 279 bp, Glycine max
atgactacccaataagggtattcaagaacagcaatgacttgggagtgaagttcccatttaaccaaccaatgaagatatacaacagtttgtggaatgctgatgactgggccaaaggggtggtttggagaaaacagattggtccaaagcccccttcgtagcctcctacaagggcttccacattgatggttgtgaggcctcagtgaatgccaagttctgtgacacacaaggcaagaggtggtgggatcaaccagagttccgtgaccttgatgctgctcagtg

SEQ ID NO: 188348 - DNA, 280 bp, Glycine max
agcgtcggttccttttggatctcttggatctctatgtcacagtggagttctacgtagaagaagatggtagtggtgggtttgtgagaacaagaggagtgcagcttatgctgaatgggagcccctactatgctaatggctttaatgcctattggcaaatgtatcatgccacagatccatcacagagaaacaaagtcacatcagtgtttcaacaggcttcaaatcatggccacaacattgccagaacttgggcattcagtgatggtggatatcaaccactaca

SEQ ID NO: 188349 - DNA, 282 bp, Glycine max
cttttcttcccttctttccagaacaacaccacaaaccaaacagagaaaaaaaagctccaccaatggcgggttacagagccgacgacgactacgactacctcttcaaggtggtctgatcggcgattccggcgtgggcaagtccaacctcctctctcgcttcaccaagaacgagttcaacttggagtccaagtccaccattggcgtcgagttcgccacccgcaccttgaacgtcgattccaaagtcatcaaggcccagatctgggacaccgcaggccaagaaag

SEQ ID NO: 188350 - DNA, 286 bp, Glycine max
cttgtcaaccctttgagagttagaatggctgctgctattgaaatccccacaatagtgtttccaaactcctctgcccaacagaggatgccagtggttggaatgggatctgcccctgacttcacatgcaagaaagacacaaaggaggctatcattgaggccgtgaaacagggttacagacacttcgacactgctgctgcttatggctctgaacaggctctcggtgaagctctcaaggaagctatccatcttggcctcgtctcccgccaagacctctttgtcacttcca

SEQ ID NO: 188351 - DNA, 296 bp, Glycine max
gctccctgctgctttgaaaaggttgcagtttgataagcagctttcaatggaaagtatgaggagacttgttacagaagctgatgggtatcagcctcatctaatggctccagaacaaggataccgccgtctagttggatcttctctagtaactattaggggcctggctgaggcagctgttgatgcggttcactccctgttaaaggacttggttcacaaagctatgagtgagactttggacttgaagcagtatcctggtctccgggttgaggttggggctgcagctgttgattcactcg

SEQ ID NO: 188352 - DNA, 294 bp, Glycine max
tgcgggtacggtttcgacttgtttcttcttcgtgtttcttctttctctccttcttccttttcagatctccgctgaggaatcctcggagaaggagttcgtactcacattggatcactctaactttcacgacactgtcagcaagcacgatttcatcgtcgtcgagttctacgccccatggtgtggtcactgtaagaagcttgctccggagtatgagaaagctgcttctatcttgagtagtcatgatcctcctattgttttggctaaagtagatgccaatgaggagaagaacaaaga

SEQ ID NO: 188353 - DNA, 270 bp, Glycine max
taaagaaaacccagaaaaactctgaagaagagttcgttgctttctgcttcactgcgaagatgaacggaggcccatctggtttcacaaatgctcccgtcacaagggctttcatcatcacttcggcgcttttcacaatcttctttgggatccaaggccgtttcagcactctggggttgtcgtatcaggatatttttggaaagcttcgcctttggagattgatcatttcgatattttccttctcgtcaacaccagagttgatgtttggattgt

SEQ ID NO: 188354 - DNA, 275 bp, Glycine max
  unsure (1)..(275): unsure at all n locations
cttcgaacaaggagccccgaaacccaaacccnaatctgattcgcttacgattatggcgtctganancgcttcnncgatcgagttccgcggccgattcgtacnttgggagcttgataagcttgacctctnngagtgagatcagatacgaaggtattctctacaacntcaacacngaagagtccagtnttggcctcagaaacgtgcggtcttttggaacagaaggaaggaaaaaggatggcccacaaatccctcccanggacaaggttatggtttnt

SEQ ID NO: 188355 - DNA, 222 bp, Glycine max
tctggcgagttcccaggtgactacggctgggacactgctgggctttcggccgacccagaaaccttcgccagaaaccgtgagctcgaagtgatcgactccaggtgggccatgctcggggccttgggctgcgtcttccccgaactattgtcccgcaacggggtcaagtttggagaagctgtgtggttcaaggccgggtccgagatcttcagcgagggtgggctg

SEQ ID NO: 188356 - DNA, 293 bp, Glycine max
gtttatcgtgaggagaatatgaagttgtttgttttctttgttgctgcagtagttttggtagcatggccatgccatggcgcaggctaccaaaggttccctctccgaatgaaaactggctatggtgagcgttcttcggaggtaaaatgcgcaagttttaggcttgctgtggaagcacacaacatccgagctcttaaaaccattcctgaagagtgcgttgaaccaacaaaggactacattaatggcgaacaatttagatcagactctaaaacagttaaccaacaagctttctttta

SEQ ID NO: 188357 - DNA, 291 bp, Glycine max
gtatggggtaacgtccgtttgtggaaggcggagagacatggaagacgccgtttcggtccgtccatcgttttgccaggaaaatttatctcaagatgataagaaagagtttcatttcttcgctgtcttcgacggccacggatgctcacatgtggcgactatgtgtaaggagaggttacacgaaatagtgaaggaagagattcacaaagcgaaggagaatttggaatgggaatcaacgatgaagaagtgtttcgcgcgcatggacgaagaggttctcaggtggagccagaacaa

SEQ ID NO: 188358 - DNA, 218 bp, Glycine max
gagactttgttgatcggggttacaatagtcttgaagtattcaccatccttttacttctaaaagctagatacccagctaatattacccttctacgtggaaaccatgaaagtagacaactaacgcaggtctatggattttatgatgaatgccagaggaagtatgggaatgctaatgcttggcgatattgtacagatgtttttgactatcttactctttct

SEQ ID NO: 188359 - DNA, 258 bp, Glycine max
tgggtgacatcaagtttactagatagaagagaagaatcttaaaattccaattccatataataaaaacttcagcgtccttaataaaataggcaatttggaaaacacttgaaaatggaaggacaaactaaaaacggcccagtacatccacaatcataacaaacatgaatgcctaaaatctcagtaccaaagagatattagcaacaaacaccttctcccttcaaaaagatatggaggagaagttcaattctaattagcggt

SEQ ID NO: 188360 - DNA, 277 bp, Glycine max
taatctctggagatgcacgtcgtgtttggagatatgcagacgtgcagccgaaatagcagattatcgtgttaagaagctaatttctaatcctgattgtgctactgcaggaaagcggacttgttggaatggtagatgttgaggcagccattcaagaaatgttccaagcacctcatattcagatgatgaaaagctgttccagagttggcaaaattttcctgaccgctatggtgcacgactttataattcaggaatgggggaaacacttttgaaaattggc

SEQ ID NO: 188361 - DNA, 260 bp, Glycine max
attgaaatccccacaatagtgtttccaaactcctctgcccaacagaggatgccagtggttggaatgggatctgcccctgacttcacatgcaagaaagacacaaaggaggctatcattgaggccgtgaaacagggttacagacacttcgacactgctgctgcttatggctctgaacaggctctcggtgaagctctcaaggaagctatccatcttggcctcgtctcccgccaagacctctttgtcgcttccaagctttgggt

SEQ ID NO: 188362 - DNA, 177 bp, Glycine max
ctcgagcgaaaaagcccgcaagtcgctcctcgccacgcacgacgtcttcatcgtcgcaggcgatgtcaacgacgcgaaactcttggcgaactcttcgatgtggttgctttcactcacgtgatgcacctcgcggcgcaggctggggttcgctacgccatggagaatccccactcgtac

SEQ ID NO: 188363 - DNA, 275 bp, Glycine max
gttacaggcacaattttcacaagcgaggcctgttgcaataacccctaatgtttcacctcgaatgccactataccctctaggggctcctgggataggacaacaattgctgtatgggcaagcagctccaagcatgatacctcaagctgcatttggttaccagcagcattttgttcctggaatgaggccaggtggtgctccaaacttctatgttccactggttcagcagggtcaacaggggcagcgctcaggaggacaacgaggagcaggtcctatgc

SEQ ID NO: 188364 - DNA, 289 bp, Glycine max
tgcgggtcgtcgcgtgccggtcgggggacggattgggaacgggcccttcggggccaatccttttcccgaggttacggatccattttgccgacttcccttgcctacattgttccatcgaccagaggctgttcaccttggagacctgatgcggttatgagtacgaccgggcgtgggaggcactcggtcctccggattttcaagggccgccgggggcgcaccggacaccacgcgacgtgcggtgctcttccagccggtggaccctacctccggctgggccgtttgcagggtg

SEQ ID NO: 188365 - DNA, 282 bp, Glycine max
tgccagaaagggattgatgaaaattgggctgctgcattagaacataatcctgaagcttttgctagagtggtcatgttgtatgttgatatggaggttaatggtgtcccattgaaggcatttgtggatagtggagctcagtctaccattatatcaaaaagctgtgctgagcgtcttggattgttgagacttttagatcagcgttacagaggaattgctcatggagttggccaatcagaaatattgggtcgtatacatgtagctccaatcaagattgggagtata

SEQ ID NO: 188366 - DNA, 218 bp, Glycine max
ccgggccgaagcccgctactgctggtcggcaaacggacggcgggcgcacgcgtcgctactagcccggattctgacttagaggcgttcagtcatgatccaacgcacggtagcttcgcgccactggcttttcaaccaagcgcgatgaccaattgtgcgaatcaacggttcctctcgtactaggttgaattactattgcgacactgtcatcagtagggtaa

SEQ ID NO: 188367 - DNA, 248 bp, Glycine max
tgtaccattcaaggaatttcggtgaatacccagaatggaatgatgccggaaagaatatggatacaaacattaattggtcgtgtattagcagacgatatatacagaggttcacgatgcattgccgttagaaatcaagatattggaattggacttatcaatcgatttaaaacccttcaaacccaaccaatatctatccgaactccctttacctgtaggaatacatcttggatctgtcgattgtgttatgg

SEQ ID NO: 188368 - DNA, 272 bp, Glycine max
cacactcattcggtgctccgaatctcagattctagggttagggttcccaatttctccaccgatcagaaaatgagttcaactggtggttctaccaagggcggaaggggcaagcccaaagcctccaaatccgtttcaagatcgcagaaagctggtctccaattccccgttggaataatcggtcgattccttaaggctgggaaatacgccgagcgtgttggtgctggtgctccagtgtagctctctgcagtgctcgaatatgtcgctgctgaggt

SEQ ID NO: 188369 - DNA, 152 bp, Glycine max
ctcgagcctttaatctcgtacgacaacacccacgccgccacgtcgcgcacgaagtaaagctgatgtccatgtacgagcagtggctagtaaagcacggcaaggtgtacaacgcgctcggagataaggagaagaggttccagatcttcaaggac

SEQ ID NO: 188370 - DNA, 287 bp, Glycine max
tggactatccaaaaatacgagaaagaggctaaggacaaaagtcgagaaagctggtatatggcttatataatggacacaaatgaggaagagagggtaaagggaaaaacagttgaagttggaagagcacattttgagactgaaactacgaggtttactattttggatgcacctggtcacaaaagttatgttcccaacatgattagtggtgcatctcaagctgatattggggtgttggttatttctgctcggagaggagagtttgaaactggatacgagagaggtggaca

SEQ ID NO: 188371 - DNA, 259 bp, Glycine max
cacactcattcggtgctccgaatctcagattctagggttagggttcccaatttctccaccgatcagaaaatgagttcaactggtggttctaccaagggcggaatgggcaagcccaaagcctccaaatccgtttcaagatcgcagaaagctggtctcgaattccccgttggaagaatcgctggattccttaaggctgggaaatacgccgagcgtgttggtgctggtgctcctgtgtacctctctgggatgctcgaatatc

SEQ ID NO: 188372 - DNA, 183 bp, Glycine max
tgtttatcgtgaggagaatatgaagttgtttgttttctttgttgctgcagtagttttggtagcatggccatgccatggcgcaggctaccaaaggttccctctccgaatgaaaactggctatggtgagcgttcttcggaggtaaaatgcgcaagttttaggcttgctgtggaagcgcacaacat

SEQ ID NO: 188373 - DNA, 219 bp, Glycine max
gtttatcgtgaggagaatatgaagttgtttgtttgctttgttgctgcagtagttttggtagcatggccatgccatggcgcaggctaccaaaggttccctctccgaatgaaaactggctattgtcgagcgttcttcggaggtaaaatgcgcgagttttaggcttgctgtggaagcacacaacatccgagcttttaaaaccattcctgaagagtgcgttga

SEQ ID NO: 188374 - DNA, 247 bp, Glycine max
atgaaaatgaaggtccttgttttcttcgtcgctacaattttggtagcatggcaatgccatgcgtagcgatatgttccctctccgaatgaacactggctatggtgcccgtactccggaggtgaaatgcgcaagttggaggcttgctgtggaagcacacaacatctttggctttgagaccattcctgaagagtgcgttgaagcaacaaaggaatacatccatggcgaacaatatagatcagactccaaa

SEQ ID NO: 188375 - DNA, 213 bp, Glycine max
agggtttcaaaagatggagaacatgcagagcttctggcaattgggcgatgaactccgtggacactcaaaagcatcggaggatcacaaatggttaatggttgcttcgaaattggcggaacagacaagattgaagggggagcgtgtgaacaaccttgatctttcaaagggccccattgaaacaaggtcaagggataaatttgggttccaggaaga

SEQ ID NO: 188376 - DNA, 201 bp, Glycine max
aaaaaatggaagctactagacatgtgctcagcgagtatggtaacatgtcaagtgcatgtgtgctattcatcttggatcaaatgaggaagaaatcaatagaaaatggacttggcacaaccggtgaaggccttgactggggtgtgctatttggtttcggcccttgactcaccgttgagactgttgtgctccacagtgtcactg

SEQ ID NO: 188377 - DNA, 293 bp, Glycine max
ctgtagactgtagcaaacaccatgaccaccaaggttccaaaatccgtatacgactttgttgtcaaggatgctaagggagatgttgtagatctctccttttacaagggaaaagtccttctgattgtcaatgttgcttctcaatgatatccttaatctgtgctgtgtttgttacttcttctttttttttccctgattgtgccttctaattaatttaaagccttgatattttcatcttttctattcttttcagtaactactctcacagctaatgttataaatgttgagaaaattta

SEQ ID NO: 188378 - DNA, 245 bp, Glycine max
caaaaatcacttattgtgaacacacgaaaagacatggaccggatcaaaggcccatggagcccggaggaggacgaggctctgcagaagctggtggagaaacacgggcccaggaactggtccctcatcagcaagtccatcccgggccgctccggcaagtcgctgcaggctccgctggtgcaaccagctgtccccccaggtggagcaccgggccttcacccacgaagaggacgacaccattatccggg

SEQ ID NO: 188379 - DNA, 197 bp, Glycine max
gccacctccaacttctcaattgttctctctctctccctagccttctttctagtgctactcaccaaggcaaactcaaccaacaccgtttctttcaccgtcagcaagttttccccacgccaacaaaaccttatcttccaaggagatgctgctatctcaccctccggggtgttacgactcaccaaggttgagggtatcgg

SEQ ID NO: 188380 - DNA, 237 bp, Glycine max
agccatggttctcaaaaccgaactatgccgattcagcggtgccaagatctacccagggaaaggcatcagatttgttcgtggtgattctcaggttttcctgtttgctaactcgaaatgtaagaggtatttccacaacaggttgaagccatcaaagctcacctggactgcaatgtacagaaagcaacacaagaaggacattgctcaagaagctgtgaagaaaagaagacgtgctgccaa

SEQ ID NO: 188381 - DNA, 275 bp, Glycine max
  unsure (1)..(275): unsure at all n locations
gtggagcacaaggttgtggcaaataacaaantggaaagatactccatagcatntttcctatgtccttcttacagtactgtcataaacggctgcaaaggaccttctgtttntaggaagttcacgtttggagantacagacaccannttcaagaagntgtcaagaaaataggacacaaaattggactntcaagncttctantttnngatncatgcgcacattgggatnnagcttnaacatcattcngcatgggggcctgatntgcctnttgggcctt

SEQ ID NO: 188382 - DNA, 276 bp, Glycine max
gtgcaatacctctccttgttggtcttttgtctgtgcctgactcccgcactcaagaacatgccgtgacagcgctcctgaatctttccatatatgaaaacaacaaaggaagtattgtttcttcaggagcagttccaggtatagttcgtgtgctgaagaagggaagcatggaggctcgggaaaatgcagcagcaacacttttcagcctttcagtgatagatgaaaacaaggttacaattggatctttaggagccataccaccactagtgacactgctaa

SEQ ID NO: 188383 - DNA, 281 bp, Glycine max
ctcgagcgcacagttactcttgtgaattagcgagatttgaagcgagtgctgagtgcgaatgaagagaatcgaatatttgttggaggtttatcctgggacgttacggagcgtcaactcgagcatgcctttgctcgttacggcaaaattctcgaatgccagttgtagaagcatgggcaacagacgtgccatcttatatactgacaatgcatttgaatgtagctgaattgctcaagaaatgaaagcatgatctccataatggagtgctgtgaatgcctgtcttg

SEQ ID NO: 188384 - DNA, 136 bp, Glycine max
aatctgtcaggtgtgcggtgatgctgttggattgactgctactggtgatgtgtttgttgcttgcaacgagtgtgctttccctgtgtgtcgtcgttgttatggatatgagcggaatgatgggaaccagtcttgtgca

SEQ ID NO: 188385 - DNA, 276 bp, Glycine max
gctctgttccgtcgatgacgatggcgtttagggtgcgaaaccctgacctccgctttctcattcttctctctctcttgtccatcacttccgccaaggtcttcttctaggagcgtttcgatgacggatggggaaatcgttgggttaaatcagattggaaaaaagatgagaacctggctggggagtggaaccacacctctggccaatggaatggagacgctaacgacaaaggtattcaaaccagtgaggattacagattctacgctatttcagctcagt

SEQ ID NO: 188386 - DNA, 176 bp, Glycine max
ctgagagagctcgtcgcggcggttgcagaagaagattgcaagatgaagttcaacatcgcgaatcccaccactggatgccagaagaagctcgagatcgacgacgatctgaaactgcgagcattttgggacaagaggatctcacaggaggtcatcggagatgcactcggtgaggaatt

SEQ ID NO: 188387 - DNA, 274 bp, Glycine max
caaggagttgcagaaggaccctcctacttcctgcagcgcagtcccgtggcggaggacatgtttcactggcaggcaacaatcatgggacctcctgatagcccatataccggtggtgtattcctagtttcaattcattttcctcctgattatccattcaaaccaccaaaggttgcatttgggactaaggtattccacccaaacatcaacattaatggaggtatatgccttgacattctaaaagaacaatggagcccagcactaaccatttctaggg

SEQ ID NO: 188388 - DNA, 238 bp, Glycine max
ctctcaagccgaagtcggctcgagcggcgtcgagcccaagcagtggacggaggctcgggactattaccgcgtgcctgttgaacaatgagccggcgactcataggcagtggcttggttaagggaaaccaccggagccgtagcgaaagcgggtcttcacagggcaattgtcactgcttatggacccgaacctgggtgatctatccatgaccaggatgaagcttgggtgaaactagatgga

SEQ ID NO: 188389 - DNA, 290 bp, Glycine max
gcccggcactgcaacccatcccaccaagattgtagctctttatatttccccgaagcttgtaatgattgatcttgctaaagatcttctccaagccaatcccaactcctatgcattggtcattagcatggagaatatcacgttgaattggtattttggaaacgatcggtcaaagcttgtctctaattgtttatttcgtatgggaggagctgcagttctgctctccaataaaagctcggatagaagaagatccaaataccgattggtcaccacggttcgcactcataagggtg

SEQ ID NO: 188390 - DNA, 289 bp, Glycine max
agaacctttgctttcttttcctagggccggtgtcagtccagtactgtggttccaattacttaatgctttagatcagcatgggttgcctttgctctctcctgtgaaggttcatttacagactctgcaactagtgttctcgagaattttgctctcccattaactatagaagacatatacgcatacagcatcgattgaaaaagcttgataaggattctgataaaaatagggatcttttaggggcatattgggataagctctccgtagaagaggcaaaggaagttgtgtcatt

SEQ ID NO: 188391 - DNA, 290 bp, Glycine max
gggaaggcaaagcttcaaaacttgcaaaaagggtgattgcttgtctcgatgtgagaacaaatgataagggggaccttgttgtaaccaaaggagaccagtatgatgtaagagaacatacaaaagagaatgaggtaagaaatcttggcaagccagttgatcttgctggacagtactataaagatggagctgatgaggtcagctttctaaatattactggatttcgcgactttcctcttggtgatttaccgatgctgcaggtattgcgatacacatcagaaaatgtttttgta

SEQ ID NO: 188392 - DNA, 292 bp, Glycine max
gttgtttaaagtaagagagaagaaagaagcaaatggcaaactttccagttgttgacatggggaagcttaacaccgaagagagacctgcagccatggagattataaaagatgcctgtgagaactggggtttctttgagttggtgaaccatgggatatccattgagcttatggacacagtggagaagctcacaaaagagcattacaagaagactatggagcaaaggttcaaagaaatggtgaccagcaaaggtcttgagtcagttcagtcagaaatcaatgacttggactggga

SEQ ID NO: 188393 - DNA, 295 bp, Glycine max
actcgagccgaatcggctcgaggtaaaaatctctcccagatgtgcacatgttgcgaactcgaacaatattatgtggcatgactgtccaattcagaaacaagatagacagcagctgcttcagcaaaaaggctgtgttatatggctaactggcctcagtggttcaggaaaaagcactattgcatgtgctttgagtcgaagcttgcactccaaaggaaaactgtcttacatccttgatggtgacaatattcggcatggtctaaaccaagatcttagtttcagagcagaagatcgttct

SEQ ID NO: 188394 - DNA, 290 bp, Glycine max
ctcgagccgctttgaacattggcaagcttgcaatgaaaggcagagaccccctgttccttcactgcactcccaaggcatgtattgaactattacaacgaagtgctgtaagtattaagggaaagaaagccgttgtggttggtagaagcaacatagttggattaccagcttcattgctgcttttgaaagcagatgccacagttactattattcattcacacacaagtcagccagaaagtatcatacgtgaagcagatattgttattgcagcagcaggacagccgatgatgatc

SEQ ID NO: 188395 - DNA, 288 bp, Glycine max
attcactccacttgtcaagagcttctagcattgtgatgttgattgcatatgtagtctacattgtctttcaactgtggacacacaggcagttatttgaagccgaagatgagggtgaggatggtgaggacggtgaagaagaacaagctgtgattggattatggagtggcattgcttggttggtagggatgactgtgttcattgctgtgttgtctgaatatgtggtggatacaattgaggatgcatcagattcgtggggtttgtctgtgagctttctcagcataatcttgc

SEQ ID NO: 188396 - DNA, 285 bp, Glycine max
ggagaagaaggatcctactggagccaaggtcaccaaggctgcccagaagaagaagtgaatcgtgcggtttggttcatcaggggatgtcgtttcttatggttacaataaatgttggtttcttgcccttgtgtcttcgtttctaggtagcttgtttttcggacatagtttgaagtctccaccatcatctcgcaacttttgttcccagaattgggttcttgatcgacggtggcaagactccttttatcattctgttttaatgtgttgtgtttgtgagaaccctgatta

SEQ ID NO: 188397 - DNA, 291 bp, Glycine max
acatccccttattgttaaaccctttgtttgcacaagaaaagagttacttcatcatcatcatcaacatgagtcgcttcaacaatcagcaagaatcccctgtatcatatcctccagcactgtatgttagtgccccaccacctatgggttatccttccaaaggtgatcctacagctgtagggtacccccaacaaagagttccagaagaaaccacaagcaggggtgatggattttggaagggatgttgtgctgctttatgctgctgctgggtcctggattgttgcttctgattga

SEQ ID NO: 188398 - DNA, 291 bp, Glycine max
gctagattcgacgattcccgaagtgccttcctcctcctcctccttcttcccctctaatcggatccaaatccaaatccaaatccagttcaaagaagatgcaatacaagaacctggggcgatctggcctgaaggtgagccagctctcctacggcgcgtgggtgagcttcgggaaccagctggacgtgaaggaggcgaaggccctcctacagtgctgccgcgaccacggcgtcaacttcttcgacaacgccgaggtctacgccaacggccgcgccgaggaaatcatgggccagg

SEQ ID NO: 188399 - DNA, 291 bp, Glycine max
acttgatccagacaaaatttatctttttgattctggagcccagtatctagatggaacaacagatattacacgaacagttcattttggtaaaccttcgactcacgaaaaagcgtgttatacagcagtcctaaagggtcacattgctcttggaaatgctagatttcccaatgggacaaatgggcattctcttgatattcttgcccgaattcctttgtggaaggatggtcttgattatcgacatggtactggtcatggaattgggtcctatctgaatgttcatgaaggacctca

SEQ ID NO: 188400 - DNA, 273 bp, Glycine max
tcggaaagatcggcgatggctgcctccaaggatcgcgagaacttcgtacacatcgccaagctcgccgaacaggccgagcgatacgaagagatggtggaatcaatgaagaacgttgcgaatctcgacgttgaactgactgtggaggagcggaatttactttctgttgggtacaagaatgtgattggtgctcggagagcatcgtggaggatcctgtcttccattgagcaaaaggaagaaacaaaagggaacgagttgaatgcgaacggattaagg

SEQ ID NO: 188401 - DNA, 290 bp, Glycine max
  unsure (1)..(290): unsure at all n locations
cttggntcnttgcctcatcatgcttgcacaaagcggtaacnacaanancagccnantaccgtgcttcgtganagtcgcacanaggagngtngggggncgntgaaactatnagncaggtgcaccgtntggaacanggntnttccttcttaccaagcantcggtggacacaaggccagccaccgcaaggncncgtcggaatccnacaccaccgcntccgnngtcgccgtntctgcganagccaacgacagcnantcngcttcgnccgtcggcggcggaagatgnacgagtgt

SEQ ID NO: 188402 - DNA, 286 bp, Glycine max
ggagaactcatcatcatcatcttcatgttcaaactatctctaccgagagtgcctccgcaaccatgcagccagcctcggtagctacgctaccgacggctgtggggagttcaccctggacgtggacagcgtctcgtccccctccctccagtgcgcacctgcggctgtcatcgcaacttccaccgcaacgtcacgtgccccgcggtggaaggagggttgcaggcagtgactggagggagtggggacatgatggagtactccgggggcggagacgtgggaagaataacgg

SEQ ID NO: 188403 - DNA, 289 bp, Glycine max
ctaactccctaccctattccgctttctctcatccatcatgaaaggaggaaagtccaagaccgaatctaagagagccgatgccaaacttgctgtgaataagaagggcgccgccaccaagactaggaaacccgccggaaaggggaaggcagcgaaagatcctaacaagccaaagaggcctccaactgctttcttcgttttcatggaggaattcaggaaggtgttcaacaaggaacatcccgacaacaaagcagtgtctgctgtgggcaaagctgctggagcaaaatggaag

SEQ ID NO: 188404 - DNA, 287 bp, Glycine max
ggggacaactgatgcttattgtgtagcgaaatatgggcagaagtgggtgcggacaaggacaatcattgacagctttgcaccccggtggaatgagcagtatacttgggaggtttttgatccttgcactgtcattacaattggtgtatttgataactgtcatttgcatggtggtgataagcctggaggctcaaaagattccaaaattgggaaggtaagaattcgtctttccacccttgatatagatcgtgtttatacacattcctatccacttctagttcttaatccaa

SEQ ID NO: 188405 - DNA, 274 bp, Glycine max
gtgaaataaatgaagcacccagttttgcttcatctcaaccattccccaatgttcaggaaatggtaaggactaaccctttgcaggttcctgaaagatatgcgaattgtcaagaagagttggagaaagtcaaacatatgcctcacctttcatctgaggtccctgtcattgatttagcactgcttacatctggaatctcagaggagttgttgaaattggacgtagcatgcacagagtggggcttcttgcatatagtaaatcatggtgttcaagaaca

SEQ ID NO: 188406 - DNA, 289 bp, Glycine max
ctgtaaaggaggtgtctttgctggatgacggaagccagggcaaacagagccttttccaacttcagcaggaaatatctcttttgagtcagttccgacacgacaacatagttcgatatcttggcactgacaaggatgatgataagctgtatatcttcctcgagcttgtaacaaaaggatcattggcaagtctctatcaaaagtaccgtttaagggactctcaagtttctgcatacacacgacagtttttaagtggcttgaagtatcttcatgatcgtaatgtggttcacag

SEQ ID NO: 188407 - DNA, 290 bp, Glycine max
ctgattcccctccccagacgccgtagagtcagagagagagattcactgaaacagagcgcagaagaaaatacataaactaatccagaaaatgagcagcggcgctggaaaggtggtgtgtgtcaccggcgcttccggttacattgcttcctggatagtcaaattcctcctcaatcgcggctacaccgttaaggccaccgttcgcgacacaagtgatccgaaaaaaataaaccacttggttggcctcgacggtgctaaggagaggctgcacctctacaaggcgaatcttctcg

SEQ ID NO: 188408 - DNA, 285 bp, Glycine max
agcccttctcgtcctctcaattctctcagtccaaggggctgcaaattttctggttcttttcgacagattttgagtcattgtttgaaatggcatcggtatctagtcagccacagttccgttacactcagccgctgtcaaaggtgcttcatttgaggaacttgccgtgggagtgcacagaggaggaactgattgagcttgggaagccgtttggcaaagttgttaacacaaaatgcaatgttggggcaaatagaaatcaagcttttattgaatttgcagatttgaatc

SEQ ID NO: 188409 - DNA, 287 bp, Glycine max
tgctgttttaaatacctctaaaggttctataataatagaactgtacaaggaaagtgctcctgaagttgttgatgaattcattgacttatgtcaaaaagggcacttcaaggggatgctttttcacaaagtaattaagcactacgtgattcaggctggggataaccaaggacaaggagctactgaagactggaacttgagaggaaagcaacatacaattactagtatgaaacatgaagcattcatgcttggaacttccaagggcaaacaccacaacaagggatttgatc

SEQ ID NO: 188410 - DNA, 289 bp, Glycine max
cttcagagtttgtgtaaccaacttcacctttccttccttccttccttcttccgatttcgaagatggctgaagcagaggatgccgtacgacgccgtaatgcggtcgccgagtatcgaaagaaacttctccagcacaaggaattggaatccagagtccgatccgtcagggagaatttgcgagcttcaaagaaagagttcaataaaacagaagatgatttgaagtctcttcaaagtgttgggcagatcattggcgaagttctcaggcctcttgacaacgaacgccttattgt

SEQ ID NO: 188411 - DNA, 286 bp, Glycine max
gtgactttcattccattaccttctcagcaacttaacatggttgggttcaactcagttcctaattggcttctcattcttaaggaagagaagttttttactcgctgtttgattcatcactctgtaaagaagaacgagaagaacattttctgcttagattgctgcacaagcatttgcctccactgcttgccctttcaccgctctcacgtccttttgcagataagaagatacatgtacaatgacgtattacgccttggtgatgctcagacattgttgaattgttcccttg

SEQ ID NO: 188412 - DNA, 287 bp, Glycine max
ctgaagcatggggtgtggagccatatgacatagaggatgctgataggaactgcaaggctctagtgcagaaaggatttgtacgtgctgcagataaaaattccctttaccatacagggcaaagtctttttctcatgttatagtgtcagatgctttggattacctgtctccaaaatatttgaacaaatctcttcccgagctagcaagggtatctgctgatggtattattatttttgcaggctacccaggtcaacggagagctaaaatagcacaattatccaaatttggcc

SEQ ID NO: 188413 - DNA, 275 bp, Glycine max
  unsure (1)..(275): unsure at all n locations
ggatgttgtacgatgcatggtgattctgcgatggggaaatatcgtgcaaatcgaccttttnnnggctacaccagacagcccggctccttacgttttaatggcgaatctctattctagtgaagggaaatggaaggagagagcacgttccattccgaaaatgaaagagatgggggtagcaaaagatctgggtataagctgggttgagattgaaaagaaagtcaatagtttcgtagtaggggacaaaatgtgatctcagtgatgctanttctggcttt

SEQ ID NO: 188414 - DNA, 284 bp, Glycine max
gtttcctttctgtttcttttttcttcttccttcttcctttcttcgttgttgttgttgctgcgattctctagatcttgaacagtgttttcgtgttcggtgagatggaagaaaggaagcaatcgcgttatgtgaagttgactaaagatcagacacctctcgaagatattacccctggcgaactcaatcagccaattcaggttcctcagttggatgctcgtaagtgccctgaatgtagacagccgctacctgaaagctatgctcctcctgctgatgaaccttggatg

SEQ ID NO: 188415 - DNA, 258 bp, Glycine max
ggagagtttgtgcttcaactcttgccagaaatggggtttctgttactctctttgagtcagctagaggccctggtggacgcatgtcccaaagaagagagagaactgaagatgggacggagctgcattttgaccatggtgctccatttttctcggttagcaagtctgaagttttacatctggttcaagagtgggaatcaaggggtctcgtagctgaatggaaagagaagtttgcctcgtttgatttccacacaacatacg

SEQ ID NO: 188416 - DNA, 284 bp, Glycine max
gaaaaatcaaatcaacatgctgagagtgggcgcaaagagggttttggaaacgacgttgtttggggttagggttccggcgaggctgtaccacgagagggttgtggatcactacgacaacccccggaacgttggatcgtttgacaagaacgacccgagcgtggggacgggtttggtgggggccccggcgtgcggcgatgtgatgaagctccagattaaggtcgacgacaaaaccggaaaaatcgtcgatgctcgattcaaaactttcggctgtggctccgccattg

SEQ ID NO: 188417 - DNA, 287 bp, Glycine max
acatccccttattgttaaaccctttgtttgcacaagaaaagagttacttcatcatcatcatcaacatgagtcgcttcaacaatcagcaagaatcccctgtatcatatcctccagcactgtatgttagtgccccaccacctatgggttatccttccaaaggtgatcctacagctgtagggtacccccaacaaatagttccagaagaaaccacaagcaggggtgatggattttggaagggatgttgtgctgctttatgctgctgctgggtcctggattgttgcttctga

SEQ ID NO: 188418 - DNA, 285 bp, Glycine max
ctacaatataaacaatggcatctactcaggaagatgtgaagcttttgggtattgtgggaagcccatttgtgtgcagggtccagattgcccttaagttgaagggagttgaatacaaatttttggaagaaaattcgggcaacaagagtgatttgcttctcaaatacaaccctgttcacaagaaggttacagtgtttgttcacaatgagcagcccatagcagagtctcttgtgattgttgaatacattgatgagacatggaagaacaaccccatcttaccttctgatc

SEQ ID NO: 188419 - DNA, 232 bp, Glycine max
gccagggtctgtagtgtgcgggtgggtttgtttatcgcaaacacagaacagaggtgtagagaagaaagctctcaaaagtatggcggcggagtcatcactgagggtggcgactcccactatttgcaacctcaatggttctcagagaagaccaaccactctctctccgcttcgcttcatgggttttagccctcgaccctctcactctctcacttcctcttcccttccacacaac

SEQ ID NO: 188420 - DNA, 278 bp, Glycine max
attgcttggtgcttgtagcatacatggtgattctgagatgggtaaatatgctgcaattccaatgtttttggctacaccagacagccccggctccttacgttttgatggcgaacatatatcctagtgaagggaaatggaaggagagagcacgttccattaagaaaatgaaagagatgggggtagcaaaagaagtgggtataagctgggttgagattgaaaagaaagtcaatagtttcgtagtaggggacaaaatgcatcctcaagctgatgctatattc

SEQ ID NO: 188421 - DNA, 279 bp, Glycine max
gcaaaacccattttactccctcttccacaaaagaacaatatctctattttccaaactacacacatcatttagaaccatgtctttctctaccaaattgcctttggtcctcttattttcatcccttttcatccatgcatctttggctgagatggtgtgtgaggacctgccaaaggaagtgtgtgctttctcagtagcttcatcagggaagaggtgtttgttggagactgagaaggcagccgacggtggcgtcgagtaccaatgccggacatcggaagtggt

SEQ ID NO: 188422 - DNA, 275 bp, Glycine max
tgcgcttcgcggcgtctcgtatggctaatccgcctcacgagggtcaccaacggcacgtgcctttggggggccgaggcccctaactgctggtcggcaaactgacggcgggcgcacggttcgcttctagcccggattctgacttagaggcgttcagtcataatccaacgctcggtagcttcgcgccactggcttttcaaccaagcgcgatgacaaattgtgcgaatcaacggttcctctcgtactaggttgaattactattgcgacactgtcatcag

SEQ ID NO: 188423 - DNA, 273 bp, Glycine max
cttagaagagggccttggactcttgaagaggataatttgctctcccaatatatttctagtcatggagaagggcgatggaatttgctagctaaacgttcaggattaaagcgaactgggaaaagttgcagattaaggtggctaaattatctaaagccagatgtaaaacggggaaatttaaccccacaagagcaacttataatcctcgaactccactcaaagtggggaaacaggtggtcaaaaattgcacaaaatttgccaggcagaacagacaat

SEQ ID NO: 188424 - DNA, 275 bp, Glycine max
ctcgagccgctcgagccgctttatagtagttttatccttgcagagtcttaggtgttttgtactaagttaacttttacgtttctgccgatttcatgtagccgtaactttcaaaactaggttcttgatcggcggtggtcaattttcattgctgtttgtttttgatgagtactgttttttgttttgatggtaagaagagtctgagatatttcgaatttcacaagcagctatagggttttagtccatttcctttgctgctgagggatgttttaagttgc

SEQ ID NO: 188425 - DNA, 281 bp, Glycine max
ctctcaccggcatctcgctggtggcgctgcaattcaaggccttactgaagaaaaatctcttgctgtcatggcggaacaagagagccaccctcttacagttactctcccctctcatattcattttcctcatcttcgcaatcgacaaggccatcaaggcacagacctcgacctcctcctcctacaagagcgtcactgaccctcccatggaaccttctccccccatcactccctgcgaggacaagttcttcatcaaactcccctgctacgacttcgtctggagc

SEQ ID NO: 188426 - DNA, 276 bp, Glycine max
atgaagttgtatgtattctttgttgctgcagtagttttggtagcatggccatgccatggcgcaggctaccaaaggttccctctccgaatgaaaactggctatggtgagcgttcttcggaagtaaaatgcgcaagttttaggcttgctgtggaagcacacaacaaacgagcctttaaaaccattcctgaagagtgcgttgaaccaacaaaggactacattaatggcgaacaatttagatcagactctaacacagttaaccaacaagctttcttttat

SEQ ID NO: 188427 - DNA, 260 bp, Glycine max
gatgagtgtgaatgacaaccaaactggttcgaaatatatgggtaaccaatatttctataatgattcagtagtggttgtaatgaaaggtcaatacatggagctccagaggatattaactatttttacaaccattgatttatcacataatatgtttgaaggagaacttctgaaagtccttggcgaattgcattctctcaaagggcttaacctttcgcacaatgcaatcactggtaccattccacgatcctttggtaatttaa

SEQ ID NO: 188428 - DNA, 278 bp, Glycine max
atgaagttgtttgttttctttgttgctgcagtagttttggtagcatggccatgccatggcgcaggctaccaaaggttccctctccgaatgaaaactggctatggtgagcgttcttcggaggtaaaatgcgcaagttttaggcttgctgtggaagcacacaacataccgagcctttaaaaccattcctgaagagtgcgttgaaccaacaaaggactcacataatggcgaacaatttagatcagactctaaaacagttaaccaacaagctttcttttatg

SEQ ID NO: 188429 - DNA, 145 bp, Glycine max
gttggcctcaagaaggagaacatggggtttgaggaaactgagttaaggcttggactgcctggatacggaggcactgaagaagtgctcatcaggaagaggggtttctctgagactgaaactggtcatgaagatgagtctgccaaca

SEQ ID NO: 188430 - DNA, 274 bp, Glycine max
attaaattaacaacacagataacataattccttcacactgatcactcgtttcataaaaggatctctaactagataaaataagaggcaaacaaagaaacccatagtagaatgggtaacccttattctcaaacacaaagtggttaattaacaacacgagtagaaagatgatagatctatcatcttctatcaaagcactcttaattaattttttaaaattaacaatgtttggtgcagaagcatctgcgacggaagccacggcagtgtcctccagtga

SEQ ID NO: 188431 - DNA, 272 bp, Glycine max
gttgtgagctataagctagtttatcgtgaggagaatatgaagttgtttgtatactttgttgctgcagtagttttggtagcatggccatgccatggcgcaggctaccaaaggttccctctccgaatgaaaactggctatggtgagcgttcttcggaggtaaaatgcgcaagttttaggcttgctgtggaagcacacaacatccgagcctttaaaaccattcctgaagagtgcgtacaaccaacaaaggactacattaatggcgaacaatttag

SEQ ID NO: 188432 - DNA, 268 bp, Glycine max
ctaaacggtggttccatgagagtgtgatgatagtggtagctcgaggtgataagagtggagaagatggtatccccatgcttctcaagataccacgtctgtttgatccttggggtggttacagtatcatcggatttggggacataatcttaccaggacttatagtggcattttcactaaggtatgattggttggcaaagaagaaccttcgggctggatacttcttgtgggcaatgtctgcctatggtttaggtctcctcatcacatatgt

SEQ ID NO: 188433 - DNA, 277 bp, Glycine max
gcgatcgcgaatcaatcggagttcaatagaagggcctccaaaatcggctacgggattcaccaaacgtctcagaagctcgccaaactcgccaaattagcgaaaaggacttcggtttttgatgaccctactatggaaatccaagagcttacgggggttattaagcaggatatcactgctctgaactctgctgttgtggatcttcagttggtgtgtagctctaggaatgagactggaaatgtttctgccgatacctctagccattcgagcacggtggtcg

SEQ ID NO: 188434 - DNA, 208 bp, Glycine max
  unsure (1)..(208): unsure at all n locations
catggcccgacatgttcatcggactcttcataccattgtccagcagcaggaaaatggtatgaagactcgatgaacatctcgggccaggccttagcatcaccacaaacataaagataacctccctgagaaatcaaattccacagacgtgnagctttatccatcatcttgtgttgaacatactcctttcaggtcctctctcgagaatgtg

SEQ ID NO: 188435 - DNA, 276 bp, Glycine max
acactctcccactcctccgagccggtcgagttgaatcggtgagtcagtgaccgagttgaaccatgtcggacgaagagcaccatttcgaatccaaggccgatgccggagcctccaagacctatcctcagcaggccggaaccatccgcaaaaacggctacatcgtcatcaagggtcgtccctgcaaggttgttgaagtttctacttccaagactggtaagcacggccatgctaagtgtcactttgttgggattgatattttcactgccaagaagcttg

SEQ ID NO: 188436 - DNA, 273 bp, Glycine max
ctccgccagcccccctcatcgacttggccgagattaagctctggaccttctacagagccctcatcgccgagtttatcgccacactcctcttcctctacgtcaccgtcgccaccgtcattggccacaaaaaacagaccggaccatgtgacggcgttggccttctcggcatcgcatgggccttcggtggcatgatctttgtcctcgtctactgcaccgccggcatttctggtggacacatcaaccctgcggtgacttttggcctgttcctggccc

SEQ ID NO: 188437 - DNA, 270 bp, Glycine max
agagcataatgtcagggatcattcacaagattggggagacccttcatgtgggagggcaaagaaggaggaggagcataagggtgagcaccatgctggagaatacaaaggggagcaccatggtgaacacagtagtgagtacaaaggagagcatcatggtgaacacaaagctggagagtaccatggtgagcacaagccagagcacaaagaggggttcctagacaaagtcaaggacaagatccatggtgagggcggcgcgccgagggcgagaag

SEQ ID NO: 188438 - DNA, 268 bp, Glycine max
ctcgagccttgcccttcatgagatcaatcttctttcatccattgctgaccgtgatccgtcaaattccaaatttgttattcaatctattgaccactttaagcacactggtccaaatggacagcatctttgcatggttcttgagtttcttggcgatacttgcttcgcctgatcagatataaccgttataaaggtcttccattgaataaagttagcgagatttgcaagtgtgtgttgattggtttggattacttacatactgatcttggta

SEQ ID NO: 188439 - DNA, 277 bp, Glycine max
cttgaaagcatcgttagacaagccgttactaataagttccaacaaacctttgtcaccgtcccagccacccttcgcctattctttcacgattgctttgtccagggttgtgatgcttccgttttgattgcatccaccggaaataaccaggcagaaaaggatcacccagacaacctgtctttggcgggtgatgggtttgacacagtgatcaaagcaaaggctgcagtagatgccgtccctcagtgcagaaacaaagtctcgtgtgcagatattctggcct

SEQ ID NO: 188440 - DNA, 274 bp, Glycine max
gcaatggtgtacgtcaaggctcagaaatcaaaagcctacttcaagagatatcaagtcaagttcaagagaagaagagagggaaaaaccgattaccgtgccaggattcggttgattaatcaggacaagaacaaatatgacactccgaaataccgatttgttgttcgctttagcaacaaggacattgttgcacagataatatctgctagcattgctggcgatattgttcttgctgcagcatatgcacatgagctgccacaatatggtcttgaagtag

SEQ ID NO: 188441 - DNA, 270 bp, Glycine max
attttactccctcttccacaaaagaacaatatttctattttccaaactacacacatcatctagattcatgtctttctctaccaaattgcctttggtcctcttattttcatcccttttcatccatgcatctttggctgagatggtgtgtgaggacctgccaaaggaagtgtgtgctttctcagtagcttcatcagggaagaggtgtttgttggagactgagaaggcagccgacggtggcgtcgagtaccaatgccggacatcggaagtggt

SEQ ID NO: 188442 - DNA, 267 bp, Glycine max
gactgttatgtttaaattgtagtcatggtggtgtttttggctgtgaatttgctcatatgtgctaattatgtgttcttgtttgatgttactctacagaagttaaaatggcccaagaaactttcctattcacatctgaatcagtgaacgaggggcacccttacaagctctgtgcaccagatctccgatgctgtgctcgatgcatgcttggagcaggaccctgacagcaaagttgcctgtgaaacctgcaccaagaccaacatggtgatg

SEQ ID NO: 188443 - DNA, 273 bp, Glycine max
cggctcgagggccgctcgcgcttccgacgacgaccgcggttacaaagaaggaaaacttggattcacagtctgtttcaccaaggcaggtacaaattctgggcgttacgtgccatcttgcttctggcgttctggtccatgttcaccggtaccgtctcgctccgctcgtccggcactctcaattccctttccaacgacatcgacactcccatccacgacgacctagatgttcttgaaatggaggagagggagaaggttgtgaggcacatgtgggat

SEQ ID NO: 188444 - DNA, 269 bp, Glycine max
gagcgatccgagaaaaactctgtaaacatgttggtttaccaggacctccttacaggtgatgagcctctctctgactccttccgttacaaggaaattgtgaatggaatgctgtgggaagttgaggggaagtgggttgttaaaggagcagttgatgtagacattggtgcaaacccttctgctgagggtggaggagaagatgagggagttgatgatgcagctgttaaggttgttgacattgttgacacattcagacttcaggagcaacccgc

SEQ ID NO: 188445 - DNA, 264 bp, Glycine max
cggctcgacctcgagccgattcggctcgaggggggagatctgattcgggagggtgcttgagggacttcacgtggttttcgcagtggtctcagcgttaggcgtgtgtggccctgctctttactggcgattcaagaacgccatcactctccgcaacaacaacaacaaactctcttgcccttcctgcctctgtgactgccctccccctctctcgctcttccaacttgctcctgggctggcgaatctctctgtctcagattgtggaag

SEQ ID NO: 188446 - DNA, 266 bp, Glycine max
gcgaaattgcgatttcatgtcatagagaggaaaagaggagaggcggggcggagcagagacgaatggcagatcagagcgagcattcgaaaacggcgttgcctccggaggaccaggaccgtcccgttcgggtatacgcggatggcatctacgatctcttccactttggccacgcccgctcccttgagcaagccaagaaatcgtttccgaatacatacttgcttgttgggtgttgcaacgatcaagtcacccacaaatacaaaggcaaa

SEQ ID NO: 188447 - DNA, 269 bp, Glycine max
ggcacatataaggaagaagcccgggatggcgagcgtgaaggacatgccggttctccaggacggtccaccgccgggcgggttcgctccggtccggttcgcccggcgcatcccgaacaagggccccagcgccgttgccatcttcctcaccaccttcggcgctttctcttggggcatgtaccaggtcggccagggcaacaagatccgaaggccctgaaggaagaaaaatacgctgcccgccgatccatactgcccgtgctacaggctgaaga

SEQ ID NO: 188448 - DNA, 265 bp, Glycine max
cgatcctctgacctctcgaagctttcatcgttcaacatattctcaccatttcagtcatgggcctgctagtctgttttaggtctaccgtcctgagataatgttccaaaggaagctctggcatgtcaagattcctgtatacgaacaattttcaacgaaacttgatttcgtctggtggcaatgaatcgtattatgggtattttaacaggagatcatacacttcactttatatgggaactggaactgtgggtgggattacaagtgctat

SEQ ID NO: 188449 - DNA, 262 bp, Glycine max
gagagattgggatggcttcgacgaagaagatcacactgaagagttcggacggcgaggccttcgaggtggaggaggcggtggcggtggagtcccagacgatcaagcacatgatcgaggacaactgcgccgacagcggaattcctctccccaatgttaccagcaagattctggccaaggttatcgagtattgcaagaagcacgttgaggccaattgcgctgatgagaagcccagtgaggatgaactcaaggcttgggacgctga

SEQ ID NO: 188450 - DNA, 263 bp, Glycine max
ggaaaaagaaaaatacaatgggttccgataataccaacttggagttcttgaaggagatcggtttgggctcctccaacattggttcttacattaatggccaatggaaagccactggttcttctgtcacttctgttaatccttctaacaatcagagcatagctcaagtgactgaagcgactttgcaagattattaggagggattgcaagcttgcagtgaagcagccaagacatggatgactattccggcaccgaagagaggtgag

SEQ ID NO: 188451 - DNA, 264 bp, Glycine max
gggacatcaggaactctatccactttatttgatgttggaggggtgcacggtggaattctagctggccacatttctgatcacttagaggctagagccattactgcagcaagtttcatgtactgtgcaatccccgctctcttcttctatcgaagttatgggcacgtttctttgattgtaaatggagcattgatgtttgtcactggcatgtttgtgaacggaccttatgctcttataactactgcagtttcagctgacctgggaaca

SEQ ID NO: 188452 - DNA, 277 bp, Glycine max
ttcggctcgagcgatgttcaaaatgccataaccctttgcgagtgaagccccatacgacactacacacttcgcaatggcacgttgctgagcaaatccctgacatcgccggcgagcgacagtccgtccaagacgttcgcacccaaaacgttgtggcatgccaagccgtggccaacatcgtcataagctctttatgccccgttggcctcgacaagatgctcgtcgacgacattggcgacgtcactatcaccaacgtcggtgccacgattctcaagatgct

SEQ ID NO: 188453 - DNA, 267 bp, Glycine max
ccaagttcagcttccaatacaaggggacaatggggttgctcaatcgcctcctgttgttcttcctccaagaaattatacaagtaatggttttcttagagtttcctgcaatgggggcttgaatcaaatgcgtgctgcgatttgtgatatggtaacagttgctcggtttttgaatctcacattggttgttccagagcttgataagacatcattctgggcagaccctagcaattttgaggacatttttgatgtgaagcatttcattgattc

SEQ ID NO: 188454 - DNA, 270 bp, Glycine max
ccgacctactgctgaagaggctttggctgatccttacttcaagggactggcaaaagttgagagggaaccatcctgccaacctatcacgaaaatggaatttgaatttgaaagacgaagagtcacaaaggaagaaattcgagagctgattttccgtgagattctagagtatcatcctcaactattgaaagactacatgaatggaacagagagaactaattttctttatccaagtgctgttgatcaattccgaaagcagtttgctcatcttga

SEQ ID NO: 188455 - DNA, 280 bp, Glycine max
gctgtgacttgttttgagttcaatcaaatcgcattggtatctgaaatcaggaaagatggttagcgtagctgagatcaggcaggcacaaagggcagaaggcccagcaaccatccttgccattggaactgcaaacccaccaaaccgtgttgatcagagcacctatcctgattactacttcagaatcaccaacagtgaccacatgaccgagctcaaagagaaatttcagcgcatgtgtgacaagtctatgatcaagacgagatatatgtacctaaacgaagag

SEQ ID NO: 188456 - DNA, 281 bp, Glycine max
tagttactcctttttcgttttgagtttcaatcaagccatcatcatgtctaccgcatcgcaacccaaggccaagaaaacggcgtcgtccaagaagcccctctcccaccctcccttcgccgtgatgatagcagaggcgattgcgagtctgaaagagagaaccggttcgagccaatacgcgataaccaaatacatcgaagggaagcacaaggagttgcctgcaacctacaagaagcttgtcctcgttcatctcaagaaatctgttgctgctggcaagcttgtta

SEQ ID NO: 188457 - DNA, 279 bp, Glycine max
  unsure (1)..(279): unsure at all n locations
taggctccatctccctccactcaacataaaatataaaaaaaancttatgcantnaanacnatcgtctgtgtaaatgtaattgacaatagctacattagtgctaatgaccccttgaactgaggtgcggcggcggaggctatggctgggagccacctcgacgaggtcaagcgcatgctagaggagtaccggaggcccgtcgtcaagctcggtggagagaccctgaccatctcgcaggtcgcggcgatcgcggtccacgaccacggggtgaatgtggatctg

SEQ ID NO: 188458 - DNA, 273 bp, Glycine max
ctcgagactgattattgtgcttattattattgttgagaaagaaacgaatggcgaagttaatcaaattctctgagttgaacacaggggccaagattccttctgttgggttaggcacttggcaagctgagcctggtgttgtagccaaagctgtcaccacagccattctggttggataatggcgttttagatgtagtcaagcgtataacaatctagcagagattggttcagctcttaagaagctttttgatgcttgtgtggtgaagcgtgaggact

SEQ ID NO: 188459 - DNA, 274 bp, Glycine max
acaagacatgtctgttgttgagtcaggtgaacacaacaacatcagaggagtacctactcatggtggacgctatgttcagtacaatatctatggcaatctctttgaagtttccagaaagtatgtccctcctattcgccctgtgggtagaggcgcttatggtattgtttgcgctgctgtaaatgcagagacaggtgaggaagttgccattaagaagattggcaatgcatttgataacagaatagatgccaaaaggaccttacgagaaattaaactt

SEQ ID NO: 188460 - DNA, 273 bp, Glycine max
cgagcatcatggcctcaagagcagtgttattgttggctatgtgtgtgcttccggcgatggttgtggccattcgcccagcaaagaaccctttttgcgtgaagggtcgtgtctactgtgacccttgccgtgctggttttgagacctcagctaccacctacattgctggtgctgagattatgttgcaatgcaagagcagggttagcaacgaggttgtgtacacgaagaaggggtacaccgactcaaccggagcatacacaatgtacgtggatgcgg

SEQ ID NO: 188461 - DNA, 278 bp, Glycine max
gggatcgatgacatatattgtctcttcttggggagcttgaacaacttgtccctactcaacaagcaatatggattgtcaaagagtactgatgaggccatgtttgttattgaagcttacaagacactccttgacaacttgatctgcagggtatggacccccagatattcgtgaaaaccctaaccgggaagaccatcacccttgaggtggagtcaagcgacaccattgacaatgtcaaagccaagattcaggacaaagaagggattcctccggatcagcag

SEQ ID NO: 188462 - DNA, 280 bp, Glycine max
agcagagtgctttcgccgttggtgttctttccgatctctacgcatttcaccgctccaccggaaattccctctagcccctaccgtactccagcttggtagtttccaccgcctgtccagggttgagccctgggatttgacggcgaacttaaaaagccacctacagacgctttacgcccaatcattccggataacgcttgcatcctctgtcttaccgcggctgctggcacagagttagccgatgcttattccccggataccgtcattgcttcttctccgggaa

SEQ ID NO: 188463 - DNA, 279 bp, Glycine max
cacaaaagcccaaccctctctctcgctgttggtctctcctatttggcattcgcagatcgattacgaagtaatttcactgaatcttattgaagatgtttctcacaaggactgagtatgaccgaggtgtcaacaccttttctcctgaaggccgtttatttcaggttgaatatgcaatcgaagccatcaagctgggatcaactgcaattgggttgaagacgaaagagggtgttgtccttgcagttgaaaagcgcatcacttcgccgcttctggagccaagta

SEQ ID NO: 188464 - DNA, 277 bp, Glycine max
gacacatcactactgtttactgtgaggaggagtgaggcagagctgatagctccggcgaagccacccctcgtgaagtgaagctactctcagacatagatgaccaagatgggttacgtttccaaattccggtgatacagttctatcgccacgacccatcaatggctgggaaagaccctgtcgatgtgataagaaaggctgtggccaaaacgcttgtgttttactatccttttgcaggtaggcttagggaaggacttggtcggaaactgatggtggattg

SEQ ID NO: 188465 - DNA, 275 bp, Glycine max
  unsure (1)..(275): unsure at all n locations
ctcgagacttgccatcaagcgccttcaattctcccttctggactactaattccggtgctcacatctgtgcaaaanaactcatcatgacactantngatctagaggtccaattctgctggaagattaccatctggtggagaaacttgcaaactttgacagggaacggatccccgaacgtgttgtccatgctcgtgggtttagcgcaaagggtttctttgaagtcacgcatgacatttctcacctcacatgtgccgagttcctccgagcccctggag

SEQ ID NO: 188466 - DNA, 273 bp, Glycine max
atcaaccacaaacaatcccatctcatgaccagattttctggttcggggatttgaattatcgtatcaatatgttggatgctgaggttagaaaattggttgctctaaagaagtgggatgagttgaagaattatgatcagctaagcaaagaattgcgtatggggcatgtatttgatggatggaaagaggggttgataaacttcccacccacttacaagtatgaaattaactctgatagatatgttggtgagaggccaaaagaaggggaaaaaagaa

SEQ ID NO: 188467 - DNA, 275 bp, Glycine max
aaaattttctggcgaagatgtgtctgcacagaaccaagtgaaggcatctgttcaacgaaaaatacgacaaagtattgctgaagagtatccgggccttgaacctgttttggatgatatacttcccaagaagtcccctcttatagttgctaaatgtcagaaccatctcaatctggttcttgtgaacaacgtgcctttgtttttcagtgtccgtgatggaccatacatgcccaccttgcgacttctccatcaatatccagatataatgaaaaagttac

SEQ ID NO: 188468 - DNA, 276 bp, Glycine max
aaaatggggtcgctgaaactgcagaagcggctggccgcaagcgtatcaagtgtggcagaggaaaggtgtggcttgaccccaatgaagtcaacgaaatctccatggccaattctcggcaaaacatcaggtatttggttaaggatgggtttatcatcaggaagccaaccaagattcactcacgctcgcgtgctcgtaggatgaaggaggcaaagaagaagggccggcactctggttattgtaagagaaagggtacaagggaggcgaggcttcccacca

SEQ ID NO: 188469 - DNA, 236 bp, Glycine max
  unsure (1)..(236): unsure at all n locations
atcacgaaactcaagacgatggagaaagcgatcaacagacagaagattttgcttcatcatctcaacccttcatcatccacacagcataaaacacataaannctccatgcttcagctntgtggcgggggatagcgctgcgtatcagaggacatcgacattcggggacgatgttgtgatcgtggctgcttatcggactgctcattgcaaagctaaacgaggtggtttcaaagacactc

SEQ ID NO: 188470 - DNA, 276 bp, Glycine max
  unsure (1)..(276): unsure at all n locations
gaatcccctctcatatggattacatcaagcttcgctacattctctctcatttcggcgatattcaaagaatanatctcgctcctcaagattctactgtacaagtgctatctaagaggtcacgtggatcccgagaccaagcatattcagaaggatgggtcgaattcggtaataaaagtgttgctaagagggttgccaatatgttaaatggtgaacaaatagggggtaagaagaggtcatcattctactatgacctttggaatattaagtacttaagta

SEQ ID NO: 188471 - DNA, 278 bp, Glycine max
ggaggtccccatatccctcttaagactggaagaagggatggtagaaggagcagagctgatgtggttgagtcattcctcccagaccacaatgagtccatttctgcagttcttgacaagtttggtgccatgggaattgacacccctggcgtcgttgcactgcttggagcacacagtgttggtcgaacccattgtgtgaagttggtgcaccgtttgtacccagagattgatccagctctgaaccctgaccacgtccctcacattctgaagaagtgccctga

SEQ ID NO: 188472 - DNA, 266 bp, Glycine max
cgtggaccctacaacagcggttgaaacctgaggggaagggtaaatggtgaaccctaatttggactttttgccgtaatcgacggagatacgctctaacaagagagatccgagaccggaaccggtgccaccgccgacagcgttgaagacgagctagccctggagaccagtgcagttgtcttcgagctttcggacgcgatccaagcacagatctacgatctctttgccaacggcgtagtggcctctggcaaagttgttggcggcatctt

SEQ ID NO: 188473 - DNA, 273 bp, Glycine max
gcttgctttgaaggtcaatagtgcagctttcaatggggatatgtatcagctaaaaggtttaattcgagcaggagctgatcccaacaaggcagattatgatggaaggtcacctttgcatcttgcagcatctagaggatatgaagatatcacaattttccttattcaagaacgtgtagatgtcaatattatagataacttcgggaacacacccttacttgaagcagttaagaatggacatgatcgggttgcttctttacttgttaaagaaggggc

SEQ ID NO: 188474 - DNA, 278 bp, Glycine max
gcgcagagcgtgatccattgacgaagatggtgcagcgtctcacctaccgcaagaggcacagctatgccaccaaatccaaccaacacagggtcgtcaaaacccctggtgggaagctcgtttatcagaccaccaagaagagggccagcgggcccaagtgccccgtcactggcaagaggattcaggggattccacacttgaggcctgcagagtacaagagatcaaggttacccagaaaccgtaggactgtcaaccgtgcatatggcggagttttgtctgga

SEQ ID NO: 188475 - DNA, 258 bp, Glycine max
ctgagaaatgtcggattcttctcgggagtagaatgtttacatggcgatattggcggactggccgagcgttacgaggagatggttttgtgcatggagatggtagcaaagactgtggaggttgatgagttgacggttgaggagagaaatcttctctctgtggcttactattacgtgattggttctaggtgtgctgtgtggaggtatatatcttcctatgatcagatggattatagcaggggcaatgtggaccatgttgtc

SEQ ID NO: 188476 - DNA, 277 bp, Glycine max
ctcgagccgattccccgtcacttgtgccaatggggaatgggcaatagttcaaggactttccactgatgagttctcaaggaagaagttggacttgactgcagaagagcattctgaggagaaggcattggcttactcatgcctaaattagacaccattgctttttgtctactgtccttgttagtaggttcccatgttttgcctatagaagtgtagcttcaattttgaataatgctccttctaagatacaaaggaactatcactggagaagagtctgttt

SEQ ID NO: 188477 - DNA, 272 bp, Glycine max
ggacattttcagacatgagggtacacttatattatacagaggcagaaattataatccgaaaaagaggcctgtaattcctgtcatgttgtggaagccccatgaacctgtatatcccagactgattaagacaacaattgatggcttaagtattaaggaaacaaaagaaatgcggaagagaggactatctgttcctgctttacacaaaacttgccaaaaatggttattatgcttttttggtacccatggtcagagatgatttcctctcctgcgaa

SEQ ID NO: 188478 - DNA, 270 bp, Glycine max
  unsure (1)..(270): unsure at all n locations
attactcttgatggctctcatgtcaattacagacatttggctatactttgtactaccatgacttatcgagggcatntgatggcaattacacgtcatggtatcaaccgaaatgatactgggccaatgatgagatgctcatttgaagaaacagttgatattctgcttgatgccgcagtatatgctgagactgattacttgaggggagtcactgaaaacataatgttaggtcaacttgcccccattggcactggcgaatgtgccttgtatctt

SEQ ID NO: 188479 - DNA, 272 bp, Glycine max
gaaatcctccatgttcaagccggtcaatgtggaaaccaaattggaggcaagttctgggaggtgatgtgtgatgcacatgggattgatgccactggcaattacgtaggtaactttcatcttcaacttgacagggttaacgtgtactacaatgaagcaagtgggggaccgtatgttcctcgagctgtgcttatggaccttgaaccagggaccatggatagcttgcgttctggtccttttggaaaaatattcagacccgataacttcgtgttcgg

SEQ ID NO: 188480 - DNA, 277 bp, Glycine max
tctgctcgtagggtttctccacctagagggaaatggctcccaaaccgcctagtacgggtctgtttgttggactgaacaagggtcacgtcgtcaccaagaaggaattgcctccacgcccctcagatcgtaaggggaaaacaagcaagagggtgcactttgtgaggaacctcataagagaggtagccggttttgcaccctatgaaaagcgtataactgagttgctgaaggttgggaaggataagagggcactgaaggttgcaaagagaaagctcggaac

SEQ ID NO: 188481 - DNA, 271 bp, Glycine max
ggggaagggaacagggagttttggtaagagaaggaacgagactcacactctctgtgtgaggtgtggccgccgcagcttccatctccagaagagtcgttgcgccgcttgtgctttccccgccgcacgcactaggaaatataactggagcgtcaaggcaatccgcagaaagaccaccggaactggcaggatgaggtacttgcgtaacgtgcctcgccgattcaagagtggcttcagagaaggtaccgaagctgcacctaggaagaagggagca

SEQ ID NO: 188482 - DNA, 267 bp, Glycine max
aacggcttgcagctgaattgggagataatgttccatctttgcctgcaggaaaagtgccttctctcgtgatgcctccatcacctgtcatgtgtggaagtgattggcctcttctcagggtcatgcgaggcatgtttgatggggtgcttgacaatacaggtcggggagttgctgatgaagaagagtatgaggctgctgatggtgattggggtgaggagcttgacatagttgatgcagatggcttacaaaatggagatgttactgcgattt

SEQ ID NO: 188483 - DNA, 276 bp, Glycine max
tcctcgccgctcgatgggaattgcgcttcaaggcgtctcgtagggctaatccgcctcacgagggtcaccaacggcacgtgcctttggggggccgaggccccctactgctggtcggcaaacggacggcgggcgcacgcgtcgcttctagcccggattctgacttagaggcgttcagtcataatccaacgcacggtagcttcgcgccactggcttttcaaccaagcgcgatgaccaattgtgcgaatcaacggttcctctcgtactaggttgaattac

SEQ ID NO: 188484 - DNA, 276 bp, Glycine max
gtgtgagtgagacggagagtgctaagcaatcgtcttctcttctcggagcttggctttgcttatcgattctctctcctctcgtttctctaattccaaggtttgtaaaagatggcagatgccgaggatattcaaccccttgtttgcgacaatggaactggaatggtcaaggcaggatttgctggtgacgatgctcctagggctgtctttcccagtattgttggccgacctcgacatactggtgttatggttgggatgggtcaaaaggatgcctatgtt

SEQ ID NO: 188485 - DNA, 276 bp, Glycine max
cttaatctttgtgaaaaataatgttcatcgagaattttaaggttgagtgtcctaatgtgaactacaccgagactgagattcagtccgtgtacaactacgaaaccaccgaacttgttcacgagaacaggaatggcacctatcagtggattgtcaaacccaaatctgtcaaatacgaatttaaaaccaacatccatgttcctaaattaggggtaatgcttgtgggttggggtggaaacaacggctcaaccctcaccggtggtgttattgctaaccgag

SEQ ID NO: 188486 - DNA, 286 bp, Glycine max
tcggaatccgccgaaccgagcggttagaactgtgctagggctttacgaaaccaccgaagttgcagaaagaagaagacaaatggtggctgacaggagcaagaagccgaaggtctccgacaagggcgaaaacctcgatgaaatcgacggagaactcgtcctctccatcgagaagttgcaggagatccaagacgagcttgaaaagatcaacgaggaagccagtgacaaagttctggaaatagagcagaagtacaatgagatacggaagcccgtttatgataagcgcaat

SEQ ID NO: 188487 - DNA, 270 bp, Glycine max
gccgcagcagcctcaggaggagaataaggatgtctcacaggaagttcgagcacccaaggcacgggtcactgggatttctccccaggaagcgtgctgctcgtcacaggggaaaagtgaaggcattccccaaggatgacccatccaaggcacccaagctcactgcattcttgggttacaaggctggtatgactcacattgttagagaggtcgagaagccaggatcaaagcttcacaagaaggaaacatgtgagcctgttacaattattgaga

SEQ ID NO: 188488 - DNA, 270 bp, Glycine max
ccatcgagccgaatcggctcgagctcttccaattcattgcttccaagcctccctctcacaacctcgcttgggacgtcggcactacgagcggccaagctgccaaatctttagctgcaatatacaagaatgtgatagccacagatgctagtgacaaacaacttgaatttgcagccaagctcccaaatgtgagataccaacacaccccttcaaccatgtcgacggccgagcttgaacaaatggtggcatctaagggaaccatagaccttgtga

SEQ ID NO: 188489 - DNA, 280 bp, Glycine max
gttttgaggtttgaatctatagaatagaatcaaaccaaattgaaagaagatcgatcgatcgatcgatggctctggtcggagttgaagtgaagcatgcggcggacggcgcaccggaggagaattgctccgccaagcccaccaagcagggcgagggcctccgccactactattctcacaacatccacgagcatcagctccttctccgtcaaaagacgcataacctcaaccgtcttgaggctcagagaaacgagctcaattccagggtgaggatgctgcgcga

SEQ ID NO: 188490 - DNA, 268 bp, Glycine max
cttctctctccccgcccaaaccctaactccctaccctattccgcattctctcatccatcatgaaagacggaaagtccaagaccgaatctaagagagccgatgccaaacttgctgtgaataagaagggcgccgccaccaagactaggaaacccgccggaaaggggaaggcagcgaaagatcctaacaagccaaagaggcctccaagtgctttcttcgttttcatggaggaattcaggaaggtgttcaacaaggaacatcccgacaacaa

SEQ ID NO: 188491 - DNA, 264 bp, Glycine max
gttattgtagacaataatcctttcagctttgtattgcaaccggtgaatggaattccgtgcattccattttctgctgggcaaccacatgacacccagcttctagatgtcattcttccacttctcaagcaactttctgagcagaatgatgtaagacctttcctctatgaaaagttccacatgcctgattggttccagaaacaagggattccagcttccagttggactttgtaggattaaactagtttgccattaagctctctgttt

SEQ ID NO: 188492 - DNA, 262 bp, Glycine max
cccattctccagaaactctacaccgaaatcgagaccgataagatcgaaatcgacggccacctcatgaacgacatcattctagggttctccaaagccggtgatcctacacgcgccatgcggtttctagcgatggctcagagcaacggactgaaccctaaaccctcgacgcttgtcgcggttatcttggcgcttgggaattcgggaaggacgcacgaggctgaagcgctgtttgaggagattagcgagaacgggtcggaaccga

SEQ ID NO: 188493 - DNA, 259 bp, Glycine max
gccgctccttagtcaatggggcagcaggttcggcatctactaaaaaaagagagaatccacttgagataaccacgcctctgctaggcagcgtgtggaatggccaagagcggacctttttggatatataatcaaaagagtggagttacgggaacagccgtctgatggaaaactactttcacgttcggttcagagagcactttatttttcgtcgagaattcttcgttccctttcgtgtgaattccccagcggcgaattcaaa

SEQ ID NO: 188494 - DNA, 262 bp, Glycine max
atggcttgcaggcaattgtgggcttcaagagctgcctcttacctgaggatctctgtgtttcacagaggcttttctaatgttgttaaagatttgaagtatgctgattctcatgagtgggtgaaagttgatgaaaattctgcaaccgtcggcataactgatcatgcccaagatcatttaggtgatgccgtatatgttgaattgccagaagtgggagcagctgtaacacaaggaggtagttttggtgcagttgaaagtgtgaagg

SEQ ID NO: 188495 - DNA, 267 bp, Glycine max
cggctcgagggaaattctggttatggtcgtggtgattactttctagttggtcatgacttcccaagctacatggatactcaagcaaaagttgatgaagtgtatcgtgataggaaaaaatggctaaaaatgtccatcctaagcactgctgggagtggaaagttcagcagtgaccgaacaattgctcaatatgccaaggaaatttggaacatagaagagtgccgcgtgccataatttctgctggatgtgtctcttgcactcaagttactg

SEQ ID NO: 188496 - DNA, 276 bp, Glycine max
acaggctgtggtattgacccaagtaaatgggaatctgtgtttgaaagctttgagcaagctgatccatcaactactagactgcatggaggcactggtcttggtctttgcatcgtccgaaccttggttaataagatgggtggagaaatcaaggttgtcaaaaaggagggctcaggaacactgatgagattatgcttgcgtctcagtgcacctgtggatgccacagaacaacattgtcaagtagattttgctaacaagggcttggtggtgcttcttgca

SEQ ID NO: 188497 - DNA, 274 bp, Glycine max
gttaggtcactcttccagatggcgcgtacaaaggaaactgctcgcaagtccaccggcggcaaggctccccggaagcagctggcgacgaaggccgctcggaagtctgctccggcgaccggcggagtgaagaagccgcacaggttcaggcctggaacagtggcccagggtgagatcagaaagtaccagaagagcacggagcttctgatccgaaagcttccgtttcagcgtttggatcgtgaaatcgctcaggatttcaaacggatctgaggtttca

SEQ ID NO: 188498 - DNA, 265 bp, Glycine max
  unsure (1)..(265): unsure at all n locations
agagtgtctaatcgaagatagaagaagagatggctaaatctccagaaactgaacttcccgtcgaagctttcggttgggctgcttcagacacttctggcacccttgcaccttttcatttctccagaagagaaaatggcgttgatgacgtcactctcaagattctcttctgcggggtttgccactcggatctccacactctctacgagtggannggtttcaccacttaccctgtcgttcctgggcatgaaattgttggtgttgtgac

SEQ ID NO: 188499 - DNA, 263 bp, Glycine max
gcctactgcagctgccattgcatatggtcttgataagaaggccacgagtgttggtgagaagaatgtgctgatttttgaccttggtggtgggacatttgatgtgactttactcaccattgaggagggtatctttgaggtgaaagccactgctggtgacacccatcttggaggtgaagattttgataacaggatggtgaaccatttgttcaagagttcaagagaaagaacaagaaggacattagtggaaaccccagagcacttag

SEQ ID NO: 188500 - DNA, 263 bp, Glycine max
ggaggagcggaagaagaagaagccctttgggttctctcgctccaacaacaaggctgcttctaagcctctctctcgtggagcaacaactgtgaaatctgtggaatcaaaggggcaagctgagaagtgtgccaagagaaagaggaagaaccagtatcgcggaatccgccagcgtccatggggaaagtgggctgctgagattcgcgacccaagaaagggggttcgtgtttggcttgtcatttcagcactgctgaagaagctgcaag

SEQ ID NO: 188501 - DNA, 255 bp, Glycine max
cttgaattcaatagcttaagttcattccgtgtgttgtgctgtctacctcagaaccacacatggcgaaggcatgaggcaacaccgactgcgctgacaagactagctgcaccaagggaaacagctatggtgttattgtagagactgagaagagttacatcgagactgttgtcatggatgttccagcagctgagcatgatgggaagtgcaagtgtcgcactaactgcacttgcacggactgcacctgtggccaataag

SEQ ID NO: 188502 - DNA, 265 bp, Glycine max
ctcgagccgattcggctcgaggaggaccccaaccagaggtcaaggcgaaaaaagaatgctgccagtggagagaattcagaatctggagctgcaggccaaggagcaggtgaagggaaaaaggctctgtaccactgcaattattgtaataaagatataacaggaaaaatccgtattaagtgtgccatgtgcccagattttgacttgtgtatagagtgcttttctgttggagctgaggtgacacctcataaaagcagccacccttaca

SEQ ID NO: 188503 - DNA, 262 bp, Glycine max
cgtctccactctcggcttcttcgtcgttgcgctttgtcccaaaaccaattgcatcactctcgtccgttaccgccgctgccctagaccaccgcaagcgacgtcgcacaccgcctgcatccgttacggcggaaatgagtcgaggaagtggaggtggatacgatcgtcacatcactatagcgtcccctgaaggacgtctctttcaagtggagtatgctttcaaggctgtgaaagctgcaggaatcacctcgattggtgtccgagg

SEQ ID NO: 188504 - DNA, 262 bp, Glycine max
cggctcgagctgaccgattcggctcgaggggggagatctgattcgggagggtcgttgagggactgtcacgtggttttcgcagtggtctcagcgttacggcgtgtgtggccctgctctttactggcgattcaagaacgccatcactctccgcaacaacaacaacaaactctcttgcccttcctgcctctgtgactgccctccccctctctcgctcttccaacttgctcctgggctggcgaatctctctgtctcagattgtgga

SEQ ID NO: 188505 - DNA, 257 bp, Glycine max
agggtacctacagagcctcaagtcggtcccttaacggaatgactgctcttgtgaccggtggaactcgtggaattgtgcatgccatagtggaggacttatgtgggtttggtgccactgtccacacttgttccagaaaccaagctgaattggataagtgtttgacagaatggcgtacaaaggttttttggtttctgggtctgtgtgtcatgtctcatctcaaccccacagagagaagttcattcaggaagtcacttcca

SEQ ID NO: 188506 - DNA, 259 bp, Glycine max
attttctagggtttatacaattttcgatggcttcttcacatgttgagtaccgttgctttgtcggtgggctcgcttgggccactgacgaccaagctctcgagagagccttctctcagtacggcgaaatcgttgaaacgaagattatcaacgatcgtgagactggaagatccaggggttttggatttgtgaccttcgcctcggagcagtccatgaaagacgccatcgaagggatgaacggccaaaaccttgacggccgtaa

SEQ ID NO: 188507 - DNA, 249 bp, Glycine max
  unsure (1)..(249): unsure at all n locations
ggaagacttggcaacaacttaccaacccctcaagaagttgtggccctctacaatcaagccaacattcgcagacaacgnatctacngtccaagcccagaagtcctcggagcactaagattttccaacattgagcttttgctagacattcccgccgacaaacgcacacacctagcatctatccaagacaatgcaaacaaatgggtgcaagacaacatcgaaaactatgccaacaatgtcagattcagatac

SEQ ID NO: 188508 - DNA, 255 bp, Glycine max
gtccttccgagatgagagtggtcatcaatcgagaaggaattgacttgtcagatgcgcaattcatgcaggctatgcaggcgtgggattgggttgagaatatgcaatgagtattggaataccagacaagatattctggatttcaaagcgtggcaaatattaccttgcacttacctgagaatgttggtggtgacactactaaaatacactatattggctttaaaggcgaaccactcagttgaaaagggatgttgttgc

SEQ ID NO: 188509 - DNA, 173 bp, Glycine max
agaatatgaagttgtttgtcttctttgttgctgcagtagttttggttccatggccatgccatggcgcaggctaccaaaggttccctctccgaatgaaaactggctatggtgagcgttcttcggaggtaaaatgcgcaagttttaggcttgctgtggaagcacacaacatccga

SEQ ID NO: 188510 - DNA, 265 bp, Glycine max
gaaagatagtgagtgaagtaactgaagagaagaaaaaatgccgtgcctcaacctcagcaccaacgtgtccctcgaaggcgtcgacacctcttccatcctcgccgaagccacctcctccgtcgccagcataatcggcaaacccgaatcctatgtgatgattgtactgaaaggatcagtacccatagcttttggtgggaatgagcagccagcagcttatggagaattggtttccattggtggtcttaaccctagtgtaaacaaggaa

SEQ ID NO: 188511 - DNA, 264 bp, Glycine max
aaacttgatcagtgttggacgcgcttcctcctcctcctccgccgccgccaacgccatgcgtgacgttcagatccacaagaccaaactctgcatcatcggaagcggtccctccgcccacacagccgccgtctacgccgctcgagccgagctgaagccgatcctcttcgagggctggatggccaacgacatcgcccccggcggccagctcaccaccaccaccgacgtcgagaacttccccgggttccccgacggcatcctcggcgg

SEQ ID NO: 188512 - DNA, 262 bp, Glycine max
atttatgatacccctgctgctgtgcctcctactaggcttttcaaagccatgacgttagattaccataacctcttcccaaagcttgtggatagcatccacagcattgttttcacacaaggaaatggtggtccgggcaccatcaagaaaatcagcaccattgaaggtggcaaaaccaagtatgtgctgcacagagttgatgcaattgatgaggctaactttgtatataacttcagcataattgagggcactgccttggttgaca

SEQ ID NO: 188513 - DNA, 259 bp, Glycine max
gccgcttcagacggaggcgctggttggtgatgacgggaagcttcatgtgacggtgaggaagtcggcgagttctcggtcggagattttctctaggcgctctcatgcacccaactcggtgtcgttgactccgaggccttcgaatttgaccaatgcggagatttactcgctgcagagctcgaggaacccgactccgagaggctcgagttttaaccacacggatttttactccatggtgaatggtaagaacaacaacaacaac

SEQ ID NO: 188514 - DNA, 263 bp, Glycine max
ctcgagccggatgatggggccaacaatggtggcagaagcaagaacttgtgagtctcagagccaccgtttcaaggggccatgtttgagcgacaccaactgtggctctgtttgccgaaccgaacgtttcactggaggacactgccgtggcttccgtcgcagatgcttctgcaccaaacattgttacttttaaaaaattaattaagagtgctttgatagaagatgatagatctatcatctttctactcgtgttgttaattaaccac

SEQ ID NO: 188515 - DNA, 265 bp, Glycine max
cggatgcataccaaccagaggaaaaccattcaagccctgagttgctacttgcacaagttatggcagcttgcaaaaagtatgaggtgaaggtttcaggtcaaaattcttctgagtctggtgttccaggtggttttgaacaaataaagaagaatctatctggagataatgtattggatttgttcacatatcatagaatgggagcatctttcttttctccagagcattttcctttgttcaccgagtttgtccggagccttaagcaacc

SEQ ID NO: 188516 - DNA, 263 bp, Glycine max
gccctagcacccttcagcccactattgtttctgcctcgtgggaccgcaccgttaaggtttggaacctgtcaaactgcaagttgaggaacacgcttgctggacacaatggttatgtgaacactgttgctgtttcccctgatggctctctgtgtgccagtggtggcaaagatggggttattcttctgtgggatttggctgagggtaagcgtctttactccctcgatgctggttctatcatacatgcgctctgcttcagccccaac

SEQ ID NO: 188517 - DNA, 265 bp, Glycine max
cactcttctccgccacttctcaatctattgaatcaacaatcatgtcggacgaagagcaccatttcgagtccaaggccgacgccggagcctccaaaacctaccctcagcaagccggttccatccgcaagaacggctacatcgtcatcaaaggccgcccctgcaaggttgtggaagtttcgacttccaaaactggaaatcacggtcacgctaagtgtcactttgttggaattgatattttcactgccaagaaacttgaggatattgt

SEQ ID NO: 188518 - DNA, 259 bp, Glycine max
gcaagttcaaggcttgctgtggaagcacacaacatccgagcgggtaaaaccattcctgaagagtgcgttgaaccaacaaaggactacattaatggcgaacaatttagatcagactctaaaacagctaaccaacaagctttcttttatgctagtgaacgcgaagtccatcacaacgacatatctatattcggcatagataacaccgtactctctaatatcccatactagggagaacatggatatggggtggaggaattta

SEQ ID NO: 188519 - DNA, 264 bp, Glycine max
gtggatatctagtgcttctgctgcaagacctcgctgaaaattagggtttcgattcggaggtagacgaagatgttcggaagggctccgaagaaaagcgacagcaccaggtactacgaaatcctcggcgtttccaagaacgcttcgccggatgacttaaagaaggcttacaagaaagccgccattaagaaccatcctgactaaggcggggatcccgagaagtttaaagagcttgctcaagcctatgaggttctgagtgaccctgag

SEQ ID NO: 188520 - DNA, 271 bp, Glycine max
tactcggccgctcgagccgctcgagccgcaatgactggacaattgaatgctaagagtgatgtatacaattttggcgttgtccttctggaacttctgactggaaggaaacccgttgatcatacactaccacgtggacaacagagtctggttacttgggctacaccaaaactcagtgaggataaagtcaggcagtgtgttgatacaagactaggaggagaatacccacccaaagctgttgctaagatggccgctgttgctgcacgtgtgtgca

SEQ ID NO: 188521 - DNA, 261 bp, Glycine max
acacaatcatggaagttgatatcaggtttctgaacactggcctcctccttgtggccacaatctttgtggtcaagctcatctcagccttcatagtgcccaaatccagaaagagggtacccccaattgtgaaggggtggcccttaattggaggactcatccgtttcctcaaaggtccaatctttatgctccgtgacgagtaccctaagcttggaagtgtcttcactctcaaactcttccacaagaacatcgacttctcattgg

SEQ ID NO: 188522 - DNA, 253 bp, Glycine max
ctctaagtctaaggggtgccctgagatcactttgagcaatggtgaaggctgtggcagttcttggcagcagcgagggtgtcactggaactattttcttcactcaggagggaaatggtccaaccactgtaactggatctcttgctggtcttaagcctggtctccatggcttccatgtccatgccttaggggacactaccaatggttgcctgtcaactggagcgcatttcaatcctaataacaacgagcacgtgcc

SEQ ID NO: 188523 - DNA, 258 bp, Glycine max
attgcttgtgtcttgtgtgatgatctgatgatgcagcacctggaattagtgcgtccccttcggaatcgaatatgcggtatttcaatgtgatgatccttggcccaactcagtcgccttatgaagggggagttttcaagttggaatgatttttgccagaagaatatccaatggctgctccaaaggttaggtttctgacaaaaatatatcatccaaacattgataagcttggcaggatatgtcttgacattctgaaagata

SEQ ID NO: 188524 - DNA, 266 bp, Glycine max
gaagagatggccaccgttccagggcagctcgtgtgggagatcgtcaagaaaaacaattccttcttggtcaagcagtttggaaggggcacccagagcgtcgaattcagcagagagagcaacaatctctacaacctcaattcgttcaagtactctggtttggcaaacaagaaaactgttactgttcagcctgagggcaaagatcaggctgtgttgttggctacaaccaagacaaagaagcaaaacaagcccgctgcattctccacaaa

SEQ ID NO: 188525 - DNA, 242 bp, Glycine max
acactgtgcaatgcgagtagacgagattcaatctgaatatgaatggaagctatcataaagcaagcctacaagcttcgataacagatcgctcgtcaacaacaagctgtgcatgaacagagtagggctggaggatatggagaatcagataatatgggatatgatgatgtagagcttcaacaacatcagaaacttgagaagctttgagtatcaacacgtgctgtgaaagcattatcaaagggata

SEQ ID NO: 188526 - DNA, 260 bp, Glycine max
  unsure (1)..(260): unsure at all n locations
gtcctccttagacctggacggattgaccggaagattgaatttccaaaccctaatgaagagtctacggctggatattttgaaaatccattcaagaagantgnatttaatgcgtggcattgatctgaagangattgccganangatgaatggagcatctggtgctgaacttaaggctgtttgcaccgangctggaatgtttgcattnagggtncggngggtncccgtncctcaggaggnttttganatgccngtggccaagt

SEQ ID NO: 188527 - DNA, 257 bp, Glycine max
gcagccatggggcgaagaccgcgaggtgttataggcaaattaagaacaaaccataccccaattcacggttatgccgtggtgttcctgatcccaagatcaggatttacgatgttggtatgtggaagaagggtgttgatgaatttcctttctgtgtccatctggttagttgggagaagggtaacgtttctagtgaggccctggaagctgctcgtattgcttgcaacaagtacagggccaaatttgctggaaggatgctt

SEQ ID NO: 188528 - DNA, 218 bp, Glycine max
atcggtgttcacttgatctcatcataatcgtcagcgtcgattgaaaaagatgccgatcagaaacatcgccgtcggaaggcctgaagaggcgactcaccccgacacgttgaaggcggctttggctgagttcatctcaacctgcatctacgagttcgccggctcaggccccggcatcgactacaacaagctcaccgccaacggcgctgcaacccatgccg

SEQ ID NO: 188529 - DNA, 262 bp, Glycine max
  unsure (1)..(262): unsure at all n locations
ggaagcttctttttctgatcttttacgtgtcaatataaattcccttcaaagaaataagctttccactctttttcaatcattcaccaatggctccttctttcacttacgtcaaaatcttctcttctctcgtcgcagaggnattctccaacgctctcaccagacgcgggtacgctgttgcatcacaaagtgcaacaaagggaggagtggcctcaatgagcggcaagatggcaccaaagtcaggggaagataacaaagggtgtct

SEQ ID NO: 188530 - DNA, 257 bp, Glycine max
ttcgagcgaatcggctcgagccttactgaagcttatcaaagattgcaaaaaagtagagcaagagaacgccgcaagagcaattgggcttctcggccgtgaccctgagagcgtggaactcatgatccacgctggtgtttgctctgtcttcgccaaagtcctcaaagaaggtcccatgaaagtgcaagccgtggtggcttgggccgtgtcggaattagctgcgaaataccctacatgccaagatcttttcgtcagcataa

SEQ ID NO: 188531 - DNA, 248 bp, Glycine max
aaattagaggcttaagtggtaagaaagatttcttggatgaagatgatattcaaaagttttcctacttaagggcagtgataaaagagacacttagattgcacttaccagtaccactacttataccaagagaaacaaataaaaaatgcatgttagatgtttacgatattccagccaagacattattatatgtgaatgcttgggcaattcatagagatcctaaggctctggaagatccagaagaggttata

SEQ ID NO: 188532 - DNA, 258 bp, Glycine max
ctcgagcggttataattgatgttgaacctaaggaattgggaatcccaacaaaagcatattatgctgttgaagaggttaaagagaatgccactcaaaaaagtcaaaaggtgtttgtgcatgtgccatcagagattgctgctcatgaagttgaggaaataggagtggaacacttgcttagagatgtgaaggatacaaccattagcacccttgccacagaggtaagtgcaaaactcacagccttgaagggtttggatgcaa

SEQ ID NO: 188533 - DNA, 263 bp, Glycine max
gtatcgtgatgaatggcatggatcagatgttgctgtcaaagttttaacagttcaggatttccaagatgatcaattgaaagactttctaagagaggttgcaataatgaaacgagtatgtcatccaaatgtggtgttgttcatgggtgcagttactaaacgtccccatctatctatagtaccagactatttgcctaggggcagtttatttcgcctaatacataagccagcatctggtgagattctagatccaaggagaagatacg

SEQ ID NO: 188534 - DNA, 261 bp, Glycine max
atatcatccttgatttttccaaaaattctaagatggcagtaatgattctgagatacttcaatgtgattggatcagacccagagggcatattgggtgaggctccaagacctgaacttcgtgaacatggccgaatttctggtgcctgctttgatgcagctcgtggtattacaactggcttaaaggttagaggaactgactacaagacaccggatggaacatgcatacgagactacattgatgtaactgatttggtgatgctca

SEQ ID NO: 188535 - DNA, 229 bp, Glycine max
taaaccgagggtgttgaccaaggagaataggcatggccgttctgcacacagcatgtccttaacgtctttgcgcaagaagtctagccgaactcttgtctccaagcttccatgtgccacactcagaagcatccttttaaatttgcaagaggttattcttggtaccaagctttccattctcatccctgcaattccagctgccatcattgcggattgctatggctttggaaga

SEQ ID NO: 188536 - DNA, 253 bp, Glycine max
ttttatcacagaggaattaacatatatatagcaagcatggcagtcacactctacgaccttagctcttcctctgggttgaagaaacttgatgagtaccttctcccacgcagttacatcactcggtaccaagctacaaaggatgatcttactgtttatgcagctttgccaactgctccatcagatgaatatggaaatgtttccaggtggtacaagcacattgatgctttgttgagaatctctggtgttacggcga

SEQ ID NO: 188537 - DNA, 266 bp, Glycine max
acgcgtacgaactcggaatctgctcgactgctcgagctcgagcaacaggtatgtgggaacttttaccaaacatgcacacacttcgtagattgacttctggtttttttatggatggcaaattctacgtgattggtggaatgtcaagtacaactgtttcattaagttgtggagaggagtatgatctcaagacaaggagttggcggaaaatagaggggatgtatccatatgttaacgtgggtgttcaggcacctccacttggggctgtt

SEQ ID NO: 188538 - DNA, 259 bp, Glycine max
attatcaaagaaaatggctctcattgggttgctcttgatgggttttctcacaatgttctcctctgctcatgcctatggtggagggtggactaatgctcatgccaccttctatggagggagtgatgcatctgggacaatgggtggggcatgtgggtatgggaatctctacagccaagggtatggaacaaacactgctgctctaagcactgcactgttcaacaatggcttgagctgtggctcttgctatgagttaggtgtg

SEQ ID NO: 188539 - DNA, 263 bp, Glycine max
atgaccgagctcaaagagaaattccagcgcatcaatgactagtctatgatcaagaggagatatatgtacctaaacgaagagatcttgaaagagaatccaaacatgtgtgcttacatggcaccttctttggatgctaggcaagacatggtggtggtagaggtaccaaagctagggaaagaggctgcagtaaaggccataaaggagtggggccagccaaagtcaaagattacccacttgatcttctgcaccaccagtgggttgac

SEQ ID NO: 188540 - DNA, 238 bp, Glycine max
gctccctgaagagagcgtatcgtggcggttgcagaagatgatcgcaagatgaagttcaacatcgcgaatcccaccacgtgacgtcagaagtagctcctaatcgaagacgatctgaaactgccagcattttgggaacagattatctcacaggaggacaccggacaggcactctgtgacgcatttaacggcaatgtcatcataattaccggaggttacgacaaacaaggatcgccaatga

SEQ ID NO: 188541 - DNA, 187 bp, Glycine max
cgcccctctctcatcctccaatgttccgaccagcctcaccgatcgaccagatacgccgagtttcaaggacggcagacagactgcttcgatcaaggacggcgctgagtagcagtactaccaaggaacttggcgactggcacgacgtcacttggtcaagaccctgctgagacagaactgcacgatatga

SEQ ID NO: 188542 - DNA, 253 bp, Glycine max
  unsure (1)..(253): unsure at all n locations
ctgaagatgagagggtgctacacatcagcggtattctacgtacatgcgattccatngngcangctancaaaggttccctctccgattgaaaactgtctatggtgagcgttcttcggaggtaaaatgcgcaagttttaggcttgctgtggaagcacacaacatccgatcctttaaaaccattcctgaagagtgcgttgaaccaacaaaggactacattaatggcgaacaatttagatcagactctaaacagtta

SEQ ID NO: 188543 - DNA, 263 bp, Glycine max
ctcgctgctaggattattgttgccattgagaacccacaggatatcattgttcagtctgccaggccttatggtcagagggcagttcttaagtttgctcaatacactggtgctcatgcaattgccggaaggcacactcctggaacattcactaatcagatgcagcaatcctacaatgagcctcgtcttctgattctaactgatccaagaacagatcatcagcctatcaaggagggtgctcttggaaatattccaactttgctttt

SEQ ID NO: 188544 - DNA, 260 bp, Glycine max
gtccctgcagaatccaaaacttccaagaagaagaaaaagaaggataaagcttccaaggaggtgaaagaatctcaagatcaacccaacagttctgacacaaacaatgggcccgatttggccacaggcaccgaaaatgtggaggaggatacatctactgttgatgtgaaagagcgtctcaagaaagttgcttctacaaagaagaagaagtctagtaaagaaatggatgctgctgcaagagctgctgctcaagagctgctgca

SEQ ID NO: 188545 - DNA, 177 bp, Glycine max
caaaggagtatgttcaacctggatgaagaatgctagtcccttagaaaaaaggcccgactgttgcttggcacctatttttattaaggcatcgaatttcaagctaccacttgatcattcaattcctaataatatcggtggaacctggtactggtcttgcacctttcaggggatttttac

SEQ ID NO: 188546 - DNA, 270 bp, Glycine max
gagaatatgaagttgtttgttttctttgttgctgcagtagttttggtagcatggccatgccatggcgcaggctaccaaaggttccctctccgaatgaaaactggctatggtgagcgttcttcggaggtaaaatgcgcaagttttaggcttgctgtggaagcacacaacatccgagcctttaaaaccattcctgaagagtgcgttgaaccaacaaaggactacattaatggcgaacaatttagatcagactctaaaacagttaaccaacaa

SEQ ID NO: 188547 - DNA, 125 bp, Glycine max
gcacgcattcgtgagagaactcaatattcgtcgctcatggcactctcttctcgtctcttttccaaatccaaattgatctgtggcagtcaaatacttctacaaaaggagcatgctattccagttcg

SEQ ID NO: 188548 - DNA, 259 bp, Glycine max
tgggacacatgatccatggcatgaaatgaatgcctataacatccatgatactagcaaacggaaggacctgaacccaaaatttgttcttcaggtgtatcgagattttgctaccacaggtgatttgggatttggagtggatgtgttgcctgctgtccgtgctgcaatggagtacatggaacaatttgatagagatggggatggtcttattgagaatgatgggttccctgatcagacatacgttacatggacagtccatggt

SEQ ID NO: 188549 - DNA, 270 bp, Glycine max
aattcggctcagctgaccgattcggctcaggtccctaatgattgaatgaacgcagattttaccatgactgcaattttagatgatcacgagagcaagacctatggggtgcgttctgtaactggataactggcaccgaaaatcgtctttacattggatggtttggtgttttgatgattcctactttattgaccgcaacttctgtatttattatcgcttttattgctgcccctccagtagatattgatggtattcgtgagcctgtttctggat

SEQ ID NO: 188550 - DNA, 260 bp, Glycine max
atcttgactggaggtactgtaatcagagaagaggttggccttactttggacaaagctgggaaagaggttctcggatatgcctccaaggtggctctcaccaaggatacaaccacaattgttggtgatggaagtacccaggaagcagtgaacaagagagttgcacagattaggaacctaattgaggctgctgagcaagagtatgagaaagaaaagctgaatgagagaattgctaaattatctggtggtgtggctgtcataca

SEQ ID NO: 188551 - DNA, 263 bp, Glycine max
caggtactaggcttgctgcttcctatgtaaacttttacattgcaaataaagctatcattgcaccacaatttggagataaaaagtgggatgatgaagctgtccgagtcctatctaaggccttccctcatcatgaagttgtgggaattgaaggtgccatggagattgttttggccggtggaaatatacattgcattactcagcaacaaccagccatttgagcggcggcactctcgatattcgttgatacgtgttgtactgttgct

SEQ ID NO: 188552 - DNA, 235 bp, Glycine max
tatctggttcttatcaaatctatcagttcttcaagttgaaaatggggctatctttcaccaagttgttcagccgactgtttgccaagttagagatgcgtatactgatggtgggactcgatgctgcgtgtaagtccaccattctgtataagctcaagcttggatatattgtcaccagcatacccaacaattggtctaatgtggtcactgtggaatataataacgtcagcttcgctga

SEQ ID NO: 188553 - DNA, 271 bp, Glycine max
tggaaaattagcctcacaaaagcaaagatcaaacaaaccaaggacgagaacacgatgttgcttgaacttgcacttggtttattggttttggctctgtttctgcacttgcgtcccacacccactgcaacagcaaaagcacttcgccatctcccaaacccaccaagcccaaagcctcgtcttcccttcataggacaccttcatctcttaaaagacaaacttctccactacgcactcatcgacctctccaaaaaacatggtcccttattctctc

SEQ ID NO: 188554 - DNA, 265 bp, Glycine max
ctcgaccgatgggttcttcttcttctatgtggacggtgtgtgtgattttggcatcactggcctctgcagcactctgtgccaacccacgcaggccagtggatgtacaatttggccgaaactacgtgcccacatgggcctttgatcacatcaaatatttcaatggtggttctgacattcagcttcatcttgacaagtacactggtactggcttccagtccaaagggtcttacttgtttggtcacttcagcatgtacataaagatggt

SEQ ID NO: 188555 - DNA, 211 bp, Glycine max
cgaagatggccgcgagcgatcgcacagtgttgcaattctcttcatcatcttctgcttcgcagagcttgtccgcgaaggtccaccctctggtcatcttcaacatctgtgattgctacgttcgacgccctgaccaagccgatcgtgtcatcggaaccctactcggctccgtccttcccgatggaaccgtcgatatccgcaattcctatgctgt

SEQ ID NO: 188556 - DNA, 259 bp, Glycine max
gggcactgccctctttttggagccaaagtcggcttcggccggttggatccgggcggaagacattgtcacgtggggagtttggctggggcggcacatctgttaaaagataacgcaggtgtcctaagatgagctcaacgagaacagaaatctcgtgtggaacaaaagggtaaaagctcgtttgattctgatttccagtacgaatacgaaccgtgaaagcgtggcctatcgatcctttagtccgtcggaatttgaagctaga

SEQ ID NO: 188557 - DNA, 270 bp, Glycine max
ggaacaatagggtatgtagctccagaagtatggaatagaaattttggcggagtttcacacaaatcttgtgtgtacagctacggaatgatgctactagaaatggtgggagggagaaataatattaatgcggaagcaagtcacacaagtgagatatacttcccagattggatctacaaaaggctagagcagggtggagatttgagacctaatggggtgatggcaacggaagaaaatgagatagtaaagagaatgactgtagtgggtttatgg

SEQ ID NO: 188558 - DNA, 263 bp, Glycine max
gaaatggcggattcttctcgggaggagaacgtttacatggcgaaattggcggacaggccgagcgttacgaggagatggttgagttcatggagaaggttgcaaagactgtggaggttgaggagttgacggtggaggagaggaatctcctctctgtggcttacaagaacgtgattggtgcgaggagggcttcgtggaggatcatatcctccattgagcagaaggaggagagcaggggcaatgaggaccacgtggccattataaag

SEQ ID NO: 188559 - DNA, 267 bp, Glycine max
cgggtcacactttgcagtagcctagttttcaacttctatgcagcttcatgccccactgcagagttcattgtgagaaacacagtcagttcatcttcttcttctgattcttcaattcctgggaagctccttcgcttggtttttcatgattgctttgtggaggaatgtggattcttcagttcttgtgctttctttgcatgatggaaaattcaaatgggtttgaagatggtgatcaataattacttcatgatatgtagggatgtgatgcat

SEQ ID NO: 188560 - DNA, 261 bp, Glycine max
ggcatctctctgctctaaacgacaccgttttagtcttctcctcaagtcatggccacactcaagagcctctgcttcagaggaactgcctttcccgtttgcccctccaatgtcaccaacaatagtaactccaggagcttatattggaggcctgcacgagcagccgtgaagcccaatttccatctcccaatgcgcagttttgagttaaaaaataggacttctccagaggacataaaggctctgagattgataactgccattaaa

SEQ ID NO: 188561 - DNA, 262 bp, Glycine max
agaaaagaatggcaaagttaataaaattctttgagttgaacacaggggctgagattccttctgttgggttaggcacttggcaagctgagcctggtgttgtagccaaagctgtcaccacagccattctggttggatacaggcatattgattgtgctcaagcgtataacaatcaagcagagattggttctgctcttaagaagctttttgatgatggtgtggtgaagcgtgaggacttatggatcacctccaaactctggtgttc

SEQ ID NO: 188562 - DNA, 260 bp, Glycine max
taatgccattggaggtgagatccgattccagactgaagttgagatgatcagcttagccgtccatcggaatcttcttcgcctgtatgggttctgcatgacagctacagagaggctcttggtttatccctacatgtcaaatggcagtgttgcttcccgtctaaaagccaagccagctttggactgggctacaaggaagagaatagctttaggagctggaagaggcttgctatatttgcatgaacagtgtgacccaaagatta

SEQ ID NO: 188563 - DNA, 277 bp, Glycine max
  unsure (1)..(277): unsure at all n locations
ctcaaaactgctctcgaggcaatggtttcaagtcacgaagaggttaccctaatgggagtaattgcaagcgcatttgcttgcagggtgaagattgacctcaagttgaagggagtttaatagagatatnaaggtgaaaatttgaggaacaatagtgaactgcttctcaaatccgaaccagttcacaggaagattccagtgtttattcacaatgagaagcccatagcagaatcccttgtgattgttgagtacattgatgagacatggaagaactacccca

SEQ ID NO: 188564 - DNA, 260 bp, Glycine max
tggttgatccattgcttgatagtcagtatccaataagaggtttgtacaaatctcttattggatactgaccttcaagcaatggatcaccatctcacagaatcttttacggtttttgaataaaggctttgcccatgcaactagaagttgttctttagcaggttttgtattgtcgatcgacttcctgcctgtgatgatctccaaaagaacaactccaaagctataaatatcagacttgaacgtcaattgacccgtcattgcat

SEQ ID NO: 188565 - DNA, 212 bp, Glycine max
taggtacctcccatcataacaattaagttatctactcaggtttactcgaacatgaatgtccaatagctgcctagtctatagcaacgccgtgagtgactggccttaaacgctggagcataaattaaagctggaatgcacgacatcgaactatggtgtcgtccgtcaacagagcagtttgctgcaacatctttcgatgacctcaaacacatacg

SEQ ID NO: 188566 - DNA, 252 bp, Glycine max
ctccgcaccagtttcaccgcacgaatatcttgttgtttggagcgatccgagaaaaactctgtaaacatgttggtttaccaggacctccttacaggtgatgagcttctctctgactccttccgttacaaggaaattgagaatggaatgctgtgggaagttgaggggaagtgggttgttaaaggagcagttgatgtagacattggtgcaaacccttctgctgagggtggaggagaagatgagggagttgatgat

SEQ ID NO: 188567 - DNA, 262 bp, Glycine max
caacaagacacgcgcttagcgagaatcgcctctgcaatccgagtcatccccgactttcctaagccaggaattttgtttcaggacataaccacgctgcttcaagtgacaaaggctttcaaagacaccattgacttgtttgttgagaggtacagagatcaaaacatcaatgttgtcgcaggagttgaagctagaggctttatatttggtccacccattgcattagctattggagcaaaatttgtccccatgaggaaacccaata

SEQ ID NO: 188568 - DNA, 259 bp, Glycine max
ggaagcagccatcctttgaagaaagcgtaatagctcactggtctagctctatggcaccgaaaatgtatcagggctcaagtgattcaccgaagcgacgagaccttgaaagttgctttgtcaagtgtcagtagcgggacgttctgtcaatcggggaaggtttttggtgacaacacctggagatatcagaagtgagaatgctgacatgagtaacgataaatgctgtgtgaaacacgatcgcctgccagtggaaggctttctg

SEQ ID NO: 188569 - DNA, 259 bp, Glycine max
caatgccaccatctctgcgccgcatatgcatgccacctgccttcagttgcttgagaagaatttgcgacctggaatgcgtgttcttgacgttggctccggaacgggatacctgacagcatgctttgccttgatggttggaccccaaggccgtgctattggtgtggaacatattcctgagttggtttctttttcaatcgagaatattcaaaaaagtgctgcagctcaaccattgaaagatggttccctttctgtgcatgct

SEQ ID NO: 188570 - DNA, 260 bp, Glycine max
catctctctgctctaaacgacaccgttttagtcttctcctcaagtcatggccacactcaagagcctctgcttcagaggaactgcctttcccgtttgcccctccaatgtcaccaacaatagaaactccaggagctcatattggaggcctgcacaagcagccgtgaagcccaatttccatctcccaatgcgcagttttgagttaaaaaataggacttctccagaggacataaaggctctgagattgataactgccattaaaa

SEQ ID NO: 188571 - DNA, 261 bp, Glycine max
  unsure (1)..(261): unsure at all n locations
atgaagttgtttgagttctttgttgctgcagtagttttggtagcatggancattcatggcgcaggctaccaaaggttccctctccgaatgagaactggctatggtgagcgttcttcggaggtaaaatgcgcaagttttaggcttgctgtggaagcacacaacatccgagcctttaaaaccattcctgaagagtgcgttgaaccaacaaaggactacattaatggcgaacaatttagatcagactctaaaacagttaaccaa

SEQ ID NO: 188572 - DNA, 266 bp, Glycine max
ctctgctctttgccttctgtgacacatttggtgccttgtagagcgtgttttggcaggaaggtggtatggcgaaggacgttgaggttgctgagcgtggctccttctctgggaaggactaccaggaccctccaccagcaccactcattgatgctgaggagctcacaaagtggtccttttacagggctctcattgctgaattcattgccactttgctcttcctctacattactgtgctcacagtcatagggtacaatcaccagactgac

SEQ ID NO: 188573 - DNA, 262 bp, Glycine max
cttctctgtcacatggaacatgataacataattaagattaaagacataattcggccaacggagagggagaacttcaatgacgtgtatatcgtgtacgagttgatggacaccgatctgcatcagattatacagtctaatcaggctctcaccgatgaacattgccagtactttttatatcaactcttgcgagggttgaagtacattcactctgcaaatgttttgcaccgagatctaaaaccaagcaatttacttctgaacgcaa

SEQ ID NO: 188574 - DNA, 260 bp, Glycine max
gcaatggcttcaagtcacgaagaggttacccttttgggagcaattgcaagcgcatttgcttgcagggtgaagattgccctcaagttgaagggagttaaatacaaatatgtggaagagaatttgaggaacaagagtgaactgcttctcaaatccaacccagttcacaagaagattccagtgtttattcacaatgagaagcccatagcagaatcccttgtgattgttgagtacattgatgagacatggaagaacaaccccat

SEQ ID NO: 188575 - DNA, 256 bp, Glycine max
gtatcattcaagtgggaaaagctcttccatgactgctatagccgtcctgtttgtccttctaatcacttatacaggcacaacagaagcgaaatccggggtgtgttatggaagacttggcaacaacttaccgacccctcaagaagttgtggccctctacaatcaagccaacattcgacaggggaacaatctacggtccaagcccagaagtcctcgaagcactaagaggttgcaacattgagcttttgctagacattcc

SEQ ID NO: 188576 - DNA, 257 bp, Glycine max
ctcgagcgactcgagccgcaaaggagtggaattggacaacatcattcgcaaaattgatactgattgtagtttggttggaattgtgaatggcatggatgttcaggagtggaatccaaccactgacaaatatatagctgtcaaatatgatgtttcaacagtattggaagcaaaggctcttctgaaagaagccctccaagcagaagttggattgccagtcgacagaaatattcctctcattggtttcattggtaggcttg

SEQ ID NO: 188577 - DNA, 258 bp, Glycine max
  unsure (1)..(258): unsure at all n locations
ggcttccaccgcggctatgacagaaatacttggaaaccccgttaacctcagatgcgcaaccaggagtgctccatcgccaactaagaagaacancttcaagaccgtcgcacttttctccaagaagaagccatctgcacctccaaagaaaaagcctgccgctgtatcccccgccaatgaggaactcgccaagtggtatggtcaagagtgaaagatnttcttgactgagggtctcttagancgatctgagatccccgagta

SEQ ID NO: 188578 - DNA, 265 bp, Glycine max
agtcgagcgattcggctcaggccggtacttgtcacagtgctaggatgacaaggaccattcttgtgaggaggaattatgctcattttattaagaaataccagagatatgaaaagctgccttcaaatattccttcacacatatcaccttgtttccgtgttaaggaaggagatcatgttattattggccaatgcaggccaatctcaaagacagtgaggttcaatgtgttgaaagtgatccccgctggatagactaacggtgcaaagaa

SEQ ID NO: 188579 - DNA, 267 bp, Glycine max
cttcacccattcatgcgtggtgttgttactgctgctcttttctctttagttttctctttagttctctcttcccctttctctttctttttcttcttcttctgagcttgtttaagcttttcttccattaacatattatcagaatgtgtggtattcttgctgttcttggttgttctgatgactctcgagccaaaagggtccgcgtgcttgagctctctcgcagattgaagcaccgtggccctgactggagtgggctccatcaacatggtg

SEQ ID NO: 188580 - DNA, 268 bp, Glycine max
  unsure (1)..(268): unsure at all n locations
ttgcatttgcaggaacaggaaccaccccagaggcttttactggaatcagtttcggagggagaaggatccaaagtctcttctgttgtcgggggttgtaaacaggaagatatcagttcagccaggagtgatattttggattcagatagtccacattacaccgatggagttaactccgcactgctagagcatggtgattcttcttatgtgtttgagcatgatcnatcggatatgtcacaagatgaagaagataacctcagcaaaagtctct

SEQ ID NO: 188581 - DNA, 268 bp, Glycine max
tgccgctcgcgattcatacttggtgttgttactgctgctcttttctcttttcttttctctttagttctctcttcccctttctttttctttttcttcttcttctgagcttgtttaagcttttcttccattaacatattatcataatgtgtggtattcttgctgttcttggttgttctgatgactctcgagccaaaagggtccgcgtgcttgagctctctcgcagattgaagcaccgtggccctgactggagtgggctccatcaacatgg

SEQ ID NO: 188582 - DNA, 265 bp, Glycine max
ctaccacctgtgagcaagacttatggagtggcctgtttgatgaccacttctgcatattatctgcaactctatgatgcaaggaacatagcacttgattatggcccagtgtttaaaagccttcaagtttggaggcttatcacaaatttcttctttcttggctcattttcattaccatttgcagtccgtctgataatgatagcaaaatatggtgtttcattggaaagagggccctttgacaagagaactgcagattatgtttggatgt

SEQ ID NO: 188583 - DNA, 270 bp, Glycine max
aaggggtaaggtaccatgaacctgagtactggaagtttggagaggctggaaacagatacttccgtcatgccacaggacagttgtatgccatttcaaacgatttggctacatacatatcaattaaccagaatgttcttcacaagtatgccaacgaggatgtgtcactaggatcctggtttattggacttgatgtggagcatatagatgatcgaagactttgttgtggcactcctcctgattgtgagtggaaggcccaagcagggaacattt

SEQ ID NO: 188584 - DNA, 271 bp, Glycine max
agctagtgttggagttgtggaggccttgaaagaccaaggcatatgcaggtggaatcatgctttaagatcagctcaacaccatctcaaaaaccatgttggctcattctctcaggctaacaagctttcttcttctgctatgatctccacaacactaaaacatgagaaggcaaagcaatcagaggagtccttcagaactgtcatgtacttaagctgctggggccccaactagatatcataagtccaataagaaaatattctttctcttttaatt

SEQ ID NO: 188585 - DNA, 274 bp, Glycine max
  unsure (1)..(274): unsure at all n locations
cggctcgagggtgtttgatatcgacctgcagaaacagttgaggccttacatggaatctatggttccactccccggaatctccactnccgatttcattgctgccaaccaaggagaccgtgccaacaacgtgatcaagggcacaaagaaagaacaagttcaacaaatcatcaaagacattaaggagtttaaggaaagcactaaggttgacaaggtggttgtcctgtggacagccaacacagagaggtacagcaacctagttgtgggactaaacgac

SEQ ID NO: 188586 - DNA, 265 bp, Glycine max
  unsure (1)..(265): unsure at all n locations
gccctccttagacctggacggattgaccggaagattgaatttccaaaccctaatgaagantctcggctggatattttgaaaatccattcaagaagaatgaatttaatgcgtggcattgatctgaagaagattgccgagaagatgaatggagcatctggtgctgaacttaaggctgtttgcaccgaagctggaatgtttgcattgagggagcggagggtacacgtgactcaggaggattttgagatggctgtggccaaggtgatga

SEQ ID NO: 188587 - DNA, 269 bp, Glycine max
aaaaaaacagcgccctagatttgctcttctttgcttcggaagaaagagaaaaacaaataacaatggcgttcgcttctttcctcggcagagttctcttcgcttccgtcttcatactctctgcttaccaagaatttaacgaatttggagttgatgggggacctgcagcaaaagcactcagacctaagtttgatgcctttacacatcgagtgcattctcaagttggctttcaacttcctgagattgatctgaaatttttaattgctggggct

SEQ ID NO: 188588 - DNA, 265 bp, Glycine max
actctctcctttacttctcttcctactcttctccctagtccaaggactcacccccaaatgtgacacccaagaccatggctcaacccttgaagttttccatgtgttcagcccatgttccccatttatagccatcaaagccactctcatgggcagagagtgtcctccagctgcaggccaaggaccaagccaggctacagttcctggctagcatggtggctgggaggtcaattgtgcccattgcctcaggaaggcaaattattcaaag

SEQ ID NO: 188589 - DNA, 136 bp, Glycine max
tgatgccaaaagatggaaaattgaaggtgaaaatgagggtatgtcagcccctggaagtagaacagtgaaagaacctagagttgtagttcagacaaccagtgacattgatatccttgatgatggctataggtggaga

SEQ ID NO: 188590 - DNA, 262 bp, Glycine max
attataattgacaatgtggcaatatacaagattggtctccatgacttaaggtcaaggcttagcattatcccacaagaccctgccttgtttgaaggcactgttagaggaaacctggatccactacagaaatactctgacattgaagtgtgggaggctctagataaatgtcagctaggtcacctagtaagggccaaggaagagaagctggattccccggtggttgaaaatggtgataactggagtgtgggccaaaggcaattat

SEQ ID NO: 188591 - DNA, 262 bp, Glycine max
ctttgcttttgcgtggcctatatatatataaaactaatttccccacaacccaatcatatatcatttcatttctttttttctcgtccatcccgtaaccatgtctcagacttttgtcctcaaagttggtatgtcatgtgaaggatgtgttggagcagtgaagagagttttaggaaaattggatggtgtggaatcatatgacattgatttgaaggaacagaaggtggtagtgaagggaaatgtccagccagacacagttcttgcg

SEQ ID NO: 188592 - DNA, 260 bp, Glycine max
  unsure (1)..(260): unsure at all n locations
gcagttccttacctctcctcacaagatgcagtcatnagtcaagacaatcaccggaaagcacatcacccttgaggtggaaagctctgacaccatagacaacgtcaaggacaagatccaggacaaggaaggaattcccccggatcagcaacgtctaatcttcgccggaaagcagctcgaggacggccgtaccctcgccgactacaacatccagaaggagtcaacccttcaccttgtccttcgtctccgtggtggcatgcaga

SEQ ID NO: 188593 - DNA, 238 bp, Glycine max
gattagggactcagagcaaccctcagatgccagaagtggaccacaggagcttgttcagcagcgattgagtggaggttggagagaagacatcagagttgctggagaaaatgcacttccaaggtatgatgccacagcttacaaccaaatcatacggcatgcaagaccgcaatgtgtcaacaacaatggccctccaaaactaagcatgttcggagtaacataccttcgtctatcagatgat

SEQ ID NO: 188594 - DNA, 264 bp, Glycine max
ggctcgagaaaccacatcttccaatggcatctggacaattttcctttaaaaccggtgtcattatttctgcagcatttttagctctgagttttggatttacttggattaccggctcttggccattgatttgtaatcttgtagtaatcgcttcatcgtggacggcttattcaatcgatgtgcccctactgagatggaagagatacccatttgtcgcagcaatgtgcatgatttctacttgggctcttgcattgccaatttcatatt

SEQ ID NO: 188595 - DNA, 258 bp, Glycine max
cgcagatcgcagcaaaccagactaaactccgacgatgcctcccgtcgctcctcaatccggtgatgccatattcgccaacgtcgaacgcgtcaatgcggagctgtttactttgacgtatggcgcaattgtgcgtcaattgcttacggatctggaagaggctgaggaggttaacaagcagcttgatcaaatgggttacaatattggaatccgtttgattgatgagtttttagccaagtctaatgtctccagatgcaacga

SEQ ID NO: 188596 - DNA, 259 bp, Glycine max
cttgcctcttgagaagagtgaagccacagagcttgcatgtcctctatgcaggggtcaggtgaaaggttggactgttgtggaacctgttcgggactatctgaattcaaagaaaagaggctgcatgcaggatgactgcttgtatgttgggagctataaggagttgaagaagcatgtgcgggcagagcatccgtcggcacggccacggatggtggatcctgctgatgaacagaaatggagatggctcgagtgggagcgtgaa

SEQ ID NO: 188597 - DNA, 260 bp, Glycine max
gaaaccgagggtgttgaccaaggagaataggcatggccgttctgcacacagcatgtcctccacgtctttgcgcaagaagtctagccgaactcttgtctccaagcttccatcagacacactcagaagcatccttttaaatttgcaagcagttattcttggtaccaagctttccattctcatccctgccattccagctgccatcattgccgagtgctatggctttggaagaccttggatttttatattgagcttacttggac

SEQ ID NO: 188598 - DNA, 262 bp, Glycine max
cagcaagatagaaatggaagcagcatcggccacaattctgctactgatactaattactgctctgatatgctcatggaaggttctgaactggttatggctgagaccaaagagactagaaaaactgctaagagagcaaggttttcgtggcaatccatacacccttttctttggagactccaaggagtttctcaagatgagaaaggaagccgtatccaaacccatgaccctctctgatgacatagtgccacgtgtctctgcctat

SEQ ID NO: 188599 - DNA, 265 bp, Glycine max
aaaaacttctccagcggagtccacgccttcaattcaaagcaaagatgtgcaatttggagaagagaggcagcatattcatcctaacactcacaggcgatggcgagcaccgtctcaacccaacactcctcgattccatccaatcctccctcagccgcgtccgccaagaagccaccgcctcctccgccctcgtcaccaccgcgcacggcaaattcttctccaacggctacgacatcgcctgggcccgatcctccgatgaggtcaaaga

SEQ ID NO: 188600 - DNA, 265 bp, Glycine max
aggggccatcaaggttcttcaagacttatttccacaacctggaaggcttcaatttatgtatgctgacttgggagatccaatatctgttaataaaatatgtttggagaataaatttgatgccgtgatgcactttgctgctgttgcatatgtgggagaaagcactggtgatcctcttaagtattatcacaatattacatcaaacaccttgttggtattggagtctatggctaaacatgatgtgaagacattgatatattccagtaca

SEQ ID NO: 188601 - DNA, 263 bp, Glycine max
tggagctgccaaggctgttgggaaagtccttcctgctttgaatggaaaattgactggtatggcattccgtgttcccaccgtggatgtctctgttgttgacctcacggtgaggctggagaaggaagcctcatatgatgaaattaaaaatgctatcaaggaggaatcagagggcaagttgaagggaattcttggttacactgaagatgatgtggtctccaccgactttgttggtgataacagatcaagtatttttgatgcaaagg

SEQ ID NO: 188602 - DNA, 258 bp, Glycine max
cttacaacaaatagggtgcctctatagtcggggaaagctccctagttgaagataggaatagacttcgtcagtgttgaaatcacgagaaattgatggctgctccaccggcaagagctcgtgacggattacgattatctcataaaacttctcttgattggcgatagtggtgttggaaagagttgccttcttctacgattctctgatggttctttcacaactagtttcatcacaaccataggttaggattttaagataaga

SEQ ID NO: 188603 - DNA, 256 bp, Glycine max
caatgccacctgaggccctggatattacaaggaagttcatgaataagccagtgagaatcctggtaaagcgtgatgaattgacgcttgagggtatcaagcagttttatgtgaatgttgataaggaagattggaaactggagacattatgcgacctttatgagactttggctatcactcagagtgtcatctttgtgaacaccaggcgcaaggtggactggctcactgacaagatgcgaacaatgaccatacagtctca

SEQ ID NO: 188604 - DNA, 257 bp, Glycine max
atccttcctccgattaccaaaagaagttagcaaggagtacaaaatacaatttgtggaccaagtgatggatttggtagagttagataatctcaaggatgctatagtggggcttccaagagttactgggttatcaaccgaacaacgaaagaggctgaccatcgctgttgagcttgttgctaatccttcaattattttcatggatgaacccacttctggtcttgatgcaagagcagcagctattgttatgaggactgtga

SEQ ID NO: 188605 - DNA, 258 bp, Glycine max
gctggagttgttacaggcaccaggattatcatttttgttgccagagcaatatgcacaacaatatccacggctttcagggagaggaactgttgcgttcaccattgagaaaggagatggttcaacattttctccagttgggggagagcataaaaatactgccaccattcaggttgttattgatggatactcagctccactaactgcagggaattttgcaaaactggtgatggatggagcctataatggcacaaagctcaa

SEQ ID NO: 188606 - DNA, 259 bp, Glycine max
agaaggcctccttcagctaccttctgacaaggcacttttgtctgaccctgtgttccgccatcttgttgagaaatatgcatcggacgaagatgccttcttcgctgattacgctgaggctcaccaaaagctttctgagcttgggtttgctgaagcctaagcaacgttttggggattgttggagaggcacggtgcccataatatttctctcataaattctatggtcatggtttctaatgcgccactgtgggttcctcaaatt

SEQ ID NO: 188607 - DNA, 253 bp, Glycine max
agaaggcctccttcagctaccttctgacaaggcacttttgtctgaccctgtgttccgccctcttgttgagaaatatgcatcggacgaagatgccttcttcgctgattacgctgaggctcaccaaaagctttctgagcttgggtttgctgaagcctaagcaacgttttggggattgttggagaggcacggtgcccataatatttctctcataaattctatggtcatggtttctaatgcgccactgtgggttcct

SEQ ID NO: 188608 - DNA, 255 bp, Glycine max
ctcgagccggtcgctttataacactcaacctaagatgcagaacgaggaaggacagatcaccgagctttacattcctaggaagtgctctgccacaaaccgattgattaccgctaaggaccatgcttcggttcaggttaacattgggcatgtggatgagaatggcgtctacaatggccatttctccacttttgctctctgcggcttcatacgtgctcagggtgatgctgacagtgccctagatcgcttgtggcagaa

SEQ ID NO: 188609 - DNA, 259 bp, Glycine max
gcaatggtgtacgtcaaggctcagaaatcagaagcctacttcaagagatatcaagtcaagttcaagagaagaagagagggaaaaaccgattaccgtgccaggattcggttgattaatcaggacaagaacaaatataacactccgaaataccgatttgttgttcgctttagcaacaaggacattgttgcacaaataatatctgctagcattgctggcgatattgttcttgctgcagcatatgcacatgagctgccacaat

SEQ ID NO: 188610 - DNA, 269 bp, Glycine max
gggcacattaccagatggacaagatattgcagtcaaaaggctttcacaaacatctacacaaggattaacagaatttaagaatgaagttatattttgttctaaacttcaacatcgaaatcttgttaaagttcttggttgttgcatcaatgagcaggagaaattactcatctatgagtacatgccgaacaaaagcctagacttctttctttttgattctctcaaagcaacttttagattggtccagcgattgacatattaatgggatgctc

SEQ ID NO: 188611 - DNA, 267 bp, Glycine max
aggctcgagagaccggcgaggtgttaccggcagataaagaacaaaccgtacccgaaatcccgtttctgccgcggcgtgccggatagcaagatccgaatctacgacgtgggaatgaacaagaaaggcgtggacgagttcccgttctgcgtgcacctggtctcgtgggagaaggagaacgtctccagcgaggctttggaggcggcgcgcatcgcatgcaacaagtacatggccaagttcgccggaaaagatgccttccacctgcgcgtg

SEQ ID NO: 188612 - DNA, 264 bp, Glycine max
caaagattaagccatgcatgtgtaagtatgaactaattcagactgtgaaactgcgaatggctcattaaatcagttatagtttgtttgatggtatctgctactcggataaccgtagtaattctagagctaatacgtgcaacaaaccccgacttctggaagggatgcatttattagataaaaggtcaacacaggctctagctgttgctttgatgattcatgataactcgtcggatcgcacggactttgtgccggcgacgcatcatt

SEQ ID NO: 188613 - DNA, 254 bp, Glycine max
cacccgtggtgatggaaaacgtggagaatcaatctatggtgataagtttgccgatgaaaactttaagctgaagcatactgggccaggatacttatccatggcaaatatctggggaagacaccaacggctcccagttcttcataacaacagttaaaaccagctggctggatggacaccatgtcgtattcggcaaggtactttccggtatggacgttttgtacaagattgaagcagaaggaagtgaaaatggctcg

SEQ ID NO: 188614 - DNA, 263 bp, Glycine max
tacatccttcaggtgtcaagaagatgggtgagttgcacttggccattagattctcctgttcctcaatggttgacttgatgcagcagtatttcaagcctcacttgccaaaaatgcactataagaggccacttaacttaatggaacaggaaaagctgcgacaccaagcggtcaatgttgttgctgctcgacttagtagggcggaacccccgcttagaaaggaggtagttgaatacatgtgtgacacagattctcatctctggagt

SEQ ID NO: 188615 - DNA, 269 bp, Glycine max
ctggccactcttcatcatcttcttatggcctttcgtctacccatcgaaataggtataagaacgatttccgcgactcaggggggttggagagtcaatctgtgcaggaattggagaactatgctgtttacaaggctgaagagacgacaaattcagtgaacagttgtttaaagatagctgaggaaatgagagaggatgctaccaagactttggtgatgctgcaccaacagggtgagcagattacaaggagtcaccatgttgctgctgatatt

SEQ ID NO: 188616 - DNA, 268 bp, Glycine max
cgcactgcttttattcgcaccgcaaacagtgagccatggccgtcggaaagaacaagcgcatctccaaggggaagaagggtggcaagaagaaggtagctgatccctttgccaagaaggattggtatgacattaaggctccttctgtttttcaagtgaaaaatgttggcaaaaccctcgtctctcgtactcagggtaccaagattgcttctgaaggactcaagcatagagtgtttgaggtctccttggctgatcttcaaggggatgagga

SEQ ID NO: 188617 - DNA, 266 bp, Glycine max
ctttctcctcctccaaggcacttgtcctgattgcatgctccttctgcctatttgcgtctttggcttttggacgtgatttctccattgtgggctattcatcggaggacttaaaatccatggataagctcatcgaactcttcgaatcatggatgtcaaggcatggcaagatttacgagaacattgaggagaagcttcttaggttcgagattttcaaggataacctaaagcacatagatgagagaaacaacgtggtcagcaactactgg

SEQ ID NO: 188618 - DNA, 188 bp, Glycine max
aatttgaaaggttatgagaatgaaaatcagttattgggtgagaaaagtaatcgtgatatacgacgagctccaagctttagtggaccattaatgcttccaaaccgagcttcagctaatagtttatcagccccaatcaaatcttctggaggattcagagattccttggatgataagtctaaggctaatct

SEQ ID NO: 188619 - DNA, 266 bp, Glycine max
cttcgacggttcgggccgcggtggatgccagaccggtgactgcaggggtgtcctcgactgcaaagcttacggtgcgcctcccaacaccctggctgaatacggcctgaacgggttcaacaatttggacttcttcgacatctccctcgtcgacggttttaacgtgcccatggactttagtccaacctcgaatggatgcacacgtggcataagctgcactgcggacattaacggacagtgccctagtgagctaaagactcaaggaggtt

SEQ ID NO: 188620 - DNA, 266 bp, Glycine max
aaaaaaccactctacaaaactctccagtaattctgaaaattttattttcttttggtgaaattaacagctctgtgattgatcaatggcgacaaaggaaggcaaagccataggcatcgatctcggcacgacctacagctgcgtgggcgtgtggcaaaacgaccgcgtcgagatcatccccaacgaccaaggcaaccgaaccactccctcttatgtagccttcaccgacaccgagaggctcatcggagacgcggcgaagaaccaagtcg

SEQ ID NO: 188621 - DNA, 273 bp, Glycine max
aatcaatcaaatgatagcagatgtggacaaggatggaagtggagcaattgattatgacgaatttgagtacatgatgacagccaaaataggagaaagggacactaaagaggagctcatgaaagctttccatattattgatcatgataaaaatggaaagatatccgcattagacatcaagcgcattgcaaaagagtcaggtcaaaatttcactgacagagagattcaggagatggttgaggaagcagaccaagataatgatcgagaggttagtgc

SEQ ID NO: 188622 - DNA, 268 bp, Glycine max
  unsure (1)..(268): unsure at all n locations
gaccggacgaattcaagttcatggccgaaccggcgcctccccatgaacaattcatagacggcgttgccattcgcgacgtcgccgttactcacggtggtggacagagtggccaccatgtccgactttatctgccagagataaagccggaagacagccagagactaccagttgtcctccatttccacggaggctggtatagaatnagtgaaccggactggttcatgtactaccaattctacacccggttcgcccggtccacacggtccat

SEQ ID NO: 188623 - DNA, 269 bp, Glycine max
cttttctatttaattcctaaaatcccattcttcttcgctcattcctctgcactgccatcatcgccaacttcctcacaacgttacaagtgagtaaagagttgtgccaccatgtcggacgatgaaagggaggagaaagagttggatctctcttctgccgaagttgtcaccaaatacaaaaccgctgctgagatcgttaacaaggccttgaagctagttatttcagaatgtaaaccaaaggcgaagattgtggatatttgtgagaaagggga

SEQ ID NO: 188624 - DNA, 255 bp, Glycine max
aactgggttcatcgaaaggtgcgagcttgcagatgagcgtgatgttgagtctgttaaagaaagggtgaaaatgtcttcgttgttgttatatagattggttcagaagggttacactaatgtgatgggtaatattatggatgaggaagctgctgagaagcagagaaagaaggatgctttgcaagctcttgaagcacagaaagagaaagccaatgaagctgctgctgagttgaataaggtcgttgagagtaatagtac

SEQ ID NO: 188625 - DNA, 260 bp, Glycine max
cggctcgagggaggtggggagggtaaagctatgtacatagatgctgagggcacatttaggcctcagcgactcttacagatagcagataggtttggattgaatggtgttgatgtattggaaaatgttgcttatgctagagcatacaatactgatcatcaatcacggagtctgcttgaagcagcttcaatgatggtggaaactaggtttgctgtaatgatagtagatagtgctactgccctctataggacagatttttctgg

SEQ ID NO: 188626 - DNA, 266 bp, Glycine max
tgttgttgtaactcgttcttcttcttttgttgttctgtgtttgtgtttgttttttctctcacctgaaaatgtcttgctgcggtggtaactgtggttgcggaagctcctgcaagtgcggcaacggctgcggaggctgcaagatgtacccagacttgagctacactgagtcaaccaccaccgagaccttggtcatgggagtggcacctgttaaggctcaatttgagggtgctgaaatgggtgtgcccgctgagaacgatggctgcaaa

SEQ ID NO: 188627 - DNA, 250 bp, Glycine max
gtgacactcaccttgatagtcttgtgggccaagcattgtttggagatggagctgctgcagtcattgttggttctgacccaattccacaagttgagaagcccctgtatgagcttgtttggactgcacaaacaattgctccagacagtgaaggtgctattgatggacaccttcgtgaagttggactcacatttcacctcctcaaggatgttcccgggattgtctcaaagaacattgataaggcactttttga

SEQ ID NO: 188628 - DNA, 265 bp, Glycine max
tacctaggcacccagagacgaggaagggcgtagtaagcgacgaaatgcttcggggagttgaaaataagcgtagatccggggattcccgatataggtcaacctttcgaactgctgctgaatccacgggcaggcaagagacaacctggtgaactgaaacatcttagtagccagaggaaaagaaagcaaaagcgattcccgtagtagcggcgagcgaaatgggagcagcctaaaccgtgaaaacggggttgtgggagagctatacaag

SEQ ID NO: 188629 - DNA, 188 bp, Glycine max
tgctagctactccttaattactaattagtttcattctttggtgcaagctagcttcattagttgattcatggaattataacaatggtgagtgttgaaccaatccgtaaggcacaacgtgcagaaggccctgacaccgtcatggccatccggactgacactcctccaaactgagtcgatcagagtacttg

SEQ ID NO: 188630 - DNA, 271 bp, Glycine max
tccatggctaagggtcccggtctctactctgacatcggcaagaaagccagggatctgctgttcaaggactaccacagtgaccagaagttcaccatcaccacctactcacccactggagttgctataacagcatcaggaaccaggaaaagtgaactgtttgtggctgatgtaaacacccagttgaagaaccaaaacatcactactgatatcaaagttgatacagattctaatctcttcacgactatcactggtaaatgaacctgctcctggt

SEQ ID NO: 188631 - DNA, 242 bp, Glycine max
gctaaatcgaatcgaatcgaatctccgaagatggccgcgagcgatcgcacagtgttgcaattctcttcatcatcttcttgctcgcagagcttgtccgcgaaggtccaccctctggtcatcttcaacatctgtgattgctacgttcgacgccctgaccaagccgatcgtgtcatcggaaccctactcggctccgtccttcccgatggaaccgtcgatatccgcaattcctatgctgttccaca

SEQ ID NO: 188632 - DNA, 263 bp, Glycine max
aacaccatagtgaaatggcttccaaggctgcacttctcttgtgtttcaatgtgctcttcttcaccgtggttagctccacatatgtgccatgcaacccaccccccaaaactccaaaacacccacctgtcccaaagccaccttccccaaagcaagcaagttgccccaaagacactattaagtttggtgtgtgtgctgatgtgttaggtttgatcaacgtgcaacttggcgaagccaccaaagaccccatgctgcaacctcattga

SEQ ID NO: 188633 - DNA, 263 bp, Glycine max
gttccggcaacatggagcttcctgagtggactgatattgtaaaaacagcaaaatttaaggaattggctccatatgatcctgactggtattatgttagggctgcctcaatggcaacaaagatttatttgagaggcggtcttggtgttggggctttccagaggatctatggtggaagcaacacaaatggaagccgtcccccacatttctgcaagagcagtggggctattgcaagacacattctgcaacaattgcaaaacatgagc

SEQ ID NO: 188634 - DNA, 263 bp, Glycine max
atagagggcaagatccttcgcctcaagcaacaatatactttatgttctgcttctctacaagacatcattgctcgttttgagagaagatcaggagcaaatgttaattgggaagagtttcccgagaaggttgcagtgcagatgaatgatactcacccaacgttgtgcatcccagagctcatgagaattttaatagatgtaaagggcttaaattggaaggatgcttggaatattacacaaaggactgtagcatatacaaaccacac

SEQ ID NO: 188635 - DNA, 264 bp, Glycine max
tgtagccgtcgcactctgtgttttcagcgccgtctccgatctccgacaatggcgacccaaatgagcaagaagagaaagttcgtagctgatggagtgttcttcgctgaactgaacgaggttctgacaagagagttggccgaggacggttactccggcgtggaagttagggttacgccgatgcgcaccgaaatcataattagagccaccagaacccaagctgttctcggtgagaagggaaggagaataagggaacttacctctgtg

SEQ ID NO: 188636 - DNA, 120 bp, Glycine max
aaccgtagtaattctagagctaatacgtgcaacaaaccccgacttctggaagggatgcatttattagataaaaggctagttctagatcgcgagcggcactactgtgttttttcttttttt

SEQ ID NO: 188637 - DNA, 265 bp, Glycine max
gctggatatggtactgctctgggtgtcatccgtgacacttcatagtgccggagttctaaaaagggcttattgcacagaaacacgcccatttaatcaaggatctagacttactgcctttgagttggtgcatgaaaaaataccaggaactcttattgccgattctgctgcagctgcattaatgaaggcaggacatgtggatgctgttgttgttggggcagatcgggttgcatcaaatggtgacacagccaacaaaattggaacctac

SEQ ID NO: 188638 - DNA, 267 bp, Glycine max
atgcgctcctctaatgctccgtttggcatggcactctgctggaacctttgacaagggcacgaagaccggtggacccttcggaaccatcaagcaccctgccgaactggctcacagcgctaacaacggtcttgacatcgctgttaggcttttggagccactcaaggcggagttccctattttgagctacgccgatttctaccagttggctggcgttgttgccgttgaggtcacgggtggacctgaagttccattccaccctggaagaga

SEQ ID NO: 188639 - DNA, 265 bp, Glycine max
aggatccagagtcataacttacttctagcagagacagatgggtcttacacagtgcaacagaactacactagcttagatattcatgttggacaatcttattcttttctgttaagcacggttcaaaatgcaagtacagattactacattgtagcaagtgccaggtttgtgaatgaatcacgttggcaaagagttactggagttgctatcttgcgctatacaaattccaaggggaaggcacgtggtcctctcccacctgctcctgatg

SEQ ID NO: 188640 - DNA, 260 bp, Glycine max
ccactcccttctggaacacaccgacgtggctgttctcttggacaacgaagccatctacgacatctgtaggagatctctcgacatcgagaggcccacctacaccaacctcaacaggctcatttcccagatcatttcgtcgctaaccacttccttgaggtttgatggcgctatcaatgtggatatcactgagtttcagaccaaccttgtgccataccccaggatccacttcatgctttcttcttatgctccggttatctctg

SEQ ID NO: 188641 - DNA, 260 bp, Glycine max
atctctatctacgaaggagcggaataaaacccttctctctgtgattaagagaatggcttcagatcggaaacttcacacttttgaggaggtggcaaagcacaaccagaccaaggattgctggctcatcatttctggcaaggtgtatgatgtcacccctttcatggaggatcatcccggaggtgatgaggttttgttatctgcaacagggaaagatgcaaccaatgactttgaagatgtggggcacagtgattctgctagag

SEQ ID NO: 188642 - DNA, 260 bp, Glycine max
  unsure (1)..(260): unsure at all n locations
gcaattatcatgggcaaggtcaagatcggaatcaacggatttggaagaattggccgtttggtagccagagtggctctgcagagagacgatgttgaactcgttgccgttaacgaccctttcatcaccaccgattacatgacatacatgtttaaatacgacagtgttcatggacactggaagcatcacgatgtcaccgttaaggacgagaagacccttctcttcggtgacaagccngtcactaatttttggncanaaanccc

SEQ ID NO: 188643 - DNA, 246 bp, Glycine max
gatggacagcatgtgctctatgatggatcgtggtggtgaccgcctttgttatgtccagttcccccagaggtttgaagtgtttgatccctctgatagatatgctagccataatactgtcttctttgatgtcaatatgcgagcccttgatggactccaaggaccagtctatgtgggaactggatgccttttcagacgggttgcactttatggtgttgacccaccgcgttctaaagagcaccacagagg

SEQ ID NO: 188644 - DNA, 260 bp, Glycine max
cggaagggcaccaccaggagtggagcctgcggcttaatttgactcaacacggggaaacttaccaggtccagacatagtaaggattgacagactgagagctctttcttgattctatgggtggtggtgcatggccgttcttagttggtggagcgatttgtctggttaattccgttaacgaacgagacctcagcctgctaaatagctatgtggaggtaaccctccacggccagcttcttagagggactatggccgcttaggcc

SEQ ID NO: 188645 - DNA, 254 bp, Glycine max
cttcgttatccttctttttttctccttgaactcgaatattcactatggcagatgaggtggttctgctagatttctggccaagtccatttgggatgagggtcaggattgcacttgctgaaaagggtatcaaatatgagtccaaagaagaggacttgcagaacaagagccctttgctcctcaaaatgaacccggtgcacaagaaaatcccggttctcatccacaatggcaaacccatttgtgaatctctcgttgct

SEQ ID NO: 188646 - DNA, 265 bp, Glycine max
tggtgtacccattggcacaccgactcctctgagctggctctttatctatccggagggaatttataagctcatgacatacataagggacaactacaataatccaccagtgtacattaccgaaaatggcgttgcggaatcaaagaatgactcacttgcaatgcaatgaagcccgaaaggatggtattcgaattagataccatgatggccatctcaaatccctgcttcatgcgatcaaagatagagttaatgtgaagggctactatat

SEQ ID NO: 188647 - DNA, 263 bp, Glycine max
cactactctctttgctctttgttttctccactatggctgcacaacgaaagttccaagactacttgcctgtgatggccaacaagcttggtggggatggcctaattgatgaactgtgcaatgggttcaatctgttgaaggattctgataaaggggtcatcacctttgagagcctcaagaggaactctgccttgtttggccttcagggtcttagtgatgaagatcttcggtccatggttttggaaggtgactttgatggtgatggt

SEQ ID NO: 188648 - DNA, 201 bp, Glycine max
ctgccagtagtcatatgcttgtctcaaagattaagccatgcatgtgtaagtatgaactaattcagactgtgaaactgcgaatggctcattaaatcagttatagtttgtttgatggtatctactactcggataaccgtagtaattctagagctaatacgtgcaacaaaccccgacttctggaagggatgcatttattagata

SEQ ID NO: 188649 - DNA, 208 bp, Glycine max
gcggacaccccccaaagatccccttccccagttcccaagaaatcagcctccccatcccctcctggctcctccagtaataaagccccacttctctccgatgcctctctggacaaccctgatctcggcccattccttctcaagcttgcccgcgacaccattgcctctggcgatggccccgccaaggtcctcgaactcgcactcctggtcc

SEQ ID NO: 188650 - DNA, 260 bp, Glycine max
ctgccagtagtcatatgcttgtctcaaagattaagccatgcatgtgtaagtatgaactaattcagactgtgaaactgcgaatggctcattaaatcagttatagtttgtttgttggtatctactactcggataaccgtagtaattctagagctaatacgtgcaacaaaccccgacttctggaagggatgcatttattagataaaaggtcaacacaggctctgcctgttagctttgatgattcatgataactcgtcggatcg

SEQ ID NO: 188651 - DNA, 248 bp, Glycine max
tgcgagccctagttcatttttcttctccgttctcttctctctctgttcttcactcactctcattcattcaccatgacgaaacaacatgccaattggtctccttacgataacaacggaggatcatgtgttgcgattgctggagcagattactgcgttatcgccgcagatacgagaatgtccaccggttacaacatccacactcgcgttttctccgaaatcccccaggggcaaaaaagtgtgagatgccc

SEQ ID NO: 188652 - DNA, 187 bp, Glycine max
gcagcacgaggagcagcctcaggaggagaaggatgtctcacaggaagttcgagcacccaatgcacggttcactgggatttcttcccaggaagcgtgctgctcgtcacaggggaaaagtgaaggcattccccaaggatgacccatccaaggcacccaagctcactgcattcttgggttacaaggccgg

SEQ ID NO: 188653 - DNA, 248 bp, Glycine max
tcgagcgtgtttgttgttgtgtgtgttttccgcggaaaatcaaaatgggtatcattgaaaagatcaaagaaattgaagccgagatggctcggacccagaaaaacaaagccacagagtatcatctcgggcagctcaaggcaaaaatagcaaaactgaggacacaattattggagcctccaaaaggttctagtggaggtggagaaggatttgaagttacaaaatttggtcatggacgtgttgcactgatt

SEQ ID NO: 188654 - DNA, 255 bp, Glycine max
cttcttttgttgttctgtgtttgtgtttgttttgtctctcacctgcaaatgtcttgctgcggtggtaactgtggttgcggaagctcctgcaagtgcggccccggctgcggaggctgcaagatgtacccagacttgagctacactgagtcaaccaccaccgagaccttggtcatgggagtggcacctgttaaggctcaatttgagggtgctgaaatgggtgtgcccgctgagaacgatggctgcaaatgtggacca

SEQ ID NO: 188655 - DNA, 245 bp, Glycine max
atttgttacttgtggtgcaacctatgtgcccatctatcgaggacaaaaggatgtctcttgcccttactgcacttcccgttttgtgccaagccaagagggacagctatgtactgtgtgtgatcttgcagtggtcggggcagatgcttctggattgctgtgttcaccttcccagatacgttgattctgctgctagaccagaaacattttttcccccaatttgtttcagaagatccctgaaacagagg

SEQ ID NO: 188656 - DNA, 248 bp, Glycine max
aaagaggagacgaagcaatggcgccgaagaagccccgaaccacgtcgaggaaccctgatttggtcaggggaattggcaaatattcgaggtcgcagatgtaccacaagaggggcatctgggccatcaaggccaaaaacggcggtgttttgcccctccacgatcccaagcccaaacccgaggccccggcccagaagccgcccaagttctacccggccgatgacgtgaagaagcccctcgtcaacaagcac

SEQ ID NO: 188657 - DNA, 259 bp, Glycine max
cgagaatgcccgaaactcctcgcagtgtgactctatgctcattggtgacaatgcagctgcaaatacctatccttacattcagcaagaatcgaacatgaagctagtacgtccaaaattggtgaagatcaattgttttattttcagcaaaggggaatagactatgaaaaagcaatggctgctatgatctctggattttgccgtgatgtctttaatgagctccctgatgaatttggttctgaggtgaaccaactcatgagct

SEQ ID NO: 188658 - DNA, 185 bp, Glycine max
ccccttatctttctctcttctctctccccgcccaaaccctaactccctaccctattccgctttctctcatccatcatgaaaggaggaaagtccaagaccgaatctaagagagccgatgccaaacttgctgtgaataagaagggcgcggcaaccaagactaagaaacccgcggaaaaggggaaggc

SEQ ID NO: 188659 - DNA, 257 bp, Glycine max
ctctgagttagcctccagcctctcctccaaagtcccctgctgttcgttcggttattcttcgaaccggtgtctgaagtttacaactcaaaacttcaccgaacgcatttcattcaccaattcgtccaagtctcgtattaatcaatcagcctatccgtcttgcggttggagatatcggaggggagagcagccatggcgcatcgagtagaccacgagtatgactatctgttcaagatcgttttgatcggagactcaggtgt

SEQ ID NO: 188660 - DNA, 256 bp, Glycine max
gattggaagaagtaggaaatcatgggtgggatagtttcctcccattttagtctgaatacaggtgatgataggatgagagaaagtacttagtgtcattataatcagagaaaagggttatacactgtcagtgtaaatatttttacatagtcatccaattacaacctatcatggatacagctggccaggaaagatttagaagtcttattccaagctacattagggactcatctgtagctgttattgtatatgatgttgc

SEQ ID NO: 188661 - DNA, 247 bp, Glycine max
cacatttttatatatggtcaatacatatattattgtcccaacagcagatgactattctatgagccttggggccgcgccaacagtttgtgggattgtgattggggcaatggctgttgcacaagtgttttcatcagtgtattttagtgcatggtcaaacaagtcatactttaggcctcttgtattcagtagcatagttctttttcttggaattatcttgaatgcattggcatatgatgttagttcaata

SEQ ID NO: 188662 - DNA, 256 bp, Glycine max
atcgagcttgcaacttcacccaagtctcaaacaaccttttaaacctcatcaaacatgtctctgattccatcattgctaagcaacagaaacatcatggaccccttctccaccaacatctgggcacactctgactccgacatcgaggtttccgccttcgtgaacgcacgtgtggactggaaggaaaccccggagtcgcatgtgttcaaggcggacttgccggggctgaagaaggaggaggtgaaaggtgagttggagg

SEQ ID NO: 188663 - DNA, 250 bp, Glycine max
ggatgcttgtcggtgatgtcccatgggagatgtttgttgaatcatgcaagcgtttacgcatcatgaaaggaaaggaggctattggtcttggtcttgcaccaagagccatggcaaaatgcaagaacaggagctagactagtcgcacaattcatgacctgccccatcctttgtaattgtggtgcccagttggcttagtaactaaagtaaggataagctgcagcagacacggatggacattgcagggtgttga

SEQ ID NO: 188664 - DNA, 248 bp, Glycine max
gatcctccatggcctccaccaaggaacgtgaaaacttcgtctacgtcgccaagctcgccgaacaagccgaacgctatgaagaaatggtggaagcaatgaagaatgtggcgaactaaacgtggaattgacggtagaggagcggaaccttctgtcggttgggtacaagaacgtggtgggtgctcgtagggcttcgtggaggattctttcctcgattgaacagagagaggaagctaaagggaacgatgtga

SEQ ID NO: 188665 - DNA, 237 bp, Glycine max
gcaagatcctatggaaatttatgttgatgatgaggccaagttgacccttcacgggcttgtgcagcactacatcaaattgaaagaggaagaataaaaccggaagttgaatgatcttcttgatgcactggactttaatcaagttgtgatctttgtgaaaagtgttagcagagcagctgagctggacaaactacttgtggagtgcactttccatctatatgcattcattctgacatgtcc

SEQ ID NO: 188666 - DNA, 253 bp, Glycine max
gtcctgctccaggttgtgaatatgcagttacttttgatgctggcagtggaaattatgatgtatcttgcctctgttcatatagcttttgctggaattgcacagaggaggctcaccgtccagttgactgtggcactgtttcaaagtggattttgaaaaatagtgctgaatctgaaaacatgaactggatacttgctaactcaaaaccatgtcccaagtgcaagcgaccaattgaaaaatcccaagggtgcatgca

SEQ ID NO: 188667 - DNA, 187 bp, Glycine max
ggaagttcgagcacccaacgcacggttcactgggatttcttcccaggaagcgtgctgctcgtcacaggggaaaagtgaaggcattccccaaggatgacccatccaaggcacccaagctcactgcattcttgggttacaaggccggtatgactcacattgttagagaggtcgagaagccaggatcaaa

SEQ ID NO: 188668 - DNA, 257 bp, Glycine max
cttccctgtataggcgtaccgatgaagctcatggatgtttcaggcagaaggcagttgttacttactacaatccccgtgctgattgggtcattcattattttggtcattggaagcctggtaaattttggcaatgtcgcccatgcagcaatctcaacagtatgcgttgtggtttatttctgctgctttgtgatgggttatggaccaattccaaacatcctttgctcagagattttccccactagggtgcgtggcctctg

SEQ ID NO: 188669 - DNA, 245 bp, Glycine max
actacacatccatggcaactgctggcgtgcaagaagttcgtgttccccctctaacttccacctctgagccaccttctctctttgacggaaccaccaggttgtacatcagttatatttgtccctatgcgcacgtgtttggatcactcggaactataagggactacaagacaagattaaactggttcctattgacctacaaaacaggcctgcttggtataaggagaaagtctaccctgaaaacaagg

SEQ ID NO: 188670 - DNA, 245 bp, Glycine max
cgattacaacggcggcgacggtctccggctgccgataaaggtcttcgtcgaacacgcggatgtttctccgtcgccgtcggaggcgacgacgccggcggaaggaacatactgcgagtggaatccgaaagcggcggtgaagagcaactcgacgggattctcgaagctgtggaggttccgagacgtgaagctgcggagcaacagcgacggaaaagacgcgttcgtgttcttgaaccacgcgccggcgg

SEQ ID NO: 188671 - DNA, 255 bp, Glycine max
cgcgatctcgttctgttctgtacctgcacccagccgcagcagcaagtgatcgaagcgaaaagagagtaatcagcagagaaattcatcgtcgtagttatgggtaaagttcacggatcacttgcacgtgccggtaaggttagaggccaaaccccaaaagtggccaagcaggataagaagaagaagccacgtggccgcgctcacaagaggctgcagtataatcgccgattcgtcaccgccgtggtgggattcggcaaa

SEQ ID NO: 188672 - DNA, 252 bp, Glycine max
ataccatttcattcattcttacatattgcttaattttatctcaattttgacacaccttctgaatggctttttcaagagttgcattgttaatatgcacggtaattgggtattttgtgattgcctctgcgggcaatttttaccaagattttgatatcacttggggagatgggcgtgctaagatactcaacaatggcgagcttctcactctgtctcttgacaaagcctctggctcgggtttccaatccaagaacg

SEQ ID NO: 188673 - DNA, 196 bp, Glycine max
taccactctcagtccaagggactgcgtatttggtgattccgttcaacaggtttagcattattatctgaaatggcatcggtgtctagtcagcaacagttccgttacacgcagccaccgtcaaaggttcttcatttgagaaatttgccgtgggattgtacagaggaggaactaattgagcttgggaagccattttgga

SEQ ID NO: 188674 - DNA, 287 bp, Glycine max
ggccgcgcgactctgttgaccagaaaaaccctagccaccgtgctccgcaacgacgcgaagccataatcggagttggcataacagcagcggctactcattcacgcgggttgcacgtgtacacgctacccgatctggattacgactatggcgcactggagccagccatcagcggcgacatcatgcagctgcaccaccagaagcaccaccagacttacatccccaactacaacaaggccctcgagcagctccaagacgccatcgccaagaaagattcctccgccgtcgtt

SEQ ID NO: 188675 - DNA, 202 bp, Glycine max
ggtgaagattttttttgagggaaccaaggtggggattcagccatcgccggtggttgctgcgtttagctcaagaggtcccaactcgatcacgccacagatcctgaagccagatctcatcgcgccaggtgtcaacatcctagcggggtggtctaaagccgtggggcccaccgggttgcccgttgataacaggcgcgtggatttc

SEQ ID NO: 188676 - DNA, 291 bp, Glycine max
agaaaatgggagtggagaagcagttgttgaggcctggcaccggtcccaagccaattcccggtcagaacgtcaccgttcactgcactggtttcgggaagaacggtgacctttctcagaaattctggagcaccaaggatcctggccaggaccctttcactttcaaaatcggccaaggttctgttatcaaaggatgggatgaaggtgtgcttggcatgcaaattggtgaagttgctcgtctccggtgctctccggattatgcttatggtgctggtggctttccttcttggggga

SEQ ID NO: 188677 - DNA, 288 bp, Glycine max
gcttgagaaggagcccaaatttttgaagaatggtgatgcaggtatggttaagatgattccaaccatgcccatggtggttgaaactttctctgagtatcctccccttggtcgttttgctgtgagggacatgcgtcaaactgtggctgtcggagtcatcaagagtgttgagaagaaagaccccaccggagccaaggtcaccaaggtatcctgccaagaagaagtgattgcatttgggcaattttgctagcacatgtgatcatcatcgtggttactcctttatagtagttt

SEQ ID NO: 188678 - DNA, 276 bp, Glycine max
gagccgctcgagcggctcgagcaggactcttatgccattcgaagctttgagagaggaatatctgcccaaaatgctactcattttgcttgggagatagttccggttgaagcttccactggaagagggcgggcttccaaaattgttgataaagatgaaggcctggggaagtttgatgctgcaaagttaaggaagcttagaccaagctttaaagaggtcgggggttctgtgactgctggcaatgcttctagcataagtgatggtgctgctgcattagtg

SEQ ID NO: 188679 - DNA, 281 bp, Glycine max
actcgagcgctttaatttgcactagcaagggggttggttttatttctgtttgcttgcaacactggctgtggctaataagttactttctgttttgatcattgccctcattgccatttccatgcttcaaacagtggttatggcatctcatggacatggaggccaccactacaatgacaagaaaaaatatggacctggcagtctcaaaagcttccaatgcccatcacaatgctcaaggaggtgtgggcagacccagtaccacaagcctgcatgtttttctgtca

SEQ ID NO: 188680 - DNA, 277 bp, Glycine max
  unsure (1)..(277): unsure at all n locations
gcaatggatgcagcttttggaatggaatatttgtactcaaaaaacattgtgcatttcgacttgaaatgtgancatttgcttgtaaacttgaaagatcctttacgaccaatatgcaaggttggtgattttggcttatcaaaaattaaacgaaataccttggttactggtggtgtgcgtgggactctaccttggatggcaccagaacttctgaatggcagcagcaacaaggtctctgaaaaggttgatgtgttctcctttggcatagtattatgggaaa

SEQ ID NO: 188681 - DNA, 260 bp, Glycine max
gcgacgccctagttcatttttcttctccgttctcttctctctctgttcttcactcactctcattcattcaccatgacgaaacaacatgccaattggtctccttacgataacaacggaggatcatgtgttgcgattgctggagcagattactgcgttatcgccgcagatacgagaatgtccaccggttacaacatcctcactcgcgattactccaaaatctcccaactggctgagaagtgtgtgatggcttcatctggctt

SEQ ID NO: 188682 - DNA, 247 bp, Glycine max
gcacattcatttgtaaagggtctcacagcgtaacagacttgaactacccttcaatcacattaccaaatcttggcctaaaacccgtaaccattactcgcacagtcacaaatgttggaccaccagccacatacactgcaaatgtccactcgcctgctggatataccattgtcgttgtgccaagatccttgactttcacgaaaattggggaaaagaagaaattccaagttattgtgcaggcaggcagtgt

SEQ ID NO: 188683 - DNA, 281 bp, Glycine max
ctgtgacgagcatcatggcctcaagagcagtgttattgttggctatgtgtgtgcttccggcgatggttgtggccattcgcccagcaaagaaccctttttgcgtgaagggtcgtgtctactgtgacccttgccgtgctggttttgagacctcagctaccacctacattgctggtgctgagattatgttgcaatgcaagagcagggttagcaacgaggttgtgtacacgaagaaggggtacaccgactcaaccggagcatacacaatgtacgtggatgaggat

SEQ ID NO: 188684 - DNA, 172 bp, Glycine max
ttggtaggatgctccttcttgaaatgctctctgaactcggacatgaaaacgaagaaagcgcttggaggtctcttcgttttcatgtccgagttcagagcgctgttcaagaaggagcatctaacaacaaatccgtcgctgttgtcggcaaagctggtggtgaaaaatggaaatc

SEQ ID NO: 188685 - DNA, 233 bp, Glycine max
ctatattgaagatgttgacccttatcatgattgtgagatgctgaagcagggaactgccgatgatccgagaggcatgtctcagagtcttggtgctgtgcactattttcctcaaggaggctgcggcttatgggctttgccttgctgaaattggagagatgatgactagggatttccgcggggtgaggaggagccagtgaattgaggttgtttgtttggagcacgaagtagtggtg

SEQ ID NO: 188686 - DNA, 220 bp, Glycine max
tgagagcgttgttgagtccccagtgaagaggcagagagatgatggtgaagaaaatggtgtctctgtttccatggacgcggagggtggcaaagaccctcttagtaacggtttatcatctgtgattcctgggtggttctctgaaatcagtgcaatgtggcctggagaggctcactccttgaaggtggaaaagattttgtttcaaggaatgtcagattaccaa

SEQ ID NO: 188687 - DNA, 280 bp, Glycine max
caacaaccaaccacaagtcaatcgaatgaattcttcaagactccggactctctttctgtccggagggaatttttgtttctcaatcaatcatgcctcaactggataaattcacttattttacacaatttttctggttatgccttttcttctttactttttatactttcatatgcaatgatggagatggagtacttgggatcagcagaattctaaaactacgcaaccaactggtttcaaaccgggggaacaaaatcaggagcaacgaccccaagagtttgga

SEQ ID NO: 188688 - DNA, 278 bp, Glycine max
cacgactaggagatggcaaagtcgaagaaccacaccgctcacaaccagtcctacaaggcccataagaatggcatcaaaaagccaaagaggcatcgtcacacttccaccaaagggatggatccaaagtttctgaggaaccagaggtacgcgaggaagcataacaagaagagcggtgaaacagccaccgaagaagagtaaagtgccactctcaaatgggcctattaggatttgatttgttatttaagccccatatgttttgtgtcgaatctatctttagt

SEQ ID NO: 188689 - DNA, 286 bp, Glycine max
gtcttgtttccattgatggcccaaggccacatgatccccatgatggacatcgcaaagatattggtgcaccgcaatgttattgtgactgtggtcacaacgccacataacgcagctcgtttcacaccaatctttgatcgttatattgagtctggctttcctgtaagattggttcaacttcaattcccatgtgaagaagctggagtaccaaaaggatgcgagaatctcgatatgataccttcacttgccacggccacaagtttcttcaaagcagcaaaccttctacaac

SEQ ID NO: 188690 - DNA, 260 bp, Glycine max
atactttggtttacttttgtggtgtctctggctgctgggattctccaaatttgcttccaaaagcccgccactgatggtgttggagtgtgtttcattgcttttgcaattgggaatggcttatatgcttgttgggtaagtcatagaattaagttttgttgtaaggtattgagtttgtctcttcaacctgtctccaaattccctgatctgagcaaacccacttattatgtgcttggggctgcattcttgtggatatctctatg

SEQ ID NO: 188691 - DNA, 275 bp, Glycine max
acgtcagctcggccttctgctcgaggtgaccttcttcgtttctcgcaaagtttaagtaatcatgggtaaggaaaaggttcacatcaacattgtcgtcattggacatgtcgactctgggaagtcgtctaccactggtcacttgctctacaagcttggaggtattgacaatcgtgtgattgataggttcgtgacggaggctgccgagatggacaagaggtcattcttgtatgcctgggtgctcgacaagctcactgctgagcgttaaagtggattac

SEQ ID NO: 188692 - DNA, 284 bp, Glycine max
attcgccgccgaagaattcaaagtcccgccccagaccagcgctatcatcaccaatggcaatgtcttccttaaacatggttcagaattgcgcctgattccgcgcgatagggttggtgccttttagatgttacagatgtgtctgactggagttggtgccttttagatgttacagatgtctgactggatattgacccttctcgctagatacatgaactgtagcttcatatgtagtaatcaataaataccattgttactgatttcatatattgatattgagatcaaag

SEQ ID NO: 188693 - DNA, 178 bp, Glycine max
tctctctgtgattaagagaatggcttcagatcggaaacttcacacttttgaggaggtggcaaagcacaaccagaccaaggattgctggctcatcatttctggcaaggtgtatgatgtcacccctttcatggaggatcatcccggaggtgatgaggttttgttatctgcaacagggaaa

SEQ ID NO: 188694 - DNA, 282 bp, Glycine max
gaattattgagctgaacaaaagacaatgggattgtgggaagcttttctcaattggcttcgcagcctttttttcaagcaggaaatggagttatctctaataggacttcagaatgctgggaagacttcccttgtaaatgtagttgctaccggtggatatagtgaggacatgattccaactgtgggattcaatatgaggaaagtgacaaaagggaatgttacaataaagttatgggatcttggagggcacctaggttccgcagcatgtgggaccgttactgtcgt

SEQ ID NO: 188695 - DNA, 303 bp, Glycine max
ctgctcgagccgcaccttttttgttgttccttcttctcgttcgtcgctatgtgatctctctctgcaaccatgtccgtcgagaaagagagagagacccaggtttacttggccaagcttgccgagcaggccgagagatacgaagaaatggttgagtgtatgaagaaagtagcaaaacttgatcttgatctgactgtggaagaaaggaaccttctctcagtgggatacaaaaatgtgattggtgcacgaagggcctcttggcgcataatgtcctcaattgagcagaaggaagagtctaagggaaat

SEQ ID NO: 188696 - DNA, 97 bp, Glycine max
cacaaaagcaaagatcaaacaaaccaaggacgagaacacgatgttgcttgaacttgcacttggtttattggttttggctctgtttctgcacttgcgt

SEQ ID NO: 188697 - DNA, 247 bp, Glycine max
tcggcatagataacaccgtactctctaatatcccatactatgaaaaacatggatatggggtggaggaatttaatgaaaccttatatgatgaatgggttaacaagggcgacgcaccggcattgccagagactcttaaaaattacaacaagctgttgtctcttggcttcaagattgtattcttgtcaggaagatatcttgacaaaatggccgtaacagaagcaaacctaaagaaggctggcttccacac

SEQ ID NO: 188698 - DNA, 280 bp, Glycine max
tagtggcttgtgttgtgtgactgagggccaaaggcaaaacatggaggtggatcagatgcagagagagtgcttggactacaccaaatccttattcttggagggcttcttggatggtcaatttcttcaatctcagcagctacaggatgagaacaacccggactttgtagttgaagtggtctctctcttctatgaagattctgagagacttctcaatgaccttacctttgctctaaatcagaaaagtattgacttcaaaaaagttgatgctcatgttcaccag

SEQ ID NO: 188699 - DNA, 285 bp, Glycine max
cttgttttcttcgttgctacaattttggtagcatggcaatgccatgcgtacgatatgttccctctccgaatgaacactggctatggtgcccgtactccggaggtgacatgcgcaagttggaggcttgctctggaagcacacaacatctttggctttgagaccattcctgaagagtgcgttgaagcaacaaaggactacatccatggcgaacaatatagatcagactccaaaacagttaaccaacaagcttacttttatgccagagacctcgaagtccatcccaag

SEQ ID NO: 188700 - DNA, 284 bp, Glycine max
tggatttggaactttggatatctatagcgaaacgccgacaccaccagaaaccgaactgttcccagatctctctctcactcttccaacaatcgaaatccaagaccctaccgaccccacactcaatcgaaattcttcattctcttctcatcgatggggcagaagtctctgatctacgcgttcgtgtcgcggggaacagtgattctcgcggagtacaccgaattcagcggaaacttcaactccatcgccttccagtgccttcagaagctccctgccaccaacaacaa

SEQ ID NO: 188701 - DNA, 272 bp, Glycine max
atccattggaggttcacctgctggatttccccaacattgttattaaaggaagtgaactgcaacttcctttccaggcatgtttgaaaattgagaaatttggggatcttatattgaaggccacagaaccccaaatggttttgttcaatatctatgatgactggctgaagagtatttcttcatacactgcattctccaggctgattctgattctgcgtgcactccatgtgaataatgaaaaggcaaaaatgttgctgaagcctgataaaactatc

SEQ ID NO: 188702 - DNA, 267 bp, Glycine max
atgaatatgactgtggtctttttgtattgtacttcattgaacgtttcatggaggaggcacctgaaagactgaaaaggaaagatttagatatgtttggaaggcgatggttcatacctcaagaggcgtccaatttgagagtgaaaatccttaaattgcttttagaaaaattacagaattcaataacggataattgtaactcggaatcttctccttcgtcatctgctggccctgcaactgattgtgttgagactgccagggattctgtta

SEQ ID NO: 188703 - DNA, 269 bp, Glycine max
tgcacttcgttgcttggtgatgtccctttctgttctcttcactcttggtcttgcgagagaaagccatgccagagacgaagatttttggcatgctgtttggccaaacactcccattccaagttcattgcgagatcttctaaagcctggccctgcaagtgttgaaatcgatgatcaccctatgcaaattgaagaaacacagtacccgaaaaccttcttgcataaagaagaccttcatccaggcaaaacaatgaaagtacaattcagcaagc

SEQ ID NO: 188704 - DNA, 264 bp, Glycine max
ggaatatcacagcgacgctcaggaaaaactccaaactgtgaaaaaaccactgcgatcaatggcaacgatcaaggccgtgaaagctcgccagatcttcgacagccgtggaaatccaaccgtcgaagttgacgttattctcagcgatggaagcttccacagagccgccgtgccgagcggtgcttcaacaggtgtttatgaggctttggaattaagggatggaggctcagactacctcgggaaaggtgttctcaaggctgtggagaa

SEQ ID NO: 188705 - DNA, 267 bp, Glycine max
ggaagccttcagcctcttcgacaaggacggggatggttgtattaccaccaaggaacttgggaccgtgatgcggtcacttggctagaacccaactgaggcagagctgcaggacatgataaatgaggttgatgctgatgggaatggtaccattgatttcccagaattcctgaatctcatggctcgcaagatgaaagacactgattcagaggaggagctgaaggaggctttccgcgtgtttgacaaggatcagaatggcttcatctctgc

SEQ ID NO: 188706 - DNA, 271 bp, Glycine max
cgctcgagccttatcggctcggcgtctcgagctgcaacctactcgagatgccattcaagttatcctaacagaagctgcaaagttggatgcactggctttatctcacgcccttgagctgaagctccaatctccaatttggcaggttcgcatgaaagctgtttgtgtccttgaggccatccttagaaagaaggacgatgatcatttttcaccagtggattcttacttcaccgtaaataaagatgtggtgctgagatgttctgaatctccccaa

SEQ ID NO: 188707 - DNA, 267 bp, Glycine max
gctcgcagtcacccaagaggcgaatccttaccattgctcgagatgggtgaagaagtgaaggccgtggttccagagtctgttttgaagccgcagaagagagaggaggaatgggcgttggccaagaagcaagacctcgaggctgcgaagaagaagagagccgagagccgcaaactcatctacaacagagctaagcagtacgctaaggagtacgatcaccaggagaacgaattgattcggttgaaacgcgaggccaagctgaaaggtgga

SEQ ID NO: 188708 - DNA, 265 bp, Glycine max
ctttgatctccgttaccctttttgttttcttaacagagagagagagagataatctttcgaagttcgtattcgtgtgttgtgtggtcagtcaccgatggcagcaccacctgcgagtgcacgtgccgattacgattacctcatcaagcttcttcttattggcgatacggtgtgggaaatagttgtctgcttttgcgattttctgatggttccttcacaaccagttttgtcaccaccattggcattgattttaagataagaaccattg

SEQ ID NO: 188709 - DNA, 267 bp, Glycine max
gggaaagagcgcgtgagagtggcgcgcgtgtggaagacgaggcaggggcagcacttcgttgtggagtggcgcgtgggcatcactctcttctcagactgcgtcaactcgtatctccgcgatgacaactctgacatcgttgctactgataccatgaaaaacacagtgtatgcaaaagcaaagaaatgctcagacatactctctgctgaggactttgctattttgcgtgctaagcactttgtatcattttacaagaaggttactggtgct

SEQ ID NO: 188710 - DNA, 265 bp, Glycine max
agagtctctctctcctcctcctgttctcactctgcatcgccgcaaccgttagatcgagcgacacggctacgattgtgtgtacacggcctacgttagaaccggttcggtgttgaaggggggaacggactcgaagatcgggctgaagctgtacgacaagtacggctactacatctacattaaaaacatcgaagcatggggcggcttgatgggcaagggctacagctacttcgagcgcggcaacctcgacatcttcagcggaagggga

SEQ ID NO: 188711 - DNA, 265 bp, Glycine max
ataccaagtgtcaaggcactgaccatctacaggtcaggaaccttttctattgatgttcagtatgttgacgtgagtggtttgcaaacacctgcaaagatcagcacatatactattggccctttccaatctacaaaaaatgaaaaagcaaaagttaaagtgaaagttcggttgaatgtgcatggaattatatctgtcgaatctgcaactctactggaagaggaagaagaaattgaggttccagtttacaaagaacctgcaggagaaa

SEQ ID NO: 188712 - DNA, 262 bp, Glycine max
ctcgaggccttcgcccttatgtgaagatgtacatgatgtaccaacaaggttgctttgcaggtggcacggttcttcgttgtggcccacgatttggctgagaagaacaagggtgcacgtgtgcttgttgtctgctctgagatcactgcagtcacattccgtgggccaagtgacactcaccttgatagtcttgtgggccaagcattgtttggagatggagctgctgcagtcattgtttgttctgagccaattccacaagttgaga

SEQ ID NO: 188713 - DNA, 263 bp, Glycine max
attggcgcttcatcaagatgggtatttctagggattccatgcacaagaggcgtgccactggtggcaagaaaaaggcttggagaaagaagagaaagtatgagcttgggcgtcaggcagcaaacaccaagttatcaagcaacaagacaatcaggaggattcgtgttagaggtggcaatgttaaatggagggcattgaggctggatactggcaattactcatggggtagtgaagcagttactcgcaagactcgtattctagatgtt

SEQ ID NO: 188714 - DNA, 275 bp, Glycine max
gctcaatcaaaaaggggtatactcaccttgaagtatcctatagagcatggcatagtcagcaactgggatgatatggagaagatttggcatcacacattgtacaatgtgtttcgtgttgcccctgaagaacaccctgtacttcttaccgaggcacccctcaatcccaatgccaacagagagaagatgacccaaattatgtttgagactttcaatgtgcctgccatgtatgttgcaattcaggctgtcttgtctctgtatgccagtggaagaactac

SEQ ID NO: 188715 - DNA, 266 bp, Glycine max
gggagataaaagtgcagaagctcgtcctcaatatctctgttggcgagagtggagatagtctcaccagagccgccaaggtgttggaacaacttagtggccaaaccccagtgttttccaaagcaaggtacactgttcgttcctttgggattagaagaaatgagaagattgcatgctatgtcactgtcagaggtgacaaggcaatgcaacttttggagagtggtttgaaggtgaaggaatatgaacttctcagaaggaacttcagtgat

SEQ ID NO: 188716 - DNA, 265 bp, Glycine max
ccccgccgctcgatgggaattgcgcttcaaggcgtctcgtagggctaatccgcctcacgagggtcaccaacggcacgtgcctttggggggccgaggccccctactgctggtcggcaaacggacggcgggcgcacgcgtcgcttctagcccggattctgacttagaggcgttcagtcataatccaacgcacggtagcttcgcgccactggcttttcaaccaagcgcgatgaccaattgtgcgaatcaacggttcctctcgtactag

SEQ ID NO: 188717 - DNA, 258 bp, Glycine max
  unsure (1)..(258): unsure at all n locations
actgtcccacgagaagttgttactantaaggatcacgtattcacatatgatgtttccttcacggaaagtgatatcaaatgggcatcacggtgggacacatatcttttaatgaatgattttcagatccactggttctccatcattaactctctgatgattggtcttttcctgtctggaatggtgccaattatcatgatgagaacgcttttcagagacattgccaattataatcagctagaaacccaagatgaggcccat

SEQ ID NO: 188718 - DNA, 279 bp, Glycine max
ggaattctgctcgatgctctaatgaaatctccaagagcaatgttgttgacgatatggtcaacagcaacgccatcctctatgagtccggtgaacatccagaccatgtggttgttcattaagtacgtgccttatgtaggggacatcaagatggccatggatgagtacacttctgaggtattcatgggtggaaagaacacaattgtgttgcacaacacatgtgaggatttcatgttagctgctcctattatcttggacttggtcctttttgctgagctcagc

SEQ ID NO: 188719 - DNA, 265 bp, Glycine max
tcttgatccttctttttctccttgaactcaaacatggcagatgaggtggttctgctagatttctggccaagtccatttgggatgagggtcaggattgcacttgctgaaaagggtatcaaatatgagtacaaagaagaggacttgaggaacaagagtcctcttctcctccaaatgaacccggttcacaagaagattccggttctcatccacaatggcaaacccatttgtgaatccctcattgctgttcagtacattgaggaggttt

SEQ ID NO: 188720 - DNA, 265 bp, Glycine max
  unsure (1)..(265): unsure at all n locations
atagagtncataacaaatatacaatcnatgtctcaaccacaaaagcaccaccaanagcacatgngaagatgaagnaccattggtntttgatgcctcacttctcaggcaccaactcaacctaccaaaacagtncatttggcctgatgaggaaaagccatgcatgaatgtgcctgagcttggtgtccctctcattgacttgggggggttcctctctggtgaccctgtngcaacaatggaggctgcaaggatagttggtgaggcatgc

SEQ ID NO: 188721 - DNA, 264 bp, Glycine max
gtcagtgaggaggttgccaagtacaaggttggagctcctgctcgtgttggtttggttgccccaattgatgttgttgttcctcctggcaacacagggctcgatccctcccagacctctttcttccaggtgctcaacattcctaccaagattaacaagggtactgttgaaatcattacccctgtggagctcattaagaagggagacaaggttggatcttctgaagctgcattgcttgccaagctagggataaggcccttctcgtat

SEQ ID NO: 188722 - DNA, 281 bp, Glycine max
gctcggaattctgcgcgagcaaacttataacacacactctctctctctctctctgcaatggctggaatggttcccctttgcattgcatcagtggtcactctttttgtagcaacaagtgctagaattcctggggttttcaatggtggtgcatggcagggtgcccacgccactttctacggtggaaatgatgcctctggaacaatgggtggggcatgtgggtacgggaacacatacagccaagggtatggcgtgaacaccgcggccttgagcacggcgctgtt

SEQ ID NO: 188723 - DNA, 257 bp, Glycine max
tctcgagccgattcggctcgagtgcgtctcatccctctccgtctacgcctccagcatccaacaggaccctcaccaactggttcagacagcactctccctctccctgaaccgcacccaagccaccaaaaccttcgtggctaactgcaacaaattcagaggcctgaaacccagagagcacgctgcactcaaggactgcgccgaggaaatcagcgacagcgttgaccgcctcagccggtcgctgaaggagctcaagctat

SEQ ID NO: 188724 - DNA, 127 bp, Glycine max
tgctagctactccttaattactaattagtttcattctttggtgcaagctagcttcattagttgattcatagaattataacaatggtgagtgttgaagcaatccgtaaggcacaacgtgcagaaggcc

SEQ ID NO: 188725 - DNA, 268 bp, Glycine max
agaatccgaggcgaagagaagagaaaaattaagatggaggggaaggagcaggatgtgtcgctgggagcgaacaagttcccggagagacagccgattgggacggcggcgcagagccaagacgacggcaaggactaccaggagccggcgccggcgccactggttgacccgacggagtttacgtcatggtccttttacagagcagggatagcagagtttgtggccacttttctgtttctatacatcactgtcttaaccgtcatgggagtcg

SEQ ID NO: 188726 - DNA, 261 bp, Glycine max
tctttttactgcttaaccgttcggctatctcatatatgaacaacaacatgttaggaatgaagagacggagagatgataatgaagggtccttggatttggcaaaatgtcttatgctgttttcttgtccaatagaaagcaacaagacacaacagaaaagttttggttctgtggaatttgagtgcaagacgtgcaaccgcaagttctcttcttttcaagcactgggagggcacagggcaagccacaagaggcagaagctggagg

SEQ ID NO: 188727 - DNA, 238 bp, Glycine max
tctcgagccgaatcggctcgagattggacgttttaagttggttgatgggaagttttctccggagcggaacatcaattgtgcttgcagatgatgttggccaaatatattttctgaacacaggtcaaggcgagtcccagaaagatgcaaaatatgatcagttttttcttggtgattatcgaccccttattcaggatactcagggatatgttcttgatcaggagactcaacttccacacaa

SEQ ID NO: 188728 - DNA, 279 bp, Glycine max
tggggagaagatttagtgttgtggccatggcggagtctgagaagagtactgtgcttgttacgggagccggtggtcgcacaggacaaatagtttacaaaaaattaaaagagaggccaaaccaatatgtggctagaggtctggttagaacagatgaaagcaaacagaacattggtgctgcagatgacgtttttgttggggatataagacatgctgaaagtattgttcctgcaattcaaggtatagatgctctcataatcctcacaagtgctgttccacaga

SEQ ID NO: 188729 - DNA, 279 bp, Glycine max
ctcgagccgtattattttaacatcacacaagttttgtaaaatatttgctttatttgttgtcatttaaatgtaccatatatatatatataggctcatcagaaaggacaaattggagtcaccatagtgactttcttctttgaaccaaaatctaatagtgatgctgatcgcaaggcagcaaggcgagctctggactttatgtttggctggtttgctaatcccattacatttggtgactatcctgagagtatgagatctttagttggttctagactccccaca

SEQ ID NO: 188730 - DNA, 277 bp, Glycine max
ctttaatgcagtcttgcttgactttgctgactgtgcttttgaggaacactaaaatttctctcacctcagatcaaataagtttattaattcatcttcctatatttcttgatcttgaaaaaaatccatcgttggtggccctgtcacttctaaagggaattgtcagtcgcaagatggtggtacctgaaatatatgatcttgttactacggttgctgaactgatggtgacaagtcaaatggaacccgttcgcaaaaaatgcagtaaaattctgttgcagtt

SEQ ID NO: 188731 - DNA, 276 bp, Glycine max
gcccctgcgctccgctgcaattttacactcaaaaggacctcatgtctaacatagaggagaacaaagatctgggacagatggacgtggatgcatctgatgagtcagctaacatgccatcaccccaaaagcaggaggagtctgtaaagaaaaagtatggaggaatgctgcccaaaaagccaccactcatatctaaggaccatgaacgtgcttacttcgattctgcggattgggcacttggaaagcaaggcggagagaagcctaagggaccacttgagg

SEQ ID NO: 188732 - DNA, 276 bp, Glycine max
actcgagccgattcggctcgaggcaagttcccaagactagatataactggtgagatgaacctagctgctggcattcaggtggcacaattggctcttaagcatcggcaaaataaaaagcaacagcagaggattcattgtctttgctggaagtcctgtcaagcatgaaaagaagatgctggagatgatagggagaaagttgaaaaagaatagtgttgcacttgatattgttaattttggtgaagaagatgaggggaagacagagaagctggaagcact

SEQ ID NO: 188733 - DNA, 271 bp, Glycine max
actcgagccgaatcggctcgagggaaagcctgttatccaacacaaacttagcaacatgattacggaaactgagaaaaggattaagcagaagacaccagatgaactgctattagtattaaggggtccatgttttctcagacaagaaggttggtggtcatatgaattttgctatcaaaagaagttgaggcaactacatctggaggatgataaggttgtccaggagtttgtcttgggagtgtatgatccggaggctacagctgcatttaacgaa

SEQ ID NO: 188734 - DNA, 276 bp, Glycine max
actcgagccgcggctcgaggcggaagctcctgcaagtgcggcaacacgctgcggaggctgcaacatgtacccagacttgagctacactgagtcaaccaccaccgagaccttggtcatgggagtggcacctgttaaggctcaatttgagggtgctgaaatgggtgtgcccgctgagaacgatggctgcaaatgtggaccaaactgctcctgcaagccctgcacttgcaagtgaggtgttgggagagcaagcttcaagcagagatagcccttaattag

SEQ ID NO: 188735 - DNA, 273 bp, Glycine max
actaaatatggctgacttgttggaatggtcaaagcaagataagaaacgaatgcttcatgtcgtctaccgtgttggtgaccttgatcgcaccatcaaattttacacagaatgtttaggaatgaagcttttgaggcaaagagatatcccagaggagaaatatgctaatgcttttcttggatttggccctgaagaatcccattttgttgttgaattaacatataattatggggttacctcgtatgacattggcgatggctttggacattttgcaat

SEQ ID NO: 188736 - DNA, 144 bp, Glycine max
gggacattgagttcactgataattcatgctggattcgtagtagtaagttccgagtggcggtgagggtggcaccggggactaatcaaggtggtgttcggattcgtgaagccatatctgaggcgtttgctgtcaaggatcaccgtg

SEQ ID NO: 188737 - DNA, 270 bp, Glycine max
atttagccaaaaccactatttaattttgttccttattctcactgtgtggacattccacgtcatgtctcgcaggttgtctgaggtctgcacttccgagagacatgagaagtggatggcacagtatggtaagctttacacggatgctgctgagaaggaaaaacgtttccaaatattcaaaaacaatgtgcagttacatgagtctttcaatgctgctggggacaaacctttcaacctaagcattaatcaatttgctgaccttcataatgaaga

SEQ ID NO: 188738 - DNA, 272 bp, Glycine max
ctagggtttggaagaagctgatcggagaagatggtgcagcgtctcacctaccgcaagcgccacagctatgccaccaaatccaaccagcacagagtcgtcaagactcccggtggcaagcttgtttatcagaccacgaagaagagggccagcggacccaagtgccctgtcactggaaagaggattcaagggattccacatttaaggccaacagaatataagagatcaaggttacccaaaaaccgaagactgtgaaccgtgcatatggtggtgtg

SEQ ID NO: 188739 - DNA, 274 bp, Glycine max
agcacaaccaacacctccacagcctctcctacctcccggagccatggccgccgccgactcctccgccgctccatcgcaccagttgtcgcagagggagacggacatccagatgatgctcgccgccgacgttcacctcggcaccaaaaactgcgactttcagatggaacgctacgtcttcaagcgcagaaccgatggtatttacataattaaccttggcaagacatgggagaagctccagctcgctgctaggattattgttgccattgagaaccca

SEQ ID NO: 188740 - DNA, 272 bp, Glycine max
ggtttctccaccaagagggaaatggctcccaaaccgcctagtacgggtctgtttgttggactgaacaagggacatgtcgtcaccaagaaggaattgcccccacgcccctcggatcgtaaggggaaaacaagcaagagggtgcactttgtgaggaacctcataagagaggttgctggttttgcaccctatgaaaagcgtataactgagttgctgaaggttgggaaggataagagggcacttaaggttgcaaagagaaagcttggaacccacaa

SEQ ID NO: 188741 - DNA, 271 bp, Glycine max
ggagtctgacatgtgtgcgagtcaacgggcgagtaaacccgtaaggcgcaaggaagctgattggtgggatccccctgtgggttgcaccgccgaccgaccctgatcttctgtgaagggttcgagtgagagcatacctgtcgggacccgaaagatggtgaactatgcctgagcggggcgaagcagaggaaactctggtggaggcccgcagcgatactgacgtgcaaatcgttcgtctgacttgggtataggggcgaaagactaatcgaaccgt

SEQ ID NO: 188742 - DNA, 273 bp, Glycine max
gaaatgaacaattttgggttattggtggtgtttcggcccatctttttgccgtgttccaaggtttactcaaagtgcttgctggaattgacactaacttcaccgttacctcaaaggcatcagatgaggatggagacttcgcagaactctacttgttcaaatggacaacccttctcatcccacccacgacacttctcataataaacctggtgggggttgttgcaggcatctcctatgccaacaacagtggttaccaatcatggggtcccctctttg

SEQ ID NO: 188743 - DNA, 269 bp, Glycine max
gcgttttctgcgtcatctccgattccccgacaatggccacccaaatgagcaagaagagaaagttcgtagctgatggagtgttcttcgctgaactgaacgaggttctgacaagggagttagccgaggacggatactccggcgtggaagttagggttacgccgatgcgcaccgaaatcatcatcagagccaccagaacccaagccgttctcggtgagaagggaaggagaatcagggaacttacctcggtggttcagaagaggttcaagttt

SEQ ID NO: 188744 - DNA, 269 bp, Glycine max
aaggatgcctatgtaggtgatgaagcccagtcaaaaagaggtattcttactttgaagtacccaattgagcatggtatagttagtaactgggatgacatggaaaagatctggcatcacacattttacaatgaattgcgtgttgctcctgaggagcacccagtgcttctgactgaggctccactcaacccaaaggccaacagagaaaaaatgacccaaatcatgtttgagaccttcaatgtgcctgccatgtatgtggccatccaagctgt

SEQ ID NO: 188745 - DNA, 274 bp, Glycine max
gtagaatgctgctaggcctaatccacaagggtcattccattatgggaagattactcctatataagtaattaagttggccaattcagtacctttgatcaattgaaagcttcgttatgctgttaacagtgtctcatatgttaaccctgacacccctctcaagcttgctgattacttcaacattcccggagtcttcagtgtgaatttactccaaaactctcactcaaacggtccaggatacataggcacctcagtgttgcaaacttctctccatgat

SEQ ID NO: 188746 - DNA, 269 bp, Glycine max
gtgtacatggcctagagatggccctggatgaaatatcacatgatttggcagtttcaggtggcagggtttccaatattgatgccacagaagacacttgttgcaagctacctggtactgactttttgagttctaaattctggaagaagacagaaggtcgttattccacatcaaggttctctttaggaagcataccatcaacagatgctgtgcatattgcaaccaataaagatggaaaaagagaaatattaactgcaaataacaatagattg

SEQ ID NO: 188747 - DNA, 270 bp, Glycine max
  unsure (1)..(270): unsure at all n locations
caagccntacacattgaagcgaattcgtgancctgactaccatgtgaagttgaggccacatttgtccaaagactacatggaatcaaacaagccagcagctgagcttgtgaaactcaaccctacaagtgattatgctcctggtctggaggatacccttattttgacaatgaagggtattgctgctggcatgcaaaacactggttaagaagctgcatgcctgtgttgnttcctatacaagtaacttaactttggatacacncattttaacct

SEQ ID NO: 188748 - DNA, 271 bp, Glycine max
ctcttgaaaagggctcaggcagaggctgaaggcaaaactgttgaagctaagaagcctattgttgtgaagtatggtctcaaccatgttacctacctcatcgagcagaacaaagcacagctcgttgtgattgctcacgatgtggacccaattgaattggttgtctggcttcctgctttgtgcaggaagatggaaattccgtactgtattgtgaagggaaaggcccgcttgggaacggttgtccacaagaaaactgcatccgttttgtgtttga

SEQ ID NO: 188749 - DNA, 270 bp, Glycine max
gcagccaaacactctctctctgtctctcgaaaattctcagtttgcagagaaaatctgaatcatgtcgtggcaagcgtatgtcgacgatcaccttctgtgtgacatcgaaggtaaccacctcactcacgctgctatcatcggccaagacggcagcgtttgggctcagagtaccgacttccctcagttcaaacctgaggagataactgccatcatgaatgactttaatgagcctggatcacttgctccaactggattgtatctcggtggcac

SEQ ID NO: 188750 - DNA, 270 bp, Glycine max
ggcgcggaggaatgccaccgcagctccatggagctcctggaagagcttggattccccaaaggggtgatgccattgaaggaccttgtggagtgcggccgggttcgcgaaacggggttcatttggatgaagcagaaggcgccaagccagcacttcttcgaggcaaccaagaccctcgtgagctacgcggcggaggtcaccgcctatgtggaaaagttcaagatgaagaagatgaatggcatcaagagcaagcaagtgttcatttgggtgcca

SEQ ID NO: 188751 - DNA, 272 bp, Glycine max
ctctacaagtctttccttttcaatctaattcctaaaatcccattcttcttcgctcattcctctgcactgccatcatccccaacttcctcacaaggttacaaggactaaagagttgtgccatcatgtcggacgatgaaagggaggagaaagagttggatctctcttctgccgaagttgtcaccaaatacaaaaccggtgctgagatcgttaacaaggccttgaagctagttatttcagaatgtaaaccaaaggcgaagattgtggatatttgt

SEQ ID NO: 188752 - DNA, 271 bp, Glycine max
tgggatgtcgatactgagggattaagggaatatatgagcaagtttggtgagctggaagattgcattgtcatgaaggagcggtcaactggacggtctcgtggttttggatatgttagcatttgcttcagtggatgatgctaaggaagtactatcaagtgaacatattattggtaataggacgctggaagtcaaagtggcaacaccaaaggaggaaatgagggcaccagtcaaaaaagttactagaatatttgttgccaggattccacaatca

SEQ ID NO: 188753 - DNA, 266 bp, Glycine max
cagcatcatggctccaattgcagtgggagatgtcattccagacggcattttggcttacttggatgaagaaaacaaaccccaaactgtctctattcactctctcgccgccggcaagaaagtcatcatctttggggttcccggtgccttcactcctacatgcagcttgaagcacgtgcctggcttcattgagagagcagaagagctgaaaggaaagggtgtggacgaaataatctgtatcagcgtgaatgatccctttgtgatgaact

SEQ ID NO: 188754 - DNA, 266 bp, Glycine max
gttgaacaaaaaaatggaaacaatgttgcctccgaaccaagcagaggaagcaatagtcacaacaagccttaacgagacagagagtgaagttggtatgagggaagaagagaaggagttgcaacaacaagatcactccatgttcaacatcaagagcttcctctggcatggaggctctgtttgggacgcatggttcagctgtgcttcaaatcaagtggctcaagtgctgttgacactgccctattctttctctcaactgggcatgatat

SEQ ID NO: 188755 - DNA, 265 bp, Glycine max
ggaccctcgtgtaacacttactgttggtgatggagttgcatttttgaaggatgttccagaaggaacttacgatgcagttatagtggattcatctgaccctattggtcctgctcaagagctgtttgaaaagcccttttttgcgtccgttgcaaaggctctccgtccaggaggtgttgtgtgtactcaagcagaaagtatatggcttcatatgcacatcattgaggacattgtggctaattgtcgccaaatattcaaaggttctgtc

SEQ ID NO: 188756 - DNA, 270 bp, Glycine max
ccgggatcatccacaagattgaggagaccctccatgtgggagggcacaagaaagaggagcacaaaggagaacaccatggtgagcacaaaggtgaacacaaaggagaacaccatggtgagcacaaaggtgaacacaaaggagaacaacaccatggggagcacaaggagggacttgtggataagatcaaggacaagatccatggtgatggccatgacaagggtgagaaaaagaagaagaaggacaagaagaagaaggagcatggacatgacc

SEQ ID NO: 188757 - DNA, 269 bp, Glycine max
atggcgtcgtttcttcaatcgtttctggatccgaagaagaactggttcgccgctcagcacatgaaatccctctccaaacgcctccgcaaatatgggctccgatacgacgatttgtacgatccttactacgatctggatgtgaaggaggcgctgaatcggcttccgaaagaggtggtggacgctcgccacgcgcgtcttaaacgcgccatcgatctttccatgaagcacgagtacctccctgacaatctgcagtcaatgcaaacaccatt

SEQ ID NO: 188758 - DNA, 267 bp, Glycine max
gtcttaataaacgctcttctctgaaaaacctgatttcttctcttcttctcttctctttcgtttcgatcttcgatctctgaaaatgagagagtgcatttcaatccacatcggtcaggccggtattcaggtcggaaacgcctgctgggagctctactgcctcgaacacggcattcagcctgatgggcagatgccaagtgataagactgttggtggaggtgatgatgctttcaacaccttcttcagtgaaactggggctggaaagcacgt

SEQ ID NO: 188759 - DNA, 268 bp, Glycine max
caagtctttccttttctatttaattcctaaaatcccattcttcttcgctcattcctctgcactgccatcatccccaacttcctcacaaggttagaaagactaaagagttgtgccaccatgtcggacgatgaaagggaggagaaagagttggatctctcttctgccgaagttgtcaccaaatacaaaacgttggctgagatcgttaacaaggccttgaagctagttatttcagaatgtaaaccaaaggcgaagattgtggatatttgtg

SEQ ID NO: 188760 - DNA, 268 bp, Glycine max
atcactctcaataaatgtgccatttatggtccgatttctcctggaggagtgagaattggtactcctgcaatgacatctagaggctgtttagaggaagattttgaaaccatagctgattttcttcgtagggcagctcagattaccagcattgtgcaaagagaacatgggaaatcatgcaaagatttcctcaagggtcttcagaataacaaagatatttctgagctcagaaatcgggttgagacattcagttcccagtttgcaatgccag

SEQ ID NO: 188761 - DNA, 267 bp, Glycine max
ctcgagccgcttgcctattgcacattcttcatcacttcattcaacatttctctctcccttagctagtttttaccaatggctgctgcggttagtgctgcagtctcttttccatccaccaagtctacctctctcccaagcaggacctccatcattaccccagagagagttgtattcaagaaggcttcattgcaatacagagatgtttgtagcagtggaagggtagtttccatcagagctcaagtcaccactgaggctccagccaaggtt

SEQ ID NO: 188762 - DNA, 266 bp, Glycine max
gcataacctaaacttacccttcttctctctgtgtgtgtgcgcatcaaacgcaaccagaagcagccatggccactgcaagaactgtgaaggacgtttctcctcatgagttcgtcaaagcttactcttctcacctcaagcgatctggcaagatggagctgccagagtggactgatattgtgaaaactgcaagatttaaggagttggctccttatgatcctgactggtactatgtcagagctgcttccatggcaagaaagatctacttg

SEQ ID NO: 188763 - DNA, 263 bp, Glycine max
attttatctaggtccatcgtcgatagaagatacgagaaaccaaaggcaatgtttttgtgggattggttttatgggattctagcgtcgctcgggctgtggcagaaggaggccaagatcttattcttgggcctcgataacgctggcaaaactaccttgcttcacatgctcaaagatgagagattagtccagcatcagcctacccagtatcctacatcggaggagttgagtattgggaagatcaagtttaaagcttttgatctagg

SEQ ID NO: 188764 - DNA, 293 bp, Glycine max
ctttgattccaagtttctttggtggcagaaggagcaatgttttgagatcctttctccctcgatgtgtgggacccttttaaggattttccttttcccacttctctttctgctgaaaattcagcgtttgtgagcacacgagtggattggaaggagacaccagaagcacacgtgttcaaggctgatattccagggctgaagaaggaggaagtgaagctggagattcaagatgacagaattcttcagataagtggagagaggaacgttgagaaggaagacaagaacgacacgtggca

SEQ ID NO: 188765 - DNA, 291 bp, Glycine max
ggaggaggagggtgtaggtttggttgatttgattgttgtgcatccatcgttaagctagtggcgatcggatccagctacagcatagagatcaaggaaggaaggaaggaagatgttgggtgttataaggcacaagagtattcgccctgccttctccgcaatcagacacttgtcttctgcagctaaagagattactgtcagggaggctctgaactccgcactcgatgaggaaatgtcagctgatcctaaagtgttcttgatgggtgaagaggttggggaatatcagggtgcata

SEQ ID NO: 188766 - DNA, 299 bp, Glycine max
ttcggctcgagattcacaagcttaaacctttctttcttgtaaactttattgattgattctgagaatagaactaagagggtatagacatggctagcgcaattgcagcttcttttttggttctgcttctggctttccccactgtatttggagttgaccatgaagttggtgacactagtggattggccctcggagttaattacaacacctgggcctctgggaaaactttcacagttggtgacactttggtgttcaagtatgactccactcatcaagttgatgaggttgatgagagtggatac

SEQ ID NO: 188767 - DNA, 292 bp, Glycine max
ctcgagccgcgagcttgctgttccaactgctccccaagtctcgtagtgtcgtcagaactacgctgatgagtgtgaatctgcgattaacgagcagataaatgtggaatacaatgcttcctacgtgtaccactccttgtttgcatactttgacagggacaacgtggctctcacgggatttgccaagttcttcaaggaatctagtgaggaagaaagagagcacgctgaaaagctcatgaaatatcagaacactcgcgggggaagagttgtacttcaccccatcaagaatgtcccc

SEQ ID NO: 188768 - DNA, 294 bp, Glycine max
cctcccggtacctgtattgtatcagaaggaacgtgatatcatgatgctgtaaagagagagagatatgagataattcacaattcctcctttatcttgttttatagcagtgaagaaaaaaacatagaaagcatgggcgtggacttctacaagattcttcaggtagatagaagcgccaaagatgaggatctcaagaaagcatatcgaaggctagccatgaagtggcaccctgataagaaccctaacaacaagagagaggctgaagctaaattcaagcaaatctactgaagcttatga

SEQ ID NO: 188769 - DNA, 294 bp, Glycine max
gccgctcgatgggaattgcgcttcaaggcgtctcgtagggctaatccgcctcacgagggtcaccaacggcacgtgcctttggcgggccgaggccccctactgctggtcggcaaacggacggcgggcgcacgcgtcgcttctagcccggattctgacttagaggcgttcagtcataatccaacgcacggtagcttactgccactggcttttcaaccaagcgcgatgaccaattgtgcgaatcaacggttcctctcgtactaggttgaattactattgcgacactgtcatcagtag

SEQ ID NO: 188770 - DNA, 293 bp, Glycine max
gtgaaattgatgttcgagcttgctacactgccatttctgttgcaagtgttttgaacattttggatgatgagctgatccagaatgttggagactacattataagctgtcaaacatatgagggtggcattgctggtgagcctggttctgaggctcatggtgggtacaccttttgtggattagctacaatgattctgattggtgaggttaatcacttggatctgcctcgattagttgactgggtggtattccgacaaggtaaggaatgtggattccaggggagaacaaataaactg

SEQ ID NO: 188771 - DNA, 291 bp, Glycine max
gagaggcttatggaaggagtaccgcacccaatacccagaactgtcgaagaggttttcaccgattttaagggcagacgcgctggtttgattaaggccctcactactgacgttgaaaagttttaccagcagtgcgatcccgagaaggagaatttgtgtctatatgggtttccaaatgaaacatgggaagtgaatttgcctgttgaggaagtgcctcctgaacttcctgagccagcattaggtataaactttgccagggacggcatgcaagagaaggactggctatcactggtt

SEQ ID NO: 188772 - DNA, 289 bp, Glycine max
gttggtttaccaggacctccttacaggtgatgagcttctctctgactccttccgttacaaggaaattgagaatggaatgctgtgggaagttgaggggaagtgggttgttaaaggagcagttgatgtagacattggtgcaaacccttctgctgagggtggaggagaagatgagggagttgatgatgcagctgttaaggttgttgacattgttgacacattcagacttcaggagcaacccgcattcgataagaagcagtttgttaccttcatgaagaggtttatcaagaat

SEQ ID NO: 188773 - DNA, 286 bp, Glycine max
cttctctctagggttttagcactctctctctctctcgttttcgttcttcctttctgcctctctcagtcacacaccttctcgatgaccaacgacaacatcgccgtgacagatctcacttctgccctcaatgaagataatcgcgccgacctagtcaatgctctcaagagcaagattcagagtctggctggggcgcattctgatgttctagagactctatccccgaatgtcaggaagcgtgttgaatctcttagagaaattcaggttaaacatgatgaactagaggcag

SEQ ID NO: 188774 - DNA, 289 bp, Glycine max
ggacgactgcgccgacagtggaatccctctccccaatgtcaccagcaagattctggcgaaggttatcgagtactgcaagaagcacgttgaggcgaacagtgctgatgagaagcccagtgaggatgtgctcaaggcttgggacgtggatttcgtcaacgttgatcaggccactctcttcgatctcattctggctgcaaactacttgaacatcaagagccttttggaccttacttgccagacagtagcagacatgatcaagggaaagactcctgaggaaattcgcaagaca

SEQ ID NO: 188775 - DNA, 294 bp, Glycine max
gcagcatcgctattctcttcattccatggctttgcccaaccagcaaaccgtggattaccctagtttcaaactcgttatcgtcggcgatggtggcacaggaaagacaatctttgtgaaaaggcatctcaccggagaattcgagaagaaatatgagccaaccatcggtgtggaggttcacccattggattttttcacaaactgtggaaagattcgattttactgctgggatactgctggacaggagaaatttggtggctcagaggataggatactatatccatggacaatgtgcta

SEQ ID NO: 188776 - DNA, 289 bp, Glycine max
tgctctgctctcatctcattcatattcatttcaatggcaactcaaggtcaagtcattacctgcaaagctgcggtggcctgggaacccaacaagcccttaaccgtccaagacgttcaggttgctccgcctcaggccggcgaggtccgtgtccaaatcctcttcaccgctctctgccacaccgatgcttacacttggggcggcaaggatcccgaaggtctcttcccctgtattctcggccacgaagctgcagggattgtggagagtgttggagaaggtgttactaatgttc

SEQ ID NO: 188777 - DNA, 286 bp, Glycine max
gaaattgagttaacttctggttgtttccaggaacatgtttagatcctgtagcttcggtttgtagaaggattgatgggggtcctgctgggactagtattctagagcgcatatatgaaggagtgaatgtctactacaattatactggagaagctaaatgttttgaactggatgatgatcctcatggcatgagcggttgggaatggcaggcttgcactgaaatggttatgccaatgtctagcagccaggagtccagcatgtttcccccatatgagtataattacacttc

SEQ ID NO: 188778 - DNA, 284 bp, Glycine max
ctaccacatccaaggaaggtagcaggcgcgcaaattacccaatcctgacacggggaggtagtgacaataaataacaataccgggctcattgagtctggtaattggaatgagtacaatctaaatcccttaacgaggatccattggagggcaagtctggtgccagcagccgcggtaattccagctccaatagcgtatatttaagttgttgcagttaaaaagctcgtagttggaccttgggttgggtcgatcggtccgcctccggtgtgcaccggtcggctcgtccc

SEQ ID NO: 188779 - DNA, 282 bp, Glycine max
actaattgtgcttatccttattgagagaaaaaatggccaaatcaatcaaattctttgagttgaacacaggggccaagattccttctcttgggttagggacttggcaagctgaacctggtgttgtagctgaagctctcaccacagccattcaggttggatacaggcatattgactgtgctagtgcgtataagaatcaagcagagattggttctgctcttaagaagctttttgatgatggtgtggtgaagcgtgaggacttatggatcacttccaaactctggt

SEQ ID NO: 188780 - DNA, 290 bp, Glycine max
  unsure (1)..(290): unsure at all n locations
ctcacccttcaccttgggattgggttaatcctgcctatggtgatggcttcaaaggactcactgctaagagatcctcctctggcagacctcctgagcaggaaaggaagaaaggtgtgccatggactgaagaagaacacaagttgtttcttctggggctgaagaagtatgnccaaaggtgattggaggaacatatcgcgcaattatgtgatcactcggacgccaactncaagttgctagccatgctncagaagtacttcataaggcaactatcaggaggcaaggacaagagg

SEQ ID NO: 188781 - DNA, 286 bp, Glycine max
  unsure (1)..(286): unsure at all n locations
ccaattttctagggtttatacaattttcgatggcttcttcagatatctagtanncgtgctttgtcggtgggctcgcttgggccactgacgaccaagctctcgagagagccttctctcagtacggcgaaatcgttgaaacgaagattatcaacgatcgtgagactggaagatccaggggttttggatttgtgaccttcgcctcggagcagtccatgaaagacgccatcgaagggatgaacggcctaaaccttgacggccgtaacatcactgttaacgaagctcagtc

SEQ ID NO: 188782 - DNA, 288 bp, Glycine max
aaacatggcaactcaaatgatcaagtagagaaagtttgtggcggatggagtgttcttcgccgaactgaacgaggttctgacacgtgagttggcggaggacggttactccggcgtggaggttagggttacgccgatgcgcaccgagattatcatcagagccaccagaacccaagccgttctcggtgagaagggaaggagaattagggaacttacctcagtggtgcagaagaggttcaaatttcccgagaacagtgtcgatctttatgctgagaaggtcaacaacagagg

SEQ ID NO: 188783 - DNA, 194 bp, Glycine max
  unsure (1)..(194): unsure at all n locations
cnagcctacacattgnancgaatncgtnatcctgantaccatgtnaagttgaggncanattngtccnnagactacatggantcanacaagccagcanctgagcttgtgaaantcaaccctacaagtgattatgctcctggnctggaggatacccttatnntgacantgnanggtattgctgcnggcatgcaaaa

SEQ ID NO: 188784 - DNA, 286 bp, Glycine max
ctctttggtttgctcaaccgatctccgcagcaatggtgaacgttccgaagacaaagaagacctactgcaagagcaaggagtgcaggaagcacacgctccacaaggtcacccaatacaagaagggcaaggacagcatcgccgctcagggaaaacgccgttatgaccgcaaacagtccggttacggtggccagaccaagcccgttttccacaaaaaggcgaaaaccaccaagaaaattgtgttgaggctccagtgccaaggatgcaagcatgtctcgcagcacgctat

SEQ ID NO: 188785 - DNA, 283 bp, Glycine max
ggagaaaaagagcactgtgcaagaagatgctggatccaagccacaatggaatgagagctttcttttcactgtctctgacagtgcatctgaacttaatctaaagataatggataaagacaactttagtcaagatgattgtcttggcgtggcaaccattcatctggatccagtgtttgaagcgggtagtattccagaaactgcttacaaggttgtgaaggacgaagaatattgtggagagattaaggtggctctcacttttactgttgagaaaaatgaggagcag

SEQ ID NO: 188786 - DNA, 287 bp, Glycine max
ccctcgagccgattcggctcgagcggctcgagtctctctacgctttatcgttcgagatccctcaagtgatccactaactgaaggagaacatggggttgacattcaccaagcttttcagccggcttttcgccaagaaggaaatgcgaattctgatggtgggtctcgatgcagctggtaagaccaccatcctgtacaagctcaaacttggagagatcgttaccacaattcccaccattgggttcaatgtggagactgtggaatacaagaacattagtttcactgtctgg

SEQ ID NO: 188787 - DNA, 280 bp, Glycine max
ggatactggttctgctggttaaaataacaaaatctgaatgaggggtatcaaataaattgatgagttggggaattggcctttaattgcgcccttaccatcgtatggaagaggaagggagctccctggaggaaggtatatgagttttatccatggagatggacttagtgatgtagtaattacaggtgagaatgggacaattgatgggcaaggagatgtgtggtggaacatgtggaggcagagaacacttcaatttacaagaccaaaccttgtagaatttgtg

SEQ ID NO: 188788 - DNA, 280 bp, Glycine max
cgtgaacgtccacatcgcttatggtgcgtgcatcaccatacagttcgtcaccaacgtgatcatccatgggttgcatattcatgactgcaaggtgactgggaacgccatggttcggagctctccttcgcattatggttggaggacccttgctgatggagatgggatctccatctttcgctcgactcatattttgattgatcataacttgctgtcgaattgcgctgatgggcttgtggatgctgttatggggtccactgctattactatttccaacaactac

SEQ ID NO: 188789 - DNA, 282 bp, Glycine max
tggccaggcaagctctcctcaatcaccacactactcctacttcacgctatccctttctgctcttctactacctttcaagttttcaaagtataaagatggcagagacattcctatttacctcagagtcggtgaacgagggacaccctgacaagctctgcgaccaaatctccgatgctgtcctcgacgcttgcctcgagcaggacccagacagcaaagttgcctgcgaaacatgcaccataaccaacttggtcatggtcttcggagaaatcacgaccaaggcca

SEQ ID NO: 188790 - DNA, 279 bp, Glycine max
cgggtcacatggatgcgtccggtccgggccgtacgggcagatcttcacgcccgacaactttgtgttcgggcagtccggggcaggaaacaactgggccaaggggcactacactgagggtgctgaactcattgattctgttctcgatgtggtgcgcaaggaggctgagaactgcgattgcttgcaaggttttcaagtgtgccattccctgggaggaggaactggatcaggaatgggtaccttgttgatttctaagatcagggaagagtacccagataggat

SEQ ID NO: 188791 - DNA, 252 bp, Glycine max
aactaggcttcattgttcattttgttgctggaatgcaacttggctgataaatcattaggtgttgttttctattcatcatctgttatgattttttgaatgaaaactagctcatctgctctccaatcaaatcaagccccacaaggaggaaggtcaccccttggaaaagtagaaagtagaagtgaactccttgtgcagataacagactcctgacagaagcggtgagaaggaggaatgccaaagtcagctcttttt

SEQ ID NO: 188792 - DNA, 286 bp, Glycine max
tctcgagccgctcgagccgaatcggctcgaggaaagatcccgtcgtcgcaggcgcagagtagaccagcacagcagagggaaaacggcaccgccgccgtagaagtaaacaaccatggtgcacgtctccttttacaggaactatgggaagacattcaagaagccgcgtcgtccgtacgagaaggagcgtctcgacgcggagttgaagctggttggtgagtacgggcttcggtgcaagagagagctgtggagggtgcagtacgcgctcagccgcatccgcaacaacgcg

SEQ ID NO: 188793 - DNA, 286 bp, Glycine max
ggagcagcttcaggaggagaaggatgtctcacaggaatttcgagcacccaaggtacggttcactgggatttacttcccaggaagcgtgctgctcgtcacaggggaaaagtgaaggcattccccaaggatgacccatccaaggcacccaagctcactgcattcttgggttacaaggccggtatgactcacattgttagagaggtcgagaagccaggatcaaagcttcacaagaaggaaacttgtgagcctgttacacatattgagacccctccaatggttattgttg

SEQ ID NO: 188794 - DNA, 284 bp, Glycine max
ctcgagcccctaaagagtctccgctgaactttttggtttcttgaagatgtcgttactctccgatcttatcaaccttaacctctccgacatcaccgataaggtgatcgccgagtacatatgggttggtggatctggcatggatatgaggagcaaagcaaggactctctcgggactggttaatgacccttccaagcttcccaagtggaactatgatggttccagcactggtcaagcttctggacaagatagtgaagtgatcttatatccacaagcaatttttcggg

SEQ ID NO: 188795 - DNA, 281 bp, Glycine max
cgagatggctcggacacagagaaataaagccacagagtatcatcttgggcagctcaaggctaaaatagcaaaattaaggacacaattattggagcctccaaaacatacattcttagaagagagaacaatgacaaatgcctagccagaggcgattggtggctttcctctgtctatgatctcggtttccccagtcttggaattcttttaagaaggttctagtggaggtggagaaggatttgaagttacaaaattcggtcatggacgtgttgcactgattggat

SEQ ID NO: 188796 - DNA, 282 bp, Glycine max
gaaaacggcactgcagccgtagaaggaaaaccgaccatggtgcacgtctccttttacaggaactatggtaagacgtttaagacgccccgccgtccgttcgagaaggagcgtctagacgcggagctgaagctggtgggggagtacgggctgcggtgcaagagggagctgtggagggtgcagtacgcgctcagccgcatccgcaacaacgcgcggaatctccttaccctcgacgagaagaacccgcgccggatcttcgagggcgaggctcttctccgcagaatg

SEQ ID NO: 188797 - DNA, 280 bp, Glycine max
aacaaggcaagctattctaaatcacaccatctaaccagtctgagggcctggtatccaaaacccctctagagaaaaggtttatacctctgagaagtacttccaaacagtttgtatcactcataggcatgtaaagcttctatttagaatgtttttgagttactatgctcctcatgactgttagtcaactccctttttttcatttctgggaccttttttttgcttttcactgagattccatttccgagtcctctttgaatttgttttggacacaaagtataaa

SEQ ID NO: 188798 - DNA, 279 bp, Glycine max
gcaagctcatcctagagttttaaaaatggcagcagcctcctccatggctctctcttccccatccttggctggcaaggccgtgaagctgggcccatcagcccccgaagtcgggagggtcagcatgaggaagaccgtcaccaagcaggcctcctccggaagcccatggtacggcccagaccgcgtcaagtacttgggcccattctctggcgagcccccgtcctacctcactggcgagttcccaggtgactacggctgggacactgctgggctttcggccga

SEQ ID NO: 188799 - DNA, 283 bp, Glycine max
cgctcgagccgctcgagccgattacaacgtcttctggttctttgaagaagaacccttctctttgcgcgtgtcccgttctcttctccaatcctcctccatccccactgtgtgatctgatcctaaaccctatagccatgactaccatggaggttaagctatggaatgacaagcgcgagagagaaatgtatgacaactttggggagctttatgccattatcaaagccgctgagaggcttgagaaggcgtatgttagagatataatctcaccccaggaatatgagtt

SEQ ID NO: 188800 - DNA, 287 bp, Glycine max
gcaatggtatacgtcaaggcaaagaaatcaaaagcctacttcaagagatatcaagtcaagttcaagagaagaagagagggaaaaaccgattaccgtgccaggattcggttgattaatcaggacaagaacaaatataacactccgaaataccgatttgtggttcgctttagcaacaaggacattgttgcacaaataatatctgctagcattgccggcgatttagttcttgctacagcatattcacatgagctgccacgatatggtcttgaagtaggacttacaaatta

SEQ ID NO: 188801 - DNA, 282 bp, Glycine max
aatctgcatcatggaaggtgttattctgagaagggtcattccttcggataacagttgcctcttcaatgctgttggctatgttatggatcatgacaaaaagaaagctgctgagttgagacaggttatagcagcaacagtagcaagtgatccacagaaatattgtgaagcatttcttgggaagccaaacacagagtattgtaactggattcttgactcagagaagtggggaggtgcaattgaactttcaatattagcagattattatggacgtgaaattgcagc

SEQ ID NO: 188802 - DNA, 283 bp, Glycine max
atcgaaaccatgtggcggagactcttctcttcttcaaacctcaaatccctacacacagcactctctccttctcgtccccgactcgccgcccctctcctcacccgccacgtgaccgctcattcaggtgcttcttccgtcaaaaggagggttgaagatgtcgtgccaattgctaccggccacgagcgtgaggagattcaggctgatcttgagggaagggatattcttgaaataaaccatcccgtcggcccttttggcacaaaggaagcacctgctgttgttaaat

SEQ ID NO: 188803 - DNA, 276 bp, Glycine max
gttccttttgaaggttagaagtgctacaatacaaacaatggcagctactcaggaagatgtgaagcttttgggtattgtgggaagcccatttgtgtgcagggtccagattgcccttaagttgaagggagttgaatacaaatttttggaagaaaatttgggcaacaagagtgatttgcttctcaaatacaaccctgttcacaagaaggttccagtgtttgttcacaatgagcagcccatagcagagtctcttgtgattgttgaatacattgatgagac

SEQ ID NO: 188804 - DNA, 280 bp, Glycine max
attcggagaccttgcaagacttcatcaatggctgtcaaagtttatattgtgtactactccatgtatgggcatgttgagaaactagcagaagaaataaagaaaggggcttcctctgtggaaggtgttgaggccaagttatggcaggtacctgagacactgctggatgaggtgcttggtaagatgagtgcaccacccaagagtgacgtaccagtcattacccccaatgaactatccgaggctgatggctttgtattcggcttcccaacaaggtttggaatga

SEQ ID NO: 188805 - DNA, 127 bp, Glycine max
cttacgtgggaagatcgcaaccgtgaggctgccatcgccaccgctgatactccttatcaggccgaccgtgttcttcacatgttaattgtagctgtatgtacggacactccgattccttgtacagtgg

SEQ ID NO: 188806 - DNA, 277 bp, Glycine max
gctccatccggcagtgatccagttgcaattgacttcacggggatgggaaaaggtgaggcttgggtgaatgggcaaagcatcggacgatactggcctacatatgtggcttcagatgctggttgcacggactcatgcaattatagaggaccttacagtgcatccaaatgtcgcaggaattgtggaaagccatcacagacactgtaagtgttggatatcataaaagagaagagctgaaaaatgaagataatcttgagtttatgatgtcactaagacactt

SEQ ID NO: 188807 - DNA, 278 bp, Glycine max
agaaagcaagctcatcctagagttttaaaaatggcagcagcctcctccatggctctctcttccccatccttggctggcaaggccgtgaagctgggcccatcagcccccgaagtcgggagggtcagcatgaggaagaccgtcaccaagcaggcctcctccggaagcccatggtacggcccagaccgcgtcaagtacttgggcccattctctggcgagcccccgtcctacctcactggcgagttcccaggtgactacggctgggacactgctgggctttc

SEQ ID NO: 188808 - DNA, 275 bp, Glycine max
agcagatcctccatggcctccaccaaggaacgtgaaaacttcgtctacgtcgccaagctcgccgaacaagccgaacgctatgaagaaatggtggaagcaatgaagaatgtggcgaactaaacgtggaattgacggtagaggagcggaaccttctgtcggttgggtacaagaacgtggtgggtgctcgtagggcttcgtggaggattctttcctcgattgaacagaaagaagaagctaaagggaacgatgtgagcgtgaagaggataaaggagtat

SEQ ID NO: 188809 - DNA, 277 bp, Glycine max
gtacaggagtaccattccccagatggcaatggttagatttcttccttttagtgccatctacatagagctgtactacatttttgccagtgtatggggccacagaatttatacgatctacagcatactcttcattgtcttcattattctgttgattgtcactgctttcatcactgtggctttgacatacttccaacttgctgctgaggatcatgaatggtggtggaggtctttcctttgtggtggatcaactggcttgttcatctacggctattgcttg

SEQ ID NO: 188810 - DNA, 269 bp, Glycine max
  unsure (1)..(269): unsure at all n locations
caaagcccttgtttcactttttccatccgtatggagtaacgancgccttgctccgctctctccgccgccgcgaccttccctcgtcttctctctccgctttttgtacgcttacgagtggtacaaagacagcatatgtagggaacaagtgggcaagtttgtctcggccgttcagttcgaagactgctggtaatgatgtcatgagaattgatctgggtactaccaaatcatgtgatgatgttatggaggaatagaatcccaaagttattgag

SEQ ID NO: 188811 - DNA, 277 bp, Glycine max
ggctgttgggaaagtccttcctgctttgaatggaaaattgactggtatggcattccgtgttcccaccgtggatgtctctgttgttgacctcacggtgaggctggagaaggaagcctcatatgatgaaattaaaaatgctatcaaggaggaatcagagggcaagttgaagggaattcttggttacactgaagatgatgtggtctccaccgactttgttggtgataacagatcaagtatttttgatgcaaaggctggaattgcattgaataagaatttg

SEQ ID NO: 188812 - DNA, 285 bp, Glycine max
cactcgagccgattcggctcgagcttcgttatccttctttttttctatatgaactcgaatatatcatatggcagatgaggtacttctgctagatttctggccaagtccatttgggatgagggtcaggattgcacttgctgaaaagggtatcaaatatgagtccaaagaagaggacttgcagaacaagagccctttgctcctcaaaatgaacccggttcacaagaaaatccggttctcatccacaatggcaaaccatttgtgaatctctcgttgctgttcagtaca

SEQ ID NO: 188813 - DNA, 273 bp, Glycine max
gggttagtgtgttgaatgatgctcttaagagcatgtacaatgctgagaaacgggggaagcgccaggtcatgattaggccatcctcaaaagtgattataaaattccttttggtgatgcaaaagcatgggtacattggagagtttgagtacgttgatgatcacagagctggaaaaattgttgttgaattgaatggtagactgaacaaatgtggggttattagtccgcgttttgatgttggtgtcaaagagattgaaggttggactgctaggctgc

SEQ ID NO: 188814 - DNA, 277 bp, Glycine max
gccaagtgaaagtgagaaaaaataaaaatcaaagagcataatgtcagggatcattcacaagattggggagacccttcatgtgggagggcacaagaaggaggaggagcataagggtgagcaccatgctggagaatacaaaggggagcaccatggtgaacacagtagtgagtacaaaggagagcatcatggtgaacacaaagctggagagtaccatggtgagcacaagccagagcacaaagaggggttcctagacaaagtcaaggacaagatccatggt

SEQ ID NO: 188815 - DNA, 272 bp, Glycine max
tgggacatgcggctagggattgcagtggaggcggttctggggacaggtacggaggaggtggtcgtggtggcagatatggaggcggcggtgacgggaggtacggtggtggtggaggcggcggcggcggcggaggaagctgctacagctgtggagagtctgggcattttgccagagattgcccatcaagtgctcgttgaatttactgttagggttgtttatgttttgcggattgttttaagtttttactttaatatgtcttagggattttaatg

SEQ ID NO: 188816 - DNA, 276 bp, Glycine max
  unsure (1)..(276): unsure at all n locations
aactcgagcgaatcggctcgaggcaaatgtgggctgctggatggaaaacagccatgtctcaaattggaccccaattcatatggtggctagctgctcaaagtgtattctatcatctatacaatcaagtgtcatacatgtctctggatcagatctctcctttgacgtttagcattggaaacaccatgaaacgtatatctgtcattgtgtcttccattattatcttccacacaacaacgaaacanatnnatgctcttggtgccgacattgctatccttg

SEQ ID NO: 188817 - DNA, 277 bp, Glycine max
cctccatcagcccttgaccgtctagcatctctgcatattgattacccaatgttgtttgaactccgtaatgatgctgccgagcgggtttctcattgtggggttctggagttcattgctgaggaaggcatgatatacatgccatactggatgatggagaacatgcttttacaagagggggacattgttaaagtgaaaaatgtgacacttccaaaggggacatatgttaagttacagcctcacacaaaagacttcttggatatttccaatccaaaagcta

SEQ ID NO: 188818 - DNA, 270 bp, Glycine max
attgacctcaactttctcgacaagaggctctctgtcggtgttctctcccttccctttggtgtcgtgtcttccaaatggcgaacgtttgattcctctgttcaatcgggttttggtggagaaaatcgtgcctccatcgaagaccaccgctggcattttgttacccgagaaatccaccaagctgaattccggaaaagttattgctgttggccctggctttcacagtaaggatgggaagctaattcctgtggctgtaaaggaaggtgacactgt

SEQ ID NO: 188819 - DNA, 272 bp, Glycine max
ccagtggttgatactgctaaatttcctgatagccttagaaacatgttcaatagcttccaattcaaggagaacttaatctattttcagcaacttctcggggaaggagtctttaacatctctttgttgggggcaaaacctgaagaatggaagacattagaaaggcttgcattatctaatctgtcaaagtcgaaatgggtagaacactataattttcttaagaaatgtgaaaacaaatctggaaaatctattggtttgggttctactgctatgga

SEQ ID NO: 188820 - DNA, 271 bp, Glycine max
aacgtctcctccgctgccttggtgggagacaacgcttcggccacgaccactttgccaattgactcaggtcgatacaatcctcagtttctaatcttcatttttctcagattttagattttccaatgcgtttgaatcccttttcgatcattttcagatgctagaatcggagaggttaaaagggtcaccaaggagaccaatgtatcagtcaaaataaacttggatggttctggggtggctgatagtagtactggaattcccttcctcgatcata

SEQ ID NO: 188821 - DNA, 167 bp, Glycine max
cactctcttcaaggcagatttcttgaattacgaatctacttgctcagcaatttctggatgcactgcagttttccatcttgcttgacctgtaccctcaattattgttcccaaccctcaggtagaaacgatttagcctgctgtgaaaggaaccactaataactggtact

SEQ ID NO: 188822 - DNA, 187 bp, Glycine max
actcgagccgattcggctcgagagagatggcaaatgaactacccgtcaaagcttttagttaggctgcttcagacacttctggcacccttgccccttttcatttctccagaagggaaaatggcgtcgatgacgtcactctcaagattctcttctgcggggtttgccactctgatctccacacaacata

SEQ ID NO: 188823 - DNA, 162 bp, Glycine max
atttagacatctttatcttcatgatgcaaatgggacttgtttaagacccatcactgaaggagaatggatggttaagcaaattgccggtgtgaatgaggctacaggtctaatatattttactgggaccttagatggtcctctggagtccaatttgtattgttc

SEQ ID NO: 188824 - DNA, 273 bp, Glycine max
gcacccattgtcaagcttgggagatgcctcaatggcatctccattcactgctaagcatgcatctgttgctcccaccactgatataattcgtcaaggtaggagtaccctagtgacaaccctccagatgtttaaaattctgggtctcaattgtcttgctactgcatatgtgttgagtgttatgtatctagatggtgtcaagctaggtgacatacaagccacaataagtggtgtcttcactgctgcatttttcctctttatctcacatgcacgccc

SEQ ID NO: 188825 - DNA, 270 bp, Glycine max
gaatggttaagaatgcgaagggtaggaaggaggaggtggttaccagagagtacaccattaacctccacaagcgcctccatgactgcacatttaagaagaaagctcctaaagctattaaggagataaggaaatttgcccaaaaggccatggggaccaatgatgtgagggtggatgtgaagttgaacaagtttgtctggagccagggaatcaggagtgttccaaggaggattagggtaagaattgctcgcaagaggaatgacgatgaagatg

SEQ ID NO: 188826 - DNA, 270 bp, Glycine max
ctccgtaccagtttcactgcataaatttgagagaaaactctgcaaacatgttggtttatcaggacctccttacaggtgatgagcttctctcggactccttccgttacaatgaaattgagaatggaatgctgtgggaagttgaggggaagtgggttgttaagggagcagttgatgttgacattggtgcaaacccttctgctgagggtggagaagatgagggagtcgatgacgcagctgttaaggttgttgacattgtgatacatcagattc

SEQ ID NO: 188827 - DNA, 273 bp, Glycine max
aaaggcgtgcacgtgaagccttcaagaatattcagcttggaattgatcatatattatttaagactccatgtgatggaataaaaatggaagaatcatatgagaagaactcaaagggcctagaaatcttctgcaaaagttggcttccgagtgcatctaagccaaaagcagcagtgtgttactgtcatggatatggagacacttggtcctttttctttgaaggtattgctagaaagctggcatcatctggatatgcagtttttgccatggattatc

SEQ ID NO: 188828 - DNA, 273 bp, Glycine max
atgaaaatgaaggtccttgttttcttcgttgctacaattttagtagcatggcaatgccatgcgtacgatatgttccctctctgaatgaacactggctatggtgcccgtactccggaggtgaaatgcgcaagttggacgcttgctgtggaagcacacaacatctttggctttgagaccattcctgaagagtgcgttgaagcaacaaaggaatacatccatggcgaacaatatagatcagactccaaaacagttaaccaacaagcttacttttat

SEQ ID NO: 188829 - DNA, 269 bp, Glycine max
gtctcatccgaatctggattgcttctgtagtgggagcactgctgtgactatagtgaagcagggttcaaatctgttcatgggctatatcggggattctcgagcaatcatgggatccaaggatagcaatgactccatggtggctattcagttgactgttgatttaaagcctgatttgccaagggaagcagagagaattaagaagtgcagaggtagggtatttgctttgcaagatgagcctgaagtgcctagggtgtggttgccttttgatg

SEQ ID NO: 188830 - DNA, 266 bp, Glycine max
cttcaactttacccattcatacgtggtgttgttactgctgctcttttctcttttcttttctctttagttctctcttcccctttctttttctttttcttcttcttctgagcttgtttaagcttttcttccattaacatattatcatcatgtgtggtattcttgctgttcttggttgttctgatgactctcgagccaaaagggtccgcgtgcttgagctctctcgcagattgaagcaccgtggccctgactggagtgggctccatcaa

SEQ ID NO: 188831 - DNA, 277 bp, Glycine max
  unsure (1)..(277): unsure at all n locations
gntttgactcatggattctgatcgccccagaaaaccttccaaaaatttagttcactctcgcttcttccttttcggcttctattgctgggattgggagttcttaaccgctctcctcctttttagttgttccccttaatcttgttccttcatatttttatttttttttcttattagatcagattgaacaaaagggttgctcttattttttaatcttgggggaataatagaaatagaaataagaaaagattagtgaggttgaaatgttgcaacaacgatc

SEQ ID NO: 188832 - DNA, 288 bp, Glycine max
  unsure (1)..(288): unsure at all n locations
gganaggaagcaaggtgcgatngnaacttgacaaaagaactgganntattatggttgatcgtatacttncactcatcagacgtttatccgcacaactatgggggcattccacgtaccanttgtgnaggacggtgatcccatggatgtcntgggnattatgcaggagccagttctnccgggtgctttcttcgggccaagcnanaaggcccangccangattganccggggggngaagnaggcnagagaatgccggccgtgccgtgatccgngnanaggnantacaaaga

SEQ ID NO: 188833 - DNA, 291 bp, Glycine max
ataaaaatcaaagagcataatgtcagggatcattcacaagattggggagacccttcatgtgtcgagggcacaagaaggaggaggagcataagggtgagcaccatgctggagaatacaaaggggagcaccatggtgaacacagtagtgagtacaaaggagagcatcatggtgaacacaaagctggagagtaccatggtgagcacaagccagagcacaaagaggggttcctagacaaagtcaaggacaagatccatggtgaaggcggcgccccgagggcgagaagaagaagaa

SEQ ID NO: 188834 - DNA, 287 bp, Glycine max
tgccaccagccatgggtcgtatgcacagccgcggtaagggtatatcctcttctgctttgccctacaaaaggacacctcctagctggctcaagatgccttcgcaagatgtcgaagaaaatatctgcaagtttgcgaagaaaggtttgaccccgtctcagattggtgtcattctcagagattctcacggtattgctcaggtcaatagcgtcactggcagcaaaatccttcgcatcctcaaagctcacggacttgcgcctgaaattccagaggacctgtaccatttgatt

SEQ ID NO: 188835 - DNA, 278 bp, Glycine max
  unsure (1)..(278): unsure at all n locations
tnaaaagatgtctcgcgtgtatgttggtaacttggattcacgagtcaccgagagagatctcgaagacgaattccgcgttttcggagttattcggagtgtttgggttgcacgtagaccacctggtnatgcttttattgactttgatgaccgcagagacgcacaggatgctatccgtgaattggatggcaagaatggttggagggttgagctttctcacaactctagaggtggaggtggtggtcgtggtggtcgctctggtggttctgattgaaatgtta

SEQ ID NO: 188836 - DNA, 283 bp, Glycine max
cggctcgatgcatttttgaggtgccgctgtcatgtttgggcgtggtggaccaaggaggagtgctaactccaaatattatgatattctcgggatttccaaaaatgccagtgaatatgaaatcaagaaggcctatagaaaggcggctatgaagaaccatccagataagggaggagatcctgaaaagtattaaggagttaggtcaagcatatgaagttttaagtgatcctgagaagaaagaactgtatgaccagtatggtgaagatgcccttaaagaagggatggg

SEQ ID NO: 188837 - DNA, 286 bp, Glycine max
cgcaaacgcaaacgcaaacgcaaacgcagagcgtgatccattgacgaagatggtgcagcgtctcacctaccgcaagctgcacagctatgccaccaagtccaaccaacacagggtcgtcaaaacccctggtgggaagctcgtttatcagactaccaagaagagggccagcggacccaagtgccccgtcactggcaagaggattcaggggattccacacttgaggcctgcagagtacaagaggtcaaggttacccagaaaccgtaggactgtcaaccgtgcatatggt

SEQ ID NO: 188838 - DNA, 275 bp, Glycine max
ggaggcgcagagtagagcagcagagaagagagaaaacggcactgcagccgtagaaggaaaaccgaccatggtgcacgtctccttttacaggaactatggtaagacgtttaagaagccccgccgtccgtacgagaaggagcgtctagacgcggagctgaagctggtgggggagtacgggctgcggtgcaagagggagctgtggagggtgcagtacgcgctcagccgcatccgcaacaacgcgcggaatctccttaccctcgacgagaagaaccgcg

SEQ ID NO: 188839 - DNA, 284 bp, Glycine max
cactctcacataactctctctctctctctctctctgagtccttcttcttcttcgtccagccaacatgagctacatcgttcagggtttctccaagtcactggccatgaccattctctctgagatcggtgacaaaacgttttttgcagctgcgatactggctatgcgacaccctagacgcctagtcttatcaggttgcttatcggctttgattgtgatgaccattctctctgctcttgttggctgggcagctccaaatctgatctctcgcacatggactcatcaca

SEQ ID NO: 188840 - DNA, 277 bp, Glycine max
ggaggagaggcttccataatggtaaccaagtttgacgataaatcaaagtacggcgtggttgtgatggaagagagcacagggcaggttgatatatttgttgaaaaaccgaaattgtttgttggtaacaaaatcaatgctggaatttacttgctgaacccctctgttttggatcgaattgaactgaggaccacttctatcgtgaaagaggtgtttccaaagattgcttccgagaaaaagctatatgcaatggtcttgcctagtttttggatggacttgg

SEQ ID NO: 188841 - DNA, 276 bp, Glycine max
ggaaaagctcttccatgactgctatagccttcctgtttatccttctaatcacttatacaggtacaacagatgcacaatccggggtacgttatggaagacttggcaacaacttaccaacccctcaagaagttgtggccctctacaatcaagccaacattcgcaggatgcgaatctacggtccaagcccagaagtcctcgaagcactaagaggttccaacattgagcttttgctagacattccaaatgacaacctcagtaacctagcatctagccaag

SEQ ID NO: 188842 - DNA, 274 bp, Glycine max
gtgggggagggggcagagactgatatatggtatggtcgtctctgagtctgaagatctgtgagttaattgcttttgcagagagagagagagatcgagagggatgacggttgtggacattcgatgggggccaccgttcactcgccgctagtcacttatgcttccgtcatatctctgcttacactctgtcctccgtttgtcatacttctatggtacaccatgactcttgctgacggatctgtttccgagacattccattatttaaggcagaatgggt

SEQ ID NO: 188843 - DNA, 276 bp, Glycine max
ccaggagatcccttcacttcaactggagtacctaaccaactttattgccgaattatctctcttggagtacagtatgttgagttatcctccatcactgatagctgcttctgtaattttccttgccagatttatacttttcccttcaaagaaaccatggaattctacattgcagcattacacgctctaccggccttctgacttgtgtgcatgtgtaaaagatctccatcgtctttgttgcagcagccatgattctaatttacctgcaatcagagataa

SEQ ID NO: 188844 - DNA, 283 bp, Glycine max
atgactgatgtgccttttggtgttctactctctggaggtttggactcttctttggttgcatccatcacttctcgttacttggccaacacaaaggctgctgagcagtggggatcaaagttacattcattctgtgtaggccttgagggctcaccagatttgaaggctgcaaaagaggttgctgactatctaggcactgtccaccatgagtttaccttcactgttcaggatggaatagatgccattgaagatgttatctaccatattgaaacatatgatgtgacta

SEQ ID NO: 188845 - DNA, 280 bp, Glycine max
ggacgactgcgccgacagtggaatccctctccccaatgtcaccagcaagattctggcgaaggttatcgagtactgcaagaagcacgttgaggcgaacagtgctgatgagaagcccagtgaggatgtgctcaaggcttgggacgtggatttcgtcaacgttgatcaggccactctcttcgatctcattctggctgcaaactacttgaacatcaagagccttttggaccttacttgccagacagtagcagacatgatcaagggaaagactcctgaggaaatt

SEQ ID NO: 188846 - DNA, 277 bp, Glycine max
actcgagccgctcgagccgattcggctcgaggttcaaaccggagcaaaaaaacttgttacgcatggtttcacccgacaaggatccacgagaggaagtacttcaagcatggtacatggatgatagtgatgaatatcaaagactcccccaccacaaagaacccaaggagtttgtctcgttggaccaacttgctgaacttggagtccttagctggaaattagatgctgataaccatgaaaatgatccagagctgaaaaagattcgtgaagagcgtggcta

SEQ ID NO: 188847 - DNA, 263 bp, Glycine max
ctcttgtcaaaagtgctatcgttcaggttgatgctgctccattcaaacagtggtatcttcagcactatggtgttgagattggtaggaaaaagaagacagctgccaagaaggaaactgcagaggagggtggtgatgctgctgcagctgcagaagaagccaaaaagagtaaccatgtgcagagaaaattggagaagcgccagaaagatcgaaagcttgatgctcacattgaggagcagtttggtggtgggcgtttgcttgcttgc

SEQ ID NO: 188848 - DNA, 273 bp, Glycine max
caatgtgtggcttgtccattggaaaatggactacttggttggagcaacaattgcactgccaaggctgtgacatcatgcaaggctagtgatttccactactacaaaattgaaggagttgagcattacatgagcaaatacactacaggggatagtctgagtgagagtacttgtggaaacaaatgcaccaaggattgcaagtgtgtgggttatttctaccacaaggagaattcaaggtgttgggtagcttatgatcttcaaacccttactagaggg

SEQ ID NO: 188849 - DNA, 273 bp, Glycine max
gaaatttctaatctgcaaatatattactcgatgaggagcttaatcctcacctgtctgactgcggtttagctgctttgacaccaaacactgagtgacaggtatcaactcagatggtcggttcattcggttatagtgctcctgagtttgcattatcaggagtatacactgtaaaaagtgatgtttacagctttggggtggttatgctggaactattgactggtcggaagccacttgacagtttgcgggttcgatcggatcagtcacttgtgaggt

SEQ ID NO: 188850 - DNA, 278 bp, Glycine max
cctagcagttcaatagatggtaagacatctgaaacaagcatggagtttggaaatggtgaattcagctcagaggagctaaagaaaataaaggagaacgataaacttgctgaaattgccatggccgatcctaagcgtgctaaaaggattttggctaatcgtctatcagctgctcgctcaaaagagaggaagatgcggtacatttctgaattagagctcaaagtacaaacacttcagacagagacaaccacttgtctactcagtttaccaattacagatgg

SEQ ID NO: 188851 - DNA, 279 bp, Glycine max
  unsure (1)..(279): unsure at all n locations
gctatatattatggctagcatgaaggttacatgggtggttgtgatcatgtgcatggccgtggtgggtgcaccgatgatggcgcaagcantgacatgcaatgatgtgacggtgaacatggcacagtgcctatcctacctgatgcagggaggaacaccttcaacactttgctgcagcggagtcaagaacattcttggctctgctgtcaccaccgttgacaaacaaactgtgtgcaactgtctcaaggcggatgctgctaggtacaacatcaatgaccagta

SEQ ID NO: 188852 - DNA, 270 bp, Glycine max
ccaattttctagggtttatacaattttcgatggcttcttcagatgttgagtaccgttgctttgtcggtgggctcgcttgggccactgacgaccaagctctcgagagagccttctctcagtacggcgaaatcgttgaaacgaagattatcaacgatcgtgagactggaagatccaggggttttggatttgtgaccttcgcctcggagcagtccatgaaagacgccatcgaagggatgaacggccaaaaccttgacggccgtaacatcactg

SEQ ID NO: 188853 - DNA, 268 bp, Glycine max
gaggggaaggagcaggatgtgtcgttgggagcgaacaagttccccgagagacagccaattgggacggcggcgcagagccaagacgacggcaaggactaccaggagccggcgccggcgccgctggttgacccgacggagtttacgtcatggtcgttttacagagcagggatagcagagtttgtggccacttttctgtttctctacatcactgtcttaaccgttatgggagtcgccggggctaagtctaagtgtagtaccgttgggattc

SEQ ID NO: 188854 - DNA, 274 bp, Glycine max
cttttattcgcaccgcaaacagtgagccatggccgtcggaaagaacaagcgcatctccaaggggaagaagggtggcaagaagaatgcagctgatccctttgccaagaaggattggtatgacattaaggctccttctgtttttcaagtgaaaaatgttggcaaaaccctcgtctctcgtactcagggtaccaagattgcttctgaaggactcaagcatagagtgtttgaggtctccttggctgatcttcaaggggatgaggatcatgcattcaag

SEQ ID NO: 188855 - DNA, 274 bp, Glycine max
cgactctggattccgacgtgcctatggttcccgccggctagccctcgagcagcgccggtccatcttccaagaagcccaagcgcttcgagatcaagaagtggaacgacgtcgctctctgggcttgggacatcgttgtcgataactgtgctatctgccggaaccacatcatggatctctgcatcgagtgccaagccaaccaggctagcgccactagcgaggaatgcactgtggcatggggagtctgtaaccatgcttttcacttccattgcattag

SEQ ID NO: 188856 - DNA, 280 bp, Glycine max
gaaaaaatgggttcttcttcttctatgtgtacggtgtgtgtgattttggcatcactggcctctgcagcactctgtgccaacccacgcaggccagtggatgtacaatttggccgaaactacgtgcccacatgggcctttgatcacatcaaatatttcaatggtggttctgacattcagcttcatcttgacaagtacactggtactcgctcccagtccaaagggtcttacttgtttggtcacttcagcatgtacataaagatcggtcctgggagattctgct

SEQ ID NO: 188857 - DNA, 271 bp, Glycine max
cggctcgagataatggacaacttcaaaattcagatggtaacaaagatctaaaaattggtaaagttcggatccggatctcaaccctggaagctggtcgtgtttacacaaacgcttacccattactagtcctacatccttcaggtgtcaagaagatgggtgagttgcacttggccattagattctcctgttcctcaatggttgatctgatgcaacagtatttcaagcctcacttgccaaaaatgcactataagaggccacttaacttaatgga

SEQ ID NO: 188858 - DNA, 269 bp, Glycine max
cttgagtcagttcaatcagaaatcaatgacttggactgggaaagcacctttttcctgcgccatcttccagtctccaacgtttcagacaactcagatcttgatgaagaatacaggaagacaatgaagaaatttgcactggaattggagaaacttgcagagcagcttctggacttgctgtgcgagaatctcgggctggagaaagggtacctgaagaaggtgttctatggatcaaagggtccaaattttgggactaaagtgagcaactaccc

SEQ ID NO: 188859 - DNA, 267 bp, Glycine max
tctgcaatggcttcaagtcaggaggaggtgacccttttgggagctactggaagcccatttgtgtgcagggttcatattgccctcaagttgaagggagttcaatacaaatatgtcgaagaaaatttgaggaacaagagtgaactgcttctcaaatccaacccagttcacaagaaggttccagtgtttattcacaatgagaagcccatagcagagtctcttgtgattgttgaatacattgatgagacatggaagaacaaccccatcttg

SEQ ID NO: 188860 - DNA, 273 bp, Glycine max
ggcgtagtaagcgacgaaatgcttcggggagttgaaaataagcgtagatccggggattcccgatataggtcaacctttcgaactgctgctgaatccacgggcaggcaagagacaacctggtgaactgaaacatcttagtagccagaggaaaagaaagcaaaagcgattcccgtagtagcggcgagcgaaatgggagcagcctaaaccgtgaaaacggggttgtgggagagctatacaagtgtcgtgctgctaggcgaacagcagagaatgctg

SEQ ID NO: 188861 - DNA, 266 bp, Glycine max
tgcatagacacaaattagaaagagatgaccaacttttcaaggccttccaatattttgataaagacaacagtgggtttattacaagagatgaattggaatcagccatgaaagaatatggtatgggtgatgatgcaacaatcaaggaaatcatatctgaagttgatacaattatatctgaagtggatacagatcatgatggtagaatcaactatgaagaattctctgcgatgatgaagagtgggaaccaacaacaaggcaagctattc

SEQ ID NO: 188862 - DNA, 267 bp, Glycine max
tgcatagacacaaattagaaagagatgaccaacttttcaaggccttccaatattttgataaagacaacagtgggtttattacaagagatgaattggaatcagccatgaaagaatatggtatgggtgatgatgcaacaatcaaggaaatcatatctgaagttgatacaattatatctgaagtggatacagatcatgatggtagaatcaactatgaagaattctctgcgatgatgaagagtgggaaccaacaacaaggctagctattct

SEQ ID NO: 188863 - DNA, 203 bp, Glycine max
cgcagatccctacctctcctttcaagatgcagatcttcgacaagaccctcaccggaaagaccatcagccttgaggtggacagcactgacaccatcgacaacgtcaaggccaagatccagggcaaagaaggaattcccccggaacagcaacgtctcatcttcgccgggaagcaactcgaggacggacgtacctcgccgactaca

SEQ ID NO: 188864 - DNA, 263 bp, Glycine max
ctcgagctcgagccttcaagttctgattatcaaggtgttttgatctgttgagggggtttaatactgaaaatgggacaagtgttaggttgcgtgcaagtggatcagtcaagtttggccatcaatgaagttatcgggaagtacgatgatgatctcgaacctggttgccactgtgttccatggtgtttcgggagtcgtgtgggctggtgtccttctttggcgggtcaaacagctagatgttcgctggtggaaccaagactaaggac

SEQ ID NO: 188865 - DNA, 266 bp, Glycine max
cttcaaagagcgtcacagttctagtgaagatgacaatgaacttagaagagggccttggactctggaagaggataacttgctctcccaatatatttttaatcatggggaatggcgatggaatttgctggctaaacgttcaggattaaagagaactgggaaaagttgcagattaaggtggctaaattatctaaagccagatgtaaaacggggaaatttaaccccacaagagcaacttataattcttgaactccactcaaagtggggaa

SEQ ID NO: 188866 - DNA, 272 bp, Glycine max
caacaccgtggattaccctagtttcaaactcgttatcgtcggcgatggtggcacaggaaagacaacctttgtgaaaaggcatctcaccggagaattcgagaagaaatatgagccaaccatcggtgtggacgttcacccattggattttttcacaaactgtggaaagattcgattttactgctgggatactgctggacaggagaaatttggtggcctcagagatggatactatatccatggacaatgtgctattatcatgtttgatgttactg

SEQ ID NO: 188867 - DNA, 268 bp, Glycine max
atttggggtaaggtcaccaggcctcatggtaacagtggtatagttcgtgctaagttcaagtccaatctgccgcccagatcaatgggagcaagggttagagtcttcatgtatccaagcaatatatgagtgatatgaatggaataatcaatggaaataaaagtattatacttcagttatgatggggccgtggtagaaagtgatgaataatgcaggttctcaagactcgtgagtcgtggagtttgtttgtcagggtattgataggaattat

SEQ ID NO: 188868 - DNA, 272 bp, Glycine max
attactcagcactgccactcttcaatcacactaatggctgtcaccttctcagatcctcacaccgaagagggcatcaaatccctcgatcaattcctttctgggaaaacctatatctctggggatcaattgacaaaggatgatatcaaagtgtatgcagctgttgtggaaaagccaggagactcttttcctaatgctgctaagtggtacgatgccgtctcttctcaacttgctccaagcttccctgggcacgctcaaggggtaagattcagtgg

SEQ ID NO: 188869 - DNA, 273 bp, Glycine max
tggtgaccttttgggagttgtgggaagcccatttctacacagggttcagattgctctcaagttgaagggagttgaatacaaatatttggaagacgatttgaacaacaagagtgatttgctcctcaagtataacccagtttacaaaatgattccagtgcttgttcacaatgagaagcccatttcagagtcccttgtgattgttgagtacattgatgacacatggaaaaacaatcccatcttgccttctgatccctaccaaagagccttggctcg

SEQ ID NO: 188870 - DNA, 272 bp, Glycine max
aagctcgagcgcttgcctcgaacaggacccagacagcaaggttgcctgcgaaacatgcacataaaccaacttggtcatggacttcggagaaatcacgaccaaggccaatgttgactacgagaagatagtgcgtgtacaccctgagcaatatcagggctctgctgctcaatgttgacgaggaccttgcagttgtcggcatccagtcccacatcgtttgagacaaagccgatgttcccgaatatcttgttgtttggagcgatccgagaaaaact

SEQ ID NO: 188871 - DNA, 274 bp, Glycine max
caagaaggccggtattgttggaaaatacggcacccgatatggtgctagtttaaggaaacaaatcaagaagatggaagttagtcagcacagtaaattcttctgcgagttctgtggaaagtatgctgttaagaggaaggctgtgggtatttggggctgcaaagattgtggaaaagtgaaggctggaggtgcttacacattgaacactgccagtgctgtcactgtccggagcaccattcggaggctgagagagcagactgagagttgaaagcagttt

SEQ ID NO: 188872 - DNA, 276 bp, Glycine max
aatggctccaaagaaaggtgcgaaaggtggagttgtagcagcaaagaagaaggttcaggagaaggtaacgaaccctttgttcgagaagcgtccgaagcagttcgggatcggaggcgcgctgccgccgaagcgggacctgacgcgcttcgtgaagtggccgaagaacgtccaaatccaacgcaagaagcgcatcctcaagcagaggctcaaggtccctccggctctcaaccagttcaccaaaaccctcgacaaaaatctcgcaacaaatctttttaa

SEQ ID NO: 188873 - DNA, 277 bp, Glycine max
gttgccatgaggtttcaccagtaccaggtggtgggaagggctcttcctttcgaatccgatgagcatcctaagatctaccgcatgaaactctgggccaccaacgaggtccgtgccttatccaagttctggtatttttttcgaaaattgaagaaggttaagaaaagcaatggacaagtgctagccatcaatgagatttttgagaagaatcctaccaagattaagaattatggaatttggctgcgttatcagagccgcactggttatcacaatatgtaca

SEQ ID NO: 188874 - DNA, 280 bp, Glycine max
ccaccctccacatagcttccaccctctcaacccccaccaacttcatcaagtcctcctgcagcaccacccagtacccagccctctgcatccagtccctctccgtctacgcctccaccatccagcaagacccccacgagctcgtccagacagccctctccctctccctcaaccacaccgaggccaccaaaaccttcgtcgcaaaatgcaacaaattcagaggcctcaaaccgagagaatacgctgccttgaaggactgcgctgaagaaatcagtgacagcgt

SEQ ID NO: 188875 - DNA, 277 bp, Glycine max
  unsure (1)..(277): unsure at all n locations
gaagtgttctcctaattcagtgagtgaggttctgaattctttaacttgaanatgatggcatcatttgcagggactactcagaagtgcaaagcatgtgagaagactgtntatttggtggatcagctcactgctgacaacangatctatcacaaatcatgtttcagatgctaccactgcaagggtacccttaagttgagtaactattgttcctttgagggtgtgttatactgtaagcctcatttgatcaactctttaagaagactggcagcttggacaa

SEQ ID NO: 188876 - DNA, 273 bp, Glycine max
caaaaacatcgaaagagagaggcatggccgagcaaaccttcatcatgatcaagccagatggcgttcaaagaggccttattggcgagattattagcagatttgagaggaagggtttttacttgaaagggttgaaactcgttactgtggaccgtccttttgctgagaagcactatgctgatttgtctgcaaagcctttctttagtggtttggtggattacattgtctctggccctgttgttgccatgatctgggagggtaagaatgttgttacaa

SEQ ID NO: 188877 - DNA, 273 bp, Glycine max
tgggcgccctttttttgggtgcggatcactatgaaactgctcgtggtgtacagaaagtacttcaggactacaagaatcttcaagatatcattgctattttgggaatggatgagctcagtgaagatgataaattgactgttgcccgtgcccgtaagattcagcgattcttaagccagcctttccatgttgcagaagtcttcactggtgccccaggaaaatatgttgagttgaaggagaacatcaccagtttccagggtgtgttggatggcaaat

SEQ ID NO: 188878 - DNA, 274 bp, Glycine max
gtttgtattctttgttgctgcagtagttttggtagcatggccatgccatggcgcaggctaccaaaggttccctctccgaatgaaaactgtctatggtgagcgttcttcggaggtaaaatgcgcaagttttaggcttgctgtggaaccacacaacatccgagcatttaaaaccattcctgaagagtgcgttgaaccaacaaaggactacattaatggcgaacaatttagatcagactctaaaacagttaaccagcaagctttcttttatgctagt

SEQ ID NO: 188879 - DNA, 274 bp, Glycine max
attgtagaaggcgatggccgcgcgagcactgttgaccagaaaaaccctagccaccgtgctccgcaacgacgcgaacccataatcggagttggcataacagcagcggctactcattcacgcgggttgcacgtgtacacgctacccgatctggattacgactatggcgcactggagccagccatcagcggcgacatcatgcagctgcaccaccagaagcaccaccagacttacatcaccaactacaacaaggccctcgagcagctccaagacgcca

SEQ ID NO: 188880 - DNA, 275 bp, Glycine max
atggtcttcggagagatcacaaccaaggccaacgtagactatgaaaagattgtccgcgacacatgccgcgaaattggattcatctctgatgatgttggtcttgatgctgacaaatgcaaggtgttggtcaacattgagcaacagagcccggatatcgcccagggtgtgcacggccacttcaccaagcgcccagaggaggttggtgctggtgaccagggtcacatgtttgggtatgccaccgatgaaacccccgagtacatgcccctcagccatgt

SEQ ID NO: 188881 - DNA, 279 bp, Glycine max
gttagttgggagaaggaaaacgtttctagtgaggccctggaagctgctcgtattgcttgcaacaagtacatggccaaatttgctggaaaggatgctttccacttgagagtcagggtgcacccattccatgttcttaggatcaacaagatgctttcgtgtgccggagctgataggctccaaactggaatgagaggtgcttttggaaagccacagggtacttgtgctagagtggctattggacaggtccttctttctgtccgctgcaaggacagcaacagc

SEQ ID NO: 188882 - DNA, 282 bp, Glycine max
tgacccccttaatactcttcacattcctctgtggttgagcacagccaaactcaaagaagaaagaagaaaatccagcgaaagtaaaaccagcatccgaaaaagatgagcagcatcggaacaggttacgatctctccgtcaccactttctcccccgatggccgtgttttccagatcgagtatgctgccaaagccgtcgataacagcgggactgttattgggatcaagtgcaaagatggggttgtgttgggcgttgagaagcttattccgtcgaaaatgatgctt

SEQ ID NO: 188883 - DNA, 281 bp, Glycine max
taagctcgagctcgagccgctcgagccgtgccaatactcaggtgcattttgaaacaacaggtcctgagatatgggaacatacaaatggacaagtagacatatttgttatgggaataggtagtggaggcacagtctctggggttggacaatatcttaaatccaaaaatcctaatgttaagatatatggagtggagccaagtgaaagcaatgtgctgaatggtggtaaacctggtcctcatcatataactggcaatggggttggattcaaaccagacatattg

SEQ ID NO: 188884 - DNA, 270 bp, Glycine max
cccttaatttctatctccaatccctcagcaaaacgcagcaaatgggtcggcttaatctcctacttgtgtggtcactctcattaacactgtccctttattatctacacccaatctctgctcagctcagtccaaaccactatgctaaaacatgccccaatcttgaaagcatcgttagacaggccgttaccaagaagttccaacaaacctttgtcaccgtcccagccacccttcgtctcttctttcatgattgctttgtgcagggttgtgatg

SEQ ID NO: 188885 - DNA, 273 bp, Glycine max
caagatctctctctctgtaatcgaaaatgagcaagggaccgggtctctttaccgatatcggcaaaaaatccaaagatcttttgactaaggactacaactccgatcagaaactcaccatttcctcatacagcatctccggagtggccctcacttcaacatctgtcaagaaaggaggactctccactggggatgtggcagcactgtacaagtataagaacactattattgatgttaaactggacaccgcatcaactatctccacaaccctcacat

SEQ ID NO: 188886 - DNA, 275 bp, Glycine max
  unsure (1)..(275): unsure at all n locations
agggtccatggtcgccggaagangacgtcattctgagccgtctggtnagcaagttcggcgcgagaaattggancctcatncgcgcgcgggannnagcggaagatccggcaagtcgngccggctccggtggtgcaaccngctcgatcccgcagtcaagcgcanacccttcaccgatgaggaggaccagatgacagttgctgctcntgcatccatgggaacaaatgggcagccattgccaggcttctaccaggaagaacagataatgcgattaagac

SEQ ID NO: 188887 - DNA, 275 bp, Glycine max
gtatttgaagtatagagatggcagagacattcctatttacctcagaatcagtgaacgagggacaccctgacaagctctgtgaccaaatctctgatgctgtcctcgacgcttgcctcgaacaggacacagacagcaaggttgcactgcgaaacatgcaccaaaaccaacttggtcatggtcttcggagaaatcacgaccaaggccgatgttgactacgagaagatagtgcgtgacacctgcaggagcatcggctttgtctcaaacgatgtgggact

SEQ ID NO: 188888 - DNA, 252 bp, Glycine max
acactaccaacctgctttgcatgatgaagtttggagattggatcggatagctaaggatggtgcacttcacaaaaaattgattcaggcgaaaattgtaactgtagaagatttcctacgtcttcttgttcgtgagccacagaagttaagaagtatacttggtagtggaatgtccaatagaatgtgggagaatactgtggagcatgccaagacatgtgtcttgggtggcaatactttgtatactacattgatgaa

SEQ ID NO: 188889 - DNA, 277 bp, Glycine max
ccctaatcgagatcttctccgagctcatgggccgccgcgacggctgctccaaggggaaaggggactccatgcacttttataggaaggaaggtggcttctacggtggccatggaatcgttggggcgcaggttccgcttgggtgtggcttggcttttgctcagaagtattgtaaagatgagaatgttacgttttctatgtacggtgatggtgctgccaatcagggccagttgttcgaggcgcttaacatttccgctctttgggatctcccctccatttt

SEQ ID NO: 188890 - DNA, 274 bp, Glycine max
acagaacctgctgaggctgttaagagagcatatagtataactgattctactattttagacaaatcaggtgaattgggtagagggggttcaactgcggttacagcaatattgatcaactgttacaagctactagtggccaatattggggattcccgggctgtcttatgtaagaatggcgtagcaagacaactatcggtggatcatgaaccaagcatagaaagtgaagatataaaaaacagaggtggttttgtgtcaaacttcccaggggatgtgc

SEQ ID NO: 188891 - DNA, 270 bp, Glycine max
gtttgttgtgagctataagctagtttatcgtgaggagaatatgaagttgtttgttttctttgttgctgcagtagttttggtagcatggccatgccatggcgcaggctaccaaaggttccctctccgaatgaaaactggctatggtgagcgttcttcggaggtaaaatgcgcaagttttaggcttgctgtggaagcacacaacatccgagcctttaaaaccattcctgaagagtgcgttgaaccaacaaaggactacattaatggcgaaca

SEQ ID NO: 188892 - DNA, 269 bp, Glycine max
caaatccataactttctgggaatcaaacgatgatgatgtttgaagatatgggtttttgtggggatttggatatgttttctgctccccttggagaaggggacattaccacacggcatactgagtaagaggtgatagttgaggatgattatagtgatgaagaaattgatgtagacgagctcgagaggaggatgtggagggacaaaatgcgtctgaagcgattgaaggagcagagtaaacctaaggaaggaattgatgctgtgaagcagagg

SEQ ID NO: 188893 - DNA, 269 bp, Glycine max
gcacaattggtcatcgcgcttggttgaaaagccagtggcgcgaactaccgtgcgttggattatgactgaacgcctctaagtcagaatccgggctagaagcgacgcgtgcgcccaccgtccgtttgccgaccagcagtagggggcctcggaaccccaaaggcacgtgccgttggtgaccctcgtgaggcggattagccctacgagacgccttgaagcgcaatacccatcgagcggcgggtagaatcctttgcagacgaatcaaagcgaca

SEQ ID NO: 188894 - DNA, 274 bp, Glycine max
caccaatctcacacttgccacttataatagtcctcttgttatcattttctttagcaaattcagcctcactacaagaaagttttgtccaatgtctcaacctgaattcggacagaacatttccattttactcatcaatttacactccaagcaacccttccttcaccagcatccttgactcctccgcacagaatctaaggcttttggtgccttcagcgccaaaacccgagttcatattcacaccctcccgtgattcccatgttcaagcagcagtgat

SEQ ID NO: 188895 - DNA, 273 bp, Glycine max
gttacctgaaagcaagtaccctgtagttcgattatccgaaatacctgctaagcagttggaaaatgataaatctgagcagaaaaaaattgttattagacctaggcctaataaaaacagtttgaatgatgctaacggagttgggaggaaaggaaaccctttaagaagtgtggaagaaaggaaggaggaatatgaccgggcacgggcacgtatctttagtagccctagaagctctgaatcaggtgatacctcatccgtggttccaatggatgggag

SEQ ID NO: 188896 - DNA, 275 bp, Glycine max
tgcacaactccaccactgtgcaatggccgacgaggaacctgttgatcagaagagatatcttgaagagtcttgcaaaccaaaatgtgtaaaaccattactagaataccaggcgtgcattaaaaggatacatggtgatgaatctgggcagaaacactgcactggacaatattttgattattggtcttgtattgacaaatgtgttgcaccgaagctattcaccaaactgaagtaaatcgggaaggatttgatggctatcattgcattctgttctgttt

SEQ ID NO: 188897 - DNA, 273 bp, Glycine max
gttcacaatttcaaaatggctaggggactaaagaagcatttgaaaaggctcaatgctcctaagcattggatgcttgacaaactgggtggtgcatttgcgcctaaaccctcatctggaccacacaaatcgagggattgcctccccctcattcttattctgcgaaaccggctgaagtatgctctgacataccgtgaagtcattgctattctgatgcagcgccatgttcttgttgatggcaaagtcaggactgacgagacttaccctgctggtttc

SEQ ID NO: 188898 - DNA, 264 bp, Glycine max
tctgactgaacataaacttggtaaaaaggtgtttgtcaatgcggttggtttcttgcgtgtccggcgaagtggtttatatgctagcagcagccaatttattgatttgctggatgatacacgaattcatcctgaatcttatattcttgcacaagagttggccaaagatgtgtatgaagaagatggcacaggtgatgcaaatgatgatgatgatgcactggagatggccatagagcatgtgagatgacgacctagttatttgaaaaa

SEQ ID NO: 188899 - DNA, 270 bp, Glycine max
atggaggcagtgatggctatacttggaggtggtgcacatgttggtgttcttcttcaggggaaaaaagttagagatgacaatagaacacttgtgcagactggtatatcttgcaatgaaaatttggataccctgagtttcatgttggagcccacttcactacgagcttctccaactatttgtgttggtgatccttcttctcaatgtgaaacatcccagcctacatggcccacagaaactcctgtcttagattcaggagttactgataccttg

SEQ ID NO: 188900 - DNA, 275 bp, Glycine max
atctagcaaagttgatcccttccagcatctcaaactcgtccccaattccgacggcacgatcactcgccagcgtgatgacccacccatctcaccctcactcaatcccacccttcccgtcctcacccaagacgcaaccatcaaccgatcaaacaacaccttcgcccgcatattcctactccgcgaagcactcgattcctccccctccaacaacctccctctcgtcgtttacttccacggcggcggcttcgtcctcttcagcgccgcctctgacttct

SEQ ID NO: 188901 - DNA, 269 bp, Glycine max
atcttgttctatctgtgacgagcatcatggcctcaagagcagtgttattgttggctatgtgtgtgcttccggcgatggttgtggccattcgcccagcaaagaaccctttttgcgtgaagggtcgtgtctactgtgacccttgccgtgctggttttgagacctcagctaccacctacattgctggtgctgagattatgttgcaatgcaagagcagggttagcaacgaggttgtgtacacgaagaaggggtacaccgactcaaccggagca

SEQ ID NO: 188902 - DNA, 269 bp, Glycine max
agaatatgaagttgtttgtattctttgttgctgcagtagttttggtagcatggccatgccatggcgcaggctaccaaaggttccctctccgaatgaaaactggctatggtgagcgttcttcggaggtaaaatgcgcaagttttaggcttgctgtggaagcacacaacatccgagctattaaaaccattcctgaagagtgcgttgaaccaacaaaggactacattaatggcgaacaatttagatcagactctaaaacagttaaccaacaa

SEQ ID NO: 188903 - DNA, 267 bp, Glycine max
gtacaattcttcgttcgttctctgcagttatatcctttttgagcttcaatggcggacgctgaaaccttcgctttccaggctgagatcaaccagcttctaagtctcatcatcaacacattctacagcaacaaggagattttcttgcgtgaactcatcagcaatgcttctgatgctttggataagattcgattcgagagcttaaccgacaagagcaagctcgatgctcagccagagctcttcattcgtcttgtgcctgacaaggataac

SEQ ID NO: 188904 - DNA, 269 bp, Glycine max
  unsure (1)..(269): unsure at all n locations
accgatctcgcgccaaatacaaattcgttacaaccctacccagggttccggcgagcatggccgacggtccggcgagtccaggcggcggtagccacgagagcggcgagcacagccctcgctctaacgtgcgcgngcaggacaggtacctccccatcgctaacataagccgcatcatgaagaaggcactacctgcgaacggtaaaatcgccaaggacgccaaagagaccgttcaggaatgcgtatccgacttcatcagtttcatcaccagc

SEQ ID NO: 188905 - DNA, 269 bp, Glycine max
ggttcttcccctcctaaagcagcacaaagtgatgtatttcactcataccgattccaggcttgataacaatgacattccacgttccatacagaaactaagaagccgtgtaaattacagagcattgaaatattcagctccaattgaagaacttggaaacacactggtatctagaatgcaacagaatggaaatccttatcttgcccttcatctgagatatgagaaggatatgcttgcatttacaggctgcagtcacaatttgactgcagaag

SEQ ID NO: 188906 - DNA, 269 bp, Glycine max
acgcacggcctttgtgccggcgacgcatcattcaaatttctgccctatcaactttcgatggtaggatagtggcctaccatggtggtgacgggtgacggagaattagggttcgattccggagtgggagcctgagaaacggctaccacatccaaggaaggcagcaggcgcgcaaattacccaatcctgacacggggaggtagtgacaataaataacaataccgggctcattgagtctggtaattggaatgagtacaatctaaatcccttaa

SEQ ID NO: 188907 - DNA, 267 bp, Glycine max
ctgcaccctactttaactgatgtaatagtattcacatctactccagacaaagtgaacaacaaatactacctgggacctgctccacttgaagacatggctaggcaaatagcaactgcatatggcccttgcggaaacaacagggattacattttccttctagaaaaggccatgtatgatattggccatgaggatgacttagtgatagagcttgccaatgaagtgaggaaagtacttggaatgggaaatgtagtaccaaaggagaagaaa

SEQ ID NO: 188908 - DNA, 268 bp, Glycine max
attggccgatggtgtgcaggggttgctccagattggggagcttgctgaggctgtcagtgtttttctggaaggactctgctctgaggggttttcagtccttcattaggtttggtccagtgttgcttctgcttataatgtggagctgctttcttagtctgacttcgatgtattgtctggtttacgtgcttgttagcatgggtgttgctggagtagctgtccaatacttgggttatactcctgggcttttcattgtgggactttttgccat

SEQ ID NO: 188909 - DNA, 271 bp, Glycine max
ctcgagccggttgccgaacattccagaaggctcaaagatatgacgacacgtctcgctcacgaaaccaccaaagccacgcaaactgctcaagacttgtccaatttgcgcaggctcagacaagcctttgtagctttgaatgtgtggcaaccagaggttgtccggggtaggcaaaaacaaatggtagagcaaagtgttgtgcctgctgaatgtcggatacatgcgcttgagaacggattcaagctttgtaagcaacagattctgggattggaga

SEQ ID NO: 188910 - DNA, 274 bp, Glycine max
gaattagttatcttgagaaacattattcccattgctatatattatggctagcatgaaggttacatgggtggttgtgatcatgtgcatggccgtggtgggtgcaccgatgatggcgcaagccatgacatgcaatgatgtgacggtgaacatggcacagtgcctatcctacctgatgcagggaggaacaccttcaacactttgctgcagcggagtcaagaacattcttggctctgctgtcaccaccgttgacaaacaaactgtgtgcaactgtctc

SEQ ID NO: 188911 - DNA, 279 bp, Glycine max
gttagaagtgctacaatacaaacaatggcagctactcaggaagatgtgaagcttttgggtattgtgggaagcccatttgtgtgcagggtccagattgcccttaagttgaagggagttgaatacaaatttttggaagaaaatttgggcaacaagagtgatttgcttctcaaatacaaccctgttcacaagaaggttccagtgtttgttcacaatgagcagcccatagcagagtctcttgtgattgttgaatacattgatgagacatggaagaacaacccc

SEQ ID NO: 188912 - DNA, 255 bp, Glycine max
ctcgagcggctggggtaccatggaagtgatgggtctgatgttgggggagttcgtggatgagtacaccgttcgcgttgtggatgtgtttgcgatgcctcagagtgggaccggtgtcagcgttgaagctgttgatcatgtttttcagactaatatgcttgatatgttgaagcaaactggaaggccggagatggttgtggggtggtatcactcgcatcctggatttgggtgttggctttctggagtggacattaatac

SEQ ID NO: 188913 - DNA, 264 bp, Glycine max
cccaagtaccctcgcattagcgcgcctccaagaaataagcttgatcattatcagatcctgaaataccctctgaccactgaatccgccatgaagaagattgaggacaacaacactttggttttcattgtcgacctgcgtgccgacaagaagaagatcaaggatgccgtgaagaaaatgtatgacatccaggccaagaaagttaacaccttgatcaggcctgatggaaccaagaaggcttatgtccggttgacccctgattacgat

SEQ ID NO: 188914 - DNA, 261 bp, Glycine max
cccacaaatagtcaaacaaggggatgatggtaactctggatccagtgctgtttgtgatgtaatatgcttgcaggctctctcaaagagaattcattatggaaaatatgtagctgaggcaaaataccaagctagtccagattcatataaagatgccattatagcacaggacaaggacaagttgatggaattgctaacatatcctgaagttgaagaggcaattaagaggagagttgacatgaagaccaagacttatgggcaaga

SEQ ID NO: 188915 - DNA, 267 bp, Glycine max
tctagggttctattcattttccgatggcttctgcagatgttgagtaccgttgctttgtcggtgggctcgcttgggccactgacgaccatgccctcgagagagccttctctcagtacggcgaaatcgttgaaacgaagattatcaacgatcgtgagactggcagatccaggggttttggatttgtgaccttcgcctcggagcagtccatgaaagatgcgatcggagcgatgaatggacagaacttggacggccgtaacatcactgtca

SEQ ID NO: 188916 - DNA, 264 bp, Glycine max
acaagcctcaggtaagccaaaaccatggttaagcataacaatgttatcccaaacggacacttccgtaagcactggcagaactatgtgaagacttggttcaatcagccagcacggaagacaaggagacgattggctcgtcagaagaaagctgtgaagatattccccagacctacggctggacctctcaggcccattgtacatggtcaaactttgaaatacaacatgaaagtgagaggtggaaggggattttctcttgaagaactc

SEQ ID NO: 188917 - DNA, 261 bp, Glycine max
ctcaagcgatctggcaagatggagctgccagagtggactgatattgtgaaaactgcaagatttaaggagttggctccttatgatcctgactggtactatgtcagagctgcttccatggcaagaaagatctacttgagaggaggacttggtgttggtgcctttcagaggatttatggtgggagcaagaggaatggtagccgccctcctcatttctgcaagagcagtggtgctgttgctcgtcacattcttcaacagttgcag

SEQ ID NO: 188918 - DNA, 247 bp, Glycine max
  unsure (1)..(247): unsure at all n locations
tctcgagcctancaaccagagatgtagcatccaaagaaggtttttggttcggctgctcgggactcatctgctccgtctctccccattcaacttctcctgttcagatacggtggagaaagatttggtattcaaagtgcaatactgtggaatatgccactcagatctacatattttaaagaacgagtggcgcaacacttcctatcctctgggacctgggcacgagattgctggtgtggtaacagcaagt

SEQ ID NO: 188919 - DNA, 260 bp, Glycine max
atgagagtggtgcagcattctggcctgatgtccatttccgtatcgtgatggcactgattgtctcacagatagttttgatgggactcctcaccaccaagaaagctgcttcatcaactccttttctcattgtgctcccaatactaaccatatggttccataggtactgcaaaggccgttttgaatctgcatttgttaaatttcccttacaggtatgtcaatttgtcttttgtgattagtaattctttgaacagtttgcattg

SEQ ID NO: 188920 - DNA, 263 bp, Glycine max
gtgctgcaatggcttcaagtcaggaggaggtgacccttttgggagctactggaagcccatttgtgtgcagggttcatattgccctcaagttgaagggagttcaatacaaatatgtcgaagaaaatttgaggaacaagagtgaactgcttctcaaatccaacccagttcacaagaaggttccagtgtttattcacaatgagaagcccatagcagagtctcttgtgattgttgaatacattgatgagacatggaagaacaacccc

SEQ ID NO: 188921 - DNA, 264 bp, Glycine max
atgggttctgagttggcacaacgagattggcattaatgaagttgcagaaagcatgatggccttcaataccaattacaaggatacaggtctttttggtgtttatgctgttgctaacaaagattgtttggatgacttaagctatgcaataatgtacgagacaaccaagttggcttatcgggtttcagaagatgatgtcacacgtgcttgtagtcagttgaaatcttcactcctgctccacatagatggaacaagtccagtagctga

SEQ ID NO: 188922 - DNA, 260 bp, Glycine max
ccaaggatagtttcaatatgaagttcagcattgcgaatcccaccaccggttgtcagtagaagctggagatcgatgatgacctgaagctgcgagcatttttggacaataggatctcacaataggttgttggtgatgctctgggtgaggaattcaaaggttatgtcttcaaaattactggaggttgcgacaagcgaggatttccaatgaagcaaggagtgttgacccctggtcgtgttcgcctcttgctgcatagaggaact

SEQ ID NO: 188923 - DNA, 267 bp, Glycine max
  unsure (1)..(267): unsure at all n locations
ggcttcctcantgatctcttccccaactgttaccactgtccaaccgtgccgatgccggcntggttgctaccattcgctgggcntcangtccatggcttgnttccccaccaggaagaccaacnatgacattacctccnntgctagcaacggtggaagactgcaatgcatgcnggtntggccaccagttgggcaagangnagtttgagactcntcctacctgccagaccttgntgatgcncaattggcaaaggaagtagagtaccttct

SEQ ID NO: 188924 - DNA, 259 bp, Glycine max
agaaaaccctagttcgcttgcagtcacacaagaggccaatcctattcatagctcgagatgggtgaagaagtgaaggtagttgttccagaatcagtgttgaagaagcgcaagagggaggaggaatgggcgttggccaagaagcaagaactcgatgctgccaagaagaagagagccgagagccgcaaactcatctacaacagagctaagcagtacgctaaggagtacgatcaccaggagaaggaattgattcggttgaaac

SEQ ID NO: 188925 - DNA, 260 bp, Glycine max
gcccctcccagcccttcaagggggcccgcatcaccggctccctccacatgaccatccagaccgccgttctcattgagaccctcaccgcccttggcgccgaggtccgctggtgctcctgcaacatcttctccacccaggaccacgccgccgccgctattgcccgcgacagtgccgccgtcttcgcctggaagggtgagaccctccaggagtactggtggtgcaccgagcgcgccctcgactggggccccggtggtggaccc

SEQ ID NO: 188926 - DNA, 260 bp, Glycine max
aaggaagatggttctaaaggtgatcaacttgctctggacgtaaagagtttaaatttgaaagaggaggcttctcaggatagaaaagataatggtaatcgggcacagacattcagttttaatgaacttgaagctgcgacgggaagttttaggttggattgttttttgggtgaaggaggctttggcaaggtttacaagggacacttggagagaataaaccaggttgtagctataaagcaacttgaccctaacggacttcaagg

SEQ ID NO: 188927 - DNA, 257 bp, Glycine max
cagagttgaggctgggtcttcccggatcccaatcgcctgaaagggagccggatcttttctctttaagcccagcaaagcttgatgagaagccactgttccctttgcttcctactaaagacgggatttgcttgtcggcgcaaaaaactgttgtttctggcaacaaaagaggttttgctgataccatggatgggttttctcaggggaagttcgctggtaatacagggatgaacgcaatgctatcacctaggccttctgga

SEQ ID NO: 188928 - DNA, 260 bp, Glycine max
cccagattcaaccagttaaacttggaacccaaggctttgaggtttcaaaattgggattcggatgtatgggccttactggagcgtacaatgaccctctccaagaacaggatggcatatctgttatcaagtatgcgttcagtaagggaatcacattttttgatactgcggatgtttatggagccaatgctaatgaacttttggttggaaaggctttgaagcagctgcccagagaaaagattcagatagccacaaaatttggt

SEQ ID NO: 188929 - DNA, 258 bp, Glycine max
cctcgaccgattcggctcaggccaacctgcacactcttcaactcgatcgaacagaacatggcaaagaatgtggggatccttgccattgacatctacttccctcccgcttgcgttcagcaggaagcattggagactcatgatggtgccagtaaagggaagtataccattggtcttggacaagattgcatgtcattctgtaccgaagtagaagatgtcatctcaatgagtttgacagtggttacttctcttcttgagaaa

SEQ ID NO: 188930 - DNA, 259 bp, Glycine max
agaagcgtcttaataaacgctcttctctgaaaaacctgatttcttctcttcttctcttctctttcgtttcgatcttcgatctctgaaaatgagagagtgcatttcaatccacatcggtcaggccggtattcaggtcggaaacgcctgctgggagctctactgcctcgaacacggcattcagcctgatgggcagatgccaagtgataagactgttggtggaggtgatgatgctttcaacaccttcttcagtgaaatgggg

SEQ ID NO: 188931 - DNA, 256 bp, Glycine max
ctcgagccggttattctggaacagcaattatctcaaggatcaagccactttcagttcgatatggtctaggtataccagatcatgatagtgagggtagacttgtaactgctgagtttgatacattttatttgatatgtggatacgtccctaattctggagatggcttgaaaagattgtcttacagggtgactgaatgggatccatctctcagcaattatttgaaagagctggagaagtcaaaacctgtaattttgac

SEQ ID NO: 188932 - DNA, 259 bp, Glycine max
ctcgaccgattaagttaagatcttccactgctggttatcacctttgttccagtcccagaggactattgtagtgccatcacgaacacctccagaattcttgtcaccgtgaaaagcatccacattaagatgaacattgttgaccatccttatagctctgtggccatctcctaagtcacggctttcagtccatagaatagactcatcaagatagtcgggcttgtaaggtatcagccgaacaggatgagtggcaccgatggag

SEQ ID NO: 188933 - DNA, 258 bp, Glycine max
gggagccacagctatgcagagccaagttgtgtgcaatggttgtaggagccttctgctttacccaagaggggcaaccaatgtttgttgtgcattgtgcaacacaattacctctgttcctccccctgggatggaaatgtctcaactttattgtggagggtgtaggacattgctaatgtacacacgtggagctacaagtgtgagatgttcctgctgtcacactgtaaaccttgttccaccagcatctaatcaagtagctca

SEQ ID NO: 188934 - DNA, 259 bp, Glycine max
caagggtccaaattttgggacaaaagtgagcaactaccctccttgtcccacccctgatctgatcaagggactaagagctcacactgatgctggtggcataattctactcttccaagatgacaaggtgagtggcttgcagctcctcaaggatgaccagtggatcgatgtcccaccaatgcgtcactccattgtaatcaaccttggtgaccaacttgaggtcataaccaatggcaagtacaagagtgtgatgcaccgagtg

SEQ ID NO: 188935 - DNA, 254 bp, Glycine max
agagagttcgacgcggcggttgcggaagaagattgcaagatgaagttcaacatcgcgagtcccaccactggatgccagaagaagctcgagatcgacgacgatcagaaactacgagcattttgggacaagaggatctcacaggaggtcagcggagatgcacttggtgaggaatttaagggctatgtcttcaaaattactggaggttgtgacaaacaaggattcccgatgaaacagggagtgcttactcctggtcg

SEQ ID NO: 188936 - DNA, 259 bp, Glycine max
ctcgagcgctcgagccgatgcacggcccctggttgctcagtgagaaaacacgttgcgcgagctacacatgacatcaaagctgtgatcacaacttatgaagggaaacacaaccatgatgtacctgctgcacgtggtagcggaaactattacatgaacagaaattctctgaacagcagcataccagcacctataagaccctcggcagtgaattgttattctaactcatcaagtttcacaaactctctctataataatacta

SEQ ID NO: 188937 - DNA, 261 bp, Glycine max
ccctgatatcgcccagggtgtgcacggtcacttcaccaagcgcccagaggaggttggtgctggtgaccagggtcacatgtttggctatgccactgatgaaacccctgagtacatgcccctcagccatgtccttgcaaccaaactcggtgctcgcctcaccgaggttaggaaaaatggtacctgtgcttggctgaggccagatggcaagacacaagtaactgttgagtactacaatgacaatggtgccatggttccagttcg

SEQ ID NO: 188938 - DNA, 258 bp, Glycine max
tctcgagcgctcgagccgctcgagccgctcgagccgattctacctcatactctcaacactctctacgctctttgattactccactaacgctgcacaacgaaacttccaagactacttgcctgtgatggccaacaagcttggtggggatggcctaattgatgaactgtgcaatgggttcaatctgttgaaggattctgataaaggggtcatcacctttgagagcctcaagaggaactctgccttgtttggccttcaggg

SEQ ID NO: 188939 - DNA, 260 bp, Glycine max
ggaggctcacccctacgtcccacgcgatttgcacttacccggctacgctccctgcttcctttccatgtccaacattctttccgtcttcgcctcctcctcattgctcatcgtcactctcgtctggatcttctctggacgctttaagaaaaccaaagttgatagagtgctgatgtgctggtgggccttcacaggtctcacacacattattcttgagggttattttgttttctctcctgagtttttcaaggataaaactggct

SEQ ID NO: 188940 - DNA, 258 bp, Glycine max
ggcgaatcggccgccggtggatctcgtcatggtgatcgacgtccgaggtagtgtcaccggtgaagagctttggatgctgaaacgttcgatgcaggttgttatctcgtcgctcggctccgccgaccgtctctccgtcgtcgcattctcaggcggatcgaagcggctatttccgctgcggaggatgacccgctgcggccagacagcggcgcggcgagtcgtcgacgcgctggcctccgttgagctccgccgagaaggaat

SEQ ID NO: 188941 - DNA, 259 bp, Glycine max
tctcgagccgaatcggctcgagatagccccactcaaccaccaatcctctcctcgttcacgctacccctttctgctcttcttctacctttcaagttttaaaagtataaagatggcagagacattcctatttacctcagagtcggtgaacgagggacaccctgacaagctctgcgaccaaatctccgatgctgtcctcgacgcttgcctcgagcaggacccagacagcaaagttgcctgcgaaacatgcaccaaaaccaac

SEQ ID NO: 188942 - DNA, 260 bp, Glycine max
gctccctcagaagcgaagaatgagccacagagaactagtctcctactctcacccgcaagaaaaaaatggcacctcacatcgttggatacccccgtatgggtcccaagagggagctcaagttcgctctcgagtctttctgggatggcaagagcagcgccgaggatttgcagaaggtgtcttctgatctcagggcatccatctggaagcagatggctgatgctgggatcaagtacatccccagctacactttctctcactat

SEQ ID NO: 188943 - DNA, 251 bp, Glycine max
ctcgagcgatcttgacaaaatggccgtaacagaagcaaacctaaagaaggctggcatccacacatgggagcagttaattctcaaggatccacatcttatcactccaaatgcactttcatacaaatcagcaatgagagagaatctgttgaggcagggatacagaattgttggaatcattggagaccaatggagcgatctgcttggagaccacagaggcgaaagcaggacctttaagcttcctaatcccatgt

SEQ ID NO: 188944 - DNA, 255 bp, Glycine max
ctcgagcgcccgccgctcgatgggaattgcgcttcaaggagtctcgtagggctaacccgcctcacgagggtcaccaacggcacgtgcctttggggggccgaggccccctactgctggtcggcaaacggacggcgggcgcacgcgtcgcttctagcccggattctgacttagaggcgttcagtcataatccaacgcacggtagcttcgcgccactggcttttcaaccaagcgcgatgaccaattgtgcgaatcaac

SEQ ID NO: 188945 - DNA, 256 bp, Glycine max
atgggtgccgtgacctcttcaatggcggccaagctggcgttcttccctccttctccgccgtcctacaaggtgctgaaggaggaggccacggggctgctgctgatggacccgttcccgcaccgcgagaacgtggaggtcctgaggttcccgaaccgccgcggtaccgagatcgtggccattcacgtgcggcaccccatggccaaatccaccctgctctactcgcacggtaacgccgccgacattggccagatgtacg

SEQ ID NO: 188946 - DNA, 258 bp, Glycine max
gtttaatctggaactccgacttgattgagactattgaattagacaaatcttttgataaatgcatgcatcacaatgtactctgctgaagctaggaaagagagtagaggagctcatgcccgtgaagacttcaaggttagagatgatgggaactggatgatacacactgtgggattctgggagaacgagaaggtccggttggactacaggccggtgcatttgaatgtattggatgatgaggttgaatcattccctcccaag

SEQ ID NO: 188947 - DNA, 258 bp, Glycine max
acagggagaagcttctcacatcccttcgtcaacacctctccgactcttctcgttctctccatggcttcgtcctccttcaaggtggcgaggagcaaacgcgttacgacaccgatcacttggagctcttcaggcaagagagttacttcgcttacttgtttggagtcatagagcctggattctatgcagctattgacgttgcaactgggaattctatcctatttgctcctaggttaccttctgagtatgctgtttggttgg

SEQ ID NO: 188948 - DNA, 259 bp, Glycine max
gaggagaatgccgaagaacaagggaaagggaggaaagaaccggaagcgcgggaagaacgaggcggacgacgagaagcgggagcttgtgttcaaggaggacggccaggagtacgcgcaggtgctccggatgctggggaacggccgctgcgaggcgatgtgcatcgacggcaccaagcgcctctgccacatccgcggcaagatgcacaagaaggtctggatcgccgccggcgacatcatcctcgtcggcctccgcgactac

SEQ ID NO: 188949 - DNA, 259 bp, Glycine max
cctcgagcgaatcggctcacgaaattctcccatctgcttactcactgatctccaatcccattccatggcttccactgaatcatcccctttcaagaaaattcagattcaaagggatgacactacatttgacgcatatgtggttggaaaagaggatgctcctggaattgttgtgattcaggagtggtggggtgtggattacgaaattaagaaccatgccgtgaagatttctcagcttggtagtgggtttaaagctcttatt

SEQ ID NO: 188950 - DNA, 257 bp, Glycine max
gtaaaatttgagcaagagattgaatgtggtggaggttacatcaagcttctctctggatttgttaatcaaaagaagtttggtggggatacaccatatattttaatgtttggaccagatttatgtggcacggatacaaagaagctccatgtgatactctcctaccacggtcaaaattaccccataaagaaggacctgcaatgtgaaactgacaggttaactcacttctacacattcattctcatgccagatgccacata

SEQ ID NO: 188951 - DNA, 257 bp, Glycine max
ggtggatcagatgacgacgtggtgattgtagctgcatatcgtactgccatctgcaaagcaaagcgtgggggctttaaggatacccttccagatgacctgcttgccacagttctgaaggctgtaatagagaaaacaaatgtgaacccagcagaagttggagacattgttgtgggcactgtactggcacctggatcagatagaggaattgagtgcagaatggctgccttttatgcaggtttcccagagacagtgcctct

SEQ ID NO: 188952 - DNA, 261 bp, Glycine max
cttttccctccctttctcaggaaaattcccccgattttctcgagaaagtgaaacgcaattatgagctttcaggacatcgaggccgggcgccccttcggttcgaggcgcgggttgctgaatgggaagcaagaccccacgcaagcggtggctgccggcatattccagatcaacactgccgtctccaccttccagagactcgtcaacaccctcggaacccccaaagacaccctcgacctccgcgaaaagctccacaagacaaga

SEQ ID NO: 188953 - DNA, 259 bp, Glycine max
gcagtcgcaaccctaatcagaagaagcgcagttcaagcgagtgacagccaccagccatgggttctatgcacagccgcggtaagggtatatcctcttctgctttgccctacaaaaggacacctcctagctggctcaagatctcttcgcaagatgtcgaagaaaatatctgcaagtttgcgaagaaaggtttgaccccgtctcagattggtgtcattctcagagattctcacggtattgctcaggtcaatagcgtcactgg

SEQ ID NO: 188954 - DNA, 256 bp, Glycine max
ctcgagcgctgtgacttgttttgagttcaatcaaatcgcattggtatctgaaatcaggaaagatggttagcgtagctgagatcaggcaggcacaaagggcagaaggcccagcaaccatccttgccattggaactgcaaacccaccaaaccgtgttgatcagagcacctatcctgattactacttcagaatcaccaacagtgaccacatgaccgagctcaaagagaaatttcagcgcatgtgtgacaagtctatgat

SEQ ID NO: 188955 - DNA, 257 bp, Glycine max
aaaaccttctcttacccttctctcaagtttcaagagatttcatcatggctccaaagaaggacaaggctccaccaccttcctccaagcccgccaaatctggcggtggcaagcagaagaagaagaagtggagcaagggaaagcaaaaggagaaggtgaacaatatggtgctgtttgatcagggcacctatgacaagctcctttctgaagctcccaaatacaagctcatcactccttccattctctctgatcgtttgagg

SEQ ID NO: 188956 - DNA, 262 bp, Glycine max
aatcgcggttcccatcatcaaagaggtcgatttgtacaagtttgatccatggcagcttccagaaattggctactacggcgagaaagaatggtacttcttttctcctcgggatcggaaatacccgaacggttcacggccgaaccgtgccgccggaagcggctattggaaagccaccggcgccgataaggcgatcggaaaaccgaaagcgctagggatcaagaaagctctggttttttacgccggaaaagcccccaaaggagtg

SEQ ID NO: 188957 - DNA, 172 bp, Glycine max
agaaaggtgcatttcaacactctagctttctagctggggctgctacaacagctgcaggaagattagtggctcaacaaggtgtacttgaggctatttggccatatagtggtcactatcaccctacagaagagaactttaaagaattcataagctttcttgacgagcacaatgt

SEQ ID NO: 188958 - DNA, 250 bp, Glycine max
atggacccgtatgtactgttacaatacaaaggtcaagagcgcaagagcagtgtaattcatgagggcggcagaaatcccatatggaatgagaaatttgtattcagagtggaataccctggatcaggtgatcaatacaagctcaaccttagaatcatggacaaggatgtattttctgcagatgactttgtcggccaggctacaatctatgtgaaggatttattggcggaaggagcagagaacggatcagctg

SEQ ID NO: 188959 - DNA, 247 bp, Glycine max
gaccttcggaggttaaagcaaaaaacaaagagagagagagagagaaaatgatgaagccatcgatgctcagatctctccactccgccgccacccgcggcgcctctcatctcttccgccgtgggtacgcctccgagccggtgccggagcgcaaggtagccgttctcggcgccgccggcgggatcgggcagcctctctcccttctcatgaagctcaatgccctcgtttcgagcctctccctttacgatat

SEQ ID NO: 188960 - DNA, 163 bp, Glycine max
gtgaagcttgtggaataaagcctgaacaagtggaagtgactgatgctgctcttcttgccctaattgaaaattactgccgagaatcaggggtcaggaatcttcaaaagcacatagagaaaatttaccgaaagatagcgctacaacttgtgaggcaaggggagat

SEQ ID NO: 188961 - DNA, 251 bp, Glycine max
ctctctcacaaaatgacaacaatatcaaattgctcccttctcttcctcttcctcttcctctccaccctccacatagcttccaccctctcaacccccaccaacttcatcaagtcctcctgcagcaccacccagtacccagccctctgcatccagtccctctccgtctacgcctccaccatccagcaagacccccacgagctcgtccagacagccctctccctctccctcaaccacaccgaggccaccaaaac

SEQ ID NO: 188962 - DNA, 247 bp, Glycine max
cgccactgcagcgtggacggaatcggagtgcagccatatcagcagcagcagaagtccttgaagtgctgctctagtttgaggcacaatgagattggagaaatgctggttttgctcttcaaccatataccctggacatggaatccagtttgttcgtaatgatgcaaagatttttcggttttgtagatctaaatgccacaagaactttaaaatgaagagaaatcctcgtaaggtaaaatggaccaaggca

SEQ ID NO: 188963 - DNA, 249 bp, Glycine max
catcaatcagcatcaccaccgctccaacacaggggaaaatgagggagatccttcacgttcagggagggcaatgcgggaaccagatcggttcgaagttctgggaagtggtgtgcgacgagcacggcatagatccgacggggaagtacgtcggaaactcagatctacaactcgagcgcgtgaacgtgtactacaacgaagcttcctgcgggcggtttgtcccacgcgcagtgctgatggacctggagcccg

SEQ ID NO: 188964 - DNA, 247 bp, Glycine max
ctgatgctgaggacattcaacctcttgttgttgataatggaactggaatggtcaaggctggttttgcaggtgatgatgcttctagggccgtgttccccagcattattgggagaccacgccatactggtgtaatggttgggatgggtcagaaggatgcttacgtgggtgatgaagcccaatcaaaaaggggtatactcaccttgaagtatcctatagagcatggcatagtcagcaactgggacgatat

SEQ ID NO: 188965 - DNA, 246 bp, Glycine max
ctcgagccgcttcaggtagaacatgatcattcccgagaagaaccgtaaagagatctgcacatacctcttccaagagggagtttgctttgcgaagaaggacttcaatctggcgaagacccggagattgatgtgccgaatctgcaggtgataaagctgatgcagagcttcaaatccagagagtacgtgagggaaacatttgcgtggatgcactattactggttcctcaccaacgatggaattgagttc

SEQ ID NO: 188966 - DNA, 249 bp, Glycine max
gttgtcagtcctagtgatatgatggatggtcgggtaggagcactgcgtgcagctctggatgctgaaggctttcagcatgtttctataatgtcctatacagcaaagtatgcaagttctttttatggtccatttagagaggcactagactcaaacccccggtttggagacaagaaaacttatcagatgaacccagctaattacagagaggctctgactgagatgcgggaggatgaatctgaaggagctgac

SEQ ID NO: 188967 - DNA, 248 bp, Glycine max
accaccatgttgctgccattgtggctgctgcattttatgcaatttggaatctcttctcaggatttatcgtcgtaagacctaaaatgcccgtgtggtggagatggtactattgggcatgtcctgtggcttggaccttgtatggattgattgcatctcagtttggagatataactgaaagaatgccgggtgaagataacaagatggtgaaagaattcatagaagactattttggtttcaaacatgacttc

SEQ ID NO: 188968 - DNA, 242 bp, Glycine max
agagggggtcagagtgagaaagagaaagagagaattcgtaaaccctaatttcggaaagatcggcgatgactgcctccaaggatcgcgagaacttcgtctacatcgccaaactcgccgagcaggccgagcgttacgaagagatggtggaatcaatgaagaacgttgcgaatctcgacgttgaactgacggtggaggagcggaatttgctttctgttgggtacaagaatgtgattggtgctcgc

SEQ ID NO: 188969 - DNA, 249 bp, Glycine max
ggggaagaagaagatggtgtccttgaagcttcagaagctcctcgccgctagcgtcctaaagtgcggcaagggcaaggtctggcttgatccaaatgaagtcaatgaaatctccatggccaattctcgacaaaacataaggcatttggttaaggatgggtttattatcaggaagccgactaagattcactctcgctcccgtgctcgtcgaatgaaggaggccaagagaaaggggcgtcactctggttatgg

SEQ ID NO: 188970 - DNA, 246 bp, Glycine max
gtgctgttgcggcaagaagtacacttcagggacgcaatatttatgatggttgctgtcagctggacattcagttctcaaaccttgatgaattacaagtgaactacaataatgaccgttcaagggacttcacaaacccaaatctccctacagagcagaaaggaagaccttcacaacctggatatggtgatgcaggaaatatgtatgctgctcaaggttctggagccagggcatttggattcccacaga

SEQ ID NO: 188971 - DNA, 249 bp, Glycine max
ggcgtctcgtagggctaatccgcctcacgagggtcaccaacggcacgtgtctttggggggccgaggccccctactgctggtcggcaaacggacggcgggcgcacgcgtcgcttctagcccggattctgacttagaggcgttcagtcataatccaacgcacggtagcttcgcgccactggcttttcaaccaagcgcgatgaccaattgtgcgaatcaacggttcctctcgtactaggttgaattactatt

SEQ ID NO: 188972 - DNA, 239 bp, Glycine max
attttatttacaacaacaatggcttctgtgcctcaaccaaaaatctcccttctaaccttattcttcttctcttccttcaccatcattgcgcatgcaattgttcctcaaaacgaaaccttcaaatttgagaactcaggtgaacttggaccctacatcgttgagtacggtgcagattacagaatgataagcatcttcaactctccattccaagttggtttctacaacaccacccaaaatgc

SEQ ID NO: 188973 - DNA, 249 bp, Glycine max
ctcgagccgggaagctccaaagttcaaaggctttccgggatgcaaaagcaagtacttagcctcatacagagggtttctgcgtgcagcacgttccaaatcggaggaagaacggtgcaagatagagtcaattatatcgcaagagtttcggcgtaatgcggaggatgtagatcgcaaaaattttctctacattgagtacttacttcgccgtggcaacaaacaacttgatcagcttaaaaaccctggtactac

SEQ ID NO: 188974 - DNA, 233 bp, Glycine max
  unsure (1)..(233): unsure at all n locations
gtaaagcatggctttgttggtggagaaaaccacgagtggtcgcgagtacaaggtcaaggacctttcccaggccgacttcggccgcctcgagatcgagctggccgaggttgagatgcccggcctcatggcctgtcggaccgagttcggcccctcccagcccttcaagggggcccgcatcaccggctccctccacataacaaaaaaagcaaaaannctcattgagaccctcaccg

SEQ ID NO: 188975 - DNA, 237 bp, Glycine max
gtgacatgcgcaagttggaggcttgctgtggaagcacacaacatctttggctttgagaccattcctgaagagtgcgttgaagcaacaaaggaatacatccatggcgaacaatatagatcagactccaaaacagttaaccaacaagcttacttttatgccagagacctcgaagtccatcccaaggacacatttgtgttcagtatagatggcaccgtactctctaatattccatactac

SEQ ID NO: 188976 - DNA, 244 bp, Glycine max
agagtcttcagtttctcctcgttgttcttcgctttcctgttttcaatttcgattctttcgttaatttaataagatgtttgggagggcaccgaagaagagcgataatacgaggtactacgaaatcctcggcgtctccaagaacgcttcgcaggatgatctgaagaaggcttacaagaaagccgccattaagaatcaccccgacaagggcggtgatcccgagaagtttaaagagctggcgcaagct

SEQ ID NO: 188977 - DNA, 247 bp, Glycine max
ataacactccttgtgtagtggtgacatcaaaatttggttggagtgctaacatggagagaatcatgcagtctcaaactttgtcagatgctagcaagcaagcatacatgcgcggcaagagggttcttgagatcaatcctaggcaccctattatcaaggagctccgagagagagtagtaaagaaccctgaggatgagggtgtgaagcatacagcacagctgatgtaccagactgcactctttgaaagcgg

SEQ ID NO: 188978 - DNA, 245 bp, Glycine max
ctcgagccgcttcaacaatgctcaaaattttgatggctctgctccttttgtctctatctttacaagcatatggacaatttgaggaatggtgcatagcagatgagcagaccccagatgacgagttacagagggccatggagtgggcttgtggaaagggtggagcagattgcagcaagatacgagtgaatcaacgctgttaccttccaaagaccttgaaggaccatgcctcttatgctttcaacaac

SEQ ID NO: 188979 - DNA, 249 bp, Glycine max
tctctcagacatggcatctcaaggtttgtgtccttcgataaaaaatattcttcttttggactctgaagggaagcgtgtggtcgtcaagtattactcagatgactggccaacaaacaatgcaaagttagcttttgagaagtttgtatttaccaagactgttaagacaaatgctcgtacagaagctgaggtaacactacttgagaacaatatcattatttacaaatttgtacaagacctgcatttttttgt

SEQ ID NO: 188980 - DNA, 249 bp, Glycine max
aacacctctttccatcaatacagtgaaacacaaagtttccttgtcttcagatgattacaacaccaaacacacactctaagcttaacaacactcaggcatggatcatatacacctcctctccaatctacttgaaccatgttccttctgaggttacatccaagccattttctggcatcattcgtatagcggctttgcctgattctgattccaagtatgtggaaactcttgacaagttcagttcttgttacc

SEQ ID NO: 188981 - DNA, 250 bp, Glycine max
gtgtaagtatgaactaattcagactgtgaaactgcgaatggctcattaaatcagttatagtttgtttgatggtatctactactcggataaccgtagtaattctagagctaatacgtgcaacaaaccccgacttctggaagggatgcatttattagataaaaggtcaacacaggctctgcctgttgctttgatgattcatgataactcgtcggatcgcacggcctttgtgccggcgacgcatcattcaaat

SEQ ID NO: 188982 - DNA, 118 bp, Glycine max
gcacggagtgatactgaagtgcaaatcgttcgtctgacttaggtataagggctatagactaatcgaaccgtatagtagctggttccctcggaagtttacctcaagatagctggagccc

SEQ ID NO: 188983 - DNA, 248 bp, Glycine max
aaggtttactattttggatgcacctggtcacaaaagctatgttcctaacatgattagtggtgcatctcaagctagatattggagtgttggttatttctgctcggaagggagagtttgaaactggatacgagagaggtggacaaactcgtgaacatgtccagcttgcaaaaacgctgggtgtgtctaagcttcttgttgtcgtcaataaaatggatgagcctacagtgcaatggtcgaaagaaaggtat

SEQ ID NO: 188984 - DNA, 246 bp, Glycine max
cctatttgtcgtaagctgtcgtactttgtcattccaagtgtcatttggtactcaacaactgaagaaaaacaagaaatcattaacaactacaaggcaaagctcaagtcaattgattgcaagcactttgactttggggaaggaaactgcccttttggaactagttgtttctacaagcatgcatttcaagatggccgtctggagcaggtagttttgcgacatctaggggctgcagagggtgatactgta

SEQ ID NO: 188985 - DNA, 247 bp, Glycine max
atcacaaccaaggccaacgtagactatgaaaagattgtccgcgacacatgccgcgaaattggattcatctctgatgatgttggtcttgatgctgacaaatgcaaggtgttggtcaacattgagcaacagagcccggatatcgcccagggtgtgcacggccacttcaccaagcgcccagaggaggttggtgctggtgaccagggtcacatgtttgggtatgccaccgatgaaacccccgagtacatgc

SEQ ID NO: 188986 - DNA, 246 bp, Glycine max
tgtggataggatcaatctagaatcctgggatggagcagctaagaattctgcaaagcaagaacctaaccctcttttagctgttttgaaagtttttgttgatgcttttgtgaaattttggtcagggtgaagatattaatgtttgtttctttctcttctgttgtgttgtctatgtatggtgatggtggagttgattttttgtacctaacagaataattttgatttagccttgatcatttaatgagctcg

SEQ ID NO: 188987 - DNA, 249 bp, Glycine max
gtgaggggaacgatgatataaaacctcactctcactcgcagatcttcactcacccaaaaccaacctactccaaggaagtcccctaatcagaaccagagatggacaccaaacccaccgagatcagcagcggcaagatgttcggaggttacaacaagagattcaagcatttcagccttaccctgggatgctccatgaacttccacatctacttccctccatctccttctccctctcacaaattccctgtgc

SEQ ID NO: 188988 - DNA, 248 bp, Glycine max
ctaaggtttctgattttggactgtcgaaaactggtccaacattggataatacccatgtaagtactgtggtaaagggtagttttgggtacttggatccagaatacttcaggaggcagcaactgactgacaaatctgatgtttactcgtttggtgtggttctctttgaggtattgtgcgctcgaccagcattgaaccccacccttgctaaggagcaagtgagtctggctgagtgggcagctcattgctac

SEQ ID NO: 188989 - DNA, 240 bp, Glycine max
cgattaccccagcttcaagcttgtcatcgtcggcgacggtggcacaggaaagacaaccttcgtgaagaggcatctcactggtgaattcgagaagaaatatgaaccgaccattggtgtggaggttcatccgttggattttttcacgaactgtggaaagattcgcttctattgttgggatactgctgggcaagagaagtttggtggcctcagagatggatattatatccatgggcaatgtgc

SEQ ID NO: 188990 - DNA, 246 bp, Glycine max
cggctcgagatgggcaacttcgacgaagctgagacccttttggttgaagctcttaacaaggatgccagggatccagaaactctagccaatctagttgtatgctgtcttcatctcggcaaaccatctaacaaatcattcagccagctgaaactttctcacccagagcatgtattggtcaaacgggtatcatcagctgaagaaagttttgatagagcgctacaatcattttcctcatgagtgtcgatg

SEQ ID NO: 188991 - DNA, 248 bp, Glycine max
ataatcccctcttgcctcgagacccttatgagagagccctggctcgtttctggtctaagaccttagatgacaagatctagcctgctatatggaatgcttgctggagtgatgagaatggacgtgagaaagcagtggaggaagccttggaagcattgaaaatcctgcaggaagcactgaaagacaagaaattttttggaggagagagcataggattggtagacattgctgccaatttcattgggtattgg

SEQ ID NO: 188992 - DNA, 249 bp, Glycine max
ctttactcctcttcaatcagttgcatattctttgctattccaatggccactgttgaggttgtgtcagccaaggttgccctcccagaggacacaaaagaggcatcattgaaggttgacgaggagaagaacacagaagaagttgttgagactccaacaccagaaactgtggtcactgagcaaaccaaggaggaaagtactgaggccccacgacctgcagcttcagaagacaagccctcggttgaagttcag

SEQ ID NO: 188993 - DNA, 246 bp, Glycine max
gccccactcaaccaccacacctctcctcgttcacgctacccctttctgctcttcttctacctttcaagttttaaaagtataaagatggcagagacattcctatttacctcagagtcggtgaacgagggacaccctgacaagctctgcgaccaaatctccgatgctgtcctcgacgcttgcctcgagcaggacccagacagctaagttgcctgcgaaacatgcaccaaaaccaacttggtcatggtc

SEQ ID NO: 188994 - DNA, 246 bp, Glycine max
gttttggtagcatggccatgccatggcgcaggctaccaaaggttccctctccgaatgaaaactggctatggtgagcgttcttcggaggtaaaatgcgcaagttttaggcttgctgtggaagcacacaacatccgagcctttaaaaccattcctgaagagtgcgttgaaccaacaaaggactacattaatggcgaacaatttagatcagactctaaaacagttaaccaacaagctttcttttatgct

SEQ ID NO: 188995 - DNA, 245 bp, Glycine max
cggtaatacacttggcccttctaattctcagccatcaactccatcaactcatactcctggtgatggagttgctatggcgggtaacttgcagaatgttgctggtatatccaaaggtttgatcatgtatggtactgatggagtgggcggtcttgcatcttcgacaaatcagctggatgacatggaacattttggagatgttggctccttagaggataatgtggaatcatttctctcacaggatgatg

SEQ ID NO: 188996 - DNA, 244 bp, Glycine max
ggaagtgggttgttaaaggagcagttgatgtagacattggtgcaaacccttctgctgagggtggaggagaagatgagggagttgatgatgcagctgttaaggttgttgacattgttgacacattcagacttcaggagcaacccgcattcgataagaagcagtttgttaccttcatgaagaggtttatcaagaatttgactcccaagctcgatgcagagcaacaggagttgtttaagaagcacat

SEQ ID NO: 188997 - DNA, 245 bp, Glycine max
caagactggtaaagaaggttgggtttctcttggagggatacttctttgtatcactggaactgaagctatgtttgcggatcttggtcatttacttgctttgtcaataaggcttgcgtttgcgtttgttatatacccgtgtttggtggtacagtacatgggtcaagctgctttcttgtctaaaaacctcggctctgttgctaacagtttttataactcaatacctgaccctgtgttttggcctgttt

SEQ ID NO: 188998 - DNA, 244 bp, Glycine max
accagtttcaccgcacgaatatcttgttgtttggagcgatccgagaaaaactctgtaaacatgttggtttaccaggacctccttacaggtgatgagcttctctctgactccttccgttacaaggaaattgagaatggaatgctgtgggaagttgaggggaagtgggttgttaaaggagcagttgatgtagacattggtgcaaacccttctgctgagggtggaggagaagatgagggagttgatg

SEQ ID NO: 188999 - DNA, 251 bp, Glycine max
cggctcgatggaagtttggactcttcattgggttgcagccgacacggttcgctacctaagcaggcacaaatgctgccaagcaatcgggaaccaaattacactctttctgtgtaggccttgagggtgcacgctgacctaaaggcagcatagggagtaggcagactacataggaactgtacatcatgaattgtcactacactgttcaggatggcatggatgccattgaggatgtgatctatcacatggaaaca

SEQ ID NO: 189000 - DNA, 280 bp, Glycine max
ggaccacgtgccttccccttggaatttgtatagcgcaagatagcaactccagtaactctttgccaacgtgattcattcacaaacctggcacttgctacaatgtagtaatctgtacttgcattttgatccgtgcttaacagaaaagaataagattgtccaacatgaatatctaagctagtgtagttctgttgcactgtgtaagacccctctgtctctgctagaagtaagttatgactctggatcctgaaattcagacttgttgatactccaacattatgta

SEQ ID NO: 189001 - DNA, 263 bp, Glycine max
gggtgattggacatcacaactgaaagctgtttttgctaaggcatgtcaaccagcaagtggtgaccagagtggtcttctacgagctgatatgttacaaggcaacaacataccaaggatgccaaagctcgtgatcgatggtccttatggagctccagcacaagactacaaaaactacgaagtgatccttctcgtgggactaggaattggtgccacccctttgattagtattctcaaagatgtgctaaacaacatgaaacaacgga

SEQ ID NO: 189002 - DNA, 274 bp, Glycine max
cttgcgagtgaacacaagttacaacaatggctttctttggtagaactgggaatttgttacgacagacagcgagcaggcaggttagttcaaaattgcgttcgcccccttcattttttcaggctatacgctgtatgtcatctgccctcagcacaaaactgtttattggaggtgtttcatattctactgacgagcaaagcttgagggaagctttttcaaaatatggtgaagttgttgatgctcgattatttatggatcgtgaactggtagatccaga

SEQ ID NO: 189003 - DNA, 275 bp, Glycine max
ggtgaccttttgggagttgtgggaagcccatttctacacagggttcagtttgctctcaagttgaagggagttgaatacaaatatttggaagacgatttgaacaacaagagtgatttgctcctcaagtataacccagtttacaaaatgattccagtgcttgttcacaatgagaagcccatttcagagtcccttgtgattgttgagtacattgatgacacatggaaaaacaatcccatcttgccttctgatccctaccaaagagccttggctcgttt

SEQ ID NO: 189004 - DNA, 277 bp, Glycine max
actcgagccgctcgagccgctcgagcggctcaggtcaatgacagtcgagtgttgcttggaggcgggtggaatgagatggtgatggcaaaagaagttgatgagttggctaagaaaactcctggaaagaagtctcttgctattgaggcattctcccgtgcactcttggctattccaacgatcattgctgataatgctggtttggacagtgctgagttgatttctcaactccgggcagagcatcagaaggagggctgtacttctggaattgatgttattt

SEQ ID NO: 189005 - DNA, 277 bp, Glycine max
gttgccatgaggtttcaccagtaccaggtggtgggaagggctcttcctaccgaatccgatgagcatcctaagatctaccgcatgaaactctgggccaccaacgaggtccgtgccaaatccaagttctggtattttttgagaaaattgaagaaggttaagaaaagcaatggacaagtgctagccatcaatgagatttttgagaagaatcctaccaagattaagaattatggaatttggctgcgttatcagagccgcactggttatcacaatatgtaca

SEQ ID NO: 189006 - DNA, 281 bp, Glycine max
gttcgatctcaaccaaggttgttccttccaccgccatgagtttcatcttcggaaagcgaaaaacacccgcagagcttctgcgggaaaataagaggatgctggacaaatcaatcagagaaattgagcgcgagcggcaaggcttgcaaacgcaagagaagaaattgattgcggtgataaagaaaagtgccaaacagggccagatgggagctgttagagttatggcaaaagatcttgttagaacaaggcatcaggttgagaaattttataagctaaaatctcag

SEQ ID NO: 189007 - DNA, 282 bp, Glycine max
  unsure (1)..(282): unsure at all n locations
gcttcttttcttctggggggcaaaaggggtcacttttcagatccgagattgagctcctttacccatcatcatcatggagctcctcgggtacctgaatcagggtcacccttctagaggaacaacacttgttattactctttcattggtgctttcgacacttgtgtccttctccactttcacacatgacacgattcatnctgcgnttccggaactgaatcctataaaacctaggcactcacgtcttctcaggagtgccgtgcaacatgaaactcctacatcaca

SEQ ID NO: 189008 - DNA, 282 bp, Glycine max
  unsure (1)..(282): unsure at all n locations
atctgctcggatggaatctggaagtggcaatggtgatncgtgaggtacagcgtactatgctggaacttctcaatcagttggatggatttgaagcttcaaacaagatcaaggttttgatggccacaaatcggattgatatcctggatcaagccctccttagacctggacggattgaccggaagattgaatttccaaaccctaatgaagagtctcggctggatattttgaaaatccattcaagaagaatgaatttaatgcgtggcattgatctgaagaagattg

SEQ ID NO: 189009 - DNA, 278 bp, Glycine max
gctagctgtgacttgttttgagttcaatcaaatcgcattggtatctgaaatcaggaaagatggttagcgtactgagatcaggcaggcacaaagggcagaaggcccagcaaccatccttgccattggaactgcaaacccaccaaaccgtgttgatcagagcacctatcctgattactacttcagaatcaccaacagtgaccacatgaccgagctcaaagagaaatttcagcgcatgtgtgacaagtctatgatcaagacgagatatatgtacctaaacg

SEQ ID NO: 189010 - DNA, 276 bp, Glycine max
gttactgtctgttcaagctaccatctatctctctctttcttagtgcctccttgccagaagttaaaatggcccaagaaactttcctattcacatctgaatcagtgaacgagggacaccctgacaagctctgtgaccagatctccgatgctgtgctcgatgcatgcttggagcaggaccctgacagcaaggttgcctgtgaaacctgcaccaagaccaacatggtgatggttttcggagagatcacaaccaaggccaacgtggactatgagaagattg

SEQ ID NO: 189011 - DNA, 274 bp, Glycine max
cctaatcgtgagaagaaaggaaagggaaaagaggaaaatggtgtgcataaggaaggcgacggtgaaggaccttctggcgatgcaggcgtgcaacctgttctgcctccctgagaactaccagatgaagtactacctctatcacatcctctcctggccccagctcctctacgtcgccgaagactacaacggccgcatcgtcggctacgtcctcgccaagatggaggaagaaaccaccgactgccacggccacatcacctccctcgccgtcctccgc

SEQ ID NO: 189012 - DNA, 276 bp, Glycine max
cttcactttcactcacaatcacgagaatgcccggtgtgcaaggctctcgtggaggaggagaaattggttcccttgtatgggagaggaaagtcgtccactgatccgagatcaaaatctattccgggcgttaacatcccacatcgtccggctgggcagaggcctgaaactgctcctccacctgaaacaaatcattttcatcaacatgggtttggatttatgggtggcttggggggatttgtgccaccgccgatggcaacaacaagatttgggaatttt

SEQ ID NO: 189013 - DNA, 275 bp, Glycine max
ggcatacaaggatggtcatgttgcaccatttgttaagtctgaacccattcccgagactaacgatgaacctgttaaagtggtagttggggccagtcttgaggacattgttttcaaatctgggaagaatgttctgctggagttttatgctccctggtgtggtcattgcaaacagttggctccaatattggatgaagttgctatctcatatcaaaatgaagctgatgttgttattgcaaaactggatgcaactgccaacgatatcccaagtgaaacct

SEQ ID NO: 189014 - DNA, 280 bp, Glycine max
gccaaacactctctctctgtctctcgaaaattctcagtttgcagagaaaatctgaatcatgtcgtggcaagcgtatgtccgacgatcaccttctgtgtgacatcgaaggtaaccacctcactcacgctgctatcatcggccaagacggcagcgtttgggctcagagtaccgacttccctcagttcaaacctgaggagataactgccatcatgaatgactttaatgagcctggatcacttgctccaactggattgtatctcggtggcaccaaatatatggt

SEQ ID NO: 189015 - DNA, 280 bp, Glycine max
gtttccatctatactttttccaattgaaattaaaaatatccaacgcggcaaacacggcagtgacactggagtctacgatactgaaggaaggtttgtaccttcaaaatttgaagatatttttaacaagcatgcacatacacatccaaatgctttgacatatgatgagttaacggagatgataaaggcaaatagagagcctaaagatttctcaggaaggattggtagtgtggttgaatggaaaattctttacaaacttgctaaagataagagtggattactg

SEQ ID NO: 189016 - DNA, 283 bp, Glycine max
ctttgtttgcaacaacgataccatggcagagaatctccaaagacaactctttggtctgcctccacggtacagagattcagttagaacaataactccagggttgcccctttttctgtacaactactccactcaccaactccatggtatcactgaggctgcaagttttggaggatctaatattgatccaacggcttgggaggataagaagtgccctggtgaatctcgtttccctgctcaggttcaagtgattactaggaaagtttgtgagccactagaggaagat

SEQ ID NO: 189017 - DNA, 277 bp, Glycine max
atacaggtgacattgaagcaacagttgtggcatgcaaggcagctgatgctgctgtgaagatgattcttgatgcaatagagcaagtgggtggaatttatgttgtcacagctgaccacgggaatgctgaggatatggtcaagagggataaatctggaaaaccacttctaggcaaggatggaaaaatccagattcttacttcccatactcttgagcctgtgccaattgctattggaggtcctggattggcccctggtgtcagattccgcaacaatgttcc

SEQ ID NO: 189018 - DNA, 274 bp, Glycine max
gaaacacccaaggttcgtttatggttatcagatagtgaccaagtagtgcgtttaggtcatacacccactatatatgtttacaaagcaaaacacaacaccaaaaccatagagagaatgaaaacctcacttggcaagattttggtgtactactatccagttgctggaagattgaacttatcagatagtggtcgaatggaattggattgcaacgcaaagggagtgacacttcttgaagctgaaaccacaaagtcattgggtgattatggagattttt

SEQ ID NO: 189019 - DNA, 276 bp, Glycine max
gcagtttcaaagagaggatttgggattgggaaggcgagggattgcgctgcgtctcttcctcttctctatcgattcatccctcattcataatcttccaatccaacaacctcaacctcacactcacacatacacacatctgaacgcgtatcgtccctcccatggcttcaaagcgcatcctcaaggagctcaaggacttgcagaaagacccaccaacttcttgcagcgctggtccagtagctgaggacatgttccattggcaagcaacgattatgggtc

SEQ ID NO: 189020 - DNA, 274 bp, Glycine max
gtgagagcatacctgtcgggacccgaaagatggtgaactatgcctgagcggggcgaacagtaggaaactctggtggaggcccgcagcgatactgacgtgcaaatcgttcgtctgacttgggtataggggcgaaagactaatcgaaccgtctagtagctggttccctccgaagtttccctcaggatagctggagcccgcgggcgagttctatcgggtaaagccaatgattagaggcatcgggggcgcaacgcctcgacctattctcaaactttaa

SEQ ID NO: 189021 - DNA, 276 bp, Glycine max
  unsure (1)..(276): unsure at all n locations
gatggatggtactacaccaatgtactccaaggccaggtatgatgaaattgtgatggaagtttcttcctatttgaagaaagtaggatacaaccctgacaagattccttttgttcctatatctggttttgagggagacaacatgattgagaggtccacaaaacatgagagtttcaanggtcctactctgctagatgcacttgaccagatctctgagcccaagatgccttctgacaagtccctcaggctaccccttcaggattgtaggaagattggagg

SEQ ID NO: 189022 - DNA, 278 bp, Glycine max
agaggcagctaagtgttgtgatgacactcctttgttgtgttcattttcatgtccaatgttgtgatgaagttgaagatgcaatcagcagatctgacttcccagaagggttcctcttcggaacgagcacttcctcttaccagattgaaggagcaccttttgaagatggtaggggtttaagcaactgggatgtttttagtcatacaccaggaaagataaaaaatgacgagaatggtgacattgcagatgatcattatcatcgctacttggaagacattgag

SEQ ID NO: 189023 - DNA, 280 bp, Glycine max
gcacttggtggcaatcgtgatgtggcaggaagccagaacagccttgagatcgatggtttagctcgctttgctgttgaagaacacaacaaaaaacaggtttttctttcttttttcccttaaaaaagatgaaagaaaatgttaattatgtgttgtattgcattgtttgcttctcgagaaattcctatgatttgttttgagttgttaatttgtattgggtcaggccgatgatcggttttggccatgttaacgtttcttcggaaatgcacatcttgaattggat

SEQ ID NO: 189024 - DNA, 279 bp, Glycine max
ctcgagccgcttcaacaatgctcaaaattttgatggctctgctccttttgtctctatcttttcaagcatatggacaatttgaggaatggtgcatagcagatgagcagaccccagatgacgagttacagagggccatggagtgggcttgtggaaagggtggagcagattgcagcaagatacaagtgaatcaaccctgttaccttccaaataccttgaaggaccatgcctcttatgctttcaacaactactatcaaaggttcaaaaacaaaggaggctctt

SEQ ID NO: 189025 - DNA, 249 bp, Glycine max
cttcttcttctcatgcgatcatcactacatatgatgtgtttgtcagcttccgcggtgaagacacgcgcaacaacttcactgcttttctctttgatgctctctttgaaaatggcatccatgccttcaaagatgatacacatcttcagaaaggcgaatccatagcacccgagctgctactggccattcaggggtctcgccttttcgttgtggtcttctcaaagaactatgcttcctcaacttggtgcttgc

SEQ ID NO: 189026 - DNA, 272 bp, Glycine max
aaccaccatggtttctgagacactccaaagccaaaccaagaacgtgtgcgtgattggagcaggaccatcagggctagtggcagcaagagagttgagaaaagagggtcacagggtggttttgttggagcagaatcatgatgttggaggacagtggctatatgaatcaaatgtggaaggagaggatccctttagggaaaaagccttttctaaaggttcatagcagcatctatgaatctttgaggctcacatctccacgtgagatcatggggttc

SEQ ID NO: 189027 - DNA, 276 bp, Glycine max
cctcgagccgaatcggctcgagggtgttcacttgatccttcataagtcgtcatcatcatcatcatcatcaccgttgattgaaacagatgccgatcagaaacatcgccatcggaaggcctgaagaggctactcaccccgacacgttgaacgcggggttggctgagttcatctccaccttgatcttcgtgttcgccggttcaggttccggcatcgcctacaacaagctcaccgacaacggcgccgccactcccgccggcctcatctacgcttccatcg

SEQ ID NO: 189028 - DNA, 276 bp, Glycine max
cagtacccgacatatcaaattccagaaaagtctgcagacgataagccttatgtaccaacatttcaggtttccaaagaaaaggcaaagaccttggggattgaatttattcctttggaagtgagtcttagagagacagtggaaactttgaaagaaaagaactttgccaacttttagtctctgatatctctgcttgatcaggagtgaacacgttgagaatctcaacggtgtttcgtttgtggttctggttttagaatctcattgcttgaaaataaacta

SEQ ID NO: 189029 - DNA, 278 bp, Glycine max
ggctcgagtctcctcttccagacaccatcatagtcccaatgaccatgatatacaccttactctatctttctttcactttttcctatgctattaagacctccaccatcatcaactacgccgacaatgaggtcatggccatgtacgaggagtggttggtgaagcaccaaaaggtgtacaatgagttgggaaagaaggacaagagattccaagttttcaaggacaacttagggttcatacaagagcacaacaacaatctaaacaacacttacaaacttggg

SEQ ID NO: 189030 - DNA, 284 bp, Glycine max
cggcattagtgtacttggaagtaagggagtagcaatacgacaagaaggaataccttgatttttatactgaccttaccgctacatctccagccgtttctggagtgatggtatatatagcaactcccgacaagaaatctaatgtaaattatttgggccctgcatcgattgaagacattgcaaggcaaataattcaagctaaaggtcccgcaggacctaacagagattatcttttcaaccttgaaaaggctcttcatgaaataggatgcaaagacaaacatgtcatt

SEQ ID NO: 189031 - DNA, 285 bp, Glycine max
cggcattagtgtacttggaagtaagggagaagcaatacgacaagaaggaataccttgatttttatactgaccttaccgctacatctccagccgtttctggagtgatggtatatatagcaactcccgacaagaaatctaatgtaaattatctgaaccctgcatcgattgaagacattgcaaggcaaataattcaagctaaaggtcccgcaggacctaacagagattatcttttcaaccttgaaaaggctcttcatgaaataggatgcaaagacaaacatgtcattg

SEQ ID NO: 189032 - DNA, 280 bp, Glycine max
gcctttttggcatgaacatatagcatgtgcgccgtgaggtcaatcactgtcagttcttctttagaaattctcgaacatgatgacgagctcttatcggcttgaggcttcttttcaagctgagtcgaaatttcataagagaagaaagaaagtagaaaggatttggattcgaggcttgctaagtgaagtcaacaagcaaggaaaaaaagctttctccgagaaagcgtctgttcacgtcagggtccggggtaggcttcttcttcgagattggcttggtcttcag

SEQ ID NO: 189033 - DNA, 269 bp, Glycine max
cttgcttctggtgatataatgatctcgtgtcttggagataaagatggaaatgctgcaggaaatggatttcttcttcttgattctgagtttaatgtgaagggaaggtgggagaaaccgggtcacagcccactatttgggtatgacttttggtaccaaccacgtcacaataccatgattagcacatcatggggtgctcctagtgcttttacaaaaggttttaacttacagcatctctctgatggattatacgggaggcatctccatgtata

SEQ ID NO: 189034 - DNA, 270 bp, Glycine max
gtccctggagaagatgttgtagaagttgttgtgagccctccttttgtgttccttccttttgtaaaaagtttgctgcgccctgatttccatgtctcggcccaaaattgttgggttcgcaaaggtggtgcttatactggagtcgttagtgctgaaatgcttgttaatttgggaattccttgggttattattggtcactctgaacggaggcagcttttgaatgaatcaaatgagtttgtgggagataaagttgcctatgcacttcaacaaggt

SEQ ID NO: 189035 - DNA, 271 bp, Glycine max
cacaaacacactcttttttgttctttgctcacttcccttgttcgtttcactctcacgatggactccctctctctctggtgcaccggagcccgtctcgccggcggcctctactggttcgtctgtgttctgggccccgccgagcagaagggcaaacgcgccaccgatctatccggcggctccatctccgccgagaaagtcctcgacaactacaagctgtactggtccttcttccgccgcaccatggagatcgagaccgccgagtaagttcccg

SEQ ID NO: 189036 - DNA, 270 bp, Glycine max
gttaagccttcaccagtagtggcagcttttagttccagagggcccaatatggttaccagacagattctgaaaccggacgttattgggcctggggttaacatcttggccgggtggtccgaagcaattgggccatcagggttatccgatgacactaggaaaactcagttcaacatcatgtcaggtacatctatgtcttgtccacacataagtggattggctgccttgttgaaagctgcacatccgcaatggagtcctagttgcgataaaatc

SEQ ID NO: 189037 - DNA, 275 bp, Glycine max
ctaagcacttccatacacaaattttctctcccagaagaaatattttcatttcatttcgagtaaaagtaaaacacagttcctgatccatggcatctcgccgccgcatgttgttgaaggtcataatcctcggagacagcggggttggtaaaacatcactgatgaatcagtatgtgaatcgtaaatttagtaatcagtataaggcaaccatcggcgcagattttcttaccaaggaagttcaatttgaagataggttgttcacattgcagatttgggat

SEQ ID NO: 189038 - DNA, 276 bp, Glycine max
cttcacgaagaaagtactacagaaactgggtcttggtcaactcaggcagcagagtctaagaatgaaaaggagtctcaagaatcctccaagcaggcaactggatacaagtggaagctttgcaatgtcactgctggtcctgattttatcccatgccttgacaactggaaagctattaggagtctccggagtactaaacactatgaacatcgagaaagacactgtcctgaagaacctcctacctgccttgttcctgttcctgaaggatataaacgccca

SEQ ID NO: 189039 - DNA, 272 bp, Glycine max
ggctcccaagggtttaacctttctggctgtgttaatatgcgtttcagcactgtcactgagtgcctctgttgcgggggaagggcaaaataatggccttgttatgaacttctacaaggaatcatgccctcaggctgaagacatcatcacagaacaagtcaagcttctctacaagcgccacaagaacactgctttctcctggctcaggaacatcttccatgactgtgctgttcagagttgtgatgcttcactgttgctggactccacaagaagga

SEQ ID NO: 189040 - DNA, 279 bp, Glycine max
ctccttcttctctctcctctggcacccctaaagcttcttctgttctgtgcaggcagtttttctttggtttggttgcatcctttgatctgatcagcaaatttgagaattcagtttgggaagggccattcctctttagtgcaaaacagatcgcaggtgcctttgtgctgatggccactaatgaaaatcttccaccaaatgtaattaagcaacttgccaaggagttgaaaaatcttgatgaatctcctcccgagggcattaaagttgtggtaaatgatgatg

SEQ ID NO: 189041 - DNA, 272 bp, Glycine max
ggaagagactgggtggaaatatatccatggggatgtgtttaggttccccaagtttaagtctctgtttgcggctgcgcttggatctggcactcagttgtttacccttacggtgttcatattcatattggcgcttgttggtgtgttttatccatacaatcgaggggcgctgtttactgcacttgttgtcatatatgcacttacttcagggattgctggatacactgcaacttcattctattgtcagttggaaggaacaaactgggttaggaatc

SEQ ID NO: 189042 - DNA, 265 bp, Glycine max
atgtccgttgaactcaagctctctcgttccaatcgtatcgatcgttattcggaagctctggaaggaaaaatcggtgtcaaaactcagtcttcaatctcccactatggaattcgtcttactgtcaaaggatccgtcaacttgcaggttcgtggaggatcagctggggttgttgaatcattctacggtgttattaagcccatccctattgtgaatagtaccattgaggttaaatcttctggaaagattggttctggtgcatcagaga

SEQ ID NO: 189043 - DNA, 270 bp, Glycine max
gggaattcaagcactttgtaattgttaagttcaaggaaggtgtggccgttgacgagctcacaaaagggatggaaaagttggtcacggagattggtgctgtcaagtcctttgaatggggacaagacattgaaagcctagatgtgttgagacaaggtttcactcatgcattcttgatgacattcaacaagaaagaagactttgttgcatttcagagccacccaaatcatgtcgagttctcgacaaagttttcggcagctattgagaatattg

SEQ ID NO: 189044 - DNA, 266 bp, Glycine max
ggagtatcatgggtgaacaattagggctactaaaagtcatggttgtgcaagggaaaaggttggtgatccgggatttcaagaccagtgatccttatgtagtactcaaactagggaatcagactgcaaagaccaaggtaattaatagctgcttgaatcctgtttggaatgaagagctgaatttcactctgacagaaccattgggagttctgaatttggaagtgtttgataaagatcttttgaaggctgatgacaagatgggaaatgct

SEQ ID NO: 189045 - DNA, 272 bp, Glycine max
cttaccaacccctcaagaagttgtggccctctacaatcaagccaacattcgcaggatgcgaatctacggtccaagcccagaagtcctcgaagcactaagaggttccaacattgagcttttgctagacattccaaatgacaacctcagaaacctagcatctagccaagacaatgcaaacaaatgggtgcaagacaacatcaaaaactatgccaacaatgtcagattcagatacgtttcagtgggaaatgaagtgaaacccgaacactcatttg

SEQ ID NO: 189046 - DNA, 272 bp, Glycine max
tatcgagccgattcggctcgagatatcagagatctttgcagctctctacggtttttaaaaaacactacgcaatcagcaagatgaccacttccgacagtaacatgctactaaattatgttccagtttatgtgatgcttccactcggagttgtcaatgttgacaatgtttttgaagacccagatggccttaaagaacagctcttgcagcttcgagctgcgggtgttgacggggttatggttgatgtgtggtgggggatcatagaactgaagggg

SEQ ID NO: 189047 - DNA, 282 bp, Glycine max
gccacagcaagagtgttcaaatgggagagggaaaaggaagaatttgtgtcactggaggcacaggattccttggttcatggataatcaagagcctccttgaacatggatatgctgttaataccactataagatctgacccaggacgcaagagagatgttagcttcctcacaaacctacctggtgcatcagaaaagcttaaaattttcaacgctgatctcagcgacccagagagttttggtccagcagttgagggttgtgttggaatttttcacactgccaccc

SEQ ID NO: 189048 - DNA, 284 bp, Glycine max
tggagggtggaagatcatcagtttcaaatgggaatgttgaggttcgttatagagggattagaagaaggccatggggaaagtttgcagcagagattcgtgaccctacaaggaaaggaacaaggatatggcttggaacatttgacactgctgaacaagctgcacgagcttatgatgctgctgcttttcattttcgtggccacagagcaattctcaacttcccaaatgagtatcaatctcataatccaaactcttctttgcctatgcctctagctgtgtcagctcct

SEQ ID NO: 189049 - DNA, 187 bp, Glycine max
cagatcttgaggctcccttgcgccctaagaggaagatggtttgggtggactatttcgttcagtttcgatggatccttgttatggttgtggtccgtcccatctcatacatcatttatttccttacataccttagggatgtactatctgagtggatgtcctataagacgcgttggaaggaccatgacga

SEQ ID NO: 189050 - DNA, 271 bp, Glycine max
atgctcttagagaagctatctcaggaatcatgactgattccaaggaaaagaacaggaaatttgtggagaccattgaactccaaattgggctgaaaaactatgatccccagaaggacaagcgttttagtggctctgttaagttgcctcacattcctcgccccaagatgaagatttgtatgcttggagatgcccaacacgttgacgaggctgagaagataggattggactacatggatgtcgaggccttgaagaagcttaacaaaaacaagaa

SEQ ID NO: 189051 - DNA, 272 bp, Glycine max
ctcgagccgcttctcaaactagtagtattattcttccattcataatgggtgttttcacattcgaggatgaaatcaactcccctgtggctcctgctactctttacaaggccctagttacagatgccgacaacgtcatcccaaaggctcttgattccttcaagagtgttgaaaacgttgagggaaatggtggcccaggaaccatcaagaagatcactttcgttgaggatggagaaaccaagtttgtgctgcacaaaatagaaagcattgatgag

SEQ ID NO: 189052 - DNA, 268 bp, Glycine max
ggatggtatgattcttgcaaacacaacatcaattggaatgcaacctaaagttgatgagacgcctgtttctaagcacgctttgaaatattactccctagtttttgatgctgtctacacgcccaagattactagactcttgaaagaagcagaagaatcaggagccactattgtaacaggattggagatgtttatggggcaagcatatggacaatatgagaatttcaccggattaccagcaccaaaggagctcttcagaaaaattatggaa

SEQ ID NO: 189053 - DNA, 266 bp, Glycine max
ggagtgctgaccagtgtattagcagtggtcaagagggccttacttatgatgacaactctatacatggatacttaaatgatgttttggttgaaaatgcaattgtggatgatactgatctgaatcctttggagtttttagcttccctgttccctggttttgcagcagaaagccttgcggaagcttactttgctaatggatgtgatttacatctgaccactgagatgctcaatcagttagagcttcaagttgatggcggtttcaatcag

SEQ ID NO: 189054 - DNA, 263 bp, Glycine max
gcttgacacaaagggtcctgaagttaggagtggggatttgccacaaccaattacattaatgcctgggcaggaattcacttttactattcagagaggtgttggaactgctgattgtgttagtgtgaactacgatgattttgtgaatgatgtggaaatgggggacatgcttcttgtcgatggtggtatgatgtctatggttgttaagtctaagacagaggattctgtgaaatgtgaagttgttgatggaggagagctcaagtcaa

SEQ ID NO: 189055 - DNA, 268 bp, Glycine max
atgctcttagagaagctatctcaggaatcatgactgattccaaggaaaagaacaggaaatttgtggagaccattgaactccaaattgggctgaaaaactatgatccccagaaggacaagcgttttagtggctctgttaagttgcctcacattcctcgccccaagatgaagatttgtatgcttggagatgcccaacacgttgaagaggctgagaagataggattggactacatggatgtcgaggccttgaagaagcttaacaaaaacaa

SEQ ID NO: 189056 - DNA, 265 bp, Glycine max
ggagcccgcgggcgagttctatcgggtaaagccaatgattagaggcatcgggggcgcaacgccctcgacctattctcaaactttaaataggtaggacggtgcggctgctctgttgagccgcgccatggaatcgagagctccaagtgggccatttttggtaagcagaactggcgatgcgggatgaaccggaagctgggttacggtgcccaactgcgcgctaacctagaccccacaaagggtgttggtcgattaagacagcaggacg

SEQ ID NO: 189057 - DNA, 264 bp, Glycine max
ggacagattggtgcttttgaagggtgttagtggtgcattcaggcctggtgttctcacagctttgatgggtgtaagtggagctggtaagactactttgatggatgttctggctggtaggaaaaccggaggatatattgatggaagcatcaaaatttctgggtaccctaagaagcaagaaacatttgctcgtatctctggctactgtgagcaaaatgatatccactcacctcatgttacagtttacgaatccttgctctactctgc

SEQ ID NO: 189058 - DNA, 267 bp, Glycine max
tctcgagccgaatcggctcgagccagcacaaccatatccagaaagatttgcattgagttttggaattgttcttttggaactacttactggcagaaagaatcttgatagccatcaccccaaggaagagaggaacttagtcaagtggagccggcctttcctggccgatgattttcgactgtcactgatcatggatcctcaacttaaaggtcactttcctcccaaagcggcaagaacgatggctgacattgcacaaagatgcctccaaaa

SEQ ID NO: 189059 - DNA, 269 bp, Glycine max
gtttgcggctgaggattccgaacgagtgaccttcttcgtttctcgcaaagtttaagtaatcatgggtaaggaaaaggttcacatcaacattgtcgtcattggacatgtcgactctgggaagtcaactaccactggtcacttgatctacaagcttggaggtattgacaagcgtgtgattgagaggttcgagaaggaggctgccgagatgaacaagaggtcattcaagtatgcctgggtgctcgacaagctcaaagctgagcgtgaaagag

SEQ ID NO: 189060 - DNA, 268 bp, Glycine max
cgttgaagcagcttgtgctgcacatcctactgccgatgtcttcatcaactttgcttcatttagaagtgctgcagcatcatccatggctgctttaaaacagccaacaattagagttgttgctattattgctgaaggagtacccgagtcagacactaagcaattgattgcatatgcccgatcaaacaataaggttgttattggcccagccacagttggaggcattcaagcaggtgcttttaaaattggtgacacagctggaacaattgac

SEQ ID NO: 189061 - DNA, 266 bp, Glycine max
gtggaggcccgcagcgatactgacgtgcaaatcgttcgtctgacttgggtataggggcgaaagactaatcgaaccgtctagtagctggtttcctccgaagtttccctcaggatagctggtgcccgcgggcgagttctatcgggtaaagccaatgattagaggcatcgggggcgcaacgccctcgacctattctcaaactttaaataggtaggacggtgcggctgctctgttgagccgcgtcatggaatcgagagctccaagtgggc

SEQ ID NO: 189062 - DNA, 267 bp, Glycine max
agtagtcatatgcttgtctcaaagattaagccatgcatgtgtaagtatgaactaattcagactgtgaaactgcgaatggctcattaaatcagttatagtttgtttgatggtatctactactcggataaccgtagtaattctagagctaatacgtgcaacaaaccccgacttctggaagggatgcatttattagataaaaggtcaacacaggctctgcctgttgctttgatgattcatgataactcgtcggatcgcacggcctttgtg

SEQ ID NO: 189063 - DNA, 265 bp, Glycine max
atttagttgttgacatcaacaaagtcatggaggaagttaatgtggttcaaaccaagaatggaactgttgcagtagcttctgcgtttgctggacataaggaagctatacagcaaagggaccacaaatttttaagaattgctgttgaagaagcctataaaggggtagactgtgaagatgggggtccctttggtgctattatagtatgtaatgatgaaatagttgctcgatgtcacaacatggttctgaggaacacagaccctactgc

SEQ ID NO: 189064 - DNA, 255 bp, Glycine max
ctcgagccgtgaagtctgctatgtgtgcagtggtggttgtagcacttcttcttctggcggacgtggggcccatggctgaggctgtgacatgtaccccaacagagttgagtccgtgtcttccagcaatcacttccggtgctaaaccttccaatgcttgttgcacgaagctgaagcagcaaaaaccatgcttatgtggctacctcaaaaacgctagcttgaagcagtatgttaactctcctaatgcccgaaaaaccg

SEQ ID NO: 189065 - DNA, 269 bp, Glycine max
cttttattcgcaccgcaaacagtgagccatggccgtcggaaagaacaagcgcatctccaaggggaagaagggtggcaagaagaaggcagctgatccctttgccaagaaggattggtatgacattaaggctccttctgtttttcaagtgaaaaatgttggcaaaaccctcgtctctcgtactcagggtaccaagattgcttctgaaggactcaagcatagagtgtttgaggtctccttggctgatcttcaaggggatgaggatcatgcat

SEQ ID NO: 189066 - DNA, 266 bp, Glycine max
ggggccagtccttccacttctccccctccatccccggtaagtcccaccgcgaggccacgcgcctccacgaggagatggccgtcgatctcatcgaggccaagcccggcaacaaaatcctggacgtgggctgcggcgtgggcgggcccatgcgggccatcgcggcccactcccgcgcgaacgtggtgggcatcaccatcaacgagtaccaggtcaatcgagcaaggatgcacaacaagaaggctgggttggactctctctgcgaggtc

SEQ ID NO: 189067 - DNA, 266 bp, Glycine max
caagccttacatctatgcgtcacctccccctccttaccactattagctagcatagctctatggatatgaagaatatgtgcaacgaataaaagaaagcgatagaaaaggaagaagaagcgcttcgcgatgcacgaaagagaagaattggaagcaaagtttcggcgttttgtcttttataaaaaaaatgttaaatcattataattttctatgatagggattggtttcttgtcttttttcttttgtttatgaatatcggtgtattttaa

SEQ ID NO: 189068 - DNA, 261 bp, Glycine max
caaattctcaaacccaaatcccaagtctcctaaaaccctaattcgcagtgaaaatgagagaaatcttgcacatccagggagggcaatgcggtaaccagatcggagcgaagttctgggaggtgatatgcgacgagcacggcatcgaccacaccggaaagtacagcggcgactccgagctccaattggagcgcatcaatgtttattacaatgaagccagcggcggaaggtacgttccacgcgccgtcctcatggatctggagc

SEQ ID NO: 189069 - DNA, 262 bp, Glycine max
gaactacacataatgttatttccgttcccaggtcaggggcacttgataccaatgagtgatatggcgagagcatttaatggaagaggggtgaggacaaccatagtgaccactccactcaacgtagccactattcgtggaacaataggaaaagagacagagacagatatagaaatcctgacggtgaaattccctagtgcagaggctggtttacctgagggatgcggaaatacagagtcaatcccctcccctgacttggtactga

SEQ ID NO: 189070 - DNA, 262 bp, Glycine max
ggtcaaggaagggtaagaaggcatggagagctaacatcagcaccgaagagatcgaagatttcttcgagaaatcaacgaaggacgctctttctggtggctctctacaagccgtttcttccgattctctcttctatgaagacaagtccaaagatcttgctgtgaagaagacgatcgagaaacatagggagagggtgctccgatgtgatagcctgctacagaaaaatcagtttgttaagccagtgccatcttctattctgaagaa

SEQ ID NO: 189071 - DNA, 263 bp, Glycine max
gacttatggaactatttctccattgggtagtccccagcaggttattcttatcaatggtcagtttcctgggcctagacttgacttggtgactaatgagaatgtaattctcaaccttatcaacaagctggacgagccatttttactcacttggaacggtattaaacaaaggaagaattcatggcaagatggagttttgggaaccaactgtcccattcctccaaactcaaattacacatacaagtttcaggccaaggatcagattg

SEQ ID NO: 189072 - DNA, 269 bp, Glycine max
gtggatacctaggcacccagagacgaggaagggcgtagtaagcgacgaaatgcttcggggagttgaaaataagcgtagatccggggattcccgatataggtcaacctttcgaactgctgctgaatccacgggcaggcaagagacaacctggtgaactgaaacatcttagtagccagaggaaaagaaagcaaaagcgattcccgtagtagcggcgagcgaaatgggagcagcctaaaccgtgaaaacggggttgtgggagagctatacaa

SEQ ID NO: 189073 - DNA, 277 bp, Glycine max
tctcgagccgaatcggctcgagatatgcttgtctcaaagattaagccatgcatgtgtaagtaacgaactaattcagactgtgaacactgcgaatggctcattaaatcagttatagtttgtttgatggtatctactactcggataaccgtagtaattctagagctaatacgtgcaacaaaccccgacttctggaagggatgcatttattagataaaaggtcaacacaggctctgcctgttgctttgatgattcatgataactcgtcggatcgcacggc

SEQ ID NO: 189074 - DNA, 272 bp, Glycine max
caaccacctctttcaattctctcctctcttattccaaactcaaattagaggaaaaagggtcaaataataattaagtgtaatatggatacgatcagtgttcaggcgatgagaagcttatcagatagtgactcattatcatctgcaacatatgcaagtgaagaagatatgaaaattaagaaaggtccatggactgaggaagaagattctgttctgatcaactacgtcaacttccaaggcgaaggtcaatggaactccctcgctcgctctgcagg

SEQ ID NO: 189075 - DNA, 269 bp, Glycine max
cattgctggaggtgctactcagaattcaatcagggttgctcagtggatgcttcaagcaccaggtgccacaagttatataggttgcataggaaaggacaaatttggagaggagatgaagaagaaatgtacactagatggtgtaaaggttaactattatgaaatcgacactacacctacaggaacttgtgctgtttgtgtggttggtggtgaaaggtcccttgttgccaacttatcagctgcaaattgctacaagtctgagcatttgacga

SEQ ID NO: 189076 - DNA, 220 bp, Glycine max
ggtgaacggctgctggccgttgcttggcagcagtgagggtgtcactggaactattcacttcgttcaggagggaagtggtccaaccaccgtaactggatctcttgctggtcttaagcctggtctccatggtttccatgtccatgcctcgggggacactaccaatggttgcctctcaactggatcacatttcaatcctagtaacaaggagcatggtgccctg

SEQ ID NO: 189077 - DNA, 263 bp, Glycine max
agtaaacactgccacagcaagagtgttcaaatgggagagggaaaaggaagaatttgtgtcactggaggcacaggattccttggttcatggataatcaagagcctccttgaacatggatatgctgttaataccactataagatctgacccaggacgcaagagagatgttagcttcctcacaaacctacctggtgcatcagaaaagcttaaaattttcaacgctgatctcagcgacccagagagttttggtccagcagttgaggg

SEQ ID NO: 189078 - DNA, 260 bp, Glycine max
agggtcacatgtttggctatgccactgatgaaacccctgagtacatgcccctcagccatgtccttgcaaccaaactcggtgctcgcctcaccgaggttaggaaaaatggtacctgtgcttggctgaggccagatggcaagacacaagtaactgttgagtactacaatgacaatggtgccatggttccagttcgtgtccacactgtcctaatttccacccaacatgatgagactgtgagcaatgaccaaattgctgctgac

SEQ ID NO: 189079 - DNA, 275 bp, Glycine max
tcgggaaatcacatagctagttgtttaaagtaagagagaagaaagaagcagatggcaaactttccagttgttgacatggggaagcttaacaccgaagagagacctgcagccatggagattataaaagatgcctgtgagaactggggtttctttgagttggtgaaccatgggatatccattgagcttatggacacagtggagaagctcacaaaagagcattacaagaagactatggagcaaaggttcaaagaaatggtgaccagcaaaggtcttga

SEQ ID NO: 189080 - DNA, 267 bp, Glycine max
tgcctgttctctccatacattgcgactgccaaggagcagtatgaatgattccattgtggaacagattgctgggaggctttctatgatttctttcttggatgtgagctactgtattaaaatcggtccctatgcacttgagatgattggcaagaactgcaaactgctagaagggttgtgtcgaaacatgcacccgttggatactgcaagcaagccgtttcaagatgatgaagcatatgcaattgcctccacaatgcctaagctcaagca

SEQ ID NO: 189081 - DNA, 261 bp, Glycine max
cactctctctgctcttcttctacctttcaagtttttaaagtattaagatggcagagacattcctatttacctcagagtcagtgaacgagggacaccctgacaagctctgcgaccaaatctccgatgctgtcctcgacgcttgccttgaacaggacccagacagcaaggttgcctgcgaaacatgcaccaagaccaacttggtcatggtcttcggagagatcaccaccaaggccaacgttgactacgagaagatcgtgcgtg

SEQ ID NO: 189082 - DNA, 258 bp, Glycine max
gacgagtgcatggtgcttgacaatgaagctttgtatgacatttgcttccgtaccctcaagctaaccaccccaagctttggtgacttgaaccatttgatctcagctacaatgtctggtgtcacttgttgtttgaggttccctggtcaacttaactctgatctgcgaaagcatgcagtgaaccttattcccttccctcgcctccacttcttcatggttggatttgctcctttgacatctcgtggctctcagcaatacagg

SEQ ID NO: 189083 - DNA, 262 bp, Glycine max
atcgtcttccaaaatgaacgacgcagatgtctcgaagcaaatccagcagatggtgcgtttcatccgccaggaagctgaggagaaagccaacgagatctctgtatctgccgaagaggaattcaatatcgagaagctgcagttggttgaagccgaaaagaagaagatcaggcaagaatacgaacgcaaagagcgccaagtcgaaattcgcaagaagattgagtactcaatgcagctgaatgcttctcggattaaagttcttcaa

SEQ ID NO: 189084 - DNA, 261 bp, Glycine max
ctacattcaccgagcatttgcattcacattgaatatggctgagactacacaatctaatgctgagttgttggagtggcctaagaaagataagcgccgcttcctgcatgttgtgtatcgtgttggtgatcttgatcgcaccattaagttttatactgaatgttttgggatgaagcttttgaggaaaagagatattccagaggagaaatatgccaatgcttttcttggatttggccctgaacaatcccattttgttgtggaatt

SEQ ID NO: 189085 - DNA, 264 bp, Glycine max
ctcgagcccttttttgtctcgctctctctggtgttatcagaatccgactagattaactgttggtgcatgtgggtttggttctttggtgctacagtcaatggtggagatgtatcagctgcatcttctctttatcgaaatggtgttggttgtggtgcctgttaccaggtgaggtgtaccaacagtgtatattgctcagaaaatggtgtgactgcagttataaccgaccaaggttcaagtgataacactgatttcattcttagcaaa

SEQ ID NO: 189086 - DNA, 263 bp, Glycine max
gtgccctcttctcacaactgtgatgttcctcatgtgaatcgtactgattaccagctcattgatattgctgaggatggatttttgagtctgcttactgaaaatgggaacaccaaggatgacctcaagcttcccactgatgagagtctgctcactcagataaaggatggatttgctgagggcaaggatcttgttgtgtctgtcatgtctgctatgggtgaggaacagatttgcgccctgaaggatattgggccaaagaactagct

SEQ ID NO: 189087 - DNA, 260 bp, Glycine max
ggtgttgttactgctgctcttttctcttttcttttctctttagttctctcttcccctttctttttctttttcttcttcttctgagcctgtttaagcttttcttccattaacatattatcacaatgtgtggtattcttgctgttcttggttgttctgatgactctcgagccaaaagggtccgcgtgcttgagctctctcgcagattgaagcaccgtggccctgactggagtgggctccatcaacatggtgactgctttttg

SEQ ID NO: 189088 - DNA, 261 bp, Glycine max
ctcgaagcgctcgagccgaatcggctcgagattccaatggccgatcagctcaccgacgaacagatactccgccttcaaggaagccttcagcctcttcgacaaagacggggatggttgtattaccaccaaggaacttgggaccgtgatgcggtcacttggccagaacccaactgaggcagagctgcaggacatgataaatgaggttgatgctgatgggcatggtaccattgatttcccagaattcctgaatctcatggctcg

SEQ ID NO: 189089 - DNA, 263 bp, Glycine max
ctagagagctgtggtttctctgctaccattggaatggatgttctcaaagataagtgtctgatatctactttggaaggtaaaattgagatgcatgatttaatacaagaaatgggacaagaaattcttcgtcaagaatgttgccataatccaggaaaatgcagtcgattgtggaaggttgaggaaattcatcaagttttaaaagataacaaggggacagatgcagtacagtgtatgtttctagacacaaggaaagtcaatgaagt

SEQ ID NO: 189090 - DNA, 242 bp, Glycine max
ggacaacggctgatcttacattggaaattgccaacaagatgcagaacattgtctgtgtggagaccatgatgcacctcacctgcaccaacatgcctgttgagaagattgaccatgctctccacaccatcaagtccagtggcctccaaaatgtgcttgcacttcgaggtgatccaccgcatggtcacgacaaattcgtccaggtcgaaggcggctttgcctgtgcacgcgacttggtgcaacat

SEQ ID NO: 189091 - DNA, 260 bp, Glycine max
gaacccttccacggtggtgactgcgcgatgggtgcctacaagtatgtttcagagctatggcgcaagaagcagtctgatgtcatgcgcttcttgcagcgggtgaggtgctgggagtataggcagcaaccttccattgttcgcttgacaaggtcgacccgccctgacaaggctcgtcgcttgggcttcaaggctaagcagggctatgtgatataccgtgttcgtgttaggaggggtggccgaaagaggccagttcccaaagg

SEQ ID NO: 189092 - DNA, 265 bp, Glycine max
atatattagtatcgagacttccatgaaaaaaaaagtataaaaaccagtacataattagataccacaaaacactaaacatcacaacttaacccacactcaatagtcttggaccaggacctctccgaccgtctcgtccccgtcctcgcttcagcagcacaacaagaccaaaccctcgatttccaagacatcctccaacgtttcgcgttcgacaacatctgcaaaatcgcgttcgggtatgacgccgagtacctgacgccgtcaactg

SEQ ID NO: 189093 - DNA, 264 bp, Glycine max
ctcaatttcgaaccccatttctggtttcttttccccttttgttattcatcttcaacctcaccccttcgcacgcactctatggagcatcctcacccgtacttcaactcactccctctaacttcaagtccaaggttctgatttcatatggtcttgttcttgttgaattctttgctccatggtgtggacactgtcaggctctgactcctatatgggagagggcagctactgtgttgaagggtgttgttactgtggcagcaattgatg

SEQ ID NO: 189094 - DNA, 267 bp, Glycine max
gtgtcatactaatgttcattgctataccatcgtttgctttgttatactcaatggatgatattgtagtggatccagccattactatcaaagctattggacatcaatggtattggacttatgagtattcagactataacaactctgatgaacaatcacttgcttttgatagttatatgattccagaagatgatctagaattagggcaattacgtttactagaagtggacaatagagtggtagtgccagctaaaactcatctgcgtgtta

SEQ ID NO: 189095 - DNA, 271 bp, Glycine max
ctactctacattcacaacataactctccgattctgaagattttcttatctcttgtctctaaaactagaagcttcgtgattgatcaatggcgacataagcaggacaagccataagcatagaactcggcacgacgtatagctgcgtgggcgtgtggcaaaacgaccgcgttgagatcatccccaactaccaaggcaagcgaactaccccctcatatgtcgccttcaccgacaccgagagggtcatcggtgacgccgcctagaaccaagtcgcg

SEQ ID NO: 189096 - DNA, 277 bp, Glycine max
gtttgcttcccaagtctctcgaagcatctttctttctcttcctgcagaagctatccgtgttacttgttcccaagtctccaacaagcaaagtacatggttgatttggaaatccaggtccccagcgcattcgacccgtttgccgaggcgagagaatcagatgcccccggggcaaaggagtatgtgcacatacgaattcagcagaggaatggaaagaagagtctgacaacaatgcaagggctgaagaaggagttcagctacgagaagatcctcaaggact

SEQ ID NO: 189097 - DNA, 280 bp, Glycine max
  unsure (1)..(280): unsure at all n locations
gntggagtctgagaactctagcatgtactagtactactcctacattcctccatcttcctttgtactatttttttttttaaccatanaagcaagangcacaangntggtganagctccttgttgtgaaaagatgggtttgaagaagggtccttgggctcccgnggaggatcaaatcctcacatcttacattganaaacatggtcatggcaattggngtgccctcccaaagcaagcaggttgttaagggtgtgggaaaagctgtagacnccgctgggttaaa

SEQ ID NO: 189098 - DNA, 190 bp, Glycine max
agaggttccaacattgagcttttgctagacattccaaatgacaacctcagaaacctagcatctagccaagacaatgcaaacaaatgggtgcagacaacatcaaaaactatgccacaatgtcagttcagtaggcagggaatgatgaccgaatcattgaatctatgcgatgaaatcaagcatcatggctgac

SEQ ID NO: 189099 - DNA, 274 bp, Glycine max
gcggcgtgagaatgttggacatcaacctattcagagaggagaagggccacaaccctgaactcatacggcgaatcccaacgccgtcgtttcgccagcgtcgaaatcgtcgacgaggtcatcaatctcgacaaagaatggcgaaaacgtcaattcgagttggacaatctccgcaaggaattcaacaagatcaacaaggaagtctccaaactcaagcgtgctggggaggatgttctaagttcattactgaatcagaggagaccaaaaaatcgatagc

SEQ ID NO: 189100 - DNA, 275 bp, Glycine max
gtttgctaccttctctcggaaaaatggttacgttcaggtttcaccagtaccaggtggttgggagggctcttcacacggaagcagatcagcaccccaagatctaccgaatgaagctctgggccaccaacgaggttcgcgccaagtccaagttctggtattttctgaggaaactgaaaaaggtgaagaagagcaatggccaagtgcttgccatcaacgagatttttgagaagaacccaaccaaaattaagaactatggtatatggttgcggtatcag

SEQ ID NO: 189101 - DNA, 278 bp, Glycine max
aaaatcacttgaaatttccagaggaggtcagattgacacccgaagccaaggatctaatatgcaggttgctttccggtgtgccacataggcttggtactagaggagcagaagaaattaaagctcatccttggttcacagatgtcatgtgggacaagctctatgaaatggaggcagcatttaaaccacaagtcaatggagagcttgacactcagaattttatgaaatttgatgaggttgaacaaccaaaatcaactagatctggatctggacccttcaga

SEQ ID NO: 189102 - DNA, 276 bp, Glycine max
ggccaaggtgtttgatatcgacctgcagaaacagttgaggccttacatggaatctatggttccactccccggaatctatgaccccgatttcattgctgccaaccaaggagaccgtgccaacaacgtgatcaagggcacaaagaaagaacaagttcaacaaatcatcaaagacattaaggagtttaaggaaagcactaaggttgacaaggtggttgtcctgtggacagccaacacagagaggtacagcaacctagttgtgggactaaacgacaccat

SEQ ID NO: 189103 - DNA, 268 bp, Glycine max
accaaacacaacaacacaaagataaaaagagcacaaacagaccaattccaacggttgaattttttggcatgagacaccccaccgacgttagtcaaataaaacatgtcttgctccgtcgcggtttccaattcgccggtgttctctccttcttcttccctcttctgctcgaagccctccatcatctcttcttcgccggaatccctctctctctctctcgcatctcaaaccttccaactcttctacgacgtcgtcttgttcttcaccctct

SEQ ID NO: 189104 - DNA, 276 bp, Glycine max
gctcttcctcactctcattcgcaatggccgcagcagcacgtcctctcgtcaccgtgcaggacctcgacagtgacatggccaccgacgcctccgccaccgtccctatccctgacgtcatgaagtcctccatccgcccggacatcgtcaacttcgtacactccaacatctccaagaacagccgacaaccctatgcagtcagccgccgcgccggccaccagacttccgccgagtcctggggaaccggtcgtgccgtctcccgtatcgcccgtgttcccg

SEQ ID NO: 189105 - DNA, 277 bp, Glycine max
tcttcttcacttcaaacttgccaatctcgaagatggcaatagaattggcatctcccaattgggctccaaccgcagccgcatgtttggcagccttggccgccctcctcctcttcctcctccgcggtctccgccgccgtaaatacaatctccccccaggccccaagccctggcccatcataggcaacctaaacttaatcggctccctcccacaccagtcgattcacgcgctgagtaaaacatacgggcacatcatgcacgtgtggttcgggtcgaaccc

SEQ ID NO: 189106 - DNA, 278 bp, Glycine max
gtcgcaaccctaatcagaagaagcgcagcttcaagcgagtgacagccaccagccatgggtcgtatgcacagccgcggtaagggtatatcctcttctgctttgccctacaaaaggacacctcctagctggctcaagatctcttcgcaagatgtcgaagaaaatatctgcaagtttgcgaagaaaggtttgaccccgtctcagattggtgtcattctcagagattctcacggtattgctcaggtcaatagcgtcactggcagcaaaatccttcgcatcct

SEQ ID NO: 189107 - DNA, 279 bp, Glycine max
tctcgagccgattcggctcgagctcccccataatgaaattgctgcactgatatgccgtcaggatggcttagtcaagcgactaactaagtctgataatcttctcgagggtggaggagaagaggacaattttgccatcgtgtttgcagctatgggagttaacatggagactgcacagtttttcaaacgtgactttgaggagaatggctcgatggagagagtgacccttttccttaatctggcaaatgatcctacaattgagcgtatcatcactcctcgtat

SEQ ID NO: 189108 - DNA, 281 bp, Glycine max
  unsure (1)..(281): unsure at all n locations
ctcacgttatccacacaacaacactcctcaaancctaaccaaccatagcttcttccaccttcaccgcaatgtccgcttgcaagctttcctcctccgccgccatctcctccttcaccacccaccgccgcaccaacgccgtccttctgtccagacgcagccgcgccgccagggtctccgccatggccaaggagttgcacttcaacaaagacggcaccgcaattaggaagctccagagcggtgtgaacaagctcgcggatctgggttggggtcacgcttggtcc

SEQ ID NO: 189109 - DNA, 275 bp, Glycine max
agaggcgagaatgaagatatattcggtctcgactaggcactactttgcgtttggggctcttgtgtctgaagagctttcttacaagattaaagaattgcctggagttcggtgggtgcttcctgattcttacttgaatgttaaggaaaaggattatggaggtgagccctttattaacgggcaagctgctccctatgatcccaagtatcacgaagagtgggttagaaacaatgctcgtgccaatgagagaaacaggcgcaatgacaggcctcgtaatg

SEQ ID NO: 189110 - DNA, 279 bp, Glycine max
  unsure (1)..(279): unsure at all n locations
attgaactgatggcgagcgccatgttaggggatgctaccacgagctttgaagatggtaagttggcgtctatgaccaccgatgacgtcgtcagagcctctcgtattctcgaaaacgatattcgcattctcaaggaagaggtgcagagatcgaatcgggaatgggaatcgtacaaggagaagatacaaggataatgaggagaaagttaaacttaatnaggcaattgnccctacctcgtggtaacattgttgagatattgggaaataaatncnggaggtgag

SEQ ID NO: 189111 - DNA, 275 bp, Glycine max
gaagattatgccgagggagaggaagaatatgaagaagaaaatggtggtgctgttgctgggggacaacaaggttttcctgctcttggtgaaaatttctttgaagttgaagccatacgtcgtaagaggttgcgcaagggtgaggtgcaatacttaatcagatggaatgggtggcccgagacagccaacacttgggagcctctggaaaatctagagtctgttcctgatgttgttgaagcttttgaggagagcttgaagtccggaaaacatcgtaagcg

SEQ ID NO: 189112 - DNA, 275 bp, Glycine max
gcgttgttgcattgtagaaggcgatggccgcgcgagctctgttgaccagaaaaaccctagccaccgtgctccgcaacgacgcgaacccataatcggagttggcataacagcagcggctactcattcacgcgggttgcacgtgtacacgctacccgatctggattacgactatggcgcactggagccagccatcagcggcgacatcatgcagctgcaccaccagaagcaccaccagacttacatcaccaactacaacaaggccctcgagcagctca

SEQ ID NO: 189113 - DNA, 279 bp, Glycine max
cacacctcccgcagcagccatggttctcaaaactgaactatgccgattcagtggtgccaagatctacccaggaaaggtcatcatatttgttcgttgtgattctcaggttttcctgtttgcaaactcaaaatgtaagaggtatttccacaatcgcctgaagccttcaaagctcacctggactgcaatgtacagaaagcaacacaaaaaggacattgctcaagaagctgtgaggaagaggagacgtgctgccaaaaagccttactctaggtccattgttgg

SEQ ID NO: 189114 - DNA, 279 bp, Glycine max
ctctccagctaaagcttgtagcaacctcagacgcgaatcttccattctgttctgcctgaatgaacagacacacatagtcacattccatttccatgtctgcgtcatgcggggtggtggagtgtgtgttcgtgctgggctgcgcgcggtggctgtggaagcgctgcacctacgtgggcagctacgacagcgccacgtggccctccgccaccgccgacgagttcgacccggtcccacgcgtctgccgcctcatcctcgccaactacgagcccgatctccgta

SEQ ID NO: 189115 - DNA, 276 bp, Glycine max
  unsure (1)..(276): unsure at all n locations
actcgagccgaatcggctcgaggtccgggatcatccacaagattgaaagagaccctccatgtggaatnggacaagatagaggagcacaaaggagaacaccatggtgagcacaaaggtgaacacaaaggagaacaccatggtgagcacaaaggtgaacacaaaggagaacaacaccatggggagcacaaggagggacttgtggataagatcaaggacaagatccatggtgatggccatgacaagggtgagaaaaagaagaagaaggacaagaagaag

SEQ ID NO: 189116 - DNA, 273 bp, Glycine max
gagaaagagaaagagtgaaatcggagtttgggaaggaattgcaatcaatggatgtgataaagacgcagcaaatctcatctcgaccaatcgagaaggtggtggttcaccctctcgtgcttctcagcatcgtcggcaactacaacagagtcgccaaagacactcgcaagcgcgtcgtcggcgtcttgatcggctcctccttcaaaggcaccgtcgacgtcaccaacagctacgccgtgccctttgaagaagatgacaaggatcctagcatctggt

SEQ ID NO: 189117 - DNA, 263 bp, Glycine max
  unsure (1)..(263): unsure at all n locations
aaaggnaagaggcctcttgttcctgttagtatagaggttcatcctgatgttaangaagtcttggatacattccganttgccgnactggggagtgattcacttggagcttatgtgatctctatggcctcaaatgcaagtgatgtccttgcagtagagcttttacagaaggatgcacggcttgctgctattggggagttgggaaaagcatgtcctggtggaacgttgcgggttgtccctctgtttgaaactgtgaaagacctgag

SEQ ID NO: 189118 - DNA, 289 bp, Glycine max
ctgcaatctacagccaaaatgcctttcaagaggtacgttgagatcgggagggttgcccaaatcaactacggcaaggaatatggcaggctcgtcgtcattgtcgacgtcattgaccagaacagagctcttgtcgatgcccctgatatggtgaggtcccaagtcaatttcaaaaggcatttcccataaccggatattagaggattgaccattaagagtggtccactaatgacggaaagatccttggtcaaaggccatggcaggagtgctcgatgtctaagaaccaagtggg

SEQ ID NO: 189119 - DNA, 275 bp, Glycine max
gttgtgaagaaggggtgcgaggctctgcatagatgcgaggacatggtcaataacctaggtttgttctctcccaacgagaccaaagaagatatcagcaccaccaatctcaagtacattctggtgccattttatcttgcggagttgacagaaaaattagcacaggatgacaggatacatattctaaaggcttcccaggcaaaactaaaggagtttatttcattttgcgaacaatggagctggtcccaaaagaggagttagaatcttacattgaaggg

SEQ ID NO: 189120 - DNA, 261 bp, Glycine max
cggctcgagctagggtttcatctttgccatcagaaacaacaatgatttacgacgttaactctccccatttccgatccttcctcagccagaagggaggctcctccgataagaggaaaacggatgaacagaagccaaaagagcagaaacccaaagccagcgagaacaaacctataatgacagagtgacaacaaatttgctgcattcagttgtagaatgataataggtggtagatattgcatttggttctacaaaattaagatc

SEQ ID NO: 189121 - DNA, 278 bp, Glycine max
ctggggcatgtgggtatggctctttggcactagacataagtggtggacaccttgcagctggtgtggattctctcttcaaaaatggagcaggttgtggtgcctgctttcagataagatgcaagaacccaactctatgtagcaaagaaggtaccaaagtggtattgactgatcttaatcacaacaatcaaactgattttgtgctaagcagcagagcctttgcgggcatggctcaaaagggtatgggccaacaaatactgaagcttggcattgctgaaatt

SEQ ID NO: 189122 - DNA, 271 bp, Glycine max
gtcaacacccagttgaagaacaaaaacatcactactgatatcaaagttgatacagattctaatctcttcacaactatcactgttaatgaacctgctcctggtctgaaggctatttttagcttcaaagttcctgaccataggtctggaaaggtggaagttcagtacttgcatgactatgctggaataagcaccagtgttgggttgacagcaaacccaattgtcaacttctctggtgttataggaactaatgttcttgctcttggtgctgatc

SEQ ID NO: 189123 - DNA, 270 bp, Glycine max
caatcttcctcaatcatgtcttcagaaacaaaagcagaaacacaaactttgaccaccccctcttactcctcagatgttgacaatggtatagtgaaggatgtagtcctatggagaagaaagaaaataaatataagcgttcttgttgcggcaacagcggcatgggtgttgatggaagtgtttgaattcaacttcctcactctcatatcatgggtggccatactcggtcttgcttcaatattcctctatgccaatatgcttagacttttgggc

SEQ ID NO: 189124 - DNA, 274 bp, Glycine max
gggtctttgcttgattttggagatgtctctgctctcagatctcatcaaccttaacctctccgataccaccgagaaggtgatcgcagagtacatatggatcggtggatcaggaatggacctgaggagcaaagcaaggactctcccaggaccagttagcgacccttcagagcttcccaagtggaactatgatggttccagcacaggtcaagctcctggtgaagacagtgaagtgattttatacccacaagccattttcagggatccattcagaagg

SEQ ID NO: 189125 - DNA, 273 bp, Glycine max
gccgaacgaaacataaataaaaccttgctcttttttcacgccctagctcattttcttctccgttctcttctctctgttcctcactcactcgcatttattcaccatgactaagcaacaagctaattggtctccatacgataacaacggaggatcatgtgttgcaattgctggagcagattactgcgtcatcgccgcggatacgaggatgtccaccggttacaatatcctcactcgcgattactccaaaatctcccaactggcggagaagtgtgt

SEQ ID NO: 189126 - DNA, 275 bp, Glycine max
atttgcttccccagatcgtagatctacggtttaactggagtagtgtggtaagatgggacgtggatttagactgcttcatttagtcaggcacgttctatcgtatcttcctgaagttcagactgctgacaggaaaatgccatttagagagaaggtcatatacactgtgatctctcttttcattttcctggtttgtagtcagctccctctatatgggtaacactcagcaacaggtgctgatccattctattggatgcgagttattctcggttcaaatc

SEQ ID NO: 189127 - DNA, 258 bp, Glycine max
gcagaatcattcccaccatcaaagggttccttcaaatctgattatagaggagcatatcttgatggtgtcatcagatttctagtgaacaataatgccccattaatggttaatgtgtactcttaattcgcttacactgcaaaccccttaggacattagtcttgactatgcactttgtaagtctccttcagtggtagtgcaagatggttcacttggttaccgtaacctctttgatgcttcggttggatgtgtttatgctgc

SEQ ID NO: 189128 - DNA, 234 bp, Glycine max
ggcagacagcaagctcatcctagagttttaaaaatggcagcagcctcctccatggctctctcttacccatccttggctggcaaggccgtgaagctgggcccatcagcccccgaagtcgggacggtcagcatgaggaagaccgtcaccaagcaggcctcctccggaagaccatggtacggcccagaccgcgtcaagtacttgggaccattctctggcagagccccgtcctacctc

SEQ ID NO: 189129 - DNA, 265 bp, Glycine max
gcttgcacctattggtatcttctacaatatcctctcatagtgctcttcttcttcttcattttcattatcaagatgtctttgctttcggatctcatcaacctcaatctctcagaatccacagaaaagatcgttgctgagtacatatgggttggtggatctggtatggacctcagaagcaaagccaggactcttcctgggccagtgagtgaccctgcaaagcttccaaagtggaactacgatggctctagcacagaccaagctccag

SEQ ID NO: 189130 - DNA, 271 bp, Glycine max
ctcgagccgtgcacctacaaaagggccaccccttcttcccttctcaacttgtacttcatctaattcaatactacaacttctgaatcacttagttgaattgaattatcttcaaaatgagagaaatccttcatgttcaagctggtcaatgtggcaaccaaattggaggcaagttttgggaggtgatgtgtgatgaacatgggattgatgccactggaaattacgtaggcaattcccatcttcaacttgagagggttaacgtgtactacaatga

SEQ ID NO: 189131 - DNA, 269 bp, Glycine max
gaacaatttgtggcggaagaggctgtttagcaagattgcgtctttccagcagtttattcctcatgattttgatgccagtgatcatgggacatcgagtttcccggttgcttctgtgcatcgtatagggattttggacattaggattcttaacaccgataggcatgctgggaacttgttggttaggaaacttgatggcattgggagttttggtcaggtggagttgattcccattgatcatgggctctgcctgcctgaaactttggaggatc

SEQ ID NO: 189132 - DNA, 273 bp, Glycine max
aatggcttatgctaggcttgctcctatggctgtcttcttgcttgccacttccaccataatgtccccaacgaagatagaagcagcagattgtaatggtgcatgttcacctttcgagatgccaccgtgccgctcacgtgattgtcgttgtgtccctataggactagttgctggtttctgcatacatccaactggactttcatctgttgcgaagatgatcgacgaacatcccaacttatgtcaatctgatgatgaatgcatgaagaaaggaagtgg

SEQ ID NO: 189133 - DNA, 275 bp, Glycine max
tagcgatggctgcctccaaggatcgcgagaacttcgtctacatcgccaagctcgccgaacaggccgagcgatacgaagagatggtggaatcaatgaagaacgttgcgaatctcgacgttgaactgactgtggaggagcggaatttactttctgttgggtacaagaatgtgattggtgctcggagagcatcgtggaggatcctgtcttccattgagcaaaaggaagaaacaaaagggaacgagttgaatgcgaagcggattaaggagtacaggcag

SEQ ID NO: 189134 - DNA, 278 bp, Glycine max
ggatctgcccctgacttcacatgcaagaaagacacaaaggaggctatcattgaggccgtgaaacagggttacagacacttcgacactgctgctgcttatggctctgaacaggctctcggtgaagctctcaaggaagctatccatcttggcctcgtctcccgccaagacctctttgtcacttccaagctttgggtcaccgaaaatcatcctcatcttgtacttcctgctttgcgcaaatcacttaaaactcttcaactagagtacttggacctgtatct

SEQ ID NO: 189135 - DNA, 278 bp, Glycine max
ggatctgcccctgacttcacatgcaagaaagacacaaaggaggctatcattgaggccgtgaaacagggttacagacacttcgacactgctgctgcttatggctctgaacaggctctcggtgaagctctcaaggaagctatccatcttggcctcgtctcccgccaagacctctttgtcacttccaagctttgggtcaccgaaaatcatcctcatcttgtccttcctgctttgcgcaaatcacttagaactcttcaactagagtacttggacctgtatct

SEQ ID NO: 189136 - DNA, 279 bp, Glycine max
ctacccgccgctcgatgggaattgcgcttcaaggcgtctcgtagggctaatccgcctcacgagggtcaccaacggcacgtgtcctttggtggggccgagcgccccctactgcttggttcgggcaaacggaacggcgggcggcacgcgtccgcttgctagccccggaattctgaacttaggagggcgttccagtccataattccaacgcacggtagcttccgcgccactgggcttttccaccaaggcgcgatgaccaattgtgcgattcaacgggtcctc

SEQ ID NO: 189137 - DNA, 264 bp, Glycine max
actcgaccgctcgagccgcttagggtggtgcatttgcaaccctttaatttcctcacaaaaatgcagtaacgagtttgtactcactagtgtttactgtgcttgctttggctattgtgaacaaagttcatgggcaagggacgcgtgtagggttctattcgagtacatgcacacgcgctgagtccattgttaagtccacagttacaacccatgttaatttgatagtactttggtgctgggttgcttcgatgcacttcatgattgctt

SEQ ID NO: 189138 - DNA, 271 bp, Glycine max
actcgacagctcgagccgaatcggctcgagattccaatggccgatcagctcaccgacgaacagatatccgaattcaaggaagccttcagcctcttcgacaaggacggggatggttgtattaccaccaaggaacttgggaccgtgatgcggtcacttggccagaacccaactgaggcagagctgcaggacatgataaatgaggttgatgctgatgggaatggtaccattgatttcccagaattcctgaatctcatggctcgcaagatgaaag

SEQ ID NO: 189139 - DNA, 268 bp, Glycine max
agaacagcctatcgtttcaagagaagatggtaactagaattgtggatcttcgttcagacacagttacaaagccaactgaagcaatgagagctgctatggcaagtgctgaagttgatgacgatgttctaggctatgatccaactgcttttcgcttagaaacagagatggcaaagacaatgggcaaagaagctgatctttttgttccatctggcactatggggaaccttgtatctgtacttgttcattgtgatgtcaggggaagtgaggt

SEQ ID NO: 189140 - DNA, 269 bp, Glycine max
atgatgcctctgattgcactacagttgtacttccaggtggtgtgcatggttcaccaaacaaaggtgaacctacacctttgatctatcgatggaaaaccgggggatcatgtgattgcgggggttgggacattggttgcagactgcttgtgctctccaaccagaaccagaattcaagtattgcaaagagctataaacattacaatgatcgttttcaactttttgttaaggaaggagctgagcaagaaaaaccacttttcactttgttgcca

SEQ ID NO: 189141 - DNA, 272 bp, Glycine max
atccctttggggaggctctgagactagccaagcctctcgagttagagatgaagaggagtttcctcaagggcagatcttggataatgttgacttgagagcatttactttggcagaattgaaggcagccaccaaaaatttcagagctgagactgtgataggagagggggggtttggtaaagtatacaagggcttgattgatgatagagcagcaaaaaaaagaggtgaggggttgactgttgccatcaagaaattgaattctgaaagcacccaag

SEQ ID NO: 189142 - DNA, 276 bp, Glycine max
actcgagccgaatcggctcgaggtccgggatcatccacaagattgaagagaccctccatgtggaagggcacaagaaagaggagcacaaaggagaacaccatggtgagcacaaaggtgaacacaaaggagaacaccatggtgagcacaaaggtgaacacaaaggagaacaacaccatggggagcacaaggagggacttgtggataagatcaaggacaagatccatggtgatggccatgacaagggtgagaaaaagaagaagaaggacaagaagaaga

SEQ ID NO: 189143 - DNA, 270 bp, Glycine max
gttttcttcgtttatttggctctgtggccccattacaggtcttgtggttcaaccatgcgttggtatttggagtgataaatgtacttcaaggtttggcagaagacggccgttcattctggcaggatctcttatgatatgtctggctgtgatattaatcggattttctgctgacattggatatgtattaggtgatacacatgagcattgcagaacatttaaagggacccgaacaagggctgctcttgtatttattcttgggttctggatgct

SEQ ID NO: 189144 - DNA, 273 bp, Glycine max
ctcgagccgcccgccgctcgatgggaattgcgcttcaaggcgtcacgtagggctaatccgactcacgagggtcaccaacggcacgtgcctttggggggccgaggcccctactgctggtcggcaaacggacggcgggcgcacgcgtcgcttctagcccggattctgacttagaggcgttcagtcataatccaacgcacggtagcttcgcgccactggattttcaaccaagcgcgatgaccaattgtgcgaatcaacggttcctctcgtactagg

SEQ ID NO: 189145 - DNA, 271 bp, Glycine max
ggaaaaccctagctagtagtctcagttcgtttgagagagaaaaaatggcagagggtctcgttctccgcggaaccatgcgcgcccacaccgacgtcgtgacggcgattgccactcccatcgacaactccgacatgatcgtgacggcgtcgcgcgacaaatccatcattctctggcacctcaccaaggaggacaagacctacggtgtcccccgccgccgcctcaccggacattctcacttcgtccaggacgtcgtcctctcatccgacggtca

SEQ ID NO: 189146 - DNA, 268 bp, Glycine max
agatgctgctcttgaatctgcggttctgcagtctatcccttgcatccgttctggtagttttgctgacattgggccacggagatacatggaagatgaacatataaggatagatgatttgtcgtctcatctgggatcactatacaactttccccaaccaagtgccttttatggggtgtttgatggtcatggaggacctgaagctgcagcttatataaggaaaaacgtgacaaagttcttctttgaggatgtcaatttcccacggacatca

SEQ ID NO: 189147 - DNA, 266 bp, Glycine max
cttgaggatttggagtttgtacaatttcacccaacaggtatatatggagcaggttgccttatcacagaaggatctcgtggtgaaggtggaattcttaggaatagtgagggtgagcgatttatggaacgatatgcccctactgcaaaggatcttgcatcaagagatgtagtttcaagagcaatgacgatggagattcgggaaggtcgtggtgtaggacccctgaaagatcacatctatctccacttgaatcacttacccccagatgt

SEQ ID NO: 189148 - DNA, 264 bp, Glycine max
ctcgagccgcgaatatcttgttgtttggagcgatccgagaaaaactctgtaaacatgttggtttaccaggacctccttacaggtgatgagcttctctctgactccttccgttacaaggaaattgagaatggaatgctgtgggaagttgaggggaagtgggttgttaaaggagcagttgatgtagacattggtgcaaacccttctgctgagggtggaggagaagatgagggagttgatgatgcagctgttaaggttgttgacatt

SEQ ID NO: 189149 - DNA, 264 bp, Glycine max
atactacgtacttaaggaggatgagtctccttgtatttttggttcaattgaaaagcagagatggtcctatgcctgtgctaagcagttgattgagaggcttgtttatgctgagggtgctgaaaatggcttggaattcacaattgtgaggccttttaattggattggaccacgaatggatttcattcccggcattgatggcccaagtgagggtgttcctcgggttctggcatgctttagcaataatctcctccgtggagagcccct

SEQ ID NO: 189150 - DNA, 272 bp, Glycine max
actcgagccgaatcggctcgagaatggcggttgttgctcaaacccatgacatcgccggcgaacggcagtccggccaagacgttcgcacccaaaacgttgtggcatgccaagccgttgccaacatcgtcaaaagctctttaggccccgttggcctcgacaagatgctcgtcgacgacattggcgacgtcaccatcaccaacgacggcgccacgattctcaagatgctggaagtggagcatcctgctgccaaggttttggttgaactcgccgag

SEQ ID NO: 189151 - DNA, 269 bp, Glycine max
aaaaaccatagccttcctcttgctcggataaaaaagataatgaaagctgatgaagatgtccggatgatttcagcagaagctccggtcatatttgcaaaagcttgtgaaatgttcatattagagttgacgttgcgatcttggatccacacagaagagaacaagaggagaactctacaaaagaatgatatagcagctgctatttcgagaaacgatgtttttgatttcttggttgatattattccaagagatgagttgaaagaggaaggact

SEQ ID NO: 189152 - DNA, 266 bp, Glycine max
gctgtggccgttcttggcagcagtgagggtgtcactggaactattcacttcgttcaggagggaagtggtccaaccaccgtaactggatctcttgctggtcttaagcctggtctccatggtttccatgtccatgccttgggggacactaccaatggttgcctctcaactggatcacatttcaatcctaataacaaggagcatggtgcccctgaggatgagaatcgtcatgctggtgatcttgggaatgttaatgtcggtgatgatgg

SEQ ID NO: 189153 - DNA, 266 bp, Glycine max
tgtccctccttcctctgccttataattcttgtgacccttttggctggtagcattgaaagtgcaccagcaaacgtgaagccaagccattatgctgcacccttcaataggagtgtttttccttctggttttctatttggaataggctctgcagcttaccagatagaaggagcagcagctatagatggcagaggaccaagtatatgggacacctatactaaacagcaaccagggaagatttgggatcatagtgatggaagtctagcaat

SEQ ID NO: 189154 - DNA, 264 bp, Glycine max
aagaaagaatcccaggcgaggagaaagatggaggggaaggagcaggatgtgtcgttgggagcgaacaagttccccgagagacagccaattgggacggcggcgcagagccaagacgacggcaaggactaccaggagccggcgccggcgccgctggttgacccgacggagtttacgtcatggtcgttttacagagcagggatagcagagtttgtggccacttttctgtttctctacatcactgtcttaaccgttatgggagtcgcc

SEQ ID NO: 189155 - DNA, 259 bp, Glycine max
attttaaaaaatgactgggataaacttaagaattcaattattgaaattgaataagtaaacaatttaattggattggtcgaatggtatcaaaaaaatggagtactaactcccatttcttatttattattgaattaaccgatcaacttgctttgttatcgaacatttctttttgatttcaaaaattttccggaaaaaatttgaatctatttttatatgcgaatcaatcctactacttctggtcctgaggtttctgcgcttg

SEQ ID NO: 189156 - DNA, 264 bp, Glycine max
gtgatatatagagagagacaaagagtctaacttgaaagtttttctctttcaaaacctagtgacacttcttctgtgtcagagtttgtgaagtgaaccccatcaacagagtcccataataatcatgaagaaaggaaacttgggtcttggtctcaaactctcagttcctgtgtctgatcaatctaattttgccaagttcctgactgaaagtgggacttttaaggatggggatctgcttgtcaacagggatggagttcgaattgtctc

SEQ ID NO: 189157 - DNA, 263 bp, Glycine max
gtgaaatcataacaagacaacccctatttctggggaaagattatgttcatcagctcaggctgattacggagctcataggctcacctgatgacactagccttggatttctacgaagtgataatgctcgtagatatgtgagacagcttccacaatatccaaggcaacaatttgctgctagatttccaagtatgtctcctggtgctgttgatttgttagagaagatgcttgtctttgatccaaataggcgcatcacagttgaagaa

SEQ ID NO: 189158 - DNA, 267 bp, Glycine max
gaattcttcttctggtcagagcagtggctatgatctctccttcaagatcttgctgatcggtgactctgctgtgggaaaaagtagcctccttgttagcttcatctccaattctgctgaagatattgcccccacaattggtgttgattttaagatcaagatgctcactgtaggagggaagagattgaaactaactatttgggacactgctggacaggaaaggttcagaacgctaactagttcttactatagaggagcgcaaggaatcat

SEQ ID NO: 189159 - DNA, 269 bp, Glycine max
gccacttcgaaaccaaattttcttccttcgttggcatctgtgatctcttctcctcacaatgagcagatcagggcaaccaccggatttgaagaagtacatggacaagaagcttcagatcaagctgaatgcaaatcgcatggttgttggtactctccgtggcttcgaccagtttatgaatttagttgttgacaacactgtggaagtgaatggcaatgagaaaaatgacatagggatggtggtaatcagaggaaatagtgtggtcactgttg

SEQ ID NO: 189160 - DNA, 264 bp, Glycine max
ccaaggcacattgagttccaggttcttgcagataaatatggtaatgttgttcactttggagaacgtgattgcagcattcagaggcgcaaccagaaactgcttgaagaagcaccatctcctgccctgacccctgagttgcgaaaggcaatgggagatgcagcagttgcagctgctgcatctattggttacataggtgttggaacggttgagttccttttggatgaaagaggttccttttactttatggagatgaacactcgtatc

SEQ ID NO: 189161 - DNA, 262 bp, Glycine max
gtgagctataagctagtttatcgtgaggagaatatgaagttgtttgttttctttgttgctgcagtagttttggtagcatggccatgccatggcgcaggctaccaaaggttccctctccgaatgaaaactggctatggtgagcgttcttcggaggtaaaatgcgcaagttttaggcttgctgtggaagcacacaacatccgagactttaaaaccattcctgaagagtgcgctgaaccaacaaaggactacattaatggcgaac

SEQ ID NO: 189162 - DNA, 263 bp, Glycine max
  unsure (1)..(263): unsure at all n locations
caaacccaaacgttaactcagacgaagcaccaacagaagaagaagaaacaaaaccgaacctctctaaactctccaacgtcgccacccgattcatcgcatttcgcaggctgcaatggcgacgttcgaactgtaccgcagtcgacgattggaatgtgcctgacggagacgctggacgagatggttcagaacggcactctaagccccgagctcgcgattcaggttctggtccagttcgataagtccatgactgangctctggaaac

SEQ ID NO: 189163 - DNA, 262 bp, Glycine max
tgtgtatttccctacctctcccttcaagatgcagatcttcgtcaagaccctcaccggcaagaccatcacccttgaggtggaaagctctgacaccatcgacaacgtcaaggccaagatccaggacaaggaaggaatccccccggaccagcaacgtctcattttcgccggaaagcaacttgaggacggccgtacccttgctgactacaacattcagaaggagagtactcttcacctcgtcctccgtctccgtggtggcatgcag

SEQ ID NO: 189164 - DNA, 260 bp, Glycine max
catgtaccgctttgcaacctccctcgcctccaaagctagaattgctaggagcagcactcaacagattggaagtagggtcagttggaacaggaattatgctgccaaagacattaagtttggtgtggaggcccgggctttgatgcttaagggtgttgaagagctcgccgatgccgtcaaagtaaccatgggccctaaggggcgtaatgtggttattgagcaaagttttggagcacccaaagtgacaaaagatggagtaaccg

SEQ ID NO: 189165 - DNA, 261 bp, Glycine max
atctgaagtcatgtattaaggttgctttggattttgtctctcctgaaaatgttggggagtgctttcgtttgacggaggagtttcgcacacttccaataaaccacaggtctactgaggacaaattggagctgagtggtggaaattgtatggagggaaaacaccacacttgcaaaccattgccattaaagttttaagtttgacctgtagctcatcgggatttggagtacttttgagcatattcactcaaagaagagaagtaag

SEQ ID NO: 189166 - DNA, 268 bp, Glycine max
cgagagcggattctcagatccatggagcaggctcatattattaagccaaagcctctcagatccgcggtggcggcgtgacggaaatgaagtcctcaagccgtctcttcacgatcggactggtgtcggcgtggtactcctccaacattggggtactgctcctcaacaagtaccttctcagcaactatggcttcaagtatcctatcttcctcaccatgtgccacatgaccgcctgctccctctttagctacgttgccatcgcctggctcaa

SEQ ID NO: 189167 - DNA, 257 bp, Glycine max
ctccttgaactcgaatattcactatggcagatgaggacgttctgctagatttctggccaagtccatttgggatgagggtcaggattgcacttgctgaaaagggtatcaaatatgagtccaaagaagaggacttgcagaacaagagccctttgctcctcaaaatgaacccggttcacaagaaaatcccggttctcatccacaatggcaaacccatttgtgaatctctcgttgctgttcagtacattgaggaggtctgg

SEQ ID NO: 189168 - DNA, 261 bp, Glycine max
agttcccaaaggtattgtttatgggaagcccacaaaccagggagttacccaactgaaatttcagcgaacaagaggtcagttgccgaggagcgagctggacggaagctgggtggacttagggtcctcaattcttactgggtgaatgagcttgtcatggtgtttcaggactctacttataaatactttgaggtgattctggtggatgttgctcatgctgctattagaaatgatcccagaatcaattggctcgccaatccagtg

SEQ ID NO: 189169 - DNA, 236 bp, Glycine max
cagaaacctagcatctagccaagacaatgcaaacaaatgggtgcaagacaacatcaaaaactatgccaacaatgtcagattcagatacgtttcagtgggaaatgaagtgaaacccgaacactcatttgcacaatttctagtgcctgcattggaaaacattcagagggccatttctaatgctggccttggaaaccaagtaaaagtttccactgccattgatactggtgccttggcag

SEQ ID NO: 189170 - DNA, 261 bp, Glycine max
gttgggtgtgtgtgggcctgctctctattggcgattcaaaaacgcaatcactcttcgcaattcccacagcagcaaactctcttgccctccctgcctctgtgattgccctccccctctctcgctcttccaactcgctcctgggttggccaatctctctatctcagattgtggaagtaatgacccggatctgaaggaggagatggagaagcagtttgtggaccttctcagtgaggagttgaagttgcaagagtctgttactga

SEQ ID NO: 189171 - DNA, 263 bp, Glycine max
ctcgagccgtgcaatggcttcaagtcaggaggaggtgacccttttgggagctactggaagaccatttgtgtgcagggttcatattgccctcaagttgaagggagttcaatacaaatatgtcgaagaaaatttgaggaacaagagtgaactgcttctcaaatccaacccagttcacaagaaggttccagtgtttattcacaatgagaagcccatagcagagtctcttgtgattgttgaatacattgatgagacatggaagaaca

SEQ ID NO: 189172 - DNA, 262 bp, Glycine max
cagagattcataagctaggaaatgagcaattgtacatggagacttcggattcggtgccaaggttgaacacggactcgagcagttcggagcacgtggtttcgcccgatgtcacgtgcgagagggaggtgcagagcgaccccaagtggaacgatgatctggacctaaagctagaaaacgcgtttgattttcagtttaattacttggacgataataacctttccgtggatgattacctttttggcactgttcagtatcaaatggg

SEQ ID NO: 189173 - DNA, 260 bp, Glycine max
gtaggagggtttcaaaagatggagaacatgcagagcttctggcaattgggcgatgaactccgtggacactcaaaagcatcggaggatcacaaatggttaatggttgcttcgaaattggcggaacagacaagattgaagggggagcgtgtgaacaaccttgatctttcaaagggccccattgaaacaaggtcaagggataaatttgggttccaggaagagaacaaatttgattctcttaacttaagcatgttgaacctgga

SEQ ID NO: 189174 - DNA, 262 bp, Glycine max
cgcacactgaattcaaaaacatcgaaagagagaggcatggccgagcaaaccttcatcatgatcaagccagatggcgttcaaagaggccttattggcgagattattagcagatttgagaggaagggtttttacttgaaagggttgaaactcgttactgtggaccgtccttttgctgagaagcactatgctgatttgtctgcaaagcctttctttagtggtttggtggattacattgtctctggccctgttgttgccatgatct

SEQ ID NO: 189175 - DNA, 275 bp, Glycine max
aattcggctagagattatcttccccaaatcgtagatctacggtttaactggagtagtgtggtaagatgggaggtggatttagagtgcttcatttagttaggccgtttctatcgtttcatcctgaagttcaaactgctgacaggaaagtgccatttagagagaaggtcatatacactgtgatctctcttttcattttcctggtttgtagtcagctccctctatatgggatacactcaacaacaggtgctgatccattctattggatgcgagttatt

SEQ ID NO: 189176 - DNA, 258 bp, Glycine max
gccagcctcaaaaaatacttgctctacctctgccactttctgagtacaatacaacactgccatggctgcctcagtctccactattggagctgtcaacagagctccactgagcttgaacagctctgaagctggagattcggttcccagttcagccttctttggcacaagcttgaagaaggttactgcctcaagggtccctaacgtcaagatttcttctggaagtttcaaaatcgttgcggcggagaaagagattgatga

SEQ ID NO: 189177 - DNA, 256 bp, Glycine max
gcacgctctgcttccagcgagtgttctttcttcgtttcaacaccttaatttgcacacgctgcttcttcagcttgagaaatggcacaagaaacctttctattcacatctgaatctgtaaacgagggtcaccccgacaagctgtgcgaccagatctctgatgcagtgctcgatgcgtgccttgaacaggaccctgacagcaaggttgcctgtgagacatgcaccaagaccaacatggtcatggtctttggagagatca

SEQ ID NO: 189178 - DNA, 257 bp, Glycine max
aattttctagggttttattcattttccgatggcttctgcagatgttgagtaccgttgctttgtcggtgggctcgcttgggccactgacgaccatgccctcgagagagccttctctcagtacggcgaaatcgttgaaacgaagattatcaacgatcgtgagactggcagatccaggggttttggatttgtgaccttcgcctcggagcagtccatgaaagatgcgatcagagcgatgaatggacagaacttggacggcc

SEQ ID NO: 189179 - DNA, 259 bp, Glycine max
cccccgagtacatgcccctcagccatgtccttgcaaccaaacttggtgctcgcctcacagaggttaggaagaatggcacctgtgcttggttgaggccagatggtaagacacaagtaaccgtcgagtactacaatgacaatggtgccatggttccagttcgtgtccacactgtcctaatttccacccaacatgatgatactgtgagcaatgatcaaattgctgcggaccttaaagagcatgttatcaagcctgtcattcc

SEQ ID NO: 189180 - DNA, 257 bp, Glycine max
aatggcttcagctaaaaggtggcttccgctcgaagctaatcctgacgtcatgaatcagttcctttgggggcttggacttcgagaggatgaggcagaatgctgtgacgtttatggcttagatgaagagcttctggaaatggttccaaagcccgttcttgccgtgctttttctttatcccataaccacccagagtgaagaagagaggttgcagcaggaaaatgaaaaaaagcaaactgtgggtaatgcttgtgggacaa

SEQ ID NO: 189181 - DNA, 256 bp, Glycine max
cccatgcttcatccagagaaatttgtcaagcttgggattgatcctccaaagggtgttctttgttatggccccccaggaactgggaaaacacttttagccagggctgtggctaataggactgatgcttgttttataagggttattggaagtgagctagttcagaaatatgttggtgagggggctaggatggttcgtgaactatttcagatggctcgttcaaagaaggcatgcattgtgttttttgatgaagttgatg

SEQ ID NO: 189182 - DNA, 263 bp, Glycine max
ctcgagccgattgaattcaaaaactaagttcatttcttgtgctttgctttattcctcaaaaacaaacatgtcgaacacatgcggcaactgtgactgcgctgacaagactaactgcaccaagggaaacagctatggtgttatagtagagactgagaagagctacatcgagactgttgacatggatgttccagcagctgagcatgatgggaagtgcaagtgtggcactaactgcacttgcacggactgcacttgtggccattaag

SEQ ID NO: 189183 - DNA, 255 bp, Glycine max
ctcgagccgtgatctcccaccaggttttcgattctacccaacagaagaagaattagttttcttctatctacacaaccagctagaaggccaaatacacgacacaagcagagtcattccagtcattgacatcaatggcgtagagccatggaaccttccatcacttgcaggggagctttgtcgtggagacacggagcaatggtttttcttttcaccgagacaagagagagaggccagaggaggcagacccaacagaac

SEQ ID NO: 189184 - DNA, 253 bp, Glycine max
gagatcgggagggttgcccaaatcaactacggcaaggaatatggcaggctcgtcgtcattgtcgacgtcattgaccagaacagagctcttgtcgatgcccctgatatggtgaggtcccaagtcaatttcaaaaggctttccctaaccgatattaagattgacattaagagggtccctaagaagaaagatcttgtcaaagccatggaggatgctgatgttaagaccaagtgggagaagagttcatggggcagga

SEQ ID NO: 189185 - DNA, 254 bp, Glycine max
gttgattcatccccatgaaggccaggaagacatgcagggtggttccaaccacgctcacctcggagacccttgtcttgttctcacctctgatcccaaacctcgtcttcgttggaccgctgaccttcacgaacgctttgttgatgctgtcactcaacttgggggtgccagtaaagccactccaaaagcgataatgaggaccatgaatgtcaagggtttgacgctctatcatttgaagagtcatcttcagaagtaca

SEQ ID NO: 189186 - DNA, 255 bp, Glycine max
gtaaacggcgggagtaactatgactctcttaaggtagccaaatgcctcgtcatctaattagtgacgcgcatgaatggattaacgagattcccactgtccctgtctactatccagcgaaaccacagccaagggaacgggcttggcggaatcagcggggaaagaagaccctgttgagcttgactctagtccgactttgtgaaatgacttgagaggtgtaggataagtgggagctggaaacagcgaaagtgaaatacc

SEQ ID NO: 189187 - DNA, 250 bp, Glycine max
ctattttcctattgttcctcttctcgttcggatcttccactactccaaccaccagttggagaaaaaaggttcgtgagccatgccagaagtaagttttttactttcacgacattatatacaatggtcacaactcagagaatgcaactgcggccattgtgggtgcacccacatgggccaatagaacaatcttggctgggcagaaccattttggtgactcgccccaagttggacgcgctcagggattttacat

SEQ ID NO: 189188 - DNA, 256 bp, Glycine max
attagaataaaaaggtgttggaatagagggaagaacgtggaaagtggttgacgaagaagacgaagaagaagaatggagaagtcagggaagagagtgttgcttacctccaacggcgacgacatttctcaaggcattgccttccatttggtgaagcaagggtgcaggttggttttgctgggagatcagaattccctgcggagcatcgcgaacaaaatcatggattccctctccctcgcagacagaggcaccgtgcagg

SEQ ID NO: 189189 - DNA, 258 bp, Glycine max
ttctgcaactaagaggaacttgaattataggttggttgctgtaacatgagacgtgctatgacaaatgctgctaggtcactcactaagcccggcttggaggagtcacaggagcaaatccataagattagaatcaccctttcctctaagaacgtcaagaatctcgagaaggtttgtgctgacctggttcgtggtgccaaggacaagcatctcagggtgaagggacctgttaggatgccaactaaagttcttaacatcacc

SEQ ID NO: 189190 - DNA, 261 bp, Glycine max
ctctcactcactcactcttcttcttcctcttcgtgtggttttctatctcgaactcgaacgaagatgcgtgagattcttcacatccagggagggcaatgcgggaaccagatcggagccaagttctgggaggtggtgtgcgcggagcacgggatcgattcaacggggaggtaccaaggggacaacgagttgcaactcgagcgagtcaacgtctactacaatgaagcgagttgcggaaggttcgtgcctagggcggtgctcatg

SEQ ID NO: 189191 - DNA, 262 bp, Glycine max
tgccaggattcggttgattaatcaggacaagaacaaatataacaccccgaaatatcgctttgttgttcgtttcagcaacaaagacattgttgcacaaataatatctgctagcattgctggcgatattgttcttgctgcagcatatgcacatgagctgccacgatatggtcttgaagtagggcttacaaattatgctgcagcttattgcactggtctcctgttggcccgaagagtcctcaaaacacttgaaatggatgaggag

SEQ ID NO: 189192 - DNA, 259 bp, Glycine max
cgaatccaaggaagggaaaggaaagtaagagaagagaagaatggccgaagagggacaagtgattggtgtccacagcgtggaggagtgggaggaacatctcaagaagggacaagagtccaagaaattgattgtggtggattttactgcttcttggtgcggcccatgccgtttcattgccccaattcttgcggatatggctaaaaagttgccgaatgtcaccttcctcaaggtggatgtggatgaattggcgactgtttcc

SEQ ID NO: 189193 - DNA, 260 bp, Glycine max
ctggcatccacacaatgcttcttgcaccaccatgccctcaccactccaaccagagcttcatcacagcgcttagttgtgagcaccaaaccaaaccacattgtttgcaaggcacaaaagcaggttgtccaagagggtgaggacactactaacattgtctctcgcaggttggccctcactgttctcattggtgctgctgctgttggctctaaggttgcacctgctgatgctgcctatggagaagctgccaatgtgtttggaaa

SEQ ID NO: 189194 - DNA, 262 bp, Glycine max
tgcttcgattgagctgaacaagtttgtgttcttttgtttgttggtgctaatacaagtggcagtttctgaaatcatttttgaagagcgttttgatgatggatggcgaggtaggtgggtgaagtcagactggaaaagcagtgaaggcaaagcaggttcattcaagcacacagctggaaaatgggccagtgatccagatgataaaggtattcaaacatccagtgatgccaaacactttgccatctctgcaaaaataccagaattc

SEQ ID NO: 189195 - DNA, 270 bp, Glycine max
ctagtctcctactctcacccgcaagataaaaaatggcatctcacatcgttggatacccccgtatgggtcccaagagagagctcaagttcgctctcgagtctttctgggatggcaagagcagcgccgaggatttgcagaaggtgtcttctgatctcagggcatccatctggaagcagatggctgatgctgggatcaagtacatccccagcaacactttctctcactatgaccaggttctcgacgccaccgccaccctcggtgccgttccac

SEQ ID NO: 189196 - DNA, 266 bp, Glycine max
ctcgagccgcgaggagcactagctagtttcacaatttccaaatggctaggggattgaagaaccatctcaagaggctcaatgctcctaagcattggatgcttgacaaactgggtggtgcatttgcgcccaaaccctcatctggaccacacaaatctagggagtgccttcccctcatactcatcctacgaaaccggctaaagtatgctctgacttaccgtgaagtcatcgctattctgatgcagagacatgttcttgttgatggaaaa

SEQ ID NO: 189197 - DNA, 256 bp, Glycine max
gggaagctctggtgagatcaagaatgaggaagaagacgttgaggctggattactcccctgttgtcgaatttgcctcgaaagcgattccgacccagaggatgaattgatatctccgtgcatgtgcaaagggacccaacagtttgtccatcgttcatgtcttgatcattggcgctcagtaaaggaaggatttgccttctcacactgcacaacctgcaaagcccaatttcatcttagagttgaatcgattgaggacaac

SEQ ID NO: 189198 - DNA, 259 bp, Glycine max
atttaactcgaccttgtatgatgaatgggttaacaagggcaatgcaccggcactgcccgagactcttaagaattacaacaagctggtgtctcttggcttcaagattatattcttgtcaggaagaacactggacaaacaggccgtaacagaagcaaacttaaagaaggctggctaccacacatgggaaaaattaattctcaaggatccacaagatccttccactccaaatgcagtttcatacaaaacagcagcgagagag

SEQ ID NO: 189199 - DNA, 259 bp, Glycine max
cttccgcctcccttcccttcaactccacggcgcagatccgaggagtttgggaaaccctaattcattcctctttgcttcttctatctctattcctctaacaccagtgatggcaggtttggctccagatggatcgcagtttgatgctcggcaatatgattctaagatgaatgaattgctttccgccgatggacaagaatttttcacttcatatgacgaatctatgatagttttgatgcaatgggccttcaagaaaatcttc

SEQ ID NO: 189200 - DNA, 261 bp, Glycine max
ctcgagccgcttgtctcaaagattaagccatgcatgtgtaagtatgaactaattcagactgtgaaactgcgaatggctcattaaatcagttatagtttgtttgatggtatctactactcggataaccgtagtaattctagagctaatacgtgcaacaaaccccgacttctggaagggatgcatttattagataaaaggtcaacacaggctctgcctgttgctttgatgattcatgataactcgtcggatcgcacggccttt

SEQ ID NO: 189201 - DNA, 268 bp, Glycine max
gcttgtctcaaagattaagccatgcatgtgtaagtatgaactaattcagactgtgaaactgcgaatggctcattaaatcagttatagtttgtttgatggtatcttctactcggataaccgtagtaattctagagctaatacgtgcaacaaaccccgacttctggaagggatgcatttattagataaaaggtcaacacaggctctgcctgttgctttgatgattcatgataactcgtcggatcgcacggcctttgtgccggcgacgcat

SEQ ID NO: 189202 - DNA, 254 bp, Glycine max
gcgagattgtgggataggagatgagagactcatgaaagttgttagtgattctgtcaaactagtgatggaagaggatccattacgtcccttaattttgggtggtgatcactcaatctcatatccagttgtcagagccatatctgagaagcttgggggaccagttgatgttcttcattttgatgcacatcctgatctctatgatgaatttgaaggaaattattattcgcacgcttcttcttttgctcgaatcatgg

SEQ ID NO: 189203 - DNA, 258 bp, Glycine max
gcaagccccactcaaccaccacacctctcctcgttcacgctacccctttctgctcttcttctacctttcaagttttaaaagtataaagatggcagagacattcctatttacctcagagtcggtgaacgagggacaccctgacaagctctgcgaccaaatctccgatgctgtcctcgacgcttgcctcgagcaggacccagacagcaaagttgcctgcgaaacatgcaccaaaaccaacttggtcatggtcttcggaga

SEQ ID NO: 189204 - DNA, 254 bp, Glycine max
ctcttcacacaacaaaacttttttctggcattgtagcatcatgactggcagagaaatcctccatatgatgaaggtgaaagcagggtttggaacaccagacacagggaatggaaaaggcaaaatatcaaaacacattacacatggctttcacttgatgaagggcaaatcagcgcatcctatggaagattatttagtttcagaatttaagcaagaaaaggacagagaattaggcttgtttgcaatatttgatggcc

SEQ ID NO: 189205 - DNA, 259 bp, Glycine max
ctctctgctcttctcttctcttctacctctcaagtttttgaagtataaagatggcagagacattcctattcacctcggagtcagtgaacgagggacaccctgataagctctgcgaccaaatctccgatgctgtcctcgacgcttgcctcgaacaggacccagacagcaaggttgcctgcgaaacatgcaccaagaccaacttggtcatggtcttcggagagatcaccaccaaggccaacgttgactacgagaagatcgt

SEQ ID NO: 189206 - DNA, 260 bp, Glycine max
acaacttcccctgtaaatcgcgtttcgtttgtgcaaggttttaaaagatggctgatgctgaggacattcaacctcttgttgttgataatggaactggaatggtcaaggctggttttgcaggtgatgatgctcctagggccgtgttccccagcattattgggagaccacgccatactggtgtgatggttgggatgggtcagaaggatgcttacgtgggtgatgaagcccaatcaaaaaggggtatactcaccttgaagtat

SEQ ID NO: 189207 - DNA, 230 bp, Glycine max
tgcctttcctctccgaaccctcgatcactaccacgcgcacctatattacctcatccaccgtcgctctctcgaacaaccacaacaccatcttcatcacatggcaaacgcagcatctggtatggcagtccatgatgactgcaagttgaggtttttggagctgaaggcaaaaaggacacaccgtttcatagtttttaagattgaggagcagcagaagcaggtcattgtggaga

SEQ ID NO: 189208 - DNA, 257 bp, Glycine max
ggctaagtatcattcaagtgggaaaagctcttccatgactgctatagccttcctgtttatccttctaatcacttatacaggcacaacagatgcacaatccggggtatgttatggaagacttggcaacaacttaccaacccctcaagaagttgtggccctctacaatcaagccaacattcgcaggatgcgaatctacggtccaagcccagaagtcctcgaagcactaagaggttccaacattgagcttttgctagaca

SEQ ID NO: 189209 - DNA, 257 bp, Glycine max
caagatcgccagatcgccgtctccgggaggagatggccagactttacttccaacaactcatctctgctgtggacttctgccacagccgcggcgtctaccaccgtgacctcaagccagagaaccttctcctcgacgacgacggcaacctcaaggtcaccgacttcggcctcagcactttctccgagcacctccggcacgacggcctactgcacactacgtgcggcacgccggcctatgtcgcgcccgaggtgattggg

SEQ ID NO: 189210 - DNA, 252 bp, Glycine max
ggggatgggaaatcaaagtgttttggatttgtgaattttgagaatgctgatgatgctgctagggctgttgaggctctcaatggcaaaaattttgatgacaaagaatggtatgttggaaaagctcagaagaaatctgaaagggagaatgaattgaaacaacgatttgagcagagcatgaaagaagctgctgataaatatcaaggcgcaaacttgtatgtaaaaaatttagatgatagcattggtgatgaaaaa

SEQ ID NO: 189211 - DNA, 256 bp, Glycine max
aaaaaagcaaaacagagagaacaactgttactcacacacgccatgggtaaatgaatggtttttgagcaacagcagttaaaagagaaaagggattcagcgaagatgacatccgttggtgtggcaccaacttcgggtttgagagaagccagtgggcatggagcagcagctgcggatagattgccagaggagatgaacgatatgaaaattagggatgatagagaaatggaagccacagttgttgatggcaacggaacgg

SEQ ID NO: 189212 - DNA, 251 bp, Glycine max
ggcaaacacagcattggttgtctcttctggctccttgcaaggatggtgttgcagatgaggggtaccattcgccctggcctcaaatgggatgtcatggttgatctgttcttctatagagaaccagaggaggctatacaacaagaggaggaggaagctccggcggttgattatgccatcacggatttcaatgcaggtgctattgctgctgatggccagtggcctggtacaattgatcaatcatggagtgatgc

SEQ ID NO: 189213 - DNA, 257 bp, Glycine max
gtgcaattcgaagataggcttttcaccttacagatttgggatacagctggccaagaaagattccaaagccttggagttgctttctatcgtggtgctgattgttgtgttcttgtatatgatgttaattcgatgaaatcatttgacaaccttaataactggagggaggaatttctgattcaagcaagtccttctgatccagagaattttccttttgttgtcataggaaacaaaatagatattgatggtgggaacagcag

SEQ ID NO: 189214 - DNA, 258 bp, Glycine max
ctttttccaatccgatatggccgccgcgaccgccttgctccgctctctccgccgccgcgaccttccctcgtcttctctctccgcctttcgttcgttgacgagtggcacaaagacatcatatgtagggaacaagtgggcaagtttgtctcggccgttcagttcaaagcctgctggtaatgatgtcattggaattgatctgggtactaccaattcatgtgtttctgttatggagggaaagaatcccaaagttattgagaa

SEQ ID NO: 189215 - DNA, 262 bp, Glycine max
ggcacctttaagcatagttatgacatcactgtccactgcttctgcagtttttgtcacgccactcttattactgttgctcattgggaagaaattgcctatagatgtaaaaggaatggtgtataacattacacagattgtggttgtgcctattgcagctggcctgcttctaaatcgattctttcctcgtatttgtaatgttattcgaccatttttgcctccgctatctgtactggtggcatctatctgtgccggagcgccactt

SEQ ID NO: 189216 - DNA, 254 bp, Glycine max
cctttcaaaccttacactcctcatttcgtttccgtagcagttttctcacacttcaccgctgcttccccttcacctctgatttcgtatcagtagtcagagatcaaaatgtctcgaagatatgacagccgtacaacaatcttctcccctgaaggacgtctttaccaagtggaatatgcaatggaggctattggtaacgctggaaccgcaatagggatcttatcaaaagatggggttgtgctggttggtgaaaagaa

SEQ ID NO: 189217 - DNA, 256 bp, Glycine max
tatagaccccagaaaagaagaggtaattgcaagagttagtgagggagataaagaagacattgatattgctgttaaagcagcacgtcaggcatttgactcgggtccatggcctcgcttgccaggctctgaaagggcaaaaattatgatgaaatgggcagacctagttgatgaaaatatagaagaactagcagcattagataccattgatgctggaaagctatactatattaataaggtagcggaaattccttcagct

SEQ ID NO: 189218 - DNA, 256 bp, Glycine max
  unsure (1)..(256): unsure at all n locations
cactcccttatccatttccacaccacaccatagatcaaaancaacgctctctcttcagcctccattctacgctctcccaaccgccagtctctgacccgaagagcgaaccataatggaagagtaaattaccggaaaccgaataaccgtttctccgtgaaagcctccgccaaagagattgcctttgaccagcattcccgctctgctatgcaggccggcattgacaagctcgccgacgctgttgggctcactcttgggc

SEQ ID NO: 189219 - DNA, 257 bp, Glycine max
gttgcgttggcgcaaactggcattccttcagaacgcgctttcctgcacttttctcgacttcgctctcgcgtgggccaacaatctaatctggcgaattcagttagatggctccaaactccgagctccagtaacactgatctttattctgagttgaaggaactggttccagagtatcaggaacgtgttaagaagctgaagaaagatcatggaagtgttgaattaggaaaaatcactgttgatatggtacttggtggaat

SEQ ID NO: 189220 - DNA, 252 bp, Glycine max
ggctcattgtgctcatgcacgtgccgctctacaatagtaatggagctcactatatggaaggtgaaagcatgcgatctgtttttgagagctggttcatcgagtacaaagttgatgtgatctttgctggccatgtccatgcttatgaaagatcatatcgatactctaatgttgactacaacataacaggcggtaacaggtatccattacctaacaaatcagcacctgtttacataacagtcggagatggtggaa

SEQ ID NO: 189221 - DNA, 259 bp, Glycine max
ctaagtctttgggaatagtgctgcaatggcttcaagtcaggaggagcgtgacccttttgggagctactggaagcccatttgtgtgcagggttcatattgccctcaagttgaagggagttcaatacaaatatgtcgaagaaaatttgaggaacaagagtgaactgcttctcaaatccaacccagttcacaagaaggttccagtgtttattcacaatgagaagcccatagcagagtctcttgtgattgttgaatacattga

SEQ ID NO: 189222 - DNA, 255 bp, Glycine max
tcccttttcacgtcattatcctaaaaacttgcagattttcacatcccaaacaacatgaaggttcggttcatgtttctgtcggtgctcctttgtgccacttttcatgtctccttctctattatcgacggtttagttgccaacggcaactttgagttgggtccaaagccctccgccctaaaaggaacagtggtggtgggcgggagccactcgatcccagaatgggagatctccggctttgtggagtacataaaatcc

SEQ ID NO: 189223 - DNA, 252 bp, Glycine max
atatttggctcagctagtaacatccattccaatggtgaaaagcaatccgaaaatgttgctcatataccttctgttggaaacaaccaaactcccaaggtgaggaaaccatataccattactaaacaaagggagaagtggactgaggaagagcatcaaaagttccttgaagctttgaaattgtatggtcgtggctggcgccaaattgaagagcatataggtaccaaaaatgctgttcagattcgaagccatgct

SEQ ID NO: 189224 - DNA, 248 bp, Glycine max
cctcgagccgaatcggctcgagaatggcggttgttgctcaaacccctacacatcgccggcgagaggcagtccggccaagacgttcgcacccaaaacgttgttgcatgccaagccgttgccaacatcgtcaaaagctctttaggccccgttggcctcgacaagatgctcgtcgacgacattggcgacgtcaccatcaccaacgacggcgccacgattctcaagatgctggaagtggagcatcctgctgc

SEQ ID NO: 189225 - DNA, 250 bp, Glycine max
tatggctaccatgaccccgaagcttttgttcattccattcaaaagcctagggtgataataatgcttgttaaggctggggcacctgttgaccagaccattaagaccctatctgcatacatggaaaaaggtgactgcataattgatggtggtaacgaatggtacgagaacaccgaaaggagagagaaatcggtggctgaattgggtctgctctaccttgggatgggagtttctggtggtgaggaaagtgctc

SEQ ID NO: 189226 - DNA, 255 bp, Glycine max
ggtggacctagttggacagtgcaattgggcagaagagactcaaccactgcaagtttaagttctgcaaactcagacttgccccgttttgatttaagtctgcaacaactcagcgataatttccaaaacaaaggtctcaccaccgctgaaatggttgctctctcaggagggcacacaattgggcaagctaaatgttcaactttcagaacaaggatttacaacgagaccaacatagattcctcttttgcaacatcattg

SEQ ID NO: 189227 - DNA, 251 bp, Glycine max
gatacctaggcacccagagacgaggaagggcgtagtaagcgacgaaatgcttcggggagttgaaaataagcgtagatccggggattcccgatataggtcaacctttcgaactgctgctgaatccacgggcaggcaagagacaacctggtgaactgaaacatcttagtagccagaggaaaagaaagcaaaagcgattcccgtagtagcggcgagcgaaatgggagcagcctaaaccgtgaaaacggggttgt

SEQ ID NO: 189228 - DNA, 255 bp, Glycine max
ggtggacatatttggacagttcacttgggcagatgagactcaaccactgcaagtttgagttctgcatactcagacttgccccgttttgaatgaagtctgcaacaactcagcgataatttccaaaacaaaggtctcaccaccgcataaatggttgctctctcaggagggcacacaattgggcaagctaaatgttcaactttcagaacaaggatttacaacgagaccaacatagattcctctgttgcaagatcattg

SEQ ID NO: 189229 - DNA, 256 bp, Glycine max
ggttgggacccgaatacgaagtcgacgctgacacagatccctctgctgacgacgaaggcgggtccacgagacggagcggcatggacgcagaggcttaaggaagagtacaaggctctgatagcgtacacgcagatgaacaagtccaacgacaacgattggttccgtatctccgccgccaatccggaaggcactcgctggaccggtaaatgctggtacgttcacaacctcctcaagtacgaattcgacctccaattcg

SEQ ID NO: 189230 - DNA, 254 bp, Glycine max
ctagatctgtagacaatatgggaagcactggtttgctacatttgatatgccttgtcattgctttagtaagtgtgtcgcttgtgcaagcagaagatgcgtataagtatttcacatggacggtgacttatgggactctttatcccttggctagtccccagcaggttattcttatcaatggtcagtttcctgggcctagacttgacttggtaactaatgaaaatgtaattctcaaccttatcaacaagctggacgaa

SEQ ID NO: 189231 - DNA, 276 bp, Glycine max
ctcgagctcgagccgctcgagccgtccgccccttttttgttgttccttcttctcgttcgtcgctttgtgatctctcactgcaaccatgtccgtcgagaaagagagagagacccaggtttacttggccaagcttgccgagcaggctgagagatacgaagaaatggttgagtgtatgaagaaagtagcaaaacttgatcttgatctgactgtggaagaaaggaaccttctctcagtgggatacaaaaatgtgattggtgcacgaagggcctcttggcg

SEQ ID NO: 189232 - DNA, 269 bp, Glycine max
ggactgtcttggagaccaacttgcctaaagtgaaggaaggtaagaagtccaagttcagtttaggtgtgtccgatcctaagattggttcccagatatctgaagtgactaagattccttgccaaagtaatgagtttgtgagtgaacttcttcgtggtgtgcgattccattttgatacgtttgttggtgatctcaagtctggagatttggaaaaggcacaacttggtctgggacatagttacagcagggcaaaggtgaagtttaatgttaac

SEQ ID NO: 189233 - DNA, 269 bp, Glycine max
atcggagtttcagtttcacccctcttttctcatctctaacatcatagtcctcagaggctagtcttcctattatcacaaacaatgtctgacagtcaagaatctgacaagaacattgagatatggaagatcaagaaattgatcaaggctctggaagctgctcgaggtaatggtaccagcatgatttctctgataatgcctccacgcgatcaaatttcccgggtcactaagatgttgggagatgaatttggaactgcttcaaacatcaaagt

SEQ ID NO: 189234 - DNA, 270 bp, Glycine max
aaaccctcttcatcttgttctatctgtgacgagcatcatggcctcaagagcagtgttattgttggctatgtgtgtgcttccggcgatggttgtggccattcgcccagcaaagaaccctttttgcgtgaagggtcgtgtctactgtgacccttgccgtgctggttttgagacctcagctaccacctacattgctggtgctgagattatgttgcaatgcaagagcagggttagcaacgaggttgtgtacacgaagaaggggtacaccgactc

SEQ ID NO: 189235 - DNA, 273 bp, Glycine max
  unsure (1)..(273): unsure at all n locations
gttccctggtattgctgacagaatgagcaaggaaatttcggcattggcacccagcagcatgaagatcaaggttgtagcaccaccggagagaaaatacagtgtctggatcggtggttctatcttggcatctcttagcaccttccagcagatgtggattgcaaaggcagaatatgacgagtctggtccatcaattgtgcacagaaagtgcttctaaaactgtttgagagatagggttattgaagcganagactactatcatcatgatttgtctgg

SEQ ID NO: 189236 - DNA, 271 bp, Glycine max
actgatcttcaccatatcattcgctctgatcaaaatctgtcataggagctatctcaatacttcttgtaccagattcttcgtgggcttaagtatatacattctgcaaacgtaatccattgagatttaaaaccaagcaacctgctgctaaactcaaattgtgacttgaagattattgattttggtcttgcgagaccaactttggaaagtgacttcatgacagaatatgtagtcacaagatggtacagagctcccgaattgttgttgaattcct

SEQ ID NO: 189237 - DNA, 265 bp, Glycine max
cgattgaaacatatgatgtgacaacaattagagcaagcattcccatgtttcttatgtctcgtaagatcaagtcattgggagtcaaatgggttatatctggagaaggatctgatgagatctttggagggtatctatatttccacaaggcaccaaacatagaagaatttcatcaagaaacatgccgcaagattaaagcactccacaaatatgattgcttgcgagccaataaatcgacctttgcctggggtctagaagccagagtgcc

SEQ ID NO: 189238 - DNA, 272 bp, Glycine max
ctgaggaaaccaccactggagttaagaggctctatcagatgcaggcgaatgggactcttctcttccctgctattaatgtcaatgactctgtcaccaagagcaagtttgacaacttgtatgggtgccgtcactctctccctgatggtctcatgagggctaccgatgttatgattgctggaaaggtggctgttgtggctggatatggtgatgttggcaagggttgtgctgctgcaatgaagcaggctggtgctcgtgtcatcgtgaccgagatt

SEQ ID NO: 189239 - DNA, 269 bp, Glycine max
cacgacaccaagtcaaacaggtgatttgttcactttgtgggactgaacaagaggttcagcaaaactgtataaattgtggtgtttgtatgggcaagtacttctgtggaacatgcaagctttttgatgatgatatatctaagcagcagtaccattgcagtggctgtggaatttgcagaactggaggaagcgaaaatttcttccattgctacaagtgtggttgttgctactcaactcttctgaaaaacagtcacccttgtgtagaaggagca

SEQ ID NO: 189240 - DNA, 264 bp, Glycine max
cttgttttcttcgttgctacaattttggtagcatggcaatgccatgcgtacgatatgttccctctccgaatgaacactggctatggtgcccgtactccggaggtgaaatgcgcaagttggaggcttgctgtggaagcacacaacatctttggctttgagaccattcctgaagagtgcgttgaagcaacaaaggaatacatccatggcgaacaatatagatcagactccaaaacagttaaccaacaagcttacttttatgccaga

SEQ ID NO: 189241 - DNA, 267 bp, Glycine max
agatgttgtcttgtctactgctatcgatttgaagcgaacagctccaagacctgttctgacatcatctggagtgagttccaggtctgtgtcccctttctctagaagaccaagcccccctcgttcagctacacctattccaacaacatcgggacacaccttctctaaaagtattactgatagtttgaagaaaacaaatgaacttttgaatcaggaagtgttgaagttacgcggtcaggttgagacctaagacagagatgcgaactgcaa

SEQ ID NO: 189242 - DNA, 269 bp, Glycine max
ccatcttctccaaagttatcatattcgaagagaaaaaaggagtgactgtccaggttgggcaattagggacggaaaaggagaaacacgaaaatgtttttccacatagtactggagcgaaatatgcagcttcatccacgctactttggtcgtaaccttcgcgataatctcgtttccaagcttatgaaagacgtggaaggcacttgcagtggccgacatggatttgtggtggcagttacagggatagagaacatagggaaagggctaattcg

SEQ ID NO: 189243 - DNA, 270 bp, Glycine max
gtagcatggccatgccatggcgcaggctaccaaaggttccctctccgaatgaaaactggctatggtgagcgttcttcggaggtaaaatgcgcaagttttaggcttgctgtggaagcacacaacatccgagcttttaaaaccattcctgaagagtgcgttgaaccaacaaaggactacattaatggcgaacaatttagatcagactctaaaacagttaaccaacaagctttcttttatgctagtgaacgcgaagtccatcacaacgacata

SEQ ID NO: 189244 - DNA, 268 bp, Glycine max
cagaaatgagatatttgctatgcaacctgcacccattcaagtttcatatatgggattccctggaacaactggggctacttacatagactacttagtcactgatgagtttgtttcaccactacggtatgcaaatatatattcagagaagattgtacatctaccgcattgctactttgtaaatgattataaacagaaaaatcaggatgtgttagatccaaactgcccacacaaacgatcagattatggtctacctgaggataaatttata

SEQ ID NO: 189245 - DNA, 269 bp, Glycine max
agggtaaggtaaccctagagtggtgaatcgaatctgcaaagatggaagctgtttctcgaagaagaggtggaggcattttcgaaagcctctacaaggtcgttatgcgtcgcaactctgtctacgttaccttcgtcatcgctggcgccttcctcggagaacgggctgtagattatggagtccacaagctctgggaggctaataatgttgggaaacgatatgaagacattcctgtgctagggcaaaggcagtcagaatagtgaccagcttgt

SEQ ID NO: 189246 - DNA, 268 bp, Glycine max
ctcgagccgctcgtccatcccgtaaccatgtctcagactgttgtcctcaaagttggtatgtcatgtgaaggatgtgttggagcagtgaagagagttttaggaaaattggatggtgtggaatcatatgacattgatttgaaggaacagaaggtggtagtgaagggaaatgtccagccagacacagttcttgcgaccgtttccaaaactgggaagaagactaccttctgggaaggtgaagcagcagcatccgaaactagcacagcaactg

SEQ ID NO: 189247 - DNA, 268 bp, Glycine max
gggctctgtgatttgatcagcagatagagattgaacatttgcagcgaaaagggaaagaaagagaaaatcatgtcaacagcagaagctcctccttctttccaagaagcagcgcgatgcgttgtctgcaattgcagtttcaacactttcagaagaagacaccactgtcgatcctgtgggagaacattgtgtaatgaacattcatcaaatcaaatggctttaccacaatttggcctttactcaaatgtcgagtatgtgctgattgtttcaa

SEQ ID NO: 189248 - DNA, 270 bp, Glycine max
gactgaattcaaagttagaaaaaaaaaacatgtcttgctccgtcgcggtttccaattcgccggtgttctctccttcttcttccctcttctgctcgaagccctccatcatctcttcttcgccggaatccctctccctctctctgtcgcatctcaaaccttcgaactcttctacgtcgtcgtcttgttcttcgccttctgctgctgctgcttcttcttctccttcttctccgtttcgacttcgccttcccaagcctcccaccgcgttctccg

SEQ ID NO: 189249 - DNA, 272 bp, Glycine max
tgttagatctgtacccgcctagccattgatttggaaaagtccaacttcaaggatgagtaagcttcagagtgatgctctaagagaagctatctcaggaatcatggctgattccaaggaaaagaacaggaaatttgtggagaccattgaactccaaattgggttgaaaaattatgatccccagaaggacaagcgtttcagtggctctgttaagttgcctcatattcctcgccccaagatgaagatttgtatgcttggagatgcccagcacgttg

SEQ ID NO: 189250 - DNA, 269 bp, Glycine max
atcgagccgattcggctcgagggtcgctgcaaaacccagggcgcgagccgggcggacggtcgtcggtgcatatcttggtggtagtagcaaatattcaaatgagaactttgaaggccgaagaggggaaaggttccatgtgaacggcacttacacatgggttagtcgatcctaagggacgggggaagcccgtctgatagcgctctgtgcgcgtactccgaaagggaatcgggttaaaattcctgaaccgggacgtgtcagctgacggcaac

SEQ ID NO: 189251 - DNA, 275 bp, Glycine max
gtgaccccaatatacttagccatatctttacttcccaaaacttgctctacaatgagtttccttcgttcttttgcaagaaacaaggatatatcaaaagtaggacgcagaggtatccattgcatgcagaaactatgtgcagaaaaaatatctcctgattcactagagaaggcccaaaatcgtgtgatagatgctgcactcacacttgttcgagaaaatacaaggcttaagaaagaacttgtgcatagtttgggaggtgctgtagcaacttcaactct

SEQ ID NO: 189252 - DNA, 268 bp, Glycine max
cgaagatggaggacgcatcagcatcaaagttcattccacaccaaatcggaggggtccaaaacgacgcgcttcgattcggtctccatggagtcaagagcgacatcgttggttctcaccctcttcaatcttcactccaatctacaaggagaatggatgaagcgatgaagaggcaatgcaaagttaacctgtacggaactgcttttcccatgaaggaggagcttgacaggcaaatcctgtccaggcatagatcatatacatcaccatccgg

SEQ ID NO: 189253 - DNA, 257 bp, Glycine max
atggaaaaacaaataccatttattgggatattgagcaacaaagctgaggaaaatccagattttttcaattggaatagaataaaaatccgttattgcgacggtgcatcatttagtggggacagtcaaaatgcgggagcagggttatatttcagagggcaacgcatttggcaagctgctatggaagatttaatgtcaaaagggatgcgctatgccaaacaggctcttctatctggatgttctgctggaggtttagctac

SEQ ID NO: 189254 - DNA, 265 bp, Glycine max
gcagtgttagggtttctgtagcctccaaccagaaagagagggaaatggctcccaaacatcctagtacgggtttgtttgttggattgaacaagggtcacgttgtcaccaagaaggagttgcctccacgcccttcagatcgtaaggggaaaacaagcaagcgagtgcactttgtgaggaacctcattcgagaggttgccggctttgcaccttatgaaaagcgaataactgagttgctcaaggttggaaaagataagagggcactgaa

SEQ ID NO: 189255 - DNA, 267 bp, Glycine max
gggatccttctcagtgctgcgacgaacacgacgtcgtgatgggatttttcaaaaggatagccggatatctagggtttggaaaccacgaacacgattccaaggatgaggcccgcgatggtcaacctcgtaccacacaacctcgtaaaggcttcagtgtccctgcccaggtcgtcgtcgatcgcccccacctcgctcccgttctcactccttctacttccggcgacggtggaattcagggtctggattggtatgtaaagcgtcttaaga

SEQ ID NO: 189256 - DNA, 268 bp, Glycine max
  unsure (1)..(268): unsure at all n locations
cgctctgcttccagcgagtgttctttcttcgtttcaacaccttaatttgcaaancgtgcttcttcagcttgagaaatggcacaagaaacctttctattcacatctgaatctgtaaacgagggtcaccccgacaagctgtgcgaccagatctctgatgcagtgctcgatgcgtgccttgaacaggaccctgacagcaaggttgcctgtgagacatgcaccaagaccaacatggtcatggtctttggagagatcacaaccaaggccaacg

SEQ ID NO: 189257 - DNA, 269 bp, Glycine max
gctagctactccttaattactaattagtttcattctttggtgcaagctagcttcattagttgattcataaaattataacaatggtgagtgttgaagcaatccgtaaggcacaacgtgcagaaggccctgccaccgtcatggccatcggcactgccactcctccaaactgcgtcgatcagagtacttatcctgactattatttccgcatcaccaacagtgagcacatgactgagctcaaagaaaagttcaagcgcatgtgtgataagtcg

SEQ ID NO: 189258 - DNA, 263 bp, Glycine max
ctcgagccgctacccgccgctcgatgggaattgcgcttcaaggcgactcgtagggctaatccgcctcacgagggtcaccaacggcacgtgcctttggggggccgaggccccctactgctggtcggcaaacggacggcgggcgcacgcgtcgcttctagcccggattctgacttagaggcgttcagtcataatccaacgcacggtagcttcgcgccactggcttttcaaccaagcgcgatgaccaattgtgcgaatcaacggtt

SEQ ID NO: 189259 - DNA, 267 bp, Glycine max
actcgagccgaatcggctcgagctcgagccgaaattttcaaacaattttactcaggataagtctgcaaaggtccagcgttataattgaatcgagatcttctcttagacagggggctcttgcaaaaagaaggtctaatttccagggaaaccaatttcctgctgcagttgaagttgcgcgaaaagctgttactgctcctctgcacaatagagtccctaatcgtaatagggtggctaactggaataaaacaagatttcaagttcctgtag

SEQ ID NO: 189260 - DNA, 263 bp, Glycine max
  unsure (1)..(263): unsure at all n locations
ctcgagccgattgacatatccaagtggtactgcaactgcacatctcatcaacagcttccacactcctcaaggagatanactagcaaagaagcaagtgaaaatgttgggaaaattcttcagtttgagttttttttggggcttctttcaatggttctacactgctactgaccagtgtggatttcaagccttcccttcattggggcttaaagcatatgaaaacaagttcttttttgattttgctgcaatctatgttggagttggaa

SEQ ID NO: 189261 - DNA, 267 bp, Glycine max
tactcgagccgctcgagccgctcgaggagtatgtctctgggggtccccaacctggaggcatgttcttcccagtgcctcatggaatccatgctgtgaggcttggcaatgatgcctcaatctcccaaagcatcaaggtcaaacccggtcaactgtatgctctaattcttggggcctcaaggacttgtgcgcaggatgaagttttgaggatctctgtgcctccacagactggtgatgttcctttgcagaccctttatagcctcaatggtg

SEQ ID NO: 189262 - DNA, 267 bp, Glycine max
  unsure (1)..(267): unsure at all n locations
angnaatgnaanttacntgntgatanaaanttnagacagagcgagtngttgtaaagctangccttgttgcagccatggccacccacgnggctctaaccntctacaaggatccccactaacaccaagttcccatccaaggcttcacactctttcccaacccaatncgcctcaaagagacttgaggtgacagaattctctgggctaagatccacttcatgtgtgacatatgctancgntgctagagaatcttccttttttgatcttgta

SEQ ID NO: 189263 - DNA, 268 bp, Glycine max
ctctacactccatcaaaagtagatatcccaacatctcaagtttacgtgaattcttcaatgctaagtatcaagaaaattctcccagttttaaacttgcccagagaaactttgttgaaagtatggcaggatattccctggtgtgctactttctgcaggtgaaggataggcataatggaaacctcctattggatgaagaaggtcatatcatacatatcgattttggcttcatgctttccaattcacctggtggtgttaactttgaaagtgc

SEQ ID NO: 189264 - DNA, 267 bp, Glycine max
agcaaatgctctgttttggtcacctgccggtcgctacattgtactggctgggttgaaaggcttcaatggacagttggaattttacaacgttgatgaacttgaaaccatggctactgctgaacattttatggcaacagatattgaatgggatccaactggaagatatgttgcaactgcggtgacttcagttcatgaaatggagaatggtttcaatatatggtctttcaatggcaagcatctatatcggattctgaaggatcacttctt

SEQ ID NO: 189265 - DNA, 262 bp, Glycine max
caaaagttaaagtgaaagttcggttgaatcttcatggaattgtatctgtcgaatctgcaactctgctggaagaggaagaaattgaggttccagtttccaaagaaccagcaggagaaaataccaagatggaaactgatgaagctcctgccaatgttgctgcacctcctagcaccaatgacaatgatgttaacatgcaagatgctaattccaaggcaactgctgatgcccctgggtccgaaaatgggacccctgaggcaggaga

SEQ ID NO: 189266 - DNA, 262 bp, Glycine max
gcacgctctgcttccagcgagtgttctttcttcgtttcaacaccttaatttgcacacgctgcttcttcagcttgagaaatggcacaagaaacctttctattcacatctgaatctgtaaacgagggtcaccccgacaagctgtgcgaccagatctctgatgcagtgctcgatgcgtgccttgaacaggaccctgacagcaaggttgcctgtgagacatgcaccaagaccaacatggtcatggtctttggagagatcacaacca

SEQ ID NO: 189267 - DNA, 260 bp, Glycine max
aggaggctggcccctactgctggtcggcaaacggacggcgggcgcacgcgtcgcttctagcccggattctgacttagaggcgttcagtcataatccaacgcacggtagcttcgcgccactggcttttcaaccaagcgcgatgaccaattgtgcgaatcaacggttcctctcgtactaggttgaattactattgcgacactgtcatcgcaacttcttctagatttaaggaagatgggtaaggaaaaggttcacatcagtat

SEQ ID NO: 189268 - DNA, 264 bp, Glycine max
tctcgagccgaatcggctcgagtctctctctttgtcgcttggatcacagatctcatctcaatttccagatatgtcgacatctgataagccagaagtggtggaaaggggtagcaaggatgaaaaacacaaggaagatgatcaagaggaggggaagggtggattcattgagaaggtgaaggatttcattcatgacattggtgagaagattgaggaagctattgggtttgggaagccaactgctgacgttactgcgattcacattcc

SEQ ID NO: 189269 - DNA, 265 bp, Glycine max
attccccatctcctcaccttattcagccactgctaatttctagggttccgaaatggacgctggcggaaagatcaagaagggcgccggaggaagaaagggcggcggccctaagaagaagccggtttcaaggtccgtcaaggccggtctccaattccccgtcggaagaattggccgttatttgaagaaaggaaggtacgcccagcgtgtcggtaccggtgctcccgtttacttggccgcagttctcgagtacctagctgctgaggtg

SEQ ID NO: 189270 - DNA, 260 bp, Glycine max
gtttactaccagcttgacaacttttaccagaatcatcgccggtatgttaaaagccgaaacgatgaacagctgagggattctggaaaagcaaactccgtaagtggttgtgagcctgaaaataatgcaaatggaaaggcaattttaccttgtggtcttatagcttggagcttgttcaatgatacatacagcttctcacgcaacagcaagaatttgacagtgaacaagaaagacatctcatggaagagtgacagggaccacaa

SEQ ID NO: 189271 - DNA, 259 bp, Glycine max
cttacaggtttactctgtcgggtctgcttaacaacatggatggtttatggtcaagtggtggagaggagcgaattataatattcactactaaccacagagagagaattgaccctgcattgctgcgccctggtcgtatggacatgcacattcacttgtccttcctcaaaggcaaggcctttcgagtcttggcttccaattatttaggaattgaagatcattcactttttgaagaaattgatggactattggagaaattaga

SEQ ID NO: 189272 - DNA, 259 bp, Glycine max
ggattgggtaaagtgtcaacacatgccgtggtttatgcccgactaattactgatggccaagatcatggagtgcatggtttcattgtccagctgcggagcctggatgatcacttacctcttccaggcataactgttggtgatattggaatgaaatttggaaatggagcatataactccatggataatgggatgctaaggtttgaccatgtacggattccaagaaatcaaatgttaatgagggtttcacacgtaacaaggg

SEQ ID NO: 189273 - DNA, 259 bp, Glycine max
gggtacggtttcgacttgtttcttcttcgtgtttcttctttctctccttcttccttttcagatctccgctgaggaatcctcggagaaggagttcgtactcacattggatcactctaactttcatgacactgtcagcatgcacgatttcatcgtcgtcgagttctacgccccatggtgtggtcactgtaagaagcttgctccggagtatgagaaagctgcttctatcttgagtagtcatgatcctcctattgttttggct

SEQ ID NO: 189274 - DNA, 263 bp, Glycine max
  unsure (1)..(263): unsure at all n locations
ctctcaactcaccaacaacaaccgccccatctttccccttcgacgacccaactattccatgggccaaaagaaaacgttcaaagcgttgttcacgcgaccacccttcggaggaagagtacctcgctctctgcctcatcatgctcgctcgcggcggcaccacccgccgcgtcagcactccaccgccgcaaccgactccagatccttccaccaagctcagttacnaatgctccgtttgcaacaaaagcttcccctcttaccaagcg

SEQ ID NO: 189275 - DNA, 258 bp, Glycine max
gctcgatgggaattgcgcttcaaggcgtctcgtagggctaatccgcctcacgagggtcaccaacggcacgtacctttggggggccgaggccccctactgctggtcggcaaacggacggcgggcgcacgcgtcgcttctagcccggattctgacttagaggcgttcagtcataatccaacgcacggtagcttcgcgccattggcttttcaaccaagcgcgatgaccaattgtgcgaatcaacggttcctctcgtactag

SEQ ID NO: 189276 - DNA, 214 bp, Glycine max
gcgaaatgcgatacttggtgtgaattgcagaatcccgtgaaccatcgagtctttgaacgcaagttgcgcccgaagccattaggccgagggcacgcctgcctgggtgtcacacatcgtttcaaagagaagaaaaaaaagagtaaaaaaaaaaaagaaaaaaaaaaaaaaaaaaaaaaaaaaaaaaaaaataaaaaaaaagaaaaaaaaacaaaaa

SEQ ID NO: 189277 - DNA, 261 bp, Glycine max
gcccctggttgtggtgaatggaagaggccaacgaagaggaatccagcttataagggaaagtggagtgctccttacatcgataaccccagttacaagggcatatggaagcctcgcgagattccaaaccctgaatactttgaactcgcaaaacctgattttgagcctattgctgctattggcattgagatttggacaatgcaggatggcatcctatttgacaatgttctgatagctaacgatgataaagttgcagaatcctat

SEQ ID NO: 189278 - DNA, 279 bp, Glycine max
accctaggtaagaagaaaagatgccggctggtcatggtttgcgatcccgcaccagagattccttctctcgtcctttcaggaagaagggaaccatcgccctcaccacatacctgagaacctaccacgtcggcgactatgttgacgtcaaggttaacggtgccgttcacaagggaatgccccacaaattctaccatggccgcaccggacgcgtctggaatgtcaccaaacgtgctgttggcgtcgaagtcaacaagcaggttggcaacagaattataagga

SEQ ID NO: 189279 - DNA, 277 bp, Glycine max
cgagattcattcttcaccaaaacttcgcaaagaaacactacacatccatggcaactgctggcgtgcaagaagttcgtgttccccctctaacttccacctctgagccaccttctctctttgacggaaccaccaggttgtacatcagttatatttgtccctatgcgcacgtgtttggatcactcggaactataagggactacaagacaagatcaaactggttcctattgacctacaaaacaggcctgcttggtataaggagaaagtctaccctgaaaac

SEQ ID NO: 189280 - DNA, 272 bp, Glycine max
cttctttcttcttatatatcgaacatggctaagtatcattcaagtgggaaaagctcttccatgactgctatagccttcctgtttatccttctaatcacttatacaggcacaacagatgcacaatccggggtatgttatggaagacttggcaacaacttaccaacccctcaagaagttgtggccctctacaatcaagccaacattcgcaggatgcgaatctacggtccaagcccagaagtcctcgaagcactaagaggttccaacattgagct

SEQ ID NO: 189281 - DNA, 263 bp, Glycine max
cagtggtggttgtagcacttcttcttctggcggaggtggggcccatggctgaggctgtgacatgcaccccaacagagttgagtccgtgtcttccagcaatcacttccggtgctaaaccttccaatgcttgttgcacgaagctgaagcagcaaaaaccatgcttatgtggctacctcaaaaacgctagcttgaagcagtatgttaactctcctaatgcccgaaaaaccgttgcttcttgtgggattccctttccaacttgttaa

SEQ ID NO: 189282 - DNA, 271 bp, Glycine max
ctgggaaagaacaacaaatcaccatccgttcatctggaggactctcagaagatgagattgataagatggtcaaagaagcagagttgcacgctcagaaagaccaggaaagaaaggctctcattgacatcagaaacagtgcagatacaagcatctacagcattgagaagagtttaggtgagtacagagataagatccccagtgaagtggccaaagagattgaagatgcagtatcggatttgagaacagcaatggcaggagacaatgctgacga

SEQ ID NO: 189283 - DNA, 193 bp, Glycine max
gacagtgtcgtaggatggagaaggtggtatgtgtgaccggcggcacggctgcattggttcatggctcgtccatctcctcttggatcgcggctacaccgttcacgccaccgtccaaaacctcaacgatgaagccgagacgaagcatcttcaatccctcgacggagcgtccacgcgcctccgcctcttccaaatg

SEQ ID NO: 189284 - DNA, 275 bp, Glycine max
ctctgaagccgctcacgttatccacaacactctcaaccctccttaaaccctaaccaatccaaccatggcttcttcttccaccttcactgcaatgtccgcctgcaagctctcctcctccgccgccatctcctccttcccctcccgccgccgctccaacgccgtcgttctgtcgaggcgcacgcgccgccagggtctccgccatggccaaggagttgcacttcaacaaagacggcaccgcaattaagaagctccagagcggtgtgaacaagctcgcg

SEQ ID NO: 189285 - DNA, 272 bp, Glycine max
agagcagacactccaatggtcaaggacgctggcccgtcaaatcagctaagttcatcctagatttgctgaagaacgctgagagtaatgctgaggtaaaaggtttggatgtcgatgctctgtacatttcccatgtccaggttaatcaagcacagaagcaaaggcgtcgtacctacagagctcatggaagaatcaacccttacatgtcatctccatgccacattgagctgatattgtctgagaaggaagagcctgtgaagaaagaggctgagacc

SEQ ID NO: 189286 - DNA, 270 bp, Glycine max
cgaacttgggtcgattcactaatccccctgattggcaggaaattttgacctattttcgaggatctgaactgcagaattattttactcggattctagaggatgatttgaaggctatcatcaagcctcagtatgttgaccatattccaaaagctgtgcaagggaatgtggggcaggtgctagaccagaaagatgagagagagaagaaggaggagctttgtgctgatcttgagcttaatcaagttatagatcgtaatgttggtgatctttcgg

SEQ ID NO: 189287 - DNA, 269 bp, Glycine max
aattcatgacaatccagatgaaatgactgctgctttgtatctacaagtcagtatagttagccaggctttgatatttgtcacccgttcgcgcactggtccttcatcgaacgccctggattgctgttagtgactgctttcgttattgctcagctgattgctacagtaatagcagtgtatgccaactggggctttgcaaggatccaaggaattggttggggttgggcaggagtgatttggctctacagtattgtcttctatttcccacttga

SEQ ID NO: 189288 - DNA, 269 bp, Glycine max
  unsure (1)..(269): unsure at all n locations
ctgtttcttctttttctccaaccttcgtttcaccaccacacttacattactttgtcgaaatggctccaccaattgagaccccaaacaaggtttccagctatcaacagtccccaaaccctcgtcttaacgagaggattctttnatnnatttccaggagacacgttgctgcacacccgtggcacgatcttgagataggacccgnagctccaaagatcttcaactgtgtggtcgaaatagggaaaggaagcaaggtgaaatatgaacttgac

SEQ ID NO: 189289 - DNA, 270 bp, Glycine max
gcttcatggattttggtatagtccctacactttgagggtggtatggaccttaaatttaaaggatataccatatcaaaacatagaagaagaccgctacaataagagtcttcaacttcttgaatacaacccagtatacaagaaaactccagtgcttgtccataatggaaaacccttatgtgagtccatgcttattgttgaatacattgatgagatttggtcacataattcattacttcctgctgatccctacgagagagctctggcaaggtt

SEQ ID NO: 189290 - DNA, 189 bp, Glycine max
aaaaaaggcgcagatgggtagcacaggtttctcatggaaattggcggatcatccaaagcttccaaagggtaagactgtggctgtggtggtgttggatggttggggagaggccacacccaatgagtacaactgcatccacaaggctgaaacaccctgcatggattctcttaaaaagggtgccctgaacgg

SEQ ID NO: 189291 - DNA, 270 bp, Glycine max
ggctccaggtccatcgggctgcgttaagtgcgtcgccttctgcgacagcgctgtcggcaaggcgtgcttgttgatttcctacaccagcaacacttttcccacggactacgtgcccgacgtttttgacgattatcagtgctaatgttgtggtggatggaagcaccgtaaacctggggttgtgggatactgctggtcaggaggattataataggcttagacccttgagttatcgaggagctgatgtatttatacttgccttttctctcataa

SEQ ID NO: 189292 - DNA, 280 bp, Glycine max
gaatcaactagccccgaaaatggatggcgctaaagcgaccgacctatacccggacgtcggggcaaggaccaaaccccgatgagtaggagggcgcggcggtcgctgcaaaacccagggcgcgagcccgggcggagcggtcgtcggtgcagatcttggtggtagtggggtaacgatacgtaataagtttcatcattgaggaagtttcctgtgcatcgtctccgaaaatgaacgacgcagatgtctcaaagcaaatccagcagatcgtgcagttcatccgcca

SEQ ID NO: 189293 - DNA, 289 bp, Glycine max
ctcgagctcgagccgatcgatacgcgctgtctcacttatgttgtcgctgcgtctcgtacgtcgccctgtgctctccactctgcaccatgtccgtctagaaacgatagatacgacccaggatttactcactcacaatctcgtccgagtcatgccgaaacgtacgaagaaatggttcagtgtattaagatagtagcacaacttgatcttagtctgagtgtgtatgacaggatacttctctcagtgggatacgttaatgtgattggttcacgacgggcctcttggcgcgtaa

SEQ ID NO: 189294 - DNA, 268 bp, Glycine max
caccattctagatatcagagaactttgcagctctcttaggtttttaaaaaacaccacgcaaacagcaagattgccacttccgacagtaacatgctactaaattatgttccagtttatgtgatgctcccactcggagttgtcaatgttgacaatgtttttgaagacccagatggccttaaagaacagctcttgcagcttcgagctgcgggtgttgacggggttatggtttttgtgtggtgggggatcatagaactgaaggggcctaagc

SEQ ID NO: 189295 - DNA, 268 bp, Glycine max; identical to SEQ ID NO: 119764

SEQ ID NO: 189296 - DNA, 267 bp, Glycine max
gcagagatggtcctatgcctgtgctaagcagttgattgagaggcttgtttatgctgagggtgctgaaaatggcttggaattcacaattgtgaggccttttaattggattggaccacgaatggatttcattcccggcattgatggcccaagtgagggtgttcctcgggttctggcatgctttagcaataatctcctccgtggagagcccctcaagcttgtggatggtggccaatcccagaggacttttgtgtatattaaggatgctat

SEQ ID NO: 189297 - DNA, 266 bp, Glycine max
cttgtgaaccactggaggaagattccttcaggccaatccttcaccactatgatggtcccaagttccgtcttgagctgaatgtgcccgaggtattttatttttatcttgctgaatattggtcccatttgaaagaagatactaacatggttcagtgtttttatttttcctggtccgctaaactctatcgctttttgggtttataggcgttgtctcttctggatatttttgcagaacaagacaccttcaatgacactttcgaggctttg

SEQ ID NO: 189298 - DNA, 266 bp, Glycine max
attgagccatgttcttgcaacaaaactcggtgctcgtctcaccgaggttcgcaagaacggtacctgcccttggctgaggcctgatgggaagacccaagtgaccgttgagtattacaatgacaatggagccagggttcctattcgtgtacacaccgtgctaatctccacccaacacgacgagactgtcaccaatgacgaaattgctgctgacctcaaagagcatgtgatcaagcctgtgatcccagagaagtaccttgatgagaaga

SEQ ID NO: 189299 - DNA, 270 bp, Glycine max
ggttattcgcaccgcaaacaaacagtgagccatggccgtcggaaagaacaagcgcatctccaaagggaaaaagggtggcaagaagaaggcagctgatccctttgccaagaaggattggtatgacattaaggccccttctctttttcaagtgaaaaatgttggcaaaaccctcgtctctcgtacgcagggtaccaagattgcttctgaaggacttaaacatagagtgtttgaggtctccttggctgatcttcaaggggatgaggatcatgc

SEQ ID NO: 189300 - DNA, 270 bp, Glycine max
cttttgttgttctgtgtttgtgtttgttttttctctcacctgaaacatgtcttgctgcggtggtaactgtggttgcggaagctcctgcaagtgcggcaacggctgcggaggctgcaagatgtacccagacttgagctacactgagtcaaccaccaccgagaccttggtcatgggagtggcacctgttaaggctcaatttgagggtgctgaaatgggtgtgcccgctgagaacgatggctgcaaatgtggaccaaactgctcctgcaaccc

SEQ ID NO: 189301 - DNA, 270 bp, Glycine max
cggctcgagctcgagccgaatcggctcgagggcatgcactctcatgtctgaagaatttgttccatatcaacagttggttgacagattacaaagcctacatgttcaaagatgacctcttggctggtttaactcttgccagcctctgcatacctcagagcataggatatgctactttagcaaaagttgctcctgaatatggcctgtataccagtgttgttccacctcttatttatgctatgatggggagctcaagagaaattgcaattggac

SEQ ID NO: 189302 - DNA, 268 bp, Glycine max
gcggcataacctaaacctatctttcttctctctctgtgtgtgcgcttcaacggcaaccagaagcagccatggccactgcaaggactgtgaaggatgtttcacctcatgagttcgttaaggcgtactcctctcacctcaagcgatccggcaagatggagctgccagagtggactgatattgtgaaaactgcaagatttaaggagttggctccttatgatcctgactggtactatgtcagagctgcttccatggcaagaaagatctactt

SEQ ID NO: 189303 - DNA, 268 bp, Glycine max
ataattccaaccttcaacgtctcgtcactctcttccttttttccctaattgcaccctctttggctcaacaatccttcagacccagagccctcgttgtcccagttaaaaaagacgcttccaccctccaatatattgctcaaatcaaacaaagaacaccactcgtcccagaaaacctagtacttgacatcggtggccaattcctgtgggtcgattgcgacaacaactacgtctcctccacttaccgccccgcacggtgtggctccgccca

SEQ ID NO: 189304 - DNA, 261 bp, Glycine max
tcttcttttgttgttctgtgtttgtgtttgttttttctctcacctgaaaatgtcttgctgcggtggtaactgtggttgcgcgagctcctgcaagtgcggcaacggctgcggaggctgcaagatgtacccagacttgagctacactgagtcaaccaccaccgagaccttggtcatgggagtggcacctgttaaggctcaatttgagggtgctgaaatgggtgtgcccgctgagaacgatggctgcaaatgtggaccaaactg

SEQ ID NO: 189305 - DNA, 284 bp, Glycine max
cggctcgagttcgagagcggcgacactaagatcggagaaagaatggcgaaaacgacgtcgttgctgctctttacactgctcctcttcggaaccctagctctcatccaggcgaagaaatcgaaggaggatttgaaggaggtgacccacaaggtttactttgatgttgagattaatggaaaagaagcaggtcgtattgtaatgggtctttatgggaaggctgttccaaaaactgcagaaaacttccgagcactttgcacaggggaaaagggaactggtaaaagtgg

SEQ ID NO: 189306 - DNA, 282 bp, Glycine max
ttcggctctagcgggcggtgttagcatagacgactggtggaggaacgaacagtatttggtgatcggaggtgtatcttggtctacagtgtgcactatttcagggccgtgtaattggtctaagtcgatggtaagtcaaactacactgtgacctcaaaagcagcagatgatggagaattctcagaactctacatattcaagtggacatcactcttgatccctccaatgactttacttatcatgaatattgtcggggtggttgtcgggatctcagatgccatcaac

SEQ ID NO: 189307 - DNA, 275 bp, Glycine max
cttctttcttcttatatatcgaacatggctaagtatcattcaagtgggaaaagctcttccatgactgctatagccttcctgtttatccttctaatcacttatacaggcacaacagatgcacaatccggggtatgttatggaagacttggcaacaacttaccaacccctcaagaagttgtggccctctacaatcaagccaacattcgcaggatgcgaatctacggtccaagcccagaagtcctcgaagcactaagaggttccaacattgagctttt

SEQ ID NO: 189308 - DNA, 266 bp, Glycine max
atccaacacccctcggccagagagagtttccccttggaaaatagagcctgctcttgctcccccggctctaaatcctctttcaatgcccaggcctaaaaggcctcggtctaatgcagttccttcatccccagattcttctgttcttactcgagaagcatcatctaaagtgagcatagacccttcaccggcaaatggctttccaagggtcttgcaaggtcaagaattctcgaccttgagaggcaattttgctgaaagtaatgagtctg

SEQ ID NO: 189309 - DNA, 179 bp, Glycine max
tcagaagatagctccccaggtagcttatacatttgatgcggggccaaatgctgttctaattgcacgcaacaggaaagctgctacctctttgattcagaggctgcttaactacttccctccaaattcagatgacctcagcagttacattattggggacaagtcaattgcaaagatgctgg

SEQ ID NO: 189310 - DNA, 265 bp, Glycine max
cgctctgcttccagcgagtgttctttcttcgtttcaacaccttaatttgcacacgctgcttcttcagcttgagaaatggcacaagaaacctttctattcacatctgaatctgtaaacgagggtcaccccgacaagctgtgcgaccagatctctgatgcagtgctcgatgcgtgccttgaacaggaccctgacagcaaggttgcctgtgagacatgcaccaagaccaacatggtcatggtctttggagagatcacaaccaaggcca

SEQ ID NO: 189311 - DNA, 265 bp, Glycine max
cttaaccccaaacaaaggctctgcaattgcaaattcagaggatgtcgatcttcgagtacaacggaagcgccgtggtggctatggtcggcaagaactgcttcgccattgccagcgaccgaaggctcggcgttcagctccaaactatagccacggattttcaacgcatttccaagattcacgacaagctcttcatcgctctctctggcctcgccaccgatgctcaaacattgtatcagcgtcttgttttccggcacaaactgtacca

SEQ ID NO: 189312 - DNA, 265 bp, Glycine max
cagtggtggttgtagcacttcttcttctggcggaggtggggcccatggctgatcgtgtgacatgcaccccaacagagttgagtccgtgtcttccagcaatcacttccggtgctaaaccttccaatgcttgttgcacgaagctgaagcagcaaaaaccatgcttatgtggctacctcaaaaacgctagcttgaagcagtatgttaactctcctaatgcccgaaaaaccgttgcttcttgtgggattccctttccaacttgttaatt

SEQ ID NO: 189313 - DNA, 268 bp, Glycine max
cggctcgagaaacttcctcagcctcccccaacagcaacaagggaataccaacaacaacaacatgggagagaacaaacctgcagaggtgaaggatttccagatagtggtagctgagaacaaggatgagagcaagaaacagcagcaacagttggcaccaaagaggagttccaacaaggacaggcacaccaaggttgaaggcaggggaaggaggataaggatgcctgctctctgcgcaccagaatcttccagttgaccagggaattgggtc

SEQ ID NO: 189314 - DNA, 278 bp, Glycine max
gttatcctcataaatacactctaattaggtggcaagataagtgtctaaccttagtaacattgccacatattgtgttcattttggaattgtgccactaaaattctattcaattcatctatggctgcctcttcttatgctatgcaatcaatcctggcaaaccctattgatccgcatttccagcgggtctagggtgaaccaatttggcgttcctgctttgcacatgagaaggaatgttggcctgagagttaggtccatggctaaggaagaacaaccaagtg

SEQ ID NO: 189315 - DNA, 267 bp, Glycine max
attcggcacaaactcaatttggccgtcaatggctgcctccgaggctctcaacggcacaaccaccacctctctcaggcacgcgttcggcaacgtcctacgcgtacatcataacttctcatgatcggcgatcagacttctcgatccgactcttatccgttataaagtatgagagtgttattcacgagtttgatccttatttcaactatagagtcactacagtttttgacaaagaatgggatatatgattactggacatggtttgatgat

SEQ ID NO: 189316 - DNA, 269 bp, Glycine max
ggagcagcagctatagatggcggaggaccaagtatgtgggacacctatactaaacagcaaccacggaagatttgggatcatagtgatggaagtctagcaattgatttttatcaccggtacaagagcgacacaaagatggtgaaagaagttgggttggattcatacagattttccatctcatggtccagaatattccccaagggcaagggagcagttaacaccttgggggtcaagttctacaacgatctcattaatgagattatagcaaa

SEQ ID NO: 189317 - DNA, 271 bp, Glycine max
gcttgcaatcccacccatattgaagttcgctgaaatgctttcccttaatgttaagtctgtgaattacaccaggggaagtttcattttccccagtgctcagccatatccccatcgcaacttttctgaggaagttgctattcttgatggctactttggcaaacttggtgcaggaagcaatgcttatattttgggtggccaagacaaagcacagaactggcatgtctactctgcttctgcagattctgtaactcaatgtgacaatgtttacact

SEQ ID NO: 189318 - DNA, 298 bp, Glycine max
agctcggaatttcggtcgactcgagcgcgctgatttaatggctgcagggctccaatgaggatgcttctgctttataagcgcagcaattccagctatatgtggtgcagccatgctggttccagatatcatggcaaacgcttcaccaacataatttggctcatcagttccatttggacaccaagcagcccaaatcaatgaaccaggagctaatatatctggtttgagaagatctgcctcttggaagctgaagtcctttatatttggccctcgagcagagaataatgctacctgtggtgca

SEQ ID NO: 189319 - DNA, 301 bp, Glycine max
ttcggctcgaggctggccccctctggtggggtggtgttggcttctcgtgatggaaagattgtgtgcgaaaatactcttgatgcacgacttgatgtagtgttccgtaaaaagcttccagaggggaaggagagagccaggaagggaatgttggattaagggttgccaaacttcttcaattaaaactactgtgaacttggatgtattgctgtcactacaaataagatccgaaagcagctactttggacaagttgttgtttgaagattttgattgtatggtttggttacccctgaaatgtttata

SEQ ID NO: 189320 - DNA, 283 bp, Glycine max
gcaatggtgtacgtcaaggctcagaaatcaaaagcctacttcaagagatatcaagtcaagttcaagagaagaagagagggaaaaaccgattaccgtgccaggattcggttgattaatcaggacaagaacaaatataacactccgaaataccgatttgtggttcgctttagcaacaaggacattgttgcacaaataatatctgctagcattgccggcgatttagttcttgctacagcatattcacatgagctgccacgatatggtcttgaagtaggacttacaa

SEQ ID NO: 189321 - DNA, 271 bp, Glycine max
gaaaaaatgggttcctctttgtggacttgtctgattttgttatcacttgcttctgcttccttcgccgccaacccaagaacaccaattgatgtgccatttggcagaaactatgtgcctacttgggcctttgatcacatcaaatacctcaatggtggttctgagattcagcttcatcttgataagtacactggtactggcttccaatccaaaggatcctacctgtttggtcacttcagcatgtacataaaattggttcctggtgattcagctg

SEQ ID NO: 189322 - DNA, 274 bp, Glycine max
cttgctccctcagaagcgaagaagaagccacagagaactagtctcctactctcacccgcaagataaaaatggcatctcacatcgttggatacccccgtatgggtcccaagagagagctcaagttcgctctcgagtctttctgggatggcaagagcagcgccgaggatttgcagaaggtgtcttctgatctcagggcatccatctggaagcagatggctgatgctgggatcaagtacatccccagcaacactttctactcatatgtacaggttct

SEQ ID NO: 189323 - DNA, 270 bp, Glycine max
ggatagggctaagagtggccatggaggctcaagcaatcattggtgaagaatcaaaacaatttgaggcttggagagactcattggaaactgttcctaccattaaaaagttgagggcatatgctgaaagaataaggcttgctgagcttgagaagtgcctaggtaagatgggtgatgatatcaacaagaagacacaaagagctgtggatgatcttagcaggggtatagtgaataagttgctctgggccaatgcaacacttgaggtgtgatggc

SEQ ID NO: 189324 - DNA, 275 bp, Glycine max
  unsure (1)..(275): unsure at all n locations
gctagagtgtgaganctctagcatatactagtactactacattcctccatcttcctttttatttttcaccataaaaaaaccagagcacaaagatggtgagagctccttgttgtgaaaagatgggtttgaagaagggtccttgggctaccgaggaagatcaaattctcacatcttacatccaaaaacatggccatggcaattggcgtgccctcccaaagcaagcaggccttctaaggtgtgggaaaagctgcagactccgctggattaactatttg

SEQ ID NO: 189325 - DNA, 280 bp, Glycine max
tgcaatcctatctgaatcattcatcatcttcttaaaagttaaaaaggccaaggtcctgaatctcacagagacagagagagtgagtacggtgggagaagggaaggtgagtagtaatggtcatggatgttgcaaatcagggccaggctatgcttccccactggaagccatttctggtcccagagagtctctacatttatgtaacctactgtctacacagggaccggaatagagaagccagactatttggcgacagtggatgtggatccagactctccaactt

SEQ ID NO: 189326 - DNA, 281 bp, Glycine max
gggctatttccttctcggcctcgttactcttgttcttgttaaatcttccaaagttacatgcgaagaagaatcagttaatacagtttcacccattattgacatttcactcaatcggaagagtttcccagaagggttcatatttggggcgggatcttcctcgtaccagttcgaaggggcagcaaaggaaggtggtagaggaccaagtgtatgggataccttcacccataattatccaggaaagatcatggatagaagcaacggagacatggcaattgactcat

SEQ ID NO: 189327 - DNA, 277 bp, Glycine max
gcgattcttgcttcaagttccagaaatgggtgtggctcaaaacattcccgatgcggaggagggaaccttggagattggaatggaatacagaactgtttctggagttgctgggccattggtcattcttgataaagttaagggacccaagtttcaagagattgttaacattcgcttaggagatggtactactcggcgtggacaagtgctagaagttgatggtgaaaaggctgttgttcaggtctttgagggtacatctgggattgacaataaatttaca

SEQ ID NO: 189328 - DNA, 275 bp, Glycine max
ggatgatacttgtttttttttttgttcacaaaggggtgtttttggtggatatgttgagaggtgctggcaacttttgcttagttcatgtcagccttgttcctgttttgaatgttgttggtgaacagaaaacaaaaccaacccagcatagtgttcgtgcactgcgtggccaagggctgactccacatatcttagcatgccgcagcactatggtcctggatgagaatgcaaagggaaaactctctcaattttgcctaattccggcagaaaacattgtt

SEQ ID NO: 189329 - DNA, 277 bp, Glycine max
cgatgtagtgcgccagaccagagatcttctgctctttgttgctcgcagccccgaaacccgcgaaagcaaacgtgaggtgaagcagatgtccgagctatttaaaaatatcagggagctaaagtcaatcctgtatggaaatagtgaatctgaaccagttgtcagaagcttgtgcgacattgactcaggagttctttaaggaggacacgttgcgactgcttatctaatctcttccaaaattgaatttggaggccagaaaagatgccactcaagttgttgc

SEQ ID NO: 189330 - DNA, 268 bp, Glycine max
cttttgagggttcgcgtgaagcgtggtgtcaaccttgccgttcgtgatgttcgaagcagcgacccttatgttgtcatcaagatgtacaaccagaaactaaagactcgtgtgattaaaaaggatgtgaatcctgagtggaatgaagaccttactctttctgttataaatccgaatcacaaaattaaactgactgtgtatgaccatgacacttttagcaaagatgacaaaatgggagatgcagaatttgacatctttccctttatagagg

SEQ ID NO: 189331 - DNA, 269 bp, Glycine max
ataaggaccttggtttaaagaatgtgaggcattttatacttgatgagtgtgacaagatgctcgaatcacttgatatgagaagagatgtgcaagagatcttcaaattgactccccacgataagcaagtgatgatgttttcagctacactcagtaaagagatccgacctgtttgcaagaaatttatgcaagatcccatggaaatttatgtcgatgatgaggccaaattgactcttcatggtcttgtccagcactatatcaacttgcaagag

SEQ ID NO: 189332 - DNA, 270 bp, Glycine max
gaaagaagcaaatggcaaactttccagttgttgacatggggaagcttaacaccgaagagagacctgcagccatggagattataaaagatgcctgtgagaactggggtttctttgagttggtgaaccatgggatatccattgagcttatggacacagtggagaagctacacaaaagagcattacaagaagactatggagcaaaggttcaaagaaatggtgaccagcaaaggtcttgagtcagttcagtcagaaatcaatgacttggactgg

SEQ ID NO: 189333 - DNA, 268 bp, Glycine max
cttggatcaaaggaagcatgaaggtagaagaggatttctgaaattgttgaatgtgggagttggcttacctgtattattaggaggtgggaaagcttatgctgatgaacaaggaccttcctcctccagaatgtcttattctagatttcttgagtatttggataagggtagagttaaaaaagtggatctgtttgagaatggaaccacggctgttgtggaggctgtttctcctgagttgggtaatagggtgcagcgagtgcgtgttcaactt

SEQ ID NO: 189334 - DNA, 278 bp, Glycine max
taatggcacctgcaacactgtctctgtctctcctcctcctgttctcactcagcatcgccgtaaccgttagatcgagcgactacgactacgattgtgtgtacactgcatacgttagaaccggttcggtgttgaagggcggaacggactctaagatcgggctgaagctgtacgacaagtacggctactacatctacattaaaaacctacgaagcatggggcggcttgatgggcaagggctacgactacttcgagcgcggcaacctcgacatcttcagcgg

SEQ ID NO: 189335 - DNA, 277 bp, Glycine max
cttgatcgtgcacgcacatatcaggttcttcgtgccaatgatgctcagtttgaagtgatatctcacgaaggaacaaatatagttgatatcaggaaccgttgctgtctttgccgtggctggcagctctatggtttgccctgtgcacatgctgtggcagcacttctctcctgcaggcagaatgttcatagattcacagaaagctgtttcactgttgcaacttatcgcaagacgtactcacaaaccatacacccaattcctgataaatctctctggaagg

SEQ ID NO: 189336 - DNA, 275 bp, Glycine max
atccaagttcagctctgttccagagacaaccagactgggtcatctaccatgagcttgtgatgacaactaaggaatatatgcgtgaggtcactgtcatagaccccaaatggcttgttgaattggctccaagatacttcaaagtggcagatcctacaaagatgagcaagcgaaagcgtcaagagcgaattgaaccactttatgacagataccatgagccaaattcatggcgtttgagtaaacgtcgtgcataatatgtaattcatctatgttctctt

SEQ ID NO: 189337 - DNA, 267 bp, Glycine max
acagcattagccattagcactataaataaatagagaacacgcgaaacacctgattcccctaccccagacgccgtagagtcagagagagagattcactgaaacagagcgcagaagaaaatacataaactaatccagaaaatgagcagcggcgctggaaaggtggtgtgtgtcaccggcgcttccggttacattgcttcctggatagtcaaattcctcctcaatcgcggctacaccgttaaggccaccgttcgcgacacaagtgatccg

SEQ ID NO: 189338 - DNA, 255 bp, Glycine max
cggctcgagctcgagccgtgctgactatctaggcactgtccaccatgagtttaccatcactgtacaggaacgaatagatgccattgaagatgttatctaccatattgaaacatatgatgtgactacaattagagcaagcacacctatgtttctacatgtctcggaagattaaatcacttggtgtcaaatgggttatctcaggagaaggatgtgatgagatctttggagggtatttgtacttccacaaggcaccca

SEQ ID NO: 189339 - DNA, 267 bp, Glycine max
gaaaggaggaaagtccaagaccgaatctaagagagccgatgccaaacttgctgtgaataagaagggcgccgccaccaagactaggaaacccgccggaaaggggaaggcagcgaaagatcctaacaagccaaagaggcctccaagtgctttcttcgttttcatggaggaattcaggaaggtgttcaacaaggaacatcccgacaacaaagcagtgtctgctgtgggcaaagctgctggagcaaaatggaagacgatgtctgatgctga

SEQ ID NO: 189340 - DNA, 267 bp, Glycine max
gcaaaagctagttcaattggagccaaagggattatgtatattagggctttacaatggaattgtcatgcgctatgtcaccgcttcaagtgcctacttgggaaagcaggaggatgctttagaatttgatttcttgtactaccgtagcagagacccaatgactcccaggctttatgaagacattcttgaagaggttgaacaacttgggatttttaaatatggaggactacctacattggggtaagaataggaacttggcatttcaaggag

SEQ ID NO: 189341 - DNA, 269 bp, Glycine max
caacacttgtttcttcagccatggccagtcaacctgaatcatctgacgcatagggcacaaaaagggattttagcaccgccatattagagcgtaagaaggctccgaatcggctcgtggttgatgaagctgtcaacgacgacaactctgttgtcgcgcttcatcctgataccatggagaaacttcaactttttcgtggtgacaccatcttgatcaaggggaaaaaaagaaaggatacaatatgtatcgcacttgctgatgagacatgcgag

SEQ ID NO: 189342 - DNA, 277 bp, Glycine max
ggaaaaaccgattaccgtgccaggcttcggttgattaatcaggacaagaacaaatataacactccgaaataccgatttgtggttcgctttagcaacaaggacattgttgcacaaataatatctgctagcattgccggcgatttagttcttgctacagcatattcacatgagctgccacgatatggtcttgaagtaggactttcaaattatgcagcagcttattgcactggtctcctgttggcccgaagagtcctcaaaacacttgacatggatgagg

SEQ ID NO: 189343 - DNA, 269 bp, Glycine max
agcgcacttcttctagatttaaggaagatgggtaaggaaaaggttcacatcagtattgtggtcattggccatgtcgactctgggtgcatccataccactggtcacctgatttacaagcttggaggcattgacaagcgtgttattgagaggtttgagaaggaagctgctgagatgaacaagaggtctttcaagtatgcctgggtgctggacaaacttaaggctgagcgtgaaagaggaatcaccattgatattgctttgtggaaatttga

SEQ ID NO: 189344 - DNA, 274 bp, Glycine max
cttatcatcttcaaatcgcaactttttcattttacttacttttcaactcacttttacctttttcgtagttttcactaacactcccctattttagctctcacaaacttcgtacagtgacaatatgaagaaagttgtgttgaaggtggaaatacatgatgacaaaatcaagaaaaaagctatgaaggctgtctctggcattttaggggttgagttagtttctgcagacacgaaagacaagaaattgaccataattggggacattgatccagtaaaa

SEQ ID NO: 189345 - DNA, 267 bp, Glycine max
caacatagcagtcttctggaccccatagatgtttcttcatcttcagatgatgaaaatgaccttcctaatgatgatgtgtctaatcaattagtcctttatgatcctgtggtgaatggaaacaatgcaattgaacttgcacctgatcctctccagtgtgaacatccattgcttccaagaagcaaaccttcacattcagttcctagagttttgccttacagttggtgctttcactgttcaatgtgcatcctgcttcaaatggaggttgat

SEQ ID NO: 189346 - DNA, 273 bp, Glycine max
ctcgagccgcttaaggggatcataaaaggaactgggtatttgtgttcatgtgacaactgcaaccagtcaaaggcacttaatgcatacgagtttgagcgtcatgctggtgccaagacaaaacatcctaacaatcacatatactttgagaatggaaaaaccatctatgctgttgttcaagagctgaaaaacactacctcaggatatgctttttgatgctattcaaaatgtgactggctctaccatcaaccaaaagaactttcgaatatggaaagc

SEQ ID NO: 189347 - DNA, 224 bp, Glycine max
ctgaatccgtgccctagcatcttcctcctccgccattgcagcaaggtacacaaccttcgacataaacccaatactcgaaggatcggattcgccatcatggggaagaagaagaagagagtttcctacgaagtgtggtgttattactgcgatcgcgaattcgacgacgagaagatcttggtgcagcatcagatagccaagcacttcaagtgccatgtctgccacaa

SEQ ID NO: 189348 - DNA, 277 bp, Glycine max
gtgctgcaatggcttcaagtcaggatgaggtgacccttttgggagctactggaagcccatttgtgtgcagggttacatttgccctcaagttgaagggagttcaatacaaatatgtcgaagaaaatttgaggaccaagagtgaactgcttctcaaatccaacccagttcacaagaaggttccagtgtttattcacaatgagaagcccatagcagagtctcttgtgattgttgaatacattgatgagacatggaagaacaaccccatcttgccttctga

SEQ ID NO: 189349 - DNA, 270 bp, Glycine max
ctcgaccgcgccaccagtgaattcaattgtaatggcatacagactccttacaccttctgacaaggttcaattattgatatatttcatgctcaaatatgtaatggagattttgctatcggaatctagtgtcgttacaacatactacttcattcggtcaacaagcacagttgcagtttttcttgcttgccttggcctgacagttcttacctgtaaacattcatgttggaagctatataagcaacatgttccaggacaggcaaattctgttgg

SEQ ID NO: 189350 - DNA, 269 bp, Glycine max
gtgttgtcccctatttcatcttcatcatctacttctccatctgactttaaacttggtgatcacaattctaatgctcatgtcaaataggcaggtttattaaaaactcaaaggccaagcctgaaaggtggcaaagaaatcaagcagcacagatatgcatttcaaacaaggagtcatgttgatatactggatgatgggtaccggtggagaaagtatggggagaagtccgtgaaaaacaataaatttcctaggtttgtcttacttcattaatt

SEQ ID NO: 189351 - DNA, 264 bp, Glycine max
gcctatcctacctgatgcagggaggaacaccttcaacactttgctgcaacggagtcaagaacattcttggctctgctgtcaccaccgttgacacacaaactgtgtgcaactgtctcaaggcggatgctgctaggtacaacatacaatgaccagtatgctcaggcactccctggtttctgcaaggtcaatgtcccttacaagatcagccgctccactaactgtgcaagcatcaggttctgaacaagccatggacagatttgctca

SEQ ID NO: 189352 - DNA, 270 bp, Glycine max
gaaggataggcataatggaaacctcctattggatgaagaaggtcatatcatacatatcgattttggcttcatgctttccaattcacctggtggtgttaactttctaagtgcacctttcaaattaacacgtgaacttcttgaggttatggattctgatgctgagggtgttccgagcgagttctttgattattttaaggttttatgcattcaaggcttccttacttgccgcaagcatgctgagcgcatcattcttcttgttgagatgttgca

SEQ ID NO: 189353 - DNA, 267 bp, Glycine max
  unsure (1)..(267): unsure at all n locations
attctgttttcatagtgacgaacttctgaagaaatgggcaaatcatcctttgacacactctcactctttccgcgagaggtttgatgncaactctcactggtcacaggaacgaaattttggcccttctgtcaaggcttgaagccaagggcaagggaatcctgcaacatcaccaagtggttgcagagtttgaagaaatccctgaggagagcagaaagaaactccaagatggtgtctttggagaagttttgagatccacacaacatacgc

SEQ ID NO: 189354 - DNA, 260 bp, Glycine max
  unsure (1)..(260): unsure at all n locations
cacttatgctagtggtggtggttggctccatggtggcttcctgtggtgctaacttcaaccaagactttgatctaacatggggtgatcaccgtgctaagatattcaatggtggtcagcttctatctctttctctggancgagtctctggctccggcttccaatccaagaaagagtacctatttgggaggatcgatatgcaactcaagctcgttgctggcaactctgccggcactgtcactgcttactacttgtcgtctcaa

SEQ ID NO: 189355 - DNA, 266 bp, Glycine max
tgcgaaaccgagagagcgaaggggcaaacacaattttttttatcttcttttttattttttgtagagagagagagagagaaaatgttggggatcttcagcagttcagtggtgtcgccgccggaggagctggtggccgctggcaacagaacgccgtcgccgaagacgacggcggggaagctgctgaaccggttcgtggagagcaaggcgtcggcggtgtcgctgcaggtgggggaacacgtgcagttggcttacacacaccacaacga

SEQ ID NO: 189356 - DNA, 239 bp, Glycine max
  unsure (1)..(239): unsure at all n locations
atttccatttcctctctcacagattccaagaatcttaattcatttagagaatcntacccaaccgtgagcgctgattaccagaaggccgttgagaaggcgaagaagaagctcagaggcttcatcgctgagaagagatgcgctcctctaatgctccgtttagcatggcacactgctggaacttacgcacgtaagctcgaaaaccggtggatgcctcggaaccataaagcacccctccgaac

SEQ ID NO: 189357 - DNA, 267 bp, Glycine max
gccaattcagatggatatcctctcagatgaaccgtgtgaggaacggagagctctaccgtgtcatctgtgacacaaggggtgcctttgtgcagcctgcagtttatgaggcctttgggttgactgtggttgaggccatgacttgtgggttgccaacgtttgccacatgcaatggtggtcctgctgagatcattgtgcatggaaaatctggttaccacattgatccttaccatggtgaccatgctgctgagatccttgttgagttctttg

SEQ ID NO: 189358 - DNA, 266 bp, Glycine max
ataggactgatctttacaagacatacttactttattgtctaactggtgaagtgacaagggttccatttggtgctcagatcactactaagaaggatgattctgagtatcttcttctaaatcagcttggtgggatcctgggattgagtagtcaagaaatagtggaagtgcacaggggtctagctgagcaggcttttaggcaacaggctgaggtaattttagccgaatggacagttgacaaaggccagggtggagcagcttaataacct

SEQ ID NO: 189359 - DNA, 269 bp, Glycine max
cggctcgaggagagactgttgatatagaaaggtaggataaaccagtggccaaggaatatatggcgttttctatggttttcattgttagcaacattatgctgcttttcagttcagcatttgccaaaactgctagtcctccctctctgagcccaactccagcaccagccccggcacccgactacgtgaacctcaccgagttgctcagtgttgctggtccatttcacaccttccttggataccttgagtccaccaaagtgattgacactttc

SEQ ID NO: 189360 - DNA, 270 bp, Glycine max
ttcggctcgaggcatttactacattgttaggattagtgttgtgccttttttggaatgttatagctgttactgctgcttggattaagggtgaaggtgtacaaaatatggtttcttgccattatctatttcatatcaggggttcctggagcatatgttctgtggtatcgcccattatatcgtgcttttaggaatgaaagtgctttgaaatctggatggtttctcctgttttatctgcttcacataggattctgcatcttagctgcagttgct

SEQ ID NO: 189361 - DNA, 222 bp, Glycine max
agcggctctagccattaggtgtaggcgcctttcagaggtggaatcttctagttcttcctatttgacccgaaaccgatcgatctagccatgagcaagttgaagagagctctaacaggccttggaggaccgaacccacgtatgtggcaaaatacggggatgacttctggctaagggtgacaggccaaccaagatcggatatagctagttttccgcgaaatctat

SEQ ID NO: 189362 - DNA, 264 bp, Glycine max
  unsure (1)..(264): unsure at all n locations
ttctcgagccgaatctgctcgacactgttattctctgaattttctgcccatctacaactctagnagnactcaatatggaaactgaaaagtctaatgtttcaaaggctgaagaatttaaactccttgccaatgaagtgttcaatgctcgaaaatactcccaagccattgatctatatacacaagcaattgagctgaacagtcaaaatgcagtttacttatctaatcgtgcctttgcccatcttcggcttgaggcatatggtagtg

SEQ ID NO: 189363 - DNA, 262 bp, Glycine max
cttcacgcaggctcgtatcttctctgattcgatcctcccttcgtagatctcaatcgaagccctcaatttccacacaacatacgatatacacaacatccaaccgtgcctcaccgcacggatacttgctgaacctcgtcgccgagtacgccaccgccgctgcttttgctaccgctcctccctctcctcctcctccggggaagaaatagctcggcggcggcgggaagatcaccgatgaattcaccgggaagggcgcgatcgggca

SEQ ID NO: 189364 - DNA, 262 bp, Glycine max
gcttaggctagggttcagaaacgaaaaagggttcggtgttcagttcgcgatgagagccaagtggaagaagaagcgtatgaggaggttgaagaggaagcgccgaaagatgagacagagatccaagtagtgcgttaatccaagtagttgatttccgttgcttttataattatgttgtcaaattgggcacccagttgttagaggcactggtttctcctttttgatgttttgatacatttttgtttggtttaattcgtcttatgtt

SEQ ID NO: 189365 - DNA, 265 bp, Glycine max
  unsure (1)..(265): unsure at all n locations
gttctacatagcatctcctttaccaccattctagatatcagagaactttgcagctctcttaggtttttaaaaaacaccacgcaaaaaacaaaatgtaaacttccganagnaacttagcattaaannangnaccagnnnatgngatgactccactcggagttgtcaatgttgacaatgtttttgaagacccagatggccttaaagaacagctcgtgcagcttcgagctgcgggtgttgacggggttatggttgatgtgtggtgggg

SEQ ID NO: 189366 - DNA, 264 bp, Glycine max
gtacgatagttatggaaatcaagcccggtttgtcagtactcgttaccggtggtgcctctggaatcggcaaaggtcttgcactagctcttgcagagaagggtgtatttatcacgatcgtggatttctctgaagaaaagggaagacaagctgcaatcctcgtcgagaaaattaactccaattttcattctaagttaggatttccgtctgccatatttgtgaaatgtgatgtgagtaatgcaagggatctagctgctgcatttgaaa

SEQ ID NO: 189367 - DNA, 268 bp, Glycine max
ccaccacctcgctctcttcttccctgcttcacaatttttattttaatgatactattttgttattgttaagacggcatcatcagggaaatggatcgggtgaagggtccatggagcccagaagaggacgaggctttgcggaggctggttcaggcccacgggcctcgaaactggtcggtgataagcaagtccgttccgggacgatccgggaaatcgtgccgcttacggtggtgcaaccagctctcgccgcaggtggcccaccgccccttct

SEQ ID NO: 189368 - DNA, 266 bp, Glycine max
ctcgagccgctcgagccgattcggctcgaggggcatgcccctctttttggacccaaggtaggcttcggacggtcgatccgggcggaagacattgtcacgtggggagtttggctggggcggcacatctgttaaaagataacgcaggtgtcctaagatgagctcaacgagaacagaaatctcgtgtggaacaaaagggtaaaagctcgtttgattctgctttccagtacgaatacgaaccgtgaaagcgtggcctatcgatcctttag

SEQ ID NO: 189369 - DNA, 266 bp, Glycine max
ctttttggtttcttgaagatgtcgttactctccgatcttatcaaccttaacctctccgacatcaccgataaggtgatcgccgagtacatatgggttggtggatctggcatggatatgaggagcaaagcaaggactctctcgggactggttaatgacccttccaagcttcccaagtggaactatgatggttccagcactggtcaagctcctggacaagatagtgaagtgatcttatatccacaagcaatttttcgggatccattcag

SEQ ID NO: 189370 - DNA, 258 bp, Glycine max
gccccactcaaccaccacacctctcctcgttcacgctacccctttctgctcttcttctacctttcaagttttaaaagtataaagatggcagagacattcctatttacctcagagtcggtgaacgagggacaccctgacaagctctgcgaccaaatctccgatgctgtcctcgacgcttgcctcgagcaggacccagacagcaaagttgcctgcgaatcatgcaccaaaaccaacttggtcatggtcttcggagaaatc

SEQ ID NO: 189371 - DNA, 261 bp, Glycine max
ggaacatatcaccgattgatgtcatcactcatgttcctattctttgtgaagagtctgacattccttatatttatgtcccatctatagaagatcttgcaggcgcaggagcaacatagaggcctacttgctgtgttctggtacagacaaagcctgcaaagggtgaaatagagcaaggggaacaagagaaactaaagtcagattatgatcaagttgtagcggaagttactgagcttacaacttcactcttttgaaacatgcaca

SEQ ID NO: 189372 - DNA, 263 bp, Glycine max
ctgcactataccagaatgtctcagggaagaggcagtgcatctttgcctattgtggtcactgtggtttcactactgtgccttttggaacgtgctaacgcagcaacttactccgttggaggacctgggggatggaccttcaacactaatgcttggcccaatggaacaagattcagagctggtgatatcctaatcttcaactatgactcaacgacccacaatgtggttgctgtggacagaagtggatacaacagctgcaagacacc

SEQ ID NO: 189373 - DNA, 265 bp, Glycine max
ctggaacgaggtgatgaaggaaacaaagcctggtccacttttgaaaacccaatcagcccgttgtatggactgtggtactcctttctgtcatcaggaaaactctgggtgtcctcttggaaataaaataccagaatttaatgagttagtataccaaaataggtggcgtgaagcattagataggcttcttgagacaaataacttcccagagtttaccggtagggtatgcccagcaccttgtgaaggttcttgtgtccttggtattatt

SEQ ID NO: 189374 - DNA, 266 bp, Glycine max
gtttggtcggaataagattcaaaacgctgtttttttgcagtttcttcgattctctctttctctttcttcagaaaaattaaacccattcaaagaaagaaagaaagagcgatcatttccaatcacaatggcagatcaactcaccgatgaacagatctcggagttcaaggaagccttcagtttgttcgataaggatggcgatggttgcatcacaacaaaggagcttgggactgttatgcgttcgttgggtcagaatccaacagaggctg

SEQ ID NO: 189375 - DNA, 266 bp, Glycine max
tctcgagccgaatcggctcgagggagtgagagagagtgttcttcgactgctaccttctcccagccatggttacgttcaggtttcaccagtaccaggtggtcgggagtgctctcccaacggaagcagatcagcatccgaagatctaccgaatgaagctctgggccaccaacgaggttcgcgccaagtctaagttctggtattttttgaggaagctgaagaaggtgaagaagagcaatggtcaagttcttgctatcaacgagattttt

SEQ ID NO: 189376 - DNA, 258 bp, Glycine max
ggagtttcaagggttaccggaaggttgcattgctagtatactctctcgcactacgccggcggacgtgtgtaggttttccgtcgtatcaaagattttccgttcggccgctgaatcggacgctgtgtggaaacgttttctcccttccgattaccattccatcatttcccagtctccttcgcctctcaactatccttccaagaaggagctctatctcgctctctcggatcgccctatcatcatcgatcagggtaaaaagag

SEQ ID NO: 189377 - DNA, 257 bp, Glycine max
cgaagttgcagaaagaagaagaaaaatggtggctgacaggagcaagaagccgaaggtctccgacaagggcgaaaacctcgaagaaatcgacggagaactcgtcctctccatcgagaagttgcaggagatccaagacgagcttgaaaagatcaacgaggaagccagtgacaaagttctggaaatagagcagaagtacaatgagatacggaagcccgtttatgataagcgcaatgatattatcaatgccattcctgatt

SEQ ID NO: 189378 - DNA, 263 bp, Glycine max
ctcgagccgtccgggttcacgtttcacaatcactttttgcgcttctctcactcactcactcttcttcttcctcttcgtgtggttttctttctcgaactcgaacgaagatgcgtgagattcttcacatccagggactggcaatgcgggaaccagatcggagccaagttctgggaggtggtgtgcgcggagcacgggatcgattcaacggggaggtaccaaggggacaacgagttgcaactcgagcgcgtcaacgtctactacaa

SEQ ID NO: 189379 - DNA, 265 bp, Glycine max
gcttgagccgcctttggtcaaagctgtagaaactgcagaagctatggtgctcatcccttctgtgtgtggattgccagtgcagcctaaaataccgaacctggccttagagatagtgctttccattaatgtgtcttgtaattctggtttttgtcatcgttgtatttgtttcgtggagaactattatgcatgaataacttccaggagggatattctgcaagttacaccaatgttaagtttttgatgtcctaaattccaataaattcct

SEQ ID NO: 189380 - DNA, 264 bp, Glycine max
  unsure (1)..(264): unsure at all n locations
ggnaatgcaacttacttgttgatataaacttcagacagagcgagttgttgtaaagctagccttgttgcagccatggccacccacgcggctctagcttctacaaggatccccactaacaccaagttcccatccaaggcttcacactctttcccaacccaatgcgcctcaaagagacttgaggtgacagaattctctgggctaagatccacttcatgtgtgacatatgctaacgatgctagagaatcttccttttttgatcttgta

SEQ ID NO: 189381 - DNA, 157 bp, Glycine max
ggaagacctaaggtatgcagtgtggaaactcagtagcaagcttaagaggaatagctttgctatggttacgttctttgagatgagagtcttgatgaacagtaccattctgatgtattgctttccttgaaagttaatgcatgcttcttatcttctgtct

SEQ ID NO: 189382 - DNA, 262 bp, Glycine max
gcggattcttctcgggaggagaacgtttacatggcgaaattggcggacaggccgagcgttacgaggagatggttgagttcatggagaaggttgcaaagactgtggaggttgaggagttgacggtggaggagaggaatctcctctctgtggcttacaagaacgtgattggtgcgaggagggcttcgtggaggatcatatcctccattgagcagaaggaggagagcaggggcaatgaggaccacgtggccattataaaggagta

SEQ ID NO: 189383 - DNA, 265 bp, Glycine max
aggggattagggtttaggaagcagcgacaacaatggatttcacagtggagaagaaggaatcagagaacaacgccgaaaatgctcacccaacaacgttagtttcttcttctcaattggcatcggcacttgattccaacaacaaagaaatctaagaacgacaagctcgtgaactcaaagccggacttcaccccctaaagcacaagtttgtcttctggtacactcgtcgaacacctggagttcgaaatcaaacatcatatgaggacaa

SEQ ID NO: 189384 - DNA, 265 bp, Glycine max
tatctacccatgggagacttttaaagggttgcgtgaaatcgggactggggttttgctgtccgttggaggtgctattttcatcaatgtgtttctcagtcagagtactcgtcccggaaagtttccatctatactttttccaattgaaattaaaaatatccaacgcggcaaacacggcagtgacactggagtctacgatactgaaggaaggtttgtaccttcaaaatttgaagaaatttttaacaagcatgcacatacacatccaaat

SEQ ID NO: 189385 - DNA, 257 bp, Glycine max
ccgaggggaagatactcgttatggtttcactggctatctctacaatgtccttcgggaaaggggaattcacaccttcattgatgacgacgagccccaggaaggggacgaaatcacgacagcacttgaggcggctattgagaagtccaagattttcatcatcgtgctctctgaaaactacgcatcttcctccttttgtttaaactcactcactcacatccttaactttactaaggagaataatgatgtgttggttttgc

SEQ ID NO: 189386 - DNA, 258 bp, Glycine max
caaagctaatgctccttcttcttcacatgtcattttcaattttgcacgtgtggacagatattggttttctactcaacccgctctagagcttcccgcgagcaagatcgtggacgtgccgttggcacaaactggtgaaggcatcgcagaatgtgagcttctcaaatggtatgtacaagagggggattatgttgacgactttcaaccactttgcgaagtccaaagtgataaagctaccatagaaattactagtcgttacaa

SEQ ID NO: 189387 - DNA, 264 bp, Glycine max
ccctgcaactaacggcaccccccacaaaaatgacaggagagacagtgaacccaaaagcttaccctttggccgatgcgcaactcgcaataacaatcttggatcttgtgcaacaagctgccaactacaagcaactaaaaaagggtgctaatgaagcgactaagacactgaacagaggcatttctgagttcgttgtgatggccgcagacactgagcctcttgagattcttctccatcttcctctccttgctgaggataagaatgttc

SEQ ID NO: 189388 - DNA, 262 bp, Glycine max
ggctcccaagggtttaacctttctggctgtgttaatatgcgtttcagcactgtcactgagtccttctgttgcgggggaagggcaaaataatggccttgttatgaacttctacaaggaatcatgccctcaggctgaagacatcatcacagaacaagtcaagcttctctacaagcgccacaagaacactgctttctcctggctcaggattatcttccatgactgtgctgttcagagttgtgatgcttcactgttgctggactcc

SEQ ID NO: 189389 - DNA, 120 bp, Glycine max
accgctcgaaccggtaagatctggggatctggtttcttatactgctgacgacggtgacatgattctgggagagggaaagttcttggtgtcggataacattcctggaaatgaaaggacgaa

SEQ ID NO: 189390 - DNA, 257 bp, Glycine max
cctgcctcttcctcacccctttctccatctaacgagtaaggaaaaatggcgcgtaagaagatcagagagtatgactcaaagaggttgttgaaggagcactttaagagactttctgtcaaggagttgccgatcaagtctgcacaaattactgcatcaactgatttcactgagctacaagagaaggaaccctggctttcatcttctaaattggttgtgaaacctgacatgttatttggaaagcgtggcaaaagtggttt

SEQ ID NO: 189391 - DNA, 260 bp, Glycine max
caccctactttttcaacaccctctatgaacctttccgagaaggtgcagattttgttcgcggttaccccttcagtctccgggaaggtgtaccaactgcagtttctcatggtctttggctcaacatcccagattacgatgctcctactcagcttgtgaagcctcttgagaggaacactaggtatgtggatgctattttgaccataccacagggcactttgtttcccatgtgtggaatgaacttggcctttgatcgcgatctt

SEQ ID NO: 189392 - DNA, 249 bp, Glycine max
tgcatttctatttctaactaattattgtgcttattattattgttgagacagacaagtatggcaaagttaatagaattctttgagttgaacacaggggccaagattccttctgttgggttaggcacttggcaagctgagcctggtgttgtagccaaagctgtcaccacagccattctggttggatactggcatattgcttgtgctcaagcgtataacaatcaagcagaaattggttctgctcttaagaag

SEQ ID NO: 189393 - DNA, 259 bp, Glycine max
gttttccttctccatttctcgtcgcaccttttcctcttctctctctttctctctttctagttcgtgttcttcgtcgcaaatccgaagtaggatctctcttgttttttctctaggtttttcgcgatggcgtcgaagcgaattttgaaggagcttaaggatttgcagaaggatcctccaacatcttgcagtgccggtcctgttcatgaagatatgtttcattggcaagctacaattatgggtcctccagacagtccctatg

SEQ ID NO: 189394 - DNA, 255 bp, Glycine max
cggctcgagatcaaactttgtcacggttatattagaccctttgataaacctctttcaaggcttttcaatcacaccctttctctaatcacttcttcttgtgctggcataacttcaacaacttattctgtgttctcgatctcacgatggctcatttggccctgtctcagatggctgtaactgttcctgttgggcagcgatttgtctctcagaagatctgcggttaaggcacctaactttaacttttgggataaatca

SEQ ID NO: 189395 - DNA, 249 bp, Glycine max
tctgaaggggagcaggttcccaatgataagcttgtggatttggtgcatgtgaatcttgggtggcttttatgagcctgtggtcactacttttgctgggctgtatcgataccgcgttggtgacgtgcttcaggtggtaggattttacaacaacgccccacaagtccgtttcatctgcaggagaaacgttgtgatcagcgtcgacaccgagaagaccaacgaggaggacttgcacaggggcgtgacaatggc

SEQ ID NO: 189396 - DNA, 252 bp, Glycine max
gttcaatccacgtgtgtcgagcagccgccgcaagagccgaaaggctcattgtcacggcgccatcgagcgtgcggcgggtgcttatgagcgcccctctgtcggcggagctgcggtctaagtacaacgtgaggtcgatcccagtacggaaggaggacgaggtgcaggtgatgcgaggaacatacaagggtcgcgaggggaaggtgactcaggtctaccgtcgaaagtgggtgattcacattgagcgcataaccc

SEQ ID NO: 189397 - DNA, 254 bp, Glycine max
gagatcggaaaatgggtacgcttcagtcttggagaagtccctacggttccatcaaggacaccaccaaagtgggtctggcccatgtcaatagcgattacgcggatttggacgttgccattgtcaaagccacgaaccacgtcgagtgtccccccaaagagaggcacctcagaaagattctgtttgccacgtctgctgtgaggcctagggctgatgttgcttactgtatccatgcactttcgcggcggttggcgaag

SEQ ID NO: 189398 - DNA, 254 bp, Glycine max
aaaaaataaaaatcaaagagcataatgtcagggatcattcacaagattggggagacccttcatgtgggagggcacaagaaggaggaggagcataagggtgagcaccatgctggagaatacaaaggggagcaccatggtgaacacagtagtgagtacaaaggagagcatcatggtgaacacaaagctggagagtaccatggtgagcacaagccagagcacaaagaggggttcctagacaaagtcaaggacaagat

SEQ ID NO: 189399 - DNA, 256 bp, Glycine max
tttccctctcgcttctccggcaaccaagattcgccgtctcgacgctgagttgccgccaattttggaagaggacggaaccgttacctaacgaggacgagagctctcgttctcttcaagcctctcgtccattccccttcctctttctctctcactctcgattctgaccttatgataggaattaggaacaatcaatatctgtggtccaaacaatgtgagcgcgtgacagagtcagaatcacgtgaggaggaaaatgatg

SEQ ID NO: 189400 - DNA, 248 bp, Glycine max
ggcaggagcagaggggctaaacagagaacagtacgtgtggcttgcgagcctgtcggagcaggcggagcggtacgaagagatggtgcagttcatgcagaaggtggtggtggggtggacgccggcgtcggagctcacggtggaggagcgcaacctcctctcggtggcctacaagaacgtgatcgggtctctgcgtgccgcgtggcgcatcgtgtcctccatcgaacaaaaggaggaagggcccaaaaacg

SEQ ID NO: 189401 - DNA, 250 bp, Glycine max
ctgcacccaaggaggcggtggagacaggtacggcggaggcggtggtagtagtaccaggtatgtcagcggcggtggcggggaagtacggtggtggtggaggaggtggtggcggcggagggagctgctacagctgtggagagtctgggcatttcgccagagattgcccatcaagtgctccttgagattactggtatggtggtttatgttatggcggattggttaagtttttactttaacatgttgtagggag

SEQ ID NO: 189402 - DNA, 257 bp, Glycine max
gttactgtctgttcaagctaccatctctctctctctttcttagtgcctccttgccagaagttcaaataggcccaagaaactttcctattcacatctgaatcagtgaacgaggggcaccctgacaagctctgtgaccagatctccgatgctgtgctcgatgcatgcttggagcaggaccctgacagcaaggttgcctgtgaaacctgcaccaagaccaacatggtgatggttttcggagagatcacaaccaaggccaa

SEQ ID NO: 189403 - DNA, 252 bp, Glycine max
agatacactaagttatcctcatagatacactctaattaggtggcaagataagtgtctaaccttagtaacattgccacatattgtgttcattttggaattgtgccactaaaattctattcaattcatctatggctgcctcttcttatgctatgcaatcaatcctggcaaaccctttgatccgcatttccagcgggtctagggtgaaccaatttggcgttcctgctttgcacatgagaaggaatgttggcctga

SEQ ID NO: 189404 - DNA, 253 bp, Glycine max
acgaaacgcgcttcatcagtcaaaagccaccaaaggtgatgttatcaagtatggaagttgtggcacaatcaatgggatttaagacacatattcgcaactataagatgagaatagagagtatctcaacaaataaggcttcttatttctcagttatactagaagtctttgaaattgctcctacatttttcatggtggatattcagaaagcagctggagatgctggtgaatatctcaagttttacaagaatttttc

SEQ ID NO: 189405 - DNA, 255 bp, Glycine max
attccccttatctttctctcttctctctccccgcccaaaccctaactccctaccctattccgctttctctcatccatcatgaaaggaggaaagtccaagaccgaatctaagagagccgatgccaaacttgctgtgaataagaagggcgccgccaccaagactaggaaacccgccggaaaggggaaggcagcgaaagatcctaacaagccaaagaggcctccaagtgctttcttcgttttcatggaggaattcagg

SEQ ID NO: 189406 - DNA, 253 bp, Glycine max
cggctcgagaatttgcaccgttgaatccgttgcttacactcctaggaaagaccttttgcaaatcacaggtatcagtgaagctaaagttgacaagatcattgaagcagcttctaagctggtgcctatgggtttcaccagcgctagtgaacttcatgcccagcgcgatgcaatcattcagataaccacgggatcaagagagcttgacaagatattggagggtggagttgagaccggttctataactgaattatat

SEQ ID NO: 189407 - DNA, 252 bp, Glycine max
tgtgcctcaaccaaaaatctcccttctaaccttattcttcttctcttccttcaccatcattgcgcatgcaattgttcctcaaaacgaaaccttcaaatttgagaactcaggtgaacttggaccctacatcgttgagtacggtgcagattacagaatgataagcatcttcaactctccattccaagttggtttctacaacaccaccccaaatgccttcactctagctttgcgtgtagggctccaacgctcgga

SEQ ID NO: 189408 - DNA, 247 bp, Glycine max
gttggttctttcacctcttgctacctcacaacaggaccattttcgcgttcggctgtgaactataacgctggatgcaagacagcagcttccaacattataatgtcacttgcagtaatgttgacattgttattcctgacacccttgttccattacactcccctggtggtgctatcagctattatcgtatctgcaatgcttggactcatagattatgaagcagccatccatctatttaaggttgacaaat

SEQ ID NO: 189409 - DNA, 247 bp, Glycine max
gcttcttctagatttaaggaagatgggtaaggaaaaggttcacatcagtattgtggtcattggccatgtcgactctgggaaatccactaccactggtcacctgatttacaagcttggaggcattgacaagcgtgttattgagaggtttgagaaggaagctgctgagatgaacaagaggtctttcaagtatgcctgggtgctggacaaacttaaggctgagcgtgaaagaggaatcaccattgatatt

SEQ ID NO: 189410 - DNA, 248 bp, Glycine max
gttggacgtagctggaccctccggctcctccgatggaggggtaggagtgaattggctctgcatgagccctaggcgagatcacaaccccgaaaactatgacgaccttcaattcgagttcaatcctaatctcttcgcctctctcgagcactatttgcctcctcatatgctcaacctctcacgcgatgttaagcttcactacatcaggaacattcttcttcgctatttgcctgagaatgaccgcaactgga

SEQ ID NO: 189411 - DNA, 251 bp, Glycine max
aagttgctgaacatgaacccgcaatcgccggttcgggcggaaccggagcctccggttacgacggtctccccacggttcgcgctcacgtccggttcgcagcggaaaatcgcgatcgcggtcgatctgagcgacgtaagcgcctacgcggtgcgctgaccggtgcagaactacctgcgaccgggcgacgccgtgatcctcctgcacgtgcgtcccacgagcgttctctacggcgcggactggggctccgtgga

SEQ ID NO: 189412 - DNA, 249 bp, Glycine max
gtcctccactttcctggtcgccctttgccaagcctttgacttgaggcatttggatgagaatttgaagaacacggtcaagaacgttgtgagtcaagttgctaagaggactctcaccacaggtgtcaatggagagcttcacccttcaaggttttgtgagaaggacttgctcaaggttgttgatagggagtacacatttgcatacattgatgacccctgcagtggaacataccctttgatgcaaaagctaag

SEQ ID NO: 189413 - DNA, 248 bp, Glycine max
aaacccccaaaatatctctcgctctgaaaccggcatggatttgcagcagagcgagttcgatcgcctcttgttcttcgagcacgctcgcaaggccgcagaagctgaatacgagaagaaccctctcgatgccgataacttaacaagatggggtggagctctattagagttgtctcagtttcagagttttcctgaatcgaagaaaatgacccaagaggctgtttcgaagctagaggaggcgcttgcagtga

SEQ ID NO: 189414 - DNA, 248 bp, Glycine max
aaaaaatccgcgattcgctcttctcttggaaaagtgaaaaccagaagtacgaacgaaagagaagagcgatttagaagtgagagaagatggggttgtcgttcacgaagctgttcagcaggttgtttgcgaagaaggaaatgaggattctcatggtaggtctcgatgctgctggtaagacaaccatcttgtacaagctcaagtatggagaaatcgtcaccactatccccaccatcggatttaatgttgag

SEQ ID NO: 189415 - DNA, 254 bp, Glycine max
cctcgagccgaatcggctcgagatctgaagataatggataaagacaactttagtcaagatgattgtactttgcgaggcaaccataccatttagatccagtgtttgaagccgatagcattccagaaactgcttacaaggttgtgaaggacgaagaatattgtggtgagattaaggtggctctcactttcactgctgagagacatgaggagcagggttatgatgcacctgaagagagctatggtggatggaaagaa

SEQ ID NO: 189416 - DNA, 254 bp, Glycine max
tctcgagccgaatcggctcgaggcctctactacatcatcacattcaactttcagtaccttctcattctcacagtctctcacacacaacaattgaagtagaaaatggttgacaatgattcgctctcggaattcctcgcatctgcggtcgacgcggctcagaaagctggcgagattattcgaaaaggcttctaccagaccaaaaatgtggaacacaaaggacaggttgatttggtcacagaaactgataaagcatg

SEQ ID NO: 189417 - DNA, 249 bp, Glycine max
ggttactactcttcgccttttcctttgcaattgttaccaaacaattcttgcttagcccttacaagcaagcattaacaacaatgaagaaagtagtgttaaaggtgggcttacatgatgatagaatcaagcgaaaagttatgagaacagcatctggtctttcaggggttgaatcagtttctattgacatgaaagacgagaaaatgaccttattagggaacattgatccagtgaatgcagtgtgcaagctac

SEQ ID NO: 189418 - DNA, 246 bp, Glycine max
ctcgttcttcttcttttgttgttctgtgtttgtgtttgtcttttctctcacctgaatatgtcttgctgcggtggtaactgtggttgcggaagctcctgcaagtgcggcaacggctgcggaggctgcaagatgtacccagacttgagctacactgagtcaaccaccaccgagaccttggtcatgggagtggcacctgttaaggctcaatttgagggtgctgaaatgggtgtgcccgctgagaacgat

SEQ ID NO: 189419 - DNA, 253 bp, Glycine max
catgtaccgctttgcaacctccctcgcctccaaagctagaattgccaggagcagcactcaacagattggaagtagggtcacttggaacaggaattatgcggccaaagacattaagtttcgtgtggaggctcgggctctgatgcttaagggtgtcgaagagctcgctgatgccgttaaagtaacaatgggccctaaggggcgtaatgtggttattgagcaaatttggagcacctaaagtgacgaaagatggagt

SEQ ID NO: 189420 - DNA, 263 bp, Glycine max
caaaaacctcgtccgagaacttgtatagagaaggatttcccgcggcgcacagttcttccataccaacttagacgtccggcgctgctattggcataacaaccggtacaccataggttggcccaacccagtcctctcgtactagggttggctcctcgcagttctccctttaacaccaacggtagataggaaccgaactgtctcacgacgttctaaacccaactacgtaccacttgaatcggcgaacaaccgaacccttgggacct

SEQ ID NO: 189421 - DNA, 261 bp, Glycine max
cgagatgggtgaagaagtgaaggtagttgttccagaatcagtgttgaagaagcgcaagagggaggaggaatgggcgttggccaagaagcaagaactcgatgctgccaagaagaagagagccgagagccgcaaactcatctacaacagagctaagcagtacgctaaggagtacgatcaccaggagaaggaattgattcggttgaaacgcgaggccaagctgaaggtggtttctatgtggatccagaggctaagctgttgttt

SEQ ID NO: 189422 - DNA, 253 bp, Glycine max
ctcgagccgtgctattgaaatccccacaatagtgtttccaaactcctctgcccaacagaggatgccagtggttggaatgggatctgcccctgacttcacatgcaagaaagacacaaaggaggctatcattgaggcgctgaaacagggttacagacacttcgacactgctgctgcttatggctctgaacaggctctcggtgaagctctcaaggaagctatccatctggcctcgtctcccgccaagacctctttg

SEQ ID NO: 189423 - DNA, 264 bp, Glycine max
tggcacccttgccaattgggttcgctgtgttcttggttcacttggcaaccatccccatcaccggaactggtatcaaccctgctcgtagtcttggtgctgctatcatcttcaacaaggaccttggttgggatgaacactggatcttctgggtgggaccattcatcggtgcagctcttgcagcactctaccaccaggtcgtaatcagggccattcccttcaagtcaagtgattcaatcaaacggttcatgcttaatcaagttggga

SEQ ID NO: 189424 - DNA, 172 bp, Glycine max
tctgagtgccaactttcacctcagccaaatacacaacaaaatggggtttcagaagataagggtggggaaccccatcgtcgaaatggatggggatgaaatgacccgagtgatttggaaactgataagaggtaagcttattttccctgtatttggagctggatattaagtattt

SEQ ID NO: 189425 - DNA, 212 bp, Glycine max
agctgctgagcgtgattatgacctgaaccgtgctgctgagcttaatgatggaactttgatgtcccttcagcgccaattagaagaagctgaaaagaacctaagtgacttccgaaactctggacaatctttactccgagaagaggtcactgaccttgatattacagagattgttagcaaatggaccggtataccattatcaaacctccacaaaa

SEQ ID NO: 189426 - DNA, 126 bp, Glycine max
gcccgtccagaagcagacccgcgccggtcagcgaacccgcttcaaggccttcgtggtggtcggcgacaacaacggccacgtcggtctcggagtgaagtgcagcaaggaagtcgccaccgccatacg

SEQ ID NO: 189427 - DNA, 258 bp, Glycine max
catcaatgatgtacactcatcatggattggaggtagcatttactggaaattacaatgagtattttggttttgcaactgatgttgatgctgtgatttacctgatgctgactaatgatgtcattcatgggctgttccctgaggctgttacaattggtgaagatgtgagtggaatgccaacattctgccttcctacgcaagatggtggggttggctttgatatcgcctgcacatggccattgcagacaagtggattgagat

SEQ ID NO: 189428 - DNA, 258 bp, Glycine max
gcgagtccatttggcaaaagggttgaatgggcattgaaactgaagggtgtggagtatgagtacatagaacaagatatcttcaacaagactagtctccttctccagttgaacccggttcacaagaaggttccggttcttgttcatgcccacaaacccatcgctgagtcattcgtcatcgttgaatacgttgatgaaacatggaagcagtatccactgttcctcaagacccttatcaaagagcacttgctcgattttggg

SEQ ID NO: 189429 - DNA, 264 bp, Glycine max
gtcgaacagtcaactcagaacttgtacggacaaggggtatccgactgtttaattaaagacagagcattgggatggtccctgcggatgttgacgcaatgtgatgtctacccagtgctctgaatgtcaacgtcagaaattcgaccaagcgcgggtagacggcgggagtaactatgactctcttaaggtagccaaatgcctcgtcatctaattagtgacgcgcataatggattaacgggattcccactgtgcctgtctactatccag

SEQ ID NO: 189430 - DNA, 258 bp, Glycine max
tctcgagccgattcggctcgaggttgggagctgctgcaatcgatcaacatcacccaattcttactgtagatgaattagctgagcaaatagccgaggttctcaacttttttggtcttagtgcagtcatgtgtatgggagtaactgctggggcttacattcttaccttatttgctatgaagtatagacaacgtgttcttggtttgatacttgtttctcctcatgtaaagaaccgtcttggactgaatggttgtacaacaa

SEQ ID NO: 189431 - DNA, 261 bp, Glycine max
tggccctcctaacgaaacgaagaatctcgcatcggaatctggaagcacgcgatgtcaacctcgaaccagcaccagttccgatacactcaaaccccttccaaggtgctccaccttcgcaaccttccctgggaatgctccgaagaggaactcagagagctctgcaaacccttcggtaagatcatcaacaccaagtgcaatgtcggcgccaatcgcaaccaggctttgtcgaattcgcggatctaaatcaagccatttcgatgg

SEQ ID NO: 189432 - DNA, 262 bp, Glycine max
ggaggagacccttttgggagctactggaagcccatttgtgtgcagggttcatattgccctcaagttgaagggagttcaatacaaatatgtcgaagaaaatttgaggaacaagagtgaactgcttctcaaatccaacccagttcacaagaaggttccagtgtttattcacaatgagaagcccatagcagagtctcttgtgattgttgaatacattgatgagcatggaagaacaaccccatcttgccttctgatccttaccaaa

SEQ ID NO: 189433 - DNA, 261 bp, Glycine max
atgatacgttatgaaggactacctggcttttataaggggatgagcacaaagatagtacaaagtgtttttgcagcttctgttctattcatggttaaggaggagcttgttaaggcttttatggttgtggcagataagagcaaaaaagttgtatcaaatataagtagttgactttcttcttttggataaagaaagtaaaacaagtagttgacttctttaccattgaaagggataactccctcttgatctacctctccctgttgg

SEQ ID NO: 189434 - DNA, 261 bp, Glycine max
gggaatcgcagcgaagtccactatgccgaagcaaattcacgagattaaggacttcctcctcactgctaggaggaaggatgcacgctctgtgaaaatcaagcggagcaaggatgtggtgaagttcaaggtccgttgctccaagtacctttacaccctctgtgtgtttgattctgagaaggctgataagttgaagcaatcacttcctccaggtttaagcgtgaggatgtgtgattcttactgctgtatgaagatcaggttttt

SEQ ID NO: 189435 - DNA, 261 bp, Glycine max
atgatacgttatgaaggactacctggcttttataaggggatgagcacaaagatagtacaaagtgtttttgcagcttctgttctattcatggttaaggagtagcttgttaaggcttttatggttgtggcagataagagcaaaaaagttgtatcaaatataagtagttgactttcttcttttggataaagaaagtaaaacaagtagttgacttctttaccaatgaaagggataactccctcttgatctacctctccctgttgg

SEQ ID NO: 189436 - DNA, 261 bp, Glycine max
ctagtctcagctgaaatggcctcttcagtgatggcatctgtggccctcaaacctgcccctttcactgttgagaagtcctcagtgagaggccttccctctctctcaaggaactcttcttcattcagagttgtggccagtggcaagaagatcaagactgacaaaccttatggaattaatggtggcatggctttgagggatggaactgatgcatctggcaggaaggaaagggaaagggtgtttaccagtttgtagacaaatacg

SEQ ID NO: 189437 - DNA, 260 bp, Glycine max
cagtgctacagccctatacttgacgagcttaatatgctattccctaatcgcagtaaagatagtccacctgcatgtttagttcctggtgctggacttggtcggctggccctggagatttcatgtttaggatttatcagtcagggaaatgaattttcatactacatgatgatatgctcgagctttattcttaaccattcccaaacggctggcgagtggacaattatccttggattcacagcaattgcaattcattatcagac

SEQ ID NO: 189438 - DNA, 258 bp, Glycine max
tcttcgttcttcgactgtctacgatctgctttctctgaattgtgaaaatgtcgctcggagaaactgcttgttcatacgcagctctcatccttcatgaagatggaattagtgtaactgctgacaagatcagcaccttgttgaaaactgcagaggatccagtagactcttattggccaaccttgattgctaaacttgctgagaagaaaaatcttggcgattgatagcaaatgcggcaggcggtggtgcaccagttgctgt

SEQ ID NO: 189439 - DNA, 170 bp, Glycine max
cggacagctacctttgctgtgagtggcagaggattcgtagcacgagacattaccttccaaaacacggcaggactcagagaagcaccaagcagtggcactaagatcagactcagacctctctgtgttcttccgatgtgggatcttcggttaccaagacagcctctacacaa

SEQ ID NO: 189440 - DNA, 255 bp, Glycine max
aaaaccttttagatatttcacttatggggctgcgtttgctgaggttgaaattgacactctgactggagattttcacaccagagtggcaaacatatttttggatctaggttattcgctgaatccagcgatagatgttggacagatcgcgggagcttttatccaaggtttgggttgggtagctttagaagaacttaaatggggagatgaagcacatgatggatcccgtctgggtgcctttacacatgtggacctgga

SEQ ID NO: 189441 - DNA, 258 bp, Glycine max
cctccagcctccttcttcatccatcttccctctccaccaaaatcctccgcggttcgttccgttattcatcgaaccgttctctcaagtctcgtacttggcttagttcacaactcgaaacttcaccgaacgcattccattcaccaattcgtccaagtctcgtatcaatcagtcaatccgtctcgtggcggttggagagatcggaggggaaaggatccatgcgcatcgagtggaccacgagtatgactatctgttcaagat

SEQ ID NO: 189442 - DNA, 254 bp, Glycine max
gaaaaatgtcggaactttaaggccacttgccatagagttgagtttgccacatcctcagggagatcaatctggtgcttttagtcaagtttttctgcctgcagatgaaggtgttgaaagttctatttggctgctagcaaaggcttatgtagttgtgaatgactcgtgctatcatcaacttgtcagccattggttaaacactcatgcagttgttgagccttcatcatagcaacaaacaggcatctcagtgttgttca

SEQ ID NO: 189443 - DNA, 260 bp, Glycine max
gtagaggtaccaaagctagggaaagaggctgcagtaaaggccataaaggagtggggccagccaaagtcaaagattacccacttgatcttctgcaccactagcggtggggacatgcctggtgctgattaccaactcaccaaacaattgggccttcgcccttatgtgaagaggtacatgatgtaccaacaaggttgctttgcaggtggcacggttcttcgttggccaaggatttggctgagaacaacaagggtgcacgtgtg

SEQ ID NO: 189444 - DNA, 254 bp, Glycine max
cagccatggccagtgcaaggactgtgaaggatgtttcacctcatgagttcgttaaggcgtactcctctcacctcaagcgatccggcaagatggagctgccagagtggactgatattgtgaaaactgcaagatttaaggagttggctccttatgatcctgactggtactatgtcagagctgcttccatggcaagaaagatctacttgagaggagggcagtgttagtgcctttcagaggatttatggtgggagcaa

SEQ ID NO: 189445 - DNA, 140 bp, Glycine max
ctcgagccgcgcggtgctgatggacctggagcccggaaccatggacagcgtgcggaccgggacgtacgggcagatcttccgcaccgacaacgtcgagtaagggcagtccggcgccggcaacaactgggctaaggggcact

SEQ ID NO: 189446 - DNA, 255 bp, Glycine max
ctcgagccggttcaagagagtgtatatgagcagcttcgtgttgttcgtgaaggtcaacttcgtatcatattcactcaagacttgaagatattatcttgggagttctgtgcaaggtgccatgaggaacttcttcctcgaaggttggttgcaccacaggtcaaccagttagttcaggtagctaaaaaatgtcaaagtacaattgctgaaagtggttcgatggggtttctcaacaagacatccaaacaaacagcaaca

SEQ ID NO: 189447 - DNA, 258 bp, Glycine max
ctcccttgtatattgttgcagctctagctagggtttcgcaagtgcgatccaagaagaacaacgacgatggcgatggctgcagctctgcgtcgcgaaggaaggcgtttgacccaaccaatcaacgccctccactcttctctcaattcctccctcatctctcaagaccaagcccctcatggcgcgcgctccatttccactcaagttgtgagttaccgatgaagagtgtgaggaatatccagaagatcaccaaggccatga

SEQ ID NO: 189448 - DNA, 262 bp, Glycine max
ggttctgatcttctttgttttgttttgtctggttccctttcttccttcaaccaattttgacatccgaaaccggcatcagatccgattcgaaatgtacggattcgaagctctcaccttcaacatccacggcggcttcctcgaggccatcgtccgcggccaccgcgccggcctcctcaccaccgccgattacaacaacctctgccaatgcgaaaccctcgagacatcaagatgcacctctccgccaccgagtacggtccttact

SEQ ID NO: 189449 - DNA, 274 bp, Glycine max
gaagagcatcacttcgattctcaggcggatgcgggagcgtccaagacgtatcctcagcaggctggtaccattcgcaagaatggctacatcgtcatcaaatccaggccttgcaaggttgtagaggtctctacgtcaaagacaggcaagcatggacatgcaaagtgtcactttgttgcaattgatatttttaatgggaaaaagcttgaagatattgttccatcatcccacaactgtgatgttccacatgtgaatcgcactgactatcagcttattg

SEQ ID NO: 189450 - DNA, 261 bp, Glycine max
ctttgtggttagaattccggataacctaccacttgatgctgctgctcctctcctctgtgctgggatcactgtgtatacccctttgagatactatggacttgagaagcctggtctgaatcttggtgtggtcggtctgggtggacttggtcacatggctgtcaagtttgccagagctcttggagctaatgtcacagtgattagcacatctcctaacaagaagaagtgacccattgagaacataggagctgactcattcgtggt

SEQ ID NO: 189451 - DNA, 266 bp, Glycine max
ctcgagccgcgggtacggtttcgacttgtttcttcttcgtgtgacttctttctctccttcttccttttcagatctccgctgaggaatcctcggagaaggagttcgtactcacattggatcactctaactttcacgacactgtcagcaagcacgatttcatcgtcgtcgagttctacgccccatggtgtggtcactgtaagaagcttgctccggagtatgagaaagctgcttctatcttgagtagtcatgatcctcctattgttttg

SEQ ID NO: 189452 - DNA, 264 bp, Glycine max
gcgcttcaacggcaaccagaagcagccatggccactgcaaggactgtgaaggatgtttcacctcatgagttcgttaaggcgtactcctctcacctcaagcgatccggcaagatggagctgccagagtggactgatattgtgaaaactgcaagatttaaggagttggctccttatgatcctgactggtactatgtcagagctgcttccatggcaagaaagatctacttgagaggaggacttggtgttggtgcctttcagaggatt

SEQ ID NO: 189453 - DNA, 271 bp, Glycine max
tgctcactgcaacaacaacaacaacaacaacgaacgccaacgcaaacgcaaacgcgaataagagcgagaacattctcttcagctcaacccttttctttttcgatggctaatcggcacacgattattctaatgcagacctcgcagaacagagcaactaggacgttcatggattatgaatccataactcaggccatggatggcatatgtgcactgtatgaaaggaaactgaaggagttgaatccggctatcagaaatctctcttatgacatta

SEQ ID NO: 189454 - DNA, 270 bp, Glycine max
aagaggatatatgatatggtcattgttggacaactttgaatggacaagtggctatgacataagatttgggctatattatgtggacagaggcactcttgaacgaattcctaaactttctgttcaatggttttctagtttcctcaacaacagtagccaccccaacataacagaacacttgagcaagcaacatattgaaagcaaagatgtgagaaatgttggttttgattttatttgaactatcccgtcaaacacggttaacattttcttact

SEQ ID NO: 189455 - DNA, 206 bp, Glycine max
  unsure (1)..(206): unsure at all n locations
cagggaaccccccacgtcagatccgatgcctccgatcatcgttacaaggacggagactccgttcctctgtacgccgacaaagtcggtccctttcacaaccccagtgaaacgnatcggtactttgacctgccattctgtgtaacaggtcatgagaaagataagactgaagccctcggtgaggtgttaaatggcgatcgtcttgttag

SEQ ID NO: 189456 - DNA, 233 bp, Glycine max
gttgaagccgtttgcaaccaatcattagtgctgtgtatcagagatctggaggagccccaggcggtggtggtgcatcaggcgaagaagacgaggacgattctcacgatgagctctagattagtcggagtctgttaaatttttatgatagctgggaattaagaagttcccctcgcgcttggcgttttttgagtgggcgatcgatgaagagtacttgtgtggaaattgacttggta

SEQ ID NO: 189457 - DNA, 265 bp, Glycine max
ggaggaggctcgggactctgaccgcgtgcctgttgaagaatgagccggcgactcataggcagtggcttggttaagggaaaccaacggagccgtagcgaaagcgagtcttcacagggcaattgtcactgcttatggacccgaacctgggtgatctatccatgaccaggatgaagcttgggtgaaactaagtggaggtccgaaccgactgatgttgaagaatcagcggatgagttgtggttaggggtgaaatgccactcgaacccag

SEQ ID NO: 189458 - DNA, 267 bp, Glycine max
gttgaagccgtttgcaacccaatcattagtgctgtgtatcagagatctggaggagccccaggcggtggtggtgcatcaggcgaagaagacgaggacgattctcacgatgagctctagattagtcggagtctgttaaatttttatgatagctgggaattaagaagtcccctgcgcttgcttttttggtggcgatgataagatactttgtgaaattacttgtactttacttttttgcttagttttacgacgaaacttcttcagctgtat

SEQ ID NO: 189459 - DNA, 268 bp, Glycine max
gcagaggaaaaggggaagacaaatgttgagtgcgacggcgatcggcgcgttattgggtttgggaacccagatgtactccaatgctctccgcaaactcccctacatgcgccatccgtgggagcacgtggtcggaatggggttgggcgcggtgtttgtgaaccagcttctgaaatgggaggcccaagtggagcaagacctcgacaagatgctcgaaaaggccaaggccgccaacgaaagacgttatatagatggagatgatgattaatgc

SEQ ID NO: 189460 - DNA, 288 bp, Glycine max
tcggaattcgctcgagggggaattcaagcactttgtaattgttaagttcaaggaaggtgtggccgttgacgagctcacaaaagggatggaaaagttggtcacggagattggtgctgtcaagtcctttgaatggggacaagacattgaaagcctagatgtgttgagacaaggtttcactcatgcattcttgatgacattcaacaagaaagaagactttgttgcatttcagagccacccaaatcatgtcgagttctcgacaaagttttcggcagctattgagaatattgt

SEQ ID NO: 189461 - DNA, 270 bp, Glycine max
ttttaacttcctctttctacatttcattcaaaacaatcatggcttctcttcattccattacattttcaacaaaaactgtcctttatgtatttgtattggcctcttccatcgcagcctctgctggcaacttctaccaggattttgacgtaacttggggagatggtcgtgccaagatactcaacaacggcgatcttctcactctttcccttgacaaagcctctggctcggggtttcagtccaaaaacgagtatctctttggcaagattgata

SEQ ID NO: 189462 - DNA, 266 bp, Glycine max
  unsure (1)..(266): unsure at all n locations
ggaaggggtgtaacggctccttcttccgcgcgtttgacatggacgacaatggggacgagtgcatggatgagtactttcataaacccgagaagaagcgtcgtctctccatgaaccaggttcagtttctggagaagagtttcgaggaggagaanaagcttgaaccggaganaaagaccaagcttgcnaaagaccttggtttgcggccacggcaattgctatttggttccagaaccgtncgagctcgctggaagaccaagacgctggag

SEQ ID NO: 189463 - DNA, 266 bp, Glycine max
caggacttggagggatccccctgtgggttgcaccgccgaccgaccctgatcttctgtgaagggttcgagtgagagcatacctgtcgggacccgaaagatggtgaactatgcctgagcggggcgaagcagaggaaactctcgtggaggcccgcagcgatactgacgtgcaaatcgttcgtctgacttgggtataggggcgaaagactaatcgaaccgtctagtagctggttccctccgaagtttccctcaggatagctggagcccgc

SEQ ID NO: 189464 - DNA, 264 bp, Glycine max
gggatcatccacaagattgaggagaccctccatgtgggagggcacaagaaagaggagcacaaaggagaacaccatggtgagcacaaaggtgaacacaaaggagaacaccatggtgagcacaaaggtgaacacaaaggagaacaacaccatggggagcacaaggagggacttgtggataagatcaaggacaagatccatggtgatggccatgacaagggtgagaaaaagaagaagaaggacaagaagaagaaggagcatggacat

SEQ ID NO: 189465 - DNA, 261 bp, Glycine max
attctattctaagattttgagaatgtctagctgtgggtgtggaagcagctgcaactgtggcagcaactgcggttgcaacaagtactcttttgacttgagttacgttgagaagacaaccacagagactctagttttgggtgttgggcctgtgaaggcccaattcggagggtgctgaaatgggtgttgcatctgagaacggtggctgcaactgtggatcaagctgcacctgtgacccatgcaactgcaagtaaggtcaagatg

SEQ ID NO: 189466 - DNA, 263 bp, Glycine max
attctattctaagattttgagaatgtctagctgtgggtgtggaagcagctgcaactgtggcagcaactgcggttgcaacaagtactcttttgacttgagttacgttgagaagacaaccacagagactctagttttgggtgttgggcctgtgaaggcccaattgcgagggtgctgaaatgggtgttgcatctgagaacggtggctgcaactgtggatcaagctgcacctgtgacccatgcaactgcaagtaaggtcaagatgta

SEQ ID NO: 189467 - DNA, 263 bp, Glycine max
atgggtgatgttttgacttataggcatgaattaggaatgaactataatttcatccgtccagacttgattgtgggatcatgccttcagactcctgaagatgtagacaagttgcgtagaattggagtgaaaactatattttgcttacaacaagattcagaccttgaatattttggagttgatattaatgccatacgagaatatgccaagacatgcaatgacattcaacacttgcgtgctgagataagggactttgatgcatttga

SEQ ID NO: 189468 - DNA, 268 bp, Glycine max
ccacaacacaaattaaagttagtgagacgtacccttattatggccaaagaaggtcttggacttgaaatcactgagctaaggttgggtctacctgatgcggagatcaagtaagtgtagtcaataagaaaaatgagaagaagagggcattctcggaaattgatgatggtgttggagatgaaaatagctcctccggcggaggcgaccggaaaatggagacgaataagagtcaagtggtggggtggcctccggtgtgctcttaccggaagaa

SEQ ID NO: 189469 - DNA, 238 bp, Glycine max
  unsure (1)..(238): unsure at all n locations
atttccttcaaagtgaagacggcttgcatgtgantggaacacaatgtgttanancttttggggatgagcagcttgcagtggatttgctagctaatcagcttctttttgaggccttaaattactctcatttctgcaagtatgcttgctctgangaaaatcctgagctcttggacatggcnnnnncagttgaaggtggatttantgttgcntttgatgcccctgatggctccaacantgt

SEQ ID NO: 189470 - DNA, 259 bp, Glycine max
ataaatctagctccaattcctaatcacctggttaatttcttcacatagagctatacagatccaacgttaacatgaagaatgttttagtaaggtcagctgcgtgagctctgcttggcggcggtgggcggagtactaccgccagctctcaacggcggcgatcgtggaacagagacaccagcacggtggcggcgcgtttggaagcttccacgtgcggaggatgtccactcttccagaggtaaaggatcagcactcagaggag

SEQ ID NO: 189471 - DNA, 252 bp, Glycine max
gtatatgctagctattactgggtatcatctcagtttcataagacatgccaagtatttacttagttctacagaagtgcacttctctatttggcatacacatcagtggaatctctctcagattcattcaagctggatctggcattgattggtccctctctgcccttcttggggataacatctacaactttggagagctacttgcccatcctataattaatatccttgctgggacaaaagtggaatggctttact

SEQ ID NO: 189472 - DNA, 265 bp, Glycine max
gcgccgtctccgatctccgacaatggcgacccaaatgagcaagaagagaaagttcgtagctgatggagtgttcttcgctgaactgaacgaggttctgacaagagagttggccgaggacggttactccggcgtggaagttagggttacgccgatgcgcaccgaaatcataattagagccaccagaacccaagctgttctcggtgagaagggaaggagaataagggaacttacctctgtggttcagaagaggttcaagtttcccgag

SEQ ID NO: 189473 - DNA, 267 bp, Glycine max
gccgcattccaggagggtaaaagtcaaggtcaaggttcagaaggaggttctgaatggagcaatactcgaacagtcttatcccgtcgagtatgttcaacaagaacatatgtgtgaatcctgttctagggtccaagctaatcctgaccagtgggttgctgctgtgcaactcaggcaacacgtttctcacaggcgtactttcttttatttggagcagctgattctgaagcatggtgctgctgccactgctatacgaatcaagcagatgga

SEQ ID NO: 189474 - DNA, 268 bp, Glycine max
gtgggagataaagttgcctatgcacttcaacaaggtctaaaagttattgcatgcattggggagactctcgaacagcgtgaagctggtacaacaacggctgttgtttctgagcaaacaaaagcaattgcagctaaaatatcaaattgggacaatgtcgttttggcctacgagccagtttgggccattggaacaggaaaggttgctactcctgctcaggctcaagaggtccatgctgatttgaggaaatgggttcatgacaatgtgagtg

SEQ ID NO: 189475 - DNA, 264 bp, Glycine max
cggtattaccaggggggttatgcaaattatcaagataatggtgggtattcaaaccggggacgaggtggtgggcgaggtagaggttgggggtatcgtggtactggttatgatggtggcaggggtggaggttcagggtatgaaggtggcagaggtggaggtggttatgaaggtggcagaggtggaggtggttatgaaggtggcagaaggagtggctatgaaggtggcagaggtggtggttatgaaagaggcagaggaggaaggggt

SEQ ID NO: 189476 - DNA, 263 bp, Glycine max
ctcatggcttcagattccaaaaaggatttccctgctgatgacaaagctggaacagcagagaataaagcatccaaagatgaaacgtcatctaaagattctccagcagcacaaagagctactacagctacttctggacctgcaactggttttccaggcaacccttttgatttctctgcaatgtctggcctgctcaatgatccaagtatcaaggaattggctgaacagatagcaaaagatccatcattcaaccagatggctgagca

SEQ ID NO: 189477 - DNA, 261 bp, Glycine max
aatgactcaagcccagattcaaccagttaaacttggaacccaaggctttgcggtttcaaaattggtcctcggatgtatgggccttactggagcgtacaatgaccctctccaagaacaggatggcatatctgttatcaagtatgcgttcagtaagggaatcacattttttgatactgcggatgtttatggagccaatgctaatgaacttttggttggataggctttgaagcagctgcccagagaaaagattcagatagccac

SEQ ID NO: 189478 - DNA, 255 bp, Glycine max
ctcaaccctgataggctgggtgagctcaaagcatttgatgacacaaaagctggtgtgaaaggccttgttgatgaaggggtcgcaaagatcccaagattatttcatcatccacctgatgaatttgtcagggcttcaaagttaggcaacacagaatacactatacctgttatagaccttgaagaagttggcaaagatccaagttcacgccaagaaattataggcagaataagggaagcatctgagagatggggtttc

SEQ ID NO: 189479 - DNA, 264 bp, Glycine max
cctcgagccgaatcggtcgaggctggaccctccggctcctccgatacaggggtaggagtgaattggctctgcatgagccctaagcgagatcacaaccccgaaaactatgacgaccttcaattcgagttcaatcctaatctcttcgcctctctcgagcactatttgcctcctcatatgctcaacctctcacgcgatgttaagcttcactacatcaggaacattcttcttcgctatttgcctgagaatgaccgcaactggattcaa

SEQ ID NO: 189480 - DNA, 265 bp, Glycine max
catcgagccgattcggctcgaggtcaggctcgtatcttctctgattccatcctcccttcgtagatctcaatcgaagccctcaaattccgcatcgacatcgaggctcacgtcatccaaccgtgcctcaccgcacggatacttgctgaaccgcgtcgccgagtacgccaccgccgcggctgctgctaccgctcctccctctcctcctcctccggggaagaaggagctcggcggcggcgggaagatcaccgatgaattcaccgggaag

SEQ ID NO: 189481 - DNA, 264 bp, Glycine max
ctcgagccggtttgtccatggtggaacgggccttgcttatttgaggcacttgacgctattgaagttccactgcgagatcccaaaggtcctttcaggatgcctattattgacaaattcaaagacatgggaactgttgttatgggcaaagttgaatctggcagtgttcgtgagggagattccttgttggtcatgccaaataaggatcaagtgaaagttgttgccatctttattgatgaagatcgtgttaaacgtgctggacctggt

SEQ ID NO: 189482 - DNA, 266 bp, Glycine max
ctcgagccgcttgtatacgtcgccgcttcagcgtagaacatgatcattcccgagaagaaccgtaaagagatctgcaaatacctcttccaagagggagtttgctttgcgaagaaggacttcaatctggcgaacacccggagattgatgtgccgaatctgcaggtgataaagctgatgcagagcttcaaatccagagagtacgtgagggaaacatttgcgtggatgcactattactggttcctcaccaacgatggaattgagttcctt

SEQ ID NO: 189483 - DNA, 261 bp, Glycine max
gatgaattaaacctcatctcgaagaaagtgaattcaggtagtgttggaggttgtgatgtccaacatgatgttccagcagtgttcttctctaatgggggctacactggcaatgtttatcacgaattcaatgatggaatcgtacccttatacattacttctcagcatttcaagaagaaggttgtgtttgtgattcttgagtatcataattggtggatcatgaagtatggagatatcctttctcgcctatcggattttccgcca

SEQ ID NO: 189484 - DNA, 262 bp, Glycine max
caagaccttaaggaattccgacaatggggaagcagaactcctggacatcctgagaactttgagacccttggagttgaagtgaccacaggtcctcttggtcagggcattgccaatgctgttggattagcactagctgagaagcacttggctgcacgatttaacaagcctgacaatgagattgttgaccattacacatatgttatattgggtgatggttgtcaaatggagggaatttcaaatgaagcatgctcacttgccggtc

SEQ ID NO: 189485 - DNA, 264 bp, Glycine max; identical to SEQ ID NO: 120875

SEQ ID NO: 189486 - DNA, 262 bp, Glycine max
ggttgacgaacagatgatcaatgttcagaacaagaactcatcatactttgtggaatggatccccaacaatgtgaaatccactgtctgtgatatccctccaactggtttgaaaatggcatcaaccttcattggcaactctacctctattcaagaaatgttcaggagggtgagtgagcaattcacagctatgttccgcagaaaggccttcttgcattggtacactggagaaggtatggatgaaatggagtttactgaagctgag

SEQ ID NO: 189487 - DNA, 263 bp, Glycine max
attatatttgcagtggagaaggaaagaatatctatctctcattctctcgtgcctcaacgcttttttaactcctttcgcttttccattccaacctctttcacacttcagatctgtttcttcatcggttgttcaagtaaatagcctttatcaccactgctgaagtgtgtgatgcgaacccacagttaattttgagtggggagcttcgtgcccttcagccagtttttcagatttatggccgtcgacaggttttctctggacctata

SEQ ID NO: 189488 - DNA, 266 bp, Glycine max
gcaactacatcagtccatggcaacccccaaccctaccagattctcccttgccatggagagaaccgggcaatgggttttctccccagaaatcccaaccgatgttattgttgcagttggagaatccactttttctctccataagtttattctggcggctaagagtaactacatcagaaaagtgataatggaatcagaggagagtgacctaacaagaatagagatttccaacatacctggaggacaagaagcttttgagaaagccgcga

SEQ ID NO: 189489 - DNA, 255 bp, Glycine max
tcttgaatcttcgttatccttctttttgtctccttgaactcgagtattcactatagcagatgaggtggttctggtaggattccgggcaagtccatttggggattagggtcaggtttcaccttgtggaaaggggagtcaattatgattccaagcaggaggctttgaggaccaagagcctttgctcctcagaatgaacccggttcacaagaaaatcccggttctcatccacaatggcagacccatttgtgaatctct

SEQ ID NO: 189490 - DNA, 177 bp, Glycine max
gcgcttcaacggcaaccagcagcagccatggccactgcaaggactgttaaggatgtttcacctcaatgagttcgttaaggggtactcctctcacctccagcgatccggcaagatggagatgccaaagtggactgatattgtgaaaactgcaagatttaaggagttcgctccttatga

SEQ ID NO: 189491 - DNA, 249 bp, Glycine max
ctcctatctatctttaaggaaattgcttcttcgggctggttgttctaaatctgcttcgtccaagatcggaacttacaattgctttgcttctcagtcctcccctctaccgagccacaaccctagttaccggtaaaggtttattcgaaggcacgaaagcatacagaaaagaaaatgggggcttgctactcttccgtccagaagaaaatgccattcgcatgaagactggtgcccaaagaatgtgcatggcat

SEQ ID NO: 189492 - DNA, 199 bp, Glycine max
ttcggctctaggagactatgtggagctcgttgccgttaccgaccctttcgataccaccggttgactgacatagaagggttcatactcccggttcacggacactggaaccctcacgatgtcacgttaagggccatcagaccttctctcggtgacaagccagtcacgcttttggacagagagccctggagcctcccagggg

SEQ ID NO: 189493 - DNA, 253 bp, Glycine max
ggaagatgtgacgcttttgggagttgttggaagcccgtttgtgtgcagggtccagattgccctcaaattgaagggaattgaatgcaaatttatggaagaaaatttggcaaacaagagtgatctacatctcaaatccaaccccgtttacaagaaggttccagtgtttattcataatgagaagcccatagcagagtctcttgtgattgttgagtacattgatgagacatggaagaacaaccccatcttgccttct

SEQ ID NO: 189494 - DNA, 257 bp, Glycine max
gcgaggataaagatggaggggaaggagcaggatgtgtcgttgggagcgaacaagttccccgagagacagccaattgggacggcggcgcagagccaagacgacggcaaggactaccaggagccggcgccggcgccgctggttgacccgacggagtttacgtcatggtcgttttacagagcagggatagcagagtttgtggccacttttctgtttctctacatcactgtcttaaccgttatgggagtcaccggggctaa

SEQ ID NO: 189495 - DNA, 260 bp, Glycine max
gtacggttagagaagggaaggtgagtagtaatggtcatggatgttgcaaatcagggccaggctatgcttccccactggaagccattactggtcccagagagtctctcatttatgtaacctctgtctacacagggaccggatctgagaagccagactatttggcgacagtggatgtggatccaaactctccaacttattccaaagtcatccataggcatcctgttccttatttagggtgacgaattgcatcacacaggctg

SEQ ID NO: 189496 - DNA, 263 bp, Glycine max
atcactgccactcttcaatcacactaatggctgtcaccttctcagatcctcacaccgaagagggtatcaaatccctcgatcaattcctttctgggaaaacctatatctctggggatcaattgacaaaggatgatatcaaagtgtatgcagctgttgtggaaaagccaggagactcttttcctaatgctgctcagtggtacgatgccgtctcttctcaacttgctccaagcttccctgggcacgctcaaggggtaagattcagt

SEQ ID NO: 189497 - DNA, 258 bp, Glycine max
gtttgagggcatcagagatagcgaagaagttgaatctgcaacctcacccagaaggtgggttttacgtggagacattccgagaccattccgtccagctttcgacctctcagctcccccccgaatacaaagtggatcgccctgtatcgacctccatctattttctcgttccttctgggagtgtgtctcgcctccatcgcataccctgcgccgaaacctggcatcattacatcggcgaccctctcaccgtatgtatatctt

SEQ ID NO: 189498 - DNA, 228 bp, Glycine max
gttgactcggttccgtttgttcattctcgcggatctaatattaaggaatagcttaagggcacattacaatgaaggcattgattctggttgggggatttggaacaaggctgaggccactgacactcagtttccctaagcctcttgttgattttgctaacaagcctatgattgtgcatcagatagaagcacttaaggccattggagtgactgatgtagtgctagtcatca

SEQ ID NO: 189499 - DNA, 235 bp, Glycine max
gttgtgattgtgtctgtatgttctctcacctgaaaatgtactgctgcggtggaactgtcgttgcgagaagcgcctgcaagtgcggcaacggctgcggaggctgcaagatgtacccagacttgagctacaccgagtcaaccaccaccgagaccttggtcatgggagtggcaccagttaaggctcaattcgagagtgctgaaatgggtgttcccgctgagaacgatggctgcaaatg

SEQ ID NO: 189500 - DNA, 262 bp, Glycine max
gcacgccctatgctggccttcgggtgtggatatgatcaaacgcatcatggtcaaaatcccccaccttccacagctggggttcttggccttggaaatggcagaacaagcattttgtctcagcttcactctcttggcctaattcgcaatgttgtaggccactgcttaagtgggagaggaggaggctttttattctttggagatcaactcattcccccatctggagttgtttggacacccttattgcagagttcctccgcacaac

SEQ ID NO: 189501 - DNA, 254 bp, Glycine max
caacatgccaattggtctccttacgataacaacggaggatcatgtgttgcgattgctggagcagattactgcgttatcgccgcagatacgagaatgtccaccggttacaacatcctcactcgcgattactccataatctcccaactggctgagaagtgtgtgatggcttcatctggctttcaagctgatgtcaaagctttgcagaaggttttgtctgctaggcatttgatttatcagcatcaacacaacaagca

SEQ ID NO: 189502 - DNA, 212 bp, Glycine max
ctcgaagattcactatggcagatgatgtggttctgctagatttatggacaagtccatttggggataagcggtcaggattgcagttgctgaaaagggtatcaaatatgagtccaaagacgaggacttccaggacaagagccctttgctcctcagaatgaacccggttcacaagaaaatcccggttctcatccacaatggcaaacccatttgtg

SEQ ID NO: 189503 - DNA, 227 bp, Glycine max
tgtcaatgttgtctctcagaagacgacatagattggacaaaggacatggggtatgatgaaaggggtcatggcattggcttcacagaaggttgaagtattcgctagatataacccgaattggacgtctgataactggcaacgaaatgaaagtgatagaaatggtttctaccaggagttcaatcgagagaataatggccgggattcttctagcatcggaggccaacatt

SEQ ID NO: 189504 - DNA, 200 bp, Glycine max
  unsure (1)..(200): unsure at all n locations
atataacattccgaaatatctctttgttgttcgtttcagcaacaaagacattgttgcacaaataatatctgctagcattgcaggcgatattgttcatgctgcagcatatgcacatgagctgccacgatatggtcatgaagtagggcttacanattatgctgcagcttattccactgaatagtcacaaaagtagcatcaca

SEQ ID NO: 189505 - DNA, 255 bp, Glycine max
gttcccttgtgacttgcgcttagaacttcccagaaagccgtggggttgtgctgggcatcctcgaaggctacgttggtctcagtggagccatcattacacaactctactttactttttgctacgacgattcaaggtccttgattttgctcatagggtggctcccagctggtatttgcttccatttccatcgtggcattcgcatcatgttacccgttcgttagcccaatgagctcagtgtattctagaagtttttgt

SEQ ID NO: 189506 - DNA, 250 bp, Glycine max
ggcaaccagaagcagccatggccactgcaaggactgtgaaggatgtttcacctcatgagttcgttaaggcgtactcctctcacctcaagcgatccggcaagatggagctgccagagtggactgatattgtgaaaactgcaagatttaaggagttggctccttatgatcctgactggtactatgtacaagctgcttccatggcaagaaagatctacttgagaggaggacttggtgttggtgcctttcagag

SEQ ID NO: 189507 - DNA, 247 bp, Glycine max
gtttatcgtgaggagaatatgaagttgtttgtattctttgttgctgcagtagttttggtagcatggccatgccatggcgcaggctaccaaaggttccctctccgaatgaaaactggctatggtgagcgttcttcggaggtaaaatgcgcaagttttaggcttgctgtggaagcacacaacatccgagcatttaaaaccattcctgaagagtgcgttgaaccaacaaaggactacattaatggcgaac

SEQ ID NO: 189508 - DNA, 238 bp, Glycine max
atgaccactctcccctcccatggtggttggtggagtccctaaatgcagtgaagtacatagactcatgccacttctcagtacctcaaggcaagagagcagtggagctaatagcaggcaaagagagtgccattgcccaagtggctagaaccatccctggcaaaacctatgtgctctcattctctgttggggatgcaagcaactcatgtgaagggtccatgtttgtggaagcctttgcagg

SEQ ID NO: 189509 - DNA, 254 bp, Glycine max
atgaagtgaatgcgacccctgaaattcctcaaagcaacaccatctacatcaacaacctcaacgagaaaattaagattgatgagttgaagaagtctctgaacgctgttttcactcagttcgggaagatacttgaggtgttagctttcaaaaccctaaagcacaaaggtcaagcttgggtggtctttgaagatgcctcttctgcttccaacgccctaagggaaatgcaaggtttccccttctatgataagcccatg

SEQ ID NO: 189510 - DNA, 245 bp, Glycine max
caggcatggaaatctgcagtcactgaggaccctcttaagattttatcaagttggattggtcccaatgtgtgtgcttacaaaggagtcttctgtgctgcaaaccctcaagatgaaacggttggtgcatcagcagcattcccagttgtagtagcaggcatagatctcaaccatgcaaatctgaaaggaactcttgtgaaggagctctctctactcagtgatttgtcccttctccacctcaacagtaa

SEQ ID NO: 189511 - DNA, 251 bp, Glycine max
gcacgctctgcttccagcgagtgttctttcttcgtttcaacaccttaatttgcatacgctgcttcttcaccttgagaaatggcacaagaaacctttctattcacatctgaatctgtaaacgagggtcaccccgacaagctgtgcgaccagatctctgatgcagtgctcgatgcgtgccttgaacaggaccctgacagcaaggttgcctgtgagacatgcaccaagaccaacatggtcatggtcattggaga

SEQ ID NO: 189512 - DNA, 249 bp, Glycine max
ctcgagccggttctttcgtcgtcgtcacaagtcacaactcgcaaaccacaatgcctaagcagatccacgagattaaggattttattctgacggcgcggaggaaggatgcgaggtcggtgaaaatcaagaggagcagggatgtcgttaagtttaaggttcgatgctccaagtacttgtacacgctttgtgtctttgaccctgagaaagccgataagttgaagcaatctcttcctcccggtttgagtgttc

SEQ ID NO: 189513 - DNA, 246 bp, Glycine max
atggggtcaacccaagtccaagattacccatctcatcttttgcaccactagtggtgtcgacatgcctggtgctgattatcagctcactaaactattaggccttcgcccctccgtcaagcgttacatgatgtaccaacaaggctgctttgccggtggcacggtgcttcgtttggccaaagacctcgctgaaaacaacaagggtgctcgcgtgcttgtcgtttgttctgagatcaccgcagtcacatt

SEQ ID NO: 189514 - DNA, 246 bp, Glycine max
cactcgagccgattcggctcgaggcagaatcaattttctctctcaatcacctttcatggctcgtaccaagcaaaccgctcgcaaatccaccggtgggaaggctcctaggaagcaactcgccaccaaggctgcaagaaaatctgcacctaccaccggtggagtcaagaagcctcatcgctatcgtcctggaactgttgctcttcgtgagatccgaaaataccaaaagagcacagagcttctgatccg

SEQ ID NO: 189515 - DNA, 246 bp, Glycine max
agggcctggtggtgacccaataagaaatccaaaagtcttgccaacaggaaagaatattcatgccctggaccctcaatctattcctacaactgcagcgatgcagagtgccaaaatagtggtagataggttgattgagaggcagaaagctgagaatgggggaaaatatcctgagacaattgcacttgtattgtggggaactgataatattaaaacatatggtgaatccctggctcaagtcttgtggat

SEQ ID NO: 189516 - DNA, 250 bp, Glycine max
tgtccccgctgcgtctctcgtaatcatgcctaagcaaatccacgagattaaggatttccttctcactgccagaaggaaggatgcgaggtcagtgaagatcaagaggagcagagatgtggttaagttcaaggtcagatgctccaagtacctctacacactttgtgtgtttgacccagagaaagctgataaattgaagcaatctcttcctccaggtttgagtgttcaagacctgtaaaggtactgggcgaga

SEQ ID NO: 189517 - DNA, 284 bp, Glycine max
tcaccattcaccaacctgcttctctgttctcttctttcccttcccaagaagaagaagaagaagatgccttcttcagaatcatcaacaggcttctccgaaaccatttgtgtgaccggcgctggtggcttcatcgcctcttggatggtcaaactcctcttggagaaaggctacactgtccgaggaaccctcagaaacccagatgatcccaagaacgggcacttaaaagagtttgaaggagcttcccagagactaactctgcataaggttgacctccttcatcttga

SEQ ID NO: 189518 - DNA, 280 bp, Glycine max
attcttcgtttgtctaagatccgccttctctgaattgtaaaaatgtcgctcggagaaactgcttgttcatacgcagctctcatccttcatgaagatggaatcagtgtaactgccgacaagatcagcaccttgttggaaactgcaaaggttcaagtagatacctattggccaaccttatttgctaaacttgctgagaagaaaaatcttggcgatttgatagccaatgcagcaggcggtggtgcaccagttgctgttgcagctgcccctgttgctgcctcag

SEQ ID NO: 189519 - DNA, 278 bp, Glycine max
ggcttctgtgcctcaaccaaaaatctcccttctaaccttattcttcttctcttccttcaccatcattgcgcatgcaattgttcctcaaaacgaaaccttcaaatttgagaactcaggtgaacttggaccctacatcgttgagtacggtgcagattacagaatgataagcatcttcaactctccattccaagttggtttctacaacaccaccccaaatgccttcactctagctttgcgtgtagggctccaacgctcggagcagctatttcgttgggttt

SEQ ID NO: 189520 - DNA, 276 bp, Glycine max
cttctctctttctctctccttttccctcaagctcagaatctcccgaatcttgttaaaaagaagaaggatgtcaagcggagcaacacactggtgtcatgcatgcagacagccagttgtgcttgatgggagagatgctgtttgcccttactgcgatggaggatttgtacaagaacttgatgagttggaaggaattgcaccccaccataccttttgctcacaatcaggaggagtatatcaaatgcctgacattttcgatgctatacctgcttttatggg

SEQ ID NO: 189521 - DNA, 276 bp, Glycine max
cttttagcaagttaacaacacttttgtcttcgttccattatctacttctcaattctcttcaccctttgcctctgaaagaaatgggtagtcttgaagcggaaagaacaacagtaggattggcagcaagagacccttcagggattctctccccatacacctacaatctaagaaacacaggccctgatgatgtttacattaaagttcactactgtggagtttgccattctgatctccaccagattaaaaatgatcttggcatgtccaactatcccatgg

SEQ ID NO: 189522 - DNA, 275 bp, Glycine max
gccgtcttcacctggaagggtgagaccctccaggagtactggtggtgcaccgagcgcgccctcgactggggccccggtggtggacccgacctcatcgtcgacgacggtggtgacgctacccttctcatccacgaaggcgtcaaggccgaggagctctatgagaagaccggcgaactccccgaccccaactccaccgacaacgccgagtttcagatcgtgcttaccatcatcagagatgggttgaagaccgatcccaccaggtaccgcaagatgaa

SEQ ID NO: 189523 - DNA, 276 bp, Glycine max
actcaagccgaacaaccttctttctttttctgtgagcctttctttcaggttcttaacttgatcagtgtgcagtgtccaaatcataagggtagttgcaaattgcaatggctaagcatgatgttgagggtggttccttctctgcaaaggactaccatgatcctcctccagcaccgttgattgatgctgaggaactcacacagtggtccttctacagggctttgattgctgagttcattgccacaatgctcttcctttacatcacagtgctcactgtga

SEQ ID NO: 189524 - DNA, 274 bp, Glycine max
gcagatccacgagattaaggattttcttctgacggcgcggaggaaggatgcgaggtcggtgaaaatcaagaggagcagggatgtcgttaagtttaaggttcgatgctccaagtacttgtacacgctttgtgtctttgaccctgagaaagccgataagttgaagcaatctcttcctcccggtttgagtgttcaagacctgtagagctgttgagtgtggcagcatgcgtttgtttctctttttgttacctgatgctctagattttgtggcttggtt

SEQ ID NO: 189525 - DNA, 277 bp, Glycine max
gaaggtctccgcctccgccgagatcgaggagctgaccgtggaggagcgcaacctcctctccgtcgcctacaagaacgtaatctgcgctcgccgcgcctcctggcgcatcatctcctccattgagcagaaggaggagagccgcggcaacgaggaccacgtcgccgtcatccgtgactaccgctccaagatcgaggccgagctctccaacatctgcgacggaatcctcaagctcctcgacacgcgcctcgtcccctccgccgcctccggcgactccaag

SEQ ID NO: 189526 - DNA, 278 bp, Glycine max
cagaatcaattttctctctcaatcgtctttcatggctcgtaccaagcaaaccgctcgcaaatccaccggtgggaaggctcctaggaagcaactcgccaccaaggctgcaagaaaatctgcacctaccaccggtggagtcaagaagcctcatcgctatcgtcctggaactgttgctcttcgtgagatccgaaaataccaaaagagcacagagcttctgatccgcaagctcccctttcagcgtcttgttcgtgaaatcgcgcaagacttcaagactgatt

SEQ ID NO: 189527 - DNA, 275 bp, Glycine max
gagcgattcggctcagaaggcgaactcaaattggttaaacaaacttatcaatgaagcgaatggatgtcaatgtgtatgcttggggccccaaatcaaaaggggtgacccctctccaccttgctgccgaaggtggtcacattggagtgatggttgtactacttgagcgtggtgctgacattgatgccagaactaagggtgcctgtggctggacaccgctccacattgcagccaaggaaaggaggagggatgctgtgaaattcttgttagagaatgga

SEQ ID NO: 189528 - DNA, 292 bp, Glycine max
tcggaattcggaacgcggttcttatcacagaggaattaacatatatatagcaagcatggcagtcacactctacgaccttagctcttcctctgggttgaagaaacttgatgagtaccttctcccacgcagttacatcaccgggtaccaagctacaaaggatgatcttactgtttatgcagctttgccaactgctccatcagatgaatatggaaatgtttccaggtggtacaagcacattgatgctttgttgagaatctctggtgttactggcgagggatctggtgttattgtt

SEQ ID NO: 189529 - DNA, 275 bp, Glycine max
ccgtgctccgcaacgacgcgaacccataatcggagttggcataacagcagctcctactcattcacgcgggttgcacgtgtacacgctacccgatctggattacgactatggcgcactggagccagccatcagcggcgacatcatgcagctgcaccaccagaagcaccaccagacttacatcaccaactacaacaaggccctcgagcagctccaagacgccatcgccaagaaagattcctccgccgtcgttaagctccagggcgccatcaagttca

SEQ ID NO: 189530 - DNA, 272 bp, Glycine max
gtttggaatatatttttattccttctttgtttcttcactttcttccatacacataaccatgtcttctcagaccgttgtcctcaaagttggtatgtcatgtcaagggtgtgctggagctgtaaacagggttttggaaaaaatggaaggtgttgagtcatttgacattgatctgaaggagcagaaggtgacagtgaaaggaaatgtgcagccggacgaagttctgcaagccgtttccaaatccggaaagaagacggcattctgggtggatgaag

SEQ ID NO: 189531 - DNA, 277 bp, Glycine max
aagatctacgacgtgaagccggaaatcctgcgggccttcgccggcagcggcatctccgtgacggtgaccgcccccaacggcgacatcgccgccttaaccaaaatcgactcggcgaggcagtgggtggcgacgcacatcaaaccctttcaccctcagaccaaaaataattacatcctcgtcggcagcgaggttctccactggagcgacaccaacatgatccgcgagctcgtccctgccatgagaacccttcactcagccctcctagccgagggcataa

SEQ ID NO: 189532 - DNA, 273 bp, Glycine max
gcatctccaaggggaagaagggtggcaagaagaaggcagctgatccctttgccaagaaggattggtatgacattaaggctccttctgtttttcaagtgaaaaatgttggcaaaaccctcgtctctcgtactcagggtaccaagattgcttctgaaggactcaagcatagagtgtttgaggtctccttggctgatcttcaaggggatgaggatcatgcattcaagaagattaggttgagagctgaagatgtgcaagggaagaatgttctgacaa

SEQ ID NO: 189533 - DNA, 272 bp, Glycine max
cttatcgccaaatgtctcttctattacgaagaccacctggtcgcgaactatatccaggggatgttttttatttacattcacgtcttttggaaagagccgctaaattaagttctcagttaggcgaaggaagtatgactgctttaccaatagttgaaactcaatcgggagatgtttcagcttatattcctactaatgtaatttccattacagatggccaaatattcttatctgccgatctattcaatgctggaatcagacccgctattaatgta

SEQ ID NO: 189534 - DNA, 269 bp, Glycine max
ctcgagtcgctcgagccgatttttttggtatccattcatgggaatttccttagttttcatgctcgtctatgtttggagccgcgagtttccaaatgcacgaatcaacatttatggtgttgtatcattgaagggtttttaccttccatgggctttgctagctctggatttaatatttggagatcctataaagccagacattgtaggtatgattgcaggacatctatactacttcttaacagtgcttcaccctctcgcaggaggaaagttca

SEQ ID NO: 189535 - DNA, 271 bp, Glycine max
atgggcacggcggtatgggagcaatgctcgctgggggtgctgctgcggctgctgctgcttatggtgctcaccatgtctctcatggctcccatggctcctatggccaatatgcacatggtgctcacatgccacatggaaaattcaagcagcacgggcacggtaagttcaagcatggaaagcatggcaagttcggcaagcatggaaagcatggcaagttcggcaagcatggtggattcaagaagtggaagtgatgaatatgtatctatgactc

SEQ ID NO: 189536 - DNA, 273 bp, Glycine max
gggaacctacagtattagctactataatcattcctagtgagtatgtgggacctgttattacccttgtctctgagcgtaggggtcagcagttggagtactcattcatcgacagtcaacgggtattcatgaagtaccgcctgcctttgagagaaattgttgttgacttttataatgaattgaagagcataacatcaggctatgcatcatttgattatgaggactcagattatcaacaagctgatatggtgaaactggatattctcttgaatggac

SEQ ID NO: 189537 - DNA, 277 bp, Glycine max
gccacggacccacacagcatcgctgatacgttacgtagggagagaatcgccgagagaatgaaggccctacaagaactggttcccaatgccaacaagacagacaaggcatccatgctagatgagatcatcgattacgtgaagttcctgcagctccaagtcaaggttctgagcatgagcagattgggcggtgctgctgctgtcgctccccttgttgctgatatgtcctctgagggaggcggagactgcattcaagccaacggcaagagtaacggcggtg

SEQ ID NO: 189538 - DNA, 283 bp, Glycine max
gccctcactcttccctcttttctttctttcatccccaaatcaaaacctaaattcccaccttcaactttctcccccaaatcgaccaccaccactgtcaagcccattcatttatattttattcgtatatatacatacagagagtgagtgagagagagagtgggaagaatggattcggatcaaggcaagcttttcatcggtgggatttcatgggatacgacggaggacaagctcaaggagcatttcggtaactacggcgacgttttgagcacttccgtcatgcggg

SEQ ID NO: 189539 - DNA, 279 bp, Glycine max
aagatgccggctggtcatggtttgagatcccgcaccagagattccttctctcgtcctttcaggaagaagggaaccatcgccctcaccacatacctgagaacctaccacgtcggcgactatgttgacgtcaaggttaacggtgccgttcacaagggaatgccccacaaattctaccatggccgcaccggacgcgtctggaatgtcaccaaacgtgctgttggcgtcgaagtcaacaagcaggttggcaacagaattataaggaagaggattcatgtgcgg

SEQ ID NO: 189540 - DNA, 273 bp, Glycine max
ggacgccattgattctgtgttcgatccgttgagagaattcgcaaaggacagcgtgaggctcgtgaagcgctgccacaaacccgatcgcaaagaattctccaaggttgccgtgcgtaccgcaattggtttcgttgtgatgggattcgtgggtttcttcgtgaagcttattttcattccaattaacaacatcatcgtcggatctggttaggatgaagggtactacaatcgcctcaggaattcaggttgtcaagcaaaagtaggcagaaagagttc

SEQ ID NO: 189541 - DNA, 271 bp, Glycine max
gctttctttagttgagttaacagcatggagagggaggaagatgttaaggttggagcacagaaattctcagagaggcaagcattggggacaggagctcagggtgacaaggactacaaggaggcaccaccagcacccttgtttgagccaggggagttaaagtcatggtctttttacagagctgggattgcagagtttgtggccacattcttgttcctctacatcactgtcttgactgtcatgggtgtcaacagggcacccaacaagtgctcct

SEQ ID NO: 189542 - DNA, 268 bp, Glycine max
gctttggaagaaaaacagaagcaaaaaccttcatttgagctatctgtaaagcttgcatctgaaacaaatcgagttagaggtgttactttgttattcaatgaacccgcagaggctcgcaaaccagatattaaatggagactttatgttttcaaggctggtgaagtgctaaacgggaaagaagggttgctgatatccctacagatcatccatcttgcagcaagcaacatgctgttattcaattccggcaagtcgaaaaggagcaacctga

SEQ ID NO: 189543 - DNA, 273 bp, Glycine max
actcgagccgctcgagccgattcggctcgagattttctcttgcctcacctgcactccagatgctaatgctacgagtttgcacagcttgttcattgtctagccatgatggtcatcagattgtagagctatggacaaaaagaaacttcagatgtgattgtgggaactcaaaattcggtgaattctactgcaagattttcccaaataaagatgtagaaaatgttgagaattcatacaatcacaactttaaaggttcatattgcacatgtggtcgcc

SEQ ID NO: 189544 - DNA, 269 bp, Glycine max
gcaacacctagaagatttccttattctttttggtgctaaaccgttgggatatagcaacaacatgttaggaatgaagagacatagagataatgaagggtcagagagcttagatttggcaaaatgtcttgtgctgttctcttgtccaatagaaagcaacaaggcacaacagaaaggttttggggctgtggaatttgagtgcaagacgtgcagccgcaagttctcttcttttcaagcactgggagggcacagggcaagccacaagaggcaga

SEQ ID NO: 189545 - DNA, 270 bp, Glycine max
agaaggagcagagccgatgtggtagagcagttcctcccagaccacaatgaatccatttctgcagttcttgacaagtttggtgccatgggaattgacacccccggcgtagttgcattgcttggagcacacagtgttggtcgaacccattgtgtgaagttggtgcaccgtttgtacccagagattgatccagctctgaaccctgaccacgtccctcacattctgaagaagtgccctgatgccattccagaccctaaggccgtgcagtacgtg

SEQ ID NO: 189546 - DNA, 280 bp, Glycine max
  unsure (1)..(280): unsure at all n locations
gtcaccactcttncttcttcaatcaatggcagcaacctcaacatccctcttctcctcaaatctccattctctcaactcacaacctttctcttcctcactctccttcttcngaaatgtccattccaccctctctttcccttcttctaaaccctcccgtggcgttgtagccatggctggctctggcaagttctttgttggtggcaattggaagtgtaatgggaccaaagactccatcagaaagcttgtctctgacttgaacagtgcaacattggagtctgat

SEQ ID NO: 189547 - DNA, 273 bp, Glycine max
tggcggtcctgctgctatgatgaggtactggaataatgaggaggttttgcagaagttgggacaagccatgggtcttgccaattcgggagatgcaggtgcctctgctgaaaattctggggcagatgagaccgaagatttgggaaatgaagatgaatcaattgttcatcatactgctagtgttggtgatgtggagggcttgaaaaatgcactagcctctggtgctgacaaggatgaagaagattcagagggaagaactgctttgcattttgcctg

SEQ ID NO: 189548 - DNA, 271 bp, Glycine max
gaggggagattctttgtttgctaccttctctcggaaaaatggttacgttcaggtttcaccagtaccaggtggttgggagggctcttcccacggaagcagatcagcaccccaagatctaccgaatgaagctctgggccaccaacgaggttcgcgccaagtccaagttctggtattttctgaggaaactgaaaaaggtgaagaagagcaatggccaagtgcttgccatcaacgagatttttgagaagaacccaaccaaaattaagaactatgg

SEQ ID NO: 189549 - DNA, 267 bp, Glycine max
gtggattcagaggtagccgcgacggtggcggtcgcggcagaggtggttttggtcgcggcggaggtggttttggtcgcggatgaggtggttttggtcgcggcggcggatttaccgacgaaggaccaccctccgaagtcgtagaggtgtcatcatttatgcatgcatgcgagggagacgcagtgacaaagcttacaaatgagaaagttccctttttcaatgctcctatatatctgaaaaacatgactcagattggaaaagttgatgaaa

SEQ ID NO: 189550 - DNA, 269 bp, Glycine max
caagcctcaggtaagccaaaaccatggttaagcataacaatgttatcccaaacggacacttccgtaagcactggcagaactatgtgaagacttggttcaatcagccagcacggaagacaaggagacgattggctcgtcagaagaaagctgtgaagatattccccagacctacggctggacctctcaggcccattgtacatggtcaaactttgaaatacaacatgaaagtgagaggtggaaggggattttctcttgaagaactcaaggca

SEQ ID NO: 189551 - DNA, 268 bp, Glycine max
gaaaaatagcgtttattttaaactagaagactagaagattacgtatttgattatgcaaagcggtgcacaaattacataatccaaagtccaaaactcacactatatatataagcaggacctaggcttcttctttgcactgcaaatcacttttctactttgagtcttcttgatccttctttttctccttgaactcaaacatggcagatgaggtggttctgctagatttctggccaagtccatttgggatgagggtcaggattgcacttgc

SEQ ID NO: 189552 - DNA, 268 bp, Glycine max
atcaagatctctctctctgtaatcgaaaatgagcaagggaccgggtctctttaccgatatcggcaaaaaatccaaagatcttttgactaaggactacaactccgatcagaaactcaccatttcctcatacagcatctccggagtggccctcacttcaacatctgtcaagaaaggaggactctccactggggatgtggcagcactgtacaagtataagaacactattattgatgttaaactggacaccgcatcaactatctccacaacc

SEQ ID NO: 189553 - DNA, 267 bp, Glycine max
ggactgggctgtccatgccttcagaatcaccaatgttggtgtccaggataccacccagatccacactcacatgtgctactcgaacttcaacgacatcatccactccatcatcgacatggacgccgatgttatcaccattgagaactctcgctccgacgagaagcttctgtcagtcttccgcgaaggtgtgaagtatggtgctggaattggccctggtgtctatgacatccactccccaagaataccaccaactgaagaaattgctga

SEQ ID NO: 189554 - DNA, 269 bp, Glycine max
cagatatgtggtgcctctcctcattcagattatggcatgatcactctcctaatgactgatggtgttcctggactgcagatctgcaaggataaagtcaaccaacctcaagtctgggaggatgtgcctcatgtagaaggggccttaatagtgaacattggagacatgatggagaggtggacaaattgtttatacaggtcaacacttcacagggttatgccaacaggaaaagaacgttattccgtggcattcttctttgacccggcctcaga

SEQ ID NO: 189555 - DNA, 270 bp, Glycine max
gtttaaagtaagagagaagaaagaagcaaatggcaaactttccagttgttgacatggggaagcttaacaccgaagagagacctgcagccatggagattataaaagatgcctgtgagaactggggtttctttgagttggtgaaccatgggatatccattgagcttatggacacagtggagaagctcacaaaagagcattacaagaagactatggagcaaaggttcaaagaaatggtgaccagcaaaggtcttgagtcagttcagtcagaaa

SEQ ID NO: 189556 - DNA, 273 bp, Glycine max
agataatctcaacttaggatgttcttccagaagatcctaagttgcgattatcaaaagctagtattacacatcgaggaaagaatctgtacatgcaagctccccctgtattggaactaatgactcgatcaaacctgaatctatctctttttaatctcatgggtaaattgcccaaggatgttgtgcatgtgaatggtacaacaatcaagaacgaccaaaagttttcctgtttgagaaaattacgtgttgttttcaagggagttgacggggttacag

SEQ ID NO: 189557 - DNA, 261 bp, Glycine max
ctcgagccgatgggaattgcgcttcaaggcgtctcgtagggctaatccgcctcacgagggtcaccaacggcacgttcctttggggggccgaggccccctactgctggtcggcaaacggacggcgggcgcacgcgtcgcttctagcccggattctgacttagaggcgttcagtcataatccaacgcacggtagcttcgcgctactggcttttcaaccaagcgcgatgaccaattgtgcgaatcaacggttcctctcgtacta

SEQ ID NO: 189558 - DNA, 267 bp, Glycine max
gaagaactagtctaagcagaaatggcctcttcagtgatggcatctgtggccctcaaacctgcccctttcactgttgagaagtcctcagttagaggccttccctccctctcaaggaactcctcttcattcagagttgtggccagtggtggcaagaagatcaagactgacaagccttatggaattaatggtggcatggctttgagggaaggagttgatgcatctggcaggaaaggaaagggaaagggcgtttaccagtttgtagacaaa

SEQ ID NO: 189559 - DNA, 266 bp, Glycine max
gggagcaacaccatctttcattttccggcgatctcttgtttcttccatcatcaccgttttccggcgatccctaatcctcgcaaacagaaatgacgacatcaaggcgccttgcggacaggaaggtggagaagtttgagaagaacatcacaaaaagaggatttgtgccagacactaccactaagaagggaaaagactaccctgttggcccagtgctgctcggtttcttcgtctttgttgtcattggatcatctctcttccagataatc

SEQ ID NO: 189560 - DNA, 267 bp, Glycine max
gtgacagcaatctacgagcttctctctgcctgcctatcagatttaggtgaaaataacaagaaatactgccggaggagaaagggctacgatgctcgacaacgtgtcactctacgcctgctggcaacttggcttgatatcaagtgggcaaaaatggaggccattgagacaatagttgctagttctgcaatgtctttcattaaagagcaagaggcaagtaaagaagaaactcaatcaaaagaagacaagtgggctaaatggaagaggggt

SEQ ID NO: 189561 - DNA, 265 bp, Glycine max
gttaggttctgcacgctctgcttccagcgagtgttctttcttcgtttcaacaccttaatttgcacacgctgcttcttcagcttgagaaatggcacaagaaacctttctattcacatctgaatctgtaaacgagggtcaccccgacaagctgtgcgaccagatctctgatgcagtgctcgatgcgtgccttgaacaggaccctgacagcaaggttgcctgtgagacatgcaccaagaccaacatggtcatggtctttggagagatc

SEQ ID NO: 189562 - DNA, 265 bp, Glycine max
accacttccaatggcttcatatcatgaagaagaagtgaggctattgggcaagtgggccagcccatttagcaacagagtagaccttgctctcaagctcaagggtgttccctacaaatactccgaggaagatcttgctaacaagagtgctgatcttctcaagtacaaccccgttcacaagaaggttccggttttggtccacaatgggaacccattgcccgagtcactcatcattgttgaatacatagatgagacgtggaaaaataac

SEQ ID NO: 189563 - DNA, 272 bp, Glycine max
gagaagcaagctcatcctagagttttaaaaatggcagcagcctcctccatggctctctcttccccatccttggctggcaaggccgtgaagctgggcccatcagcccccgaagtcgggagggtcagcatgaggaagaccgtcaccaagcaggcctcctccggaagcccatggtacggcccagaccgcgtcaagtacttgggcccattctctggcgagcccccgtcctacctcactggcgagttcccaggtgactacggctgggacactgctgg

SEQ ID NO: 189564 - DNA, 270 bp, Glycine max
atggcattcagcggttatttccttttgggcctcatagctcttgttattgttaggtcttccaaagttacatgtcgacaattagcagttaatacagtttcacctattattgacatttcactcagtcggaacagtttcccagaagggttcatctttggggcgggatcttcctcgtaccagttcgaaggtgcagcaaaggaaggtggtagagaaccaagtgtatgggataccttcacccataattatccaggtaagatcatggatagaagcaac

SEQ ID NO: 189565 - DNA, 268 bp, Glycine max
attgtgttcgatatcaaaccaattgatgaggaggctgggaagtattcggagctatgcaaagcatcttcgcatagatggggtgaagaacactatagccgttgcctctggcaaaggtggtgtgggcaagtccaccactgctgttaatttggctgttgcacttgcaagaaagtgtcagctcaaggttggtttgcttgatgccgatgtgtatggtcccagcattcccacaatgatgaacatcaatacaaagcctgaagtcactcatgataag

SEQ ID NO: 189566 - DNA, 265 bp, Glycine max
tgttcctacaatcattccaaatgtgcccttccggtcgcaccctcctcccttcctccgtctccgatttccgaccggcattcgacgtcctcgatgccgaccgcgacggcaaaatcagccgcgacgacctccgcgccttctacgccggagtcggcggcggaggagatgacgtgatcggggcaatgatgacagtggctgacaccaataaggacgggttcgtggagtacgaggagttcgagcgcgtggtctcggcggagagaaagcccgt

SEQ ID NO: 189567 - DNA, 266 bp, Glycine max
ggcaccccccacaaaaatgacaggagagacagtgaacccaaaagcttaccctttggccgatgcgcaactcgcaataacaatcttggatcttgtgcaacaagctgccaactacaagcaactaaaaaagggtgctaatgaagcgactaagacactgaacagaggcatttctgagttcgttgtgatggccgcagacactgagcctcttgagattcttctccatcttcctctccttgctgaggataagaatgttccctatgtattcgttc

SEQ ID NO: 189568 - DNA, 268 bp, Glycine max
gatacactaagttatcctcataaatacactctaattaggtggcaagataagtgtctaaccttagtaacattgccacatattgtgttcattttggaattgtgccactaaaattctattcaattcatctatggctgcctcttcttatgctatgcaatcaatcctggcaaaccctttgatccgcatttccagcgggtctagggtgaaccaatttggcgttcctgctttgcacatgagaaggaatgttggcctgagagttaggtccatggct

SEQ ID NO: 189569 - DNA, 272 bp, Glycine max
gcggaagagaaaatgacgaccaggttcaagaagaacaggaagaagagaggtcacgtcagcgccggacacggccgtatcggaaagcaccgcaagcatcccggaggtcgcggtaacgccggtggcatgcatcaccaccgtatcctcttcgacaagtaccatcctggtttcttcgggaaggtaggcatgcgctacttccacaaacttcgcaacaaattctacaatccgatcatcaacatcgacaagctgtggtccctcctcccccaggaggccaa

SEQ ID NO: 189570 - DNA, 260 bp, Glycine max
gcctctcgatgggaattgcgcttcaaggcgtctcgtagggctaatccgcctcacgagggtcaccaacggcacgtacctttggggggccgaggcccctactgctggtcggcaaacggacggcgggcgcacgcgtcgcttctagcccggattctgacttagagacgttcagtcataatccaacgcacggtagcttcgcgccactggattttcaaccaagcgcgatgaccaattgtgcgaatcaacggttcctctcgtactag

SEQ ID NO: 189571 - DNA, 264 bp, Glycine max
gaggaagggcgtagtaagcgacgaaatgcttcggggagttgaaaataagcgtagatccggggattcccgatataggtcaacctttcgaactgctgctgaatccacgggcaggcaagagacaacctggtgaactgaaacatcttagtagccagaggaaaagaaagcaaaagcgattcccgtagtagcggcgagcgaaatgggagcagcctaaaccgtgaaaacggggttgtgggagagctatacaagtgtcgtgctgctaggcga

SEQ ID NO: 189572 - DNA, 180 bp, Glycine max
aacctgagtccaggtctctcatgggctcagagagttaaaattgctgttggagcagccaggggacttgagtatcttcatgaaaaggcagagattcatatcatcgatcgttacattaagtctacgaacggacgtcttgcttccggtgacgttgcgacgattgctgatcttgatgtgtcaaat

SEQ ID NO: 189573 - DNA, 258 bp, Glycine max
ctgagatggtgtgtgaggacctgccaaaggaagtgtgtgctttctcattagcttcatcagggaagaggtgtttgttggagaccgagaaggtggccgacggtggcgtcgagtaccaatgccggacgtcggaagtggtggtggagagaatggcagagtacatagagacagaccaatgtgtggaggcatgtggggttgataggaactctgttggaatttcatctgatgccttctttgagcctcaattcactggcaagcttt

SEQ ID NO: 189574 - DNA, 258 bp, Glycine max
cttcaggggagagcttggaaaatggattgctgcagttgctgttgtattacgccttttccttccaagacacttccctgattggctggaattgcctggtgctctgattcttcttatcgttgtagctccttctctaattgcaagcacctttagagacaacattgttggggtggtagtgtgcctcatcattgcatgttatttgctgcaagaacacattcgggcttctggtggtttcagaaactccttcactaaagctcacgg

SEQ ID NO: 189575 - DNA, 251 bp, Glycine max
cgattatatggatcccaagcaggcctctcttggttagcaaaacctgtcactggacagagttctattggccttgcatcacgccatggaagcatcatcaaccaaagcatgccactcatggatcctctagtgacactgtttggtaccattcatgagaagctccccgagacaggagcaggaggaagcatgcgaacactctgtttccaaattttggaagcatgttcagcacagctgagccgcatgttaaaaatgaa

SEQ ID NO: 189576 - DNA, 250 bp, Glycine max
ctttatcagtatcattcattatcactacgattgttctaaaagcaattattactcttgagagaattaaaagatcatcatcacaataacaagatgagttcaggaattagagcatggagtgtggcagctagtgttggagttgtggaggccttgaaagaccaaggcatatgcaggtggaatcatgctttaagatcagctcaacaccatctcaaaaaccatgttggctcattctctcaggctaacaagctttctt

SEQ ID NO: 189577 - DNA, 248 bp, Glycine max
gtgaaggctgtggccgttcttggcagcagtgagggtgtcactggaactattcacttcgttcaggagggaagtggtccaaccaccgtaactggatctcttgctggtcttaagcctggtctccatggtttccatgtccatgccttgggggacactaccaatggttgcctctcaactggatcacatttcaatcctaataacaaggagcatggtgcccctgaggatgagaatcgtcatgctggtgatcttgg

SEQ ID NO: 189578 - DNA, 250 bp, Glycine max
cttatcaatgggtaacaattaactatctactgggaaacttgggaaagcattattcagaaactgttgcagtagttgatcttggaggtggatctgttcaaatggcttatgcagtctcagagacagatgctgcgaaggctccacgagcaccggacggagtggaatcatacataacggagatgttccttaggggaaagaaatattacctctatgtacacagttacttgcgatacggtatgctagcagctcgtgc

SEQ ID NO: 189579 - DNA, 252 bp, Glycine max
tagcaaatcgttgatctacggtttaactggagtagtgtggtaagatgggaggtggatttagagtgcttcatttagttaggccgtttctatcgtttcttcctgaagttcaaactgctgacaggaaagtgccatttagagagaaggtcatatacactgtgatctctcttttcattttcctggtttgtagtcagctccctctatatgggatacactcaacaacaggtgctgatccattctattggatgcgagtta

SEQ ID NO: 189580 - DNA, 251 bp, Glycine max
ctcgagccgctgcccctgctagctattttgtaacaagcagatcaaattaattgcttgatatcaagaaacatggcaatcaccggtgttcatggatggggagacatcaagagtctcagcgtccaagtgatcaccggtcgatggttcgtcgtattcgcctcttttctaatcatggcagccgccggagcaacctacatgttcggtctctattccagagacattacgagccagctctcttacgaccaatccactct

SEQ ID NO: 189581 - DNA, 246 bp, Glycine max
atggaagtcacactttcagcctgcaagtccgttagctcgccttctgttcccgtcgcaggtttgtttgcggggaatggaggaattaagagctcgcaatgcagtttcttagcgggagcgagcaaagtgaggtttcctaggcaagtaggtcaagttagccaccttcgcaaacagcgccaaacgcgtcactgcggtgctctccacgcgacttgcgatacagacaagatcctgatcgcgaacagaggcgag

SEQ ID NO: 189582 - DNA, 247 bp, Glycine max
gcagcccttgcaatctcaatcttctcttcttttttcaggatacccatttcgtttttcttctcaaatggccctttcttgttccaaagtttcaagcttttctctctcacccgttgtgggtggtggtgatgtttttaaaaatctcactttttcttccttttctttgagtttttctaataagcgtgttggtggaatcaagaacttgagggtgcgtgctgctgcttcaaacgcaccagctccactcgctggg

SEQ ID NO: 189583 - DNA, 245 bp, Glycine max
caacacaacgcgaatggctacggcgctggagaagaaagcgaaggaggcattcttcgacgacgaattcggtctggccgtcgatctctactctgaagccatacgattggatccgaacgacgccaatctcttcgcggacagagcccaagcccatatcaaactcaacgctttcactgaagccgtttccgatgccaacaaatccatccaattaaacccttccttgcccaaggcctatcttcgtaaagcca

SEQ ID NO: 189584 - DNA, 244 bp, Glycine max
cggctcgagggagtgtcggcggctgtgtccaagacagctgcggctccaatcgaacgagttaagttgctcatccaaaaccaggatgaaatgatcaagagtggtcggttgtctgaaccatacaaaggaattggcgattgtttcactcgaaccatgaaggatgaaggggtgattgctctttggagaggaaacactgctaatgttatcagatacttccctactcaggctctgaattttgcttttaagg

SEQ ID NO: 189585 - DNA, 257 bp, Glycine max
ctgccagtagtcatatgcttgtctcaaagattaagccatgcatgtgtaagtatgaactaattcagactgtgaaactgcgaatggcagtttttatcatcttaatcattcaactagcggtgtatcagaacctatacttaatgatccatcgcttccaaaaccacataattgttctgacaaatttgatactgaacttccatcagatcttatcacttcgtgtgttgctacattaatcatgattcagacttgtactgaacggc

SEQ ID NO: 189586 - DNA, 255 bp, Glycine max
gttgaatcagtagtgaagctgaagggacttgacattgatacaatccaacagcattatacagtttaaggaatttggacaaccttcaagcagaacacactttggtgcttatccaagaacaagaacaacaaatgtaatgaagacctaagttaatccgtctttagattaggatgaaggtccttttgtcagtcaaaatctgaatggtttactcttctattccataccaaataacgtggttgataggatttacttttcgtc

SEQ ID NO: 189587 - DNA, 251 bp, Glycine max
attttcggtggccgtaggagcaatgtgttcgatcccttcaaggattttcctttcccaaattccgtctctacttccttccctgagttttctcgggaaaattctgcgtttgtgagcactcgtgtggattggaaggagaccccagaggcgcacgtgttcaaggccgatattcccgggctgaagaaggaggaagtgaaggtgcatattgaagatgataaggtgcttcagatcagcggagagaggaacgttgagaa

SEQ ID NO: 189588 - DNA, 251 bp, Glycine max
caattttcgaatctctctcctccatggacccaacttcgatccctccccctccggccaccaccgtccccttcactgtcgaacccagcaatcacgtgacccccgccgacaacaccaacaccaaccaccctccttacgatgagatgatatacacagcaatcggggctctgaaggagaaagatggttcgagcaagcgagccataggaaagtacatggaacaagtgtacaaggaccttccacccacccactctgct

SEQ ID NO: 189589 - DNA, 249 bp, Glycine max
gtgttaatatgcgtttcagcactgtcactgagtccttctgttgcgggggaagggcaaaataatggccttgttatgaacttctacaaggaatcatgccctcaggctgaagacatcatcacagaacaagtcaagcttctctacaagcgccacaagaacactgctttctcctggctcaggaacatcttccatgactgtgctgttcagagttgtgatgcttcactgttgctggactccacaagaaggagcttg

SEQ ID NO: 189590 - DNA, 248 bp, Glycine max
ctttcgatgaactcaaagctggtctaagaagatatgggtctacccttaaggatatagaaatacgtgatcttatggaagcggctgatgtggacaaaagtggaaccatagactatggggagtttattgctgcaacagttcatctcaacaaactagagcgtgaagaacatctcattgcagcattccaatattttgacaaggatggtagtgggtacattacagttgatgaacttcaacaagcttgtgcagaa

SEQ ID NO: 189591 - DNA, 247 bp, Glycine max
  unsure (1)..(247): unsure at all n locations
gctacttcctactccaaccgcactncctgctaccgcnattatcatgggcnaggtcannatcggaatcaacggatttggaagaattggccgtttggnagccagagtggctctgcagagagacgatgttgaactcgttgccgttaacgaccctttcatcaccaccgattacangacatacatgtttaaatacncacagtgttcatggacactggaagcatcacgatgtcaccgttaaggacgagnagac

SEQ ID NO: 189592 - DNA, 245 bp, Glycine max
gttgagttctaatgagtaacgaatacgattacctgttcaagcttctcctaatcggagactcttccgttggaaaatcctgcttgcttctcagattcgctgatgactcctatgtcgacagctacataagtaccattggagttgatttcaaaatcagaacggtggagctggaagggaaaaccgtcaagctgcagatttgggatacagctggacaggagcgattcaggactataacaagcagttattat

SEQ ID NO: 189593 - DNA, 246 bp, Glycine max
gctcgatgggaattgcgcttcaaggcgtctcgtagggctaatccgcctcacgagggtcaccaacggcacgtgcctttggggggccgaggccccctactgctggtcggcaaacggacggcgggcgcacgcgtcgcttctagcccggattctgacttagaggcgttcagtcataatccaacgcacggtagcttaccgccactggcttttcaaccaagcgcgatgaccaattgtgcgaatcaacggttc

SEQ ID NO: 189594 - DNA, 257 bp, Glycine max
tgcgaatctacggtccaagcccagaagtcctcgaagcactaagaggttctaacattgagcttttgctagacattccaaatgacaacctcagaaacctagcatctagccaagacaatgcaaacaaatgggtgcaagacaacatcaaaaactatgccaacaatgtcagattcagatacgtttcagtgggaaatgaagtgaaacccgaacactcatttgcacaatttctagtgcctgcattggaaaacattcagagggcc

SEQ ID NO: 189595 - DNA, 238 bp, Glycine max
ggctcgaggccgcagctatggtgaagtactaccagagaacccgacaatcccaccaagtcctgcaaggccagaggcgctgacctcagagttcattttaagaacactagggagactgcctttgccatcaggaagttgccccttgttaaagctaaacgatacttagaggatgttttggcccacaaacaggctattcctttccgacgcttttgtggtggtgttgggaggacggcccaggcta

SEQ ID NO: 189596 - DNA, 250 bp, Glycine max
aactgtggttgcggaactcctgcaagtgcggcaacggctgcggaggctgcaagatgtacccagacttgagctacactgagtcaaccaccaccgagaccttggtcatgggagtggcacctgttaaggctcaatttgagggtgctgaaatgggtgtgcccgctgagaacgatggctgcaaatgtggaccaaactgctcctgcaacccctgcacttgcaagtgaggtgttgggagagcaagcttcaagcagag

SEQ ID NO: 189597 - DNA, 249 bp, Glycine max
ctcttcaaagttgatcaaggtggatgggctccccttgcaattgctggagcatttcttctcattatgtatgtctggcattacggcacggtgaaacgctacgagtttgaaatgcatagtaaggtctcaatggcatggattctcggacttggaccgagtttaggacttgttcttgtcccgggaattgggctagtatacacagagcttgcaaatggagtaccccacatcttttctcacttcatcacaaaccta

SEQ ID NO: 189598 - DNA, 247 bp, Glycine max
gggatgctaagatggacaaaagaagtgttgatgatgttgtccttgttggtggttctaccagaattcccaaggttcaacaactgctgcaggacttctttaatgtgaaaagagctttgcaagagcattaatcccgatgaggctgttgcatatggtgcggctgttcaggctgcaatcttaagtggtgagggcaatgagaaggttcaggatcttctcctcctggatgtcacccctctgtctcttggtttgg

SEQ ID NO: 189599 - DNA, 243 bp, Glycine max
gcgaccttcttcgtttctcgcaaagtttaagtcatcatgggtaaggaaaagactcacatcaacattgtcgtcattggacatgtcgactctgggaagtcaactaccactggtcatttgatctacaagcttggaggtattgacaagcgtgtgattgagaggttcgagaaggaggctgctgagatgaacaagaggtcattcaagtatgcctgggtgcttgacaagctcaaggctgagcgcgaaaga

SEQ ID NO: 189600 - DNA, 241 bp, Glycine max
ggaatgcttgatcaaattatggatcagaatctggtggggaaagtcaatcctgcttctcttaagaagtttggggagacagctgagaagtgcttggccgagtatggagtggatcggccgtctatgggcgacgtcttgtggaatcttgaatatgctttgcagcttcaggagacctcatcagcactcatggaacctgaagataacagcacaaaccacattactggaattcagttaacacgtctca

SEQ ID NO: 189601 - DNA, 243 bp, Glycine max
gcatcgtggaggatcctgtcttccattgagcaaaaggaagaaacaaaagggaacgagttgaatgcgaagcggattaaggagtacaggcagaaggttgaattggagctttcaaacatctgtaatgatgttatgacagtgattgatgagcaccttatcccttcggctgcagctggtgaatccactgtgttttactataagatgaaaggagattattatcgttatcttgccgaatttaaggcaggc

SEQ ID NO: 189602 - DNA, 243 bp, Glycine max
gggccttcgtgtccgtggtcagcacaccaagactactggccgcaggggaaagactgttggggtctctaagaagcgttaagctattatgttttggcttggatattagattttgtttaggaggcatgtttgaagtacactacatgttttgcatcataccaactttgtatccgttgttaaatggcttgacaatttcaattttgtttgttatttgcatctgagattccgattagttaaatgatgttg

SEQ ID NO: 189603 - DNA, 254 bp, Glycine max
atcatggcgatggcaaacttggctcgacggaagggttacgccgactttatgtcgtcgaggtcgtcgctttgtctgacaaggtggagggggttcgcgtccggatctgacgaaaacgacgtcgtggtcatcggcggcggtcccggcggctacgtggcggccattaaagcggcgcagctgggtctgaaaaccacttgcatcgaaaaacgtggcactctcggcggtacctgcctcaacgtcggatgcatcccttccaa

SEQ ID NO: 189604 - DNA, 244 bp, Glycine max
tctctctcgtgcggacacaatttttgatggggatatacctcagcactcccaaaacagagaaggcctctgaagatggtgagaacgacaagcttcgcttcggtttgtcttccatgcagggctggcgtgcttccatggaagatgctcatgcagctcatccatatttggacgagtctacgtcatactttggtgtttatgacggccatggaggcaaagcagtttcaaaattctgtgccaagtatctaca

SEQ ID NO: 189605 - DNA, 245 bp, Glycine max
cttgatttggaaaagccctcatttcttcaacacgattaaagagcttgagttagatctcagaggcaacaagatagctgtaattgaaaacttgggtgctactgaggaccaatttgacacaatagacttatctgacaatgagattgttaaacttgaaaatgtaccatatcttaaccggttgggcacaatgctcattaacaacaacaggattactagaattaatcccaacatcggagagttcttgccaa

SEQ ID NO: 189606 - DNA, 244 bp, Glycine max
ctcgagccgataaaaacaccatcagcatcttcactcaccacgaaggttccgttctctgtggatctatatctctagggcacgttacgtggaaggaagctcttcaccgacttcaatcgaagaagatggattacagtgctggttcgagtctgtttccgttgcaccgttgcaaaaccattcacctggtgaggcacgcgcaggggattcacaatgtggagggtgacaaaaactacaaagcctacatgaa

SEQ ID NO: 189607 - DNA, 244 bp, Glycine max
cagggttatgcacaggacagctataatgcatataatgcgcaatcacaatcagggtatgggcagccacctacatatgatcagcagcaaggctatggtagtgaaagcaacccggcacaagagggccacactgcaaactatgcagtacagggagattcagcccaagctccttctgcccaaccaattaccgtagcgcacaaggttatcctaccaaccaactgcccagttcaaacactgccaactaccc

SEQ ID NO: 189608 - DNA, 239 bp, Glycine max
attttccaggaggatcttgtgaaacgcctagagtctgagatcaaaggagactttgagaaagccgtgtaccgatggatactagaacctgcagatcgtgatgctgttttggccaatgttgccatcaagaatggcaaaaactacaatgtcattgtggaaatcgccactatcctctccccggaagagcttttggccgtgagacgtgcttatctcaaccgctacaagcactccttggaagaaga

SEQ ID NO: 189609 - DNA, 242 bp, Glycine max
attaaaaatgcagatcttcgtgaaaaccctaacggggaagaccataaccctcgaggtcgaaagcagcgacaccattgacaatgtcaaggctaagattcaagacaaggaaggcatccctccggatcagcagcgtttgattttcgccggaaagcaacttgaagatggaaggaccttggccgattacaacatccagaaggaatcaacccttcaccttgtcctcaggcttcgtggtggcatcatcg

SEQ ID NO: 189610 - DNA, 238 bp, Glycine max
atggcactcacgtctactggactactatttggatggggttggaataagtttggacaggttggagtcggtgacaatgttgatcactgctctcctgtgcaagtgaagttcccccaagatcagagagtagttcagatctcatgtgggtggaggcacacaattgctgtaactgaaaaggaaaatgtattttcttggggaagaggcacaaatgggcaacttgggcatggggataccattgacc

SEQ ID NO: 189611 - DNA, 240 bp, Glycine max
ggtcctcgtcaacattgagcaacagagtcctgatattgctcaaggtgtgcacggccacctcacaaagaggcctgaggagattggtgctggtgaccaaggtcatatgttcggctatgccactgacgagactcccgagctcatgcccttgagccatgtccttgccacgaagctcggtgccaagctcaccgaggttcggaagaacgggacatgcccttggctgagacctgatggcaagaccca

SEQ ID NO: 189612 - DNA, 239 bp, Glycine max
gcgaaatcgcaatcgcaatccagcgaatatgaaggtcgtcgctgcatacttgctcgcagtgttgggagggaatccttccccttctgccgatgacatcaaacacatcctcggcgcagttggagctgaggctgagaatgagttgattgagttgctcttgactgaagtcaagggaaaagacttcaatgagctaattgctagtggaagtgaaaagatgtctgcagtgtctggtggcggtgcag

SEQ ID NO: 189613 - DNA, 247 bp, Glycine max
ctgcacttgtgtctcttgcattgtttggtgcttatgtgagcagagcaggcatcaaaacagtgaatgtgatgaccccaaaagtttttataggtttgattgtgggagcaatgcttccctactggttttcagccatgacaatgaagagtgtcgggagtgcagctctcaaaatggttgaagaagttcgtaggcaattcaataccatcccggtcttttagaaggaagagcaaaacccgattatgcaaattgt

SEQ ID NO: 189614 - DNA, 243 bp, Glycine max
  unsure (1)..(243): unsure at all n locations
ctccattctccaaggtttggacgaaatagagaggcgcattgagaatggagagttcaattggagagctgacagggaggatgttcacatgaacattgaggccgcgctcaccgacttgatcggtgagcctgccaagaagctccacactgcatggaatacaaangatcaggtcttgacggattttcgcctctggtgtcgtagagccattgacaagatcctcgtgagcatgaaacagcttcaggtctc

SEQ ID NO: 189615 - DNA, 238 bp, Glycine max
agattcggttctttacttgttgggttgttctgatcttctctcatagcaatcaaatcacactcccatcttctcatctcgtaaaccctaaaccccgttttcagtgacatcgagatcgatcgaacatggatgaggagtacgatgtgatcgtgttgggcacgggtctcaaggagtgcattctcagcggtcttctctccgtcgatggcctcaaggttctgcacatggacaggaatgactatta

SEQ ID NO: 189616 - DNA, 238 bp, Glycine max
gttcactttcactttaccaactcctaacaatttctctctgtttccttcttcaccgcatcaatggagttggacggcgttctcctcggcatgtgcaaccctctcctcgacatctctgccgtcgtcgacgacgctttcttgcaaaaatacggtatcaagttgaacgatgcgattctcgctgaggataagcacaaacctatgtatgaagaattggctaacaatcctaatgtggagtacattg

SEQ ID NO: 189617 - DNA, 239 bp, Glycine max
accaagaccacaaaatccgcgtctggaaaacaaccgaccaacccggtaataataataacaaccccaactactacaaatgcgtcgcctcgcttcccacgctccacgaccggttctccaaactcttctcctccgagaactacgtcgagattcgccgccacaagaagcgcacgtgggtgcatcacgtggacaccgtctccgccctcgcactttcccaagacgggtctcttctctactctgcg

SEQ ID NO: 189618 - DNA, 240 bp, Glycine max
  unsure (1)..(240): unsure at all n locations
gggtttttagctcccccaatttcttcgctcaacatggttcttcaaaatgatattgatttgctaaatcctccggttgagcttgagaagaggaaacacaagctcaagcgtcttgttcagtcaccaaactctttcttcatggatgttaagtgccagggttgcttcaacataaccactgtctttagccactctcagactgttgttgtatgcggaaactgccagactgtcttgtgtcaaccnacc

SEQ ID NO: 189619 - DNA, 269 bp, Glycine max
tattcatacgtggtgttgttactgctgctcttttctcttttcttttctctttagttctctcttcccctttctttttctttttcttcttcttctgagcttgtttaagcttttcttccattaacatattatcataatgtgtggtattcttgctgttcttggttgttctgatgactctcgagccaaaagggtccgcgtgcttgagctctctcgcagattgaagcaccgtggccctgactggagtgggctccatcaacatggtgactgctttt

SEQ ID NO: 189620 - DNA, 259 bp, Glycine max
caccgttccgttccgttttcctctgtttttattttctttctttcaaatccccgcttcgtggaaatcccgaaccagaaaccatgcttctccgaaccgctgctgcttctgcatcgtccctctccctcttcagcccgaacgccgaacctccccgttcggttcccgctcgtggattggtggttcgcgcacgaaaggatccacgaaccaccgcgccctgaccggagtgatttttgaaccgttcgaagaggtgaagaaggagctc

SEQ ID NO: 189621 - DNA, 257 bp, Glycine max
gtgagatttgcgaatctgagaaatggcggattcttctcgggaggagaacgtttacatggcgaaattggcggacaggccgagcgttacgaggagatggttgagttcatggagaaggttgcaaagactgtggaggttgaggagttgacggtggaggagaggaatctcctctctgtggcttacaagaacgtgattggtgcgaggagggcttgttttatgatcatatcctccattgagcagaaggaggagagcaggggcaa

SEQ ID NO: 189622 - DNA, 259 bp, Glycine max
cctcgagccgaatcggctcgagggttctgccttcacacaacattcctcgccatccccttttactcctaagaaaagccatggctaagggtcccgatctctactctgacatcggcatgaaagcatgggatctgctgttcaaggactaccacagtgaccagaagttcaccatcaccacctactcacccactggagttgctataacagcatcaggaaccaggaaaagtgaactgtttgtggctgatgtcaacacccagttgaa

SEQ ID NO: 189623 - DNA, 255 bp, Glycine max
gaaggtccttgttttcttcgttgctacaattttggtagcatggcaatgccatgcgtacgatatgttccctctccgaatgaacactggctatggtgcccgtactccggaggtgaaatgcactagttggaggcttgctgtggaagcacactacatctttggctttgagaccattcctgaagagtgcgttgaagcaacaaaggaatacatccatggcgaacaatatagatcagactccaaaacagttaaccaacaagc

SEQ ID NO: 189624 - DNA, 251 bp, Glycine max
ataggcacttatccttacaaacagaaaatggacatcttcaattagagagcaagagaaacataggttgactcctattgtggaagccctgtcctcaagttatctgggtcctgattattctcagtcaagagaatatgctgatatatcattaaaggacatagatcaagttgccaagagctcatttcctttgtgcatgcgtcacctatttgataagctgaaagaggatcatcatttaaagcatggagggaggatgc

SEQ ID NO: 189625 - DNA, 253 bp, Glycine max
gcgacttttgagttcaaaagatgactaacttcccattgatcaacttggagaagctcagtggtgaggaaagaaacgataccatggaaaaaattaaagatgcttgtgaaaactggggattctttgagctggtgaatcatggcattcctcatgacatattggaaactgtggagaggttgaccaaagagcactacaggaaatgcatggaagagaggttcaaggaattagtggcaagcaaaggtctagatgctgtcca

SEQ ID NO: 189626 - DNA, 253 bp, Glycine max
ggaagagttaggtttctaatgacttcaacatgatggatctgaaaatttacacatgtgaacaccctcagtgcccttacagtcaagttcgccttggtttccctgaccgaatttcaagggacaaccatcagttgatttgtgcttatagaggtacttcagattttgggggtccaagttttcctgttaatgagataaagccagtcgtacaccccccgtcctttgttcaacccaaatctactgctcagcctggtagtat

SEQ ID NO: 189627 - DNA, 260 bp, Glycine max
aggtaaggtaggttaacactcttcttcatcgtcgtcgcaatgggacgtgtgatccgtgcgcacgtaagggagcaggctcggtcttcaagtcccacacgcaccaccgcaacggccctgcacgcttccggagcctggacttcggggagcgcaacggctacctcaagggcgtggtcaccgacgtcatccatgaccctggccgcggcgcgccgctcgccaaggtcgccttccgccaccctttcagatacaagaagcagaacgag

SEQ ID NO: 189628 - DNA, 264 bp, Glycine max
acggctaccctaatcctctcctcttcctctctactaatttcagctatggccgatgaagctgtggttgttccagatcccacccagatcgatgtcaagctctttaaccgctggagcttcgacgatattgagattactgacatttctctggctgattatatcggagtggcgacatccaagcacgtcacgtatgtgcctcacaccgccggcaggtactcggtgaagcggttcaggaaggcgcaatgccccattgttgagaggctgacc

SEQ ID NO: 189629 - DNA, 261 bp, Glycine max
gaggcgtgccactggtggcaagaagaaggcctggaggaaaaagagaaagtatgagcttggtcgccagcctgctaacactaagctgtcaagcaacaagacagtcaggaggatccgtgttagaggtggaaatgtgaaatggagggcattgagattggatactggaaattactcctggggaagtgaagctgtaactcgcaagactcgtgtactagatgtggtttacaatgcctcaaacaatgagcttgtgcgtactcagactct

SEQ ID NO: 189630 - DNA, 255 bp, Glycine max
gttctatcgtcgtgttgtcgtccacgcttcgccccttcattgtcgcgtgcttcagccctccgttctcgcatccggtattgtactactctcacttctacttcttcagagactaccactccaacctccgtcacgaaacgagtaatgtcgggagttcagcccacgggctcaattcacctcggaaactattttggcgccatcaagaattgggttgcccttcagaatgtgtatgatacacttttcttcattgtggacctg

SEQ ID NO: 189631 - DNA, 255 bp, Glycine max
actcgagccgaatcggctcgaggcagacgcaaacgcaaacgcaaaacgcaaacgcaaacgcaacgcgtgatccattgacgaaactggtgcagcgtctcacctaccgcaagcggcacagctatgccaccaagtccaaccaacacagggtcttcaaaacccctggtgggaagctcgtttatcagactaccaagaagagggccagcggacccaagtgccccgtcactggcaagaggattcaggggattccacacttga

SEQ ID NO: 189632 - DNA, 253 bp, Glycine max
ttcaccggttcgatcatatatgaagaatactctacaacaaaagcaagaggaacagggtgaagggtctgggatgtacgtgaaagttagcatggcaggtgcaccttacttaaggaagatagatctaaatgtttacaagagctacccagaacttctcaaggccttgggaaatatgttcaagtgcacatttggtaagaacctagaacaagttttaaataatctcttattattttttttggctttcttaagattaatt

SEQ ID NO: 189633 - DNA, 256 bp, Glycine max
caggcgaggagaaagatggaggggaaggagcaggatgtgtcgttgggagcgaacaagttccccgagagacagccaattgggacggcggcgcagagccaagacgacggcaaggactaccaggagccggcgccggcgccgctggttgacccgacggagtttacgtcatggtcgttttacagagcagggatagcagagtttgtggccacttttctgtttctctacatcactgtcttaaccgttatgggagtcgccgggg

SEQ ID NO: 189634 - DNA, 256 bp, Glycine max
gaattgcgcttcaaggcgtctcgtagggctaatccgcctcacgagggtcaccaacggcacgtgcctttggggggccgaggccccctactgctggtcggcaaacggacggcgggcgcacgcgtcgcttctagcccggattctgacttagaggcgttcagtcataatccaacgcacggtagcttcgcgccactggcttttcaaccaagcgcgatgaccaattgtgcgaatcaacggttcctctcgtactaggttgaat

SEQ ID NO: 189635 - DNA, 264 bp, Glycine max
atgccagtagtcatatgcttgtctcaaagattaagccatgcatgtgtaagtatgaactaattcagactgtgaaactgcgaatggcagtttttatcatcttaatcattcaactagcggtgtatcagaacctatacttaatgatccatcgcttccaaaaccacataattgttctgacaaatttgatactgaacttccatcagatcttatcacttcgtgtgttgctacattaatcatgattcagacttgtactgaacggcaataccc

SEQ ID NO: 189636 - DNA, 258 bp, Glycine max
ggtggctataatctttctgtggtgagttgtcaagatgtacacatcaaggaagaaaatccacaaggataaggatgctgagccaactgaatttgaggaatcagtcggacaggcattgtttgatctggataataccaacaatgagctgaaaagtgatctgtaagatttatacataaactcagctgtccaaattgatgtttctgggaaccgcaaggctgtggttatacatgtcccctacagattaaggaaaggattccggaa

SEQ ID NO: 189637 - DNA, 243 bp, Glycine max
cttatttagggtttttgtgactgtgctccacaaccgagtcgccatggcgtcgcaggagagtatcgaaaagatgcaggcacggcagaattaccggaatttatggcacaccgatctcatgagatccattcaggccgatactccttattgttgcctcgcgttgtggtgtgcaccatgtgtgtcttaccttcttcgcaaacgagctctctatgatgatatgtcaaggtacacatgttgtgctggcta

SEQ ID NO: 189638 - DNA, 250 bp, Glycine max
atgggaattgcgcttcaaggcgtctcgtagggctaatccgcctcacgagggtcaccaacggtcacttcctttagggggccgatgacccctactgctggtcggcaaacggacggcgggcgcacgcgtcgcttctagcccggattctgacttagaggcgttcagtcataatccaacgcacggtagacttcgcggcactggcttttcaaccaagcgcgatgaccagttgtgcgagtcaacggttcctctcgta

SEQ ID NO: 189639 - DNA, 253 bp, Glycine max
tacatttatagggcttctttctttgcaagaaatgagagagtgcatttcaatccacattggtcaggccggtatccaggtcggaaacgcctgctgggaactctattgccttgaacacggcattcagcccgatgggcagatgccgagtgacaagaccgttggaggaggagacgacgccttcaacacattcttcagcgagaccggcgccggaaagcacgtgcctcgcgccgtcttcgtggatcttgagcccaccgtg

SEQ ID NO: 189640 - DNA, 257 bp, Glycine max
gctggaccctccggctcctccgatggaggggtaggagtgaattggctctgcatgagccctaagcgagatcacaaccccgaaaactatgacgaccttcaattcgagttcaatcctaatctcttcgcctctctcgagcactatttgcctcctcatatgctcaacctctcacgcgatgttaagcttcactacatcaggaacattcttcttcgctatttgcctgagaatgaccgcaactgggtgcccctttttttaattaa

SEQ ID NO: 189641 - DNA, 249 bp, Glycine max
gttcccctctttgtgttcgttcgcgacgatggggtccatccccgatccaggcgagttgagcgagttgactcagccgagcttcgacgagttccagcgccaaacctctctcatgaccagctgcaccctcctctggaaggagctctccgaccacttctcctccctcgagcaagtcttcaaccacaaatccgaagtcctcaagcgcaagattcacaccctcgacaactttacctcggactccctctgcctcct

SEQ ID NO: 189642 - DNA, 252 bp, Glycine max
taggcaaaatctaaaatctatcatgcatgattcatgtgtaccatggtaattggtggtggccggcttaggcctcaggaggattcacttaataaccccattgatgtggtagttggtacccctggcagggttcttcaacatattgaggttggtaatatggtatatggtgacatcaaatacttggttttggatgaggcggacacaatgtttgatcggggctttggtcctgatattcgtctatttataggcccatta

SEQ ID NO: 189643 - DNA, 252 bp, Glycine max
gggaactggcctcgcaaactgagaaggttatattggctattggggatttcatcaatatacaagctcatgcatgcgttggaggtaaaagtgtgggagaagacataaggaaacttgagtatggagttcatgtggtgtctggaactcctggccgagtttgtgacatgatcaaagcttttgagttgtgtgtgtcagcattagatccaatctctctctctctctctctcccaattcaaccctaactagccccaaacc

SEQ ID NO: 189644 - DNA, 259 bp, Glycine max
cggctcgagtccatctctctcacaaaatgacaacaatatcaaattgctcccttctcttcctcttcctcttcctctccaccctccacatagcttccaccctctcaacccccaccaacttcatcaagtcctcctgcagcaccacccagtacccagccctctgcatccagtccctctccgtctacgcctccaccatccagcaagacccccacgagctcgtccagacagccctctccctctccctcaaccacaccgaggccac

SEQ ID NO: 189645 - DNA, 256 bp, Glycine max
cttcgatagtgctttctcagattcttccttcgtggtaaccggtcgaatcatggagcccatggacattgttggcaagtcaaaggaagacgcttcgcttcctaaagcaacaatgacaaaaattattaaagagatgttacccccagatgtacgtgttgcaagagatgcccaagatctattgattgagtgttgtgtagagtttataaaccttgtctcgtcagaatccaatgaagtttgtaacagagaggataaacggaca

SEQ ID NO: 189646 - DNA, 233 bp, Glycine max
ggctcgagcgtctccctgagctcagagccctatgggcctccaaggacacccccaattgggccaacgagaccatcttaaagcccgccttacacgccctcgaaatcaccttccgcttactcgcaaccgttttctccgacccgagaccgtacatcaacaaacgcgagtcgacccgacgcgtcgagtctctcgccacggcccaaatccagatcatagccatgttatgcgaagacgaa

SEQ ID NO: 189647 - DNA, 244 bp, Glycine max
cttgagacagttatctttatctacgcaagagaagaatagaaaatggatatcaggttgatggatttggactctccattgttcaacactctgcaccgaatcatggatctgacagaggacgcagagaagaacttgaacgctccgacgcggacatacgtgcgcgacgcgaaggcaatggctgcgactcctgcggacgtgaaggagtaccctaactactacgtgttcgtgatcgacatgccaggcctga

SEQ ID NO: 189648 - DNA, 244 bp, Glycine max
actcgagccgattcggctcgaggtaattaatagctgcttgaatcctacttggaatgaagagcacaatttcactctgacagaaacattgggagttctgaatttggaagtgtttgacaaagatcttttgaaggctgatgacaagatgggaaatgctttcttgaaccttcaaccaatagtctctgcagccagattaagagacatcttaagagtgtcctctggtgagacaacattaaggaaggtcata

SEQ ID NO: 189649 - DNA, 247 bp, Glycine max
accacttccaatggcttcatatcatgaagaagaagtgaggctattgggcaagtgggccagcccatttagcaacagagtagaccttgctctcaagctcaagggtgttccctacaaatactccgaggaagatcttgctaacaagagtgctgatcttctcaagtacaaccccgttcacaagaaggttccggttttggtccacaatgggaacccattgcccgagtcactcatcattgttgaatacatagat

SEQ ID NO: 189650 - DNA, 248 bp, Glycine max
cacgcatccatggccaccaccaccaacgccgccgcagccccgccgcgccagctctcccagaaggaagccgacatccagatgatgttagccgccgacgtccacctcggcaccaaaaactgcgacttccaaatggaacgttacatcttcaagcgccgcaacgacgggatttacattattaaccttgggaagacatgggagaagcttcagttagcagctagggttattgttgcaattgagaaccctcagga

SEQ ID NO: 189651 - DNA, 246 bp, Glycine max
atggaagtcacactttcagcctgcaagtccgttagctcgccttctgttcccgtcgcaggtttgtttgcggggaatggaggaattaagagctcgcaatgcagtttcttagcgggagcgagcaaagtgaggtttcctaggcaagtaggtcaagttagccaccttcgcaaacagcgccaaacgcgtcactgcggtgctctccacgcgacttgcagcaaagacaagatcctgatcgcgaacagaggcgag

SEQ ID NO: 189652 - DNA, 250 bp, Glycine max
  unsure (1)..(250): unsure at all n locations
gacgctctntccgccttcgcttctctcaatcccgatctccgatccttctcccccggctacctccgtctctcactccgtcctcgtcttcccanganacttcagatnccgggctncctgggagtatctatggaaatcactttcgtgtttcaacatatggagaatcgcatggaggaggtgttggttgtattattgatggatgtcctcctcaccttcctctctccgaagctgatatgcaattggatcttgacag

SEQ ID NO: 189653 - DNA, 249 bp, Glycine max
aagatatgtaattgtatggataccttacaaggtgtctggatgggaagaaagccactgatgtgaggactgctgcaattgcagttgggactagtagtcgtggcggtctagggaagcttttgatcagaggaagcaactctgagcgtggtgtcacaaaccttggcctctctgcagttgctcatggttggccttctctcagatcactttctttatggaatgagtctaccattggggatgagggtgtgtctcaga

SEQ ID NO: 189654 - DNA, 251 bp, Glycine max
caatccctcacttctccacaatccatctctttcattcttcaagacttatcttctcagcctcggtgctcgcatccctccccaacccaaaacggaaccaggtgattttgatgacaagtcagatcctcctttatccgcacaaaatgacattatagaatctgatatagagttggataatgctgatgttgttgaacctgataatgaccctcctcaaaagatgggagatccttctgctgaaataacggaagaacaaa

SEQ ID NO: 189655 - DNA, 253 bp, Glycine max
ctaggcctaacccacaagggtcattccattatgggaagattactcctacaaaagtaattaagttggccaattcagcacctttgatcaatggaaagctccgttatgctgttaacagtgtctcctatgttaaccctgacacccctctcaagcttgctgattacttcaacattcccggaatcttcagtgtgaatttactccaaaactctccctcaaatggtccaggatacataggcacctcagtgttgcaaacttc

SEQ ID NO: 189656 - DNA, 254 bp, Glycine max
cactgtttgtattggtaatttggatcttaatgtgacggaggaggagcttaagcaagcctttgtgcaatttggtgatattgtgttggtcaaaatttatgcgggcaaaggatatggttatgttcaatttggaactagagcgtctgctgaagatgccattcagaggatgcaagggaaggtaataggtcagcaagtgatccaaatttcttggggcagtaccttgacagctagacaggatgtacccggtggctggggtg

SEQ ID NO: 189657 - DNA, 235 bp, Glycine max
cggtgtaattatatcgggtaaagccaatgattagaagcatcgggggcgcaacgcccttgacctattctcaaactttaaataagtaggacggtgcggctgctctgttgagccgtgccatggaatcgagagctctaagtgggccatttttggtaagcagaactggcgatgcgggatgaaccggaagctgggttacggtgcccaactgcgcgctaacctagactccacaaagggtgtt

SEQ ID NO: 189658 - DNA, 242 bp, Glycine max
gccttctctcctctattttggcttccaacctttttgctccattcattctcaacaacaaaccaatctctatattttgcttagacaatgagggggagcttgtggcaacttgggcaatcgatcactcgccgtcttgcccatggagataagaaggctgttgctcgccgatgttttgcctcagaagctgagctgaaaaagacagtgtttcatgacttccatgttgctcatggtgggaagatggttcc

SEQ ID NO: 189659 - DNA, 248 bp, Glycine max
atggcctcagagatggatattatatccatgggcaatgtgcgattataatgtttgatgttactgcccgtctaacatacaaaaatgtccctacctggcaccgggatctttgccgggtctgtgaaaacatcccaattgttctttgtggtaacaaggttgatgtcaagaacaggcaagtgaaggcaaagcaggttaccttccacaggaagaagaatttgcagtattatgagatttcagcgaagagcaactac

SEQ ID NO: 189660 - DNA, 250 bp, Glycine max
tcaaccttctttcttcttatatatcgaacatggctaagtatcattcaagtgggaaaagctcttccatgactgctatagccttcctgtttatccttctaatcacttatacaggcacaatagatgcacaatccggggtatgttatggaagacttggcaacaacttaccaacccctcaagaagttgtggccctctacaatcaagccaacattcgcaggatgcgaatctacggtccaagcccagaagtcctcga

SEQ ID NO: 189661 - DNA, 252 bp, Glycine max
cacaccttcagcagcagcagccatggttctcaaaaccgaactatgccgattcagcggtgccaagatctacccagggaaaggcatcagatttgttcgtggtgattctcaggttttcctgtttgctaactcgaaatgtaagaggtatttccacaacaggttgaagccatcaaagctcacctggactgcaatgtacagaaagcaacacaagaaggacattgctcaagaagctgtgaagaaaagaagacgtgctgc

SEQ ID NO: 189662 - DNA, 240 bp, Glycine max
ctgatatgaacctcatcactgatgatgacttcagagaatttgtagatggggtccctagagaatgtaagctcacaatagtatcagattcttgccatagtggtggcctaattgatggagctaaggagcagataggaactagcacaaagggagaagggcaacaacattctggttctggttctggctttggattatccagttttcttcgtcgctccgttgaagacgccatcgaatctcgtggag

SEQ ID NO: 189663 - DNA, 245 bp, Glycine max
gtaaatggcgaggaagaagatcagagagtaccactccaagaggcttctcaaggagcatctcaaacgtctcgcctctatcgacctccaaatcctctcagctcaggtgacagaatctacggatttcactgagctgacagaccagcatccatggctttcgtcaaccagattggtcgtcaagccagacatgctgttcgggaagcgcggcaagagtggcttagttgctctccatttagacatagctcaag

SEQ ID NO: 189664 - DNA, 258 bp, Glycine max
tctcgagccgattcggctcgagatgagactttcacccttttcagagttcaatgaatgtagtgtctcaaatcctcaagcattatgtctctacatggccaaatcacttagcaaacatggtgtgctttattgccacatggttgagccaagatgggacatttctggggagaataaggaaacccttcacactctttcaccaatgaagaaagcttttgatggaaccttcattgttgctgggggttatgatagagaagaagggaa

SEQ ID NO: 189665 - DNA, 262 bp, Glycine max
  unsure (1)..(262): unsure at all n locations
ctcgagccgatggcttctgtgcctcaaccaaaaatctcccttctaaccttattcttcttcagttccttcaccatcattgcgtantgaattgttcctcaaaacgaaaaatataaatatgagaactcaggtgaacttggaccctacatcgttgagtacggtgcagattacagaatgataagcatcttcaactctccattccaagttggtttctacaacaccaacccaaatgccttcactctagctttgcgtgtagggctccaac

SEQ ID NO: 189666 - DNA, 262 bp, Glycine max
gttccctttgcttcttagtgtttctagctgcagcaatgcaaggtacacttgcagttgattacactgtcaccaacaacgccctctcaacctctggtggcgtgcgtttccgtgatgcaataggggacgattatgcaaaacaaacgctcgactcagccacccaattcatatggtgggtgctccagcaaaacgctcctgctgatagaaaagatgtgcaaaaagtaaacctgttcgtggatgacatggatggcgttgcatataccag

SEQ ID NO: 189667 - DNA, 223 bp, Glycine max
ctcgagccgtccaggacaaggaaggtatccctcctgaccagcagaggttgatttttgctgataagcagctggaagatggtcgcactcttgctgattataacatacaaaaggaatcaacacttcacttggtcttgaggctcaggggaggaaccatgattaaagtgaagactctaactggaaaaggaattgaaattgacattgagccaactgatacaatcgaccg

SEQ ID NO: 189668 - DNA, 261 bp, Glycine max
cttctttttctccttgaactcaaacatggcagatgaggtggttctgctagatttctggccaagtccatttgggatgagggtcaggattgcacttgctgaaaagggtatcaaatatgagtacaaagaagaggacttgaggaacaagagtcctcttctcctccaaatgaacccggttcacaagaagattccggttctcatccacaatggcaaacccatttgtgaatccctcattgctgttcagtacattgaggaggtttggaa

SEQ ID NO: 189669 - DNA, 206 bp, Glycine max
gttccatgcgaatcatggccttcgccctccaagcattcttggagttagggagcatgtttttacaggaagtgtctcttccttggcttggttcatgtcaaatcaagaaactagctttgtaaccttggcccaacgagttttagcaaatcctctcaaagttcgcatgcactatggaactacagatgtatttgaccgaatattccacataa

SEQ ID NO: 189670 - DNA, 262 bp, Glycine max
ccttcatcatgatcaagccagatggcgttcaaagaggccttattggcgagattattagcagatttgagaggaagggtttttacttgaaagggttgaaactcgttactgtggaccgtccttttgctgagaagcactatgctgatttgtctgcaaagcctttctttagtggtttggtggattacattgtctctggccctgttgttgccatgatctgggagggtaagaatgttgttacaactggccgaaagattatcggagccac

SEQ ID NO: 189671 - DNA, 258 bp, Glycine max
ctcaggtaagccaaagccatggttaagcataacaatgttatccccaacggacacttccgtaagcactggcagaactatgtgaagacctggttcaatcagccagcacggaagacaagaagacggttggctcgtcagaagaaagctgtgaagattttccccagacctacagctggacctcttagacccattgtacatggtcaaactttgaaatacaacatgaaagtgagagctggaaggggattttcccttgaagaactc

SEQ ID NO: 189672 - DNA, 249 bp, Glycine max
gtgggaggaggctcgggactctgaccgtgtgcctgttgaagaatgagccggcgactcataggcagtggcttggttaagggaaaccaccggagccgtagcgaaagcgagtcttcacagggcaattgtcactgcttatggacccgaacctgggtgatctatccattttcaggatgaagcttgggtgaaactaagtggaggtccgaaacgactgatgttgaagaatcagcggatgagttgtgggtaagggtg

SEQ ID NO: 189673 - DNA, 260 bp, Glycine max
tgtgaacagatttgcagcatagcactatctcgaaattgttcattttcctctaatctatggatcccgaaacatcgttagaacttgtcaagcacggtgtcactctcctcttactcgatgttcctcagtacacccttgtcgccgtcgatactcagatgttctctgtggggcctgcttttaagggtattaagatgattcctccaggcgttcattttgtgtattatagttcatcaagcagggatgggaaggagttctcatcaatt

SEQ ID NO: 189674 - DNA, 263 bp, Glycine max
tagaaatcccatattttccccccacattaactcatccattccctcttactaaaaggcctcaaagatatactccggacttatattacgttattttgttagggtcaccgtttcgagatattctaaacttgtactgaaaaatatggagggaaaagaagaggacgtcagagttggagccaacaggtacggagagaggcagccaatagggaccgctgctcatgctaaagactacagagagccaccgtcggcgcctctcttcgaagcgg

SEQ ID NO: 189675 - DNA, 219 bp, Glycine max
tagatgggttaaagttttctggaggttctcacagcatgatgccaaaggctactatcaagcaaatcattgacatggcccatcagcatgacgtgtatgttagcacgggtgattgggctgagcacatgattagcaaaagtccatcaggtttcaaggaatatgtagaggaatgcaagcagttggggtttgacaccattgagctcaatgtgggatcgcttgaga

SEQ ID NO: 189676 - DNA, 260 bp, Glycine max
ggggtggttctgttggatacatgggccagcatgtttgggatgagggttaggattgcattagctgaaaagggtgttgagtatgaatacaaggaagaaaatctcaggaacaagagtcctttgcttttgcaaatgaacccaattcacaagaaaattccagttctgatccataatggcaaaccaatttgtgaatctgcaattatagtgcagtacattgatgaggtctggaatgataaagctccaatcttgttctctgaccctta

SEQ ID NO: 189677 - DNA, 262 bp, Glycine max
agattctgacccacaatagcaagggaatcagattccagattttatcaaaccctgaattccttgctgagggaactgcaatcaaagatctctttaacccagaccgtgttcttattggaggcagggaaaccccagagggccaaaaagctattcaagcattgaaggttgtttatgctcaatgggtccccgaagaaagaatactaaccacaaatctctggtcggcagaactatctaagcttgctgctaatgccttcttggcccaaag

SEQ ID NO: 189678 - DNA, 258 bp, Glycine max
ggagcacttgttctactctttgcatttctcttcctcagttgtgtgtatgtacaagacacaacaacccttgtgcctgctctcataacttttggtgattctgctgtggttgtagggaacaatgactatcttcccacccttttcaaggctgattaacctccttatgggagggactttgttaaccaccaacctaatgggctgttgtgcaatggcaaattagctactgatttcactgctgacacattgggtttcaagacctat

SEQ ID NO: 189679 - DNA, 257 bp, Glycine max
ggagtttgggaaaccctaattcattcctctttgcttcttctatctctattcctctaacaccagtgactgcaggtttggctccagaaggatcgcagtttgatgctcggcaatatgattctaagatgaatgaattgctttccgccgatggccaagaatttttcacttcatatgacgcagtctatgctagttttgatgccatgggccttcaagaaaatcttctgagcggcgtatatgcttatagttttgagcggccttct

SEQ ID NO: 189680 - DNA, 260 bp, Glycine max
ggggcctcttccccgggcgtcgaacagtcaactcagaactggtacggacaaggggaatccgactgtttaattaaaacaaagcattgcgatggtccctgcggatgttgacgcaatgtgatttctgcccagtgctctgaatgtcaaagtgaagaaattcatccaagtgcgggtaaacggcgggagtaactatgactctcttaaggtagccaaatgcctcgtcatctaattagtgacgcgcatgaatggattaacgagattcc

SEQ ID NO: 189681 - DNA, 261 bp, Glycine max
cgcggcataacctaaacttacccttcttctctctgtgtgtgtgcgcatcaaacgcaaccagaagcagccatggccactgcaagaactgtgaaggacgtttctcctcatgagttcgtcaaagcttactcttctcacctcaagcgatctggcaagatggagctgccagagtggactgatattgtgaaaactgcaagatttaaggagttggctccttatgatcctgactggtactatgtcagagctgcttccatggcaagaaag

SEQ ID NO: 189682 - DNA, 181 bp, Glycine max
gcgatggctagaactgaatccactgtacccatatttgatatggctgacatagaggagggtgttgaaggttatgatgatgaaaggacactacttatgtctcaaaagagcttggagaagcgttttggtcagtctccagtttttattgctgccactttcatggagcagggtggcattccacctt

SEQ ID NO: 189683 - DNA, 246 bp, Glycine max
gctggacctaattcccggtcaaagcgcgtggttacacctcctgttgatgctactactaattggatgtggcagcttgccaaggcccatgtttgctccaatgatgctggggtgcaccaacttgttaaccattggttacgtacacatgccaacttggaaccatttatattggcggctcataggcaattaagtgctatgcgtccaattttccagttgttggcaccccacatgaggtaaaccttggagatc

SEQ ID NO: 189684 - DNA, 266 bp, Glycine max
ggaaagtccaagaccgaatctaagagagccgatcccaaacttgctgtgaataagaagggagccgccaccaaggctaggaaacccgccggcaaggggaaggcagcgaaagaccctaacaagccaaagaggcctccaagtgctttcttcgttttcatctgggagttcaggaaggtattcaacaaagaacatcctgaaaacaaagcagtgtctgctgtgggcaaagctgctggagcaaaatggaagaccatgtctgatgctgaaaaagc

SEQ ID NO: 189685 - DNA, 223 bp, Glycine max
aagcaattgaaatttctgatctacggtcgcagcggttggattggtggtctactgggtaagctctgcgaagagcgcgggatccaatatgagtacggcaccggcagattggagaaccgctcgtcgttggaggcggacatagcggctgtgaagcccagccacgtgttcaacgccgcgggtgtcccgggtaaacccaatgtggactggtgcgaatctcacaaagttg

SEQ ID NO: 189686 - DNA, 256 bp, Glycine max
agataaaccaatgccaaggggagagattgtagttggaggatttagtgtgacagctggttactttaagaatcaagaaaaaactaaagaagtgttcaaggttgatgagaagggaatgcgctggttttatactggcgatattgggcaattccatcctgatggatgtcttgaaatcatagataggaagaaagatattgtcaaacttcaacatggagaatatatatctcttggaaagattgaggcagcactatcatcgtgt

SEQ ID NO: 189687 - DNA, 259 bp, Glycine max
gtccttccttcttcgatccagatctctctccttctccctcaaatggcttcccttctgcaatgttccatgcccctcgtctctctttccaatcgagctctggtacccggtaccaggatctccaacccaagttcagtttccctttcaattaagggaagaagtttcccatccgttacattgcagcccagagggcgtcggtttcagcttagatgtgcggcaaaaccagagacagtgaagaaggtgtgtgacatagtcaagaagc

SEQ ID NO: 189688 - DNA, 252 bp, Glycine max
atgggttcttcttcttctatgtggacggtgtgtgtgatctcggcatcactggcctctgcagcactctgtgccaacccacgcaggccagtggatgtacaatttggccgaaactacgtgcccacatgggcctttgatcacatcaaatatttcaatggtggttctgacattcagcttcatcttgacaagtacactggtactggcttccagtccaaagggtcttacttgtttggtcacttcagcatgtacataaag

SEQ ID NO: 189689 - DNA, 256 bp, Glycine max
gcctcactctctcactctctcactctcttaggagcctataatctgagcgatgtcagatctcgaggctcccttgcgccctaagaggaagaaggtttgggtggactattttgttcagtttcgatggatccttgttatttttgtggtccttcccatctccttcaccatttatttccttgactaccttggggttgtaagatccgagtggaagtcctataagacgcgtcagtaggcacatgatgagaatgtgaagcaggtt

SEQ ID NO: 189690 - DNA, 271 bp, Glycine max
cattcggctcaagatcttctctgtattgctgttatgtctgatcatagcagcttcttctgggtttgtgaattgctttgatgttgaaaagaaggagaagatttgaatatttgcgctcaatataggtgacctttctttgaaggtcaccaactggggtgcttcaattttgtccctggtgattcctgataagtatggaaagttgagtgatgttgtacttggatatgattctgttaaggattacactaatgctacaacatattttggagcaactgtt

SEQ ID NO: 189691 - DNA, 219 bp, Glycine max
ctcgagccgatatatagcaagcatggcagtcacactctacgaccttagctcttcctctgggttgaagaaacttgatgagtaccttctcccacgcagttacatcaccgggtaccaagctacaaaggatgatcttactgtttatgcagctttgccatgtgctccatcagatgaatatggaaatgtttccaggtggtacaagcacattgatgctttggtgag

SEQ ID NO: 189692 - DNA, 252 bp, Glycine max
ggccgccctttttttttttttttttttttttttttttttttttttttttttttttattattttttttattcttttttttcctgctacaattttcaaacacgggggggagccacaagaaaaaatagtatcaaaccacttaaaaagattttcccacccctaaaaaaaaaaatcctagtggcaaagaatatgggaaaaattttcccccccaaaaaaaaataaaaatttgaaagggggttaacctttcaaaaatta

SEQ ID NO: 189693 - DNA, 258 bp, Glycine max
ggaggaggtggtggagggaaatcatcgtggagttcatcaacatcgtcatgggtacccacaacctcagtgtcggcatctggaaagaggattcagagggaaatggttgaactcaacaacgaccctcctcctgattgctctgctggccccaagggcgataacctctatcactggattgccaccattattggaaccccagaaacaccctaccaaggtggcatctttttccttgacatcaaatttccaattgattatcccttc

SEQ ID NO: 189694 - DNA, 255 bp, Glycine max
ctcaggactaagaggatcggagaatatggaaagacatgagtgctcttgtagggcggatgtgttggaaaatagcttctaagaggaaccagactgtcatatgggtcaagcctcttacaaatgactgttacttgaaaagagagcctgatactcaccctccactactgcagtcctactcatgatcctgatgctgtttggggagttaaaatgaaagcttgtatcacacgctattctgatcagatgcacagagcaaaagga

SEQ ID NO: 189695 - DNA, 255 bp, Glycine max
cttcatttcattatataatatgcatgttgcttatttccaacatatacctttgatttcattaatgatatcaatgaaatttaatttattatttcaggtgataagtcgatgattaagaagcgatacatgtacttaaacgaagagatcctgaaggagaatcccagtgtttgtgcatatatggcaccttcgttggatgcaaggcaagacatggtggttatggaggtaccaaagttgggaaaagaggctgcaactaaggca

SEQ ID NO: 189696 - DNA, 255 bp, Glycine max
atcccgttcttccagagcattgttcttcctaaagaagctaccactgttcagaagtgctacattgagcttgccaagcaagtcaaggaaaagctttccaaggtagatccttactttgacaagttggcagatgccatggtcacttggattgaagcttgggatgagcttaaccctgcgggagcatcagtggccaatggcaaagcgtgaatcggtttttggttaactgcataacagccacaaaacttggaagtggaacta

SEQ ID NO: 189697 - DNA, 255 bp, Glycine max
agagcctgcgccggagcctgacatccggcttcttgttcggtctctctcagcttgccctctatgcctccgaggctctcattctatggtatggtgcacatttggtcagcaaaggtgtttcaaccttctcaaaggtcatcaaggtgtttgtggtcctagtgatcactgcgaattcggtggctgaaaccgtgagccttgcaccggagattattcgcggtggcgaagctgttggttcagtgttctcaatcctcgatcgat

SEQ ID NO: 189698 - DNA, 257 bp, Glycine max
caagatgcctccagaagctattgatcttgcatcccggctgttgcaatactccccaagtctccggtgcactgcacttgaagcatgtgcacatcctttctttgatgaacttcgtgaacccaacgctcgcctgccaaatggtcgcccatttccccctctatttaacttcaaacaggaattatctggagcatctcccgagcttgttaataagttgataactgaccatgtgaagcggccaatggggctaccatttatgcatc

SEQ ID NO: 189699 - DNA, 253 bp, Glycine max
ggttggaggacgcacttcatgtggctctggcaagggcaagagccatcagggctcagttaagtatggctttagcctagttaaagggaaagcaaaccacccaatggaggactatcatgtagcaaaaattcgtcaagcttggagggcaagagttaggactttttgctatatatgacggacacttgggagacagtgtgcctgcctatttacaaaagcatctcttttctaatatcttgaaggaggaggacttctggac

SEQ ID NO: 189700 - DNA, 257 bp, Glycine max
ctcgagccgcatggcctcaagagcagtgttattgttgtgctatgtgtgtgcttccggcgatggttgtggccattcgcccagcaaagaaccctttttgcgtgaagggtcgtgtctactgtgacccttgccgtgctggttttgagacctcagctaccacctacattgctggtgctgagattatgttgcaatgcaagagcagggtttgcacacgaggttgtgtacacgaagaaggggtacaccgactcaaccggagcata

SEQ ID NO: 189701 - DNA, 254 bp, Glycine max
ctcagtctcatcatcaacaccttctactccaacaaggaaatcttccttcgtgaactcatcagcaacgcctctgatgctttggacaagattagatttgagagtttgacggacaagagcaagctcgatgctcagccagagttgttcattcatattattcccgacaagactaacaattcgctgaccattgttgacagtggcattggcatgaccaaagctgatttggtaaacaacttgggtacaattgctaggtctgg

SEQ ID NO: 189702 - DNA, 253 bp, Glycine max
ctcgagccgcttctaaaagtgacttaacagctcatattgaaacttacctacagaattgaggatcatgggttgctttggcttctgcaaaggagatgatagtgtcacagttgctgacagaggacctttcatgcaaagcactcctactgggaaccccagttatcatggaagacacgcagcagtaactgctcctcggactataaatgttcaacctattgctgtcccttcaattacagtagatgagttgaagcctttg

SEQ ID NO: 189703 - DNA, 255 bp, Glycine max
gaactaccccgtgaaattctctgtcaacgaatcgctggcgaaggaaaatcgtttatctcttgagatcaagctcatctccgaccgcaccctcggcgacaccgtcatcggcaccgtccatgttcctctcagggaactcctggataaccccggcgatgacagctccttccgccaagtcagttatcaggtgatgaagcaatcaagaaaatcctcgggatccttgaatttctcctacaaattcggcgaacatgttcccgc

SEQ ID NO: 189704 - DNA, 255 bp, Glycine max
ggatatacaacctcttgtttgtgataatggaactggaatggtcaaggctggatttgctggagatgatgctccaagggctgtgttccctagcattgtgggtcgtccacgccacactggtgtgatggttggaatgggcaaaaggacgcatatgttggtgatgaggctcaatccaagaggggtattttaacactgaaatacccaattgagcatggcatagttaacaactgggatgacatggagaagatctggcatcac

SEQ ID NO: 189705 - DNA, 251 bp, Glycine max
gaaaattctatgtggagagaagctttcatgaaggcatacaaggctatggataaagtgttgaggtctcatccaaatttggactgcttctgtagtggaagcacagctgtcactatagtgaagcagggttcaaattgttcatgggaaatattggggattcccgagcaatcatgggatccaaggacggcaatgactccatggtggcaattcagttgaccattgatttgaagcctgattgtccaagtgggaagcag

SEQ ID NO: 189706 - DNA, 253 bp, Glycine max
gcatcgctgtccatggctaccatcgttagcatcaaggcccgccagatcttcgacagtcgtggcaatccaactgtcgaggtggatttgacttgctccgatggtacttttgccagagctgctgttccaagtgggcatccactgggatttatgaggcccttgaattgagagatggaggatctgactaccttggaaagggtgtatcaaaggctgttgacaatgtgaacaccgtcattggccctgctttgattggcaa

SEQ ID NO: 189707 - DNA, 251 bp, Glycine max
ggagcagtttgtgtcgttgggagcgaacaagttccccgagagacagccaattgggacggcggcgcagagccaagacgacggcaaggactaccaggagccggcgccggcgccgctggttgacccgacggagttacgtcatggtcgttttacagagcagggatagcagagtttgtggccacttttctgtttctctacatcactgtcttaatcgttatgggagtcgccggggctaagtctaagtgtagtaccgt

SEQ ID NO: 189708 - DNA, 252 bp, Glycine max
gcaaggtgtggctttggcgatcttgaggggtgtgattgacttcaagagggaaccttggccgcaaatatcggagagtgccaagagccttgtgcggcgaatgttggagccggatcctaaaaaccgcttgacagtgaacaggtgcttgaacatccctggctgcaaaatgcaaagaaagctccaaatgttccattaggagatattgtcaggtcaaggcttaagcagttttctgtgatgaatagattcaaaaagaaa

SEQ ID NO: 189709 - DNA, 254 bp, Glycine max
ggaggggtgtcatataagtctgatgtctatagttatggaatgatgattttggaaatggtcggaggaaggcaaagtatcagtattgaagcaagtcattcaagtgagacatattttcctgattggatatacaacatgttgagttgggaagcaatttagcatgggatgaaggtatgaccacagatgaaaatgaaatttgtaagaaaatgattattgtgggattgtggtgcatacaaacaatcccatctgacaggcct

SEQ ID NO: 189710 - DNA, 255 bp, Glycine max
gagagaatgagtacggtgggagaagggaaggtgagtagtaatggtcatggatgttgcaaatcagggccaggctatgcttccccactggaagccatttctggtcccagagagtctctcatttatgtaacctcttctacacagggaccggaatagagaagccagactatttggcgacagtggatgtggatccaaactctccaacttattccaaagtcatccataggcttcctgttccttatttaggtgacgaattgc

SEQ ID NO: 189711 - DNA, 255 bp, Glycine max
aaatcaaagagcataatgtcagggatcattcacaagattggggagacccttcatgtgggagggcacaagaaggaggaggagcataagggtgagcaccatgctggagaatacaaaggggagcaccatggtgacacagtagtgagtacaaaggagagcatcatggtgaacacaaagctggagagtaccatggtgagcacaagccagagcacaaagaggggttcctagacaaagtcaaggacaagatccatggtgagg

SEQ ID NO: 189712 - DNA, 254 bp, Glycine max
caagaatcaaggaaccaaccaaccaccccatttcagctctctctggatattgtaatggaagcaggtttagaatcaatgggagtatcagaggcttggaaggctcatgtgggcatggctctggtgcagctatttatggtggctaccatgtcctaaccaaagtggcacttaatgttgggatcaaccaactagttttctgcttttaccgcgatttccttgccttcactattgttgctccgctcgctttttttcttgaa

SEQ ID NO: 189713 - DNA, 253 bp, Glycine max
ccaaatcgtagatctacggttaaattggtgtagtgtggtaagatgggaggaggatttagagtgcttcacttagttaggccatttctctcgtttcttcctgaagttcaaactgctgacaggaaagtgccattagagagaaggtcatatacactgtgatctctcttttcattttcctggtttgtagtcagctccctctatatgggatacactcaacaacaggtgctgatccattctattggatgcgtgttattct

SEQ ID NO: 189714 - DNA, 256 bp, Glycine max
gcttgctgtggaagcacacaacatctttggctttgagaccattcctgaagagtgcgttgaagcaacaaaggaatacatccatggcgaacaatatagatcagactccaaaacagttaaccaacaagcttactttatgccagagacctcgaagtccatcccaaggacacatttgtgttcagtatagatggcaccgtactctctaatattccatactacaaaaaacatggatatggggtggagaaatttaactcgacct

SEQ ID NO: 189715 - DNA, 257 bp, Glycine max
cttctctctccacccaaaccctaactcccgaccctgttcccctctacgtatccgtcatgaaaggaggaaagtccaagaccgaatctaagagagccgatcccaaacttgctgtgaataagaagggagccgccacaaggctaggaaacccgccggcaaggggaaggcagcgaaagaccctaacaagccaaagaggcctccaagtgctttcttcgttttcatggaggagttcaggaaggtattcaacaaagaacatcctg

SEQ ID NO: 189716 - DNA, 271 bp, Glycine max
  unsure (1)..(271): unsure at all n locations
tcggtgttcggctctagcgcgagccttgctgatgttgacgcaatgtgatttctgcccagtgctctgaatgtcaaagtgaagaaattctactaagcgcgggtaaacggcgggagtaactatgactctcttaaggtagccaaatgcctcgtcatctaattagtgacgcgcatgaatggattaacgagattcccactgtccctgtactactatccagcgaaaccacagccaagggaacgggctagngcggaatcagcggggaaagaagaccctg

SEQ ID NO: 189717 - DNA, 253 bp, Glycine max
ctccctctttattttcttcttcttcttcttcgctaaaccccccctttatttttcctatctcactaacatcgatgggagacgagaataagactaagtcccctgcttccggcgtgtggtccaccatcaagccttcgtcaatggcggagctccggcatgctcgccacctgcgtcattcaacccatcgatatgatcaaggtgaggattcaacttgggcaaggatcagctgcgcaggtcacttccaccatgcttaaga

SEQ ID NO: 189718 - DNA, 255 bp, Glycine max
tctcgagccgattcggctcgagcttcacttttgtttgtcccacagtcatcactgctttcagtgaccggcatgcagagttcgaggcactaaatactgagatattgggtgtttcagttgacagtgtgttctcgcacttgcatggatccaaacagatagaaagtcaggtggccttggtgacttgaattatcctttgatttctgatgtcaccaaatccatatcgaaatcttatggtgttctcattcctgatcagggaat

SEQ ID NO: 189719 - DNA, 259 bp, Glycine max
accagcaccacttccaatggcttcaaatcatgaagaagtgatacttttgggcaagtgggccagcccatttagcaacagagtagaccttgctctcaagctcaagggagttccctacaaatactccgaggaagatctgctaacaagagtgctgatcttctcaggtacaaccccgtgcacaagaaggttccggttttggtccacaatgggaacccattacccgagtcacttatcattgttgaatacatcgatgagacatgga

SEQ ID NO: 189720 - DNA, 260 bp, Glycine max
gcgagaattaaatggcaaactttccagttgttgacatgggtaagcttaacaccgaaggaagacctgcagccatggagattataaaagatgcctgtgagaactggggtttctttgagttggtgaaccatgggatatcattgagcttatggacacagtggagaagctcacaaaagagcattacaagaagactctggaacaaaggttcaaagaaatggtgaccagcaaaggtcttgagtcagttcagtcagaaatcaatgact

SEQ ID NO: 189721 - DNA, 257 bp, Glycine max
  unsure (1)..(257): unsure at all n locations
catcaccancatggaagatgngcaagcgaggataggcagagttgctgggaacaaagacctttaccttgggacgttcagcacccaagaggaagcagcagaagcatacgatgtagcggcgatcaaatttcgcgggcaaatgcagtcacaaactttgacatttcaagatacgatgtggagagaatcatggccagtngcaatctcctcgctggggagcttgcaaggcgtaaganagataacgatcctagaaacaaggacct

SEQ ID NO: 189722 - DNA, 171 bp, Glycine max
  unsure (1)..(171): unsure at all n locations
ctcaacgaagaggttaaagagacggcaacactttgctgtccgccttgaccgagcagagcttcgtcttggccctcgattttgccctaaagtactctcagtcacaacagacaccgtcgtacgtacgtcgtcgtcatcaattggcacacgaagnncagaccaagggctttgaga

SEQ ID NO: 189723 - DNA, 252 bp, Glycine max
gcctaacctactattatccctttccttcctgcatctctttgctttcctggctctttcagatagatgttcaacaagttgtggacataagtgtcaaccccattttcccaggtggcacatattacattatgcctcaacttggggcgctgccggtggtggattgaaactaggtcggacaggaaactcaaactgcccagttactgttttgcaagattactcagaaatcttccgtggcacaccagtcaaattcagcat

SEQ ID NO: 189724 - DNA, 252 bp, Glycine max
atcaagcttgccccctccaaccctcagcttggttttggaagggttaccatgacgagaacagcctccaagaatgtgtcttctggacgcccatggtgcggcacagaccgtcttaagtacttgggcccattcctggtgagcccccatcctacctcactggtgaattcccaggtgactatggttgggacactgctgggctttctgctgacccagagacctttgccaagaaccgtgaacttgacgtcatccactcca

SEQ ID NO: 189725 - DNA, 255 bp, Glycine max
caaggcccctctggttccaccgagtacgccagtggttaatgcactgtcaaagcagcgagctatgctggaaaacatcctaagggcttgtgttggattagctcctgagaacaacatgatcctggagtacaagtaagttcaaagtcttaagagtaatggtttgggatactgtagttgaatgagatcaaaacttaactcatatcccataccctcttttctgttatatatttatggcaaatgtgaaatttaaagatcgtt

SEQ ID NO: 189726 - DNA, 259 bp, Glycine max
cggctcgagatggaacagctggcagcggtggaaggattgtgcgagttggcgaggaaggcggttggggcgggggaatcggttcggagatatcacgtgaacctgtctgttttcacgtccgttccagacgcgtggggattgaacaggtgtttcccattatcccaattcaccgtttggacgaaaagccttcggtgaggggtattctctcggacttgacttgtgacagcgacgggaagattgacaagttcatcaacggagagtc

SEQ ID NO: 189727 - DNA, 255 bp, Glycine max
gcgggttacagagccgacgacgactacgactacctcttcaaggtggtcctcatcggcgactccggcgtgggcaagtccaacctcctctcgcgcttcaccaagaacgagttcaacctggagtccaagtccacattggcgtcgagttcgccacccgcaccttgaacgtcgattccaaagtcatcaaggcccagatctgggataccgcaggccaagaaaggtatcgtgcgatcaccagtgcttactatcgtggggcag

SEQ ID NO: 189728 - DNA, 241 bp, Glycine max
  unsure (1)..(241): unsure at all n locations
ataaacgctaacctctgtaccattcttcttcttaaaaatgagagagtgcatttccatccacattgggcactanttcanacangncggaaatgcntgctgggagctttattgcctcgagcatgccattcacgttcatctacgttgatctaacgttctgccattcgcaatatacagtcanaccttggctgatgggcagatgccgagtgataagaccataggtggtggtgacgatgctttcaac

SEQ ID NO: 189729 - DNA, 254 bp, Glycine max
atcggaacctcttctgcggcgtagcaatgggacactccaacgtttggaactctcacccaaaaaactacggtcctggttctcgcacttgccgtgtgtgtgggaatccacatggactgatcaggaagtatggcttatgtgctgtaggcagtgcttccgtagcaatgccaaggaaattggcttcatcaagtatcgctaaaagagcagttgtcaactacggaccaatattgtgttctggcactaggatgttttgagga

SEQ ID NO: 189730 - DNA, 255 bp, Glycine max
tactcgagccgattcggctcgaggctttcttcgttttcatgtccgaattcagagagcagtttaacgaaggagcatcctaacaacaaatccgtcgctgttgtcggtaaagctggtggtgacaaatggaaatcgtgtctgatgctgaaaaggcccccttcgttgccacggccgaaaagaagaaacaagagtatgagaaaactattttggcttacaataagaaattggaggggaagaattcagaggaagacgagtctg

SEQ ID NO: 189731 - DNA, 250 bp, Glycine max
gccgacagtataatccatgtggttgccaaacggcttgtggaaagcagtgtccttgtcttcaaaatggaacctgctgtgagaagtactgtggatgccccaagagctgcaagaatcgatttcgtggctgcattgtgctaagagtcaatgcagaagccgtcaatgtccatgttttgctgcagatagggaatgtgatccagatgtttgtaggaattgttgggtcagttgtggcgatggtacacttgggattcct

SEQ ID NO: 189732 - DNA, 251 bp, Glycine max
attcggttgtgatataaacctgcgttgcgctaaacgacaccgttttcactgtctctgagaatggaggcactaagtcgctccgtggaagaaatattcgaggatttccagggccgaagagccggcatcacaaagcccttaccaccgatgttgaagatttctacagccaatgtgatcctgagaaggagaatttgtgcttatatggatttcctaatgagcaatgggaggtaaatttacccgttgaagaagttcct

SEQ ID NO: 189733 - DNA, 248 bp, Glycine max
gttcctctccttcgtttcgtcttcgatcttcggtttcattctgcgtttgttcacatcatggccaccgcttcagtggcatttaagtccagggaggaccaccgcaagcagattgagttggaggaggcgcgaaagcagggcttgcgccggctgaactcgatgaagatggaaaggaaatcaatcctcacattccccagtatatgtcttctgcaccttggtatcttaatgctgagagacctagtttgaaacat

SEQ ID NO: 189734 - DNA, 253 bp, Glycine max
gcttcttcttccgtttttgtctatcggcgtgaacaatggcgacttacgctgctatgaagcccacaaagcccggcttggaggagccccaggagcagatccacaagataaggatcaccctttcctccaagccgtcaaaaacctcgagaaggtttgtgcggacttggttcgcggtgcaaaggacaagcgcctcagggttaagggacctgtcaggatgcccactaaggttcttctcatcactaccaggaagtcccct

SEQ ID NO: 189735 - DNA, 251 bp, Glycine max
cgatcactcccacgcgctcctatatcctctccttcaccgtcgctctctccaacgatcacaacaacatcgtcatcccatggcaaacgccgcatctggtatggcagtccatgatgactgcaagttaaggttttggagctgaagacaaagaggacacaccgtttcatagtttttaagattgaggagcagcagaagcaggtcattgtggagaagcttggtgagccagcccaaggctatgaagatttcactgccag

SEQ ID NO: 189736 - DNA, 248 bp, Glycine max
gtctggataagcttacttatcttttagtttaggtgttttatctgtttttggttttattgcttgttgctttgtctggtttattaataccgcttatcctagtgagttttacgggcccactgggccagaacttctcaagctcaagcatttacttttctagttagagaccaacgtcttggggctaatgtaggatctgctcaaggacctacaggtttaggtaaatatctaatgtgttccccgacaggagaagt

SEQ ID NO: 189737 - DNA, 248 bp, Glycine max
cttttccgttaacccacagtttgcaggctcctacggctacattgctcccgagtatgcttgcatgcttaagatcacagagaagagcgacgtgtacagctttggagtggtcctactggagataataacgggaaaaggccagtggatccatcattcccggatggacaacaacatgttattcagtgggtgagggagcacctcaagagcaagaaggacccagtcgaggttcttgattccaagctacaaggcca

SEQ ID NO: 189738 - DNA, 253 bp, Glycine max
ggaccttgctgttcgtgctagtcttaggggatggaaatttttgtaccttggagacctccaggccataagtgagcttcctagtactttgagagccttcagattccagcagcacagatggttttgtggtcctctaatttgttccgcaaaatggtgattttgattgtgaggaacaagaaagttaagttttggaagaaagtgtatgttatatacagctttttctttgttcgcaaaatcatcgcccacatggtcacct

SEQ ID NO: 189739 - DNA, 259 bp, Glycine max
  unsure (1)..(259): unsure at all n locations
gctagttgccacactacaccgatatagtccacacaacatgctgagtgccnnnnnnnnnnnnnanannncnaagttnannannntnnnnacntttaannannnttgtttnaangggaagagggtattcgtgagggcgatctgaacgtgcctttggatgacaaccttaacatcaccgatgacactagagtccgtgctgctgttcccaccatcaagtacttgactggttatggtgctaaagtgatcctttctagccatttgg

SEQ ID NO: 189740 - DNA, 260 bp, Glycine max
atctatgtatgcctcatcttcaaaagttacaaatttaaatgaagtgcttatatctcttattagtactattgtatgtagaattgttttggggagaaggtatgaagaggagggatctgaaggtagcagattccatagttgttcaatgagtgtgaagctatgttgggtaacttctttgtttcagattatattcctttcatgggttggattgataaactcaggggactggatgcacgtcttgaacgcaatttcaaggagatgga

SEQ ID NO: 189741 - DNA, 289 bp, Glycine max
tggaacctctttcatgggtcatggaagctgcagcaatcatggccattgctttagccaatggaggaggcaaacctcctgattggcaagtacttgttgggattatcacactcctaattatcaattcaacaataagtttcattgaggagaacaatgctggtatgctgccgcagctctgatggctcgtctagcaccaatagctaagttccttcgagatgggaaatgggttgaggaggatgctagcattcttgttccgggtgatataattagtgttaagctaggggatattatc

SEQ ID NO: 189742 - DNA, 307 bp, Glycine max
tcggatatcggctcgatcgaattcgaagttaatttgcaagatggctaaggaaaaggctcagatcaacattgttgtggttggtcatgtggaccctgaggaggcaaccaccattaacgagctgaagaagcctgttgtggagaaagaagctccagggcatgccatatgagggcatgcagtacggcctcggaggggaaccagaaaattatgttaacaaaataatctggaaccctaatgtatcagtgtcatcatcagtgtgtagtttaagctagctttgctatggttacgttctttgagatgagagtcttga

SEQ ID NO: 189743 - DNA, 283 bp, Glycine max
catggctgcactccagagctcaatggccggtctctccctctcttccaaatctttcttaggccaactccttcctcccatcactctcccttctcttcttccgggtaagtcaacagagaagcaatgtcccattgtaaatgaggctaaaacgatgggagcggaggagtgtataccaaacagtcttcctatcttgcacaaaatgcatgttaaacttggagatacggtgcaagtcatatctggacgagaaaggggtaaagttggggagattactaaaatcttcaagcat

SEQ ID NO: 189744 - DNA, 284 bp, Glycine max
aataataatggggtctatgggtaactcaaatccaaatctaaatccaaatccaaatccaaatccatggactccaaaggattgttctgaaggaatttgcagcatctattgtcctcagtggtgttacaaagtgtactctcctccccctccaattctactaggtgatggcgatgatgacccttcaagctttgaattctcctcctctcatagttgctgtgattggaatcttggctagcactttcatcttggtcacttactataccataatctcaaggttctgcaggcgc

SEQ ID NO: 189745 - DNA, 287 bp, Glycine max
atgcttgtctcaaagattaagccatgcatgtgtaagtatgaactaattcagactgtgaaactgcgaatggctcattaaatcagttatagtttgtttgatggtatctactcggataaccgtagtaattctagagctaatacgtgcaacaatacccgacttctgggaagggatgcatttattagataaaaggtcaaaacaggctctgcctgttgctttgatgattcatgataactcgtcggatcgcacggcctttgtgccggcgacgcatcattcaaatttctgcccta

SEQ ID NO: 189746 - DNA, 294 bp, Glycine max
taggtattcctgttgggacatcattaattgatgctcatgctggtggcgtgggggtaattgaaagtgtgccaccatcagaagctgaagaacatgacatggaagcaaattgcaccgtatggtgttagtttgtggaacttctacatgccatatggctgtatccggagcaaattgttcatacctggggtttggggtccattttggtcagcaatggtaccagaatattggctaacggaaggtgggcagagtgctactggtgcattattggatcatataattgaaaaccatgctgcttct

SEQ ID NO: 189747 - DNA, 290 bp, Glycine max
tcgagaatactgccccaaaatgattctcacatacggtgtcaagtattttgatggcaccataacacatggaggctactctgatttgatggttgcggatgaacactttgtggttagaattccggataacctaccactccatgctgctgctcctctcctctggctgggatcactgtgtatagccctttgagataccatggacttgacaagcctggtctgaatcttggtgtggttggtcttggtggacttggtcacatggctgtcaagtttgccaaagctcttggagctaatgt

SEQ ID NO: 189748 - DNA, 198 bp, Glycine max
gcaccatgtgaaaaatgcaagaaggatgctaacatctctatcaaggatgttgatgaggttcttcttgttggagggatgactcgagttcctaaagtccaagatgtggtttcagagatctttggaaagtctcctagcagaggagtaaatcctgatgaggcagtgccatgggggcagcatccaaggtggtatctacggggg

SEQ ID NO: 189749 - DNA, 128 bp, Glycine max
ttaccaaacatggtgacagggcgacaaggagagcgtgttagactttacgtcaggggttcaatacttgtatacaagaggtccaagtcaaatcaatactccaacacctcattaatccagattgagaatgt

SEQ ID NO: 189750 - DNA, 293 bp, Glycine max
  unsure (1)..(293): unsure at all n locations
ganaaagaagagtcaccgctacgacgccgttcgtgcttttttgaggtgccacagtcatgtttggtgctggtggaccaaggaggagtgacaactccaaatattatgatattctcggggtttcccaaatgccagtgtagatgaaatcaagaaggcctatagaaaggctgctatgaagaaccatccagataagggaggagatcctgaaaagttcaaggagttaggtcaagcatatgaagttttaagtgatcctgagaagaaagacctgtatgaccagtatggtgaagatgccctta

SEQ ID NO: 189751 - DNA, 288 bp, Glycine max
cttctgagtactgtgttgtcgctccagacacagagatcttctgtgaaggagagcctgttaaaagggaagatgagaatagattagacgaggttggatatgatgatgttggtggtgtaagacagcaaatggcacagattcgggaattagtggaatgccatgaggagaccacagttattcaagtctattggtgttaagccaccaaaaggaattctgttgtatggacccccagggtctggtaagactttaattgctcgggcagttgcaaatgaaactggtgccttctttttc

SEQ ID NO: 189752 - DNA, 303 bp, Glycine max
  unsure (1)..(303): unsure at all n locations
gctcggacatcggctcgagcgagtcaggaggtcacacggggcacgcggtcgggcgcaacgagttagtccggttgctagggagcaagacaggtatcccggaatagcaaacgtgagacngatcatgacgaaggcgttgccggccgacgcgaagatattcgaagacggcgatggagacggtcaagagtgcgcgtcggggttcatcagcttcataacatgtgaggcttccgataagtgccagaaggaggacaggaagacgatcaacggcgacgatcttctctgggccatgactaccctgggcttcga

SEQ ID NO: 189753 - DNA, 199 bp, Glycine max
atgcggtgctacaagtatgtttcggagctatggcgcaagaagcagtctgatgctatgagattcttgcagcgggtgatgtgctgggagtatcgccagcatccttctattgtccgtgtgacaaggtctattcgctcagatatgtgccgtcgcttggcgttcaggctaagcaagggtacgtgatttaacgtgttcgcgcacg

SEQ ID NO: 189754 - DNA, 280 bp, Glycine max
tgaccatcggcggtcaatctgctggccgcatcgtgatggagctctacgccgacgtcactccccgcaccgccgagatattccgcgcgctttgcaccggcgagaagggcgtagggcggagcggcaaagcccctccaactaccaagggctcgtccttccaccggtgatcccgagtttcatgtgtcagggtggcgacttcaccgccggaaacggaaccggcggcgagtcgatttatggcgccaagttcgccgacgagaacttcgtgaagaagcacaccggtccc

SEQ ID NO: 189755 - DNA, 232 bp, Glycine max
tcatcgaccgattcggctcgagtgacgttagtaagtaacaatggtgcagaaggccaagggtacgaaggaggaggttgtcactcgagagtacaccatcaacctccacaaacgcttgcatggctgcacatttaagaagaaggctcctaaagcaattaggagataaggaagtttgctcagacagcgatggggacgatgatgtaagatggatgtgaagctcaacaggctgtgtgga

SEQ ID NO: 189756 - DNA, 287 bp, Glycine max
tgtttgttttgtgctttagataaaagttctgccaaatcaagaggggttttaagatcatagtgtgtgttttgcaacaatggctaagttctttgctgctatgatcttggcactctttgccatttccatacttcaaacagtggtaatggctgctaatgaacagggaggccatttgtatgacaaccagagcaaatatggaagtggaagtgtcaagagttaccattgcccatcacaatgctccgaggagatgtagccagacccaataccacaagccctgcatgtttttctgt

SEQ ID NO: 189757 - DNA, 271 bp, Glycine max
ctcgagccgctcattgagagcttcaaaaattcaggagtaaatctaattaagggagatatgaatgatcatgagagtctggttaatgcaatcaagcaagttgatgtcgtaatctgtgcatttggtagactactaattgaagaccagttgaagatcatgcagcataaaagaagctggaacggtcagagatttttccaactgaattgggattggagtggatgtcacgattaagttgacccattagagaagttttcgaggaaaaagcagattcgag

SEQ ID NO: 189758 - DNA, 189 bp, Glycine max
ctagatctgatctgagagaatggctcctcggtctagcagcaaggacgcccaagaccttttccgcgctctttggtctgcttatgctgcaacccccactaatctcaagatcattgatctctatgtcatctatgccgtattcaccgctttcatcaggttgtttacatggctttggttggatcatttcccatt

SEQ ID NO: 189759 - DNA, 273 bp, Glycine max
caaaaaggccttattactcctggacagactgttctggttgagtatacaagtggtaacaccggcataggattggcattcatagcagcattgaggggctataaacttcaggtgactatgccgtcttatgtgagtcttgaggagaagattttactgccgccatttggagctgaggtagttctttaggaccttgccaaaggtattgatggagtgattcagaaggcagaagagctactagcaaagacacctgatagttttatgcttaaccaatttgaa

SEQ ID NO: 189760 - DNA, 178 bp, Glycine max
  unsure (1)..(178): unsure at all n locations
cgtgaggagaatatgaagttgtttgtattctttgttgctgcagtagttttggtagcatggccatgccatggcgcaggctaccanaggttccctctccgaatgaaaactggctatggtgagcgttcttcggaggtanaatgcgccagttttaggttgctgtggaagcacaccacatccg

SEQ ID NO: 189761 - DNA, 270 bp, Glycine max
gcttcttcctatttttctctcccttttgatcggatgaatttcctgattgtacgcctaaatatcataagcaagcttgatcaagtgaatcaggttattggtttcaatttgttatctcaatctttgttaccagccattgttgagtttgctgaggataggattggagggttcgacttgcaataatagattatttacccttattagcaagtccattgggggttgggttttttttatgacaaacttggtgctctttgcatgcaatggttacaggac

SEQ ID NO: 189762 - DNA, 281 bp, Glycine max
  unsure (1)..(281): unsure at all n locations
acaacaacggctgttgttgctgagcaaacaaaagcaattgcagctaaaatatcaaattgggacaatgtcgttttggcctatnngccagtttgggccattggaaacaggaaaggttgcaactcctgctcaggctcnagaggntcatgctgattaagggaatgggttcatgacaatgtggagtgccgaagttgccggcatccggtaggaaataatctatggaggctctgtaatggaggaaactgccaaagattggnagcacagcccgatgtngatggttttgg

SEQ ID NO: 189763 - DNA, 190 bp, Glycine max
  unsure (1)..(190): unsure at all n locations
agaanaacacactgcaattgtttggactagttttaatttcttccaattccatggctgggaaagatagaatcctgattttgggacccactggagccattggaaggcacatagtctgggcaagtgtgaaggcagggaacccaacatttgtgttgtgaggaacacccctggctctaacaacaggggtaatctg

SEQ ID NO: 189764 - DNA, 110 bp, Glycine max
aaattaactagctaggatggtcagtgttgaagagatccgtaatgcacaacgtgcagagggccctgccactgtcatggctattggcaccgcaactcctccaaactgtgtcg

SEQ ID NO: 189765 - DNA, 281 bp, Glycine max
gtcctgacaagcatgatggcttccatgatgttcgtacaaactacaattacacagagccaactcttgctggaaatgctggtttagttgcagcactagtggcattgtcaggcgacaaaagcacatcgattgacaaaaataccagtttctctgctgttcccccaatgtttctcacaccgccaccaccaccagcaccatggaaaccataagcgcatcatgccattggttatttctttctagcaagtatcccagatgatttgagtgcaccggtaaccttcgttgtt

SEQ ID NO: 189766 - DNA, 280 bp, Glycine max
  unsure (1)..(280): unsure at all n locations
ggaccatagaatccagccaagtaataacgttgggccacaccacacaggtcatgancgggccacttncgnttctgctntcccagcaatngaggtacttnagaaggagaagaagtacataacctcagaggagctgaagggtcacaacaaggagggagatttatggatctcaattcaaggtaaggtgtacaatgtctcagattgggtcaaggagcaccctggtggtgatgttccaatctcaaaccttgctggccaggatgtcactgatgcattcatagcatac

SEQ ID NO: 189767 - DNA, 273 bp, Glycine max
gttctgtgtttgtgtttgttttttctctcacctgaaaatgtcttgctgcggtggtaactgtggttgcggaagctcctgcaagtgcggcaacggctgcggaggctgcaagatgtacccagacttgagctacactgagtcaaccaccaccgagaccttggtcatgggagtggcacctgttaaggctcaatttgagggtgctgaaatgggtgtgcccgctgagaacgatggctgcaaatgtggaccaaactgctcctgcaacccctgcacttgcaa

SEQ ID NO: 189768 - DNA, 271 bp, Glycine max
cgaagatctaccactcaacatttcaagagaaatgttgcaacagaacaagatcttgaaggtcatcagaaagaacttggttaagaagtgccttgagctcttctttgaaattgcagagaacaaggaggattacaacaagttctatgaggctttctccaagaacttgaagctaggtatccatgaggattcacagaacaagggaaagattgctgaattgctcaggtaccactccaccaagagtggtgatgaaatgacaagcctcaaggattatgtg

SEQ ID NO: 189769 - DNA, 280 bp, Glycine max
gttcttttctacggagcctcgaccaagaagaatcgcagagagaagagggtcagagtgagaaagagagacagagagacagaaactgagagaaattcgcaaaccctaatttcggaaagatcggcgatggctgcctccaaggatcgcgagaacttcgtctacatcgccaagctcgccgaacaggccgagcgatacgaagagatggtggaatcaatgaagaacgttgcgaatctcgacgttgaactgactgttggaggagcggaatttactttctgttggggta

SEQ ID NO: 189770 - DNA, 273 bp, Glycine max
tatcgagcgattcggctcgagaagcaaggctagctatgaaaaacattgcaaagaagtggacccctgaactaaggcattatgcccctggtgttccaataattctcgttggaacaaagttagatcttcgggatgataagcaattttttatggaccatcctggtgcagtgccaattactacagcacagggagaagaattgagaaagctgattggtgctccggcctacattgagtgtagttccaaaacgcaacagaacgtgaaaggtgtctttgacg

SEQ ID NO: 189771 - DNA, 262 bp, Glycine max
ggggttcctcgacaagattaaggagaagctaccagggcacaagaagacagaggaggccacagctactactcctcctccaccaccacctgttgcatcattggagcatggtgaaggtgctcatcatgaaggagaggccaaggagaagaaaggtatattacaaaagataaaagagaagcttcctggttatcactccaagacagaggaggaaaaggaaaaggaaaaggagagtggtgctcattgatatttaagattgagacaaggc

SEQ ID NO: 189772 - DNA, 182 bp, Glycine max
gtttatcgtgaggagaatatgaagttgtctgtcttctttgttgctgcagtagttttggtagcatggccatgccatggcgcaggctaccagaggttccctctccgaatgaaaactggctatggtgagcgttcttcggaggtaaaatgcgcaagttttaggcttgctgtggaagcacacaacat

SEQ ID NO: 189773 - DNA, 267 bp, Glycine max
gtgttattgagcagatagcatggagccacagtgtagaatcgagaaggatgccactgaattgatagggaataccccaatggtatatctgaacaacattgtggatgggtgtgtagcccgtattgctgctaaattggagtacatgcaagcgtgctgtagtgtcaaagataggattgctttgagcatgattgaagatgctgagaaaaaaggccttattacacctggaaagactgttctggttgagtatacaagtggtaacaccggcatagg

SEQ ID NO: 189774 - DNA, 273 bp, Glycine max
cggctgcaacctacgtcgtcctcgaggcctgttgtccctctcctgaaggacgagctggacatcgtgatcccgacaatccgaaaccgcgacttcctcgagatgtggcggcccttcttcgaaccttaccacctcatcatcgtgcgggacggagaccccaacaggaccagcaatgtccccgaaggcttcgattatgaactctacaaccgcaaggacatgaatcgcatcctcggacgcaaagcctcctgcatctcgtttaaggattctgcgggtcgc

SEQ ID NO: 189775 - DNA, 271 bp, Glycine max
gaaagagcatctttctcctttctttcatcaccgttggaagagactgagatgggttcaaaaacctagacttttacctttgaggaggtggctaagcacaatcacaggaaggattgctggattatagtcaaagggaaggtgtgggatgtcaccccatttttggatgatcatccaggaggtgatgaagatttagtgactgcaacagagaaggatgccaccactgattttgaagatattgggcacagtgattcagcaacagagatgatggaaaaat

SEQ ID NO: 189776 - DNA, 271 bp, Glycine max
cgttaggttctgcacgctctgcttccagcgagtgttctttcttcgtttcaacaccttaatttgcatacgctgcttcttcagcttgagaaatggcacaagaaacctttctattcacatctgaatctgtaaacgagggtcaccccgacaagctgtgcgaccagatctctgatgcagtgctcgatgcgtgccttgaacaggaccctgacagcaaggttgcctgtgagacatgcaccaagaccaacatggtcatggtctttggagagatcacaac

SEQ ID NO: 189777 - DNA, 264 bp, Glycine max
agtggtcctgcttcaactgaaattaaatctgctgatgaagctactgcttttattggtgaaaataaagttgctattgttggagttttcccgaaattttctggagaggagtttgacaacttttctgccttagcagagaagttgcgttctgattatgactttggtcacactctgaatgccaaactccttccaagaggagagtcatcagtttctgggcccgtagttaggctgttcaagccattcgatgaactttttgttgacttccag

SEQ ID NO: 189778 - DNA, 261 bp, Glycine max
ctcgagcgtttttataataataataataatttgctccactgttagggtttttggcggacgtcgtcgcggtcgtcatcgtcattgaatcagccatgcctcggtactactgtgactactgcgacacctatttgacccacgattctccatctgttagaaagcagcacaatgcaggttacaaacacaaggcaaatgtgaggacttactaccagcaatttgaagaacaacaaacacaaagtttaattgatcaaaggatcaaagaac

SEQ ID NO: 189779 - DNA, 259 bp, Glycine max
accctggactaaagtataacgaaattattgtggataactgctgtatgcagcttgtttcaaagcctgaacagtttgatgtcatggttacccggaatctttatggaaatctagttgcaaatactgcagcaggcattgctggaggcactggagtcatgccaggaggtaacgttggggctgagcacgctgtgtttgagcaaggtgcgtcacaggaaatgttggtagtgataaaataagggaacaaaagaaagccaatccagtg

SEQ ID NO: 189780 - DNA, 263 bp, Glycine max
cgcattttacttggtgctgttcatggggttgtggagtccctgtttaggagatacactgaaaatggaatgaacgaagatctggcctataagattactgttgagtctataacaggaattatatctaaaaccatctcaactaagggcatgctagctgtatacaatgctttatctgaagatgagaaaagggaatttgagaaggcttatagtgcttctttttatccttgcatggaaattctgtatgagtgctacgaggatgtagccag

SEQ ID NO: 189781 - DNA, 268 bp, Glycine max
gggagcctacaggatgcttgtgtatgagtatgtagacaatggcaatctagaacaatggctgcatggggatgttggagctgtaagccctttgacatggaacatacggatgaacattatattgggaacagcaagaggattggcctatcttcatgagggtcttgaaccaaaagttgtccaccgagatgtgaaatcaagtaacatactcattgatcgccaatggaactccaaggtttctgattttgggcttgctaagcttttatgttctgag

SEQ ID NO: 189782 - DNA, 269 bp, Glycine max
ctatgatccaaagatgctgctaccttttctccgtagcagtcaacactacacccttgaggaagcttacgaaatttgcattaaaagagacctattgagggagcaagtcttcatcctaggaaggatgggaaactcgaaacaagccctagctgttattataaacaaattgggggatatagaggaggccgtagagtttgtcaccatgcagcgtgatgatgaactttgggaagaattaatcaagcaatgccttcacaaacctgaaatggtgggca

SEQ ID NO: 189783 - DNA, 261 bp, Glycine max
gttgctgtcaccactgcggggaagctgtgcgataaccctttgggatacgctctcgagttggtgaggaaagccaaagcggatgtgactgaggaatacatgcactcggtggctgatttaatggtcaccaagggccggcctcacttcactgttgtgagatcgtatctcgtgtcggatgtgactcgtgctgggtttggaaacattgagtttgggtgggggaaggctgtttatggaggacccgccaagggaggggttggagccata

SEQ ID NO: 189784 - DNA, 262 bp, Glycine max
tctctctctctcaaccataatagtcatgggtttgaaggaggattttgagcagtatgctgagaaagcaaaaactttgccaccgactcaatcaaacgaagacttgcttatcctttatggattgtacaaacaggccaccgttggacctgtcaacaccagccgtcctggaatgttcaacatgagggacagagctaaatgggatgcatggaaggctgttgaagggaaatccaaggacgaagcaatgggtgattacatcattaaggtg

SEQ ID NO: 189785 - DNA, 180 bp, Glycine max
gctcattggagaaagaagggtctttgcttgattttggagatgtctctgctctcagatctcatcaaccttaacctgtccgataccactcggaaggtgatcgcagagtacatatggatcggtggatcaggaatggacctgaggagcaaagcaaggactctcccaggaccagttagcgaccct

SEQ ID NO: 189786 - DNA, 262 bp, Glycine max
  unsure (1)..(262): unsure at all n locations
ctttcactttaccaactcctaacaatgtctctctggntccttcagcaccgcatcaatgggggtagggacggcgttctcctcggcatgtgcaaccctctcctcgacatctctgccgtcgtcgacgacgctttcttgcaaaaatacggtatcaagttgaacgatgcgattctcgctgaggataagcacaaacctatgtatgaagaattggctaacaatcctaatgtggagtacattgctggaggtgctactcagaattcaatca

SEQ ID NO: 189787 - DNA, 270 bp, Glycine max
gccaagttctcttgtattgtggaaggaagcaaatgctaaaggaagtctatttcaaagaattccttcagatttgttgacacagctgaagacagattgtctcgtcctgcacaatcatcgttatgccatatccccatgcaagcttcaatataataccaagttatctgacttttttgagattctggcaacatctgaggatagagatggaaagactttcgtttccacagcacgtggtaggaaatatcccgtgactgtcaacctatggcaaccaga

SEQ ID NO: 189788 - DNA, 258 bp, Glycine max
cgaagatggtgcagcgtctcacctaccgcaagaggcacagctatgccaccaaatccaaccaacacagggtcgtcaaaacccctggtgggaagctcgtttatcagaccaccaagaagagggccagcgggcccaagtgccccgtcactggcaagaggattcaggggattccacacttgaggcctgcagagtacaagagatcaaggttacccagaaaccgtaggactgtcaaccgtgcatatggcggagttttgtctggaa

SEQ ID NO: 189789 - DNA, 259 bp, Glycine max
gtgcttatagatccagcgtcacagattcaatttgacactggaagtaatttctcatttcaaagattaagtgaaaacatggttgtccttgctgcatccattgtgagcaaatctggcaaagttctagtttctagacagtttgtggacatgtctcgtatcagaattgagggtcttctagcagcatttcccaagttaataggcactggaaagcaacacacatatgttgagacggagaatgtgcgctatgtttaccagccaatgg

SEQ ID NO: 189790 - DNA, 272 bp, Glycine max
gccggaggagccgcgccggaggaggcgttgaagcacaaactggagagaaaatggacgttttggtgcgacaaccaatccaaacccaagcaaggcgctgcttggggaacctctcttcgcaaggtctacaccttcgacaccgttgaagagttctggtgtttgtatgatcaggtattcaagcccagcaagttgcaaatcaatgccgattttcacttgttcaagactgggattgaccctaaatgggaagatccagagtgcgccaatggaggaaagtg

SEQ ID NO: 189791 - DNA, 263 bp, Glycine max
ggaggataatcctttggtagattttcttgagcttcctgacaactgccaaggcttgtactattgcaacatcttaagtggagtcatcagaggagccttagatatggtgtcaatgaaaactgaggtaacttggcttcgtgatgtgcttcgcggtgatgatgtgtttgagttgcaggtaaaacttctcaagcatgtcccagaagagtatccatacaaggatgacgagtgaatttgttttgtagtattgtatactccaggttttcatt

SEQ ID NO: 189792 - DNA, 262 bp, Glycine max
gttctgtgtttgtgtttgttttttctctcacctgaaaatgtcttgctgcggtggtaactgtggttgcggaagctcctgcaagtgcggcaacggctgcggaggctgcaagatgtacccagacttgagctacactgagtcaaccaccaccgagaccttggtcatgggagtggcacctgttaaggctcaatttgagggtgctgaaatgggtgtgcccgctgagaacgatggctgcaaatgtggaccaaactgctcctgcaacccc

SEQ ID NO: 189793 - DNA, 259 bp, Glycine max
catatatatagcaagcatggcagtcacactctacgacctttgctcttcctctgggttgaagaaacttgatgagtaccttctcccacgcagttacatcacccggtaccaagctacaaaggatgatcttactgtttatgcagctttgccaactgctccatcagatgaatatggaaatgtttccaggtggtacaagcacattgatgctttgttgagaatctctggtgttactggcgagggatctggtgttattgttgaggga

SEQ ID NO: 189794 - DNA, 262 bp, Glycine max
acagcagctctatccggaaccatggtgagcacctccttcatgaggaagcaacctatgacgaccaagagcctaaagacattccccaacgctctttttggtctgaaaggtggacgaggtggtcgtgtaacttgcatggcctcgtacaaggtgaagctcataaccccagaaggagaagtggagtttgaatgcccagatgatgttttcattgttgacaaggctgaggaagaaggcattgaacttccctactcgtgcagggctggtt

SEQ ID NO: 189795 - DNA, 265 bp, Glycine max
ctcgagccgctccttctcaaactagtagtattattcttccattcataatgggtgttttcacattcgaggatgaaatcaactcccctgtggctcctgttactctttataaggccctagttacagatgccgacaacgtcatcccaaaggctcttgattccttcaagagtgttgaaaacgttgagggaaatggtggcccaggaaccatcaagaagatcactttcgttgaggatggagaaaccaagtttgtgctgcacaaaatagaaag

SEQ ID NO: 189796 - DNA, 269 bp, Glycine max
gcagcctcaggaggagaaggatgtctcacaggaagttcgagcacccaaggcacggttcactgggatttcttcccaggaagcgtgctgctcgtcacaggggaaaagtgaaggcattccccaaggatgacccatccaaggcacccaagctcactgcattcttgggttacaaggccggtatgactcacattgttagagaggtcgagaagccaggatcaaagcttcacaagaaggaaacttgtgagcctgttacaattattgagacccctcca

SEQ ID NO: 189797 - DNA, 261 bp, Glycine max
cggctctgcctgttgccttgatgattcatgataactcgtcggatcgcacggcctttgtgccggcgacgcatcattcaaatttctgccctatcaactttcgatggtaggatagtggcctaccatggtggtgacgggtgacggagaattagggttcgattccggagagggagcctgagaaacggctaccacatccaaggaaggcagcaggcgcgcaaattacccaatcctgacacggggaggtagtgacaataaataacaata

SEQ ID NO: 189798 - DNA, 262 bp, Glycine max
ctcgagccggtaactatgactctcttaaggtagccaaatgcctcgtcatctaattagtgacgcgcatgaatggattaacgagattcccactgtccctgtctactatccagcgaaaccacagccaagggaacgggcttggcggaatcagcggggaaagaagaccctgttgagcttgactctagtccgactttgtgaaatgacttgagaggtgtaggataagtgggagctggaaacagcgaaagtgaaataccactacttttaa

SEQ ID NO: 189799 - DNA, 262 bp, Glycine max
tcgcacggcctttgtgccggcgacgcatcattcaaatttctgccctatcaactttcgatggtaggatagtggcctaccatggtggtgacgggtgacggagaattagggttcgattccggagagggagcctgagaaacggctaccacatccaaggaaggcagcaggcgcgcaaattacccaatcctgacacggggaggtagtgacaataaataacaataccgggctcattgagtctggtaattggaatgagtacaatctaaat

SEQ ID NO: 189800 - DNA, 260 bp, Glycine max
ctctcagctgctcgtccaccaccaacaatcagccgcatcacaccgctttgtgtttcagtttttgatatcttataattaacaggaattccattagcgagacggcgccgggtgatcccagtttcctcatcatgaagctttgtagcatctgtttcaggatttacaggaataaaggccggcttgcgcagctttttcaactcttctagctttgttgattgtattagctcttttggcacctcaagctcaggctctggctgaatagg

SEQ ID NO: 189801 - DNA, 262 bp, Glycine max
ggagggtattcctccagaccagcaaaggttgatttttgctggaaagcagcttgaagatggacgtacactggcagactacaacatccaaaaggagtccacccttcaccttgtccttcgtctcaggggaggtatgcagatctttgtgaagactttgacaggcaagactattaccttggaagttgaaagctcagacacaatcgataatgtcaaagcaaaaatccaggacaaggagggtatcccaccagaccagcagaggttgata

SEQ ID NO: 189802 - DNA, 267 bp, Glycine max
cttgtcactgctcattttcgcgttctgcgccgtcgccgtcgccgtcgccgtcgcgggctcctccttcgatgatgccaaccctatccgtttagcgtcggacttggagtcgcaggtgctggacgtgatcggacagagccgccacgctctctccttcgcccgcttcgctcgccgccacggcaagcgctaccgttccgtcgacgagatccgcaaccgcttccggatcttctctgataatcttaaactcatcagatccaccaacaggaggtc

SEQ ID NO: 189803 - DNA, 267 bp, Glycine max
cccctttctggtttcaacgctgcaactatccatggcaaaccactggctcagacccgaggtgtatccactgttcgctgcggttggtgccgctgttgggatctgtggattccaattggttcgtaatatctgcatcaaccctgaagtcagggtgaacaaggagggaagaaaggcaggagtgttggagaactttgctgagggagagaagtatgctgagcatttcctgaggaagtatgtgcgcaacagaactcctgagattatgccctccat

SEQ ID NO: 189804 - DNA, 170 bp, Glycine max
gctagctactccttaattactaattagtttcattctttggtgcaagctagcttcattagttgattcataaaattataacaatggtgagtgttgaagcaatccgtaaggcacaacgtgcagaaggccctgccaccgtcatggccatcggcactgccactccgccacactgc

SEQ ID NO: 189805 - DNA, 261 bp, Glycine max
cagcctcaggaggagaataaggatgtctcacaggaagttcgagcacccaaggcacgggtcactgggatttctccccaggaagcgtgctgctcgtcacaggggaaaagtgaaggcattccccaaggatgacccatccaaggcacccaagctcactgcattcttgggttacaatgctggtatgactcacattgttagagaggtcgagaagccaggatcaaagcttcacaagaaggaaacatgtgagcctgttacaattattga

SEQ ID NO: 189806 - DNA, 256 bp, Glycine max
ggaaccatcaccaaccctaatttcttagctaaaccctattcgtttagcatttcctctcttttctcccactcgtaaatcctctcccaaacttttcacatccaaataaatcatggttttctgggtttttggctacggttcactggtgtggaaccctggattcgattacaatgagaagattataggtttcattaaggactacagacgcgtgtttgatttagcgtgcattgatcaccggggaacacctgaaaacccagca

SEQ ID NO: 189807 - DNA, 254 bp, Glycine max
gcggtgatttgccgccaccgtctggagccgaagatggacgcgttctacttcggcaatgcgattcagagcatcacgacggtcgcgaccgtcggagaacttctctcgcgcgatctgcgcttctgcgcagatcttctgcaccgtaacgtcgtcgctcatgatgacgctacggtgcgccgcagaattgaggactgggagagtacgtcaaggctgtttcctctcggaaactttgacggagcgatgatcaccatgggaag

SEQ ID NO: 189808 - DNA, 259 bp, Glycine max
ggaccctgtcttgacggacccgtctgtgccgttaacgttacttctgacggatcgggttctcaccacggctggtaccttaactacgtccaggtcacctccactgggccccacctttcctgcgctcaggatcagtacgaggtggagcagtggctcgctctcgacacttcgccttaccagctttgggccgttaggaaccactgccgctacagtttggaccgggcccagcccgtttcggagcgccccggatccggatccggat

SEQ ID NO: 189809 - DNA, 260 bp, Glycine max
cgaaggagaagaaacccaataagtgattctcatttttatggctcttgccctgaagtcaagttgcttcttgcaattgaagaaacctgaggctggtttcaatgtttgtttttcatctaagaaagctataatctccgtgaaacgacacactcccgtggctgctatcaggaccatggaagcagtgggactctctgcaacattcaccaggttgaaaaaagaaggaaaagtagctttcatcccgtatgtcactgctggtgatcctg

SEQ ID NO: 189810 - DNA, 265 bp, Glycine max
ataccaacttggagttcttgaaggagatcggtttgggctcctccaacattggttcttacattaatggccaatggaaagccactggttcttctgtcacttctgttaatccttctaacaatcagagtatatctcaagtgactgaagcgactttgcaagattatgaggagggattgcaagcttgcagtgaagcagccaagacatggatgactattccggcaccgaagagaggtgagattgtgagacagattggtgaagcattgagggc

SEQ ID NO: 189811 - DNA, 256 bp, Glycine max
gtttatcaaagcttttccatgcgtctggttcagaagatctggctccagatgacctttccaattcaatgggcttgtttctacagaccacaaacattattcgagattatctggaagacatcaatgagatccccaagtcacgcatgttttggccacgacagatttggagtaaatatgttaacaaacttgaggatttgaaatatgaggagaactctgttaaggcagtgcaatgcttaaatgacatggtcactaatgctct

SEQ ID NO: 189812 - DNA, 251 bp, Glycine max
  unsure (1)..(251): unsure at all n locations
gtgcttcaccgccttcaccacctctancgccatcacgtccggcgccggaagtgccggaactagcttctccggctaccagatccggcatctccgcgcgtccactgaagagatcttttcccgaggagccctcgccgccggcggatcctccgtcttcagaccagacgaccccgtcggaggcgaacgcgtggtgaaccgctgctccggctgcaggaggaaggtcggactcaccggatttcggtgccgatgcggcg

SEQ ID NO: 189813 - DNA, 257 bp, Glycine max
ctttgacctgcaagaccatcacccttgaggtggaatcctccgacaccattgacaacttaaaagctaagattcaagacaaggaagggatcccacctgaccagcagagacttatctttgcgggtaaacaacttgaggatggtcgcacccttgccgattacaacatccaaaaggaatcaaccctccatctcgtgcttcgcctcaggggtggcatgcaaatctttgtcaagactttgaccgggaagaccatcacccttgag

SEQ ID NO: 189814 - DNA, 255 bp, Glycine max
cttttgccccctcgacgacgcgttcaaagcgtttctccccaaattcaaaaacctaaccaaatccggtaaggtcgcgcttctcgaattccacggtgttccggttttccagtccaaagccactctcaaatccaacaacggacttcagcacactctcgccactgatggcgctaacaagttcgacttcactgttcagaacgacggtgaagatgttactctgaaaacgaagctcaccactgcgaagatcaccgacacgtt

SEQ ID NO: 189815 - DNA, 251 bp, Glycine max
cgaacagtcaactcagaactggtacggacaaggggaatccgactgtttaattaaaacaaagcattgcgatggtccctgcggatgttgacgcaatgtgatttctgcccagtgctctgaatgtcaaagtgaagaaattcaaccaagcgcgggtaaacggcgggagtaactatgactctcttaaggtagccaaatgcctcgtcatctaattagtgacgcgcatgaatggattaacgagattcccactgtccctg

SEQ ID NO: 189816 - DNA, 251 bp, Glycine max
gcaaagttcaagctctgcaaggttaggtcagtgcagtttggccagaaaggtatcccatacctgaacacctatgatggtcgcaccatccgttacccagaccctctcatcagggccaacgacaccattaatctggatctggaggaaaacaagattgttgattttatcaaatttgatgttgggaatgtagttatggtaacaggtgggagaaacagggggcgtgttggagtgatcaagaacagggagaagcataa

SEQ ID NO: 189817 - DNA, 272 bp, Glycine max
cggaattacggctcgagcgtactctttcaagcaactcctttccttggccaaggcaagggtgccaatgccaatgctcttagggatgttgtctccatgggaactgggaagtacaccatgggcaatgatttgtggtatggaccagacagagtgaaatacttgggacccttctcagctcagaccccttcatacttgaaaggagaattccctggggattatggatgggacactgctggcttatctgctgacccagaagcatttgccaagaacagggc

SEQ ID NO: 189818 - DNA, 101 bp, Glycine max
caggtctcttcctacttgaagaacgttggttacaaaccagacaagattccatttgtgcacatctctggtttcgagggtgacaacatgattgagaggtccac

SEQ ID NO: 189819 - DNA, 259 bp, Glycine max
ggcgatggccgcgcgagctctgttgaccagaaaaaccctagccaccgtgctccgcaacgacgcgaacccataatcggagttggcataacagcagcggctactcattcacgcgggttgcacgtgtacacgctacccgatctggattacgactatggcgcactggagccagccatcagcggcgacatcatgcagctgcaccaccagaagcaccaccagacttacatcaccaactacaacaaggccctcgagcagctccaag

SEQ ID NO: 189820 - DNA, 256 bp, Glycine max
gttgctgtcaccactgcggggaagctgtgcgataaccctttgggatacgctctcgagttggtgaggaaagccaaagcggatgtgactgaggaatacatgcactcggtggctgatttaatggtcaccaagggccggcctcacttcactgttgtgagatcgtatctcgtgtcggatgtgactcgtgctgggtttggaaacattgagtttgggtgggggaaggctgtttatggaggacccgccaagggaggggttggag

SEQ ID NO: 189821 - DNA, 256 bp, Glycine max
cctcactctctctttctctctgttttctggtaattcatcaattgattcaaaatgcagaggctcaaactgcaactagtgctattcctctcaatctcaacttgtcacactgttttctccttcactgatgggttgttgccaaatgggaacttcgagcagggcccaaagccatcacaattgaaggggtccgtagtgacaggccacgatgccataccgaattggacaatttcggggttcgttgaatacataaaatcaggac

SEQ ID NO: 189822 - DNA, 251 bp, Glycine max
tgcggctatggtactagcgcagcttcttctagatttaaggaagatgggtaaggaaaaggttcacatcagtattgtggtcattggccatgtcgactctgggaaatccactaccactggtcacttgatttacaagtctcgaggcattgacaagcgtgttattgagaggtttgagaaggaagctgctgagatgaacaagaggtctttcaagtatgcctgggtgctggacaaacttaaggtcgagcgtgaaagag

SEQ ID NO: 189823 - DNA, 252 bp, Glycine max
tgggcgggtacggtttcgacttgtttcttcttcgtgtttcttctttctctccttcttccttttcagatctccgctgaggaatcctcggagaaggagttcgtactcacattggatcactctaactttcatgacactgtcagcatgcacgatttcatcgtcgtcgagttctaccccccatggtgtggtcactgtaagaagcttgctccggagtatgagaaagctgcttctatcttgagtagtcatgatcctcct

SEQ ID NO: 189824 - DNA, 252 bp, Glycine max
caaaaggcaatgtcattaccatcttcaccacacgattatacatataaagattctgagagaagtggatcatcaagatacagagtgaatgatgaaatggagtcaacatggaataaagtactggaatctccaatgttcaataataaacctctgttaccatatgaaaaatggaatattgacttctccgaattgactgttggaactcgcgtagggattggtttctttggagaagttttccgtggcatatggaatggc

SEQ ID NO: 189825 - DNA, 261 bp, Glycine max
aagaaactgaaacaactttcggatgagctgcgttctgatgttattttccatgtttctagaactgtcgggtcatttgggatctagccttggtgttgtagaactcactattgcccttcactatgttttcaatgctcctaaggacaaaattttgtgggatgttggtcatcagtcttatcctcataagatactcactggtagaagggataagatgcataccatgaggcagacagatggattggccgggtttacaaaacgatctga

SEQ ID NO: 189826 - DNA, 261 bp, Glycine max
cgcgagtgcaagttgtgcggtatcatgtagaaacagcttcggtgtgagtaaagcctcggatcttgggttcttgagctctcgtctgaacggcctcagaatctgcttccccaaattgcgagccagacccctcactgcttctcccttccccagacccctccctatcgtggccaagagagtgtgtcccttcactggaaagaaatcaaacagggcgaacaaagtatcatttgcaaaccagaagacaaagaaactgcagtttgtgaa

SEQ ID NO: 189827 - DNA, 265 bp, Glycine max
ccactggggagcttctcaagatcgaacctctcgaactcaagttcccctttgagctgaagaagcagatctcatgttctcttcaattgtcgaataagaccgatagctatgtggccttcaaggtgaaaagaaccaatccgaagaagtattgtgttcgtccgaagactggtattgtcacgccacgatctacgtgtgatgtgatcgttaccatgcaagcgcaaaaagaggctcctgctgatatgcaatgcaaggataagtttcttcttca

SEQ ID NO: 189828 - DNA, 263 bp, Glycine max
ctcaccattctcttcttcttctccctttcttagattctcccttttttctctttaccctccgccatggctgaggataaggagatgtcttcctctgtcaccaatggcgatgattctctcactggccacatcagatctagaactagtggaggcaaaaatggggaacccaaacagactagtagttacatggctgaacgggttgtaggaactggatcatttggaattgttttccaggcaaaatgtttggaaactggggaagcagtggc

SEQ ID NO: 189829 - DNA, 262 bp, Glycine max
ctcgagcgattttatcttgctctcagatggaaattcacagtgcttgagttggaaaaacagaatacagatagcaatcgatgctgcagaggggttggattatctacaccatggatgcaagccacctattatacacagggatgtaaagtcagccaacattcttttaagtgaagacttagaagccaagatagcagattttggcctctccagggagtttaggacagataaccaagatcaacaatctcaagtgattcacagtgatgct

SEQ ID NO: 189830 - DNA, 249 bp, Glycine max
atttgtaatgcagctggagtaactggcagacccaatgtcgattggtgtgaatctcataagacggaaaccattcgcagcaacgttgctgggacttgaacattggctgatgtcagcagagagcatggactcttgatgataaattatgctactgggtgcatatttgagtatgatgcagctcatccagagggttctggcattggctttaaggaggaagacagacccaacttctttggttctttctagtccaaa

SEQ ID NO: 189831 - DNA, 237 bp, Glycine max
gaaagctctcaaaagtatggcggcggagtcatcactgagggtggcgactcccactatttgcaacctcaatggttctcagagaagaccaaccactctctctccgcttcgcttcatgggttttagccctcgaccctctcactctctcacttcctcttccctttcagacttcttcgggagcagaagaatgaactcgaattcttcctcgatttcacgcgaagatgctcgaagatgaaactt

SEQ ID NO: 189832 - DNA, 257 bp, Glycine max
cgggtattgagattgagattcaagtaatggggaagagcaaggttcttgtggtggggggaactgggtacatagggaggaggatagtgagggcaagcctggcactgggccatgagacctatgtggttcagagtgcagagttgagcctccagatagagaagctgcagaggctcctctccttcaagaagcaaggtgctcatctcattgaggcctctttcaatgatcacaagagccttgttgatgctgtgaagcaggttgat

SEQ ID NO: 189833 - DNA, 296 bp, Glycine max
gcatacagaaggacggaagtcgggtcgaagttgtggaaagtgagagacaaagaaagaagaaaatggcaaactttccagttgttgacatggggaaacttaacaccgaagagagagcagcagccatggagatgataaaagatgcctgcgagaactggggtttctttgagttggtgaaccatgggatatccattgagttgatggacactgtggagaggctcacaaaagagcactagaagaagactatggagcaaaggttcaaagaaatggtggccagcaaagggcttgagtcagttcaa

SEQ ID NO: 189834 - DNA, 265 bp, Glycine max
atccctcccattgttaatccaccagtcagaatccctcccattgttaatccagcagtgacagttccacccgttgtgcttccaccaatagtgaagcccccgggttttctccctccaattcttaacccaccaagtacaccaacaccgtcgccggggaagggagggaacactccatgtcgaccacgaaagtctcctgcacaggctacatgccccattgacacgctcaaactaggtgcttgtgtggatcttcttggtggcttggttcaca

SEQ ID NO: 189835 - DNA, 226 bp, Glycine max
cctgatatgacatgtcgacaagctttaacttttcaatctctgttttagcagcctgcctgcccttcccaattgcagcaccgaaatatctataggaaacaccggaaggttcaaccatgtacaactgtggtccatccctgtcataacctcctagtatgacaccacatccaaaaggtctgagccaccaatatagcgtacagaggtgcacataactagccacacggtcagc

SEQ ID NO: 189836 - DNA, 257 bp, Glycine max
ccctcctgctcctgttaatccacctcctgttccggttcatcctccagttaaacctcctgttccggttcaccctccagttaaacctgcctgttccggctcaccctcctgttaaacctccggttgttccggttcaccctcctgttaaacctccggttgttccggttcacccctttcctagaagctttgtcgcagttcaaggagttgtttatgttaagtcctgcaagtatgctggggttgacaccctcttgggagccaca

SEQ ID NO: 189837 - DNA, 255 bp, Glycine max
ccgcgagccgattcggctcgaggtgaaagtcagacaaaataaaactcaaagagcataataccagggatcattcacaagactggggagacccttcatgtgggagggcacaagaaggaggaggagcataagggtgagcaccatgctggagaatacaaaggggagcaccatggtgaacacagtagtgagtacaaaggagagcatcatggtgaacacaaagctggagagtaccatggtgagcacaagccagagcacaaa

SEQ ID NO: 189838 - DNA, 251 bp, Glycine max
cgaggctaatctattaggcgctgttctctcgtcttctacaaaattttctgtgcgatctcaaccaaggttgttccttccaccgccatgagtagctgcttcggaaagcgaaaaacacccgcagagcttctgcgggaaaataagaggatgctggacaaatcaatcagagaaattgagcgcgagcggcaaggcttgcaaacgcaagataagaaattgattgcggagataaagaaaagtgccaaacagggccagat

SEQ ID NO: 189839 - DNA, 255 bp, Glycine max
atttgcacctggactaaagagaaggcagtggaagaaggtttaattactgtgaatgttagggaagaagtactgaaggtgtggtgatgggtgttccacaacctccacctccctctcaacatctctgatccacaagaaattcagcttaaactttaccaagccttcatattctcaattcccagactcttttccagcattttggttcttttgttttacttgttctacctcaaaaggagggcttcttctctctcatcacca

SEQ ID NO: 189840 - DNA, 266 bp, Glycine max
tcgatgttgagtaccgttgactttggtcggtgcggctcgctaggtcgcatgacgaccatggcctcgagagagccttctctcagtagggcgaaatcggtgaaacgaagattatcaacgatcgtgagactggcagatccaggggttttggatttgtgaccttcgcctcggagcagtccatgaaagatgcgatcggagcgatgaatggacagaacttggacggccgtaacatcactgtcaatgaagctcagtctcactgtggcggcggc

SEQ ID NO: 189841 - DNA, 264 bp, Glycine max
gcttgactagagaaagagagagagagagcttcgaatcgaaactcagaagtagaaagaaacacaaatcacaatcgctatggctaggtacgaccgagcaatcaccgtgttctcccctgacggccatctcttccaggtcgagtacgccctcgaagccgtccgcaagggcaacgccgccgtcggcgtccgcggcaccgagaatgttgtcctcggcgtcgagaagaaatccagcgcgaaactccaagactccaggtcggtgaggaagat

SEQ ID NO: 189842 - DNA, 124 bp, Glycine max
attcggctcgagccttctggcggctgatatagcgaacatggctaagtatcattcaagtgggaaaagctcttccatgactggtagagccttcctgtggagccggctaatcacttatacaggcaca

SEQ ID NO: 189843 - DNA, 249 bp, Glycine max
aaaagatatcagggcattgttaactttggaaccaaattatataacttcaaatgaaaagatctcagggaaatacttggttcatctccttagccatgtggtacagcaaaagagtcaggctgaatgctggatgcaattatacgaacaatggtcttctgtagatgatgttggttctttggctattatacatcagatgctggagaatgagcctggaaagagcctgctggagtttcgtcagtctctactcctttt

SEQ ID NO: 189844 - DNA, 249 bp, Glycine max
ctttcggaagcagagaccgtaagacttcgagatggcccgtacaaagcaaactgctcgtaagtcaactggaggaaaagctcccaggaagcagcttgcaaccaaggctgcacgtaagtctgctccaacaactggtggtgtgaagaagcctcatcgttatcgccctggaactgttgctcttcgtgagattaggaaataccagaagagcactgacctcctaatcaggaagcttcctttccagaggttggttcg

SEQ ID NO: 189845 - DNA, 259 bp, Glycine max
cggatattaaaccagataacctgatactagataaaaatggccatttgaagctttcagactttggcttatgtaagcctcttgatgataagtattcatcaattttattggaaaatgatgatcttaccagtcaagaatccactagtgaaactgaaggatattctgtctctccttggttgatgccaaaggaacaattacagcagtggaaacgtaatcgacgtgcattggcgtattcaactgttggaactcttgattacatggc

SEQ ID NO: 189846 - DNA, 255 bp, Glycine max
agcgcagtctgggccagagcaaccagcgacaagaactcaatcagctagggttgctttgcttgctatcttgttggaggattttctgttcaagagaagatggtaactagaattgtggatcttcgttcagacacagtgagaaagccaactgaagcaatgagagctgctatggcaagtgctgaagttgatgacgatgttctaggctatgatccaactgcttttcgcttagaaacagagatggcaaagacaatgggcaaa

SEQ ID NO: 189847 - DNA, 215 bp, Glycine max
taattattccttgcattctcttgtatgaagatggaagcttctagcatgaccaatgggagccaaaacggttcgttttgcttgtccactagtaagggaaggtgtgatccgttaaactggggagcggcggcagaggcgatgaaggggagccacctggacgaggtgaagcgcatggtggccgagtagcgcaagccggtcgtccggctcggcggagagac

SEQ ID NO: 189848 - DNA, 241 bp, Glycine max
gttccttttgaaggttagaattgctacaagacaaacaatggcagcgactgaggaagatgtgaagcttttgggtattgtgggaagcccagttgtgtgcagggtccagattgcccttaagttgaagggagttgaatacaaatttttggaagaaaatttgggcaacaagagtgatgtgcttctcaaatacaagcctgttcacaagaaggtgccagtgtgtgttcacaaggagcagcccatagca

SEQ ID NO: 189849 - DNA, 246 bp, Glycine max
gtctcgcgtgtcaacacaggttagagcattggctttctttggtagaattgggaatttattaagacagacagcaagcaggcaggttagttcagaattgcgatcatccccttcgttttttcaggctatacgcagtatgtcatctgctccaagcacaaagctgtttatcggacgtgtttcatattctactgacgagcaaagtttgagggaagctttttcaaaatatcgtgaagttgttgatgctaggat

SEQ ID NO: 189850 - DNA, 258 bp, Glycine max
gccgctcgatgggaattgcgcttcaaggcgtctcgtagggctaatccgcctcacgagggtcagcaacggcacgtgcctttggcgggccgaggcccctactgctggtcggcaaacggacggcgggcgcacgcgtcgcttctagcccggattctgacttagaggcgttcagtcagaatccaacgcacggtagcttcacgccactggcttttcaaccaagcgcgatgaccaattgtgcgaagcaacggttcctctcgtact

SEQ ID NO: 189851 - DNA, 257 bp, Glycine max
tctgagggagacgagaagacccttgatggtgaacccgtacccgtacttcggttacaacgggaaaaacgtgaactttcttctgttcaggcccaaccgaggcttgtacgacaggtacacgaagaggagttacacgaaccagttcgacgctctgatggacgcggtgcactcggcgatgaatgctttggggtacggtgacgtggacatcgccgtcggcgaaacggggtggccctccgtttgcgacggttgggacgcgtgca

SEQ ID NO: 189852 - DNA, 247 bp, Glycine max
gccaaacactagatcaaggggaaaatggcagaggctaatgtagtgctgttggatttctggccaagctcttatggaatgagagtgaaaatcgctttggcagagaagggaatctgcatatgagtgcaagcaagaagacttggaagctagaagctctctgcttttagagatgaacccggttcacaaaatgataccagttttgattcataatggaaaacccatctgcgaatcactcaacattgttcagtac

SEQ ID NO: 189853 - DNA, 251 bp, Glycine max
agagcggtgtagatgggcattgtcatcatcctcgttaagctcttctggaagaagccccaccagcgctacaagttcgagccactccaagacgacgaggaactcgggaactctaattaccccgtcgtgcttgtgcagattccaatgttcaatgcaaaaagaggtgtagaaggtgtcgattggagcagcttgcaatctttcatggcctgtggatcgtctcgtgatccaagtgctcgatgattctactgacccta

SEQ ID NO: 189854 - DNA, 248 bp, Glycine max
attctcccaacagttggattcaagaagccagcacagactgagttgggtgcagaagaattacatgatttacaattactgcactgacaccaaaagatttccacaaggcctttccccagagtgtcaaacatcttgaactccttctaatcctactcgaaacaaataccagaacactattcttgattcttcctaggctgattgaattgcttttcatttgtatggatgttcattctttaatcctttgatacttg

SEQ ID NO: 189855 - DNA, 247 bp, Glycine max
atagagaaggagaaagtgtgcagcgtattggagccgttaaaattgtgcctacgacgcgcgtgtgcacgcgtcaaagaacaagcgcttgccgctgcagatcgtgcttcacgcgctgtactacgatcagctacatataaggagcgggacggcggaggaaaaggtggcgctggcggtggcggagaaaaaacagctgcaagctgacgtgtccttggtgagggagaacgaggagttgcggtcggagctgatg

SEQ ID NO: 189856 - DNA, 246 bp, Glycine max
cgcaatatcgcggaaaatgcttcgattgagctgaacaagtttgtcttcttttgtttgttggtgctaatacaagtggcagtttctgaaatcatttttgaagagcgttttgatgatggatggcgaggtaggtgggtgaagtcagactggaaaagcagtgaaggcaaagcaggttcattcaagcagacagctggaaaatgggccagtgatccagatgataaaggtattcaaacatccagtgatgccaaa

SEQ ID NO: 189857 - DNA, 247 bp, Glycine max
cggtgtcaacctgatgaagcagttgcctatggtgctgcagtgcaaggaagcattttgagtggagagggtggtgaggaaaccaaagatatccttctcttggatgtggctcccctcacccttggaattgaaactgttggtggggtgatgacgaagttgattcccagaaatactgttatccctaccaagaaatcccaggtgtttaccacctaccaggatcagcagagtaccgtctccattcaggtttttg

SEQ ID NO: 189858 - DNA, 255 bp, Glycine max
atagagaaggagaaagtgtgcagcgtattggacccgttaaaattgtcctacgaggcgcgtgtgcacgcgtcaaagaacaagcgcttgccgctgcagatcgtgcttcacgcgctgtactacgatcagctacatataaggagcgggacggcggaggaaaaggtggcgctggcggtggcggacaaaaaacagctgcaagctgacgtgtccttggtgagggagaacgaggagttgcggtcggagctgatgaagatgaaa

SEQ ID NO: 189859 - DNA, 245 bp, Glycine max
aggatttctagggattccatgcagaagaggcgtgccactggtggcaagaaaaaggcttggagaaagaagagaaagtatgagcttgggcgtcaggcagcaaacaccaagttatcaagcaacaagacaatcaggaggattcgtgttagaggtggcaatgttaaatggagggcattgaggctggatactggcaattactcatggggtagtgacgcagttactcgaaagactcgtatcctagatgtggt

SEQ ID NO: 189860 - DNA, 244 bp, Glycine max
ctcgagccgctcgagcttaactggattagacctttcaattaacaaactctctggaaccattccgggagacatatccactcttagaccattgtggacgtctattgatctatctacaaatgagttttctggggcaattcccgtgagtcttgcgaattgtacctttcttaatacccttaaacttgatcagaatcgactcactggccaaattcctccacaatttggtgttctctcacgaattaaggta

SEQ ID NO: 189861 - DNA, 244 bp, Glycine max
gccatcatccaatgcacctcttcttcttcttcttcgtttcagtatgacgtgtttgtcagcttccgcggtgaagacacacgcaacagcttcaccgcttttctttttgaagctctgaaaaaacaaggcatcgaggccttcaaagatgataaagatatcaggaaaggcgaatccatagcaccagagctaatacgagctcttgaagggtctcacgttctcgttgttgtcttttccaaggactatgctt

SEQ ID NO: 189862 - DNA, 115 bp, Glycine max
gcggcacatctgttaaaagataacgcaggtgtcctaagatgagctcaacgagaacagaaatctcgtgtggaacaaaagggtaaaagctcgtttgattctgatttccagacaacat

SEQ ID NO: 189863 - DNA, 248 bp, Glycine max
ctggaacataccgttggatggctccggagatgatccagcataggccttacacacaaaaagtggatgtatatagctttgggattgttctatgggaactcatcacttctatgcttccatttcagaacatgacagcagtacaggccgcatttgcagttgtcaacagaaatgttcgcccaatcatacctaacgattgcctagcggttctccgtgacatcatgacaagatgctgggatcccaaccctgatgtc

SEQ ID NO: 189864 - DNA, 280 bp, Glycine max
aagccttgtttggagatggtgcagccgctgtcattgttggatcagaccccttaccagttgaaaagcctttgtttcagcttgtctggactgcccagacaatccttccagacagtgaaggggctattgatggacaccttcgcgaagttggtctcactttccatctcctcaaggatgttcctggactcatctccaagaatattgagaaggccttggttgaagccttccaacccttgggaatctccgattacaattctatcttctggattgcacacctggtgga

SEQ ID NO: 189865 - DNA, 276 bp, Glycine max
catggcattgcttgaggcaaaaaaagattgcatctcagtatcagaaggaagcagacaagtgtaattcaggaatggaaacgtgcgaggaggctagggagaaggctgagttgacattagtcacgcagaagaagctaactgcattgtgggaacttagagcacgtcagaaagggtggaaggaagggcttgccaaatctcatgcacactctcaagggaaagtacagagttcttagatacgttacacagccacctccatggaggtgagtggttgcataatac

SEQ ID NO: 189866 - DNA, 270 bp, Glycine max
gcagaccagtgacgacgctaatgtgatgcttaatgggtttggtgcagttgtaaactcacttgggcagagagtgaaaccatatcttcctcagatttgtggtactatcaagtggcgattgaacaacaagagtgcaaaggtgagacagcaagcagcagatctcatttcaaggattgctgttgtcatgaagcagtgccatgaggaacaattgatgggtcatcttggtgttgtcttatatgagtatttgggagaagagtacctgaagtcttagga

SEQ ID NO: 189867 - DNA, 271 bp, Glycine max
atctgcaccacaggtagcattattctctgctcgagggccaaatataaaggacttcagcttccaagaggcagatcttctcaaaccagatatattagctcctggttcattgatttgggctgcttggtgtccaaatggaactgatgagccaaattatgttggtgaagcgtttgccatgatatctggaaccagcatggctgcaccacatatagctggaattgctgctcttataaagcagaagcatcctcattggagccctgcagccattaaatca

SEQ ID NO: 189868 - DNA, 183 bp, Glycine max
tctactgttacatggccatggcgctttccgcaattggttttgaatgtttcgagaacaggttggaaatatcctttttccagccgggactttttgctgaccctgaaggaaggggtctaagggctcttacaaaatcccagttgggtgagattctaacaccagctgcttgcaccattgtttcttcgc

SEQ ID NO: 189869 - DNA, 277 bp, Glycine max
tcgagcgtcattgcacaagccttcctctctatgctctgccacttcaagtttggtatcttcttgttcttctctggctgggtcctcgtcatgtctgtcttcgtgcttttcctgttgcccgagactaagaatgtccccatcgaagagatgaccgagagagtgtggaagcagcattggttctggaagaggtttatcgatgatgccgcggatgagaaagtagcccatgtctctaatggtaatggatttgatccaacctccaggttgtaaatcatttgcattg

SEQ ID NO: 189870 - DNA, 274 bp, Glycine max
ctattctccaccgtagccgcaagcttcgccgtttgaaacagtgcctcaaccatggcagaacaaacagagaaggcttttctgaagcaaccaaaagtgtttctatgctctaagaaaggtgggaagggaaagaggcctgggaaaggtgggaatcgcttttggaagtcaattgggcttggattcaagactcccagagatgccattgaaggaacatatattgacaagaagtgccccttcactggcaatgtttccattcggggtcgtatcctagccggta

SEQ ID NO: 189871 - DNA, 270 bp, Glycine max
ggagatggctctgggaagaggcagtgcagtggttctactactttgcttcttgctgcttcactctcagatggctcgtgctgccacctacacagttggagattctgggggttggacctttaacactgttgcctggcccaaaggaaagctctttcgggctggtgacacacttgctttcaattatagccctgggactcacaatgtggtggccgtgaacaaggctggatatgatagctgcaagactccaagaggagccaaagtgtataagtcagg

SEQ ID NO: 189872 - DNA, 267 bp, Glycine max
tcttaatctttgtgaaaaataatgttcatcgagaattttaaggttgagtgtcctaatgtgaagtacaccgagactgagattcagtccgtgtacaactacgaaaccaccgaacttgttcactagaacaggaatggcacctatcagtggattgtcaaacccaaatctgtcaaatacgaatttaaaaccaacatccatgttcctaaattaggggtaatgcttgtgggttggggtggaaacaacggctcaaccctcaccggtggtgttatt

SEQ ID NO: 189873 - DNA, 269 bp, Glycine max
aagcacacctatgtttctcatgtctcggaagattaaatcacttggtgtcaaatgggttatctcaggagaaggatctgatgagatctttggagggtatttgtacttccacaaggcacccaacaaggaggagttccacagagaaacatgccgcaagatcaaagcacttcaccaatatgattgcttgcgagccaataaatcaacatttgcttggggtctagaagcccgtgtaccatttttggacaaggcgtttatcaatgctgcaatgatta

SEQ ID NO: 189874 - DNA, 270 bp, Glycine max
ctcgagcgaatcggctcgaggcagacgcaaacgcaaacgcacacgcaaacgcaaacacagagcgtgatccattgaacaagatggtgcagcgtctcacctaccgcaagcggcacagctatgccaccaagtccaaccaacacagggtcgtcaaaacccctggtgggaagctcgtttatcagactaccaagaagagggccagcggacccaagtgccccgtcactggcaagaggattcaggggattccacacttgaggcctgcagagtacaaga

SEQ ID NO: 189875 - DNA, 270 bp, Glycine max
cgcctattggggtccccttcccaaagaatcagccaatgaggatgtactctagtttgtggaatgctgatgactgggccacaagaggtggccttgtgaagacagattggacacaagctccattcacagcttcctacagaaacttcaatgctgagacttgcatatggtcttctggagcatcttcttgtgctaaaacttcttctacttccaccattagcagtggttcatggctttcacaggaactggactctgcaggccatcagaggttgaagt

SEQ ID NO: 189876 - DNA, 258 bp, Glycine max
aagaaagactcccaggcgagcagaaagatggaggggaaggagcaggatgtgtcgttgggagcgaacaagttccccgagagacagccaattgggacggcggcgcagagccaagacgacggcaaggactaccatgagccggcgccggcgccgctggttgacccgacggagtttacgtcatggtcgttttacagagcagggatagcagagtttgtggccacttttctgtttctctacatcactggcttaaccgttatggga

SEQ ID NO: 189877 - DNA, 276 bp, Glycine max
cccgccgctcgatgggaattgcgcttcaaggcgtctcgtagtgctaatccgcctcacgagggtcaccaacggcactacatttggggggccgaggcccctactgctggtcggcaaacggacggcgggcgcacgcgtcgcttctagcccggattctgacttagaggcgttcagtcataatccaacgcacggtagcttctcgccactggcttttcaaccaagcgcgatgaccaattgtgcgaatcaacggttcctctcgtactaggttgtattactatt

SEQ ID NO: 189878 - DNA, 272 bp, Glycine max
cacttttctcactctctcccttattcctgttcctactcttctccctagtcgaaggactcacccccaaatgtgacacccaagaccatggctcaacccttgaagttttccatgtgttcagcccctgttccccatttaggccaccaaagccactttcatgggcagagagtgtccttcagctgcaggccaaggaccaagccaggctgcagttccttgccagcatggtggctgggaggtcagttgtgcccattgcctcaggcaggcaaattattcaa

SEQ ID NO: 189879 - DNA, 273 bp, Glycine max
atcaaatagctcccagtactttaattgatttctgaatatcatcacttaatttgaaggaaagatggtgagcgtactgagatccgccaggcacaaagggcagaaggcccagcaaccatccttgccattggaactgcaaacccaccaaactgtgttgatcagagcacctatcctgactactacttcagaatcaccaacagtgagcacatgaccgagctcaaagagaaattccagcgcatgtgtgacaagtctatgatcaagaggagatatatgtac

SEQ ID NO: 189880 - DNA, 269 bp, Glycine max
attcgccgattttaaaagatgagtaagcttcagagtgatgctttgcgtgaagccatttcaggaatcatggccgattccaaggagaagaatcgcaaatttgtggagaccatcgaactccaaatcgggttgaaaaactacgatccacagaaggacaagcgtttcagtggctctgtcaagctgccccacatccctcgccccaagatgaaaatttgcatgcttggtgatgctcagcatgttgaagaggcggagaagataggactggactggat

SEQ ID NO: 189881 - DNA, 266 bp, Glycine max
tcttcatcttgttctatctgtgacgagcatcatggcctcaagagcagtgttattgttggctatgtgtgtgcttccggcgatggttgtggccattcgcccagcaaagaaccctttttgcgtgaagggtcgtgtctactgtgacccttgccgtgctggttttgagacctcagctaccacctacattgctggtgctgagattatgttgcaatgcaagagcagggttagcaacgaggttgtgtacacgaagaaggggtacaccgactcaa

SEQ ID NO: 189882 - DNA, 263 bp, Glycine max
cttactccttacaagatgggcaaattcaatctgtcccatagagctgttttggcaccgctgaccagacagacgtcttacgacaacgtcccacaaccccatgccatcctctactactcccagagaacttccaacggaggccttctcattactgaagccactggcgtctctgacacggctcaaggctatccgcaaacccctggcatatggactaaagaccatgttcaagcttggaaacccattgtcgatgccgtccacgccaaagg

SEQ ID NO: 189883 - DNA, 265 bp, Glycine max
atggagggttttatgaccacgtgcccacgcccgcgcgtggggttccgagccctgatgggattgtgggccccgagccttttaacttcacgtttaataggttgggagtgagggatcccaatattgctatctctccttggattgaaaagggtacagttgttcatgggccaaatgggtcaccatctcctacatcagaatatgaacactcatccattccagctacagtgaaaaagctcttcaatttgccttcatttctgaccaatagaga

SEQ ID NO: 189884 - DNA, 267 bp, Glycine max
gtgaaaatggcggtacccttgctctccaagacgatcgtgaagaagcgcgtcaagaagtttatacgcccccagagtgatcgcaagatctccgtcaagccaagctggcgcagacccaagggtattgattctcgtgtcaggagaaagttcaaaggatgcactttgatgcccaacattggttatggctcagacaagaaaacccgccattatctaccaaatggtttcaagaaatttgtcgtgcacaatgtgaaagacctggaacttctcatg

SEQ ID NO: 189885 - DNA, 269 bp, Glycine max
aggctcgagagccaacaacaagaagaacaaaaccaacatcaacaaccactagaagaagaagcttgcaaattagaagaatcttcagttgaaagggaagaacacacaagaacaaagagaggaagaaacgcgaatgaagggagaattagagttgccaccagggttcagatttcaccccactgatgaagaattggtgaatcactacttgtgtaggaagtgcgcgggtcaaccaatcgcggttcccatcatcaaagaggtcgatttgtacaagt

SEQ ID NO: 189886 - DNA, 261 bp, Glycine max
  unsure (1)..(261): unsure at all n locations
cgaaactgaggtcgtagaaagaatggcgaaaacgacgtcgttgttgctctttacactgctcctcttcggaaccttagctctcatccaggcgaagaaatcgaaggaggatttgaaggaagtgacccacaaggtttactttgatgttgagattaatggaaaagaagcaggtcgtattgtgatgggtctttttggaaaggctgttccanaaactgcagaaaactttcgagctctttgcactggggaaaagggactggtanaagt

SEQ ID NO: 189887 - DNA, 270 bp, Glycine max
gtaaggtaaccctagagtggtgaatcgaatctgcaaagatggaagctgtttctcgaagaagaggtggaggcattttcgaaagcctctacaaggtcgttatgcgtcgcaactctgtctacgttaccttcgtcatcgctggcgccttcctcggagaacgggctgtagattatggagtccacaagctctgggaggctaataatgttgggaaacgatatgaagacattcctgtgctagggcaaaggcagtcagaatagtgaccagcttgttagc

SEQ ID NO: 189888 - DNA, 272 bp, Glycine max
ggaggcaggctgataaatacggtgtcccgcgaatttgttttgtcaataaaatggaccgtcttggagcaaacttttatcgaacaagagacatgatagtaacgaatttgggtgctaaaccacttgtaattcagttaccaattggttcagaggataactttaagggagttatagaccttgttaggaataaggctatagtttggtctggagaagagctgggtgccaagtttgatattgtagatgttccagaagatcttcaagagcaggctcaggaa

SEQ ID NO: 189889 - DNA, 265 bp, Glycine max
agctaccatactcaccagtggagttgatttatcccttttctctatcctagtacatgctggagggcagcaagaggtgcttgtacagttggctgctttcatccccttaatgtatatgtgtatctgtacatattattccttgtttaaaatgggaatgatgatgttttactcactgacaccaaaacaaacaagctcagtaagcctgcttatgatatgctcgatgattgcaagatatgcagcacccatttcatacaactttctcaatctc

SEQ ID NO: 189890 - DNA, 263 bp, Glycine max
tctctctactactgctagctgtgacttgttttgagttcaatcaaatcgcattggtatctgaaatcaggaaagatggttagcgtactgagatcaggcaggcacaaagggcagaaggcccagcaaccatccttgccattggaactgcaaacccaccaaaccgtgttgatcagagcacctatcctgattactacttcagaatcaccaacagtgaccacatgaccgagctcaaagagaaatttcagcgcatgtgtgacaagtctatg

SEQ ID NO: 189891 - DNA, 236 bp, Glycine max
ggaaacatctaagcaacaaccaggtgaataggcgatggcagtagttgatgggatatgtattaccgataatatacatccaatgtggcttgccatagtggaactgtgtattaatgagtttcgtgatttcaattgcgggttgcgcttgagatttacaatgtttcagtcgtgtatgtgttttattgacgagaacaatgtggcttggtggtttagtgatttataaattttttattgttgct

SEQ ID NO: 189892 - DNA, 268 bp, Glycine max
ccagatctgacaatatgcgaagaactggcttgttacatttgttatgccttgtcattgctttagtaagtgtgcaagcagaagatgcgtataagtattacacatggacggtgacttatggaactatttctccattgggtagtccccagcaggttattcttatcaatggtcagtttcctgggcctagacttgacttggtgactaatgagaatgtaattctcaaccttatcaacaagctggacgagccatttttactcacttggaacggtat

SEQ ID NO: 189893 - DNA, 269 bp, Glycine max
gttcccttaagtggaaacttgagcaagaacgcaaagttgtgaagtctgaagcgtacgagcttgaaagaaggctagaagggtgtaggcaagaattattgactgctaaggctatcatttcagtcaaggactctgaatttgatgcattgcagaataatttgaaggagctagaagaattgagagaaatgaaagaggatatcgatagaaagaatgaacagacagctgccatactgaaaatacaaggggctcaattagctgaaatggaatcactt

SEQ ID NO: 189894 - DNA, 264 bp, Glycine max
cttcccctgtaaatcacgtttagttcgcacaaggttttaaaaaatggctgatgctgaggacattcaacctcttgttgttgataatggaactggaatggtcaaggctggttttgcaggtgatgacgctcctagggccgtgttccccagtattattgggcgaccacgccataccggtgtaatggttgggatgggtcagaaggatgcttacgtgggtgatgaagctcaatcaaaaaggggtatactcaccttgaagtatcctataga

SEQ ID NO: 189895 - DNA, 262 bp, Glycine max
cggggatcaggttcgtttcctggcaaggtcttttggtgtccctggaaatcatcttggacaacaaagtcatggttttcgttggccatatggtcccgtggccattattactccttttaattttcccttggagattcctgtccttcaattgatgggtgccctttacatgggcaacaagccagtccttaaagttgacagcaaggtgagcattgttatggaacaaatgttgcgcctgcttcatacctgtggcttacctgcagaagat

SEQ ID NO: 189896 - DNA, 263 bp, Glycine max
gccagcttgagttcaaggccattctctttgtgccaaagagggcaccctttgatttgtttgacaccaggaagaagatgaacaacatcaaactttatgtcaggagggtgttcatcatggacaactgtgaggagctcattcccgagtacctcggatttgtgaagggtgttgtcgactccgatgacttgcccctcaacatttctcgtgagctgctgcagcagaacaagatcctgaaggtgatcaggaagaatcttgtgaagaagtgc

SEQ ID NO: 189897 - DNA, 261 bp, Glycine max
ggctcttaaggatgggagccaagcgaagttggatctaacaaaagggatgtacgatgctggggataacatgaagtttggttttcccatggcttttacggcgacggtgctgtcgtggtccattctggaatatggagatcagatggatcacgttggccagttagacgctgcgcaagattcgctcaagtggatcactgattatctcatcaatgctcacccttctgagaatgttctctatattcaggtgggtgatcctgttgcaga

SEQ ID NO: 189898 - DNA, 259 bp, Glycine max
gtttgaaaagcacaatgatgaccttgctgcactcgagacttgggataatgggaagccatatgaacagtctgctcaaatcgaaattccaatgctggttcgcctatttcgatactatgctggttgggcagataagattcatggtctcacagttccagctgatgggccatatcatgtgcaaacattgcatgaacccattggtgttgccggtcagatcattccgtggaacttccctcttgtcatgtttgcctggaaggttggg

SEQ ID NO: 189899 - DNA, 242 bp, Glycine max
  unsure (1)..(242): unsure at all n locations
ctaaaccgttgggatatagcaaanaacatgttaggaatgaagagacatagagataatgannggtcagagagcttagatttggcaaaatgtcttgtgctgttctcttgtccaatagaaagcaacaaggcacaacagaaaggttttggggctgtggaatttgagtgcaagacgtgcagccgcaagttctcttcttttcaagcactgggagggcacagggcaagccacaagaggcagaagctaga

SEQ ID NO: 189900 - DNA, 269 bp, Glycine max
tgcttatccttattgagagaaaaaatggccaaatcaatcaaattctttgagttgaacacaggggccaagattccttctcttgggttagggacttggcaagctgaacctggtgttgtagctgaagctctcaccacagccattcaggttggatacaggcatattgactgtgctagtgcgtataagaatcaagcagagattggttctgctcttaagaagctttttgatgatggtgtggtgaagcgtgaggacttatggatcacttccaaact

SEQ ID NO: 189901 - DNA, 142 bp, Glycine max
ctcgagccgaactcagtgaaagagaatccgaggcgaagagaagagaaaaattaagatggagacggaaggagcaggatgtgtcgctgggagcgaacaagttcccggagagacagccgattgggacggcggcgcagagccaaga

SEQ ID NO: 189902 - DNA, 139 bp, Glycine max
gtcgttatcttcttcttttgttgtttgtgtgtctgtattttctctcacctgaaaatgtcttgctgcggtggtaactggggttgcggaagcgcctgcaagtgcggcaacggctgcggaggctgcaagatgtacccagact

SEQ ID NO: 189903 - DNA, 219 bp, Glycine max
acttaatttctctctgattttctccctcacttttatttctctctttctggattattctctctgtgtagattgtggcgtgttctcgatgatgatgatgatgagccgcagcggcgccaaccgggtagcgaacaccgcaatgtttgtggcgaagggtttaagcggcgaagttggtggtttaagagcattatatggcggtggtgtgaagagtgagagcacttt

SEQ ID NO: 189904 - DNA, 165 bp, Glycine max
cactctttctgggtagcaagtagcaacgcaaactcagatatggtttggtttcaatgcgaagattgcggagacaacctcaaaaagcccaagttgtctagtcacttccgaacttgctctgcctacaaattgtcgggcattgactgtggggaaatatttgggcgtgat

SEQ ID NO: 189905 - DNA, 215 bp, Glycine max
cggctcgagggtaaatgttaccagcacaacaccccaaaaaccaaggaagcatattactacagaatgatctttgagaggttcttccctcagaactcagctaggctcactgttcctggaggagcaagtgttgcatgtagcacagccaaagctgttgagtgggatgctgcttggtctaacaaccttgatccctctggtagagcagcacttggagtgca

SEQ ID NO: 189906 - DNA, 133 bp, Glycine max
gcccctaacatccaggaaaacaaggaaggtttggaattgctgaaaactgccattgccaaagctggttacacaggcaaagttgtcattggaatggatgttgcagcttctgaattctacaaggaagataaaacat

SEQ ID NO: 189907 - DNA, 236 bp, Glycine max
cgtgaacaagcctcaggtaagccaaagccatggttaagcataacaatgttatccccaacggacacttccgtaagcactggcagaactatgtgaagacctggttcaatcagccagcacggaagacaagaagacggttggctcgtcagaagaaagctgtgaagattttccccagacctacagctggacctcttagacccattgtacatggtcaaactttgaaatacaacatgaaagtg

SEQ ID NO: 189908 - DNA, 233 bp, Glycine max
  unsure (1)..(233): unsure at all n locations
actgaacaagggttnctctntctctttctcngtcngcttcttcacnttctctcgtttcaatcgagaatcatcatgggcagaaaattcttcgtcggtggcaactggaaatgcaatgggaccactgaggaggtgaagaagattgntantactttaaatgaagctaaagtccctggagangatgtngtagantggcngtaagcccnccttttgngttcctncctttgtaaaaagnt

SEQ ID NO: 189909 - DNA, 232 bp, Glycine max
ctgccctagaccaccgcaagcaacgtcgcacaccgccttcatccgttagggcaaaaatgagtcgaggaagtggaggtggatacgatcgtcacatcactattttctcccctgaaggacgtctctttcaagtggagtatgctttcaaggctgtgaaggctgcaggaatcacctcgattggtgtccgaggaaaggattcaatttgtgtcgttactcagaagaaggttccggataa

SEQ ID NO: 189910 - DNA, 185 bp, Glycine max
gttctcttctttcccttcccaagaagaagaagaagaagatgccttcttcagaatcatcaacaggcttctccgaaaccatttgtgtgaccggcgctggtggcttcatcgcctcttggatggtcaaactccttctggagaaaggctacactgtccgaggaaccctcagaaacccagatgatcccaag

SEQ ID NO: 189911 - DNA, 143 bp, Glycine max
aggaaaaccctaattgcggtattctcagtgccttcgagagaaagaaaaaatggcagataatcttgttctccgtggcaccatgcgcgcccacaccgacgttgtgacggcgattgccactcccatcgacaactccgacatgatcg

SEQ ID NO: 189912 - DNA, 212 bp, Glycine max
cagctagagcgtgggtgtcaacgttacatgcaactcagttggttctaaaagcccataaagaagctgtgaattccttaagtgggaatggctctacaaaattaggaactgttgcaacagttgttgctgcttccagttcaacagccttggaatgttcaaaagaaattgaagcagcaatgcagattcctttgcgaaatgctcgggattgatgatta

SEQ ID NO: 189913 - DNA, 198 bp, Glycine max
gaatatcttgttgtttggagcgatccgagaaaaactctgtaaacatgttggtttaccaggacctccttacaggtgatgagcttctctctgactccttccgttacaaggaaattgagaatggaatgctgtgggaagttgaggggaagtgggttgttaaaggagtagttgatgtagacattggtgcaaacccttctgctg

SEQ ID NO: 189914 - DNA, 208 bp, Glycine max
gggagactccatgaaggtgtcatatttacaccagctagaaagattgaatgggggagttgttgtgggagagattagcagaaggttctctacaaatgagaacacattgacagttggatgttcatatgtggttgattctcagacagttttgaaggcaaagctgaacaaccacggcaaccattggggcttattgcagcatgagctaacacgt

SEQ ID NO: 189915 - DNA, 232 bp, Glycine max
ctaatttgttccgcaaaatggtgatggtgattgtgaggaacaagacagttaggttttggaagaaagtgtatgttatatacagcttttcctttgttcgcaaaatcatcgcccacatggtcaccttcttcttctactgtgttgtgattccccttacaatcttggtcccagaggttcatgttccaatctggggagctgtttatattccttctgtcatcaccattctcaattcagt

SEQ ID NO: 189916 - DNA, 203 bp, Glycine max
gcgaagacagccatggcgtcgtttcttcaatcgtttctggatccgaagaagaactggttcgccgctcagcacatgaaatccctctccaaacgcctccgcaaatatgggctccgatacgacgatttgtacgatccttactacgatctggatgtgaaggaggcgctgaatcggcttccgaaagaggtggtggacgctcccagggg

SEQ ID NO: 189917 - DNA, 232 bp, Glycine max
  unsure (1)..(232): unsure at all n locations
ctagttgccacactacaccgatatttccaccaaacccgtttgcnttgttgtttgcgaataaatggcgactaagaggagcgtgggaacgttgaaggagggtgatttgaaggggaagagggtattcgtgagggtcgatctgaacgtgcctttggatgacaaccttaacatcaccgatgacactagagtccgtgctgctgttcccaccatccaagtacttgaanggttatggggc

SEQ ID NO: 189918 - DNA, 185 bp, Glycine max
ctcgagctcgagccgcgaatatcttgttgtttggagcgatccgagaaaaactctgtagacatgttggattaccaggacctccttacaggtgatgagcttctctctgactccttccgttacaaggaaattgagaatggaatgctgtggaaagttgaggggaagtgggttgttaaaggagcagtgga

SEQ ID NO: 189919 - DNA, 230 bp, Glycine max
cttaagtatgacagaaaatgtgacttcaatcctatcaattgatgatatgcttccagctgttgcccaaggtgctattggaatagcatgtagaagtgatgacgataaaatggcggaatacattgctacacttaatcatgaagaaacaagactagcagttgtctgtgagagggcctttcttcagactttggatgggtctgccgcactccctattgcagggtatgcttgaaaac

SEQ ID NO: 189920 - DNA, 167 bp, Glycine max
gtccggccaccttggataccaaggacgccaatgaaagggcaaatctggttcttgatcatgcagagagaatgggctgcaaaagatacttgaccccaagggatgttgcagagggtacttcaaacttgaatcttgcatttgttgcacaattgtttcatcataggagttgt

SEQ ID NO: 189921 - DNA, 229 bp, Glycine max
gtaagatttgcagtagacagaggaggattagttggaccagatggttccacacactatggtgcctatgatgtcacttttacggcctgcctccctaacatggtggtgatggttgcttctgatgacgcagaaatttttcacacggttgccacagcagctgccattagtgatcaaccgtgttgtttccgataccagaagggagatggagttggtgttgaaataccaccaggga

SEQ ID NO: 189922 - DNA, 182 bp, Glycine max
gcagaaagcagcagggaaggaggaggagggaaaactgcagaagggaattgcagagttctacgacgagtcgtctggcatatgggagaacatttggggcgatcacatgcaccacggcttttatgacccggattccaccgtttctgtttctaatcatcgcgctgctcaaatccgaatgatccaag

SEQ ID NO: 189923 - DNA, 222 bp, Glycine max
cactcgagccgattcggctcgagagtcatctatggctacccttatatgacccagcaactactctccccaagaagacgctaaggctctcataacggcttttgaaggatgggggactgatgagaataatgtcatagtaatattgggtcatagaactgtttatcagaggaagcaaatgagaagagtctatgaggaaattttccaggaggatcttgtgaaacgcct

SEQ ID NO: 189924 - DNA, 228 bp, Glycine max
gaggaactcatctttcacatcaactatcttggtgctgatcaacccaccttcacccttaacttctccaaaggttctagccaagtcattgctcaatactaccaactaattcgccttggttttgagggatatagaaacgtgatggaaaactgcagagacaacatgttggtgctgaaagagggcctagagaaaacagggagattttcaattgtgtccaaagacaatggagtg

SEQ ID NO: 189925 - DNA, 169 bp, Glycine max
  unsure (1)..(169): unsure at all n locations
ccggatttttgattccgaacgatcgaccttcttcgtttctcgcaaagtttaagttatcattttttttganaagactcacatcagcattgtcgtcattggacatgtcgactctgtgaattcaactacctcttgtcatttgatctacaagcgtagaggtattgacaagcgt

SEQ ID NO: 189926 - DNA, 223 bp, Glycine max
attttggcaaagtcaagttcgctaggaacactgattctggccaagcttttgctgttaagatcattgacaagaacaccatcgtcgatatcaacatcaccaatcagataattagggaaatagcgaccttaaagctcctacggcatcccaacgttgttagattatatgaggtcttggctagcaaaacaaaaatttatatggtacttgagtacgtgattggagggga

SEQ ID NO: 189927 - DNA, 226 bp, Glycine max
  unsure (1)..(226): unsure at all n locations
ataaacaacacagagagaagcgtcttaataaacgctcttctctgaaaaacctgatttcttctcttcgtctcttctctttcgtttacgatcttcgatctctgaaaatgagagagtgcatttcaatccacatcggtcatgncgttantcaggtcggaaacgcctgctaggaactctactgcctcgaacacggcattcagcctgatgggcagatgccaagtgataatac

SEQ ID NO: 189928 - DNA, 174 bp, Glycine max
gtacggttcatcaagacagtgcaaagggtggggctctatgtccatcttcgcatttgaccttatgtgtgtgctgagtggaactttggaggatttccagtttggttgaactatgttcctggcatcagcttcagaacagataatggcccttttaaggccgcaatgaaaggtttcact

SEQ ID NO: 189929 - DNA, 274 bp, Glycine max
tatgaaatgttgattggtatttattgagaacttgagtaaagagtaaacctttttcttttagattagagtttttttatagattttgaaagtgaaaaccctttgttttttttatttgttataactacttgagccggatgaaaggaaaccttcacgtccgattttgaaagggggatatcttattggattggatcctatctcaatttttcgtttgctagacccgtagttaaaaaacccactttcctacgattacgaggtttattcgaatatgaaatcc

SEQ ID NO: 189930 - DNA, 250 bp, Glycine max
atttttaatgcagctggagtaactggcagacccaatgtcgattggtgtgaatctcataagacggaaaccattcgcaccaacgttgctgggactttaacattggctgatgtcagcagagagcatggactcttgatgataaattatgctactgggtgcatatttgagtatgatgcagctcatcctgagggttctggcattggctttaaggaggaagacagacccaacttctttggttctttctattccaaaa

SEQ ID NO: 189931 - DNA, 248 bp, Glycine max
cccaactccaacctctgttcatcgtctaccgcgctttcttttcaaccagaactatgattaagctttttaaagtaaaggaaaagcagagagaacttgcagaaaatgcaagtggcggaccacctgttaagaagcaaagtgctggagagttgcgtcttcacaaagatataagtgagctgaatctaccaaaatcatgtaccatgcaattccccaatggcaaagatgatctgatgaactttgaagtttcaatt

SEQ ID NO: 189932 - DNA, 243 bp, Glycine max
ctcgaccggttgagtacaccgtggccaggtcacgctttagctttgacgattttgaagcgtatcaggctttgtcacacagtgtaagagatcggttgattgaacgctggcatgatactcatgtttacgtcaagagaacaaaacctaagcgcctctacttcctttcgcttgagtttcttatgggtcgttccttgtcaaatagtgtcatcaatcttggcatccaggatcaatatgcagaaaccctaa

SEQ ID NO: 189933 - DNA, 251 bp, Glycine max
gcttgtctcaaagattaagccatgcatgtgtaagtatgaactaattcagactgtgaaactgcgaatggctcattaaatcagttatagtttgtttgatggtatctactactcggataaccgtagtaattctagagctaatacgtgcaacaaaccccgacttctggaagggatgcatttattagataaaaggtcaacacaggctctgcctgttgctttgatgattcatgataactcgtcggatcgcacggcct

SEQ ID NO: 189934 - DNA, 258 bp, Glycine max
caatggggagagggaaattggtgagttaattgcaaaagctatggagaaagttggcaaagagggtgtcatcacaatctcagatggcaagacattgtacaatgagttggaagtcgttgaaggaatgaagctcgacaggggatacatttctccatattttataacaaaccagaagaaccagaaatgtgaacttgaggatcctctcattataatccatgaaaagaaaatctcaagcataaatgctatcgttaaagtattaga

SEQ ID NO: 189935 - DNA, 266 bp, Glycine max
ctcgagccgctcgagccgcaaaaccctaatcgagatcacaatcggatcgtaaacaaacagagaccaaccatggacggtgattcctcttggagtgctcgactctcttccgcttccaggcgctaccaatccgctcttcaatctcgatcagacatgttcatgggttttgatgaaaatgatggggacgatgatataagagaggagtttctctgcccattttgttctgagtattttgatatcgttggattatgctgccacattgatgaaga

SEQ ID NO: 189936 - DNA, 270 bp, Glycine max
caattatcatgggcaaggtcaagatcggaatcaacggatttggaagaattggccgtttggtagccagagtggctctgcagagagacgatgttgaactcgttgccgttaacgaccctttcatcaccaccgattacatgacatacatgtttaaatacgacagtgttcatggacactggaagcatcacgatgtcaccgttaaggacgagaagacccttctcttcggtgacaagccagtcactatttttggacacagaaaccctgaagagatcc

SEQ ID NO: 189937 - DNA, 257 bp, Glycine max
gttcttcttcttttgttgttctgtgtttgtgtttgttttttctctcacctgaaaatgtcttgctgcggtggtaactgtggttgcggaagctcctgcaagtgcggcaacggctgcggaggctgcaagatgtacccagacttgagctacactgagtcaaccaccaccgagaccttggtcatgggagtggcacctgttaaggctcaatttgagggtgctgaaatgggtgtgcccgctgagaacgatggctgcaaatgtgg

SEQ ID NO: 189938 - DNA, 257 bp, Glycine max
attactctctcactttctccaatatggcttcttctcgaaatgagttttatgcacttatggtagtggtggtggttggctccatagtggcttcctgtggtgctaacttcaaccaagactttgatctaacttggggtgatcagcgtgctaagatattcaatggtggacagcttctatctctttccctggacaaagtctctggctctggcttccaatccaagaaagagtacttatttggaaggatcgatatgcagctcaag

SEQ ID NO: 189939 - DNA, 249 bp, Glycine max
cttcccctttttgatttttcttagaaaactcccaacttcgaatcaatatgaagaaagtggtgctaaaggtggaactccatgatgacaaaatcaagaaaaatgccatgaaggcagtatctggtatttcaggggtagagtcagtctcagtggacatgaaggaccagaaaatgactataattggggatgttgatcctgtaacagtagttggaaagtttacaaaattcagtcttggcaagcttagaaaattct

SEQ ID NO: 189940 - DNA, 246 bp, Glycine max
gttgggacccgattgcattcgggttcaaggcggagaatgagacagtagagatgttgattcataaccctggcaaagaggaggatcccgcgtgtggcccgcttgttgactcggttgctctcaggactctctaccctcctagagctactaaccagaacatactaaagaatggtggatttgaagaaggaccctatgtgttccccaactcatcttggggagtgatcatccccccaaacattgaggatgacc

SEQ ID NO: 189941 - DNA, 166 bp, Glycine max
atgccttccaaggacaaaatcgcttacttctacgacggtgatgtcggtagtgtatactttggggcgaacatccaatgaagccccaccggctttgcatgactcatcatcttgttctctcatacgatcttcataagaagatggagatttaccgtccacacaacatacg

SEQ ID NO: 189942 - DNA, 257 bp, Glycine max
acatcatgtaccgctttgcaacctccctcgcctccaaagctagaattgccaggagcagcactcaacagattggatgtagggtcacttggaacaggaattatgcggctcaaagacattaagtttggtgtggaggctcgggctctgatgcttaagggtgtcgaagagctcgctgatgccgttaaagtaacaatgggccctaaggggcgtaatgtggttattgagcaaagttttggagcacctaaagtgacgaaagatgg

SEQ ID NO: 189943 - DNA, 252 bp, Glycine max
gggtaatgtcttcaagaacaagagagtcttgatggagagcatacacaagtccaaggctgaaaaggcaagagaaaagaccttgtctgatcagtttgaggcaaagcgtgccaagaacaaggctagcagggagaggaaaaatgctaggagagaagagcgtttggctcaaggccctggagagaagccatcagcagccccaagtgctccatctgcaatagcatccctgccagcccaagcatcaaagaaatcaaagaa

SEQ ID NO: 189944 - DNA, 251 bp, Glycine max
acgcattatattactagttttaatttgttttgtcgtttgcttctttctttgattaatgatgactagctttaaggttgcatgtgtggttgcgatgatgtgcatggttgttgccatgagtgttacacccatggcacaggccgcaatcacgtgcgggcaggtcgccggcgacgtgtctccgtgcctcagttatcttcgaagcggcggaaaaccatcggacgcctgctgcaacggagtgaagtcactcagcggtg

SEQ ID NO: 189945 - DNA, 240 bp, Glycine max
cggctcgagatcagaaccacctgaagtagttcaggcacgaaatgacaattctcatggtacaaacttcccggattcccccgagcccatctatggaactcagttcttgccaaggaaattcaaaattgctgttactgtgccaactgataactccgtggacattctcacaaatgatattggtgttgttgttgttaccgatgacgatggggagcctcaagggttcaacatatatgttggtggtgg

SEQ ID NO: 189946 - DNA, 246 bp, Glycine max
gcctcctgctgttaaccaagtggaattgcacccaggatggcagcagccaaagctgcatgcattctgtgaatctaaaggagttcatctgtctggatattctccactgggctcaccaggagttctcaaaagtgacattcttaagaatcctgttgtgatagagattgcagagaaattggggaagacaccggcacaagttgcccttaggtggggactgcaaacaggtcatagtgtgctgcctaagagcac

SEQ ID NO: 189947 - DNA, 247 bp, Glycine max
gaagcatcattccttatagggtgaaggttagtctcatttttgatgttcccatcttgggaaggctaactctacctttggagaaaactggagaaatccccataccatacaagcctgatattgatcttgagaagattcattttgaaaggttctcttttgaagagacaattgcaacgcttcatttgaagttggaaaacaagaatgatttcgaccttggcctcaatgcgctcgattatgaggtctggcttgg

SEQ ID NO: 189948 - DNA, 247 bp, Glycine max
ctttttctttaggcctttccgaattaagtacttgtttcattgtctctcgaagcaagaaaaatgttcatcgagagtttcaaggttgagagtcctaacgtgaagtacacagagactgagattcagtccgtgtacaactatgaaaccactgaacttgttcacgagaacaagaatggcacttatcagtgggttgtcaagcccaaaactgtcaaatatgaatttaaaaccaacacccatgtccctaaactag

SEQ ID NO: 189949 - DNA, 266 bp, Glycine max
tggggaattggagatagacacctgaaacaatgggtgacagcagagcctgagaccaaagttctcagaattgaacctgaacatgacttgttaatcttagcttcagatggattatgggataaggttagtaatcaggaagcagtagatactgctcgttcttttctcgtaggcaacaacaaatcacaaccattgctgctggcttgtaaaaagcttgtagatttgtctgtttcacgaggctctttggatgacacaagtgttatgctaatcaa

SEQ ID NO: 189950 - DNA, 264 bp, Glycine max
atctaacgcaggtctatggattttatgatgaatgccagatgaagtatgggaatgctaatgcttggcgatattgtacagatgtttttgactatcttactctttctgcaattatagatggaactgtgctttgtgttcatggtggcctttctccagacattcgatcaatagatcagataagggtcattgagaggaactgtgaaattcctcatgagggaccattttgtgatctgatgtggagtgatcctgaagatatcgaaacatggg

SEQ ID NO: 189951 - DNA, 257 bp, Glycine max
ggctggagggagagtccagttatggggaggaagctgcttcagaccaacagtatggtgaggtgagtcatgatagagctgggtggcctatgagggaaaaagatagaggttcggaaagggactggtctggttcttctgagagaaggtacagagatgatagagatcaaggatatgagagagatgcatctagagaaaaagatatgggtcatgatcatgaatggtctgaaagaaggcatcgtgatgatagagaaacgggcaga

SEQ ID NO: 189952 - DNA, 246 bp, Glycine max
gtttggagcgatccgagaaaaactctgtaaacatgttggtttaccaggacctccttacaggtgatgagcttctctctgactccttccgttacaaggaaattgagaatggaatgctgtgggaagttgaggggaagtgggttgttaaaggagcagttgatgtagacattggtgcaaacccttctgctgagggtggaggagaagatgagggagttgatgatgcagctgttaaggttgttgacattgttg

SEQ ID NO: 189953 - DNA, 244 bp, Glycine max
tctcgagccgctcgagccgattcggctgaggagaatatgaagttgtttgttttctttgctgctgcagtagttttggtagcatggccatgccatggcgcaggctaccaaaggttccctctccgaatgaaaactggctatggtgagcgttcttcggaggtaaaatgcgcaagttttaggcttgctgtggaagcacacaacatccgagataaataaaccattcctgaagagtgcgttgaaccaacaa

SEQ ID NO: 189954 - DNA, 248 bp, Glycine max
ctgtcggaaagaataagaggatttccaagggaaagaagggtggcaagaagaaagccgctgatccctttgccaagaaagactggtacgatatcaaggccccttccctcttccaggtcaagaatattggcaaaaccctcgtctctcgtacccagggaaccaagattgcatccgaaggactcaaacatcgggtttttgaggtctcattggctgatctccaaggggatgaagaccactccttcaagaagatt

SEQ ID NO: 189955 - DNA, 254 bp, Glycine max
aactttcctattcacatctgaatcagtgaacgaggggcaccctgacaagctctgtgaccagatctccgatgctgtgctcgatgcatgcttggagcaggaccctgacagcaaggttgcctgtgaaacctgcaccaagaccaacatggtgatggtttccggagagatcacaaccaaggccaacgtggactatgagaagattgtgcgtgacacatgcaggaacattggttttgtctctgatgatgttggtcttgatg

SEQ ID NO: 189956 - DNA, 261 bp, Glycine max
catcctttctttgtcaaacaccaaagtccaaaccattttttgctccgatcaacatgaagttgatcaataaaccatcgcaactacgttccctcttgagccttttctgctccattttgctgctcttggaattagctttcgtggctgcggaggacccttatagattcttcgactggaccattacctatggtgacatttatcccctaggagttaaacaacagcagggtattcttatcaatggccaattcccaggccctgaaatct

SEQ ID NO: 189957 - DNA, 264 bp, Glycine max
  unsure (1)..(264): unsure at all n locations
ctagttaggcaaacacaccaaacaccaaacaccaaactagttggctcaattctctttgaatggctttggaggctttgaattcaccaacagcagccaccactccgttccgtggctaccnnnnnnnnnnnnnnnnnnnnnnnnctgaccttcacttacgtgagccttgggctaaaaggaaacgctccaaacgaccgcgttttgagacggaggaagagtacctcgctctttgcctcatcatgctcgcacaaagcggtaacaccagaa

SEQ ID NO: 189958 - DNA, 262 bp, Glycine max
acaaccttcgtcacaaacccaattcgcgagggatcggattcgccatcatggggaagaagaagaagagagtttcctcgaaggtgtggtgttattactgcgatcgcgaattcgacgacgagaagatcttggtgcagcatcagaaagccaagcacttcaagtgccatgtctgccacaagaagctctccaccgccggcggcatggccatccacgtcctccaggttcacaaggaatccgtcactaaggtgcccaatgcaaagcctgg

SEQ ID NO: 189959 - DNA, 249 bp, Glycine max
ctcgagccgattttgtatcactatgacacggttgtgttcttgtaggtactatttgaaagatgcagtccttgaagggggtattccatttaacaaagcatatggaatgacagcctttgaataccatggtccggatccaaggtttaacaaggttttcaacaaggggatggctgatcactctaccattacaatgaagaaaattcttgagacctacacaggctttgagggacttaaatccctggttgatgttgg

SEQ ID NO: 189960 - DNA, 227 bp, Glycine max
  unsure (1)..(227): unsure at all n locations
ggncaagtaccatgatgagcttacgcgccaatgctgcgancattggcactcctggaaagggtattcttgctgctgatgagtcaacagggacaattggcnagcgtttggccagcatcagtgtagagaacattgaatccaacaggcgagctcttagggagctgcttttcactgctcctggtgttcttcaatatctcagtggtgtcatcctctttgaggaaaccctctac

SEQ ID NO: 189961 - DNA, 245 bp, Glycine max
ggagtcctcaaagatctatgcttacctcttcctctgcatgatctttctctcttccgccactcccattctcggttgtggctactgtggcaaaccccccaaaaagcacaagcctggtaaaacaccaaagacacccaaaacacccgttgttaagccaccagtcaccatccctcccattaatgttcctcccgttgttcttccaccaatagtgaagcccccagggtattctccctccattccaattatta

SEQ ID NO: 189962 - DNA, 264 bp, Glycine max
  unsure (1)..(264): unsure at all n locations
tgagaaggatccatcaaagattgggagactttcaaatgaagcccttgctcctcttgtggaagttgcattgaaactttcgaagatggaagaattcactggtcgatccgctccaacagtcattacatgaacacatacaggtggaaggtggttagatcctgaagtttctcccagtcatttcttctttgtncagtttcttacggatggccgaacactagtgttggttgtttgcagcctttgctatgggcacttgagtggaatttgatc

SEQ ID NO: 189963 - DNA, 255 bp, Glycine max
actaccagcagtgctaaagtaaaagcttgggttactgcaatcaatgaagctagtctaagacctcttgagggctggtgttgtcctcatcgctttggttcctttgctcccataagaggtttgactgaagatgggagccaagcccaatggtttgttgatggacaggcagcatttgaagcaattgctacttcaattcaagatgcaaagtcagagatcttcattacgggttggtggttgtgcccagagctatatctgaga

SEQ ID NO: 189964 - DNA, 249 bp, Glycine max
acctcaatcaccctcgcgccctcgctcttcccttcctggtggcgacaatgtcgactcctgctaggaagaggctgatgagagacttcaagaggctgcaacaagacccgcctgcagggatcagcggtgccccccaggataacaacataatgctgtggaatgctgtcatatttggtcctgatgatactccatgggatggaggcacgttcaagttgactctccagtttactgaggattatccaaataaaccac

SEQ ID NO: 189965 - DNA, 248 bp, Glycine max
ctcagatcttcgcaaacttgctgtgaatctcattcccttccctcgtctgcactttttcatggtgggttttgccccactcacatctcgtggttcccaacagtacagagctcttactgtacccgaattgacccaacaaatgtgggatgctaagaacatgatgtgtgcagctgatcctcgccatggtcgatacttgacagcttctgcgatgttccgtggtaagatgagcacaaaggaggttgacgaacaga

SEQ ID NO: 189966 - DNA, 243 bp, Glycine max
atgggttcttcttcttctatgtggacggtgtgtgtgattttggcatcactggcctctgcagcactctgtgccaacccacgcaggccagtggatgtacaatttggccgaaactacgtgcccacatgggcctttgatcacatcaaatatttcaatggtggttctgacattcagcttcatcttgacaagtacactggtactggcttccagtccaaagggtcttacttgtttggtcacttcagcatg

SEQ ID NO: 189967 - DNA, 203 bp, Glycine max
gtgggaactttgaccatcgaagcagcgaatgaccctaatgccttgaacaaaaccgtgcacataagactccctaagaattatttgaccataaatgagatcatctctttgtgggagaacaaaattgggaagactcttgaaaaaacttatgtttcagaggaaaaggttcttaaagacattaaggaggcttcttttccacacaacat

SEQ ID NO: 189968 - DNA, 243 bp, Glycine max
gctgcttccgcggcgagagcgggtcgtcgcgtgccggtcgggggacggattgggaacgggcccttcggggcctcttccccgggcgtcgaacagtcaactcagaactggtacggacaaggggaatccgactgtttaattaaaacaaagcattgcgatggtccctgcggatgttgacgcaatgtgatttctgcccagtgctctgaatgtcaaagtgaagaaattcaaccaagcgcgggtaaacgg

SEQ ID NO: 189969 - DNA, 252 bp, Glycine max
ctttgttgctgcagtagttttggtagcatggccatgccatggcgcaggctaccaaaggttccctctccgaatgaaaactggctatggtgagcgttcttcggaggtaaaatgcgcaagttttaggcttgctgtggaagcacacaacatccgagatattaaaaccattcctgaagagtgcgttgaaccaacaaaggactacattaatggcgaacaatttagatcagactctaaaacagttaaccaacaagcttt

SEQ ID NO: 189970 - DNA, 270 bp, Glycine max
cggctcgaggcccttccgtaaagaacgtccttcttttggattctgatgggaaacgtgtcgcagtcaaatacttctctgaagactgggcaacgaatagtgccaaggaaaattttgagaaagttgtcttcaacaagactcagaagaccaatgcccgcacagaagcggaaatagcaatgtttgagaataacattgttgtttacaagtttgtccaagatcttcacttctttgttaccggtggtgattatgaaaatgagcttatcttagccacag

SEQ ID NO: 189971 - DNA, 238 bp, Glycine max
gcagcctccaattcgtgccactctcttcaaaatggccgttaccttctcaaatctccacacagaatcaggtctcaagtccctcgacgacttcctctctgggaaggtctacgtttctggggatcagttcacaaaggacgacatcaaagtgtatggtgctgttttggagaagccaggtgactcttttcccaatgctgccaagtggtacgaggttgtctcatctcagcttgctgcaagcttc

SEQ ID NO: 189972 - DNA, 150 bp, Glycine max
gttcccaataaaagccttgattttttcatatttgatccaaacaaacgtgggaatttgaattgggaaagacgctacaatatcataagaggcatcgctcgcggtcttctttaccttcatgaagattctagattataggttgttcatcgtgat

SEQ ID NO: 189973 - DNA, 271 bp, Glycine max
atcgagccgctcgagccggggatgcacatactattggcttagtaaaataccgagaaccatatccatttactgtggatcccagttggcggggaagtcgttcagagttgccttttctaaactctcacaagatgaagatgtccattctgctgggtgtggtgcacatgaacttgggaattcttttaagttatgtcaatgctcgtttctttggcaattcgctggatataaggtacaagttggtgccccagatgatttcccttaactgtctatttgg

SEQ ID NO: 189974 - DNA, 154 bp, Glycine max
aaccgctccagccttgtttcttctcagatcttcttccatggaacagtaggagattgtggagaagataggcgagggaacatacggcgtcgtttacaaggttcgcgaccgagtcaccaatgagaccatcgctctcaagaagattcgcctcgagcag

SEQ ID NO: 189975 - DNA, 212 bp, Glycine max
ccaggtgcattgcttcggtcgcaagaagaccgccgtggccgtgacctactgcaagcgcgggcgcggtctcatcaagatcaacggctgccccattgagctcgtggagccggagatcctccgcttcaaggccttcgagcctatcctcctgttgggtaagagccgcttcgccggcgtcgacatgcgcatccgcgtcaagggtggcggccacacct

SEQ ID NO: 189976 - DNA, 153 bp, Glycine max
gtgaaagggttgtctcaccgggtgaagagtgtgacaaagtttttactgctatgtgccaagggaagatcattgatccacttttggaatgccttggagagtggaataggtgctccacttccaatttgttagttttgttttcttctgttttcttca

SEQ ID NO: 189977 - DNA, 273 bp, Glycine max
ggaagaggcagtgcagtggttctactactttgcttcttgctgcttcactctcagatggctcgtgctgccacctacacagttggagattctgggggttggacctttaacactgttgcctggcccaaaggaaagctctttcgggctggtgacacacttgctttcaattatagccctgggactcacaatgtggtggccgtgaacaaggctggatatgatagctgcaagattccaagaggagccaaagtgtataattcagggacggatcagatcaga

SEQ ID NO: 189978 - DNA, 150 bp, Glycine max
cggctcgaagctagctatatgcttaacacatgcaagtcgaacgttgtattcggggagctgggcagaaggaaaagaggctcctagcgtgaaggttgcttgtatcgcccaggaggtgggaacagttgaaaacaaagtggcgaacgggtgcgt

SEQ ID NO: 189979 - DNA, 269 bp, Glycine max
actcgagccgattcggctcgaggcttctggctcttgcgatcaacaaacgcagcgttttgaactcagatttgagggggagacaatggcaacaacagtgagaagtctgaagataaagacaagtacgtgcaaacgtatagtgaaggagctgcattcttatgagaaggaagttgagagagaagctgccaaaacagctgatatgaaggaaaaaggagccgatccctatgatctcaagcaacaggaaaatgtcttggctgagtctaggatgatga

SEQ ID NO: 189980 - DNA, 201 bp, Glycine max
accacttacttctattacaataacacaatattctcatcggtaacatccatcaccagaaccatggtacaagagaagaagctcgtggacgaagtgtcgggttggcagagactctactaagacggttcagtagaccggacttggaccggttcgccagaagttaaattcttggttcgaacggttcatccccatgaagaatttatc

SEQ ID NO: 189981 - DNA, 225 bp, Glycine max
ggaaaataaagaaattagcgtgaaaaatgttgggtgtgttcagcagctccatagtgtcgccgccggaggagctcgttgccgccggcagccgtacaccgtcgccgaagatgacggcggcggcgctgcggaagtggttcgaggagaagaacccctccgcagtgtcggtggaggtcggagagcatgtcaagctcggttatacccaccagaacgattcgccgtttaagc

SEQ ID NO: 189982 - DNA, 279 bp, Glycine max
gcggatttggcttccaagatgtcaagggtgaaggtggtgggagagaacctgagtgaggaagagagagcttcttgtgtgaaggatttgtatcagaacactgaagaggaggttgattttgaattgtttctcaaggtctatttgaaactccaaacatttgtgaattctagaaccggaagtagtccaaagaactcgttggcattcctcaaggcagctacaaccacattgcttcacacaataagtgaatctgagaaagcgtcatatgtagcacatataaatcac

SEQ ID NO: 189983 - DNA, 254 bp, Glycine max
gcaagtaccctgtagttcgattatccgaaatacctgctaagcagttggaaaatgataaatctgagcagaaaaaaattgttattagacctaggcctaataaaaacagtttgaatgatgctaacggagttgggaggaaaggaaaccctttaagaagtgtggaagaaaggaaggaggaatatgaccgggcacgggcacgtatctttagtagcactagaagctctgagtcaggtgatacctcatccgtggttccaatg

SEQ ID NO: 189984 - DNA, 275 bp, Glycine max
gaaaccctagcctctcaccctccctgcgacacgatgcagatcttcgtgaaaaccctaacgggtaagacgatcacccttgaggtggagtcttctgacaccatcgacaacgtgaaggccaagatccaggacaaggaaggcatccctccggaccagcagcgcctcatcttcgccggaaagcagctggaggacggccgcaccctcgccgactacaacatcatgaaggagtccaccctccacctcgtcctccgtctccgcggtggcgccaagaagcgcaa

SEQ ID NO: 189985 - DNA, 168 bp, Glycine max
gccacttctgaatctattgaatcaacaatcatgtcggacgacgagcaccatttcgagtccaaggccgacgccggagcctccagaagctaccctcagcaagccggtaacatccgcaagaacggctacatcgtcatcaaaggccgcccctgcaaggttgtggaagtttcg

SEQ ID NO: 189986 - DNA, 148 bp, Glycine max
gctgctttatctttgtattggtctgatttgaaagataaagttgctgggttggcattagcacaaagtccctatggtggaactcctatagcttcagatcttctgcgagaaggacagcttggtgattatgtaaatttacggaaacttacag

SEQ ID NO: 189987 - DNA, 267 bp, Glycine max
ggctagggttcggaaacgaagaagggttctgttttcttttcgcgatgagggccaagtggaagaagaagcgtatgaggaggctgaagaggaagcgccgaaagatgagacagagatccaagtagtgcgttaaacctagtttgtttccgttgcttttacaattgcttatgttgtcaaataggacacccagttgttagtggcactggtctctcctttttgatgatttgatacattttgttggattatattcgtcttatgttctaagctgaa

SEQ ID NO: 189988 - DNA, 267 bp, Glycine max
tgcatttctatttctaactaattattgtgcttattattattgttgagaaagaaaagaatggcaaagttaataaaattctttgagttgaacacaggggccaagattccttctgttgggttaggcacttggcaagctgagcctggtgttgtagccaaagctgtcaccacagccattctggttggatacaggcatattgattgtgctcaagcgtataacaatcaggcagagattggttctgctcttaagaagctttttgatgatggtgtg

SEQ ID NO: 189989 - DNA, 270 bp, Glycine max
cttttccttttcattccatcatctctttagctttgtccaaagaccatgtctgtggtggctgataattctgcaaacaatggaagcaaccaagtggttttaaatgtaaacggtgatgcccccaagaagtgtgatgactcagccaaccaagactgtgtacctcttctgcagaagttggtagcagaggtggtggggacgtacttcttgatatttgcagggtgtgcttcggtggtggtgaaccttgacaaggacaaagtggtaacacaacctggg

SEQ ID NO: 189990 - DNA, 270 bp, Glycine max
agccatgcatgtgtaagtatgaactaattcagactgtgaaactgcgaatggctcattaaatcagttatagtttgtttgatggtatctactactcggataaccgtagtaattctagagctaatacgtgcaacaaaccccgacttctggaagggatgcatttattagataaaaggtcaacacaggctctgcatgttgctttgatgattcatgataactcgtcggatcgcacggcctttgtgccggcgacgcatcattcaaatttctgcccta

SEQ ID NO: 189991 - DNA, 247 bp, Glycine max
tgccccttgtgagtgagtgttctgaaagatgagaccaattttgatgaaaggtcatgagaggccattgacgttcctgaaatacaacagggacggcgatctcctcttctcctgcgccaaggaccacaacccaaccgtctggattgccgacaatggcgaacgcttgggcacttatcgcggccacaacggcgccgtttggacctgcgacgtctcaagagattcggttcgtctgatcacgggtagtgccgat

SEQ ID NO: 189992 - DNA, 273 bp, Glycine max
  unsure (1)..(273): unsure at all n locations
cgactcatgagagtgggggcgagcagagcccgcgcggttcgtcgtccggcgcgagggagcaggaccggtacctcccgattgccaacatcagccgcattatgaagaaggctctgcctcccaacggcaagattgcaaaggatgncanannnnccctgcaggaatgcgtttctgagttcatcagcttcattacnagcgaggcgantgagaattgccngaaggggaggagaaggccattcatggggncgntttgctatgggccatggccatttaggt

SEQ ID NO: 189993 - DNA, 256 bp, Glycine max
caaatcttagccgccattgatttttcctcttccatttctcttactttctcagcctttttcgattacccatttggttatttcgccctaatggctcttgctccatccaaagtttccaccttttctggtttttctcccaaacccagtgttgggggtgctcagaaaaacccaacttgctctgtttctctgagctttttgaatgagaaacttggaagcagaaaccttagggtttgtgcctcaacggtgcctctcactgggg

SEQ ID NO: 189994 - DNA, 208 bp, Glycine max
agctgagtatggtgttgtagccaaagctgtcaccacagccattctggttggatacaggcatattgattgtgctcaagcgtataacaatcaagcagagattggttctgctcttaagaagctttttgatgatggtgtggtgaatcgtgaggacttatggatcacctccaaactctggtgttcagatcatgcttcagaagatgtgccaaaa

SEQ ID NO: 189995 - DNA, 144 bp, Glycine max
tgccacttctgaatctattgcatcaacaatcatgtcggacgaagagcaccattacgagtccaaggccgacgccggagcctccagaacctaccctcagcaagccggtaccatccgcaagatcggctacatcgtcatcagaggccg

SEQ ID NO: 189996 - DNA, 269 bp, Glycine max
agaagcggctcgccgcgagcatgctcaagtgtggcagaggaaaggttttgattgaccccaatgaagtcaacgaaatctccatggccaattctcttttcataggatctgaacctcttcggtgtttttgagcgtctgcgagaatatatggaaatgcaaacgcgagctattgccaaaacataaggaagctggttaaggatgggtttatcatcaggaagcccaccaagattcactctcgctcacgtgctcgtcgaatgaaggaagccaagagg

SEQ ID NO: 189997 - DNA, 254 bp, Glycine max
actcgagccgaatcggctcgagataattttattttatttgaaataacgtccgggatcatccacaagattgaggagaccctccatgtgggagggcacaagaaagaggagcacaaaggagaacaccatggtgagcacaaaggtgaacacaaaggagaacaccatggtgagcacaaaggtgaacacaaaggagaacaacaccatggggagcacaaggagggacttgtggataagatcagggacaagatcatggtgat

SEQ ID NO: 189998 - DNA, 219 bp, Glycine max
ataatgtccgggatcatccacaagattgaggagaccctccatgtgggagggcacaagaaagaggagcacaaaggagaacaccatggtgagcacaaaggtgaacacaaaggagaacaccatggtgagcacaaaggtgaacacaaacgagaacaacaccatggggagcacaaggagggacttgtggataagatccaggacaagatccatggtgatggccat

SEQ ID NO: 189999 - DNA, 176 bp, Glycine max
ggcgatggcaaacttggctcgacggaagggttacgccgtcgttttgtcgtcgaggtcgtcgctttgtctgacaaggtggagggggttcgcgtccggatctgacgaaaacgacgtcgtggtcatctgcggcggtcccggcggctacgtggcggccattaaagcggcgcactggggtc

SEQ ID NO: 190000 - DNA, 150 bp, Glycine max
ctgcaatctagtggaagccacagtgttgatgggaactggagggctctggggaagcttcttatattctgttcaggttgcaggcaaggcagtttgttcagtaacgttcaggttcctggccattttgttaacaagactcgattttctagaaca

SEQ ID NO: 190001 - DNA, 225 bp, Glycine max
ctcgatccgcggatcttcaatctcatctccgatctcaaaatgcccgctgtttatggatctcgcttgaccaccttcgaagactccgagaaggagagtgaatacggttacgttcgcaaggtttaaggacccgtcgtcgttgcggatggcatggctggtgctgctatgtatgaactcgtgagtgttggacatgatactctcattggtgaaattattcgtctcaaaggg

SEQ ID NO: 190002 - DNA, 273 bp, Glycine max
gatgggaattgcgcttcaaggcgtctcgtagggctaatccgcctcacgagggtcaccaacggcacgtgcctttggagggccgaggccccctactgctggtcggcaaacggacggcgggcgcacgcgtcgcttctagcccggattctgacttagaggcgttcagtcataatccaacgcacggtagcactcgcgccactggcttttcaaccaagcgcgatgaccaattgtgcgaatcaacggttcctctcgtactaggttgaattactattgcga

SEQ ID NO: 190003 - DNA, 263 bp, Glycine max
gccccactcaaccaccacacctctcctcgttcacgctacccctttctgctcttcttctacctttcaagttttaaaagtataaagatggcagagacattcctatttacctcagagtcggtgaacgagggacaccctgacaagctctgcgaccaaatctccgatgctgtcctcgacgcttgcctcgagcaggacccagacagcaaagttgcctgcgaaacatgcaccaaaaccaacttggtcatggtcatcggagaaatcacgac

SEQ ID NO: 190004 - DNA, 267 bp, Glycine max
gttgtttggagcgatccgagaaaaactctgtaaacatgttggtttaccaggacctccttacaggtgatgagcttctctctgactccttccgttacaaggaaattgagaatggaatgctgtgggaagttgaggggaagtgggttgttaaaggagcagttgatgtagacattggtgcaaacccttctgctgagggtggaggagaagatgagggagttgatgatgcagctgttaaggttgttgacattgttgacacattcagacttcagg

SEQ ID NO: 190005 - DNA, 195 bp, Glycine max
cgcttctcttctctgcagcaactatgcctaaccctaaggtcttcttcgacatgaccatcggcgctcaatctgctggccgcatcgtgatggagctctacgccgacgtcactccccgcaccgccgagaacttccgcgcgctttgcaccggcgagaagggcgtagggcggacggcaagcccctccactacaagggctc

SEQ ID NO: 190006 - DNA, 263 bp, Glycine max
ataatgtccgggatcatccacaagattgaggagaccctccaagtgggagggcacaagaaagaggagcacaaaggagaacaccatggtgagcacaaaggtgaacacaaaggagaacaccatggtgagcacaaaggtgaacacttaggagaacaacaccatggggagcacaaggagggacttgtggattaggttcaggacaagatccaaggtggatggcaatgaaaaggttgagaaaaagaggaagaaggccatgatgaagaagg

SEQ ID NO: 190007 - DNA, 261 bp, Glycine max
gaggataagaatgttccctatgtattcgttccatcaaaacaagcacttgggcgagcatgtggagtcacacggccagtgattgcatgttctgtaacaactaatgaaggaagtcaactcaaatcccaaattcagcaactaaaggatgctattgagaagctgttaatttgaaaatttgatattcggtatgacgggcttcttgagaggctttgactggaccagatgttgtattcaacagacaaaggtgttttatgtgtaaaccta

SEQ ID NO: 190008 - DNA, 262 bp, Glycine max
tctcgagccgctcggcaacaagagtgccatgctcctacagtataaccctgtccacaagaagctaccggctctcgtgcatgacggtaagcccctggcagaatcactagtgattcttgagtatattgatgagacctggaagcaagatccctcccttcttccacatgatccctatgataaggccaatgcgattctggtccgaattcgttgatgaaaaggtagtaaaaaattagaacacagcatgttattaagtgctttattgaac

SEQ ID NO: 190009 - DNA, 259 bp, Glycine max
  unsure (1)..(259): unsure at all n locations
actcgaacacgctcgagcggctcgacggctcgaggctgaagcatattataagcctccacatctctgaaacagttttaacatacaatcttacaagtacacctccccagcttccatttaagacagaaggtgttcctgtgggaatcacttttgttgaaaatgcagtggcaaaaggggctgtttgtttggatgggagtactccagcttaccacttccacaagggatctggcagcanggattaacaactggatagttcactttg

SEQ ID NO: 190010 - DNA, 258 bp, Glycine max
cgaaattctaatttcgttaggggaaagagattgtttgtgtgtgagtgagtatggctggaaaaggcgagggtcctgctatcggaatcgatttgggaacgacgtacttttgcgtcggcgtgtggcaacacgatcgtgttgaaatcatagccaacgatcagggtaacagaactaccccatcctacgtggctttcaccgacacagaacggttgatcggcgatgcggcgaagaaccaggtcgctatgaacccaaccaacaccg

SEQ ID NO: 190011 - DNA, 256 bp, Glycine max
gtttatcgtgaggagaatatgaagttgtttgttttctttgttgctgcagtagttttggtagcatggccatgccatggcgcaggctaccaaaggttccctctccgaatgaaaactggctatggtgagcgttcttcggaggtaaaatgcgcaagttttaggcttgctgtggaagcacacaacatccgagcctttaaaaccattcctgaagagtgcgttgaaccaacaaaggactacattaatggcgaacaatttagat

SEQ ID NO: 190012 - DNA, 257 bp, Glycine max
gctctcactagtcactactactactggagatggcttcaactgcctcttgcacttctatttccccttctagtgatggttgcctttgctggtgacttaaacaaagactttgacatcacttggggagatggccgcgccaagatactaaacaatggagagttactcactctttcattggacaaagcatctggttcaggttttcaatcaaagaatgagtatctctttgggaagattgacatgcagctcaagctcgtccctgg

SEQ ID NO: 190013 - DNA, 263 bp, Glycine max
cttaagaattcaattattgaaattgaataagtaaacaatttaattggattggtcgaatggtatcaaaaaaatggagtactaactcccatttcatatttattattgaattaaccgatcaacttgctttgttatcgaacatttctttttgatttcaaaaattttccggaaaaaatttgaatctatttttatatgcgaatcaatcctactacttctggtcctgaggtttctgcgcttgaaaaaaaaaatctgggacgtatcgccca

SEQ ID NO: 190014 - DNA, 260 bp, Glycine max
gatgccaccaaagggtacttgaagcttttgtttctcactgtggcatcaggagatagaattaatggtgaagcaattcaaagcaatcgagatctttccatgatccttgatgctcttctgaaaacaaaatctagagcagtgctgaatgatataattaacaaaaatggtttgcagatgttacataacattatgaagcagtacaggcatgacttcaaaaaaattccaatactacgaaagcttcttaaggtcttggagttcctaga

SEQ ID NO: 190015 - DNA, 258 bp, Glycine max
gccaaaccaccatgttgctgccattgtggctgctgcattttatgcaatttggaatctcttctcaggatttatcgtcgtaagacctaaaatgcccgtgtggtggagatggtactattgggcatgtcctgtggcttggaccttgtatggattgattgcatctcagtttggagatataactgaaagaatgccgggtgaagataacaagatggtgaaagaattcatagaagactattttggtttcaaacatgacttcgttgg

SEQ ID NO: 190016 - DNA, 254 bp, Glycine max
  unsure (1)..(254): unsure at all n locations
gtcaaaccccaaganaccatttgctgctattgtcggtggatcgaaggtgtcttccaagattggagttattgaatccttgttggagaaagttaatgttctcttgcttggtggaggaatgatctttaccttttacaaggctcagggttattcagttgggtcatctcttgtggaggaagacaagcttagccttgcaactacacttcttgaaaaggccaaggctaaaggggtttctttgttgctccaactgatgttgt

SEQ ID NO: 190017 - DNA, 252 bp, Glycine max
gttctccattagggtggacattcttcctcaagaatatgttgatcagttttccgaacttcaggatcaagttcctccatttccctcagagacctctgtagctattgttgaagaagagcttggagctcctttaggtgatatctttgatcagtttgactatgaaccaatagctgctgcaagtcttggtcaggttcatcgtgcgagattaaatggacaggaggttgttattaaagtacaaaggcctggtctcaagga

SEQ ID NO: 190018 - DNA, 260 bp, Glycine max
agcagcctcaggaggagaaggatgtctcacaggaagttcgagcacccaaggcacggttcactgggatttcttcccaggaagcgtgctgctcgtcacaggggaaaagtgaaggcattccccaaggatgacccatccaaggcacccaagctcactgcattcttgggttacaaggccggtatgactcacattgttagagaggtcgagaagccaggatcaaagcttcacaagaaggaaacttgtgagcctgttacaattattga

SEQ ID NO: 190019 - DNA, 254 bp, Glycine max
gtcgaagcgtggtcgtggtggttcggcggggaacaagttccgcatgtcgctgggtcttccagtggcggcgacggtgaactgcgccgacaacacgggggcgaagaacctctacatcatttcggtgtaagggatcaaaggccgtttgaaccgtcttccctcggcctgcgttggcgacatggtgatggccaccgtgaagaagggaaaacccgatctgaggaagaaggtcttgccagctgtcatcgttcgccagcgca

SEQ ID NO: 190020 - DNA, 259 bp, Glycine max
gcgagttttcctctctcgaatctgcgacaccgacgaatctcactaagcggaacttcgcattcagaaaatggctttaggtggaacagctcccccgagaggaagtgcagcggctactgccagcatgaggagaaggagaacaaccggtggtgcggcctctggaggagcagctggaactatgctccaattttacactgatgatgcccctggactcaagatctccccaaatgtggttcttgtaatgagcattggctttatagca

SEQ ID NO: 190021 - DNA, 256 bp, Glycine max
ggtagatagagctgaaatcaacagtatagctttgtctccaaatgtccagtggttggcagcatccagtgacagaggcactgttcatgtattcagcttgagagtgagagtgtctggggaggatagtttgactcagccaaatgcttttcaagggcctgcactgtttcatcagaattcttcatcttctttagatcccttgatttctccaaatactggtgctaaccccaattcatcattatctttcatgagaggagtttta

SEQ ID NO: 190022 - DNA, 252 bp, Glycine max
cggctcgaggtttggagaagaggggaacaaatacttccgacatgcaactgggcagatatatgcaatctcaaaggatctggccacttacatttccatcaaccagccgattttgcataaatatgctaatgaagatgtctcacttggtgcatggttcattggtcttgaagttgagcatattgatgaccgcaatatgtgttgtggaactcctccagactgtgagtggaaggcgcaggccggtaacatatgtgttgc

SEQ ID NO: 190023 - DNA, 256 bp, Glycine max
tgttaccccagcaccacaaaatgtcgaagcgaggacgtggtggttctgctggtaacaagttcaggatgtcactgggtttgccagtggcagctgtggtgaactgtgcgacaacactggggccaagaatctttacatcatatcggtgaaaggaatcaagggtcgcctcaacagattgccatatgcttgtgttggtgacttggtcatggctactgtgaaaaaggggaagcccaatcttaggaagaaggtattgccagca

SEQ ID NO: 190024 - DNA, 259 bp, Glycine max
gtccaatttgagatcaaaacacatgggtctaagatggattctggtcctattagtttggtagtaaatgcttgcgcgacagggatcttcgagataatgttgtcggggtttgttttgtggcccatgatataactgctcagaagaatgtcatggacaaattcatccgtattgaaggtgattacaaggcaattgtacagaaccgcaatccattaatccctcctatatttggcacagatgaatttggctggtgttgtgagtggaa

SEQ ID NO: 190025 - DNA, 257 bp, Glycine max
ctagctgtgacttgttttgagttcaatcaaatcgcattggtatctgaaatcaggaaagatggttagcgactgagatcaggcaggcacaaagggcagaaggcccagcaaccatccttgccattggaactgcaaacccaccaaaccgtgttgatcagagcacctatcctgattactacttcagaatcaccaacagtgaccacatgaccgagctcaaagagaaatttcagcgcatgtgtgacaagtctatgatcaagacg

SEQ ID NO: 190026 - DNA, 256 bp, Glycine max
gcccaaccctggctgtaattcccttggagtgtcctgacatcgaggtggtcgtggtggacattgctgcaccgcgaatcaacgcgtggaacagcgaccacctcccgatatatgagcctggccttgatgatgtggtgaagcagtgcagggggaagagtctcttcttcagcactgatgtacagaagcacgtttccgaggctgccattgtctttgtctcggtgaacaccccaacgaagactcagggtcctggagccggcaa

SEQ ID NO: 190027 - DNA, 256 bp, Glycine max
gcaagggtcaatttgtacctccagactttgttgctgttgttctctaggagaaaggtgccagatagagcctttaacataatggggatccttgtgttttgggtttggttccctctgttgatctcttcactaccaaattggggagaaagggtcatgtttgtgttggccagttttgctgtttgttcaatccagcaccttcaattttgtttgaaccatttctcagcagatgtgtatgagggcccaccaaatggcaatgact

SEQ ID NO: 190028 - DNA, 256 bp, Glycine max
ggcgaatccttaccattgctcgagatgggtgaagaagtcaaggccgtggttccagagtctgttttgaagaagcagaagagagaggaggaatgggcgttggccaagaagcaagacctcgaggctgcgaagaagaagagagccgagagccgcaaactcatctacaacagagctaagcagtacgctaaggagtacgatcaccaggagaaggaattgattcggttgaaacgcgaggccaagctgaaaggtggattctatg

SEQ ID NO: 190029 - DNA, 253 bp, Glycine max
ggaaaacgttgttgagttcacagacttacccgtcaagaggccaagagaagaagaagaaggaaccaatggcgtctccaacgacgccgtttcagcgctccccattgaccctcaataccctggtatctctgcggttattcccggttggttctccgaaatcagcccaatgtggcccggggaggcacattccttgaagatggaaaagattttgtttcaagggaagtctgactatcagaatgtcatggtcttccagtca

SEQ ID NO: 190030 - DNA, 258 bp, Glycine max
gcagtattgtgtttcctgtgctatccactctcatgttgtgagcgttcgatcccgcactgataggagaaagcgtgagcctccacagcgatttatcagacgcagggatgatgcaccaaggcctggtcagcctggtcaagccccacgtcctgctggagtaggagctcctgcccgaacttaaaaaacaaattccaaagttttttggggcttgttggttcagttttatgttacaaacttatactccatttgctgtttattttt

SEQ ID NO: 190031 - DNA, 253 bp, Glycine max
gcaatgaaagcaataagtccctccttcctctgccttataattcttgtgaccctttttgctggtagcattgaaagtgcaccagcaaacgtgaagccaagccattatgctgcacccttcaataggagtgtttttccttctggttttctatttggaataggctctgcagcttaccagatagaaggagcagcagctatagatggcagaggaccaagtatatgggacactatactaaacagcaccagggaagatttgg

SEQ ID NO: 190032 - DNA, 256 bp, Glycine max
atttgggagttaggttctgcacgctctgcttccagcgagtgttctttcttcgtttcaacaccttaatttgcatacgctgcttcttctgcttgagaaatggcacaagaaacctttctattcacatctgaatctgtaaacgagggtcaccccgacaagctgtgcgaccagatctctgatgcagtgctcgatgcgtgccttgaacaggaccctgacagcaaggttgcctgtgagacatgcaccaagaccaacatggtca

SEQ ID NO: 190033 - DNA, 252 bp, Glycine max
acctaggcacccagagacgaggaagggcgtagtaagcgacgaaatgcttcggggagttgaaaataagcgtagatccggggattcccgatataggtcaaccttacgaactgctgctgaatccacgggcaggcaagagacaacctggtgaactgaaacatcttagtagccagaggaaaagaaagcaaaagcgattcccgtagtagcggcgagcgaaatgggagcagcctaaaccgtgaaaacgggttgtgggag

SEQ ID NO: 190034 - DNA, 254 bp, Glycine max
aaacaaacagtgagccatggccgtcggaaagaacaagcgcatctccaaagggaaaaagggtggcaagaagaaggcagctgatccctttgccaagaaggattggtatgacattaaggccccttctctttttcaagtgaaaaatgttggcaaaaccctcgtctctcgtacgcagggtaccaagattgcttctgaaggacttaaacatagagtgtttgaggtctccttggctgatcttcaaggggatgaggatcatg

SEQ ID NO: 190035 - DNA, 252 bp, Glycine max
attccttgtttctcttaatgtcttcttgcatgtgaccttcttcccagggtgatgaaaaaggctagaattcttggttatggtgtttatgagggggtgaacgacttgttttgatttcagaggatgagcatgatgttgtctggttttggctggagaaagacaagccccacgaatgtccagtgtgcgcacagtattttgttgtaagttcataatgacttttagaatagcttctactgttacagtgtttttgtgggg

SEQ ID NO: 190036 - DNA, 255 bp, Glycine max
gttcgcttgcagtcacacaagaggccaatcctattcatagctcgagatgggtgaagaagtgaaggtagttgttccagaatcagtgttgaagaagcgcaagagggaggaggaatgggcgttggccaagaagcaagaactcgatgctgccaagaagaagagagccgagagccgcaaactcatctacaacagagctaagcagtacgctaaggagtacgatcaccaggagaaggaattgattcggttgaaacgcgaggc

SEQ ID NO: 190037 - DNA, 255 bp, Glycine max
cggctcgagcggctcgagaagcaggacctaggcttcttctttgcactgcaaatcacttttctactttgagacttcttgatccttctttttctccttgaactcaaacatggcagatgaggtggttctgctagatttctggccaagtccatttgggatgagggtcaggattgcacttgctgaaaagggtatcaaatatgagtacaaagaagaggacttgaggaacaagagtcctcttctcctccaaatgaacccggt

SEQ ID NO: 190038 - DNA, 255 bp, Glycine max
ctcccaagggtttaacctttctggctgtgttaatatgcgtttcagcactgtcactgagtccttctgttgcgggggaagggcaaaataatggccttgttatgaacttctacaaggaatcatgccctcaggctgaagacatcatcacagaacaagtcaagcttctctacaagcgccacaagaacactgctttctcctggctcaggaacatcttccatgactgtgctgttcagagttgtgatgcttcactgttgctgg

SEQ ID NO: 190039 - DNA, 254 bp, Glycine max
gtcttcataaacgcctttcttctccgtttccgtttcctcgttcgaattcgctttttgatctgcgaaaatgagagagtgcatctcgatccacattggtcaggctgttatccaggtcggaaatgcttgctgggagctctactgcctcgagcacggcatcgggcccgatgggcaaatgccaagtgacaagacagttggcggtggtgatgatgctttcaatactttgatcagcgagactggtgctggaaagcacgtgc

SEQ ID NO: 190040 - DNA, 253 bp, Glycine max
gctagatctagagggaaattatgagcattacgttcatgcattacttccataccaatgttagctcggttaataatatcagcccaggtattaattacacgaccttgactatcaactacggattggttgaaattgaaaccatttaagttgaaagccatagtgctgatacctaaagcggtaaaccaaatacctactacaggccaagcagctaagaagaaatgtaaagaacgagaattgttgaaacttgcatattgga

SEQ ID NO: 190041 - DNA, 253 bp, Glycine max
cgcatctccaaagggaaaaagggtggcaagaagaaggcagctgatccctttgccaagaaggattggtatgacattaaggccccttctctttttcaagtgaaaaatgttggcaaaaccctcgtctctcgtacgcagggtaccaagattgcttctgaaggacttaaacatagagtgtttgaggtctccttggctgatcttcaaggggatgaggatcatgcattcaagaagattaggttgagagctgaagatgtgc

SEQ ID NO: 190042 - DNA, 252 bp, Glycine max
gtggttttcatcgtcttccttctcttatatttctttttttttttgtcttcgccgcacgccgaaacaatggccggaaaaggagagggtcctgctatcggaatcgatctcggaaccacctactcttgtgtcggtgtgtggcaacatgaccgagttgaaatcatcgccaacgaccaagggaacagaacgacgccgtcttacgtcggcttcactgataccgagcgtctcatcggtgatgcggctaagaaccaagtc

SEQ ID NO: 190043 - DNA, 254 bp, Glycine max
ctcgagccggttgaaattggcataaaactaataaaacgttcacactaaggatgtcctatggcatcaccctaaaggagatcgaccaacagtcaaaaagcgtacatcttgaattgtaccaacttccaagaactaaagccaaatagaagttcataaaacactaaaattaagcagcaccctttcccttcttcctctggagtttcttcatgtaaaactccagctccttaccttccagaatgtacccatcagccctgcca

SEQ ID NO: 190044 - DNA, 251 bp, Glycine max
gcttaaatcaccttggtcacaaaggaaaagaaaacatgccctttcacctcagcaatggaatagcatgtttgcataaggcggtagattctgtgatggtggaaataagttcctgaaaagagtgcgcagtggaggtgttgatcctagtattagggctgaagtttggccgttcctgcttggagtgtatgacttagacagcaccaaagatgacagagatgttaaaagaactcgttgtagaaagcaatatgagaaac

SEQ ID NO: 190045 - DNA, 252 bp, Glycine max
aaaatcccctcatattatctctctctctcttaaaccatcatgtcctccaccgcgcctcacgtcctccccatctccaactcccaaaccaccgcgggaaccaccggtgcaggcggcggcgccctcgaggctccggccaacaacccggccttccgcgctttcatcaacaacctctccaactccctccggcacggcctcgaccagcgccgcccctggtcggagctcgcggaccgctcagcgttctcgaaacccgac

SEQ ID NO: 190046 - DNA, 249 bp, Glycine max
caaaggatacctttttgaaatttgcagctggtaggaactgatcattgtgcctttaattccacccaaaaagctcgtggaatcgatgacttccggaaaatgcctaatggtgtcaatggtattgaagaaagaatgcatttggtatgggatatcatggtggaatctggccaaatatctgtcactgactatgtcaggataacaagcactgaatgtgctaaaatcttcaatatatatccaaggaaaggagctgtt

SEQ ID NO: 190047 - DNA, 252 bp, Glycine max
ctcgagccggtaccattcctatgtacagtgatcgcagtggcatgaacttctcatctcatggagttgaaaagatcaaaaactcagcaggccaaatcatgaaacaagagaaacttgaaagggacaagtctcagcttgaaaaactacaagttcctggaaatcatgattcaccactgtgctcaatagatttaaatgatgtagtcaactatgaggagtttatgagaaacttgacaaatgaagagcagcagcaattac

SEQ ID NO: 190048 - DNA, 250 bp, Glycine max
ggacatatcactgaaatagtatataagggccaacatagccacccaaaaccgcagtctactagaagaacaaactctcaatcaattcatcaaccttcttcgtcttgcacaaactcagggataactgatcattcagtggtgactctaggaaatccacaaatggatcatttctccatacaagaagattcttcagcttctgttggagaggaagagtttgagcaaacaccgcaaaccagttattccggaggagacg

SEQ ID NO: 190049 - DNA, 250 bp, Glycine max
aaaattgtatggataggaagcactatgttctggtgcatggggcatgccatggagcttggtgttggtataagctcaagccacgcttggaatctgcaggccataaggtcacagtacttgaccttgcagcttctggaaccaacatgaagaaaattgaagatgttgatactttctcagagtattctgcgcctttgttgcagctaatggccacaattccctcaaatgagaagttagttctagttggtcacagcct

SEQ ID NO: 190050 - DNA, 248 bp, Glycine max
gaaagagtaacgtatctattgtgttggtggtggtgttttttcaagggtaagcagatccaagacagagagaaaggttcctttcttagaaaaccggggtgcttaatttatgtttgagggtttgtgcttgaaaatggagaaaagagggaatgtgttgatggagaagtatgagtttgggaagctattaggtcaaggaaactttgcgaaggtttaccatgcaagggacgtcagaactggtgagagtgttgccg

SEQ ID NO: 190051 - DNA, 248 bp, Glycine max
aggacatgaagtggttggtgaggtactggaggtgggatcaaacgttagcaggttcagagtgggagagttggtgggagttggactcctcgtaggttgctgcaaaaactgccagccatgccaacaagacattgagaattactgcagcaagaagatctggtcttacaatgatgtttatgtcgatggaaaacccacacagggtggctttgctgaaaccatgatcgttgagcaaaagtttgtggtgaagattc

SEQ ID NO: 190052 - DNA, 246 bp, Glycine max
tctcgagcgaatcggctcagagaaatttggtcaagttaattggtatatgtattgaaaacagcttccgcagccttgtacatgaacttgttccaaatggaagcgtggaatcctatttacatggggttgacaggggaaacagcccacttgattggggtgcccggatgaagatagcacttggtgcagctcgtggcctagcttacctgcatgaagattcaagtccccgtgttatacatagggacttcaagt

SEQ ID NO: 190053 - DNA, 247 bp, Glycine max
tgcagaacccagatctgtagacaatatgggaagcactggtttgctacattctatatgccttgtcattgctttagtaagtgtgtcgcttgtgcaagcagaagatgcgtataagtatttcacatggacggtgacttatgggactctttatcccttggctagtccccagcaggttattcttatcaatggtcagtttcctgggcctagacttgacttggtaactaatgaaaatgtaattctcaaccttatc

SEQ ID NO: 190054 - DNA, 247 bp, Glycine max
ttcagttttttgtcatcactctcagctggtcggagcttatagatccagcgccagcagattcaatttgacactggaagcaacttttcatttcaaagattaagtgataacatggttgtccttgctgcttccattgtgagcaaatctggcaaagttctagtttctagacagtttgtggacatgtctcgtatcagaattgagggacttctagcagcatttcccaagttactaggcactggaaagcaacaca

SEQ ID NO: 190055 - DNA, 248 bp, Glycine max
tgagaaatggcggattcttctcgggaggagaacgtttacatggcgaaattggcggagaggccgagcgttacgaggagatggttgagttcatggagaaggttgcaaagactgtggaggttgaggagttgacggtggaggagaggaatctcctctctgtggcttacaagaacgtgattggtgcgaggagggcttcgtggaggatcatatcctccattgagcagaaggaggagagcaggggcaatgaggac

SEQ ID NO: 190056 - DNA, 252 bp, Glycine max
tagtttacaaaattcagtctcagtggacatgaaggaccagaaaatgactataattggggatgttgatcctgtaacagtagttggaaagtttacaaaattcagtcttggcaagcttagaaaattctgtcatgttgagatactttcagttggaccagccaaagaggaaccaaagaaagaggagaagaagccagaagccaagaaagatccaaaggaggaatatgctgaacttctgaaggtagttgaagccaatta

SEQ ID NO: 190057 - DNA, 253 bp, Glycine max
ctcaaatggagaacgatgatttcagtgattcacagttaattcgtcacttcagatgcgtgcttgttgcagtaacaactggtgatcgagagaattacgacgagctcgtcggttatttgcacccgaagaagaatcttaatcctgatgaggttgctatacttgtgacgactttgaaggcgctttctggagcagtgtcctatatagattctgttcatcatgaatccctgctctttgcctgttcgagaatgagactctg

SEQ ID NO: 190058 - DNA, 249 bp, Glycine max
ggttgattaatcaggacaagaacaaatataacactccgaaataccgatttgtggttcgctttagcaacaaggacattgttgcacaaataatatctgctagcattgccggcgatttagttcttgctacagcatattcacatgagctgccacgatatggtcttgaagtaggacttacaaattatgcagcagcttattgcactggtctcctgttggcccgaagagtcctcaaaacacttgaaatggatgagg

SEQ ID NO: 190059 - DNA, 248 bp, Glycine max
atgtggtactgccctagatgcaaggaacacagacaagctacaaagaagcttgacttgtggaaattgccggagattcttgtttttcacttgaaacggttctcatacagtagatacctgaacaacaaacttgacacttttgtgaattttcccattcacaatctggatttaactaaatatgtgaaaagcaaggatggaccgtcttatgtgtatgacctttatgcaatcagcaaccattatggtggtctaag

SEQ ID NO: 190060 - DNA, 249 bp, Glycine max
gtgaccctcctcacgccaacgccatagttgttcccttttctctctcgttttttctcaaaaagttgcaagagttaaagcaaaaaccagagtgttagagaaaatgatgaagccatcgatgctcagatctcttcactctgccgccacccgcggcgcctcccacctctcccgccgtggctacgcctccgagccggtgccggagcggcaggtggccgttctaggtgccgccggcgggatcgggcaacccctctc

SEQ ID NO: 190061 - DNA, 246 bp, Glycine max
gacgaagagcatcacttcgattctcaggcggatgcaggagcgtccaagacgtatcctcagcaggctggtaccattcgcacgaatggctacatcgtcatcaaatccaggccttgcaaggttgtagaggtctctacgtcaaagacaggcaagcatggacatgcaaagtgtcactttgttgcaattgatatttttactgggaaaaagcttgaagatattgttccatcatcccacaactgtgatgttcca

SEQ ID NO: 190062 - DNA, 250 bp, Glycine max
aaaaaacagaacaacaatggcgacacttaaggttcctcagcctcttccccccgttgcagatgattgtgagcagctccgaaaagccttctcaggttggggaactatcgaggagctgattgtatcgatcttggctcataggaatgctgctcagaggaagcttatcagagaaacttatgcccagacctatggagaagatctcctcaaggccttggacaaagaactcacgagtgattttgagaggctggttcat

SEQ ID NO: 190063 - DNA, 250 bp, Glycine max
gggagacgtaaacagtgctcaaatgaatcatgcaaacagaggatatatccacgacttgacccggtggtcattatgctagtaattgatcgggagaatgaccgtgcccttttgagcaaacaatcgagatttgtacctagaatgtggagctgcttagcaggttttatagagccaggagaaagcttggaggaggctgtaagaagagaaacgtgggaggagactggtattgaagtgggagaagttgtatatcata

SEQ ID NO: 190064 - DNA, 252 bp, Glycine max
ctataagctagtttatcgtgaggagaatatgaagttgtttgtactctttgttgctgcagtagttttggtagcatggccatgccatggcgcaggctaccaaaggttccctctccgaatgaaaactggctatggtgagcgttcttcggaggtaaaatgcgcaagttttaggcttgctgtggaagcacacaacatccgagctcttaaaaccattcccgaagagtgcgttgaaccaacaaaggactacattaatgg

SEQ ID NO: 190065 - DNA, 238 bp, Glycine max
agttggggtgctggaaccgagggacagttaggaacaaagattcttcaggatgagcacttccctcaactccttcaccaattctctctctcctccatctcttcccttgcctgtggcggtgctcatgtcatagccttaacctctgctggaaaggcactatcatggggtaggggcaattctggacaactgggccatggggaggttgtgagtaacctttgtatccaaaggctgtaacatcatt

SEQ ID NO: 190066 - DNA, 251 bp, Glycine max
agcactcatcttggggtgggtttactacttagatgctttcagcagttatccgctccgaacttggctaaccattaggaccccgtgggcacgataactggcacaccagaggtgcgtccttcccggtcctctcgtactagggaaaggtcctctcaatgctctaacgcccacaccggatatggaccgaactgtctcacgacgttctgaacccagctcacgtagcgctttaatgggcgaatagccaacccttggaa

SEQ ID NO: 190067 - DNA, 245 bp, Glycine max
ctcgagcgcaaaattgttgggttcgcaaaggtggtgcttatactggagaggttagtgctgaaatgcttgttaatttgggaattccttgggttattattggtcactctgaacggaggcagcttttgaatgaatcaaatgagtttgtgggagataaagttgcctatgcacttcaacaaggtctgaaagttatagcatgcattggggaaactcttgaacagcgtgaagctggtacaacaacggctgtt

SEQ ID NO: 190068 - DNA, 249 bp, Glycine max
gccgatttgaaaagatgagtaagcttcagagtgatgctttgcgtgaagccatctcaggaatcatggccgattccaaggagaagaatcgcaaatttgtggagaccatcgaactccaaatcggtttgaagaactacgatccacagaaggacaagcgtttcagtggctccgtcaagttgccccacatccctcgccccaagatgaaaatttgcatgcttggtgatgctcagcatgttgaagaggcagagaaga

SEQ ID NO: 190069 - DNA, 248 bp, Glycine max
ggcggcaagcaactccatccgcaatggtatgtttcgcttcaacggcgtcaccatccctcatccttggagagttgatctgactgagttcttgaacttgattgcagggaatcgatttgaaggcaggaggtaagtccaagaagaccaagcgaaccgcccccaaatccgatgatatctacctcaagcttctcgtcaagctgtaccgttttcttgttcggaggactgggagtaacttcaatgctgttgtcctc

SEQ ID NO: 190070 - DNA, 248 bp, Glycine max
gttttgttgtccgtgttatttctccttctccaacgtcccttctcatccttctcagccaactccgaaggagacgctcttcatgatttgagaagcaggctttctgaccccagcaacgtgcttcagagctgggacccaaatctcgttaatgcttgtacttggtttcatgttacctgcgactccaacaatcacgtcattcgcttagacttgggcacttctaagatctccggaactttgggaccaaaacttgc

SEQ ID NO: 190071 - DNA, 252 bp, Glycine max
cttgatcattcgatttttctcctcaagatgcagatattcgtaaaaactttgaccggcaagaccatcacccttgaggtggaatcctccgacaccattgacaacgtaaaagctaagattcaagacaaggaagggatcccacctgaccagcagagacttatctttgcgggtaaacaacttgaggatggtcgcacccttgccgattacaacatccaaaaggaatcaaccctccatctcgtgcttcgcctcaggggt

SEQ ID NO: 190072 - DNA, 248 bp, Glycine max
gggttgtggtagtttggcagcgacacgtatcttcatcaataatcgcagaagcagtttccggtgcatctcatcgtcttccaaaatgaacgacgcagatgtctcgaagcaaatccagcagatggtgcgtttcatccgccaggaagctgaggagaaagccaacgagatctctgtatctgccgaagaggaattcaatatcgagaagctgcagttggttgaagccgaaaagaagaagatcaggcaagaatacg

SEQ ID NO: 190073 - DNA, 244 bp, Glycine max
gggcgtcattcctattcagactttatataccagcagtggttcggccccgattgaattcgggttcaaggcggagaataggccagtcgcgatgttgattcataaccctggcaaagacgaggatcacgcgtgtggcccgcttgttgactcggttgctctcaggactctctaccctcctagagctactaaccagaacatactaaagaatggtggatttgacgaaggaccctatgtgttccccaactca

SEQ ID NO: 190074 - DNA, 247 bp, Glycine max
cctcgagccgaatcggctcgagaatgcaactccatccgcaatggacatcgatttgaaggcaggaggtaagtccaagaagaccaagcgaaccgcccccaaatccgatgatatctacctcaagcttctcgtcaagctgtaccgttttcttgttcggaggactgggagtaacttcaatgctgttgtcctcaagcgccttttcatgagcaaggtcaacaagcccccgctatccctctctagattgatccgt

SEQ ID NO: 190075 - DNA, 248 bp, Glycine max
gccgtacctaatcggagagctcccgctgactgcgatcggatttcatggctcctaagaaagacaaggctcccccaccttcatccaagcccgccaagtctggtggtgggaagcagaagaagaagaagtggagcaagggaaagcaaaaggagaaggtgaataaccaggtgctgttcgatcaggctacctatgacaagctcctctccgaggcacccaaatacaaactcattactccttccattctctctgac

SEQ ID NO: 190076 - DNA, 246 bp, Glycine max
gtgagccatggacgtcggaaagaacaagcgcatctccaaagggaacaagggttcgcaacaagaaggcagctggtccctttgccaagaaggattggtatgacattaaggccccttctctttttcaagtgaaaaatgttggcaagaccctcgtctgtagtacgcagggtaccaagattgcttctgaaggacttaaacatagagtgtctgacgtctccttggctgatcttcaaagggatgaggatcatg

SEQ ID NO: 190077 - DNA, 248 bp, Glycine max
gagcaacctgctgctaaactcaaattgtgacttgaagattgttgattttggtcttgcgagaccaactttggaaagtgacttcatgacagaatatgtagtcacaagatggtacagagctcccgaattgttgttgaattcctctgattacacctctgctatagatgtgtggtctgttggttgcatctttatggagcttatgaataaaaagcctctgtttccgggcaaagaccatgtgcatcagatgcgct

SEQ ID NO: 190078 - DNA, 246 bp, Glycine max
ataagccactagtacctcacaatgcccattgtagcaacctctcttctcttctttcttcttaatttatgcctcagaggtcattatgctgactatggaggtggttggcaaggtggtcatgccacattttatggtggaggtgatgcatctggcacaatgggaggggcttgtggatatggaaatttgtacagccaagggtatggcactaacactgcagcactcagcactgctctattcaacaatggcatg

SEQ ID NO: 190079 - DNA, 246 bp, Glycine max
ctcgagccgtgctaacctttgccgtcaccattttggctcttatgtgcgccatggcctcagtatccgacaacttcaacacccccactcctactgcacaagtccaggtgttgaacatcaactggtttcagaaacagcccaatggcaatgacgaggtcagcatgacactgaatatatctgcagatttgcagtcccttttcacatggaacacaaaacaggtttttgtttttctagctgctgagtatgaaa

SEQ ID NO: 190080 - DNA, 247 bp, Glycine max
gaacttagctacaagctaaggaaggatcaaagagaatggctcaagcaatggcatcaatgactagcttacgtggttcctctcaggctgtgttggaaggtagccttggctccacacgcttgaatgtggggagtggaagcagggtggcctcagtcacacgtgcagggttcacagttagagcacagcaacaacaagtgaatggtggtgaggtacaaagtagccgtagggcagtgctttcacttgttgctgc

SEQ ID NO: 190081 - DNA, 243 bp, Glycine max
acacctgctagcaggaacacgtacaatcttcgagacgcagttcacggtgcactactcaggtatatcccaactcatggactgctatatatattgcgcttgacaacgtgggaatgtggaacttgaggtctgaattttgggcacggcagtaccttggccaacagttttacatgcgcgtttatacaacatcgacatcaatccgcgatgaatatcctgttccaaagaatgcactactttgtggtaggg

SEQ ID NO: 190082 - DNA, 246 bp, Glycine max
aaccccaagaccttccttctttcgttctcccatcaaacccccatggaagtattcccaaggtgctgtcttcgatgttccaacacatgaagaagctgaagtgggtactcgcgaactcgtttcacgaactggagaaagaggtaatagactccatggctgagttatgccccataacaacggtgggcccactagtccctccatcgttactcggccaagacgaaaacatcgaaggagacgtgggaatcgaaa

SEQ ID NO: 190083 - DNA, 244 bp, Glycine max
atatgaagttgtttgttttctttgttgctgcagtagttttggtagcatggccatgccatggcgcaggctaccaaaggttccctctccgaatgaaaactggctatggtgagcgttcttcggaggtaaaatgcgcaagttttaggcttgctgtggaagcacacaacactcgagcctttaaaaccattcctgaagagtgcgttgaaccaacaaaggactacattaatggcgaacaatttagatcaga

SEQ ID NO: 190084 - DNA, 245 bp, Glycine max
tgaaaaccctagctcaccgtttcaagatgcaaatcttcgttaagaccctcactggtaagaccatcactctcgaagtcgagagttcagataccatagacaatgtaaaggccaaaattccagacaaggaagggatcccaccagatcagcaacggctcatttttgctggcaagcagcttgaggctggacgtacccttgctgattacaacatccaaaaggagtccactctacacttggtgcttcgtctc

SEQ ID NO: 190085 - DNA, 248 bp, Glycine max
attcggcggcgctatccactttgattccatttgcattcgaaggtcttctctgctccgctccagtatcagcacgcagccatggcggatccttctcggagtttcatgaaggacgtgaagccgtgatcatcaaggtcggcaccgccgtggtcactcgcgaggagggaaggttagctgtcggaagattaggcgctctctgcgagcagattaagcaactcaactccctcggatacgacattattctcgtctcc

SEQ ID NO: 190086 - DNA, 247 bp, Glycine max
cggctcgagagtggatggatgtctttgggtggaatattgctgtgcataacaggctcagaagctatgtttgctgatcttggacatttctcatatatggctattcagattgcattcacctttctggtatatcctgcgcttatattggcctatatgggtcaagctgcttatttgtcgcatcatcatgattccgaactccaaatcagtttctatgtctcagttccagaaagtgtgaggtggccagtgctta

SEQ ID NO: 190087 - DNA, 249 bp, Glycine max
cggctcgagctcgagccgattcggctcaggtccctccttcctctgccttatacattctgtactcctacttggtggtagcattgaaagtgcaccacgcaaacgtgaagccaagccattatgctgcacccttcaataggagtgtttttccttctggttttctatttggaataggctctgcagcttaccagatagaaggagcagcagctatagatggcagaggaccaagtatatgggacacctatactaaac

SEQ ID NO: 190088 - DNA, 266 bp, Glycine max
gagagcatgctgagaaattgatggagtatcaggtgtttgacttagacttatttttcgtataaagaatcgagtgatgttgacgctgaattctgattatttgtttgtttatttgttttcagaacaaacgtggtggaaaagtgaagttgcagtcaattgtgatgccgctttctgattttgatcatgcagataagggagatgcgctgcacggttagtgtttctggccttgtaatttccctttttagtgctttcagtttagttcgtgtgtt

SEQ ID NO: 190089 - DNA, 270 bp, Glycine max
ctttcaccctctttcaaggctccacttttataattccttgtaatttacttcatcaaagtatcaaacttgtcttctctctctctccttttacttcctctgcatatatgatatattcttccaaaatcctcatctaagggttaattttgttccggacaagtttttattattattattattattttttaaatttcagaatgatttacttataggtttctgatccaaggtttaagatgttatagtttccttgaattctcatctgggttcaacctg

SEQ ID NO: 190090 - DNA, 270 bp, Glycine max
ctcgattctctgttttgcccttcgaaacacctgttacgcgccaccgcaagaaccttcccctttccctgggtttcgtcagcaattctcgtcaatatccaactatggccctcaaggctgcctcaggttctataccaagtgcagacacaagtagtgccgataaggaggaagataagtctgagacatatagtcataacatgacagaagccatgggtgctgttttgacttataggcatgaattaggaatgaactataatttcatccgtccagact

SEQ ID NO: 190091 - DNA, 266 bp, Glycine max
catcaggaaggatctctatggtaacatagtcttgactagtggttccacaatgttcccgggtattgctgataggatcagcaaggagattacagacttggcaccgggtagcatgacaattaaggttgtagcaccaccagacaggcagtacagtgtctggcttggaggctctatcttggcctccctcagcaccttccaacagatgtggattgcgcaggcagagtatgatgactctggaccatcaatcgtacacaggaaatgcttctaag

SEQ ID NO: 190092 - DNA, 271 bp, Glycine max
cacacacaaggtttgcatgtattctattctcatttttttgatcccaacattaactataagggggagggataacaagaatagaaaaaaggaacaaccaacatgttgcagagagctgcaagcaatgcatattcatggtggtgggctagccacatcagaacaaagcaatcaaaatggatggaacaaaacctccaagatatggaggaaaaggtgcacgctgttttgaagctcctagaggaagagggggattcctttgccaagagagcagaaatgt

SEQ ID NO: 190093 - DNA, 266 bp, Glycine max
atgccaagagggcttttgttcattggtatgttggtgagggtatggaagagggagagttctctgaggctcgtgaagatcttgctgccctggagaaagattatgaggaagtcggtgcagaggcaactgaagaagatggtgatgaaggagaagattattgattagaagtttgcactgttacgttactttatctgtgttgttttttttcctcgtgctctgtgtatggtagttcttttcgtggtcgttgccttgttccggtacttttggag

SEQ ID NO: 190094 - DNA, 275 bp, Glycine max
cacaactaaaaaaaagaagaaaaacttagagtggtagttgtaggaaagcaagaacagtgaagtgttctcctaattcagtgagtgaggttctgaattctttaacttgagatgatggcatcatttgcagggactactcagaagtgcaaagcatgtgagaagactgtgtatttggtggatcagctcactgctgacaacaagatctatcacaaatccatgtttcagatgctaccactggcaagggtacccttaagttgagtaactattgttcctttgag

SEQ ID NO: 190095 - DNA, 257 bp, Glycine max
acgggatcatccacaagattgaggagaccctccatgtgggagggcacaagaaagaggagcacaaaggagaacaccatggtgagcacaaaggtgaacacaaaggagaacaccatggtgagcacaaaggtgaacacaaaggagaacaacaccatggggagcacaaggagggacttgtggataagatcaaggacaagatccatggtgatggccatgacaagggtgagaaaaacacgaagaaggaccagaagaggaaagag

SEQ ID NO: 190096 - DNA, 268 bp, Glycine max
tctcgagccgaatcggctcgaggtgtacctctgctctcacttcctaccttccttccttcaattcttctaactcttagcagccatggcgagcaccaaagttcagagggttatgactcagcccattaacttgattttcaggtttcttcagagcaaagcacgcattcagatttggctatttgagcaaaaggatttgaggattgaaggcagaatcattggttttgatgaatacatgaatttggttcttgatgatgctgaagaagtgagcatc

SEQ ID NO: 190097 - DNA, 243 bp, Glycine max
gtgggttgtagacgccgtttgcacagtcatcgtcgccatatctctcgctgctgagcgcctccttcattatggcggaaagtttctcaaagccaaggacaagaagtcgctctacgaagctctccagaagatcaaagaagagctgatgcttctgggcttcatttccctgcttctcacggttacacaaaacggcattaccaaaatctgcgttcgtcccagtttgaagcgccacatgctcccctgtaa

SEQ ID NO: 190098 - DNA, 268 bp, Glycine max
gtcaatactcaattcatcatcagcttgtggccatagtctcattatttatccttttgcttccaaatatccatgggtggggagacgatgggcatgtcattgtttgcaagattgcacaggctcgcctcagtgaagcagctgcagaggctgtgaagaaactgctgccaatatccgcaggaaatgatttgtccacaaagtgttcttgggcagatcatgttcatcatatctatccttgggcctctgctttgcactacgcaaataccccagaggc

SEQ ID NO: 190099 - DNA, 269 bp, Glycine max
ctgctttggaagaagacttggcgaagttaatgatgagcttcaacaggaagcgcagtgtataccaaacatgactcatccagatgttccaataggaggggaggattgttccaccataaggaagatggttggtagctctcccaaatttagctttcctgtcaaggatcatctccaactaggaaaggagcttgatctatttgattttgatgcagctgcagaggtcagtgggtcaaagttctactacctgaaaaatgaagcagttttgttagaga

SEQ ID NO: 190100 - DNA, 271 bp, Glycine max
cttttaaatccttttgtaccctcaactccataagccactagtacctcacaatgcccattgtagcaacctctcttctcttctttcttcttaatttatgcctcagaggcacttatgctgactatggaggtggttggcaaggtggtcatgccacattttatggtggaggtgatgcatctggcacaatgggaggggcttgtggatatggaaatttgtacagccaagggtatggcactaacactgcagcactcagcactgctctattcaacaatgg

SEQ ID NO: 190101 - DNA, 232 bp, Glycine max
gttttcatcgtcttccttctcttatatttcttttttttttttgtcttcgccgcacgccgaaacaatggccggaaaaggagagggtcctgctatcggaatcgatctcggaaccacctactcttgtgtcggtgtgtggcaacatgaccgatttgaaatcatcgccaacggccaggggaacagaacgacgcggtcttacgtcggcttcactgataccgagcgtctaatcggtgat

SEQ ID NO: 190102 - DNA, 267 bp, Glycine max
gaaaaatcaaacaaacatgagctacaacatttccaaagcatccttctttcatatatacttggaaagaaggaaattaagttagcaagtgagcaacaaggagtttcaatgatacaacatagactccagcgaaagaaggttctcttgattctagatgatgttgacaagctcgagcacttacttccattggctttggaagtaataggttccaacttgtttggaaaaaatacaagaagaaccaaaatctgtcatcaaacaatataaacaaat

SEQ ID NO: 190103 - DNA, 266 bp, Glycine max
ctttgagtcttcttgatccttctttttctccttgaactcaaacatagcagatgaggtggttctgctagatttctggccaagtccatttgggatgagggtcaggattgcacttgctgaaaagggtatcaaatatgagtacaaagaagaggacttgaggaacaagagtcctcttctcctccaaatgaacccggttcacaagaagattccggttctcatccacaatggcaaacccatttgtgaatccctcattgctgttcagtacattg

SEQ ID NO: 190104 - DNA, 264 bp, Glycine max
gcgggtggctgcattggtcaatgatactgttggaacattagctcttggacattatcatgactcagatactgttgcttctgtaataattggcactggtaccaatgcttgctatttggaacgggttgatgctattatcaagtgtcaaggtcttcctacaacatcaggatatctggtattgctctttttttttgtttgtctttatttttcacttttgtttattgtcttgttttgaacctagtataaatcttctgtttattaggttgt

SEQ ID NO: 190105 - DNA, 266 bp, Glycine max
  unsure (1)..(266): unsure at all n locations
tttggntcatgaggcaagcagggaggtacatgaagagttaccaaaccatctgtgagaactatccttcattccgtgaaanatctgaaaatgttgatctcgtggtggaaatttctctgcaaccgtggcatgttttcaagcctgatggagtgattttattctcagacattcttaccccactttctggaatgaatataccctttgatattgtgaagggtaagggtcctgttatatngatcctattcacacatctgcccaggttgatcaat

SEQ ID NO: 190106 - DNA, 216 bp, Glycine max
atagcacatagcatagcaaggaaggagtattacaaccgaaaccctgaagaaaaaaagagtagaggaagaaaaaacacctgcaccaccaacgatgggtgtggattactacaagatcttgcaggttgataggagcgccaaagacgacgacttgaagaaggcttataggaaacttgctatgaaatggcaccctgataagaaccccaacaacaagaaaga

SEQ ID NO: 190107 - DNA, 234 bp, Glycine max
gatacactaagttatcctcataaatacactctaattaggtggcaggatgagtgtctaaccttagtagcattgccacatattgtgttcattatggaattgtgacactaaagttctattcaattcatctatggctgcctcctcttatgctatgcaatcaatcctggcaaaccctttgatccgcatttccagcgggtctagggtgaaccaatttggcgttcctgctttgcaaatgag

SEQ ID NO: 190108 - DNA, 268 bp, Glycine max
atttctggggctcctgcttctggtaaaggaacccagtgccacctcatcaccaacaagtacggtttgggtcatattcctgctggacgatttacttagggcagaaattgccactggaagtgataatggaaagcgagccaaacagtatatggagaagggacagttggtccctgacgaaattgttgtgatgatggttaaggagcgtctcttgaaaccagattcgaaagagaatggttggcttttggatggatatcccaggagcttatcacag

SEQ ID NO: 190109 - DNA, 272 bp, Glycine max
gtcaaactgagaactaatatcacgctcggccgttgagcgcaacctttcgatcttcatccaagcgaggcaacgttggatatgctgaactgaacttcttttgatatgaactctgtgatttcactctgcttcgccatccgatgggggacaacaacagcaacaacgatgccttcatgcgcaaccaaaacgccgccgttcaggcccgcaccaaagcgcggaaccgttccaacgtccttcagctcaaactgattggacagagtcactcaaccggtctc

SEQ ID NO: 190110 - DNA, 268 bp, Glycine max
ataaccatgtcttctcagactgttgtcctcaaagttggtatgtcatgtcaagggtgtgctggagcagtgaacagggttttgggaaaaatggaaggtgttgagtcatttgacattgatctgaaggagcagaaggtgacagtgaaaggaaatgtggagccagatgaagttctgcaaaacgtttccaaatctgggaagaagactgcattctgggtggatgaagcaccacaatctaaaaacaagcctttagaaagtgcacctgttgcctcag

SEQ ID NO: 190111 - DNA, 270 bp, Glycine max
ctatcagatttcagaggcggaggcggaggctggagctgcctcaactcaagtcttcaactatctgaatctgaactcatccactcactcgttagcctatgctagaacgataactgagtaatggaaagtggagggaaatccctttcatcagggtcagatggtgtgaagagaaaggtttcatatttctatgatccagaggttggaaactattattatgggcagggacacccaatgaaacctcataggattcgaatgacacatgctcttttagcc

SEQ ID NO: 190112 - DNA, 271 bp, Glycine max
cttccttctcttatatttcttttttttttttgtcttcgccgcacgccgaaacaatggccggaaaaggagagggtcctgctatcggaatcgatctcggaaccacctactcttgtgtcggtgtgtggcaacatgaccgatttgaaatcatcgccaacgaccaagggaacagaacgacgccgtcttacgtcggcttcactgataccgagcgtctcatcggtgatgcggctaagaaccaagtcgccatgaaccccatcaacaccgtcttcgatgc

SEQ ID NO: 190113 - DNA, 214 bp, Glycine max
agcgagtcttgaacattcatggatccagtaagcgtgtggggtaacacgcccttagcgacggtggatcccgagatccatgacctcatcgagacggagaagcaccgccaattccgcggcatcgagctcatcgcctcccagaacttcacctcccttgcaatcatcgcggacctcggcagcaccctcgccaacaaatactccgggggcatgcccggta

SEQ ID NO: 190114 - DNA, 121 bp, Glycine max
gaagaagaagatggtgtcaggttctggaatctgcgcaaagcgggtggtggtggacgcgcgccaccacatgctgggtcgtctagcctccatcgtggcgaaggagcttctgaacggccagaaa

SEQ ID NO: 190115 - DNA, 260 bp, Glycine max
ggatcctcctccttccattcaggatgcttccgataggattactaaacgaggtgactcggtggatgacaagattaagaagcttgatgccgagcttagtagatataaggagcagattaagaaaactagacctggtcctgcccaggaagctgttaaagctagagccatgagagttcttaagcaaaaacgaatgtatgaaggccagcgtgacatgctgtacaatcagacattcaatctcgatcaagttcaatttgcagctgaag

SEQ ID NO: 190116 - DNA, 263 bp, Glycine max
ataattcattattctccaaaggcagaaacatgtgctgaacttgatccagacaaaatttatctttttgattctggagcccagtatctagatggaacaacagatattacacgaacagttcattttggtaaaccttcgactcacgaaaaagcgtgttatacagcagtcctaaagggtcacattgctcttggaaatgctagatttcccaatgggacaaatgggcattctcttgatattcttgctcgaattcctttgtggaaggatgg

SEQ ID NO: 190117 - DNA, 266 bp, Glycine max
atgataaggctcaaaaattagccctccaacattggctagaagctattgacccacgtcatcgctatggacacaatttgcacatgtattacggatatttggtttgagagccaaagcacccaaccatttttctactggttggatgttggagatggtaaagaaataaatcttgagaaatgcccaagatccatcctacaacgccagtgcattaaatatcttggaccaaaagaaagggaagagtatgaagtaattgttgaaaaagggaagct

SEQ ID NO: 190118 - DNA, 263 bp, Glycine max
ctttcttctccttttagggtttcctttttgtatctcctttccagaactgcatcttccattttttaggattaagcggtgagattcgtgaatctgagaaatgtcggattcttctcgggaggagaatgtttacatggcgaaattggcggagcaggccgagcgttacgaggagatggttgagttcatggagaaggtagcaaagactgtggaggttgaggagttgacggtggaggagagaaatcttctctctgtggcttacaagaacg

SEQ ID NO: 190119 - DNA, 249 bp, Glycine max
atgggtgttgccgtgaatttggtgacatatttgacgggtacgatgcatttcggcagtgctaattctgccaacacggtcaccaacttcatgggaacctctttcatgctctgtttgttcggtggttttgtagctgacacttttatcggcagatacctcactattgccatcttcgcgactgttcaagccactggtgtgacaatattaacaatatcaaccataatcccaagcctgcaccctccaaaatgcata

SEQ ID NO: 190120 - DNA, 262 bp, Glycine max
cttggtgtaaattttggggatgtttgcactgatgtaccacggaactccaccttcaagagtggtgacttggtgacagcttcgttctggtctgcatgtcctcgtaacgaccttatgactgaaggcacctttgcactggtggaatttctccaagaaaaggatgcttggactcctgcttatgatgatgatgatttctgcctgcgctataagtggtcaaggccttccaaactgagttctaggagcaaagcaaccttggaatggagga

SEQ ID NO: 190121 - DNA, 225 bp, Glycine max
aagcagtgggaggaggctcgggactctgaccgcgtgcctgttgaagaatgagccggcgactcataggcagtggcttggttaagggaaaccaccggagccgtagcgaaagcgagtcttcacagggcaattgtcactggttatggacccgaacctgggtgatctatccatgaccaggatgaagcttgggtgaaactaagtggaggtccgaaccgactgatgttgaag

SEQ ID NO: 190122 - DNA, 264 bp, Glycine max
tatcgagccgaatcggctcgagggggttggtttcattgcaacaccgacttgtttctgagcccgatgttcaagggcccaggttacgtttctcctcattgcacggaacaggctccctttggaaatggtttgggatgctttgctttaggggaggcgatcgcacattctcaatttttgtacactgcaggcctgggtttcttctcaacaaggcaacgactagatcgccatattttttgaatcgtcaagttaatgatagcgtacaggttg

SEQ ID NO: 190123 - DNA, 252 bp, Glycine max
ctagctgtgacttgttttgagctcaatcaaatcgcattggtatctgaaatcaggaaagatggttagcgagctccgcatcaaggaggcacaaagggcagaaggcccagcgaacatccttgccattggaccttaaacccgccaaaccgtgttgcacagagcacctatcctgattactacttcagaatcaccaacagtcgacacatgaccgagctcgaccagagatttcagcgcatgtgtgacaagtctatgatc

SEQ ID NO: 190124 - DNA, 263 bp, Glycine max
cacagatctgtcttccgaagcaggaactaaatatggctgacttgttggaatggtcaaagcaagataagaaacgaatgcttcatgtcgtctaccgtgttggtgaccttgatcgcaccatcaaattttacacagaatgtttaggaatgaagcttttgaggcaaagagatatcccagaggagaaatatgctaatgcttttcttggatttggccctgaagaatcccattttgttgttgaattaacatataattatggggttacctcg

SEQ ID NO: 190125 - DNA, 266 bp, Glycine max
ctcgagccgcataaatacactctaattaggtggcaagataagtgtctaaccttagtaacattgccacatattgtgttcattttggaattgtgccactaaaattctattcaattcatctatggctgcctcttcttatgctatgcaatcaatcctggcaaaccctttgatccgcatttccagcgggtctagggtgaaccaatttggcgttcctgctttgcacatgagaaggaatgttggcctgagagttaggtccatggctaaggaag

SEQ ID NO: 190126 - DNA, 262 bp, Glycine max
gttccattggcaagctacaattatgggtcctccagacagtccctatgcaggaggtgttttcctagtgaccattcatttccctccagattatccctttaagccacccaaggttgcattcaggacaaaggttttccacccaaatataaatagcaatggaagcatttgccttgatatattgaaggagcagtggagccctgctctaaccatttccaaggtgttgctctcaatttgttccctattgacggatccaaatcctgatgat

SEQ ID NO: 190127 - DNA, 256 bp, Glycine max
cggtttcattggcacccacaccgtcgttcagtttctcaaagctggcttcagcgtttcaataatcgacaatttcgataactccgtcatggaagcagtggaccgcgtccgccaagtggttggccctctgctttctcagaacctccaattcacccagggcgatctccggaatagggatgacttggagaaactcttctccaaaacaacatttgatgccgtgatccactttgctggcttgaaagcggttgctgaaaggttg

SEQ ID NO: 190128 - DNA, 257 bp, Glycine max
gtaaagcatggctttgttggtggagaaaaccacgagtggtcgcgagtacaaggtcaaggacctttcccaggccgacttcggccgcctcgagatcgagctggccgaggttgagatgcccggcctcatggcctgtcggaccgagttcggcccctcccagcccttcaagggggcccgcatcaccggctccctccacatgaccatccagaccgccgttctcattgagaccctcaccgcccttggcgccgaggtccgctggt

SEQ ID NO: 190129 - DNA, 255 bp, Glycine max
attttgaattatacaatatgggtagcaacaggactattgtttggtttagcaggaccttaggattgaggacaatcctgcattagctgctgctgcaaaggaaggttctgtactccctgtgtatatatggtgccctaaagaggaaggacagttttatccaggaagagtgtcaaggtggtggctgaagcagtctcttgctcacttggatcaatcactgaagactcttggatccagacttgtgctcatcaaaacccacag

SEQ ID NO: 190130 - DNA, 255 bp, Glycine max
aaagccttcaatcatatagcattctaagaaatgaagagccctaccattttcattctctttctactttctgccttctacacctcactcctaccttcagccaccgctcaagtcgtggttgacatggaaggtaatgatcttcaaaatggtgggaaatattatgtgttgccagtaatagagtcatcatatggtggaataagagtagccgcaactggaaaagaaagatgccctctcactgttgtacaatctgccgatccg

SEQ ID NO: 190131 - DNA, 253 bp, Glycine max
tgggggtcagagtgagaaagagaaagagagaattcgtaaaccctaatttcggaaagatcggcgatgactgcctccaaggatcgcgagaacttcgtctacatcgccaaactcgccgagcaggccgagcgttacgaagagatggtggaatcaatgaagaacgttgcgaatctcgacgttgaactgacggtggaggagcggaatttgctttctgttgggtacaagaatgtgattggtgctcgcagacgtcctggag

SEQ ID NO: 190132 - DNA, 256 bp, Glycine max
gtgaccccaatatacttagccatatctttacttcccaaaacttgctctacaatgagtttccttcgttcttttgcaagaaacaaggatatatcaaaagtaggacgcagaggtatccattgcatgcagaaactatgtgcagaaaaaatatctcctgattcactagagaaggcccaaaatcgtgtgatagatgctgcactcacacttgttcgagaaaatacaaggcttaagaaagaacttgtgcatagtttgggaggtg

SEQ ID NO: 190133 - DNA, 257 bp, Glycine max
aaaaatggcaatctccatacccagtagacaacttttcatagatggagagtggaaagtccctcttctcaacaatcggtttccgatcatcaaccccgctactgaagacatcatagggcatattccagccgctactaaggaagatgttgaccttgcggtggatgctgctaaaagagccttttcccataacaaaggcaaagattggtcttcagctcctggctctgttcgtgctcgctatcttcgagccatcgcttcaaaga

SEQ ID NO: 190134 - DNA, 258 bp, Glycine max
attacaccacgcttctaaattctgagaatgaattcgtaagatcgaagcaatagcctttttctctgccgccactggtttcgatcccacacccacaaacgcaaaccctccatcctttgaatgctcttgcgttttcctttcactacctcattcctaactcacacacacacaacgggtgatatcaatgtcgactcctgctaggaagaggctcatgagagatttcaagaggctgcaacaagacccgcctgcaggaatcagcgg

SEQ ID NO: 190135 - DNA, 258 bp, Glycine max
attacactactatgaaccagagaatgcctctcatctacgtgaaactgtatacatatcaaatcttcaggggattagcatatatccataccgccctgcgagtttgccatagggatgtaaagcctcaaaatcttttggttcatcctcttactcaccaagttaagctatgtgattttgggagtgccaaagttctggtcaagggtgaatcaaacatttcatacatatgttcacgttactatcgggctccagaactaatatttg

SEQ ID NO: 190136 - DNA, 259 bp, Glycine max
agatggagaacatgcagagcttctggcaattgggcgatgaactccgtggacactcaaaagcatcggaggatcacaaatggttaatggttgcttcgaaattggcggaacagacaagattgaagggggagcgtgtgaacaaccttgatctttcaaagggccccattgaaacaaggtcaagggataaatttgggttccaggaagagaacaaatttgattctcttaacttaagcatgttgaacctggactctaaatttactga

SEQ ID NO: 190137 - DNA, 257 bp, Glycine max
ctcgagccgctctgtcattggaggccttgccttagcttcgctattaaggcattttagagcagtagtggcagccatgtaggctccattttgtgggtattggccacccaacttggtgtccataatctgaaatagtcttattagcgaagctaaggcaaggcctccaatgacagaggttttagaaacccttgaacagattgcagagtgctaaaagggtcccatttgaatcatactcctactgcattcccagtatctgcttg

SEQ ID NO: 190138 - DNA, 256 bp, Glycine max
gactacgactacgattgtgtgtacactgcatacgttagaaccggttcggtgttgaagggcggaacggactctaagatcgggctgaagctgtacgacaagtacggctactacatctacattaaaaacctcgaagcatggggcggcttgatgggcaagggctacgactacttcgagcgcggcaacctcgacatcttcagcggaaggggaccctgtcttgacggacccgtctgtgccgttaacgttacttctgacggat

SEQ ID NO: 190139 - DNA, 256 bp, Glycine max
gcgattttcgattctcttctctgcaactatgcctaaccctaaggtcttcttcgacatgaccatcggcggtcaacctgccggccgcatcgtgatggagctctacgccgacgtgactccgagcaccgccgagaacttccgcgcgctctgcaccggcgagaagggcgccgggcggagcggcaagcccctccactacaaaggctcgtccttccaccgcgtgatcccgaacttcatgtgccagggcggcgacttcaccgcc

SEQ ID NO: 190140 - DNA, 256 bp, Glycine max
ctctactactgctagctgtgacttgttttgagttcaatcaaatcgcattggtatctgaaatcaggaaagatggttagcgtagctgagatcaggcaggcacaaagggcagaaggcccagcaaccatccttgccattggaactgcaaacccaccaaaccgtgttgatcagagcacctatcctgattactacttcagaatcaccaacagtgaccacatgaccgagctcaaagagaaatttcagcgcatgtgtgacaagt

SEQ ID NO: 190141 - DNA, 253 bp, Glycine max
ggaagaaccagtatcgcggaatccgccagcgtccatggggaaagtgggctgctgagattcgcgacccaagaaagggggttcgtgtttggcttggaactttcagcactgctgaagaagctgcaagagcttacgatgctgaagcaaggaggatccgtggcaagaaagccaaggtgaatttccctgatgagccttcaggcgctgcttcctcaaaacgtctcaaggcgaatccagaggctcagccaatgaagaaaaa

SEQ ID NO: 190142 - DNA, 255 bp, Glycine max
gaagacttcgacatccccggcggcgaggaaatggatctcggcgaagacgaggtcggcgaggagagggagatcggctctggcggcctcaagaagaagctcctcaaggaaggtcaaggctgggaaacccccgaagtcggtgacgaagtccaagttcattacacggggactttgctcgacgggactaagttcgattcgagccgcgacagggattctcccttcagcttcacgctcggacaagggcaagtaattaaagga

SEQ ID NO: 190143 - DNA, 255 bp, Glycine max
aagacctgcttccatctaattaatgccctctcaggagttggtattatttccatgccttatgcactggcatctgggggatggttaagcatatcactactatttgtgattgccattgcttgctgttatactggtatgttggtcaaaagatgcatggatatggaccctgacatcaagaattttcctgacataggtcaacgtgcatttggagacaaggggaggataatagtatcaattgccatgaattctgagctcttc

SEQ ID NO: 190144 - DNA, 257 bp, Glycine max
actcctccaaattaaaacacttatcatggatgttaagaaaggtgggtctgtagtacaagcacaagtgaagttgcagaagcataacgaaaaggagatgggcatgagaaaaggtccatgggcggttgaggaggacaccattctggtcaattacatcgccacacacggtgaaggccactggaattccgtggcacgatgtgcaggtctaaggaggagtgggaagagttgcagattaaggtggctaaactacttgcgcccag

SEQ ID NO: 190145 - DNA, 257 bp, Glycine max
gccagaggaaactctggtggaggcccgcagcgatactgacgtgcaaatcgttcgtctgacttgggtataggggcgaaagactaatcgaaccgtctagtagctggttccctccgaagtttccctcaggatagctggagcccgcgggcgagttctatcgggtaaagccaatgattagaggcatcgggggcgcaacgccctcgacctattctcaaactttaaataggtaggacggtgcggctgctctgttgagccgcgcc

SEQ ID NO: 190146 - DNA, 253 bp, Glycine max
caagatcttctttgtattgctgttatgtctgatcatagcagcttcttctgggtttgtgaattgctttgatgttgaaaagaaggaaaagattggaatatttgagctcaataaaggtgacctttctttgaaggtcaccaactggggtgcttcaattttgtccctggtgattcctgataagaatggaaagttgagtgatgtttcttggatatgattctgttaaggattacactaatgatacaacatattttggagc

SEQ ID NO: 190147 - DNA, 256 bp, Glycine max
cttcttccaagtccaaccacgcttttctctacagtcatgggcaaggtcaagatcggaatcaacggatttggaagaattggccgtttggttgccagagtcgctctgcaaagagacgatgtggagctcgttgccgttaacgaccctttcattaccaccgattacatgacatacatgtttaaatacgacagtgttcacggacactggaagcatcacgatgtcaccgttaaggacgagaagacccttctcttcggtgaca

SEQ ID NO: 190148 - DNA, 253 bp, Glycine max
ctattctcttcattccatggctttgcccaaccagcaaaccgtggattaccctagtttcaaactcgttatcgtcggcgatggtggcacaggaaagacaacctttgtgaaaaggcatctcaccggagaattcggaagaaatatgagccaaccatcggtgtggaggttcacccattggattttttcacaaactgtggaaagattcgattttactgctgggatactgctggacaggagaaatttggtggcctcagag

SEQ ID NO: 190149 - DNA, 254 bp, Glycine max
ctttctttggtttcacaccatttttctattgacttcatcacaatatcaaagatcattagtgtcggtattatcaccaccatattcttttggacttcctctgctatttctaggtttcgttttatttggctttgattttcttctgcaaccttatctactgcaaagctttgattactgagtctaacttaccctgccacagtttgccttgtttacctgagctctgtttttaactggtctttgatcaaggatggccataa

SEQ ID NO: 190150 - DNA, 255 bp, Glycine max
gatggcctcacaggtttgcaaagctgcttccagagccgcgaggtcccttctctccgcttccagagcctcccatggacgtgcggttggggctgctacggctgtttcattgagctgcaaagtgcctcttttctacggaaagaacggttctggaagtggttccgcttcatcatcatcatcatcatggatttcaggagcacttgctcttcctgccgcagcttacatgttccaagatcaggaggtgcgcgcagctgagct

SEQ ID NO: 190151 - DNA, 258 bp, Glycine max
aatcgcttcaagtcaggaggaggtgacccttttgggagctactggaagcccatttgtgtgcagggttcatattgccctcaagttgaagggagttcaatacaaatatgtcgaagaaaatttgaggaacaagagtgaactgcttctcaaatccaacccagtacacaagaaggttccagtgtttattcacaatgagaagcccatagcagagtctcttgtgattgttgaatacattgatgagacatggaagaacaaccccat

SEQ ID NO: 190152 - DNA, 252 bp, Glycine max
agcgtcttaatagacgctcttctctgaaaaacctgatttcttctcttcttctcgtctctttcgtttcgatcttcgatctctgaaaatgagagagtgcatttcaatccacatcggtcaggccggtattcaggtcggaaacgcctgctgggagctctactgcctcgaacacggcattcagcctgatgggcagatgccaagtgataagactgttggtggaggtgatgatgctttcaacaccttcttcagtgaaac

SEQ ID NO: 190153 - DNA, 252 bp, Glycine max
tcctcgagccgattcggctcgacttccattctcacactacttactcgctttctctctctgacggtttccgctgttctctttgaagttccaagaaatgtcaattataacacgcagaggcatccgttacatgccaagactagatgcagcaaaagtatctgctgctttgctagaaaaaggccaaaatcgtgtcatagatgcttcacttacacttattcgagaaagagcaaagcttaagggagaacttgtgcgtgc

SEQ ID NO: 190154 - DNA, 253 bp, Glycine max
gatctcgtctcgatcgatagatctcgaacatgagcactggggagcttctcaacatcgaacctctcgaactcaagttcccctttgagctgaagaagcagatctcatgttctcttcaattgtccaataagaccgatagctatgtagccttcaaggtgaaaacaaccaatccgaagaagtattgtgttcgtccgaacactggggttgtcacgcctcgatctacgtgtgatgttatcgttaccatgcaagcgcaaaa

SEQ ID NO: 190155 - DNA, 251 bp, Glycine max
ggctaagtatcattcaagtgggaaaagctcttccatgactgctatagccttcctgtttatccttctaatcacttatacaggcacaacagatgcacaatccggggtatgttatggaagacttggcaacaacttaccaacccctcaagaagttgtggccctctacaatcaagccaacattcgcaggatgcgaatctacggtccaagcccagaagtcctcgaagcactaagaggttccaacattgagcttttgc

SEQ ID NO: 190156 - DNA, 227 bp, Glycine max
atcaaagtcagaagaaatgtgctatcctcaaaatttcagatacgaaaatagtctgatattgatctaaaaagccaacaagaaaagattgattcaactaatcaaatgattgaacagtgctacagctcaattcattctcctgattagctcattgatgtaattctcccggtttccagcatcacctccctcaacataatggtttctcttcttctttaagccacccaaaggag

SEQ ID NO: 190157 - DNA, 256 bp, Glycine max
agtagtactagtgataaggtgatcataatagagcataatataagagagtgaaaactcatggaggttggcctcaacaagaaggagaacatggggtttgaggaaactgagctaaggcttggactgcctggaaacgtaggaggcactggcactgaagaagtgctcatcaggaagagaggtttctctgagactgaaactgaaactgaggaggatgagtctgctaccactgtggatttgatgcttaatctttcttctaagg

SEQ ID NO: 190158 - DNA, 251 bp, Glycine max
acaccatgcaagaatgtcatgtgatagccccaacaacaacaacggcaacatcatcgtatcgtggagttcgtcagcgaaaatggggcaaatgggtgtccgaaatccgtgagcctggaaagaagagcagaatatggttagggagctatgagtcaccagagatggctgcagcagcatatgacgtggcagcgttacaccttcggggacgagctgcaagactcaatttccccgaattagttgagacgctgccacgt

SEQ ID NO: 190159 - DNA, 250 bp, Glycine max
gttcaaaaccaatctatctatctatttggtatgagcatggagctttgttggcaaaaatccatccatggctcttaaagaagcttggaggattttgtgtgagagggttctcacccttcacactccacctcctacagtttgcttatgctttagccattggtttctctaatcaatcaccacaaaagggtatacatggaggaacataattctctgagtggcatgaagcagagaagctatggccacatcttagcaa

SEQ ID NO: 190160 - DNA, 252 bp, Glycine max
gcagaggagcagaagcctaagccttcaacatggcgagagggttgaagaaacacttgaagaggctcaatgctccaaaacactggatgcttgacaagcttggtggggcctttgcaccgaagccatcatctggaccccacaagtccagggagtgtcttcctttgatcctcatcctacggaacaggctaaagtatgctctaacatatagagaagttattgccatcttgatgcagcgccatgttcttgttgatggca

SEQ ID NO: 190161 - DNA, 249 bp, Glycine max
gcgggctcaaagagaatcccgggattgtacctcttatctattatggcctgcagcactatctatcgttggttggttctcttgtattgattccattagtcatggtacctgtcatgggtggaacagataaggatactgctaccgtaatttctacaatactgtttctttctggcatcacaactatactgcactcctactttggtacgcgactgcctttagttcaagggagctcatttgtgtatttagcaccag

SEQ ID NO: 190162 - DNA, 255 bp, Glycine max
  unsure (1)..(255): unsure at all n locations
tctcgagccgaatcggctcgagcggctcgaggggattcattgccaaacgccataggttttgtgaccaatgcaggtgcatctaagcaccaggctgtggcatttagatctggttcggaccgttctgtgttctttagatgctcattcaatggcttccaggataccctctatgcccattccaatcgccagttctaccgtgactgtgacattacaggcacnatagacttcatattcggaaatgcagctgcagtgttccaa

SEQ ID NO: 190163 - DNA, 251 bp, Glycine max
atggcctcttcagtgatggcatctgtggccctcaaacctgcccctttcactgttgagaagtcctcagttagaggccttccctcactctcaaggaactcctcttcattcagagttgtggccagtggtggcaagaagatcaagactgacaagccttatggaattaatggtggcatggctttgagggaaggagttgatgcatctggcaggaaaggaaagggaaagggcgtttaccagtttgtagacaaatacgg

SEQ ID NO: 190164 - DNA, 251 bp, Glycine max
cgcaactccgagtgtgttagaagtccgccctcctgctttaacttccatctctgaaccacttccattttttgatggaaccacaaggttatacatttgctatctgtgcccttttgcacaacgcgcatggataactaggaactgtaagggactgcaagacaagatcgaattggttcctattgatcttaaaaacaggcctgcttggtataaggaaaaagtttatcccacgaataaggtaccttcgttggagcaca

SEQ ID NO: 190165 - DNA, 252 bp, Glycine max
cagcatcactctcgtcgccgccgtcgtcgaccaccgcaagagccatcgcactccgccgtcatccgttagggcaaaaatgagtcgaggaagtggaggtggatacgatcgtcacatcactattttctcccctgaaggacgtctcttccaagtcgagtatgctttcaaggctgttaaggccgcaggaatcacctcaattggtgtccgaggaaaggattcgatttgtgttgttactcagaagaaggttccggataa

SEQ ID NO: 190166 - DNA, 251 bp, Glycine max
ccgccatttccttcctcaccaacgtcgcccgcgcggccttcggccttggcgcggcggccaccgccctctcctcctccctctacaccgtggacggcgggcagcgcgccgtcctcttcgaccggttccgcggcatcctggacaccaccgtcggcgaggggacccacttcctggtcccatgggtccagaaaccctacatcttcgacatccgcactcgcccccacacattctcctcggtctccggcacaaaggat

SEQ ID NO: 190167 - DNA, 251 bp, Glycine max
gggggcatcagagtgatggaacagtcttcgggcttgctgggttgggctctggctgcattctgctggcctgtccgttccaagttgtgagttgagctacgggacttgagcgaaggcccaagtttctgggttcctagacttgagggcacagcgtgaggctggtttaacagagcagcgaatacctcaggcttccaacagtggagggataacaggctgctgcaacagcagtccacaatggcctggtgagcccattt

SEQ ID NO: 190168 - DNA, 253 bp, Glycine max
gaaaaacaaaaccctcactgagcgctgctgctttgagagagagatggctccgaaccttgaatgtcgtatgtacgaagcgaagtacccggaggtggacatggcggtgatgatacaggtgaagaacatagcggacatgggggcgtacgtgtcgctgctggagtacaacaacatcgagggcatgatcttgttctcggagctctctcgccgtcgtattcggagtgtgagcagcctcatcaaggttggccgcatcgag

SEQ ID NO: 190169 - DNA, 255 bp, Glycine max
ccaagatgcaggcatggatacttccatgtggtgaacaatgactacacccattggagaatgtatgccataggggggagtgctgccccaactatcaatagccaagggaatagatttcttgctcccaatgacaataccttcaaagaggtgacaaagagggagaattcagcacagagcaagtggaagaattggaattggaggtcaagtggagatttgatgttaaacggtgcgttttttacggcatcaggagcaggtgca

SEQ ID NO: 190170 - DNA, 243 bp, Glycine max
ctcgagccgatttcacttcacttagggtggtgcatttgcaaccctttaatttcctcacaaacatggaggcacgtagtttgtactcactagtgtttcttgtgcttgctttggctattgtgaacaaagtgcatgggcaagggacgcgtgtagggttctattcgagtacatgcccacgcgctgagtccattgttaagtccacagttacaacccatgttaattctgatagtactttggctgctgggt

SEQ ID NO: 190171 - DNA, 232 bp, Glycine max
ggttcatccaatccccgaagcccttcaccgcattgcaaccatgtcgaggagaaaggtcagagagccaaaggaagaaaacgtgactctgggcccagctgttagagatggtgaacatgtctttggcgtcgctcgcatctttgcctccttcaatgataccttcattcatgtcactgatttgtctgggagggaaacgcttgtccgcatcactggtggaatgaaggttaaggctgac

SEQ ID NO: 190172 - DNA, 239 bp, Glycine max
cttgaacccaccgcgtttcggagagagagacgtcgcaatggggaggaggcctgcaaggtgttaccggcagataaaaaacaagccataccccaaatcacgtttctgccgtggtgttcctgatcctaagatcagaatttatgatgttggtatgaagaagaaaggtgttgatgagtttcccttctgcgttcatctggttagctgggaaaaagaaaatgtttcaagtgaagcattggaagctg

SEQ ID NO: 190173 - DNA, 233 bp, Glycine max
ctccaattgcagtgggaaacgtgattccagacggcattttggcttacttggatgaagaaaacaaaccccaaactgtctccattcactctctcgccaccggcaagaaagtcatcatctttggggttcccggtgccttcactcctacttgcagcttgaagcacgttcctggcttcattgagagagcagaagagctgaaagggaagggtgtggacgaaataatctgtatccgtgtg

SEQ ID NO: 190174 - DNA, 230 bp, Glycine max
tatggcctccaccaaggaacgtgaaaacttcgtctacgtcgccaagctcgccgaacaagccgaacgctatgaagaaatggtggaagcaatgaagaatgtggcgaactaaacgtggaattgacggtagaggagcggaaccttctgccggttgggtacaagaacgtggtgggtgctcgtagggcttcgtggaggattctttcctcgattgaacagaaagaagttgcaaaggg

SEQ ID NO: 190175 - DNA, 275 bp, Glycine max
cggctcgagatcctcacccattttcttcgtagccaaacactctgaaattctcagttatgtcgtagcaagcgtatgtggatgatcacctactgtgtgaaatcgaaggtaaccacctcactcacgccgctatcatcggccaagacggaagcgtttgggctcagagcaccaacttccctcagttcaaacctgaggaaataactgccatcaataatgactttaatgagcctggatcacttgctccaactggattgtatatcggtggcaccaaatacatg

SEQ ID NO: 190176 - DNA, 277 bp, Glycine max
gaaaacccagaaaaactctgaagaagagttcgttgctttctgcttcactgcgaagatgaacggaggcccatctggtttcacaaatgctcccgtcacaagggctttcatcatcacttcggcgcttttcacaatcttctttgggatccaaggccgtttcagcactctggggttgtcgtatcaggatatttttggaaagcttcgcctttggaagttgatcatttccatattttccttctcgtcaacaccagagttgatgtttggattgtatcttctatat

SEQ ID NO: 190177 - DNA, 278 bp, Glycine max
gaaaaacaaaggagaaaagatagaaatggagaactttccagttgttgacatgggaaacctgaataatgaagagagatcagcaaccatggagataatcaaagatgcctgtgagaactggggtttctttgagttggtgaaccatgggatatccatagagttgatgatggacaccgtggagaggatgacaaaagagcactacaaaaagtgtatggagcaaaggttccaagaaatggtagcaagcaaaggcttggagtctgctcaatctgaaatcaatgatt

SEQ ID NO: 190178 - DNA, 277 bp, Glycine max
  unsure (1)..(277): unsure at all n locations
gtgaaaggtggcactctgatttcttatgaaggaagggttcagntcctggaaattgcccaagtaccagatgaacatgtcagtgaatttaagtctatagagaaattcaaaattttcaacacaaataatttgtgggtaaacttgaaagcaattaaaaggcttgttgaagctgatgctctgaagatggaaattattcccaatccaaaggaagtcgatggagtaaaagttcttcaattggaaactgcagctggtgcagcaataaggttcttgacaaagctat

SEQ ID NO: 190179 - DNA, 278 bp, Glycine max
ttttcttctaataatggctgcgacaacacgttcccttgcatacaactacgatgtgttcctcagcttcacagggcaagacacacgccagggtttcactggctatctctacaaagctctttgtgacaggggaatctacactttcattgatgatcaggagcttcggagaggagacgaaataaaacctgcactttccaacgcaattcaagagtccaggattgctattactgtgctttctcaaaactatgcatcttcctcattttgtttagatgaactagtaa

SEQ ID NO: 190180 - DNA, 277 bp, Glycine max
tggaggagaaggatgtctcacaggaagttcgagcacccaaggcacggttcactgggatttcttcccaggaagcgtgctgctcgtcacaggggaaaagtgaaggcattccccaaggatgacccatccaaggcacccaagctcactgcattcttgggttacaaggccggtatgactcacattgttagagaggtcgagaagccaggatcaaagcttcaaaagaaggatacttgtgagcctgtaacatttatggccccccctcattgtttttggggggggg

SEQ ID NO: 190181 - DNA, 208 bp, Glycine max
gtgattactccggcaggaaattggcttattggaggagatttggaagtgctaaaacctatcaaatataatgatggcctagataactacaggctctctcccaaacaactccgtgaagaatttgacaagcgtcaagcagatgcagtttttgcctttcagttaagaaaccctgtacacaatggtcaatctttgttaatgaatgatactccgt

SEQ ID NO: 190182 - DNA, 274 bp, Glycine max
  unsure (1)..(274): unsure at all n locations
atttgtacatcccggcgagaaggcccgccgtcgggaccctcgccggtttcattactctgcaacagtctgtccagagtttccgccgcggtcagtgtgaccgtggcgatgcatgtgagtnttctcatggggtgtttgagtgctggttacacccttctaggtatagaaccgaggcttgcaaggatggtcaggaattgcaagcgaaaagtttgcttctttgctcaaacccctngcnaaaaccgggtttgccnttccatgaaaantacnacangaaana

SEQ ID NO: 190183 - DNA, 274 bp, Glycine max
gtggtggttctggctctgtccttttttcctttctctcgttaccagaaccagaagaaccatttgtggccaacatggatttggaccagtggatctccaaggtcaaagagggccagcatcttcttgaagacgagcttcaacttctctgcgaatatgtaaaagagatccttatcgaggagtccaatgtgcagcctgtcaatagtccagtgactgtttgtggtgatattcatggtcaattccatgatctaatgaaacttttccagactgggggtcatgt

SEQ ID NO: 190184 - DNA, 277 bp, Glycine max
caagccacagaatctgagctttgctgaggctgctagccttcctttaacacttgagactgcttatgaaggccttgaacgaaccgggttttctgctgggaaatctatccttgtgcttggaggtgctggtggagttggaacccatgttattcagcttgccaagcatgtttatggagcatccaaggtagcagctactgctagcactaggaaactggaactattaaggaatttgggagctgactggcctattgattatacaaaggagaattttgaagacctg

SEQ ID NO: 190185 - DNA, 236 bp, Glycine max
ctcttgttagtgctttggggaatgaaggagtttcagaagaagcagctggtgcactggccttgatcgtccggcagccaattggggccaaagcagtggtgaatgaggaatcagcagtggctggattaattggaatgatgcgttgtggaacaccgagaggtaaagagaatgcggttgcagcgatgctcgagttgtgccggagtggaggtgcagctgcaacagaaagggttgtgaaggca

SEQ ID NO: 190186 - DNA, 228 bp, Glycine max
cggcatcctggtgtggtccatgtcaaacatttacgccaactttggtggatgtgtacaatgaggttgcaaaaaaaggtgacttccagatcgttttcattacggctgatgaagatgatgagtcctttaacggttacttttccaagatgccatggcttgcaatcccattttctgattaagacacacgcgctggcttgataaattgtcccatgtaggggggttccccatctg

SEQ ID NO: 190187 - DNA, 265 bp, Glycine max
gctccaactccaacccagtttcacactagtttgttgctccaattcttgtagtcaaggggaacaatgaatgcactagcagccaccaacaggaactttaagttggcctctaggcttctgggattggattcaaagcttgagaaaagtttactgattccattcagggaaatcaaggttgaatgtaccatacctaaagatgatggcaccttgcaatcttatgtagggttcagggttcaacatgataatgccagaggccccatgaaaggag

SEQ ID NO: 190188 - DNA, 210 bp, Glycine max
gaaatttccaaggtaaaaagatgaatctgaagaacatgaagattccgaacgttccaggcggcggtgcgtcctctgcgctgctgaagcttgggcttcttggtggaattggtttatatgcagctgctaacagtctctacaacgttgaaggaggtcaccgagccattgttttcaaccgtctagttggtgtcaaagacaaggtctatcctgaag

SEQ ID NO: 190189 - DNA, 205 bp, Glycine max
gcagaggagcagaagcctaagccttcaacatggcgagagggttgaagaaacacttgaagaggctcaatgctccaaaacactggatgcttgacaagcttggtggggcctttgcaccgaagccatcatctggaccccacaagtccagggagtgtcttcctttgatcctcatcctacggaacaggctaaagtatgctctaacatatag

SEQ ID NO: 190190 - DNA, 271 bp, Glycine max
gttaggtagcaagcataagtgtctaaccttagaaacatatctgctacatatcgtgtgcattttggaattgtgccactaaaattctattcatctatggctgcctcatcttatgctatgcaatcaatccttgcaaaccctatgatccgcatttccagcgggtctagggagaaccattttggtgttcctgcttatcacatgagaaggaatgttggcctgagagttaggtccatggctgaggaagagcaaccaagtcagcctgcgaccccagtta

SEQ ID NO: 190191 - DNA, 271 bp, Glycine max
actcgttcctcttattagcgacggccattctcgccgttgtgtgctccgccgtgagcggttgctcgccatcggatagggcggcgctgctggacttccggaaggcgctgagcgagccctaccttggcctcttcaactcgtggacgggctccaactgctgcctcgactggtacggcatcagctgcgacgccaccaccggccgcgtcaccgacatcaacctccgcggggagtccgaagaccccatcttcgagaaagccggtcgctccggctacat

SEQ ID NO: 190192 - DNA, 272 bp, Glycine max
tggaggcttgctgtggaagcacacaacatctttggctttgagaccattcctgaagagtgcgttgaagcaacaaaggaatacatccatggcgaacaatatagatcagactccaaaacagttaaccaacaagcttacttttatgccagagacctcgaagtccatcccaaggacacatttgtgttcagtatagatggcaccgtactctctaatattccatactacaaaaaacatggatatggggtggagaaatttaactcgaccttgtatgatga

SEQ ID NO: 190193 - DNA, 275 bp, Glycine max
gacagctctagtcacaggaggcacccgaggcatagggcatgccattgttgaagagttagctgagtttggagcaactgttcatatatgtgcacgtaatcacgatgatattgataaatgtttagaagagtggaaaaacaagggacttaatgtgactggttcagtatgtgatttactatgttctgaccaacgtaaaagattaatggaaattgttggctccatctttcatggaaagctcaatattctagtgaacaatgctgctacaaatataacaaaga

SEQ ID NO: 190194 - DNA, 276 bp, Glycine max
gcgagcggccgcctcgagccgaatcggctcgaggaattgagaaaatagatttgcgtacagatctgatgagttactgattgagatcttcgggcgtgaggagcatatcggcgctggggtttctgtagaacatgaactcacgctctccgtcggcgcgtagggtcacgaacgccagcgcggtgcgcgcgccctggtcgaagttgatcccgtcggatcgcacgtcgttctccttcaggattccagccagcatgtgcccgaactcgtcgtcgccgagctttc

SEQ ID NO: 190195 - DNA, 275 bp, Glycine max
ctcgagccgctcgagccggttttggagggagagaaagaaaaaaggggaatttcaatggcgtcaagggtttactctgaaggcgaaggggaagagttcaaagggatcgaaggctgcggaagatcgatccgcgagcgagtgcctgaaggagtggacgacatgggcgatgcgaaaagcgaaggtcatcactcactacggtttcatccctttggtcatcgtcatcggtatgaactctgaccccaagcccccactttcccagcttctcagccccgtctgat

SEQ ID NO: 190196 - DNA, 264 bp, Glycine max
gaaccttatggtgacttgaatactgaagcggacaggaaattgggtcaactagtctcagagaaatatggcacagagttctatatccttcaccggtaccctttggctgtaaggccattctatacaatgccttgctacgacaatcctgcatacagcaactcgtttgatgtctttattcgaggtgaggagataatttcaggagctcagcgtgttcatgtgccagaatttttggaacaacgtgcagcagcttgtggcatcgatgtcaaa

SEQ ID NO: 190197 - DNA, 213 bp, Glycine max
gaaaaaactgtaggtggtctttctgctttaagaaatttgggaaaatcaacaaaagacaatactattggaactgctagtaatccaattcatatggtggctagagaaggtgggaatataaaagatcagctatggcgtacatttaggttcattgtggtgtcctttttcatgatttctggtgtaggagcactcattgaagataaaggaattagtaaa

SEQ ID NO: 190198 - DNA, 228 bp, Glycine max
tctcgagccgaatcggctcgagcacatagctagttgtttaaagtgattgataaagaaagaagactaatggcaaactttccagatgttgacatggggaaacttaacaccgaagagagagcagcagccatggagattataaaagatgcctgtgagaactggggtttctttgagttggtgacccatgggatatccatggagttgaggcaccttgtggagaggctcacaaaa

SEQ ID NO: 190199 - DNA, 239 bp, Glycine max
gccagtagtcatatgcttgtctcaaagattaagccatgcatgtgtaagtatgaactaattcagactgtgaaactgcgaatggctcattaaatcagttatagtttgtttgatggtatctactactcggataaccgtagtaattctagagctaatacgtgcaacaaaccccgacttctggaagggatgcatttattagttaaaaggtcaacacaggctctgcctgttgctttgatgatcca

SEQ ID NO: 190200 - DNA, 267 bp, Glycine max
cacttgcaaactagttttgttttgggaacatcatcacattacattagattggtggtaatggcagcgtcactacaagcagcagctactttcatgcaacccaccaagttgagcaggagcaacactttgcagcaaaagtctactcagtccatttccaaggcttttggtttggaacctgttggagctaaaaaggtcacatgctcccttcaggctgatcttaaggacttggctcacaagtgtgttgatgctaccaaaattgcaggattcgcc

SEQ ID NO: 190201 - DNA, 237 bp, Glycine max
ggctaggggattgaagaagcatctcaagaggctcaatgctcctaagcattggatgcttgacaaactgggtggtgcatttgcgcccaaaccctcatctggaccacacaaatctagggagtgccttcccctcatactcatcctacgaaaccggctaaagtatgctctgacttaccgtgaagtcatcgctattctgatgcagagacatgttcttgttgatggaaaagtcaggcctgacaa

SEQ ID NO: 190202 - DNA, 273 bp, Glycine max
ctgtactacactatgcaaactctttttcctctgcattgggacccgtgcctgctccccctgttgataaatatgactttgactggtccatgaagcaagctagaacctacagatggaatctgacagcaaatgctgctaggcctaacccacaagggtcattccattatgggaagattactcctacaaaagtaattaagttggccaattcagcacctttgatcaatggaaagctccgttatgctgttaacagtgtctcctatgttaaccctgacaccc

SEQ ID NO: 190203 - DNA, 275 bp, Glycine max
aaacattgcaggatttgcaacttgattaccttgacctctatctgatccactggccagtgcgcatgaaaagcggatcagttggattcaagaaggaatatctcgatcaaccggacattcccagcacatggaaagcaatggaggcactctatgactcaggcaaggcacgagccataggagttagcaatttctcttcaaaaaagcttcaagatctcatgaatatagcaagagtgcctcctgctgttaaccaagtggaattgcacccaggatggcagcag

SEQ ID NO: 190204 - DNA, 276 bp, Glycine max
atgacgaccaggttcaagaagaacaggaagaagagaggtcacgtcagcgccggacacggccgtatcggaaagcaccgcaagcatcccggaggtcgcggtaacgccggtggcatgcatcaccaccgtatcctcttcgacaagtaccatcctggtttcttcgggaaggtaggcatgcgctacttccacaaacttcgcaacaaattctacaatccgatcatcaacatcgacaagctgtggtccctcctcccccaggaggccaaagacaaggccaccgcc

SEQ ID NO: 190205 - DNA, 250 bp, Glycine max
caggcattggttgatgccattaaagagttacaatctcatggaaatgttatgaaactggctgaagatcaaaagaggcaaaaagaacaactccatgctaaaatcattcagcttcaaaaacaacttgatgtgaaacaagagctggagttggagattcagcaattaaaaggttcattaagtgtgttgaagcacatggaagatgacgaagatgctgaaattctgaacaaggtagatacactacaaaaggatttaa

SEQ ID NO: 190206 - DNA, 197 bp, Glycine max
ctaagttatcctcataaatacactctaattaggtggcaagataagtgtctaaccttagtaacattgccacatattgtgttcattttggaattgtgccactaaaattctattcaattcatctatggctgcctcttcttatgctatgcaatcaatcctggcaaaccctttgatccgaatttccagcgggtctagggtga

SEQ ID NO: 190207 - DNA, 265 bp, Glycine max
ctcgagccgtcagaggctccccctaacttctggggccacaccccggaagaagaatactacaactcccaaggcgttcgcaacaccaagtcccacttcgaaacccccaacggcaaaatcttcacccagtccttcctacctctcaacctccaaccccaccaagtcaaagccaccgtctttatgacccacggctacggctccgacaccggctggctcttccagaaaatctgcatcaacttcgccacctggggctacgccgtcttcgccg

SEQ ID NO: 190208 - DNA, 242 bp, Glycine max
gcaggatgtgtcgttgggagcgaacaagttccccgagagacagccaattgggacggcggcgcagagccaagacgacggcaaggactaccaggagccggcgccggcgccgctggttgacccgacggagtttacgtcatggtcgttttacagagcagggatagcagagtttgtggccacttttctgtttctctacatcactgtcttaaccgttatgggactcgccggggctaattctaagtgta

SEQ ID NO: 190209 - DNA, 239 bp, Glycine max
tactcgagccgattcggctcgagtgcatttgtatgttgggtgttcttactgtctaacacaaagaagatacagttcactcaacgaatgcctttgggttccgaactccatatggggaaggagcgttgttgtttccgaggtctcgatcatttacatggacccacttttcattccatttgtgggaatttgatgatctataaaccgtccctaacgaatgatcgcctcatgtttgagcttgatga

SEQ ID NO: 190210 - DNA, 266 bp, Glycine max
ctcgagccgaatcggctcgagggaagctctagcttgggtagcgaactacaatggcgagaggactaaagaagcatctgaagaagcttaatgccccaaagcattggatgcttgacaaactgggtggtgcatttgctcctaagccctcatctggaccacacaaatcgagggaatgcctgccactcatactcattttgcgaaaccggctgaagtcatgctctaacataccgtgaagtcattgccattctgatgcagcgacatgtcctgtt

SEQ ID NO: 190211 - DNA, 240 bp, Glycine max
ctcgagccggatgcctcccgtcgctcctcgatccggcgatgacatattcgccaacgtcgaacgtgtcaatgcggactgtttactttgacgtatggcgcaattgtgcgtcaattgctcacggatctggaagaggttgaggaggttaacgagcagcttgatcaaatgggttacaatattggaatccgcttgattgctgagcttttagctaagtctaatgtctcaagatgcaacgatttcaga

SEQ ID NO: 190212 - DNA, 200 bp, Glycine max
  unsure (1)..(200): unsure at all n locations
ggcatttgcacaactattgcgagctccacatgatgatgcccanatgataattagagaacgtgttccggttcctagattggtagtgtgtgaccaacatggttcccaggctagattcttgttagcaaaactgaatccttcagcaacgtataacaatgcacatgagatggctgctggttcagatgtaatctgtactgatgatg

SEQ ID NO: 190213 - DNA, 183 bp, Glycine max
gcgctaagtcgctccgtggaagacgtattcgaggatttcaagggccgaagagccggcatcatcaaagctcttaccaccgatgttgaagatttctacagccaatgtgatcctgagaaggagaatttgtgcttatatggatcacctaatgagcaatgggaagtcaatttacctgttgaaaaagtt

SEQ ID NO: 190214 - DNA, 170 bp, Glycine max
ggaagtggtagaagggttcaagttcgaacagaggcacgggaaagagcgcgtgagagtggcgcgcgtgtggaagacgaggcaggggcagcacttcgttgtggagtggcgcgtgggcatcactctcttctcagactgcgtcaactcgtatctccgctatgacaactctgaca

SEQ ID NO: 190215 - DNA, 267 bp, Glycine max
gctacggtgggagaagggaaggtgagtactaatggtcatggatggtgcaaatcagggccaggctatgcttccccactggaagccatttctggtcccagagagtctctcatttatgtaacctctgtctacacagggaccggaatagagaagccagactatttggcgacagtggatgtggatccaaactctccaacttattccagacgcatccataggcttcctgttccttatttaggtgacgaattgcatcacacaggctggaattca

SEQ ID NO: 190216 - DNA, 248 bp, Glycine max
gtgaattggaacattcttcactcttgagggaattaagagacaagatatggcaattggtttcatggaggtgcagcttgtcaaagcaaaaggcctgcataacgctgatatctttggtgaaatggacccatatgttctgatacagtacaatgaccaagagcagaggagtagtgtcgctattggtcagggcacaaacccagtatggaatgagaaatttatgttcaaagttgaataccttggatcaggtgata

SEQ ID NO: 190217 - DNA, 234 bp, Glycine max
gtaattggaatgagtacaatctaaatcccttaacgaggatccattggagggcaagtctggtgccagcagccgcggtaattccagctccaatagcgtatatttaagttgttgcagttaaaaagctcgtagttggaccttgggttgggtcgatcggtccgcctccggtgtgcaccggtcggctcgtcccttctgccggcgatgcgctcctgtccttaactggccgggtcgtgcctc

SEQ ID NO: 190218 - DNA, 236 bp, Glycine max
tctcgagccgaatcggctcgagcttaaagagcatgttatcaagcctagtcattcctgagaagtacctggatgagaagaccatcttccaccttaacccttctggccgttttgtcattggtggccctcatggtgatgctggtctcactggaagaaagatcatcattgatacctatggtgggtggggtgctcatggtggaggtgccttttcagggaaggaccctaccaaggttgacaga

SEQ ID NO: 190219 - DNA, 236 bp, Glycine max
agatcttgtagcaatggcgagcgctcccactccacgcgaagagttcgtgtacatggcgaactggcggacaggccgagcgctacgaggagatggtggagttcatggagaaggtctccgcctccgccgagagcgaggagctgaccgtggaggagcgtaacctcctctccgtcgcctacaagaacgtgatcggcgctcgccgcgcctcctggcgcatcatctcctcaatcgagcagaag

SEQ ID NO: 190220 - DNA, 233 bp, Glycine max
gttgaggagttgaggaggttaaagaagaggagggctactaaaaagaggattttgaaagagaatgaaccgaaacccgatccttattggttgagaacgttttttagttttgctcctgaggaggctgctaaactacctgattatggccattttgggattttgagtcctttgcttgctaatgtttgtcttaatgagttggatcactggatggaggaaaagattgttgagtttttcag

SEQ ID NO: 190221 - DNA, 232 bp, Glycine max
cttccttacaatcaaaaccaacaacaactatggcaagttatcaaaagcactacgatgatcagggtcgcaaggttgacgagtatggcaacgttgagaagcaaaccgacgaatacggcaaccctgttcatgctgctagtgtcacctatgtagccaccagaactgctgctggtggttacagtgatgacattaataagcaacatgataccaccaatgcctacggcgtagacactgg

SEQ ID NO: 190222 - DNA, 232 bp, Glycine max
aaatggcacctgcaacactgtctctgtctctcctcctcctgttctcactcagcatcgccgtaaccgttagatcgagcgactacgactacgattgtgtgtacactgcatacgttagaaccggttcggtgttgaagggcggaacggactctaagatcgggctgaagctgtacgacaagtacggctactacatctacattaaaaacctcgaagcatggggcggcttgatgggcaa

SEQ ID NO: 190223 - DNA, 232 bp, Glycine max
ctcgagccgattggtttttcttcttccatttctcttcctttctaagcttttttcgattacccatttggagattctgtcctaatggctcttgctccttccaaagtttcctccttttccgggttttctcccaaacccagtgttggggatgctctgaaaaacccaacttgctctgtttctctgagctttgcgaatgtgaaacttggaagcagaattgttagggtttgtgcctcaa

SEQ ID NO: 190224 - DNA, 235 bp, Glycine max
gttgcattgtagaaggcgatggccgcgcgagctctgttgaccagaaaaaccctagccaccgtgctccgcaacgacgcgaacccataatcggagttggcataacagcagcggctactcattcacgcgggttgcacgtgtacacgctacccgatctggattacgactatggcgcactggagccagccatcagcggcgacatcatgcagctgcaccaccagaagcaccaccagactta

SEQ ID NO: 190225 - DNA, 244 bp, Glycine max
tttccacatcttggatatctttggctaaaagattgaatattgtgttattccttctagtagtcaaggggaacaatgaatgcactagcagccaccaacaggaactttaagttggcctctaggcttctgggattggattcaaagcttgagaaaagtttactgattccattcagggaaatcaaggttgaatgtaccatacctaaagatgatggcaccttgcaatcttatgtagggttcagggttcaac

SEQ ID NO: 190226 - DNA, 232 bp, Glycine max
ctctctctctctctctctcttttctgagtcacaaaatattgtttatgtacaaacattaacaccatggcagatgtcctgagtgaagaacagattggtgagatcaaagaagcctttggcttgtttgacaaagatggagatgggtgcattactgtggaagaattggccactgttattcggtcattggatcagaaccccacagaagaagagctccaagacatgataaacgaggtcg

SEQ ID NO: 190227 - DNA, 231 bp, Glycine max
ctcgagccgctcatatactgattcagttctatacataaccatcgagatttactatcaaaccagaaattctcaaaatctcttcacctctgtgatgaccatggaatacagaaccttagaactcaacatcatatccgcaaaggacatcaagaacgttaacctcttctccaagatggacgtatacgccgtcgttacgctctccggcgaccctctccaccctcagggcgccaccac

SEQ ID NO: 190228 - DNA, 229 bp, Glycine max
gcgaaaccgacggtgaagattttgtttgaaggcacaaagttggggattcagccatctcctgtggtggcagcgtttagctctagaggacccaactcgatcaccccgcagatccttaagccagatcttatcgcgccaggtgtcaacatcctagccgggtggtccaaggcggtgggacccaccgggttacccgttgataacaggcgcgtggatttcaacatcatttctggca

SEQ ID NO: 190229 - DNA, 230 bp, Glycine max
gttttgaagaggaagcgacccgctaggttggacatacccgtttcctctctcacctttgcggttccgcccacgccctccgcggcggcgcgtgacttggtcgaggctgaggaagatgggtttggggtgtactgcaagagaggcaggagggagtacatggaggatcgttacaccgctgggaataatcttcgcggagaacacaaactggctttttttggcatatttgatgggca

SEQ ID NO: 190230 - DNA, 232 bp, Glycine max
ggcgcggcacccacacacacagttcgtcggaatgggaagggtgattcgcgctcagcgtaagggtgctgggtcggtgttcaagtctcacactcaccaccgcaagggtccggcgaggttccgcagcctcgacttcggcgagcgcaacggctacctcaaggccgtcgtcaccgacatcatccacgaccccggtcgcggcgcccctctcgccaaggtggcattccgccaccccttc

SEQ ID NO: 190231 - DNA, 234 bp, Glycine max
caagaatccccttgatcttctccctccaagtccgatgatactggatgagtggaaaagactctactcaaacactaaaaccaacttcagggaggttgctatcaaaggattttgggacatgtatgatcccgagggatactctctctggttttgtgattacaaatacaacgacgagaatactgtttcttttgtgacattgaacaaggttggtggatttcttcagcggatggatttggc

SEQ ID NO: 190232 - DNA, 229 bp, Glycine max
actttacccaatcctaacactttcttctctctttttccttcttcctcgcatcaatggagttggacggcgttctcctcggcatgtgcaaccctctcctcgacatctctgccgtcgtcgacgacgctttcttggaaaaatacggtatcaagttgaacgatgcgattctcgccgaggataaacacaaacctatgtatgaagaattggctaacaatcctaatgtggagtacat

SEQ ID NO: 190233 - DNA, 229 bp, Glycine max
cttcttttgttgttctgtgtttgtgtttgtttttttctctcacctgaaaatgtcttgctgcggtggtaactgtggttgcggaagctcctgcaagtgcggcaacggctgcggaggctgcaagatgtacccagacttgagctacactgagtcaaccaccaccgagaccttggtcatgggagtggcacctgttaaggctcaatttgagggtgctgaaatgggtgtgcccgct

SEQ ID NO: 190234 - DNA, 227 bp, Glycine max
gctggctgttgcattaacacttatcggaggtgtgcaacatgttgatgcttctggaactagggtaagaggggagtcccacttactcttggttggtgatcctggcaccggaaaatctcagtttcttaaatttgctgcaaaattgagcaaccgttctgttattaccactgggttgggaagcacaagtgcaggattgactgttactgcagtgaaggatggaggggaatgga

SEQ ID NO: 190235 - DNA, 228 bp, Glycine max
gtccccgcctaatcatctgaggccgtagtcagcctccatctttcagattcgtaagtaactcagtgagtgctttccttttcccatgtctttcttgattggtaaacccaaccagcgatttacaacaaacaagtctttcttcattgcttaaagtaagtaaagaaagcggatcacaaagactgttcatatatatatgaaatatatctgtgttgggaaggattccaaggatgt

SEQ ID NO: 190236 - DNA, 231 bp, Glycine max
agatggtgcggttcatccgccaggaagctgaggaaaaggccaacgagatctctgtctccgccgaagaggaattcaatatcgagaagctgcagttggtcgaagccgacaagaagaagatcaggcaagaatacgaacgcaaagagcgccaagttgaaattcgcaagaagattgagtactcaatgcagctgaatgcttctcggattaaagttcttcaagctcaagatgacgtga

SEQ ID NO: 190237 - DNA, 230 bp, Glycine max
ctaatcacctggttaatttcttcacatagagctatcaagatccaacgttaacatgaagaatgttttagtaaggtcagctgcgcgagctctgcttggcggcggtgggcggactactaccgccagctctcaacggcggcgatcgtggaacagagacaccagcacggtggcggcgcgtttggaagcttccacttgcggaggatgtccactcttccagaggtaaaggatcagca

SEQ ID NO: 190238 - DNA, 229 bp, Glycine max
ggggaacaagttccgcatgtcgctgggtcttccagtggcggcgacggtgaactgcgccgacaacacgggggcgaagaacctctacatcatttcggtgaaagggatcaaaggccgtttgaaccgtcttccctcggcctgcgttggcgacatggtgatggccaccgtgaagaagggaaaacccgatctgaggaagaaggtcttgccagctgtcatcgttcgccagcgcaag

SEQ ID NO: 190239 - DNA, 229 bp, Glycine max
ctcgagccgcttttacgtgcccatcaaacaaataagctctccactctatttcagtcaccaatcaccaatgactccttctttcactaacgtcaaaatcttctcttctctcgtcctagacggattcttcaacgctctcaccagacgcgggtacgcggtggcatcacaaagcgcaacaaaggaaggagtgggctttatgagcggcaagatggcaccaaagtcaggggaagac

SEQ ID NO: 190240 - DNA, 228 bp, Glycine max
ctcgagccgcgaaaatggcgttggctttcgacgagttcggaaggccgttcataatcctgaaggagcaggagcagaagagcagactccgaggattggacgctcagaaagccaacatctccgccggcaaagccgtggctcgcatcctccgaacctccctcggccccaaaggcatggacaagatgctccagagccccgacggcgacgtcaccatcacgaacgatggagcca

SEQ ID NO: 190241 - DNA, 228 bp, Glycine max
aaaaacccttagccaacacaaccatcatggccacctctgctattcagcaatcagcattcactggtcaaactgctctgaagcagctcaatgagttcgtccgcaagaccggtggcgccggcaaaggtcgcactaacatgcgccgcaccgtcaagagtgctcctcagagcatttggtatggccctgaccgtcccaagtacttgggtccattctcggagcagattccatcat

SEQ ID NO: 190242 - DNA, 231 bp, Glycine max
gccctcgagccgaatcggctcgagctttgaagaaagaagggtctttgcacgattttggagatgtcactgctctcagatctcatcaacacttaacctctccgataccaccgagaaggtgatcgcagagtacatatggatcggtggatcaggaatggacctgaggagcaaagcaaggactctcccaggaccagttagcgacccttcagagcttcccaagtggaactatgatgg

SEQ ID NO: 190243 - DNA, 227 bp, Glycine max
agattagacagattcgtaggaagatgagggagatcatgaccaaccaggcaacagcatgtgatttgaaggagttggtccggaagtttattcctgagattattggaaaagagatcgagaaggcaacatctagtatttaccctctgcagaatgtgtttgttcgtaaagtcaagatcctgaaagctcctaagtttgatcttgggaaactgatggaggttcatggagattac

SEQ ID NO: 190244 - DNA, 229 bp, Glycine max
caagaatcaaggaaccaaccaaccaccccatttcagctctctctggatattgtaatggaagcaggtttagaatcaatgggagtatcagaggcttggaaggctcatgtgggcatggctctggtgcagctattctatggtggctaccatgtcctaaccaaagtggcacttaatgttgggatcaaccaactagttttctgcttttaccgcgatttccttgccttcactattg

SEQ ID NO: 190245 - DNA, 231 bp, Glycine max
ggttgcccctttttctgtacaactactccactcaccaactccatggtatctttgaggctaacaataatgaagccaccaagactgctgcagagaagaaattcaaaacactgccaccatcagagtctctgcctaagaatgaaaccattggaggctacatctttgtttgcaacaacgataccatggcagagaatctccaaagacagctctttggtctgcctccacggtacagag

SEQ ID NO: 190246 - DNA, 230 bp, Glycine max
atttgaagtcaagtgttgttgctgtttttatcgccaatgaagagaattctgcgataactggtgttggtgtggatgcacttgtcaaagatggcctcctcaataaactcaaggatggccctctgtattggattgacacggcggataaacaaccatgcgttgggactggtggtatgataccttggaaacttcacgtcaccgggaggctctttcatagtggattagctcataaa

SEQ ID NO: 190247 - DNA, 232 bp, Glycine max
ggctccggctcttgccgctaagaagaagcctgagaaggtcacgaatccgttgttcgagaagcgtccgaagcagttcggaatcggaggggcgttgcctccgaagagagacttgactaggttcgtgaagtggccaaagaatgttcaaattcagaggaagaagaggattctgaagcagaggttgaaggttcccccagctttgaaccagtttaccaaaactcttgacaaaaaccta

SEQ ID NO: 190248 - DNA, 263 bp, Glycine max
gtcacctacgtattctcgtcattctgctcgagacgaaaccctcttcatcttgttctatctgtgacgagcatcatggcctcaagagcagtgttattgttggctatgtgtgtgcttccggcgatggttgtggccattcgcccagcaaagaaccctttttgcgtgaagggtcgtgtctactgtgacccttgccgtgctggttttgagacctcagctaccacctacattgctggtgctgagattatgttgcaatgcaagagcagggt

SEQ ID NO: 190249 - DNA, 219 bp, Glycine max
ctcgagccggatgcctcccgtcgctcctcgatccggcgatgccatattcgccaacgtcgaacgcgtcaatgcggagctgtttactttgacgtatggcgcaattgtgcgtcaattgctcacggatctggaagaggttgaggaggttaacgagcagcttgatcaaatgggttacaatattggaatccgattgattgatgagtttttagctaagttctaatg

SEQ ID NO: 190250 - DNA, 227 bp, Glycine max
caacaagtctgcttggcctgatcctcgacagttcctagaggaagcaagggcagtggggcagctgaggaatgagcggttggctaacttggttggttgttgctgtgaaggggaagagagattgcttgttgctgagtttatgccaaatgaaactctctccaaacatctctttcactgggagagccagccaatgaaatgggcaatgaggctgagagtggccttgtatttag

SEQ ID NO: 190251 - DNA, 191 bp, Glycine max
atatagaagatgttccttatttctgtctgccagcaaacgatttggttgatgttattgccccatcttgttacagctgttgtgactatacaaatgctttagctgacttagtggttggatatatgggagtgccattaatatctggaatctgcatgacacaacatccacaatatgtaacagtaaggaatgatcgt

SEQ ID NO: 190252 - DNA, 225 bp, Glycine max
aaagtggtgatcaatatgtcaaagaatccaaaagttttctttgatattctaattggaaagatgaaagctggacgagtagtgatggagttgtttgccgatgcaaccccaaaaacagctgaaaacttcagggctctctgcactggggaaaaggggattggacgatctgggaaacctttacactacaaaggttctgtatttcatcgtattattccagaatttatgtgt

SEQ ID NO: 190253 - DNA, 226 bp, Glycine max
ctcgagccgctcgagccgctaaggtcgtagagtgtgactgccatgcttgctatatacgtgttacttcttctgcgcaaaaaacgcaaacaaaggcgttacaaacgactaacgagagacggaaagagtctgggaaatcatctgttctgttggatgtaaaaccatgggatgatgaaactgatatgaagaagcttgaagaatcagtgagatctgttcagatggaagggtt

SEQ ID NO: 190254 - DNA, 226 bp, Glycine max
aaatcacatagctagttgtttaaagtgagagaaaaagaaagaagaaaatggcaaactttccagttgttgacatggggaaacttaacaccgaagagagagcagcagccatggagattataaaagatgcctgtgagaactggggtttctttgagttggtgaaccatgggatatccattgagttgatggacactgtggagaggctcacaaaagagcactacaagaagac

SEQ ID NO: 190255 - DNA, 226 bp, Glycine max
gtccctccttcctctgccttataattcttgtgacccttttggctggtagcattgaaagtgcaccagcaaacgtgaagccaagccattatgctgcacccttcaataggagtgtttttccttctggttttctatttggaataggctctgcagcttaccagatagaaggagcagcagctatagatggcagaggaccaagtatatgggacacctatactaaacagcaacc

SEQ ID NO: 190256 - DNA, 225 bp, Glycine max
gtgtggttgcgcctctgcttgcaagagtgaaaaccttctcttacctccctctcaagtttcaagagatttcatcatggctccaaagaaggacaaggctccaccaccttcctccaagcccgccaaatctggcggtggcaagcagaagaagaagaagtggagcaagggaaagcaaaaggagaaggtgaacaatatggtgctgtttgatcagggcacctatgacaagct

SEQ ID NO: 190257 - DNA, 228 bp, Glycine max
ggacccttatctctctctctctcccgaattattgttcgttcgacccttttacttagtattccctgtctccggtattcgctccctttttttctgcattctggttttacttagatctctgtcccgcaccagatctggtgtagggtgagagggttgggttcattaattttgtatcaatcttccttctgagcggtaggcgtggggataccagagtcttttcgggaagcaaga

SEQ ID NO: 190258 - DNA, 228 bp, Glycine max
atttctctcgcgtcttcattcctctcattccctctgaattcttctcactcttcagatctctctcccttccttccatcccaaccacaaggttgctgagaagacataaaaaatggtgaagatttgctgcattggagctggctatgttggtggcccaaccatggctgtaattgccttgaagtgtcctgagatcgaggtggtcgtggtggacattgctgcaccgcgaatcaa

SEQ ID NO: 190259 - DNA, 228 bp, Glycine max
  unsure (1)..(228): unsure at all n locations
ctcgagcggctcgagcggctcgagccgcctagcttaccttttgcactttcaagatgcaaatcactgntaagacactcactggtaagacaatcacccttgaggtggagagttcagataccatagataatgtaaagtccaaaattcaagacaaggaagggatcccaccagaccagcaacgtctcatttttgctggcaagcagcttgaggatggacgtacacttgctgatt

SEQ ID NO: 190260 - DNA, 269 bp, Glycine max
gtatgaggaggctgaagaggaagcgccgaaagatgagacagagatccaagtagtgcgttaaacctagtttgtttccgttgcttttacaattgcttaatgttgtcaaataggacacccagttgttagtggcactggtctctcctttttgatgttttgatacattttgttggattttatttcgtcttatgttcttagctgaaaacaatgctgttactgcgtttgcgaatcaacaggatatcttgattgcatttctgtatctctctttgcta

SEQ ID NO: 190261 - DNA, 259 bp, Glycine max
cgacaatgctggagtaagttcccatgtgactccagtagccttgattatggatggtaccagccttgtgcatattcttgacagtgaacttgaagaacagctatttcaacttgcaagtaggtgttctgttgttctatgttgccgtgtcgctccgctgcaaaaggctggaattattgcccttgtgaagaatagaacatctgacatgacactagccattggagatggtgctaatgatgtctcaatgattcaaatggctgatgtt

SEQ ID NO: 190262 - DNA, 264 bp, Glycine max
attcctggctctagaaaataaaaccttaggacccatcacagacaaagaagcaattaattcaccagctacatagtttttctatttgaagtgctacaaacaatggcagctactcaggaagatgtgacgcttttgggagttgttggaagcccgtttgtgtgcagggtccagattgccctcaaattgaagggaattgaatgcaaatttttagaagaaaatttggcaaacaagagtgatctacttctcaaatccaaccccgtttacaag

SEQ ID NO: 190263 - DNA, 268 bp, Glycine max
tggaccgtgatgagtttctgggtcccttctgaaacacttacgaagccgaagaaaacaaacgagaagcccagaatcagctcgaagcccagcaggcccgcggtggttctggtgcacggctttggcgccgagggaatcatgacatggcagtatcaagttggcgccttgacaaaaaaatacgcagtctacgttcctgacctcctcttcttcgggggctccaccaccgacaaaccccaccggtcgccggcgtttcaggcgcagtgtgtggtgg

SEQ ID NO: 190264 - DNA, 264 bp, Glycine max
ctcaatttggtacttgaatatgttcctgaaacagttaatcgtgtgatcaaacattacaacaagttaaaccaaaggatgccgctgatatatgtgaaactctatacataccagatctttagggcgttatcttatattcatcgttgtattggagtctgccatcgggatatcaagcctcaaaatctattggtcaatccacacactcaccaggttaaattatgtgactttggaagtgcaaaggttttggtaaaaggcgaaccaaatata

SEQ ID NO: 190265 - DNA, 264 bp, Glycine max
gcaaaagcaagaagaactagtctaagcagaaatggcctcttcagtgatggcatctgtggccctcaaacctgcccctttcactgttgagaagtcctcagttagaggccttccctccctctcaaggaactcctcttcattcagagttgtggccagtggtggcaagaagatcaagactgacaagccttatggaattaatggtggcatggctttgagggaaggagttgatgcatctggcaggaaaggaaagggaaagggcgtttacca

SEQ ID NO: 190266 - DNA, 157 bp, Glycine max
ggatacctaggcacccagagacgaggaagggcgtagtaagcgacgaaatgcttcggggagttgaaaataagcgtagatccggggattcccgatataggtcaacctttcgaactgctgctgaatccacgggcaggcaagagacaacctggtgaactga

SEQ ID NO: 190267 - DNA, 262 bp, Glycine max
atgacaccctcgccggtcctcgcccggagaacggcctcggcaagctccgaaagcaccactccttcgctttccgatctgcctccgccaaggaatcagacagcggaagcgtgaaatcgtacggtgaggattcgcccaagaatgcggtgagagtgacgcgaagtataatgatcgtgaaaccacctggtaaccagagtcccagtggatccgctccggcttcccccgccggttctactcctccggtgtctccgttttcgggtaagga

SEQ ID NO: 190268 - DNA, 267 bp, Glycine max
gcgattcgctcttctcttggagaagtgaaaaccagaagtacgaacgtaagagaagagcgatttagaagtgagagaagatggggttgtcgttcacgaagctgttcagcaggttgtttgcgaagaaggaaatgaggattctgatggtaggtctcgatgctgctggtaagacaaccatcttgtacaagctcaagcttggagaaatcgtcaccactatccccaccatcggatttaatgttgagactgtggagtacaagaacatcagcttca

SEQ ID NO: 190269 - DNA, 262 bp, Glycine max
aagacctgcttccatctaattaatgccctctcaggagttggtattatttccatgccttatgcactggcatctgggggatggttaagcatatcactactatttgtgattgccattgcttgctgttatactggtatgttggtcaaaagatgcatggatatggaccctgacatcaagaattttcctgacataggtcaacgtgcatttggagacaaggggaggataatagtatcaattgccatgaattctgagctcttcctagttg

SEQ ID NO: 190270 - DNA, 262 bp, Glycine max
aatcctaacactttcttctctctgttttccttcttcctcgcatcaatggagttggacggcgttctcctcggcatgtgcaaccctctcctcgacatctctgccgtcgtcgacgacgctttcttggaaaaatacggtatcaagttgaacgatgcgattctcgccgaggataaacacaaacctatgtatgaagaattggctaacaatcctaatgtggagtacattgctggaggtgctactcagaattcaatcagggttgctcagt

SEQ ID NO: 190271 - DNA, 265 bp, Glycine max
ctcgagccgccacaatgctcttcctttacatcacagtgctcactgtgattggttacaagagacagagtgatgtaaaggctgggggtgatgtgtgtggtggagttggcattcttggcattgcttgggcctttggtggcgatgatcttcattctggtgtactgcactgctggaatctcagggggtcacataaacccagcagtgacatttgggctcttcttggctcgcaaggtgtctttgattagagcaataatgtacatggtggctc

SEQ ID NO: 190272 - DNA, 264 bp, Glycine max
cgtgagttgcaaaaatgaagacgattctttccaccgagaccatgaacatcccggacggcgtgagcatcaaagttcatgccaaggtcatcgaagttgagggcccccgcggaaaattggtgcgagacttcaagcatttgaatctcgattttcagctcattactgacgaaaacggtaaaagaaagctgcaaatcgacgcgtggtttggttctcggaaaacatccgccgccattcgcaccgccttgagccacgtggagaatcttatca

SEQ ID NO: 190273 - DNA, 263 bp, Glycine max
gtgctttatgctcaggcaatggtgtgactgtggttataactgaccaaggctcaggtcataacactgacttcattcttagccaacgagcctttgggagaatggctctgaacactgacgcagctgcttctctattagctcttggtgttgttgatattcagtatagacgtgtttcatgcagctacccaaacaaaaacattacagttaagatacatgtctcatgcaacaaccctcactatttggcttttgtcatatggtttcaacaa

SEQ ID NO: 190274 - DNA, 263 bp, Glycine max
tgcagatcaaggcttctgctgaacagttctatgatgttttttgcaacaagccacacactattgccaacatttcaccagaaaatattcagtcagttgaagttcataaaggtgaatggggcaaagagggatcaatcgtctcctggaactatttacatgagggaacagtttgtgtagccaagcaagtgcttgaaggcatagacaaggaaaataacaaaatgacaatgaaggtcatagagggtgacgtgctgggactctacaagagc

SEQ ID NO: 190275 - DNA, 220 bp, Glycine max
agcacccctcacattaccttgtgtcagcaactactttgactcctttaccataccattacaataattatcaaatctaaccagtaaaaatggtgaccgtggaggaaatccgcaacgctcagcgttcccatggacccgccaccatcttggccttcggcaccgccacgccgtccaactgcgtctcccaagccgattaccctgactactacttccgcacaacata

SEQ ID NO: 190276 - DNA, 259 bp, Glycine max
ggctacccttattgctccagcaaccactctccccaagaagatgctgaagctctcagaaaggcttttgaaggatggggaactgatgagaacactgtcatagtaattttgggtcatagaactgtgtatcagaggcagcaaatcagaagagtttatgaggaaatttaccaggaggatcttgtgaagcgcctagagtctgagatcaaaggagactttgagaaagccgtgtaccgatggatactggaacctgcagatcgtgatg

SEQ ID NO: 190277 - DNA, 257 bp, Glycine max
gttcctatctctggttttgagggagacaacatgattgagaggtccacaaaccttgactggtacaagggtccaactctgcttgatgcacttgaccagattagtgagcccaagaggccctctgacaagcccctcaggcttccccttcaggatgtgtacaagattggaggtattggaactgtgccagtgggacgtgttgagaccggtgtcttgaagcctggaatggtggtgacttttgcaccaactggactgacaactga

SEQ ID NO: 190278 - DNA, 256 bp, Glycine max
ccgacatagtgttcgtctccgtcaacaccccgacaaaaactcgtggtcttggagccggtaaggctgcagatttgacttactgggagagtgcagcacgcatgattgctgatgtctccaagagtgacaagattgtggtggagacatccactgtccctgtgaaaactgctgaggccatagagaagattttgactcacaatggaaagggaatcaagttccaaatcctttcaaaccctgaattccttgctgagggaactgc

SEQ ID NO: 190279 - DNA, 256 bp, Glycine max
cacgttagcacaaactatcatggccacggcaacagcagctgccacctcgtcctttatggggacgcgtctcctggaggctcactccggggcggggcgagtgcacgcccgattcggcttcggcaagaaaaaggctcccgccccaaagaaagcctccaggggatcgggccgagacaccgacagacccctttggtatccgggcgccaaagcgcccgaatatctcgatgggagtcttgtcggagactacgggttcgatccg

SEQ ID NO: 190280 - DNA, 262 bp, Glycine max
ggccgatgaaaagacgtttgagggaagttttcaggcattttgatcatcatgctctggaattgttggagaagatgttgacacttgatccggctcagagaattactgcgaaagatgcacttgatgctgagtatttctggacagatccattaccgtgcgatcccaagagtttacccaagtacgaatcatcacatgagtttcagacaaagaaaaagcgccaacaacaacggcaaaatgaagaaatggctaagcgtcagaaaattca

SEQ ID NO: 190281 - DNA, 260 bp, Glycine max
ctgtaaaggaggtgtctttgctggatgacggaagccagggcaaacagagccttttccaacttcagcaggaaatatctcttttgagtcagttccgacacgacaacatagtccgatatcttggcactgacaaggatgatgataagctgtatatcttcctcgagcttgtaacaaaaggatcattggcaagtctctatcaaaagtaccgtttaagggactctcaagtttctgcatacacacgacagattttaagtggcttgaag

SEQ ID NO: 190282 - DNA, 261 bp, Glycine max
atatagaagaggttccttatttctgtctgccagcaaacgatttggttgatgttattgccccatcttgttacatctgtattgactatacaaatgctttagctgacttagtggtaggatatatgggactgccaaaatattctggaatcggcatgtcacaacatccacaatatgtaacagtaaggaatgaacgtggaacagagatgttgagtcttatagagaacttactggagattactccaacaattagtactggggataggc

SEQ ID NO: 190283 - DNA, 259 bp, Glycine max
ggcgattgaaacgctcgtgctgggcgctggtcaagaagttggcaacagctgcgtggtggtaaccatcaacgccaagcgaatcatgttcgattgcggaatgcacatgggctacttggatcatcgtcgttaccctgatttcacccgcatctcccccagtagagatctcaactctgccctctcttgcatcatcatcactcactttcacttggatcacgttggtgctttagcttacttcactgaagttttggggtataacgga

SEQ ID NO: 190284 - DNA, 261 bp, Glycine max
ggtggccggagaaacaatgtgttcgatcctttctcactggacgtgtgggatcccttcaaggattttcctttcccaaatacgctttcttcagcttccttccctgaattttctcgggaaaattcagcatttgtgagcacccgtgtggactggaaggagaccccagaggcgcacgtgttcaaggcagatattccaggactgaagaaggaggaagtgaaggtgcagattgaagacgataaggttcttcagataagcggagagagg

SEQ ID NO: 190285 - DNA, 257 bp, Glycine max
caatggcaaccgcgaggaccgtgaaggatgtttcgcctcacgatttcgtgaaggcttacgcctcccatctcaagcgttccggcaagatggagcttcctgagtggactgatattgtaaaaacagcaaaatttaaggaattggctccatcatgatcctgactggtattatgttagggctgcctcaatggcaagaaagatttatttgagaggcggtcttggtgttggggctttccagaggatctatggtggaagcaagag

SEQ ID NO: 190286 - DNA, 256 bp, Glycine max
attacattagattggtggtaatggcagcgtcactacaagcagcagctactttcatgcaacccaccaagttgagcaggagcaacactttgcagcaaaagtctactcagtccatttccaaggcttttggtttggaacctgttggagctaaaaaggtcacatgctcccttcaggctgatcttaaggacttggctcacaagtgtgttgatgctaccaaaattgcaggattcgcccttgccacctctgccctcgttgtctc

SEQ ID NO: 190287 - DNA, 258 bp, Glycine max
agtagtactagtgataaggtgatcataatagagcataatataagagagtgaaaactcatggaggttggcctcaacaagaaggagaacatggggtttgaggaaactgagctaaggcttggactgcctggaaacgtaggaggcactggcactgaagaagtgctcatcaggaagagaggtttctctgagactgaaactgaaactgaggaggatgagtctgctaccactgtggatttgatgcttaatctttcttctaaggaa

SEQ ID NO: 190288 - DNA, 259 bp, Glycine max
tgctagctactccttaattactaattagtttcattctttggtgcaagctagcttcattagttgattcataaaattataacaatggtgagtgttgaagcaatccgtaaggcacaacgtgcagaaggccctgccaccgtcatggccatcggcactgccactcctccaaactgcgtcgatcagagtacttatcctgactattatttccgcatcaccaacagtgagcacatgactgagctcaaagaaaagttcaagcgcatgt

SEQ ID NO: 190289 - DNA, 156 bp, Glycine max
gccgatcagctcaccgacgaacagatctctgagttcaaggaagcctttagcctcttcgacaaggacggcgatggttgtattaccaccaaggaacttgggactgtgatgcggtcgcttgggcagaacccaactgaggctgagctgcaggacatgata

SEQ ID NO: 190290 - DNA, 257 bp, Glycine max
tatcaagatcaatgattatcagaagagccgttttgtgaaccgtgtagttgcatcaatgttcaacacagtctcaaacaaaaagattgctattctgggatttgccttcaagaaagacactggtgacactagggagacccctgccattgatgtatgccaggggctacttggtgataaggccaacctgagcatatacgatccacaagtaactgaggaccaaattcagagggatctatcaatgaacaagtttgattgggatc

SEQ ID NO: 190291 - DNA, 256 bp, Glycine max
catttggacacaataatagggcctggagtgatgcttctttatcctctatacgcatcaatgagagcaattgaaagtccttcaaccttggatgatcaacagtggctaacgtattgggttttatactccttcatgaccctctttgagctttccactcataagatccttgcttggtttcccatttggggatacctgaagcttatgttttgcgtctggttggtacttccaatgttcaatggagcggcttacatatatgaga

SEQ ID NO: 190292 - DNA, 257 bp, Glycine max
gtgcagtgtccaaatcataagggtagttgcaaattgcaatggctaagcatgatgttgagggtggttccttctctgcaaaggactaccatgatcctcctccagcaccgttgattgatgctgaggaactcacacagtggtccttctacagggctttgattgctgagttcattgccacaatgctcttcctttacatcacagtgctcactgtgattggttacaagagccagagtgatgtaaaggctgggggtgatgtgtgt

SEQ ID NO: 190293 - DNA, 261 bp, Glycine max
cttgtttaaagtgagaggacaagacacaagaaaatggcaaactttccagttgttgacatggggaaacttaacaccgaagagagagcagcagccatggagattataaaagcatgcctgcgagaactggggtctctttgaattcctgaaccatgggatatccattgacctgatggacactgtggagaggctcacaaaagagcactacaagaagactatggagcaaaggttcaaagaaatggcggccagcaaagggcttgagtc

SEQ ID NO: 190294 - DNA, 257 bp, Glycine max
cggctcgaggtttgttttctttgttgctgcagtagttttggtagcatggccatgccatggcgcaggctaccaaaggttccctctccgaatgaaaactggctatggtgagcgttcttcggaggtaaaatgcgcaagttttaggcttgctgtggaagcacacaacatccgagcctttaaaaccattcctgaagagtgcgttgaaccaacaaaggactacattaatggcgaacaatttagatcagactctaaaacagtta

SEQ ID NO: 190295 - DNA, 252 bp, Glycine max
gttcaaaaccaatctatctatctatttggtataagcatggagctttgttggcaaaaatccatccatggctcttaaagaagcttggaggattttgtgtgagagggttctcacccttcacactccacctcctacagtttgcttatgctttagccattggtttctctaatcaatcaccacaaaagggtatacatggaggaacataattctgtgagtggcatgaagcagagaagctatggccacatcttagcaaac

SEQ ID NO: 190296 - DNA, 255 bp, Glycine max
gttccgcagatggtacaatcctccttggttctctgaggctattccatctgccccttatgatcctcttgttttaagacacgcctttgagcaggcagtcataaaaaggttgatgactgatgtgccttttggtgttctactctctggaggtttggactcttctttggttgcatccatcacttctcgttacttggccaacacaaaggctgctgagcagtggggatcaaagttacattcattctgtgtaggccttgaggg

SEQ ID NO: 190297 - DNA, 255 bp, Glycine max
tatttatttattctccgaaaatggttgatttacattggaaatcaaagatgccaagttccgacatgccttccaaaactctcaaactctctctctccgacaacaagtccttaccctctttgcaactacccttccgcaccacagatatctttcacgccgcaccttctgtttgcaacacttacgactactatctccgtcttcctcaactcagaaagctttggtactcctcagattttcctaattgggacaacgaaccaa

SEQ ID NO: 190298 - DNA, 252 bp, Glycine max
tactactgctagctgtgacttgttttgagttcaatcaaatcgcattggtatctgaaatcaggaaagatggttagcgtactgagatcaggcaggcacaaagggcagaaggcccagcaaccatccttgccattggaactgcaaacccaccaaaccgtgttgatcagagcacctatcctgattactacttcagaatcaccaacagtgaccacatgaccgagctcaaagagaaatttcagcgcatgtgtgacaagt

SEQ ID NO: 190299 - DNA, 254 bp, Glycine max
caagaatcgtaagctataggaaagtcttacccaactgtgagtgctgattaccagaaggccgttgagaaggcgaagaagaagctcagaggcttcatcgctgagaagagatgcgctcctctaatgctccgtttcgcatggcactctgctgggacctttgacaagggcacgaagaccggtggacccttcggaaccatcaagcaccctgccgaactggctcacagcgctaacaacggtcttgacatcgctgttaggct

SEQ ID NO: 190300 - DNA, 249 bp, Glycine max
cacaccctctttctcctactactccttccacttcttctccttcaatctccagtgcattcattctttcaacatgggtggcatcagcctcgaagaaataataaacgacaacgtcgatctggaacggattccaatagaggaagtgtttgagcagctgaaatgttcaagagcacgtctaacatcagaggaatgggtcaatcggctccaagtctttggaccaaacaaattggcacagcacaaagacagcaagtt

SEQ ID NO: 190301 - DNA, 286 bp, Glycine max
gtcgctcacactctccaaaccctagcggcactacagactagttctatcgctatctccccaagatgtcgagcgccgatcccgagcacagagaagaggaggaggcacccgccgttggcgacgacgaggacaccggagctcacgtcgctccaatcgtcaagctcgaggaggttgctgtcaccaccggcgaggaggacgaagatgcaatcctggatctcaaatcgaagctttaccggttcgacaaggacgggaaccagtggaaggagcgtggcgccggcactgtgaagtt

SEQ ID NO: 190302 - DNA, 282 bp, Glycine max
atatgaagctgcaaaaatcatatttgcttttatatctaactgggccaagttggctatcacactggtcaaattacaacagtgtcaaggtgctgttgatgcagcaaggaaagccaacagctcaaagacatggaaggaagtttgctttgcttgtgttgatgcagaggagtttcgtttggcccaaatttgtggactaaacattattattcaggtggatgacttggaagaagtcagtgaatattaccaaaacagaggttgcttcaatgagctcatatctctcatggg

SEQ ID NO: 190303 - DNA, 282 bp, Glycine max
tggagtaacgtgctgtctccgcttcccagggcagctgatctccgacctccgcaaactcgccgtgaacctcatctccttccctcgcgtccacttcttcatggtcggcttcgcgcccctcacatcccgcggctcccagcagtatcggtccctcacaatcccggaactcacccagcaaatgtgggacgcccggaacatgatgtgcgccgccgatccccgccacggcaggtacctgacggcgtccgccatgttccgcggcaagatgagcaccaaggaagtggacca

SEQ ID NO: 190304 - DNA, 283 bp, Glycine max
  unsure (1)..(283): unsure at all n locations
cttctttctcttgaacccataattccatgactcggcgttgcnccnactgcagcaanaacgggnacaatttccgtgacatgcccttcgngtgggggcnnaagtgtgaagcttttcggggtcaggctgacggatggatcaatcattaagaagagcgccagcatgggcaacctaaacctctcctccgccgccgcacatcaccanttccattcatctccttcttcttccaanctcgncgcngncncctcatcccccaatccaaggtccccatgctccgaccctcccc

SEQ ID NO: 190305 - DNA, 279 bp, Glycine max
agaagggtcttgcgttcttctgcggtttgatagatagctagccatgtttgcatgaatatttgagcggggagataataagtcaacattgataacgttttctcaaagtggttttattattttattttttttatcataagacggcagtttgcctgcactgatcagttcttagagcatgaattcagcatccccgcagtttgtttcctcaagaaggatgagtgtgtacgatccgatccaccagattagtatgttgggagaaggcttcaaaagtaatggaaattt

SEQ ID NO: 190306 - DNA, 288 bp, Glycine max
ttttactctctctctgtctctctctacgctttctcgttcgatatccctcaagggatccactaactgaaatgtgaaatgggggttgacattcaccaggcttttcagccggcttttcgccaagaaggaaatgcgaattctgatggtgggtctcgatgcagctggtaagaccaccatcctgtacaagctcaaacttggagagatcgttaccacaattcccaccattgggttcaatgtggagactgtggaatacaagaacattagtttcactgtctgggatgttggtggcca

SEQ ID NO: 190307 - DNA, 205 bp, Glycine max
aacatatcgagattggaatctaagtactcctctaatccaaccaaattcaactacctgtacagtttggtacaagttgaggtttaaactaaaacggctatatcatcatccagttgtaccaatggacttctttggcttacaagagcaatggatttcttggtggcattgttccagaacttaattgagcatgcagattggtcaatgtcac

SEQ ID NO: 190308 - DNA, 277 bp, Glycine max
agttggtgaaatcaccaacagtgcattcgagccatcatctatgatggccaagtgtgcatcccgccatggcaaatacatggagtgctgtctcatgtacagaggtgacgtagtgcctaaagatgttaatgcagctgttggaattatcaagagcaagcgcactattcaatttgttgactggtgccccaccgggttcaagtgtacgaatcaattaccagcctccgactgttcgttccaggtggtgatcttgccaatgttcagagggccgtgtgcatgatct

SEQ ID NO: 190309 - DNA, 284 bp, Glycine max
  unsure (1)..(284): unsure at all n locations
gccgattttanaagatgagtaatcttcagaatgatgctttgcgtgaatgcatttcaggaatcatggccgattccaaggagaagacatcgcaaattatgtagagaccatcgaactccaaatcgggttgaaaaactacgatccacagaaggacaagcgtttcagtggctctgtcaagctgccccacatccctcgccccaagatgaaaatttgcatgcttggtgatgctcagcatgttgaagaggcggagaagataggactggactggatggatgtggaagccctga

SEQ ID NO: 190310 - DNA, 283 bp, Glycine max
ctcgagccgctcaaattcctcataacccagttgcagtcacgggtgttgttggcttcatagggactggagtttcctccttttgttgcattaagagctgacatggatgctcttcctatgcaggaaatggtggagtgggagcacaagagtaaagtacctggaaagatgcatgcatgcggtcatgatgctcatgttgccatgcttcttggtgctgcaaagatcctcaaagagcatgaaaatgagatacgaggaactgttgttcttgtttttcaaccagcagaagaag

SEQ ID NO: 190311 - DNA, 228 bp, Glycine max
gctcgtagatttgctcgatctcgagccgctgtctgccgcccttcatatcgtgtggttaatgctggtgatagttgagctggaactgtcgatagcgggggtatcattcggcatggcccgcataaattgttggaaggtttcttgattgctggagtgggaattatggctagtggcgcgtacagctacatcaggggtgaatatgtcaatgatcgtaagaatctcggaaaggct

SEQ ID NO: 190312 - DNA, 286 bp, Glycine max
ctctagctcacgttctcagactctggaagatggacatgatcgctgtcgtgacagaactggagcgtcaagaacagatttgtctcgctctcatgaggtttaatgtgatgcagaagcaagatttgtacaatccggatgcatacctctataaggacttgatcattgcagtggcaatggcttgtataatgcatggagtattgcaattgttggaaagcatgagagaggaaaatctgttccccgattcccagacttatactgaagttataaggggcttcttgaactatggatc

SEQ ID NO: 190313 - DNA, 279 bp, Glycine max
tattggcaccatcaacctctacgaatttatggcaaagtataattgcaaaaagatggttttctcatcatctgcaaccgtttatggccaacctgaaaagataccgtgtgaggaggatttcaagttacaagctatgaatccctatggacggaccaagcttttcctggaagaaattgcccgagatattcagaaagctgaaccagaatggaagatcatattactgagatacttcaatccagttggggctcatgaaagtggcaaactcggtgaagatcccaaggg

SEQ ID NO: 190314 - DNA, 280 bp, Glycine max
agtgctacaaacaacaatggctgctaatcaggaagatgtgaagcttttgggagctactggaaggccatttgtgtgcaggggtcagattgccctcaagttgaagggagttcaatacaaatttttggaagaaaatttgaggaacaagagtggactgcttctcagatccagcccagttcacaagaaggttccagtgtttattcacaatgagaagcccatagcggagtctcttgtgattgttgaatacattgatgagacatggaagaacaaccccatcttgcct

SEQ ID NO: 190315 - DNA, 168 bp, Glycine max
agtgctcaaccctagtaagccgcaatggtgaagtactcaagggagcctgacaatccaactaagtcttgcaatgctagaggcgccgaccttagggttcattttaagagcacaagggaaactgcctttgcaatcaggaatttgcccttggtcaaggctagaaggtacttg

SEQ ID NO: 190316 - DNA, 288 bp, Glycine max
  unsure (1)..(288): unsure at all n locations
gaaaaacttagctactaaggaaggatcagagagaatggctcaatcaatggcatcaatggctggcttgcgtggttcctctcaggctgtgttggaaggtagccttcgagtgagtggctccacacgcttgaatgtggggagtgganggggggtggcctcagtcacacgtgcagggttcacagttagagcacaacaacaacaagtgagtggtgaggtacaaagcagccgtagggcagtgctttcacttgttgctgctggtttggccactggctcttttgttcaagctgtgct

SEQ ID NO: 190317 - DNA, 292 bp, Glycine max
ataacacgtaaggttagcagaaaccccgaattgataaggggaatcggaaagtactcgaggtctcaaatgtaccacgagaggggcagttgggctatcaaggccaaaaacagtggcgtgttacctcgccacggccctaaacccagacctgaaactcccgctgaaaaaccacccaaattttaccctgctgacgatgtcaagaaaccccttgtcagtaagcacaaacccaaacccgcgaagctcagggctagcattactcccgggacagtgttgattcttcttgccggtagattta

SEQ ID NO: 190318 - DNA, 277 bp, Glycine max
  unsure (1)..(277): unsure at all n locations
aatggcttctgcttctaatgccatcatccaatgcacctcttcttcttcttcatcgtttgagtatgacgtgtntgtgagcttccgcggtgaagacacacgcaacagcttcaccgcttttctttttgaagctctgaaaaaacaaggcatcgaggccttcaaagatgataaagatatcaggaaaggcgaatccatagcaccagagctaatacgagccattgaagggtctcatgttttccttgttgtcttttccaaggactatgcttcctcaacttggtgc

SEQ ID NO: 190319 - DNA, 283 bp, Glycine max
cacgtatcggctttaagtagcattgaagttttcaaagatgtaggaccatctgtggtgatgggcaagccctggtggacttcagagtggcttgtcacgacaattatttgatatgtggtgctctgataagaaaaattcttgtgttttaccagggtatgtagttgaagggacattggcaaaaaccatcatcaatgagcccaaggaagttactctcatgaatggactcactgcacctcttaacatgcaggtgcactacatgtcctgttctgctcatgctgactctgct

SEQ ID NO: 190320 - DNA, 283 bp, Glycine max
atagacaccaaggccattgaaaagagtgctaaggttggattgggattggttctcaaaccctaaggattttgatccatcctggcaagagcattgagtaggtgttaggaagcgtatagtctgtgagactaaattatttccttgaagttggttctcttcttgggtaagaagtgttcatggagttttcgttgcatttgagcaattcaaccttgtaaaaataaataggctttctataaaccacatgtgactttttaaatgcccaaagcttagcaagcctcttttgttg

SEQ ID NO: 190321 - DNA, 283 bp, Glycine max
tatgggagggtctattcatgcaaagtggtgctgagcttaccacaaagagaattttgcttatgagcactgggatgagatacttgacatctgcaaccagtatgatgtggctctatccattggtgatgggctaagacctggatccatctatgatgcaaatgacacagcacaatttgctgagctcttgacacaaggagaactgacccgtagagcatgggaaaaggatgttcaggtgatgaatgaaggaccttgacacatcccaatgcacaagattcctgaaaacatg

SEQ ID NO: 190322 - DNA, 293 bp, Glycine max
acgaatagtcctgacccttccatcgacccttcatttctttcccaactagaatcactatgccctcaaaacgggtgacggttcaaaagcgagtagcggtagatatcggtagtcaaaccaaatttgatttatgcttactatagtaatttgaggaattctcgtggaattctgcaatctgatcaagcactatggagtgatgcttccacaaagacaactgttcagaggtacttgggcttaataagagggttacttggattaacattcaacgtggaatttgggagatctatggtgaaaat

SEQ ID NO: 190323 - DNA, 292 bp, Glycine max
atggacgatcgcttcgcggatttgaaccctaagacgtgcgtggttttaggcggcagaggattcctcggaagatcgttggtgctcaggctgttgaaactcagtaactggatcgtccgagtcgccgattccgctcagtctctccaactccaccactccgagtctctcctcgaacaagctctctcttcttctcgcgcttcttacttccacgtcgaccttctcgataaacggagcattgtcaaagttctacaaggttcctctgttgtcatttatatggatgttgccggcgtcgatg

SEQ ID NO: 190324 - DNA, 279 bp, Glycine max
agaaagtcttacccaactgtgagtgctgattaccagaaggccgttgagaaggcgaatatagagctcaaaggcttcatcgctggagaagatatgcgctcctctaatgctccgtttggcatggcactctgctggaacctttgacaagggcacgaagaccggtggacccttcggaaccatcaagcaccctcccgaactggctcacagcgctaacaacggtcttgacatcgctgttaggcttttggagccactcagagcgaagttccctattttgggcaacgc

SEQ ID NO: 190325 - DNA, 283 bp, Glycine max
tgagatgcacagagagaaaatggtgtcggggtcaggattcttcgcgaagagggtagttgtggactcgcggcaccacatgcttggggaggcttgcatcgatcgttggcgaaggaatttctgaatgggcagaaggtggtggtggtgcgctgcgatgagatttgcatctccggtgggctcgtcaggcataagatgaagtacttgcgtgtcctccgcaagcgcatgaacaccaagccctctcacggccccatccatttccgtgcacccggcaagatcttctggcgca

SEQ ID NO: 190326 - DNA, 275 bp, Glycine max
tgtttgacttggaaaacattgtagaggctgcaaaaagtgctgtgaagaaggtcaatgtgttacttcggattaatcctgatgtgggtccacaggctcatccgtatgttgccactgggaataagaactctaaatttggcattagaaatgagaagctgcagtgcgttttagatgcagtgaagggacatcctaatgagctcaaacttgtaggggcccactgccatcttggttcaacaattaccaacgttgacattttcagggatgcagccaccattatg

SEQ ID NO: 190327 - DNA, 274 bp, Glycine max
aaataggagttgaacacttgcttagagatgtgaaggatacgaccattattgatcttgtcacagagtgtaatgcaagactcacagccgtgaagggtttggatgcaagacttaaagagatcaggggttaccttgaccttgttaagcatcttgttgttaatcaagttgtggagtgcaattacacttctaatgagagatgagaggtatattaccagcatcatatcatttggtttcactgcataagccttgataagatcagcaacattgagatttggta

SEQ ID NO: 190328 - DNA, 274 bp, Glycine max
tgtcgattgttaggctgttgctctgatctggagtttgatcaactgtacctaatttaccttggaagatgagtgaacttcttttaatgacattttcaaggtcgagaaggtagaccctgatggtaaaaagtatgacaaggtttctcggattgtggcacggagtgagaagtgtgacatgtacatgcttctagatataaataccgagatttatacgatgggggaaaaagaaagattcttgatggctttgtctccttcacttgttctgaatactaaggat

SEQ ID NO: 190329 - DNA, 239 bp, Glycine max
caggttcatatttttcttggaaagcttctgctatggggaaaaatgtttctaatgcaaagacggtttctgaagaagaggtacacagatgatatggagcttgatgatgcagtccacacagcaatgttgactctgaaggaagggtttgagggacagatctcaggaaaaaacattgaaattggcataattggtgctgatagaaagttcagggtattgacacaagctgaaattgatgactattt

SEQ ID NO: 190330 - DNA, 255 bp, Glycine max
atcttttttgcacacaatttggaacagaaaatgggtgcaggagattactacaagatacccaagatgaatcgttaattccgcggattgataactcaagatggcatataagaggttggccatgaagtggcacccagataagatccatccacaccaccatcaacaacttacgaatgaagaagctgaggcatagttcaagcaggtttcggaggcttatgatgttctcaggtgccccaagaagcgccagatctatggatt

SEQ ID NO: 190331 - DNA, 272 bp, Glycine max
acctattagagatgatgaggttgttcttggacaatacgaaggctataaagatgacccaacagtacctgaaaagtcaaacaccccaacatttgcaactgttattctgcgaatacacaatgaaagatgggaaggtgttccgttcatactaaaagcagggaaggcactaaattctagaaaggcagagatcagggttacattcaaggatgtccctggtgatattttcaagtgtaaaaagcaggggagaaatgagtttgttatccgcctacaacctt

SEQ ID NO: 190332 - DNA, 206 bp, Glycine max
gggggatacagcccaactctgtcttggaatttgaaatcgaagtcttgagtgcacaatgaaaaccttggtagtctgtctctgtccaaagaataaaatcatcatccatttccatggacttgtattatggtatccccactttgtgactcgtgagtgatatctacagtggttgagttgttcaactgaaatactaaataacttttggaatg

SEQ ID NO: 190333 - DNA, 283 bp, Glycine max
cacttcacttcactaatacatcatggcagacgagacccagaacaagtatgagagctctgatgttgaggtccaggatcgtggggtttttgactttctcggtaagaaaaaggatgaagaagacaagcctcatcctcacgaggaggtcatcgccaccgagtttcaaaaagtcactgtctcagaccaaggagagaacaagcacagcctcttagaaaagcttcaccgatctgacagcgactctagctcttcaagtgaggaggtaggagaagatggagagaaaaggaag

SEQ ID NO: 190334 - DNA, 293 bp, Glycine max
gatgcaaacttgctgtgaatctcattcccttccctcgtctgcacttgttcatggtgggttttgccccactcacatgtccgtggttcccacgtggttcagagcttttgctgtacccgaataggcccatcaaatgtcggatgctaagaacatgatgtgtgcagctgatcctcgccatggtcgatacttgacagcttctgcgatgttccgtggtaagatgagcacaaagtgggttgacgagcagatgatcgatgttcagaacaagagctcatcatactttgtggaatggatcccca

SEQ ID NO: 190335 - DNA, 299 bp, Glycine max
ttcggctcgagcttttggtactcttggttctctatgtcacagtggagcagagtaagctactccaacacgtacaagccgaatgttgggtttgtaaagacaagaggtgtgcagcttatgctgaatgggattccctactaatgtaattgctttaatgcctattggcttatgtaccctgcctctgatccttcccagaggaacagaatctcatcggtatttcaacaggctgcaaatcatggactcaacattgccagtacttgggccttcagtgatggtggatatcacccctacaatatctcctg

SEQ ID NO: 190336 - DNA, 297 bp, Glycine max
gctcgagctgtggaagcacacaacatccgagcctttaaaaccattcctgaagaatgcgttgaaccaacaaaggactacattaatggcgaacaatttagatcagactctaaaacagttaaccaacaagctttcttttatgctagtgaacgcgaagtccatcacaacgacatatttatattcggcatagataacaccgtactctctaatatcccatactatgaaaaacatggatatggggtggaggaatttaatgaaaccttatatgatgaatgggttaacaagggcgacgcaccggca

SEQ ID NO: 190337 - DNA, 287 bp, Glycine max
attgatttttcctcttccatttctcttactttctcagcctttttcgattacccatttggttatttcgccctaatggctcttgctccatccaaagtttccaccttttctggttttactcccaaacccagtgttgggggtgctcagaaaaacccaacttgctctgtttctctgagctttttgaatgagaaacttggaagcagaaaccttagggtttgtgcctcaacggtgcctctcactggggtgatttttgaaccgtttgaggaggttaagaagagcgagcttgctgt

SEQ ID NO: 190338 - DNA, 283 bp, Glycine max
caaatatatcatacatatgttctagatactatagagcacctgagctcatatttggcgcaactgaatatacttcagccattgacatctggtctgttggatgtgttttagctgagctgctgcttggacagcctctgttccctggtgagagtggagttgatcaacttgttgagatcatcaaggttctgggcactccaacaagggaagagattaagtgcatgaaccctaattatacagaatttaaattcccacagattaaagcacatccatggcacaagatcttcca

SEQ ID NO: 190339 - DNA, 279 bp, Glycine max
ctcgagccggttagggtttccaagatggaaggcatggttgatcacctggctttcgagcggaacaattcgcagttcgatgtcgacgagatgaagatcgtttgggccggttctcgtcacgcttttgaagtatctgacaaaatggctcgcctcgttgccagcgatccggcattcagaaaggatgatagagttgtgcttgataggaaggctttatttaagaacactttgaggaaagcagcttatgcatggaaaaggattattgagctccgtctcagtgaagag

SEQ ID NO: 190340 - DNA, 278 bp, Glycine max
cctttcgctccaaatgccatccattctccttctttgtctgtgacgaatgatgcactgaatgttatgatttctggggctcctgcttctggtaaaggaacccagtgccacctcttcaccaacaagtacggtttggttcatattgctgctggagatttacttagggcagaaattgccactggaagtgataatggaaagcgagccaaacagtatatggagaagggacagttggtccctgacgaaattgttgtgatgatggttaaggagcgtctcttgaaacc

SEQ ID NO: 190341 - DNA, 278 bp, Glycine max
aggaggggttctgtgacctccttctattccaaattcatcgattctcacaatcttaattgtgggcgttcctcttcgaatccccatcgcgtcgctccttctgcaacttcattcgatatctcttccgcttctgcgtctaaagctacgaccgacttcgtgtcgttgacccgccactatggaaggtgctattgggagctctccaaagctcgtctcagcatgcttgtggttgcaacatctgggactgggtttgtcttggggagtggtagtgctgttgatctttc

SEQ ID NO: 190342 - DNA, 276 bp, Glycine max
agaaggtggaggagttgttgctgctggatgtgatgccgcttagtcttgggattgagactgatgctggtgaaatgtcagtgttgattcccaagaacaccatgatccccaccaagagggagagcgtcttctccactttttctgataatcaaacaagtgttttgatcaaagtgttcgagggggagcatgccaagacagaggataacttccttcttgggaagtttgagctttctggtttcactccatcgccaaggggagttccacaaatcaatgtggggt

SEQ ID NO: 190343 - DNA, 119 bp, Glycine max
agaatttgacacattccccagctcaaagagccctgacattctacgttggaggtacgaccggttaagaactgtggctgggaggattcagagtgttgtaggagatttagctactcaaggag

SEQ ID NO: 190344 - DNA, 272 bp, Glycine max
gaaaatgaaggtccttgttttcttcgttgctacaattttggtagcatggcaatgccatgcgtacgatatgttccctctccgaatgaacactggctatggtgcccgtactccggaggtgaaatgcgcaagtacgaggcttgctgtggaagcacacaacatctttggctttgagaccattcctgaagagtgcgttgaagcaacaaaggaatacatccatggcgaacaatatagatcagactccaaaacagttaaccaacaagcttacttttatg

SEQ ID NO: 190345 - DNA, 271 bp, Glycine max
acagccatggggcgaagacccgcgaggtgttataggcaaattaagaacaaaccataccccaagtcacggttttgccgtggtgttcctgatcccaagatcaggatttacgatgttggtatgaagaagaagggtgttgatgaatttcctttctgtgtccatctggttagttgggagaaggaaaacgtttctagtgaggccctggaagctgctcgtattgcttgcaacaagtacatggccaaatttgctggaaaggatgctttccacttgagag

SEQ ID NO: 190346 - DNA, 270 bp, Glycine max
cgaggaggggaaggagcaggatgtgtcgttgggagcgaacaagttccccgagagacagccaattgggacggcggcgcagagccaagacgacggcaaggactaccaggagccggcgccggcgccgctggttgacccgacggagtttacgtcatggtcgttttacagagcagggatagcagagtttgtggccacttttctgtttctctacatcactgtcttaaccgttatgggagtcgccggggctaagtctaagtgtagtaccgttgggat

SEQ ID NO: 190347 - DNA, 293 bp, Glycine max
gctcggaattttgctcgatctcgatacgctcgagcagctcgagccgctcgagccgctcgaccgatcgagatgggccgaatcagtttcaatgttgagtggaaaccaagaaagagcttatcaatgggtaacaattaactatctactgggaaacttgggaaagcattattcagaaactgttgcagtagttgatcttggaggtggatctgttcaaatggcttatgcagtctcagagacagatgctgcgaaggctccacgagcaccggacggagtggaatcatacataacggagatgt

SEQ ID NO: 190348 - DNA, 285 bp, Glycine max
actcctacttacgagaaagttgccacagcatttaaattggaggaagatgtagtaattgcaaatctggatgctgataaatataaggatctggctgaaaagtatgatgtgagtggatttcctaccttgaagttcttcccaaagggcaacaaagctggtgaagagtacggaggtggaagagacttggatgactttgtggcttttatcaatgagaaatctggaacaagtcgagatgtaaaaggacaacttacttcccaagtggtgagagtagaaagcttggatgtcttg

SEQ ID NO: 190349 - DNA, 282 bp, Glycine max
  unsure (1)..(282): unsure at all n locations
agaangtgaaggagttgttgctgctggatgtgatgccgcttagtcttgggattgagactgatgctggtgaaatgtcagtgttgattcccaagatcaccatgatccccaccaagagggagatcgtcttctccactttttctgataatcaaacaagtgttttgatcaaagtgttcgagggggagcatgccaagacagaggataacttccttcttgggaagtttgagctttctggtttcactccatcgccaaggggagttccacaaatcaatgtggaatttgatg

SEQ ID NO: 190350 - DNA, 279 bp, Glycine max
ggtcctcgcccggagaacggccttggcaagctccgaaagcaccacaccttcgctttccgatctgcctccggcaaggaatcagacagcggaagcgtgaaatcgtacggtgaagatttgccggaggatgcggtgagagtgacgcgaagtatcatgatcgtgaaaccacctggtggtaaccagagtccgagcggatccgctccggcttcccccgccggttctactcctccggtgtctcctttttcgggagctagagagtccttccgttttcggagaaggtcg

SEQ ID NO: 190351 - DNA, 273 bp, Glycine max
gccttctcaggttggggaactaacgaggagctgattgtatcgatcttggctcataggaatgctgctcagaggaagcttatcagagaaacttatgcccagacctatggagaagatctcctcaaggccttggacaaagaactcacgagtgattttgagaggctggttcatctttggacacttgattctgctgaacgtgatgcatttttggcaaacgaggcgactaaaaaatggacttcaagcaatcaggttctggtggaaatagcctgcactagg

SEQ ID NO: 190352 - DNA, 267 bp, Glycine max
ctcgagcttctggttccagctggcattattgcttgcttttctcccctatctgatgcaagctcctttgtgatactttattttgttacgtcagtatacttttctggagtcatggttcgcttgatgctcgtacttgctccagctgcatgtattttgtctgggattgctctttctcaggcttttgatgttttcacaagatctattaagttgcagttgcccagcctatcaggtcattctcacgttgatgcaggggaaaccagttctgaaagt

SEQ ID NO: 190353 - DNA, 284 bp, Glycine max
atggtgtgcttcaaagggaaacataccatactttgagacctcagcaaaagaaggatttaatgttgaagctgctttccagtgcatagcaaaaaatgcactcaagaatgaacctgaagaagaaatgtacctgcccgacacaattgatgttggtggtggtggacgacagcagagatctactggctgtgaatgttaaagtgcagagaattctatggactagctttagttgcttgttttttgccaaaatacaagcgatcctcatggattattagcctgcaagtacttta

SEQ ID NO: 190354 - DNA, 276 bp, Glycine max
cttcttctcgaacaagtttggtgtgaggccattgagagatagccacgatgaaatgatggcagccttataccttcaagtcagcataattagccaggctctaatcttcgtcacaaggtcccgcagctggtcttttgttgaaagacctggtcttctcctactaggtgcattttttattgctcagttggtggcaacttttatagcagtgtatgctaactggggctttgcaagaataaagggaatgggatggggttgggctggtgtaatctggctgtacag

SEQ ID NO: 190355 - DNA, 266 bp, Glycine max
ctgaaaatgtcttgctgcggtggtaactgtggttgcggaagctcctgcaagtgcggcaacggctgcggaggctgcaagatgtacccagacttgagctacactgagtcaaccaccaccgagaccttggtcatgggagtggcacctgttaaggctcaatttgagggtgctgaaatgggtgtgcccgctgagaacgatggctgcaaatgtggaccaaactgctcctgcaacccctgcacttgcaagtgaggtgttgggagagcaagctt

SEQ ID NO: 190356 - DNA, 270 bp, Glycine max
ttctcgagccgctcgagcagctcagggcgctcgaggggctcgagcagatagcaaacttaaagaaccctggctaccacacatgggaaaaattaatactcaaggatccacaagatccttccactccaaatgcagtttcatacaaaacagcagcgagagagaaactgataaggcagggatacaacattgttgggatcattggagaccaatggagcgatctcctcggaggccacagaggcgaaagcaggacctttaagcttcctaatcccctgt

SEQ ID NO: 190357 - DNA, 261 bp, Glycine max
cgatcttgtgggcaagaatcttcatgttctcagtcagatagaggatgttcgaccatatcatgtacagagatgtggtgctgcccatagtactggagcatatttgtcagccatctgtggacatcaagacagtactgtcccaggtaatggaaaggctttcaaattatgctgcttcaagttcagacgtgttgccagagtttgtacaagtggaagcattttccaaattaagcaatgccattggcaaggtgatagaggcacagcctg

SEQ ID NO: 190358 - DNA, 273 bp, Glycine max
ctcgagccgctcgagccggccgcccttaagcacaggtcaatggacagagtgatcatgtgcgatatagacaccgaggtggtaaatttttgccgaaaatacttgattgtaaataaggaggcgttttctcataagaagctggaccttgtcatcaatgatgccaaggctgaattggagaagagaaaggaaaagtttgatatcattgttggagatttggcagacccacttgaagatgggccatgctatcaactctacaccaaatccttctatgagaag

SEQ ID NO: 190359 - DNA, 273 bp, Glycine max
gtttagagcagaaccagatcgtgttctcttcttccattggcaaacatggcaactcaaatgagcaagaagagaaagtttgtggcggatggagtgttcttcgccgaactgaacgaggttctgacacgtgagttggcggaggacggttactccggcgtggaggatagtgttacgccgattcgcaccgagattatcatcagagccaccagaactcaagctgttctcggttagaagggaaggagaattagggaacttacctcagtggtgcagaagagg

SEQ ID NO: 190360 - DNA, 271 bp, Glycine max
ctgctggccaagaagattacaatagattgagacccttaagctatcgtggagcagatgtattcctgcttgctttctctctcataagcagggccagctatgaaaatgttgccaagaaatggattcctgagttgaggcattatgctcctggtgttccaattattcttgttggaacaaaacttgatcttcgggatcataagcagttctttcaagaccatcctggtgcagtgcctatcaccacagcacagggtgaggaactgagaaagcttatcgg

SEQ ID NO: 190361 - DNA, 255 bp, Glycine max
ggctcgaggcgccgatcccgagcacagagaacaggaggaggcacccgacgttggcgacgacgaggacaacaggagctcacgtcgctccaatcgtcaagctcgaggaggttgctgtcaccaccggcgaggaggacgaagatgcaatcctggatctcaaatcgaagctttaccggttcgacaaggacgggaaccagtggaaggagcgtggcgccggcactgtgaagttcctgaagcataaggcttccggcaaggtta

SEQ ID NO: 190362 - DNA, 267 bp, Glycine max
gtgtgatggttggaatggggcaaaaggacgcatatgttggtgatgatgctcaatccaagatgggtattttaacactgaaatacccaattgagcatggcatagttaacaactgggatgacatggagaagatctggcatcacactttctataacgagctgcgtgtggccccggaagagcaccctgttctcctcacagaagcaccacttaatcccaaggccaaccgtgagaaaatgacacagattatgtttgagaccttcaacactccgg

SEQ ID NO: 190363 - DNA, 266 bp, Glycine max
gtacgctcgcgcggctcgaggagctctgtcattgtctcaagttccaggtttcagcgatttcgatctcgcatagcattctacaatggccactattccagttaaccccaagcctttcttgaacaatttgactgggaagcccgtaattgtgaaactcaagtggggaatggagtacaagggctatctcgtttccgttgattcctacatgaacttgcagctggccaacactgaagagtacattgagggacagtttactggaaatttgggag

SEQ ID NO: 190364 - DNA, 275 bp, Glycine max
atggaggggtattgagattgagtatcaagtaatggggaagagcaaggttcttgtggtggggggaactgggtacatagggaggaggatagtgagggcaagcctggcactgggccatgagacctatgtggttcagaggccagagttgagcctccagatagagaagctgcagaggctcctctccttcaagaagcaaggtgctcatctcattgaggcctctttcaatgatcacaagagccttgttgatgctgtgaagcaggttgatgttgtcatcagtg

SEQ ID NO: 190365 - DNA, 273 bp, Glycine max
aggatgtcgaggatcattgtcagagaaaataatgaaaaagtacaacctaagagagaagggaggttctgaacatcagacatatgctttgggaattaaagaggtttgggaaattgatgagaaaaagcatcaacctggtgctgtaatccacacattgggatggctcttggatcataaaacatacggaggatcttttctgtatcacatgaaagataaacaaatatctataggccttgtggttgctttaaactatcagaaccctttcatgaatcctta

SEQ ID NO: 190366 - DNA, 270 bp, Glycine max
cgatggtatagttcatctgcagaggcaacttgttgattatactgcttccctatttcatgagggctttctagatgaccaatttaaccagcttcagcaacttcaagatgaaagcaacccagattttgtggttgaagtggtgactctcttttttgaagatgcggagaggcatcttaatgagctcacaaaaacactaggccagccaagcattgattttaaaaggttggatgctcatgttcaccagttgaagggtagcagctccagcattggagc

SEQ ID NO: 190367 - DNA, 269 bp, Glycine max
tgctcgagccggttcgttcactttcactttaccaactcctaacaatttctctctatttccttcatcaccgcatcaatggagttggacggcgttctcctcggtatgtgcaaccctctcctcgacatctctgccgtcgtcgacgacgctttcttgcaaaaatacggtatcaagttgaacgatgcgattctcgctgaggataagcacaaacctatgtatgaagaattggctaacaatcctaatgtggagtacattgctggaggtgctactca

SEQ ID NO: 190368 - DNA, 275 bp, Glycine max
tcactcgaggcgagcggccgcctcgagccggaaaaattaagatggaggggaaggagcaggatgtgtcgctgggagcgaacaaattcccggagagacagccgattgggacggcggcgcagagccaagacgacggcaaggactaccaggagccggcgccggcgccactggttgacccgacggagtttacgtcatggtccttttacagagcagggatagcagagtttgtggccacttttctgtttctatacatcactgtcttaaccgtcatgggagtc

SEQ ID NO: 190369 - DNA, 284 bp, Glycine max
gctcggatttctgctcgttctgctgttgcaacaggttcgcacattgatgctattccttactctggaaaatatgatggagttattggtgttttaggtgctattgaagccatcagagtcccgaaaaggtctggttttaaaccttgaagatcattggaagtcatattattcacatcataagaaccaacacgctttggattaggtagcttgggaaggtcagaaactgcatttctatactgtatcacaataggacttctatttgtggctatttttatcaataaatccat

SEQ ID NO: 190370 - DNA, 261 bp, Glycine max
ggcaaggtgtgtttgatcaaatatccaatggtggtatcccatggttcttgggaacaagtgtggtccttacccttgcttccttgattccactcttccaagggatcagcgtggagtctaagtccaaagggttcatgtcctcagatgcagaactgtggaatgggagatttgctatgttgggtttggttgctctggcttttactgagtatgttaagggtggtaccttggtgtaattcagtcatgaatgcacaccaaaatggtctt

SEQ ID NO: 190371 - DNA, 259 bp, Glycine max
attataacttggactgagatggtcacagcgtatatggagtttgggttggtcaatttggccttgaaggtgttcgatgaaatgccagacaagaattccgtgtcttataacacggttctggctgggttctgtcgaaacgaacaaggtttagaggccatgaggttgtttgtaagaatggtggaggagggtttggagttgacggattttagtttgactagtgttgttgatgcttgtggattgcttggtgattacaaggtcagca

SEQ ID NO: 190372 - DNA, 266 bp, Glycine max
ctcgagccgatggcacctgcaacactgtctctgtctctcctcctcctgttctcactcagcatcgccgtaaccgttagatcgagcgactacgactacgattgtgtgtacactgcatacgttagaaccggttcggtgttgaagggcggaacggactctaagatcgggctgaagctgtacgacaagtacggctactacatctacattaaaaacctcgaagcatggggcggcttgatgggcaagggctacgactacttcgagcgcggcaa

SEQ ID NO: 190373 - DNA, 273 bp, Glycine max
cgaaatcataggggaaatatctgtggtgttgacttcatttggctttgcaatcccaaccaagcacgtaaacctttgaagacaagttgggctgaagctgtatttagtatactaaaattccagttacgaaaagcatcagtgtctgaagatgacgcatttacctttctgaagggtgacaactatgctgattttgtgacttattttagtttttctgaagcactccgtcaggtgaagttagttggtgtgccttatggactatgctttcaacagttgcaa

SEQ ID NO: 190374 - DNA, 233 bp, Glycine max
  unsure (1)..(233): unsure at all n locations
ctcgagctcgagccgctcgagccgctcgagcttcacccaccaatagggaacgtgagctgggtgtagaccgtcgtgagtcaggtgagttttaccctactgaatgtagtgtcgcaatagtaattcaaccgagtacgagaggtatcggngattcgcacaattggtactcgcgcttggttgtaaagccagtggcgcgaagctaccgtgcgttggattatgactgtacgcctctaagt

SEQ ID NO: 190375 - DNA, 266 bp, Glycine max
  unsure (1)..(266): unsure at all n locations
gcaccttctccttctcaatcttgtaattctatttcctccaccattatgattttctggnctnngtcagggccacgcatnaacaagcctggcacagcacccgancaccncaacggctatgatctcaccccaatcaacggctttgcctattggcttggccttggagtcttgcagtctggggttcaagttcatggattggtatatggtgttggtgcgcacgagcacgacactacggggattttcgaagtctcagcccgatcactgccctg

SEQ ID NO: 190376 - DNA, 264 bp, Glycine max
actaaggttgacaaggtggttgtcctgtggacagccaacacagagaggtacagcaacgtagttgtgcggactaaacgacaccatggaaaacctctttgcttccttggacaggaatgaggctgagatttccccttccaccttgtatgccattgcttgtgttatggaaaatgttcctttcatcaatggaagccctcagaacacctttgtcccaggactcattgatctggccatcaaaaggaatagtttgattggaggagatgactt

SEQ ID NO: 190377 - DNA, 259 bp, Glycine max
aaaaaatccgcgattagctcttctcttggaaaagtgaaaaccagaagtacgaacgaaagagaagagcgatttagaagtgagagaagatggggttgtcgttcacgaagctgttcagcaggttgtttgcgaagaaggaaatgaggattctaatggtaggtctcgatgctgctggtaagacaaccatcttgtacaagctcaagcttggagaaatcgtcaccactatccccaccatcggatttaatgttgagactgtggagta

SEQ ID NO: 190378 - DNA, 270 bp, Glycine max
ctcgagccggttcactccgtcctcggcggtggaaaacctgctgatgtgctcttgtggaggaacaagaagatatctgctagtgtacttggtgtagccactgctgtttggatcttttttgagttgcttgaatatcacctgcttactctagtttgtcacatttcgattctggtgcttgcagttttgtttttgtggtccaatgcccatacctttattcacaaggcaccgccttgcatcccaaccgttcatctccctgaagaaccaattcgccaa

SEQ ID NO: 190379 - DNA, 261 bp, Glycine max
gataatgttcgaccggaggttcgagagcgaggaggatcccatcttccagaggctaagagccttgaacggagagaggagtcgcttggcgcagagctttgagtataactagtggtgattttattcccatcttgagacccttcttgaagggttacttgaagatttgctaggaggtgaaggagacgaggttgaatcttttcaaggattacttcgttgacgagaggtagaagcttggaagcaccaagagcaccaacaacaataatg

SEQ ID NO: 190380 - DNA, 266 bp, Glycine max
ctatcaatttgcatggtgtccttcacgttcaagccaccaaagtaggatctgatacagttttgagtcagataattagtttggtggagacagcccagatgtccaaagctcccattcaaaagtttgctgattatgtaccattcttttggcttgcaggttgctagcatatttgttcctacagttgtggtgttggcattattgacactattgtgttggtatgtagctggggctcttggagcatacccagatgaatggctgccaaataatgg

SEQ ID NO: 190381 - DNA, 286 bp, Glycine max
gtgagaagaagagggggtcagagtgagaaagagaaagagagaattcgtaaaccctaatttcggaaagatcggcgatgactgcctccaaggatcgcgagatcttcgtctacatcgccaaactcgccgagcaggccgagcgttacgaagagatggtggaatcaatgaagaacgttgcgaatctcgacgttgaactgacggtggaggagcggaatttgctttctgttgggtacaagaatgtgattggtgctcgcagagcgtcctggaggatcctgtcttccattgagca

SEQ ID NO: 190382 - DNA, 269 bp, Glycine max
agataacctaagcttagaattagaaacagagaaaagaagaaaggaaagaattgatcgttgaaaatgcagggaggaaagatagcgggagattccattatggaaacagctacaaacattggtgcttcggccaaggctggcatggagaaggccaaggccactgtccaagagaaggcagaaagaatgacagcacgtgatccggtgcaaaaggagttggcaacccaaaagatagaggcaaagatgaaccaggcggactggacaagcaggcggcg

SEQ ID NO: 190383 - DNA, 272 bp, Glycine max
gtgaagtttctgataccaaacaatgccgtcatcgtccttcagggacgctacgccggcaaaaaagccgtgatagtgcgaaccttcgatgaaggcacgcgcgacgcccctacgggcactgcttggtggcagggataaagaagtaccctgcgaaggtgatcaagaaggattcggccaagaagacggccaagaagtcgcgtgtgaaggcgttcgtgaagctcgtgaactaccagcacctcatacccacgcgctacacgctcgatgtcgatttgaag

SEQ ID NO: 190384 - DNA, 270 bp, Glycine max
aatcaaagagcataatgtcagggatcattcacaagattggggagatccttcatgtgggagggcacaagaaggtggaggagcataagggtgagcaccatgctggagaatacaaaggggagcaccatggtgaacacagtagtgagtacaaaggagagcatcatggtgaacacaaagctggagagtaccatggtgagcacaagccagagcacaaagaggggttcctagacaaagtcaaggacaagatccatggtgagggcggcgccgcgaggg

SEQ ID NO: 190385 - DNA, 283 bp, Glycine max
tcagaattctgctcaatgttagaaatgctacaatacaaacaatggcaactactcaggaagatgtgaagcttttgggtattgttggatgcccatttgtgtgcagtgtccagattgcccataagttgaagggagttgaatagaaatttttggtagaaaatttgggcaacaagagtgatttgcttctcaaatacaaccctgttcacaagaaggttccagtgtttgttcacaatgagcagcccatagcagagtctcttgtgattgttgaatacattgatgagacatg

SEQ ID NO: 190386 - DNA, 262 bp, Glycine max
gttggggctgatcatgctgtgtttgagcaaggtgcttccgctggaaatgtcggaaaggaaaagatggtggagcagaagaaggcaaatcctgttgctctgcttctctcctccgccatgatgctcaggcatctacagtttccttcaatcgcggaccgccttgagactgctgtcaagcgtgtcatttcggagggcaactgcagaactaaagatcttggtggagacagcactacacagcaagttgttgacgctgtcattgccaatc

SEQ ID NO: 190387 - DNA, 291 bp, Glycine max
gctcggatgttggctcgagcaaagccttcctagaacgaaaaataaaaagaagagcaattttccctcatgaaagaagaagaagcaaacaatggccgatcaacttaccgatgaacagatctccgagttcaaggaagccttcagcttgttcgacaaggacggcgatggttgcttcacaaccaaggagcttggaactgttatgcgttcattggggcaaaacccaactgaggcagagctccaggacatgatcaatgaagtggatgctgatgggaatggtaccattgacttccctga

SEQ ID NO: 190388 - DNA, 263 bp, Glycine max
tcgagcctgattcggctcgagcggctcgaggcataatcttgttgtctgggcacggccgctattcaaagaccgttagaagttccccaaaattgctgaccctctacttcaaggccgttacccgatgcgaggactgtaccaagcacttgcagttgctgcaatgtgtctgcaggaactagctgctacaaggcctcttattggagatgtggtgactgctctcacatatctggcctcacagacatacgaaccaaatgcagccaatcaat

SEQ ID NO: 190389 - DNA, 269 bp, Glycine max
caaacctcttcgttccttcgattcattccatttcttccaaaatggccaaagacccagttcgcgttctcgtcactggagccgcagggcatcttggatatgctcttgtccctatgattgctaggggagtgatgctgggtcctgaccagcccgtgatcctccacatgcttgacattcctccagcagcagagtcgttgaatggggttaaaatggaattggtggatgctgcattccctcttcttaaaggtgttgttgctacaaccgatgtggtt

SEQ ID NO: 190390 - DNA, 276 bp, Glycine max
agcgaatggtcctgacccttccatcgacccttcatttctttcccaactacaatcactatgccctcaaaacggtgacggttcaaaacgagtagcgctagatacgggtagtcaaaccaaatttgatttatcttactatagtaatttgaggaattctcgtggaattctgcaatctgatcaagcactatggagtgatgcttccacaaagacaactgttcagaggtacttgggcttaataagagggttacttggattaacattcaacgtggaatttgggaa

SEQ ID NO: 190391 - DNA, 262 bp, Glycine max
attttgttcgcgtgaaggtaagatattgctttgatactaaaagattggggtatgtttacgaagatgttgatcttccatggttgcgaacgccacccacatcgcgaaatagcaagctactaagagaagccaaaaagggttcacttttgagttcaaagccatggaaatttcctttggttttggattccataacgagtattgttgttaagaggccgaagatatggaggtgcatggaggagatagatcaagatgaggaggttttggt

SEQ ID NO: 190392 - DNA, 154 bp, Glycine max
  unsure (1)..(154): unsure at all n locations
tttcgctatgatgttaccgcctgtgataccaaggtgattcctggtgaatatggtntcgttgctcagcttatcgagggtcgtcacctcaagaagaggccaactgagttccgtgttgataaggtccttcaaccctttgatgaatacaaattctact

SEQ ID NO: 190393 - DNA, 265 bp, Glycine max
  unsure (1)..(265): unsure at all n locations
gcagatccaggttacggaagcaggctgaatgtgatgaactagctcagcgtgctgaagctttganagangaaaatgccactctccgatcagaagtgagccagatcaggagtgagtatgagcagctacgttctgagaatgctgccctcaaggagagacttggggacatacctggtgtcgcgacgcctgggaaggaggatcttaggtctggtcagaatgatcagcatgtgagtaatgacactcaacagagtggtcagacagaggttgt

SEQ ID NO: 190394 - DNA, 263 bp, Glycine max
gtctaagggctcttacaaaatcccagttgggtgagattctaacaccagctgcttgcaccattgtttcttcgctcaataacgataatgtcgactcctttgttctatctgagtccagcctctttgtttatgcctactagatcatcatcaaaacctgtggtactactaagctattgcttgctatcccacccatattgaagttcgctgaaatgctttcccttaatgttaagtctgtgaattacaccaggggaagtttcattttcccc

SEQ ID NO: 190395 - DNA, 266 bp, Glycine max
ctagaaacagtgtgatgaaaatgaaggtccttgttttcttcgttgctacaatttttgtagcatggcaatgccatgcgtacgatatgttccctctccgaatgaacactggctatggtgcccgtactccggaggtgaaatgcgcaagttggaggcttgctgtggaaccacacaacatctttggctttgagaccattcctgaagagtgcgttgaagcaacaaaggaatacatccatggcgaacaatatagatcagactccaaaacagtt

SEQ ID NO: 190396 - DNA, 272 bp, Glycine max
caagtccaaggatttaatttcagcttttggcaccgatgaccactccaaaatttgcttagatattttaaagataggggagcttcaggtagctgggaaagagagggaatcattgttatcgagtcagttcagggatattgcgaccattgtgatgcacaagacttacaatcctgagactcagcgtccatacactatcagtatgattgaacgcctcatgcgggatatccattttgctgttgatccacacagcacctccaagaagcaggctctggagt

SEQ ID NO: 190397 - DNA, 256 bp, Glycine max
ggaagatgtgctgtctcttcataaacgatcttgatgcaggagctggtcgtcttggtggaaccactcaatacactgtgaacaaccagatggtgaatgccaccctcatgaacattgctgataaccccacaaatgttcagcttcctggcatgtacaacaagcaagagaacccccgtgtgccaatcatcgtcaccggtaacgatttctcaacactctatgctcctctcatccgtgatgggcgtatggagaagttctactg

SEQ ID NO: 190398 - DNA, 261 bp, Glycine max
gttcacgtgcatccatctacgatgtgttcctcaacttcagaggggaagacacacgctatggtttcaccggcaatctctacagggctctttctgacaagggaattcgtaccttctttgacgaagagaagcttcacagcggagaggaaataacacctgcacttttgaaggcaattaaagattccagaattgccatcactgtgctctctgaagactttgcttcttcctcattttgcttagatgaacttacatccattgttcact

SEQ ID NO: 190399 - DNA, 264 bp, Glycine max
gctatagtaagctacacttatttgaggttggagaaatatggctaaagatgttgaggttcaagagcaaggaggagagtactctgcaaaagactaccatgaccctcctccagcacccttgttcgacccagaggagctcacacagtggtccttttatagagccctaatcgctgagttcatagcaacccttctcttcctttatgtcaccgtgctcaccattattggctacaaaaggcagactgatgccacgctaggtggcaccgagtg

SEQ ID NO: 190400 - DNA, 266 bp, Glycine max
cttcactattgccgtcattagtgttgcctgatatgtcatcaccatcgccgtcgttagtccaccgtagccctatccgtgatggcgattcattttgcagaggggacttcaggtagaagctgatgtcccagtagaaagttttgaattgtcacctgttgaccagatttttgttcgaataaggccaaagtacatttttaattaagctttcaaaaactgcatcaattctgtcatcagctactcataattcattggtggctctggatgagctt

SEQ ID NO: 190401 - DNA, 256 bp, Glycine max
agacagcgcgtcttaataaacgctcttctctgaaaacccccatttcttttcttctttcttcttctctttcgcttcttcgatcttcgatcttcgtcgctgaaaatgagagagtgcatttcaatccacatcggccaggccgggattcaggttggaaacgcctgctgggagctttactgcctcgaacacggcattcagcctgatgggcagatgccaagtgacaagaccgttggtggaggtgatgatgctttcaacacct

SEQ ID NO: 190402 - DNA, 254 bp, Glycine max
atgaagatgtgaagcttttgggagttgtgggaagcccatttgtgtgtagggtccagattgccctcaagttgaagggaattgaatacaaatttgtggaagataatttggccaacaagagtgatttgcttcttaaatccaacccagttcacaagaaagttccagtttttattcacaatgagaagcccatagcagagtctcttgtgattgttgagtacattgatgagacatggaagaacaaccccatcttgccttct

SEQ ID NO: 190403 - DNA, 259 bp, Glycine max
acatcgagccgattgcgactcgagcgagctcgagcttggaacccaagaccttgaggtttcaaaaatgggattcggatgtatgacccttactgacagcgtacaatgaccctctccaagaacaggatggcatatctgttatcaagtatgcgttcagtaagggaatcacattttttgatactgcggatgtttatggagccaatgctaatgaacttttggttggaaaggctttgaagcagctgcccagagaaaagattcagat

SEQ ID NO: 190404 - DNA, 250 bp, Glycine max
aaagagatggtggagttcatgcagaaggtggtggtggggtggacgccgacgtcggagctcacggtggaggagcgcaacctcctctcggtggcctacaagaacgtgatcgggtctctgcgtaccgcgtggcgcatcgtgtcctccatcgaacagaaggaggaagggcgcaagaacgacgaccacgtgtccctcgtgaagcactacagatccaaggtcgagaacgagctcacgcaggtctgcgccacatcct

SEQ ID NO: 190405 - DNA, 139 bp, Glycine max
accttcctagaacgaaaaaaaaaaagaagagcaattttccctcaccaaagaagaagaagcaaacaatggccgatcaacttaccgatgaacagatctccgagttcaaggaagccttcagcttgttcgacaaggacggcga

SEQ ID NO: 190406 - DNA, 251 bp, Glycine max
accctcctcgggtcaagctcagtcagcactgcaccgcaaatttttctttgcccctttcgaagagtaacgccacagactccgccggcgagatcccaccggagacgaggtccgccgagagtgacgattaagatcaatgttacgcacggttcctctcaccacgatttaaacctcccggcccaatcaacttatggggatgttaagaaactccttgtcaataaaactggtttagagcctgcagagcaacgactttt

SEQ ID NO: 190407 - DNA, 249 bp, Glycine max
tagaactggtatgaaggtttctataagacatcttggcccgtccatgattcagcagatgcagcatgcttgcaatgaatgcaagggtactggagaaaccatcaacgacagagatcgctgcccacagtgcaagggagaaaaggttgtgcaggagaaaaaagtccttgaagttattgtggaaaagggaatgcagaacgggcagaagattacattccctggcgaactgatgaagcgccagacacaattactggg

SEQ ID NO: 190408 - DNA, 241 bp, Glycine max
tgctcctactaaggtggacaatgccaaaaggtctgatcccaaagctcaggccttgaagacagctaaggctgtcaaatcaagaggtcaagtgtttaggaagaaagctaaaaagatcaggacatcggttacatttcacaggccaaagaccttgaagaaggaaaggaaccctaagtaccctcgcattagtgctccacccagaaacaagttggaccattatcagatacttaaatttcctctaact

SEQ ID NO: 190409 - DNA, 242 bp, Glycine max
ataagttatcctcataaatacactctaattatgtggcaagataactgtctatacttagtaacattgccacatattgtgttcattttggaattgtgccactaaaattctattcaattcatctatggctgcctcttcttatgctatgcaatcaatcctggcaaaccctttgatccgcatttccagcgggtctagggtgaaccaatttggcgttcctgctttgcacatgagaaggaatgttggcc

SEQ ID NO: 190410 - DNA, 269 bp, Glycine max
ggaattctgctcgataccgatgccactatgagggaaattaaagctgttgactatgaaaaccagaagaatttattatctgatgcatggagaatgaaccagcttcagaaacatctcagtgatgaagatcatccgtatcataaatttagtacagggaactgggacactttggaagttagaccaaaagcaaaaggattagatacaaggagcgagcttctcaaattctatgaagaaaactattctgctaatctaatgcatctagttatatacac

SEQ ID NO: 190411 - DNA, 239 bp, Glycine max
aaaaccttcgtcgcaaaatgcaacaaattcagaggcctcaaaccgagagaatacgctgccttgaaggactgcgctgaagaaatcagtgacagcgtcgaccggctcagccggtcgctgaaggaactcaaattgtgtaaggtgaagggtgaggacttcacgtggcacatcagcaacgttgagacgtgggtgagttcggctttgaccgatgagagcactggcggcgatgggctcgcagggaa

SEQ ID NO: 190412 - DNA, 237 bp, Glycine max
ctcgagccgcttggactatggtttcaagggagctaaaattgccatggcttcttactgctcacgaactccaatatcttgcaaatccagtaactacccatgtccaaagtgctgagcaacacaaccaggatgtcaactctttgggcttgatctcatctagaaagacaaatgaagccatcgagatccttaagctcatgtcttccacattcttgattgcactttgccaagcaattgacttgg

SEQ ID NO: 190413 - DNA, 128 bp, Glycine max
  unsure (1)..(128): unsure at all n locations
cnaccncacttctgctccgcanttatcatgggcnatgtctnnatcggaatcaacngatttggaagaattngccgtttngtagccagagtggctctgcagagagaaccatgttganctcgttgccgttt

SEQ ID NO: 190414 - DNA, 236 bp, Glycine max
atgcgctaaccccttctctctctctctctctgctcggttctccgatcgccgtctttgccttgcccattcctgatcaatatgtctagaagatatgatagccgtacaacaatcttctcccccgaaggacgtctttaccaagtggagtatgcaatggaggccattgggaatgctggaactgcaatagggatcttgtcaaaagatggggtagttctggttggtgaaaagaaggtcacatc

SEQ ID NO: 190415 - DNA, 248 bp, Glycine max
gtttgttttctttgttgctgcagtagttttggtagcatggccatgccatggcgcaggctaccaaaggttccctctccgaatgaaaactggctatggtgagcgttcttcggaggtaaaatgcgcaagttttaggcttgctgtggaagcacacaacatccgagcatttaaaaccattcctgaagagtgcgttgaaccaacaaaggactacattaatggcgaacaatttagatcagactctaaaacagtta

SEQ ID NO: 190416 - DNA, 250 bp, Glycine max
cttgagaaacattattcccattgctatatattatggctagcatgaaggttacatgggtggttgtgatcatgtgcatggccgtggtgggtgcaccgatgatggcgcaagcacatgacatgcaatgatgtgacggtgaacatggcacagtgcctatcctacctgatgcagggaggaacaccttcaacactttgctgcagcggagtcaagaacattcttggctctgctgtcaccaccgttgacaaacaaactg

SEQ ID NO: 190417 - DNA, 130 bp, Glycine max
tacgcttcaatgcgtctcgtagggctaatccgcctcacgatagtcaccaacggcactcaacttttgagggccgaggccccctactgctggtcggcaaacggacggcgggcgcacgcgtcgcttctagccc

SEQ ID NO: 190418 - DNA, 239 bp, Glycine max
tactaccttaagatccaaattttatccattaatagatggagcgtcgatcgcagctagatctagagggaaattatgagcattacgttcatgcattacttccataccaaggttagctaggttaataatatcagcccaggtattaattacacgaccttgactataaactacggattggttgaaatttaaaccatttaagtggaaagccatagtgctgatacctaaagcggtaaaccagatac

SEQ ID NO: 190419 - DNA, 234 bp, Glycine max
tagtgccctgagatcacattgaacaatggtgaatgctgtggccgttcttggcataggtgagggcgtcactggaactattcacttcgttcaggagggaagtcatccaaccaccgtaactggatctcttgctggtcttaagcctggtctccatggtttccatgtccatgccttgggggacactaccaatggttgcctctcaactggatcacatttcaatcctaataacaaggagca

SEQ ID NO: 190420 - DNA, 248 bp, Glycine max
agacgctacgacgacatgtgggcaggctggtgctgcaaggtaatctgtgatcacttgggattcggaatcaagactggtctgccctatatctatcacagcaaggccagcaacccatttgtgaacttgaggaaagagtacaaaggcatattctggcaagaagacattatcccgttcttccagagcattgttcttcctaaagaagctaccactgttcagaagtgctacattgagcttgccaagcaagtcaa

SEQ ID NO: 190421 - DNA, 246 bp, Glycine max
ctcgagccgggaaaagatctggcatcacacattttacaatgaattgcgtgttgctcctgaggagcacccagtgcttctgactgaggctccactcaacccaaaggccaacagagaaaaaatgacccaaatcatgtttgagaccttcaatgtgcctgccatgtatgtggccatccaagctgtcctctccctatatgcaagtggtcgcacaactggtagtgttttggactctggcgatggtgttagtca

SEQ ID NO: 190422 - DNA, 246 bp, Glycine max
ttaggatcacagatgagaattgtacaagaagcaccatcctcctagtctgtctgatgaagtttggagattggaaaaaatatgcaatgatggagctttccacaagcgcttgagtcatgaaaagatccttactgttagagagtttctcacacttctcaatctggatccagcaaaactgcgcagtatactgggcactggtatgtctgccaagatgtgggaagtaactgtggagcatgctcgaacttgtgt

SEQ ID NO: 190423 - DNA, 237 bp, Glycine max
taactcatttcacttgagacagttatctttatctacgcaagataagaatagaaaatggatatcaagttgatggatttggactctccattgtacaacactctgcaccgaatcatggatctgacagaggacgcagagaagaacttgaacgctccgacgcggacatacgtgcgcgacgcgaaggcaatggctgcgactcctgcggacgtgaaggagtaccctaactactacgtgttcgtg

SEQ ID NO: 190424 - DNA, 236 bp, Glycine max
  unsure (1)..(236): unsure at all n locations
aagagacaaggtgatcctacacgggatgtgggacagaccatatgccaagagggtggaattagcncttaattttaagggcataccctatgagtatgttgaagaagacttgagaaataagagtgatttgcttctaaagtacaaccctgttcacaagaaggttcctgtacttgttcataatggaaaggccattgctgaatccatggtgatccttgagtatattgatgaaacatggaaag

SEQ ID NO: 190425 - DNA, 160 bp, Glycine max
attcaggctcgagaggacaatatgaagttatttgttttctttgttgctgcagtaggtctagtagcatggccatgccatggcgcaagctaccaaaggttccctctccgaatgaaaactggctatggtgagcgctcttcggaggtaaaatgcgcaagtttta

SEQ ID NO: 190426 - DNA, 258 bp, Glycine max
  unsure (1)..(258): unsure at all n locations
caaagctcaacaccttgtcttcccagtggatcgcccacaattccttctctcctcgccgtggatcctcttctcgccgagtctctcttccgatccgcgcttcttcttaccaacacgaactcntccaaaccgccaaatctattgcatctcccggtcgtggaattcttgcaattgatgaatcaaatgccacatgtgggaagcgtttagcatccattggattggacaatactgaggtgaatcgccaggcctataggcaacttc

SEQ ID NO: 190427 - DNA, 249 bp, Glycine max
gcgaaattcagctgatctgtatcgaagctttgggtttgatacgcagccagtcctcattgggctcatcatatttcagcatactgtaatcccacttcagcaattggtcagctttggtctgaacctagtcagccgatcatttgaatttcaggctgatggctttgccaagaagcttggatatgcatctggattacgcggtggtcttgtgaaactacaggaggagaatctgtcagctatgaatacagatcttgg

SEQ ID NO: 190428 - DNA, 250 bp, Glycine max
atagatcactagcaatttccatagtaacaggaacaccagaaagttcttccaagatgggtctagctgccaaagcagcattataacttgtaccacaaccaatgaaaagtatccttctacttcgcctaattgttttgaggtgatccttcagcccacccaacagaacagacttggatttgttagatcctcgatgtataagcctccccctcattgtggttgttagagactctggctgctcatgaatttccttttg

SEQ ID NO: 190429 - DNA, 250 bp, Glycine max
tatcaaaagcagaaggtcaagaatatcaacaaggtcaacgtagattcctatactagacatggcgtctgaaggacacattctacatatctcatggatcaccaactttgtccatagatgaatccattcaggccaggaagttccttcagtcatggaagaaggacgtgtttcctcaaagaccctcttcaattcttgtcatcatggtcattgggaaaccgcaatccccagggtcaacgtcgtacactcccatcaa

SEQ ID NO: 190430 - DNA, 252 bp, Glycine max
tgtttgtcttctttgttgctgcagtagttttggtagcatggccatgccatggcgcaggctaccaaaggttccctctccgaatgaaaactggctatggtcagcgttcttcggaggtaaaatgcgcaagttttaggcttgctgtggaagcacacaacatccgagccgttaaaaccattcctgaagagtgcgttgaaccaacaaaggactacattaatggcgaacaatttagatcagactctaaaacagttaacc

SEQ ID NO: 190431 - DNA, 250 bp, Glycine max
atatctatctattgagaaacatgaagaaggtttcacccttggcattttccattctctttttggccttcaccatagaaccctttattggcattgctgcagcagcccagaagcagtgcttgacacctcaggccagaagctgagaacaggtgtcaagtactacattctgccagtgttcagaggcaaaggtggaggcctaacagtttcaagcagtggcaacaacacatgccccctctttgtggtgcaagagaag

SEQ ID NO: 190432 - DNA, 252 bp, Glycine max
gtgaaggcattgcataccagtggaattacatggttgaaaatcagtatggggatggaggaaggaaagcaggaagttgtccacacagagcagaatcttctcctcttgatgacaagagcaagtccttagtgttggtaaactatttccgctctacgccatttaagcctattgcatgtgaagataactctggaggactcattgacatgctacaaacctgtcatggtgctgctgccaacaggtgggctaattatctgg

SEQ ID NO: 190433 - DNA, 250 bp, Glycine max
ggaaggaagaagatgggtggcgtgacctcttcaatggcggcgaactggcgttcttccctccgtccccggcgtcctacaaggtgctgaaggaggaggcgacggggctgctgctcatggagccgttcccgcaccgcgagaacgtggagattcttcggttcccgaaccgccgcggcacggagatcgtggccatgtacgtgcggcaccccatggccaaatccaccttgctctactcgcacgggaacgccgccga

SEQ ID NO: 190434 - DNA, 137 bp, Glycine max
ctacctctttttcttctctctcaacaacttcatcttcttcctcctcgatcatgtctcacttcaagggcaagtaccatgatgagcttatcgccaatgctgcgtacattggcactcctggaaagggtattcttgctgct

SEQ ID NO: 190435 - DNA, 246 bp, Glycine max
cggctcgaggtctgcaactccagaaactcttcttaaggaagctattcatgttatcagttgtggttacgaggataaatcagaatggggaagtgagataggatggatctatggttctgtcacagaagatattcttactggattcaagatgaatgcccgaggttggaggtctatttactgcatgcccaacctcccagcgtttaaaggttctgctcctatcaatctttcagatcgtctgaaccaagtgct

SEQ ID NO: 190436 - DNA, 250 bp, Glycine max
acgaagaagaggtgcgcaagatcttcagcaagttcgacaagaacggcgacggcaagatctcgtgcgcggagctgaaggagatgatggcggcgctgggatccaaaacgacgtcggacgaggtgaagcgcatgatggcggagctggaccggaacggcgacggctacattgacttgaaggagttcggcgagttccactgcggcggcggtggcgacgggagggagctccgggaggcgttcgagctgtacgatct

SEQ ID NO: 190437 - DNA, 197 bp, Glycine max
ggagggcaaaggtttcacggaagagcaagaagctctggtggtgaaatcatggaacgaaatgaagaagaattctcaagaactcggtcttaaatttttcaagaaaatattggagattgctccagcagctcagcaattgttctcattcttgaaggattccactgttcctttggaggaaaaccccaagctcaagccccatg

SEQ ID NO: 190438 - DNA, 245 bp, Glycine max
  unsure (1)..(245): unsure at all n locations
tattccttcattccacagaacttaaaaattaaaaaanattttnnnnaannatggccgatgccgaggatatncaatttctcgttatcgataatggaaccggaatggtcaaggctggttttgctggagatgatgcaccgagggctgtgttccctagcattgtggggcgtccacgtcacactggggtgatggttgggatggggcagaaggatgcgtatgttggggacgaggctcaatccaagaggggt

SEQ ID NO: 190439 - DNA, 241 bp, Glycine max
gtggtcgtcaacacctcatggaaacaagaagttggagaatgcttatgaggatgcaaagaaaatagcagctgaaaagtctgaagtgtgccctattttcctattgttttctgttaatgcaagtggacagttctgtggggttgcagagatggttggtacagttgactttagcaagaatatggacttttggcagcaagataactggagtggaagctttcctgtacaatggcaattataaaagatg

SEQ ID NO: 190440 - DNA, 247 bp, Glycine max
aaaaacagcgccctagatttgctcttctttgcttcggaagaaagagaaaaacaaataacaatggcgttcgcttctttcctcggcagagttctcttcgcttccgtcttcatactctctgcttaccaagaatttaacgaatttggagttgatgggggacctgcagcaaaagcactcagacctaagtttgatgcctttacacatcgagtgcattctcaagttggctttcaacttcctgagattgatctga

SEQ ID NO: 190441 - DNA, 251 bp, Glycine max
aaatgcatcttgttacatattggctgaagatgcatcttgtttgttagatacaaaggagaggctcactccttgaaggtggaaaagattttgtttcaaggaaagtcagaataccaaaatgtcatggtcttccagtcatcaacatatgtcaaggttcttgttttggatggagtaattcagctaacagaaagggatgaatgtgcctaccaagaaatgatcactcatcttcctctttgctctattccaaaccctaa

SEQ ID NO: 190442 - DNA, 247 bp, Glycine max
agatggtgagattgtccaggctgccgctctagtgagtcaatcagccctttacaacaaggagcttatgcatcagcagccagttggaccagccatgattcatccatcccaaacagctgcaaaagggccgagttggagtgaccttttagagcctggagtgaagcatgcactgattgtgggggtggggattcaaattcttcaacagttctctggtataaatgtggtgctctactatacacctcaaattctt

SEQ ID NO: 190443 - DNA, 236 bp, Glycine max
cagcaatggcgccgaagaagccgagaaccacgacaaggaaccctgatttggttagggggattggcaagtattcgaggtcgcagatgtaccacaagagcgggcatctgggccatcaaggccaaaaactgtggcgttttgccccgccacgatcccaagcccaagcccgaggccccggcccagaagccgcccaagttctaccccgcggacgatgttaagaagcccctcgtcaacaagca

SEQ ID NO: 190444 - DNA, 132 bp, Glycine max
tcttcaaatcaatctcttctcagaaatgggtgtggctcaaaacattcccgatgcggaggagggaaccttggagattggaatggaatacagaactgtgtctggagttgctgggccattggtcattcttgataa

SEQ ID NO: 190445 - DNA, 223 bp, Glycine max
cgaccaggttcaagaagaacaggaagaagagaggtcacgtcagcgccggacacggccgtatcggaaagcaccgcaagcatcccggaggtcgcggtaacgccggtggcatgcatcaccaccgtatcctcttcgacaagtaccatcctggtttcttcgggaaggtaggcatgcgctacttccacaaacttcgcaacatattctacaatccgatcatcaacatcga

SEQ ID NO: 190446 - DNA, 244 bp, Glycine max
cttgcaacttcacccaagtctcaaacaaccttttaaacctcatcaaacatgtctctcattccatcattgctaagcaacagaaacatcatggaccccttctccatcaacatctgggcaccctctgactccgacagcgaggtttccgccttcgtgaacgcacgtgtggactggaaggaaaccccggagtcgcatgtgttcaaggcggacttgccggggctgaagaaggaggaggtgaaggtggagg

SEQ ID NO: 190447 - DNA, 251 bp, Glycine max
gttagggttcccaatttctccgccaatcagaagatgagttccaccggtggttctaccaagggcggaaggggcaagcccaaagcctccaaatccgtttcaagatcgcagaaagctggtctccaattccccgttggaagaatcgctcgattccttaaggctgggaaatacgctgagcgtgttggtgctggtgctcctgtgtacctctctgcagtgctcgagtatctcgctgctgaggttttggaattggctgg

SEQ ID NO: 190448 - DNA, 246 bp, Glycine max
aattcatcaccttggaaggagataacctcactagtctgtttcctggtacatccttagatttgggtggtttcaagttagactctatgcatatgtttggagtttggctgaaggatcttcgtataatctcttatctatcaggtggaggggttgttgcaacaattttgattatgatttgcgtgttttgtgttgggacaatagacagtgttggattccatcacacgggtcaattggtcaaaatggactggc

SEQ ID NO: 190449 - DNA, 236 bp, Glycine max
cttccatctagcagcaccttaggatggcatagccttaaagttaagggcgaggttcaaacgaagaaaggcttatggtggatacctaggcacccagagacgaggaagggcgtagtaagcgacgaaatgcttcggggagttgaacataagcgtagatccggggattcccgatataggtcaacctttcgaactgctgctgaatccacgggcaggcaagagacaacctggtgaactgaaac

SEQ ID NO: 190450 - DNA, 240 bp, Glycine max
ctcgagcctgagagtgctaagcaatcgtcttctcttctcggaacttggctttgcttatcgattctctctcctctcgtttctctaattccaaggtttgtaaaagatggcagatgccgaggatattcaaccccttgtttgcgacaatggaactggaatggtctaggcaggatttgctggtgacgatgctcctagggctgtctttcccagtaatgttggccgacctcgacatactggtgttat

SEQ ID NO: 190451 - DNA, 241 bp, Glycine max
atttataaaaagctctttcccttcccctaaatccctcacactcattccatttttacctttctctctcgctcgcaaacgcaaataataaaaaacaaggttttagccatggcatcgaagcggatcttgaaggaactcaaggatctccaaaaggatcctcctacctcatgcagcgccggtcctgttgctgaagacatgtttcactggcaagcaacaattatgggtactccagaaagtccttatg

SEQ ID NO: 190452 - DNA, 237 bp, Glycine max
ctttctcaagggttgagattgcacatattgctgaacttattgaacttcccaccgatcatgtggatcggaagttgtctcagatgattttggacaagaagtttgctggaacattggatcaaggtgctggatgccttgtcatattcgacgatcccaagactgatgctatatatcctgctactctagagaccatttccaatgttgggaaagtcgtggacagtctttatgttaggtctgcca

SEQ ID NO: 190453 - DNA, 224 bp, Glycine max
ggcgacccatacatccttcacaccaacgtgtttagccaaggcaagggaaatagggagcaacaattctacctctggtttgacccaactgcagattttcacacctattccatcctatggaaccctcaacgtattgtcttctcagtggatggaagtccaattagggagttcaagaacatggagtcaaagggtgttccattccccaagaaccaggcaatgaggataaa

SEQ ID NO: 190454 - DNA, 245 bp, Glycine max
gggaaactttgatgtgtttgactggtctattccagaagaagtgatggataagttctctgaaattaagcaggatagactaattaagggcactttttttgttgacgagacctatggtgcctttaagaccgttgaagagctttgggatggtgaactctgagcaatatgcttcatagagatgttgacaaatgcactgctcctcaagcagattgattccgccttttacctgttaagatcttaaagctacc

SEQ ID NO: 190455 - DNA, 247 bp, Glycine max
gagggcgtcactagcctgtggagaggctcatcgcttacggtgaaccgcgccatgctcgtgacggcgtcgcagctggcttcctacgaccagttcaaagaaatgattctcgagaacggcgtgatgcgcgacggcctcgggacccacgtcacggcgagcttcgcggcggggttcgtggcggcggtggcgtccaaccccatcgacgtgatcaagaccagggtgatgaacatgagggtggagcccggggagc

SEQ ID NO: 190456 - DNA, 239 bp, Glycine max
ctttagtttaggatgacccaagtgaggaacaagcaagtggttctaagagactatgtcaccggattccctaaagaatccgacatgaacattgttgaaggcaccataatattgaaggttccagaaggttccaatgatgtccttctaaaaaatctctacttgtcatgtgatccatacatgcgactcctcatggccaaggaccgttctttcggagatggctccttcacccttgcctctccatt

SEQ ID NO: 190457 - DNA, 125 bp, Glycine max
aagaaaaggagtgagagatggagaacttccctgtgatcaacttgaagactatcaatggtgaggagagaaagactatcttggagcaaattcaagatgcttgtcagaactggggattttttgagttg

SEQ ID NO: 190458 - DNA, 127 bp, Glycine max
gttcgtataccacagattggtgataaattcagtagtagacatggtcagaaggggacagttggtatgacttatacacaagaagacctgccctggactgtggaaggcattacccctgatattattgtca

SEQ ID NO: 190459 - DNA, 128 bp, Glycine max
cggaatgggaagggtgattcgcgcacagcgtaagcgctgcggggtcggtgttcaagtcccacacccaccaccgcaagggtccggcgacgttccgcagcctcgacttcggcgagcgcaatcgctacctc

SEQ ID NO: 190460 - DNA, 131 bp, Glycine max
ctcgagccgctggcggagtcaactgaatgaccaaagcatcggttgcttccacttgtggcctacttcgaccgccttgacaccttaatctcagggaaccccctctcctctcttcttctcttcatgtatgtggg

SEQ ID NO: 190461 - DNA, 250 bp, Glycine max
  unsure (1)..(250): unsure at all n locations
tgcagaacttagggnntgggcctttttttgaggtttncagcgcttctttctcacaatggttcttcagaatgatattgatttgctgaatcctccagctgagttggagaagagaaagcacaaactcaagcgtcttgttcagtncaccaaactctttcttcatggatgttaagtgccagggatgcttcaacataacaactgtgtttagccactctcaaactgttgtggtgtgcggaaactgccagactgtttt

SEQ ID NO: 190462 - DNA, 230 bp, Glycine max
tattaagttggccaattcagcacctttgatcaatggaaagctccgttatgctgttaacagtgtctcctatgttaaccctgacacccctctcaagcttgctgattacttcaacattcccggaatcttcagtgtgaatttactccaaaactctccctcaatggtccaggatacataggcacctcagtgttgcaaacttctctccatgattttattgaggttattttccagaa

SEQ ID NO: 190463 - DNA, 282 bp, Glycine max
cgtctacatcgccaaactcgccgagcaggccgagcgttacgaagagatggtggaatcaatgaagaacgttgcgaatctcgacgttgaactgacggtggaggagcggaatttgctttctgttgggtacaagaatgtgattggtgctcgcagaggcctggaggatcctgtcttccattgagcagaaggcagaaccaaaagggaacgagttgaatgcgaaccggattaaggagtacagacagaagggtgaattggagctatcgaacatctgtcatgatgttctga

SEQ ID NO: 190464 - DNA, 282 bp, Glycine max
tgagacaggtgtggaaggcaaatatacctcatacccatcttgcaactgaaaaatctgaccagaactggatggttgtgaaaggcgaaacaatagtgtttcctggtggaggaacccacttccataatggtgctgataaatacattgcttcaattctaatatgcttaattttccaaacaacaatataaataatgggggaagagtcaggtctgtctctgatgttggctatgaggttgctagctttggaggatacctcctttcctccaatgtgatagctatgtcatt

SEQ ID NO: 190465 - DNA, 282 bp, Glycine max
cctaggcacccagagacgaggaagggcgtagtaagcgacgaaatgcttcggggagttgaaaataagcgtagatccggggattcccgatataggtcaacctttcgaactgctgctgaatccacgggcaggcaagagacaacctggtgaactgaacatcttagtagccagaggaaaagaaagcaaaagcgattcccgtagtagcggcgagcgacatgggagcagcctaaaccgtgaaaacgggttgtgggagagctatacaagtggcgtgctgctaggccaaca

SEQ ID NO: 190466 - DNA, 186 bp, Glycine max
ctcgagtctgtcctgggaactaagagactcccttacccaagcagatcttttgagctcgctcattgttctcgttgtcgaattgattggcttcaaagagatggaattctacttcttgaactagaccggttgctcaggccaggaggttattttcatactcatctcctgacacatatgctcaggatgaag

SEQ ID NO: 190467 - DNA, 216 bp, Glycine max
gaaggaagcaaatgctaaaggaagtctatttcaaagatttccttcagatttgttgacacagctgaagacagattgtctcgtcctgcacaatcatcgttatgccatatccccacgcaagctacaatataataccaagttatctgactttttgagattctggcaacatctgaggatagagatggaaagactttcgtttccacagcacgtggtaggaaa

SEQ ID NO: 190468 - DNA, 206 bp, Glycine max
attaagttggccaattcagcacctttgatcaatggaaagctccgatatgctgttaacagtgtctcctatgttaaccctgacacccctctcaagcttgctgattacttcaacattcccggaatgcttcagtgtagatttactccaaaactctcctcaaatggtcgcggatcgataggcacctcagtggtgcaaacttctcgccatga

SEQ ID NO: 190469 - DNA, 210 bp, Glycine max
gtgaatcatgtcggacgaagagcatcacttcgattctcaggcggatgcgggagcgtccaagacgtatcctcagcaggctggtaccattcgccagaatggctacatcgtcatcaaatccaggccttgcaaggttgtagaggtctctacgtaaagacaggcaagcatggacatgcaaagtgtcactttgttgccattgctattgttactggg

SEQ ID NO: 190470 - DNA, 268 bp, Glycine max
cttaagttcattccttgtgttttgctttcttcctcaaaaccaaacatgtcgaacacatgcggcaactgcgactgcgctgacaagactagctgcaccaagggaaacagctatggtgttattgtagagactgagaagagttacatcgagacgttgtcatggatgttccagcagctgagcatgatggcagtgcaagtgtgggaataaactgcacttgcacggactgcactgtggcccattagggatatgtatgaacatgtaattgccatgt

SEQ ID NO: 190471 - DNA, 285 bp, Glycine max
  unsure (1)..(285): unsure at all n locations
atngggggtgatcgcgatggtaatccaagagtaactcctgaagtgacaagggatgtttgcttattggctagaatgatggctgctaatttgtattattcccagatagaagatcttatgtttgagctctctatgtggcgctgcaatgatgaacncgcgttcgtgcagaagaacttcacaggtcttccaagaaagatgaagttgcaaaacactatatagattttggaaaaaggttcccccaaatgaaccatatcgtgtggtactcggtgaagtaagggataggctcta

SEQ ID NO: 190472 - DNA, 184 bp, Glycine max
gctttctgtgagtaagaaattggacgtagagggcctagttactggggtcttctgcttcttacagctagctagcccagagctccaacaagcattacatattcagcgtctatctgagcaaactgcttcgaagagattgaatgcattaagttaatgaaaaggcagatcaggactcctttgtgtggaa

SEQ ID NO: 190473 - DNA, 210 bp, Glycine max
gccgccaccgacggcgacgccgatccgctttacataggttgtgtggagcagtgtaagacaactggatgtgtaggggatagatgctttcaacattgtaaattttcatcagatggaaaaccaattgatggtctatggtatatgcatgaacctctatctgaggtggaaacaatgggactgttgcactgactgtaggtattactggatgctagc

SEQ ID NO: 190474 - DNA, 283 bp, Glycine max
gcttatcagggttttgctagcggaagtctagatgcagatgcccagcctgttcgtttgtttgttgctgatgggggtgaattgctggtggcacaaagctatgcaaagaatctgggtctttatggggaacgtgttggcgccttaagcattgtctgaagtcagctgatgttgcaagcagggtcgagagccagctgaaactagtgattaggcccatgtactcaagtcctcctattcatggtgcatccatgtggctgccattctcaaggaccgggatttgttcaatgac

SEQ ID NO: 190475 - DNA, 223 bp, Glycine max
cagccccaaatccaatggcttcagagaagaaactttcgaacccaatgagggagataaaggtgcagaagctcgtcctcaatatctccgttggcgagagtggagatcgtctcaccagagccgctaaggttttggaacagcttcatggccaaacctgtgttttccaaagcaaggtaaacggttcgttcctttagggttagaagtaatgagaagattacatgctatg

SEQ ID NO: 190476 - DNA, 252 bp, Glycine max
attgaactctagtgaggatctctttccattgaaacggttcaagtggcttattgagttttccatggatcatgattggtgtgcagcagtgagaaaactgttgaacctactgcttgatggaactgtaaatacaggagatcatccttccttgtactcgcgctttcagagatgggtctccttcacaaagctgtaaggagaaacagcaagcagttagtggagtgtcttttgagatatgttcctgagaatattctgata

SEQ ID NO: 190477 - DNA, 219 bp, Glycine max
cagccatatccccatcgcaacttttctgaggaagttgctattcttgatggctactttggcaaacttggtgcaggaagcaatgcttatattttgggtggccaagacaaagcacagaactggcatgtctactctgcttctgcagattctgaactcaatgtgacaatgtttacactcttgagatgtgcatgactggcctggatagagagatagcacaggttt

SEQ ID NO: 190478 - DNA, 278 bp, Glycine max
actagccaatgcaaactgtaaacttaaaatatgtgattttgggttagctagagttgctttcaatgacacaccaacaactgtgttttggacggattatgttgctacaaggtggtatagagcaccagaactctgtggatcattttactaaggtatactccagcaattgacatttggagtataggttgcatctttgctgaagtattaataggaaagcctcttttccctgggaaaaacgttgtccatcagttggatctgatgacagatttgcttggcactcc

SEQ ID NO: 190479 - DNA, 219 bp, Glycine max
tatccctggcaaaacctatgttctctcattctctgttgagggatgctagcaactcctgtgaagggtccatgattgtggaagcctttgcaggcaaagacaccatcaaggtgccctatgagtccaaaggcaatggagggttcaagcgtgctcactcaagtttgtggcggttacccctagaacaagagtcatgttccttagcacattctacacatgagaagt

SEQ ID NO: 190480 - DNA, 198 bp, Glycine max
atgaagttgtttgttttctttgttgctgcagtagttttggtagcatggccatgccatggcgcaggctaccaaaggttccctctccgaatgaaaactggctatggtgagcgttcttcggaggtaaaatgcgcaagttttaggcttgcgtggaagcacacagcatccgagcttttaaaaccattcctgaagagtgctttg

SEQ ID NO: 190481 - DNA, 208 bp, Glycine max
gcagtgccccattgttgagagactcaccaactctctcatgatgcacggaaggaacaatggaaagaagctcatggctgtcaggattatcaagcatgcaatggaaattattcacttgctcactgacctgaaaccaattcaggtcattgttgatacgtcatcaatagtggtccccgtgaagatgcaactagaattggttctgctggagtgg

SEQ ID NO: 190482 - DNA, 277 bp, Glycine max
atgggtggagctgagatcattaaatctgaccctgttgtgtcattcagggagactgtcctggagagatcatgccgcactgtgatgagcaaatcacccaacaagcacaatcgtctgtacatggaagcaagaccattggaggagggtctgccgaggccattgacgatggcaagattggaccaagggatgaccccaagattcgctccaagatcttgtcagaagagtttggttgggacaaggatctcgccaagaaatctggtgctttggccctgagaccctt

SEQ ID NO: 190483 - DNA, 169 bp, Glycine max
tcggaatactgctcgagctcgagccgtcacccttgaggtcgagagctctgacaccattgacactgttaaggctaagattcaggacaaagagggtatcccaccagaccaacaaaggcttatctttgcaggaaagcatctatcagatggcagaaccttggctgattcaata

SEQ ID NO: 190484 - DNA, 266 bp, Glycine max
caaattttctctcccagaagaaatattttcatttcatttcgagtaaaagtaaaacacagttcctgatccatggcatcttgccgccgcatgttgttgaaggtcataatcctcggagacagcggggtttgtaaaacatcactgatgaacagtatgtgaatcgtaaatttagtaatcagtataaggcaaccatcggcgcagattttcttaccaaggaagttcaatttgaagataggttgttcacattacagatttgggatactgctggt

SEQ ID NO: 190485 - DNA, 212 bp, Glycine max
gttgaaccctacaacagcgtcctctccacccactccctcctggaacacaccgacgtggcggtcctcttggacaacgaagccatctacgacatctgcaggagatccctcgacatcgagagaccaacctacaccaacctcaacaggctctttcccagatcatttcgtccctcaccacttccttgaggttcgatggtgccatcaatgtggatatc

SEQ ID NO: 190486 - DNA, 227 bp, Glycine max
ccttctggcctttctggtgcccttggcttccatcgagaaattgaagctttgaagcatgtatttgccgtgagaatgaatcttggtgaccctgattttgtaaatataactgaggttctttctgatatgctttctcatagttttgctaaatgttgaaaaatgacatcaatgataataagacttttggccccagtcattacggcggcaggtggaatccgataaatggatca

SEQ ID NO: 190487 - DNA, 286 bp, Glycine max
  unsure (1)..(286): unsure at all n locations
tctctcaacaacttcaccttcttcctcctcgatcatgtctcacttcaagggcaagtaccatgatgagcttatcgccaatggctgcgtacattggcactcctggaaagggtattcttgctgctgatgagtcaacagggacaattggcaagcgttggccagcatcagtgtagagnacattgaatccaacaggcgagctcttagggagctgcttttcactgctcctggtgttcttcaatatctcagtggtgtcatcctctttgaggnaaccctctaaccagagcacagg

SEQ ID NO: 190488 - DNA, 185 bp, Glycine max
gttgcgatggaacttgtagctgaatccgagcgaactctgtacccatacgtgactggatcctctgtagtcgctatcaaatacaaagatgggattctaatggccgctgacatgggaggttcgtatggatctacactgcggtataacagtgttagcgtatcaagcctattgaaaagcattctcttctt

SEQ ID NO: 190489 - DNA, 274 bp, Glycine max
gttctttggaaagtctgcaagctaatgtgcagaggctgaaaacatacaaggccaaattggttgtgttcccaagacgggcacacaaggttaaggctggtgattctactcccgaggagcttgcaaatgcaacacaagtccagggtgctttctgcctattgtgagggagaagccaactgttgaacttgtaaaggttacagatgacatgaaggcatttaaagcttattacaagcttcgtcttgaacgcacaaacaaacgccatcatggtgccagactg

SEQ ID NO: 190490 - DNA, 272 bp, Glycine max
gctgattcaggccctggcgtttcggcccggtgggcctccgctgttgaggctcacgggaattgggcttccctcgtccgacaaccgcgacacgctccgcgaaattgggctcaggctcgctgagctggcgcggtccgtgaatgttaggttgcatttcgtggcgtggcggcgtggcgccttgaagacgtgaagccgtggatgctgcaggtgaatccgaacgaagccgtggcggttaactccatcatgcagttgcatcggcttcttgcttcggactc

SEQ ID NO: 190491 - DNA, 160 bp, Glycine max
atgtatccttcctagtgctgcttcttgcagcccttatcctcatgcctcaagggcttgctacttactacaaaccaattaagaagccagcagtgtacaagcctccagtgtacaagccaccagtgtacaaaccaccggtctataaggccgaccaccggtttac

SEQ ID NO: 190492 - DNA, 180 bp, Glycine max
gaattacctaaatgccactgtcactggagttctttctctaaccctcttctttttgtttttgtataatcccttcaaatttgcattaggtaaaaaagaggctcccaaatttgcaggtgcatggccaatacttggtcacctaccactatgagtggttcagagaaaccccttacggtgttggct

SEQ ID NO: 190493 - DNA, 227 bp, Glycine max
aattcggctcgacgggtaggtcactgattgtcgttgggagcgaacaagttccccgagagacagccaattgggacggcggcgcagagccaagacgacggcaaggactaccaggagccggcgccggcgcgactggttgacccgacggagttgacgtcaggtcgttttacagagcagggatgagcagagtttgtggccactttgactggttctctacatcactgtcttaa

SEQ ID NO: 190494 - DNA, 271 bp, Glycine max
cctaggcacccagagacgaggaagggcgtagtaagcgacgaaatgcttcggggagttgaaaataagcgtagatccggggattcccgatataggtcaacctttcgaactgctgctgaatccacgggcaggcaagagacaacctggtgaacgaaacatcttagtagccagaggaaaagaaagcaaaagcgattcccgtagtagcggcgagcgaaatgggagcagcctaaacgtgaaaacggggttgtgggaaactataaagtgtcgtgctgct

SEQ ID NO: 190495 - DNA, 254 bp, Glycine max
cttaataaacgctcttctctgaaaaacctgatttcttctcttattctcttctctttcgtttcgatcttcgatctctgaaaatgagagagtgcattcaatccacatcggtcaggccggtattcaggtcggaaacgcctgctgggagctactgcctcgaacacggcattcagcctgatggctcagatgcccagtgataagactgttggtgacagtgatgatgctttcaacagcttcttcagtgaaactggggctgg

SEQ ID NO: 190496 - DNA, 182 bp, Glycine max
tcgactgctacaatgtgctttgcattgctttcattatcactttaacgtgggcagttgaagctcgaattccggggatttactctggtggtgcatggcaaagtgctcacgccaccttctacggtggattctacgcttccggcaccatgggtggtttcgtgggtatgggaacctgtacagccagg

SEQ ID NO: 190497 - DNA, 277 bp, Glycine max
cttgctttcaccctaggtgtgaagcagatgatctgttgctgtaacaagatggatgccactacccccaagtactctaaggctaggtatgatgaaatcgtgaaggaagtctcttcttacttgaagaaggttggttacaacccagacaaattccctttgttcccatctctggttttgagggtgacaacatgattgagaggtccaccaaccttgactggtacaagggaccaactctccttgaggctcttgaccaaatcaatgagcccaagaggccctccga

SEQ ID NO: 190498 - DNA, 269 bp, Glycine max
gttttatgcaccatggtgtggacattgcaaaagtcttgctcctacttacgagaaagttgccacagcatttaaattggaggaagatgtagtaattgcaaatctggatgctgataaatatagggatctggctgaaaagtacgacgtagtggatttcctaccttgaagttcttcccaaagggcaacaaagctggtgaagactacggaggtggaagagacttggatgactttgtggcttttatcaatgagatatctggagcaagtcgagatgg

SEQ ID NO: 190499 - DNA, 151 bp, Glycine max
aacgcctttcttctccgtttccgtttcctcgttcgaattcgctttttgatctgcgaaaatgagagagtgcatctcgatccacattggtcaggctggtatccaggtcggaaatggctgctgggagctctactgcctcgagcacggctcgggc

SEQ ID NO: 190500 - DNA, 183 bp, Glycine max
cagcatgtggtggcctttctggagaaaagggggttctgcattttcatcttcttccactgctgatgaagttacagaatgcatcgatggctgtggcctcactgctattgttactggggctagcagtggtattggtgctgagactactcggtacttgccatgcgtggaatccatgttattatgggt

SEQ ID NO: 190501 - DNA, 180 bp, Glycine max
actttgttgctaaagttgctgattttggcctctccaagactggtccatctcttgatcaaacccatgtgagcactgctgttaagggtagttttggttatctcgatcctgaatacttcagaaggcaacagcttactgagaaatcagatgtgattcatttgggggtggggttaatggaagtgt

SEQ ID NO: 190502 - DNA, 280 bp, Glycine max
ggaaaatgggtgatattgtccacacattaacaaacaacaggtggctggaaaaatgtgtagcttatgctgaaagtcatgaccaggccttggttggtgacaagacaattgcattttggttgatggacaaggatatgtatgacttcatggctttagacagaccatccacacctttatagatcgtggtatagcgttgcacaaaatgattaggcttattaaccatgggtcttggtggtgaagggtatttaaattttatggggaatgaatttggccacctgagtgg

SEQ ID NO: 190503 - DNA, 127 bp, Glycine max
gagaccaggtgtggaaggcaaatatacctcatacccatcttgcaactggaaaatctgaccagaactggatggtagtgaaaggcgacactatagtgtttcctggtggaggagcccacttccataatgg

SEQ ID NO: 190504 - DNA, 91 bp, Glycine max
ggcaaaatggatccgtaacctcgggaaaaggattggctctgagggctgggcacgggggtcccagtcccgaacccgtcggctgtcggtggac

SEQ ID NO: 190505 - DNA, 265 bp, Glycine max
actcgagccgattcggctcgagggctacccttattgctcccagcaaccactctccccaagaagacgctgaggctctcagaaaacgttttgaaggatgggggactgatgagaaaactgtcatagtaatattgggtcatagaactgtttatcagaggcagcaaatcagaagagtctatgaggaaattttccaggaggatcttgtgaaacgcctagagtctgagatcaaaggagactttgagaaagccgtgtaccgatggatactaga

SEQ ID NO: 190506 - DNA, 268 bp, Glycine max
ctctgaaaccggcatggatttgcagcagagcgagttcgatcgcctcttgttcttcgagcacgctcgcaaggccgcagaagctgaatacgagaagaaccctctcgatgccgataacttaacaagatggggtggagctctattagagttgtctcagtttcaggttttcctgaatcgaagaaaatgacccaagaggctgtttcgaagctagaggaggcgcttgcagtgaatcccaagaagcatgacactctttggtgcctgggaaacgctc

SEQ ID NO: 190507 - DNA, 272 bp, Glycine max
aagagtcctcttctcctccaaatgaacccggttcacaagaagattccggttctcatccacaatggcaaacccatttgtgaatccctcattgctgttcagtacattgaggaggtttggaatgacagaaatcccttgttgccttctgacccttaccagagagccaggctagattctgggctgattatgttgataagaagatatatgatcttggaaggaagatttggacatcaaaaggagaagaaaaagaagctgccaagaaggagttcatagaa

SEQ ID NO: 190508 - DNA, 274 bp, Glycine max
ctttgggataccccgttcaatcatggcttacaccaatgtgtcaagccgactactaaatataaagctgcccaaggatttgatcgctatctaaccgtgagaagtaatggtggactaaatcaaatgcgaactgatatcagacatggtggctgtggcacatataatgatgcaactttagtcatacctcaattggataagcgttcattctggaacgactctagtgtgttttcagatgtatttgatgagcttcatttcatcgaatccctgaaaggagata

SEQ ID NO: 190509 - DNA, 266 bp, Glycine max
gattcgctcttctcttcgaataaaccacaaaaccaacaaacgagaagaggagtgagagaagatggggttgtcgttcacgaagctgttcagcaggttgtttgcgaagaaggaaatgaggattctgatggtaggtctcgatgctgctggtaagacaaccatcttgtacaagtcaagcttggagaaatcgtcaccaccatccccaccatcggatttaatgttgagactgtggagtacaagaacatcagcttcactgtggggatgttggt

SEQ ID NO: 190510 - DNA, 272 bp, Glycine max
ctcaaagccgcactcaactttctaaaaccagatcggtttgaatcctcatttcccgcctctcactggaaagcagcaaaatcacctttctctactatctatctgttccttttgtactctgagtgggtagaagtcatggtaaggctcactgctgacttgatttggaaaagcctcatttcttcaacacgattaaagagcgtgagttagatctcagaggcaacaagatagctgtaattgaaaactgggtgctactgaggaccaatttgacacaatag

SEQ ID NO: 190511 - DNA, 273 bp, Glycine max
ctcgagccgggcgactcataggcagtggcttggttaagggaaaccaccggagccgtagcgaatacgagtcttcacagggcaattgtcactgcttatggacccgaacctgggtgatctatccatgaccaggatgaagcttgggtgaaactaagtggaggtccgaacgactgatgttgaagaatcagcggatgagttgtggttaggggtgaaatgccactcgaacccagagctagctggttctccccgaaatgcgttgaggcgcacagttgacta

SEQ ID NO: 190512 - DNA, 274 bp, Glycine max
agaaaactcaatattcgtcgctcatggcactctcttctcgtctcttttccaaatccaaattgatctatggcagtcaaatacttctacaaaaggagcatgctattccagttcgtcactttgctaaagagtctgcccctcctgcccttaagggagacgagatgtgaagaacatttttgtggaggtgaagaacaaatttgagaccgccataggaatattaaagaaggagaaaatcaccattgacccagaagatccagctgctgtttctcattatgca

SEQ ID NO: 190513 - DNA, 269 bp, Glycine max
agaaaactcaatattcgtcgctcatggcactctcttctcgtctcttttccaaatccaaattgatctatggcagtcaaatacttctacaaaaggagcatgctattccagttcgtcactttgctaaagagtctgcccctcctgcccttaagggagacgagatgcgaagaacatttttgtggaggtgaagaacaaatttgagaccgccataggaatattaaagaaggagaaaatcaccattgacccagaagatccagctgctgtttctcatt

SEQ ID NO: 190514 - DNA, 271 bp, Glycine max
ccgacaatggccacccaaatgagcaagaagagaaagttcgtagctgatggagtgttcttcgctgaactgaacgaggttctgacaagggagttagccgaggacggatactccggcgtggaagttagggttacgccgatgcgcaccgaaatcatcatcagagccaccagaacccaagccgttctcggtgagaagggaaggagaatcagggaacttacctcggtggttcagaagaggttcaagtttcccgagaacagtgttgaactttatgctg

SEQ ID NO: 190515 - DNA, 261 bp, Glycine max
ggcactgtggcagaagtcttaggagtgtaaaacagagacgcaaaatgaagacgattctatcgtccgagaccatgaatattcccgacggcgtgagcatcaaggttcacgctaaggttatcgaggttgatggccctcgtggaaaactcgtgcgagatcttccaccattgaacttggacttccaacttattaccgacgatggcggtaaaaggaagctcaaaattgattcttcgtttggttctcgtacaacctcgccgccatccg

SEQ ID NO: 190516 - DNA, 283 bp, Glycine max
atttgcttcaactacaatacagcttattggtattgttggtgtaatgacagaagttacatggcaagttttgctcttagttgtcccaatggctgttgcttgtttgtggatgcagaaatactacatggcttcctcaagggaactggttcgtattgttagcatacagaagtctccaattatacatctttttggtgaatcaattgctggagcatccaccatcaggggttttggacaagaaaaaaggttcatgaagcggaacctctatcttcttgattgctttgcacga

SEQ ID NO: 190517 - DNA, 265 bp, Glycine max
ctactcattctccatacctcaacgaagaggttaaagagacggcaacactttgctgtccgccttgaccgagcagagcttcgtcttggccctcgattttgccctaaagtactctcagtcacaacagacaccgtcgtcgtcgtcgtcgtcatcaatggcaccgaagcagacaaggctgagaagaagatcgcgtacgatgcgagctgtgcgacctaatggaggagtacggccagatcctcgttgtgaactccgataacgtgggatcgaa

SEQ ID NO: 190518 - DNA, 231 bp, Glycine max
attgaactctagtgaggatctctttccattgaaacggttcaagtggcttattgagttttccatggatcatgattggtgtgcagcagtgagaaaactgttgaacctactgcttgatggaactgtagatacaggagatcatccgtccttgtatctcgcgctatcaagatgggtctccttcacaaagctgtaaggagacacagcaagcagttagtggagtgtcttctgagatat

SEQ ID NO: 190519 - DNA, 216 bp, Glycine max
  unsure (1)..(216): unsure at all n locations
gtcaactgaatgaccaaagcatcggttgcttccacttgtggccttcttcgaccgccttgacaccttaatctcagggaaccccctctcctctcttcttctcttcatgtatgtgggctgcctgccccgtcccgaatagacgaacagtacaagctaaaggcgcgagagacagtttatactcaatgcacctcctctcttccacaattaggtgaatcctan

SEQ ID NO: 190520 - DNA, 270 bp, Glycine max
gctcttcaaggattacttcgttgacgagaggaagaagcttggaagcataaagagcagcaataacaatgaactatgatgcgctattgaccacattttggatgcccagagaaaaggcgagatcaacgaagacaacgtcctttacattgttgaaaacattaagtcgctgcaaatgagacaactctatggtcgattgaatggggcattgctgagcttgtgaaccacccagagatccagcagaaggtgagggatgaaattgatagagttcttgaa

SEQ ID NO: 190521 - DNA, 268 bp, Glycine max
agaaagcgttgtgaagaatggcggaagagggacaagtgatcggtgtccacagcgtagaggagtggaaggaacatctcaagaagggagaagagtccaagaaattgattgtggtggattttactgcttcttggtgcggtccatgccgtttcattgccccattcttgcagagtttgctaaaaagttgccgaatgtcaccttcctcaaggtggatgtggatgaattggagactgtttccaaggagtggggaattgaggctatgccaaccttc

SEQ ID NO: 190522 - DNA, 266 bp, Glycine max
acaagccctaaatctctcttctctttcttcttcttcctttaaccatgagagagatcttgcacgttcagggaggccaatgcggtaaccaaatcggttccaagttctgggaggtgatctgcgacgagcacggcatcgatcccaccggaaagtacaacgaggaagcaacagcagcatccaactcgaaaggatcaatgtgtattacaacgaggcctctggcggaaggtacgttccccgtgccgtgcttatggatctcgaacctggaacca

SEQ ID NO: 190523 - DNA, 267 bp, Glycine max
gcgccttcgatccagaaaacatgactaagagaacaaagaaggctggcattgttggaaaatacggtacccgttatggcgccagtctgcgtaagcaattaagaagatggaagttagtcaacacagcaagtttttctgtgaattttgtggaaagtatgctgtaagaggaaagctgtgggaatatggggatgcaaggactgtggtaaagtgaaagctggcggtgcttacactttgaataccgcaagtgccgtgactgtacggagcaccatc

SEQ ID NO: 190524 - DNA, 267 bp, Glycine max
attagctcctttcaggggtttcttgcaggaaagattagctctgaaaggagggggagctgaacttggcccttcagttttattctttggatgcaggaaccgtcaaatggactacatctatgaagacgagttgaatcacttcgttaatactggtgcactttctgagctcattcttgccttctctcgagagggacccaccaaggagtatgtacaacataaaatgatggagaaggcttcagaaatttggagcatgatatctcaaggagctta

SEQ ID NO: 190525 - DNA, 264 bp, Glycine max
ctaagtccctttggtcttcatcttctgttctgatccaggtatggcttctaaacgcatcttgaaggagctcaaggatttgcagaaggatcctcctacctcatgcagtgcaggccctgtggctgaggacatgtttcactggcaagccacaatcatgggacctctgatagcccatatgcaggtggtgttttcctagtttcaattcattttcctcctgactatcccttcaagccaccaaaggttgcttttcggactaaggtgttccac

SEQ ID NO: 190526 - DNA, 271 bp, Glycine max
gaaaagtgaaacaaaaaacagaacaacaatggcgacacttaaggttcctcagcctcttccccccgttgcagatgattgtgagcagctccgaaaagccttctcaggttggggaactaacgaggagctgattgtatcgatcttggctcataggaatgctgctcaaggaagcttatcagagaaacttatgcccagacctatggagaagatctcctcaaggccttggacaaagaactcacgagtgattttgagaggctggttcatctttggacac

SEQ ID NO: 190527 - DNA, 278 bp, Glycine max
  unsure (1)..(278): unsure at all n locations
tgtagttcttgcaactatgctggtacataccggcctgccaagtgccaacttggttgtggacaacctactcaacgatggtatcatgtgccaagatcatggttaaggccaacaaagaacttgatagtagtatttgaggaattgggtgggaactccttggaaaatagtctagtaaaaaggacaacacatactccagcaaactagtgaaaccgattcaaagaactgaaaaaacgtgaatatggncagtcaaatggtgatcgacagggcaacgtgcaatgggc

SEQ ID NO: 190528 - DNA, 276 bp, Glycine max
ctgaccaacattagtggtgaaactgaaagctctcatgtaattgaggatagaaacattgccatctccattcaagatctacgcaaggtcaccaataactttgcttcagaaaatgagctaggccatggtgggtttggaactgtttacaagggtgagctagaaaatggtaaaaaatagcagtgaagagaatggaatgtggagctgttagcagtagagcactggaggagtttcaagctgaaatagctgttctttccaaggtccggcaccggcatttggtat

SEQ ID NO: 190529 - DNA, 276 bp, Glycine max
  unsure (1)..(276): unsure at all n locations
caacctacccctttttcttctcccaccaacttcaccgtcttcttcctcgatcatgtctcacttcaagggcaagtaccatgatgagcttattgtcaatgctgcttacattggcactcctggaaagggtattcttgctgctgatgantcaacagggacaattggcaagcgtttggccagcatcagtgtagagaatgttgaatccaacaggcgtgctcttagggagctgcttttcaccgctcccggtgctcttaaatatctcagtggtgtnatcctctt

SEQ ID NO: 190530 - DNA, 267 bp, Glycine max
acagatcaaactatggccacctcaagcgccaaatcagtccatgatttcaccgttaaagatgccaagggaaatgatattaatcttggtgactacaaaggaaaggtccttatcattgtcaatgttgcctcacaatgtggcttgactaattcaaattacactagctcagtcagttgtatgagaaatacaaacagaaaggtctggaaattctggcatttccatgcaatcagtttggggcacaggagcctggatctaatgaacagatacaag

SEQ ID NO: 190531 - DNA, 270 bp, Glycine max
tctacccgccgctcgatgggaattgcgcttcaaggcgtctcgtagggctaatccgcctcacgagggtcaccaacggcacgtgcctttggggggccgaggccccctactgctggtcggcaaacggacggcgggcgcacgcgtcgcttctagcccggattctgacttagaggcgttcagtcataatccaacgcacggtagcttcgcgccactggcatgtcaaccaagcgcgatgaccaattgtgcgaatcagcggttcctctcgtactaggt

SEQ ID NO: 190532 - DNA, 267 bp, Glycine max
tctcgagccgaatcggctcgagatatgcttgtctcaaagattaagccatgcatgtgtaagtatgaactaattcagactgtgaaactgcgaatggctcattaaatcagttatagtttgtttgatggtatctactactcggataaccgtagtaattctaggctaatacgtgcaacaaaccccgacttctggaagggatgcatttattagataaaaggtcaacacaggctctgcctgttgctttgatgattcatgataactcgtcggatc

SEQ ID NO: 190533 - DNA, 263 bp, Glycine max
ctggtgggggttgttgcaggcatctcctatgccatcaacagtggttcccaatcatggggtcccctctttggtaagcttttctttgcattttgggtgatcatccatctctaccccttcctcaaaggtctcatgggtcgccagaacagaacaccaaccttgttgtagtctggtccattcttcttgcatccattttctctctgctgtgggtccgaatcgacccgtttacgacaagagtcactggtcctgatgttgagcagtgtgga

SEQ ID NO: 190534 - DNA, 270 bp, Glycine max
gtaaaagcatggatattatataattttttttttcatgaatacattgagtagaagagattaattacctaaaagaaaagaacacacactgaagaaaggaaagtgcttgaaaatactaaagggtatttaccaaaggctcttgtcttgaaagaacctttaatcacataggatcaaagaaaagcttgcaataaaagcacaagcaattgccattattaataacattattattcttacaatatcaagtcattttgcttccaattatctcctttttga

SEQ ID NO: 190535 - DNA, 275 bp, Glycine max
cttctggaagggatgcatttattagataaaaggtcaacacaggctctgcctgttgctttgatgattcatgataactcgtcggatcgcacggcctttgtgccggcgacgcatcattcaaatttctgccctatcaactttcgatggtaggatagtggcctaccaggtggtgacgggtgacggagaattagggttcgattccggagagggagcctgagaaacggctaccacatccaaggtaggcagctagcgcgcaaattacccatcctgacacgggg

SEQ ID NO: 190536 - DNA, 269 bp, Glycine max
ctttaccaactcctaacaatttctctctgtttccttcttcaccgcatcaatggagttggacggcgttctcctcggcatgtgcaaccctctcctcgacatctctgccgtcgtcgacgacgctttcttgcaaaaatacggtatcaagttgaacgatgcgatctcgctgaggataagcacaaacccatgtatgaagaattggctaacaatcctaatgtggagtacattgctggaggtgctactcagaattcaatcagggttgctcagtggga

SEQ ID NO: 190537 - DNA, 263 bp, Glycine max
  unsure (1)..(263): unsure at all n locations
caatgtatggcattgctgtggctgcccttnnggatgctgagcaccattgcgacagggttggncattgatgcctatgggccaatcagtgacaatgcaggaggtattgctgagatggcaggcatgagccatcgtattcgtgagagaactgatgccctgtgctgctggcaacactactgctgccataggcaagggatttgctattgggtctgctgctttggtgtctttggccctatttngtgcattgtgagcagagctggaatttt

SEQ ID NO: 190538 - DNA, 268 bp, Glycine max
aggaggtgacccttttgggagctactggaagcccatttgtgtgcagggttcatattgccctcaagttgaagtccattcaatacaaatatgtcgaagaaaatttgaggaacaagagtgaactgcttctcaaatccaacccagttcacaagaaggttccgtgtttattcacaatgagaagcccatagcagagtctcttgtgattgttgaatacattgatgagacatggaagaacaaccccatcttgccttctgatccttacccaagagcc

SEQ ID NO: 190539 - DNA, 267 bp, Glycine max
gtgagccctccaccaccttctccatctcctcctccaccataccattacacatcaccacctcctccttccccagctcccgctcccaagtacatttacaaatcacctccacctccagtttacatatatgcttccccacctccacctatctacaagtaagttgaattgcggaagcaccattcacgataaatcatgttctagtttttatcgaggaataaaggcaagctctatttggagtcaagtgaaacatctatcttcctgtccaagttc

SEQ ID NO: 190540 - DNA, 156 bp, Glycine max
ggggtcttaccatactgagtggttcaagcttgccaaacagtcaagaaattagattactgtatttgagccaatcaggattttcctaataaatgtaatattttctgctcagactgtatgctgagttgagtttgccaagcaattcagttggaaataatg

SEQ ID NO: 190541 - DNA, 279 bp, Glycine max
gctgcgtctcttcctcttctctttcgatccatccctcattcctaatcctccaatccaaccacctcagcctcacactcacatatacacatatctgaacgcgtatcgtccctcctatggcttcaaagcgcatcctcaaggagctcaaggacttgcagaaagacccacaacttcttgcagcgctggtccagtagctgaggacatgttccattggcaagcaacaataatggggtctgctgatagtccttatgctggaggtgtattcctagtcactattcactt

SEQ ID NO: 190542 - DNA, 265 bp, Glycine max
ccgaggtacccaaaggcccctggacttgccctaaagccttttgccagccctacaacgaatccgtcccctttcaggacagagtagacactgttctcagctatttcgatttaccctctcatcaagttccttcctttattacgctctattttgaagaccctgatcatcaggtcaccaggttggccctgatgattctcaaatcactcaagccgttgcggaaattgatgccttgtggggagactcattcagggttggaacaagaggtgtt

SEQ ID NO: 190543 - DNA, 182 bp, Glycine max
gccatcttccactctccaacgtttcagacaacgcagatcttgatcaagattacaggaagacaatgaagaatttgctctggaactggagaaacttgcagagcagcttctagacttgctatgcgagaatctgggcctcgagaaagggtacctgaagaaggtgttctacggatccaggggtccaa

SEQ ID NO: 190544 - DNA, 284 bp, Glycine max
gctgctcatagcctcaacagagagtttggacctaagttgaaggaggagatgcagtactgtgttgatcacccagcggatattagaaagcttgctacagtgaaagctcaggtttcagaagtcaaaggagttatgatggaaaatattgagaaggttcttgaccgtagggagaaaattgagcttttggtggataaaacagagagccttcgctctcaggctcaagatttcaggcagcaggaaacaagattaggagaacgatgtggttccaaaacatgaagatagagcta

SEQ ID NO: 190545 - DNA, 297 bp, Glycine max
agccaccatgtcatcaagtggaaccatttggagctatgatgaagaaaaagcatttgagaatgccatagctatgcattcggattgaggaatcctcaaaagagcaatgggagaacattgcttcagcagttcccagcaaaagcatggaagaagtgaagcaacataaccaggttcttgtagaggatgtaagtgcaatagaggcaggtcacatatcattcccaaactatgcttctgatgaaaccacaccttcaaatgaggactttcatggctcttccaaggcgacaagctcagataaaaaga

SEQ ID NO: 190546 - DNA, 165 bp, Glycine max
gcgggttactgtctgttcaagctaccatctctctctctctttcttagtgcctccttgccagaagttcaaatgggccaagaaactttcctattcacatctgaatcagtgaacgaggggcaccctgacagctctgtggacagatctcagatgctgtcctcaatgcat

SEQ ID NO: 190547 - DNA, 257 bp, Glycine max
catccctgaagatagctatactctgatagccattgtgggaatcaaggatcctgtgcgccctggggttagggtcagctgtgtaaaacttgtgtaagctgctagaataactgtccgcatggtaactggtgataacataaatacggctagggctatagctagagaatgtggcattcttacagaggatggtgtggccatagaaggcccctattttggggatttgtttacggagcaaatgaagattatgacgccaatattcc

SEQ ID NO: 190548 - DNA, 281 bp, Glycine max
ctcgagccgctccgcttcacgcattcattccttctctggttcggtgcatttcattctgatacactatggccaatggtccagcaccgttttctgagatgtcaaaagggcaaagatcttttgtacaaggattacaactttgatcacaagtttagcctgtcaattccaaactccactggattggggcttatagcaaccggattgaagaaggatcaaatttttgttggtgacataagtacactctacaagagtggaaatactacagtggatgtgaaagttgatac

SEQ ID NO: 190549 - DNA, 212 bp, Glycine max
tcggctccaggctgccacgtcttggtattctccgacacgctgaaatccgttcgggagaaggaaatcaagagacagacattgatggagctcgtggatttcatccaatcggggtcggagaagataacggagacttgccaggaagagatgatcaaaatggtgtcggcgaacattattcggtgcctcccgccggcgtcgaacgagaacaccggcca

SEQ ID NO: 190550 - DNA, 167 bp, Glycine max
  unsure (1)..(167): unsure at all n locations
gccgctcgatgggaattgcgcttcaaggcgtctcgtagggctaatccgcctcacgagggtcaccaacggcacgtgcctttgggggggcgaggcccctactgctggtggcaacggacgcggcgacgcgtgttntaccggatctgattaagcgtagcatatcacgacgt

SEQ ID NO: 190551 - DNA, 228 bp, Glycine max
aagaagggtctttgcttgattttggagatgtctctgctctcagatctcatcaaccttaacctctccgataacaccgagaaggtgatcgcagagtacatatggatcggtggatcaggaatggacctgaggagcaaagcaaggactctcccaggaccagttagcgacccttcagagcttcccaagtggaactatgatggttccagcacaggtcaagctcctggtgaagac

SEQ ID NO: 190552 - DNA, 299 bp, Glycine max
ggaattctgctcgatggcgaacaaaggccttggttccggaatcggtggtgaagaaggagaaaaggaacgaggagtgggctttggcgaagaagcaggaactcgatgccgctaagaaaatgaggttcgaaacgcggaagctgatttttaacagagccaaacaatactcaaaggaatacgacgagcagcaaaaggaactgattaggttgaagcgtgaagccaagcttaagggagggttttatgttgaacccgaagctaagctcttgttcatcatcaggatccgtggtatcaatgccatggat

SEQ ID NO: 190553 - DNA, 286 bp, Glycine max
gaaagatggaggggaaggagcaggatgtgtcgttgggagcgaacaagttccccgagagacagccaattgggacggcggcgcagagccaagacgacggcaaggactaccaggagccggcgccggcgccgctggttgactcgacggagtttacgtcatggtcgttttacagagcagggatagcagagtttgtggccacttttctgtttctctacatcactgtcttaaccgttatgggagtcgccggggctaagtctaagtgtagtaccgtggggattcaaggaatcgc

SEQ ID NO: 190554 - DNA, 299 bp, Glycine max
ggcattcggctcgatatcgagccgaatcggctcgaggaagagcttgtcaagtggactctacttccttgagcttctgacggctgttgagcttagggtacgtcattggaaccttgtcatcaagggtgaaagtgatgatgagaagaggttgaatgccacttatataatcagcgttgcacggaagctcggttgtactatattttggttacctgaggatattatgcgggtaaactcagagatgctcctcaggcttgcagccagtataatgtattggagcctgcaacaacagactgaagacacgg

SEQ ID NO: 190555 - DNA, 265 bp, Glycine max
ctatgatcttggcactctttgccatttccatacttcaaacagtggtaatggctgctaatgaacaaggaggccacttgtatgacaacaagagacaatatggaagtggaagtgtcaagagttacaaatgcccatcacaatgctcgaggagatgtagccagacccaatacccaaaggcctgcaatgtttttctgtcagaagtgctgcaggacatgcctgtgtgtgcccccggggtattatggtaataaagctgtgtgcccctgctaca

SEQ ID NO: 190556 - DNA, 146 bp, Glycine max
ctctatttctcagtctctgtgtttgcggctgaggattccgaacgagattccttcttcgtttctcgcaaagtttaagtaatcatgggtaaggcaaaggttcacatcaacattgtcgtcattggacatgtcgactctgggaagtcaac

SEQ ID NO: 190557 - DNA, 120 bp, Glycine max
gagagagtgcatttcaatccacatcggtcatgccttaattcaggtcggaaacgcctgctgggagctctactgcctcgaacaccggaatcaagcctgatggggcagatgcccaagtgataa

SEQ ID NO: 190558 - DNA, 289 bp, Glycine max
gctgtctcttaatgttgcagcttccaccacaaactcaagggtggtcttgttcaacacaaagaaccacgcttctaggcttcttgtgagggcttcagacgagcctgcagcggcggcatccgcaaccaccacccctccagctgaagctgaagcaaagccaaaaccaccacctattggccccaagagaggtgctaaggtgaagattcttaggaaggaatcctactggtacaaaggcactggttcagtggttgctgttgatcaggaccccaacactcgctacgctgttgtggtt

SEQ ID NO: 190559 - DNA, 288 bp, Glycine max
ctacgtagaccctccgccagcccccctcatcgacttggccgagattaagctctggtccttctacagagccctcatcgccgagtttatcgcaacactcctcttcctctacgtcaccgtcgccaccgtcattggccacaaaaaacagaccggaccatgtgacggcgttggccttctcggcatcgcatgggccttcggtggcatgatctttgtcctcgtctactgcaccgccggcatttctggtggacacatcaaccctgcggtgacttttggcctgttcctggcccgcaa

SEQ ID NO: 190560 - DNA, 295 bp, Glycine max
gcaggctaccaaaggttccctctccgaatgaaaactggctatggtgagcgttcttcggaggtaaaatgcgcaagttttaggcttgctgtggaggcacacaacatccgagctctttaaaaccattcctgaagagtgcgttgaaccaacaaaggactacattaatggcgaacaatttagatcagactctaaaacagttaaccaacaagctttcttttatgctagtgaacgcgaagtccatcacaacgacatatttatattcggcatagataacaccgtactctctaatatcccatac

SEQ ID NO: 190561 - DNA, 237 bp, Glycine max
tgcgaccaatgcgttctagaggtacgttgagattggaagggttgctcagatcaactatggcaaagagtacgggcggctcttgatcattgtcgatgtcattgacaagaataagggctcttgttggatgcccccgaaatggtgaggtcccaagtgaccttcaggaggctttcgctcactgacatcaagcttgatatgaagaggcttcccaaggaagaaggttctaattcaagccatgga

SEQ ID NO: 190562 - DNA, 210 bp, Glycine max
gctagctgtgacttgttttgagttcaatcaaatcgcattggtatctgaaatcaggaaagatggttagcgtagctgagatcaggcaggcacaaagggcagagtgcccagcaaccatccttgccattggaactgcacaaccaccaaaccgtgttgatcagagaacctatactgcttacttcttcacaatcaccaccagtgaccacatgaccg

SEQ ID NO: 190563 - DNA, 281 bp, Glycine max
tagcaaatattgcctattccgcaatatggcggaaaatgcttcgattgagctgaacaagtttgtgttcttttgtttgttggtgctaatacaagtggcagtttctgaaatcaactttgaagagcgttttgatgatggatggcgaggtaggtgggtgaagtcagactggaaaagcagtgaaggcaaagcaggttcattcaagcacacagctggaaaatgggccagtgatccagatgataaaggtattcaaacatccagtgatgcaaaacatttgccatctctgc

SEQ ID NO: 190564 - DNA, 298 bp, Glycine max
agctcggaatcagtcgagaaccttcaagcctcgcccatgaacgaaaccaagaagaaagagaagaataagaataagaagaagagcgacaaaaaaagtactcgggagatttgctacgaggagcgtccagaggaagaggagaatgagaataatacagatagcgatggagaatcctcgaagaagaagaagaagaagaaggtggaaggagaaagtgaagtgaaagagaaaaaggtgaagaacaatggtggctctggaattatgagcactgagtcatttgaatctctcggattgtctgaaccta

SEQ ID NO: 190565 - DNA, 282 bp, Glycine max
atttacgatagcttttgaaggtaccagtttttgtcatcactctctcagctgatcggtgcttatagatccagcggcagcagattcaatttggacctggaagcaatttctcatttcaaagattaggtgcacacatggttgtccttgatgcatccattgtgagcaaatctggcaaagttctagtttctagacagtttgtggacatgtctcgtatcagaattgagggtcttctagcagcatttcccaagttcataggcactggaaagcaacacacatatgttgaga

SEQ ID NO: 190566 - DNA, 214 bp, Glycine max
tctcgagccgaatcggctcgagggacggtgtgtgtgattttggcatcactggcctctgcagcactctgtgccaacccacgcaggccagtggatgtacaatttggccgatactacgtgcccacatgggcctttgatcacatcaaatatttcaatggtggtcttgacattccagttacatcttgacaagtacactggtactggcttccagtccaag

SEQ ID NO: 190567 - DNA, 288 bp, Glycine max
tagccacttgtatgacaacaagagcaaatatggaagtggaagtgtcaagagttaccaatgcccatcacaatgctcgaggagatgtagccagacccaataccacaagccctgcatgtttttctgtcagaagtgctgcaggacatgcctgtgtgtgcccccggggtattatggtaataaagctgtgtgcccttgctacaacaactggaagaccaaggaaggaggacccaagtgcccttgagcttcaacttgttcaacttcaattgtcgcttgccatacattttatggctt

SEQ ID NO: 190568 - DNA, 284 bp, Glycine max
gttctaacgtataagttatgattattcataaactttctgctttcttttgcagacatatgaaagatcttgcattcaaaaatggcttgatgctggtcacaaaacctgccccaagacacagcagacacttgtgcatacagcccttacccctaactatgttttgaagagtttgattgctttgtggtgtgaaagcaatggcattgagctaccaaagaagcaagggagctgtagaacaaagaaatgtggtggcagctgccctttgctgttctatatcgttactcattagt

SEQ ID NO: 190569 - DNA, 284 bp, Glycine max
tgtccctccttcctctgccttataattcttgtgacccttttggctggtagcattgaaagtgcaccagcaaacgtgaagccaagccattatgctgcacccttcaataggagtgtttttccttctggttttctatttggaataggctctgcagcttaccagatagaaggagcagcagctatagatggcagaggaccaagtatatgggacacctatactaaacagcaaccagggaagatttgggatcatagtgatggaagtctagcaattgattgttatcaccggta

SEQ ID NO: 190570 - DNA, 279 bp, Glycine max
caaagattaagccatgcatgtgtaagtatgaactaattcagactgtgaaactgcgaatggctcattaaatcagttatagtttgtttgatggtatctactactcggataaccgtagtaattctagagctaatacgtgcaacaaaccccgacttctggaagggatgcatttattagataaaaggtcaacacaggctctgcctgttgctttgatgattcatgataactcgtcggatcgcacggcctttgtgccggcgacgcatcattcaaatttctgcccta

SEQ ID NO: 190571 - DNA, 281 bp, Glycine max
ggaaaggggaaggcagcgaaagatcctaacaagccaaagaggcctccaagtgctttcttcgttttcatggaggaattcaggaaggtgttcaacaaggaacatcccgacaacaaagcagtgtctgctgtgggcaaagctgctggagcaaaatggaagacgatgtctgatgctgaaaaagcaccttatgtggcaaagtctgagaaaaggaaagtggagtacgacaagaacatgagagcttataacaagaaacaggcggaacgtcctactggtggggatgaaaa

SEQ ID NO: 190572 - DNA, 283 bp, Glycine max
cttttccttcctctgtctacatttcatttcattcaaaacaatcatggcatctcttcattccacatgttcaacaaaaaccgtgcctttatgcattggtattgttggcctcttccatggcaagttctaccaggattttgacataacatggggagatggtcgtgccaagatactcaacagcggcgagcttcttagtctacccctggagaacccctgcggatcggggtatcagtccaagaacgagtatgtctttggcaagattgatatgcaactcaggcttgtacgc

SEQ ID NO: 190573 - DNA, 278 bp, Glycine max
gagggcttaccatgttctttataagaagtctctggaggaggatgttgctcatcacacaacaggagacttccgtaagctcatactacctctggttagttcttatcgatatgaaggagatgaggtcaacttgaccctggcaaaaactgaggcaaaattgctgcatgagaagatttcaaacaaggcttataatgatgacgacttcatcaggattttggccacaaggagcagagcacagattaatgctactttgaatcactacaaagatgcatttggacaag

SEQ ID NO: 190574 - DNA, 293 bp, Glycine max
cttcaacttcacccattcatacgtggtgttgttactgctgctctattctcttttcttttctctttagttctctcttcccctttctttttctttttcttcttcttctgagcttgtgtaagcttttcttccattaacatattatcacaatgtgtggtattcttgctgttcttggttgttctgatgactctcgagccaaaagggtccgcgtgcttgagctctctcgcagattgaagcaccgtggccctgactggagtgggctccatcaacatggtgactgctttttggcacatcaa

SEQ ID NO: 190575 - DNA, 298 bp, Glycine max
cgagagcagtgctattgttggctatgtgtgtgcttccggccatggttgtggccattcgcccagcaaagaaccctttttgcgtgaagggtcgcgtctactgtgacccttgccgtgctggttttgagacctcagcaaccacctacattgccggtgctgagattatgttgcaatgcaagagcagggttagcaacgaggttgtgtacaccaagaaggggtacactgactcaactggagcatacacaatgtacgtggacgatgatcacgcagatcaaatatgcagtgccaagcttgtaagcag

SEQ ID NO: 190576 - DNA, 263 bp, Glycine max
cgagactgaggattattcatcgtgatcttaaagcaagcaacattctcttggatgctgaaatgaatcctaagatatcggattttggtatggcaagattgtttcttgtggatcaaactcaaggaaacacaagtaaaattgttggaattagtaagtatatcacgatatgaaagggttaattaactgttttcctcagtccttacaaatcaaaatagaggatttttttttccaattgagcttgaggttttacatgtatggtatatggc

SEQ ID NO: 190577 - DNA, 279 bp, Glycine max
aaatgtttggttttgttcacttgtacaatggccaagaggctgtgtcaactgggttcatcaagcttctgaagaaggaagattctgtggtgagcacctacagagatcatgttcatgcattgagtaagggggtcccgtctcgggaagtgatgagtgaactgtttgggaaggcaacagggtgctgccgaggtcaaggtggttcaatgcatatgttctcgaaagagcacaacttgctcggtgggtttgcctttattggtgaaggaattccggtggccacggggc

SEQ ID NO: 190578 - DNA, 283 bp, Glycine max
gttatcttgagaaacattattcccattgctatatattatggctagcatgaaggttacatgggtggttgtgatcatgtgcatggccgtggtgggtgcaccgatgatggcgcaagccatgacatgcaatgatgtgacggtgaacatggcacagtgcctatcctacctgatgcagggaggaacaccttcaacactttgctgcagcggagtcaagaacattcttggctctgctgtcaccaccgttgacaaacaaactgtgtgcaactgtctcaaggcggatgctgct

SEQ ID NO: 190579 - DNA, 271 bp, Glycine max
gtgaaccctaagtgaggatacactatactccggtagccgctgtgttggtgagtgagttgtggtgcttttgaaagatgaggccgattctgatgaaaggtcatgagaggccattgacgttcctgaaatacaacagggacggcgatctcctcttctcctgcgccaaggaccacaaccctaccgtctggtttgccgacaacggcgaacgcatgggcacttatcgcggccacaacggcgccgtttggacctgcgacgtctcaagagattcggctcg

SEQ ID NO: 190580 - DNA, 231 bp, Glycine max
tcaagatgcagatcttcgtcaagaccctcaccggcaagaccatcacccttgaggtggaaagctctgacaccatcgacaacgtcaaggccaagatccaggacaaggaaggaatccccccggaccagcaacgtctcatgttcgccggacagcagcttgaggacggacgtacccttgctgactacaacattcagaaggagagtactcttcacctcgtcatcggtctccgtggtg

SEQ ID NO: 190581 - DNA, 293 bp, Glycine max
cagaactgaactcgctgactgaaactcgcaaaaattagggttttgcagtgatggcactgtccaaccgcgtccgatcgggaatctctctcttcaccaaatccacgttcctcacttccgagcgatccactctacaacgattcctcgttgccccttccatttccttcgcctccagaaattacgccaacgtgccggggcaaaaggaaaacaaagttaaggtccctctggctttgtttggaggttcaggaaactatgcctctgctttgtatattgcatctgtgaaagctaatgcagtg

SEQ ID NO: 190582 - DNA, 294 bp, Glycine max
gaaagaagctgcggttggttatcttggaggggttattcagaaacttcaagatactagagagcagcgcatagaagaacctattctttacattaagatgcaaatagcaatattaaagcttgagcaaggtgatcacaaggaatgcaagaaacttctagaagatggaaagagtacactagacagcatgacagatattgatccatctgtatatgctagctattactgggtatcatctcagtttcataagacacgtcaagaatttgctgagttctacaaaagtgcccttctctatttggc

SEQ ID NO: 190583 - DNA, 208 bp, Glycine max
tctcgacgcagatcgaggacgcatcagcatcagagttcattccatactcaataggaggaggccaaaacgacgcgcttcggtacggtctccatggagtcaagagcgacatcgttggttctcaccctcttcaatcttcactcaaatctacaaggaggatcgatgaagcgacgacgagggatttcaaagttaacctgtacggtagtgcttt

SEQ ID NO: 190584 - DNA, 274 bp, Glycine max
  unsure (1)..(274): unsure at all n locations
gtgaccttcttcgtttctcgcaaagtttaagtaatcatgggtaaggaaaaggttcacatcaacattgtcgtcattggacatgtcgactctgggaagtcaactaccactggtcacttgatctacaagcttggaggtattgacaagcgtgtgattgagaggttcgagaaggaggctgccgagatgaacaagaggtcattcaagtatgcctgggtgctcgacaagctcaaagctgagcgtgaaagnggaattaccattgatatcgctttgtgcgaag

SEQ ID NO: 190585 - DNA, 284 bp, Glycine max
tggggcctaaagaggctggagggtccaaggcatatttagatcgcttttggcaagttgggccagaaacatttgctgagcttcttgagaaacttggtaaatcaaatgaccatgttgattgtgttgtttatgatgcattcttaccttgggcactagatgtggctaagagatttgggatagttggtgctgcttatctcactcaaaatatgactgtgaatagtatatgattatcatgtgccaattggggaaagcttcaagctccactcatagaacatgatgtttccctt

SEQ ID NO: 190586 - DNA, 283 bp, Glycine max
taactcgagccgattcggctcgagcatctttgccatcagtaaacgacaatgatttacgacgttacctctcctcttttccgatcactcctcagccagaagggaggctcctctgataagaggaaatcggacgaacagaagccaaaagagcagaaacccaaagccagcgagaacaaacctataatgactgagtgataacagctgagctgcattcagttgtagaatgaaaataggtggtaggtattgtatttggtgctaaactaagatctttttggcagtgttctga

SEQ ID NO: 190587 - DNA, 268 bp, Glycine max
ctcatttcttcatcgttcgattcttctcctcctaaagatgcagatcttcgtgaaaactttgaccggtaagaccatcacccttgaggtggagtcctccgacaccatcgataacgtgaaagctaagattcaagacaaggaagggatcccacctgaccagcagagacttatctttgcgggtaaacagcttgaggatggtcgaacccttgccgactacaacatccaaaaggaatccactctccacctcgtggttcgcatcaggggtggcatg

SEQ ID NO: 190588 - DNA, 280 bp, Glycine max
gttttgatcggaataaactacccgggcacgaaggcggactgaaaggatgcataaacgacgtgaggaggatgcaacgctgcctcatcgatcgatacggtttctccgaagacgacatcaccgttttgatcgacacggacgagtcctacacggagcccacggggaagaacatccggtcagcgttgaccaggctggtccgatcggcgaagcaaggggacattctgttcgtccattacagcggacacggcacgcgcctccccgcggaaaccggagaggatgatga

SEQ ID NO: 190589 - DNA, 275 bp, Glycine max
aagcgatcatagtttcacttcggccttatccagtttagggtttcggttctctcccctatctttcacgtatcgaaaccttaaatttacgatcaggtctgagcaatctggttggtagaacctttggtcttagtgagtcaagttttatgtctgaattagacgatcaaattcctactgccttcgatccttttgctgatgcaaatgctgatgactcgggtgctgggtcaaaggagtatgtgcatattcgtgtacagcagcgaaatggtaggaaaagcctg

SEQ ID NO: 190590 - DNA, 279 bp, Glycine max
gctggcataacttcaacaacttattctttgttctcgatctcacgatggctcatttggccctgtctcagcagatggctgtaactgttcctgttggcagcgatttgtctctcagaagatctgcggttaaggcacctaactttaacttttgggataaatcatgggcaccagtatttactttgtacttgaaggcaaacaactcaagtttaagaagtcgtcatgtggtattcatgtcagtgcaacaagcaagtgtacccaaagttaatgtatcacctttagagt

SEQ ID NO: 190591 - DNA, 279 bp, Glycine max
gtccaaaccctcctaagccttttgttggaggatcattggcagcattggacaatgctttcatttgggcacaaaaccatgggatgaaagtgatcatagacttgcatgcagctgaaggttcacaaaatggcaatgaccacagtggcacaagagatggatatacagaatggggagattcatacataccaaacacagtccaagtcatagacttcttagccgaaagatatggtaataggccaaacttaggaggaatagagctgatgaatgagccacaaggtgtga

SEQ ID NO: 190592 - DNA, 278 bp, Glycine max
gcaaagtgcaaggcgaaagcaataacagtagcaccccggtagatgagtcacagtttagcttgctaaatgttctaataaatgaagtaggaaagggaaaagcagatgacaactttctgagagacacagcaataaatctccttgcagctgggagagacaccattagttcaggtctcagttggtttttctggctggtggcaacacacccatctgtagaatctaagattcttgaagagatccgaaaaaatttaccagcaagagaaggtaattggaagaattta

SEQ ID NO: 190593 - DNA, 286 bp, Glycine max
  unsure (1)..(286): unsure at all n locations
actcgagncgctcgagccgctcgaccggctcgaggaaattcccaataacccttcccaattttcaccagaacacaatactcccacaccaatcttacatcatggacgccgattcacaacctcaacaactcgaagagagaacagaggagcaagaactgaagtacctggaattcgtgcaattcgcgaccatacaggctctgatgcgctgcgccatcctgctactcatacgccaaggagcgcgcgggtcctctgaagcccggtgtcgacaccgtggaggaggccgtgaaga

SEQ ID NO: 190594 - DNA, 294 bp, Glycine max
agggacagcaagagcaagattctgttcatcggagggactggttacatcggaaaattcatcgtggaagccagcgccaaagctggccacccaactttccttttggtgagggagtccactctctccaaccccgcaaaatcacccctcatcgacaatttcaaaggcctcggtgtcaatcttgttttaggagatctatacgatcaccaaagtttggtgagtgctataaagcaggtcgatgtggtaatttctactgtaggacacctgcagctagctgatcaagataagatcatttctgca

SEQ ID NO: 190595 - DNA, 288 bp, Glycine max
gaaattcgtcatcatagagatttctgaagaaatcttggtagatacaatacaagtagctaattttgagcaccattcttccaatttaaaagcttttgaacttcttggcagtctgagctttccaacagatgtttgggttttctttgggaatttcactgcctcaaatgttaggcatgctcagaggtttgttcttcaggagccaaaatgggtgagatacctaaaattgaatcttcgaagtcactatggttctgaattttattgcacactaagcgcagttgaagtttatggtgt

SEQ ID NO: 190596 - DNA, 248 bp, Glycine max
atgctattcttagccgttacagcaatctgcaatgctttcattaatagtagtacattgaatgtactcccagaatcactaggaatttccacatattcctccaattctgggattacattcaatgagcaaccattaatgatagcattgcagattgctgaaaaggctagggatgctattcttagcgggaaatttgatcaggtacgggtcaaccttccaaatggtgacatggtggggcatacatatgacattga

SEQ ID NO: 190597 - DNA, 277 bp, Glycine max
  unsure (1)..(277): unsure at all n locations
gaacagccaacacatgtatggtagggagttccaatcgatgttggacggactcgacgaggaagggtgtgttgaagaaccggggtatcaatctgagaagaagcgtcgtctaagtgtggatcaagtgaaggctttggagaagaactttgaggttgaaaacaagcttgaacctgagaggaaggtgaagcttgcccaagaacttgggttgcaacctagacaggtagccgtatggttccaaaaccgtcgagccanatggnaaaaccaancattgggngagggt

SEQ ID NO: 190598 - DNA, 274 bp, Glycine max
ctcgctcttcccttcctctggtggcgacaatgtcgactcctgctacgaagaggctgatgagagacttcaagaggctgcaacaagacccgcctgcagggatcagtggtgccccccaggataacaacataatgctgtggaatgctgtcatatttggtcctgatgatactccatgggatggaggcacgttcaagttgacactccaatttactgaggactatccaaataaaccaccgactgtacgatttgtgtctcgcatgtttcatccaaatattta

SEQ ID NO: 190599 - DNA, 273 bp, Glycine max
atggaggggaaggagcaggatgtgtcgttgggagcgaacaagttccccgagagacagccaattgggacggcggcgcagagccaagacgacggcaaggactaccaggagccggcgccggcgccgctggttgacccgacggagtttacgtcatggtcgttttacagagcagggatagcagagtttgtggccacttttctgtttctctacatcactgtcttaaccgttatgggagtcgccggggctaagtctaagtgtagtaccgttgggattcaa

SEQ ID NO: 190600 - DNA, 280 bp, Glycine max
ctataaagtacgtgaaacaactgcaagaaagggtaaagactctggaggaacaagctgtggataaaacagttgaatcagcagtttttgtgaagagatctgttgtgtttgccggcgttgatagctcctcctccgacgaaaactccgaccaatcgctccccgaaatggaagcaagaatttctggtaaagaggtactaatcatgattcactgcgacaaaaacagtggaggagctgctgctatactataggaattatagaagcattatctcacagttcagagtag

SEQ ID NO: 190601 - DNA, 286 bp, Glycine max
tagggtttcgcaagtgcgatccaagaagaacaacgacgatggcgatggctgcagctctgcgtcgcgaaggaaggcgtttgacccaaccaatcaacgccctccactcttctctcaattcctccctcatctctcaagaccaagcccctcatggcgcgcgctccatttccactcaagttgtgaggaaccgaatgaagagtgtgaggaatatccagaagatcaccaaggccatgaagatggttgccgcgtccaagctgcgggccgttcagaccagaactgaaaattcccg

SEQ ID NO: 190602 - DNA, 239 bp, Glycine max
tccccatttcctcacctccttcaaccgctgctaaattctagggttccgaaatggacgctggcggaaagatcaagaagggcgccggaggtagaaagggcggcggcccaaagaagaagccggtttcaaggtccgtcaaagccggtctccaattccccgtcggaagaattggccgttatttgaagaaaggaaggtacgctcagcgtgtcggtaacggtgctccggtatacttggctgaagtt

SEQ ID NO: 190603 - DNA, 268 bp, Glycine max
gcttaaggagtttccagtgacggaagatgcactacttcctgtgggaacatcacttaatgttcgccattttgttccaggccagtatgttgatatcacaggaataacaaaaggaaaaggttttcagggtgtgatgaagcggcatggatttagtggagggccagcatcccatggtaattcattggcccatcgaacacttggttcagtaggtcatttaactagtcatgggaaaggtttataaaaataaaaagatgcctgggcgaatgggtgg

SEQ ID NO: 190604 - DNA, 265 bp, Glycine max
atatatttacggctgacaccgagaaggaaagcaggaaaaaaacaaaaaggagcagatgggtagctcaggtttctcatggaaattggcggatcatccaaagcttccaaagggtaagactgtggctgttgtggtattggatggttggggagaggccacacccaatgagtacaactgcatccacaaggctgaaacaccctgcatggattcacttaaaaagggtgctcctgaacggtggagattggtcagggctcatggtactgctgta

SEQ ID NO: 190605 - DNA, 274 bp, Glycine max
gttcttcttcttctatgtggacggtgtgtgtgattttggcatcactggcctctgcagcactctgtgccaacccacgcaggccagtggatgtacaatttggccgaaactacgtgcccacatgggcctttgatcacatcaaatatttcaatggtggttctgacattcagcttcatcttgacaagtacactggtactggcttccagtccaaagggtcttacttgtttggtcacttcagcatgtacataaagatggttcctggagattctgctggcac

SEQ ID NO: 190606 - DNA, 101 bp, Glycine max
atatgcttgtctcaaagattaagccatgcatgtgtaagtatgaactaattcagactgtgaaacatgcgaatgcgctcattaagatgcagttgtgagtttgt

SEQ ID NO: 190607 - DNA, 275 bp, Glycine max
gtggctagaaccatccctggcaaaacctatgtgctctcattctctgttggggatgcaagcaactcatgtgaagggtccatgattgtggaagcctttgcaggaaaagacaccatcaaggtgccctatgagtccaaaggcaaaggagggttcaaacgtgcagcactcaagtttgtggctgttacccctagaacaagaatcatgttccttagcacattctacaccatgagaagtggatgacttttcttcactctgtgggcctgtgattgatgatgtca

SEQ ID NO: 190608 - DNA, 217 bp, Glycine max
tctcgagccgattcggctcgaggattgatcccttgccatcttatggaccagggagggacacaacatggtggaaggtttagcagacatgatttttggaaccaacctcactgatgtaatcataactggggacaatggcacaatagatggacgaggtgatctgtggtggaaaaaattccacaaggggtgagctcaagtacacccgtccttacctggttgt

SEQ ID NO: 190609 - DNA, 270 bp, Glycine max
agacagttgggtatatagctccagaagtgtggaacagaaactttggaggggtgtcatataagtctgatgtctatagttatggaatgatgattttggaaatggtcggaggaaggcaaagtatcagtattgaagcaagtcattcaagtgagacatattttcctgattggatatacaagcatgttgagttgggaagcaatttagcatgggatgaaggtatgaccacagatgaaaatgaaatttgtaagaaaatgattattgtgggattgtggt

SEQ ID NO: 190610 - DNA, 284 bp, Glycine max
ctttcttgtgttttcattctgttctaaaatcaaaaaccctaaccaacgaaagttttcaccgcatctccacctattctcaatctccacaaatcgaagaaaagagaatgagtagacgctagagcagaactgtctacgttgggaatctacctggtgatatccgtgaaagagaagttgaagattagtttctgaagtatggacacataacacacattgacctaaaggttcccccaagaccacctggttatgcatttgtagagtttgaagatgctcaagatgctgaggat

SEQ ID NO: 190611 - DNA, 272 bp, Glycine max
gcacaacgaaactcacagaagaaagaagaaaaagaagcgagactagagtcagcattcgaaaaagatgagtagcatcggtacaggttacgatctatcggtcaccaatttctcccctgatggccgcgttttccagatcgagtatgccgctaaagccgtcgacaacagcgggactgttattgggatcaagtgcaaagatggggttgtgttgggcgttgagaagcttattccgtcgaaaatgatgtttccgggttccaatagcagaatacactccg

SEQ ID NO: 190612 - DNA, 258 bp, Glycine max
tctcgagccgattcggctcgagggtggaatggctttactacattaagcaggcattcaatgcaggtgatttattacaatataaagaattatgtcgggtgcataatgctgctttaagagcccaaccagcactagttcaaaatgagcaaaagttgtcggaaaagatcaacattctgtgtttgatggagattatattcagtcggccttcggaagatcgaactattcccttgagtgtaattgcagagcgtacaaagctttcta

SEQ ID NO: 190613 - DNA, 259 bp, Glycine max
acaatacaaacaatggcagctactcaggaagatgtgaagcttttgggtattgtgggaagcccatttgtgtgcagggtccagattgcccttaagttgaagggagttgaatacaaatttttggaagaaaatttgggcaacaagagtgatttgcttctcaaatacaaccctgttcacaagaaggttccagtgtttgttcacaatgagcagcccatagcagagtctcttgtgattgttgaatacattgatgagacatggaaga

SEQ ID NO: 190614 - DNA, 262 bp, Glycine max
caaaaccctagttcatccatcaccagtcgaggaagaagatggtgaagttccttaagcccaacaaggctgtcatcgtcctgcagggccgctacgccgggcgcaaggcggtgatcgtgaggaccttcgacgagggaaccagggagcgcccctacggccactgcctcgtcgccggaatcaagaagtaccccagcaaggtcatcaagaaggactccgccaagaagacggccaagaaatactaggttaaggcgttcgtgaagctcgt

SEQ ID NO: 190615 - DNA, 147 bp, Glycine max
gcattggagcagtggaggcattgaaggatcaattgggggtgtgcaggtggaaccatgcattgaggtcactgcagcagcatgccaagagcaacattagatcctacactcaggccaaaaccttgtcttctgctacttctgctgctgtct

SEQ ID NO: 190616 - DNA, 258 bp, Glycine max
catgcatgtgtaagtatgaactaattcagactgtgaaactgcgaatggctcattaaatcagttatagtttgtttgatggtatctactactcggataaccgtagtaattctagagctaatacgtgcaacaaaccccgacttctggaagggatgcatttattagataaaaggtcaacacaggctctgcctgttgctttgatgattcatgataattagtatgatcgcacggcctttgtgccggcgacgcatcattcaaatt

SEQ ID NO: 190617 - DNA, 258 bp, Glycine max
aaaaaaacttgttacgatggtttcttccgacaaggatccacgagaggaagtccttcaagcatggtacatggatgatagtgatgaagatcaaagactcccccaccacaaagaacccaaggagtttgtctcgttggaccaacttgctgaacttggagtccttagctggaaattagatgctgataaccatgaaaatgatccagagctgaaaaagattcgtgaagagcgtggctacacctacatggatgtttgtgaggtctg

SEQ ID NO: 190618 - DNA, 258 bp, Glycine max
atcggcatcaactacggcacgctcggcgacaaccttccaccgcccgcggcgtggacgaacttcctgaagacgaagacgaccatcgaccgcgtgaagatctacgacgtgaacccggacatcctgcgggccttcgccggcagcggcatcaccgtgacggtgaccgcccccaacggcgacatcgccgccttaaccaaaatcgactcggcgaggcagtgggtggcgacgcacatcaaaccctttcaccctcagaccaaaatt

SEQ ID NO: 190619 - DNA, 254 bp, Glycine max
cttgggtaggcctggtggtattgctgtgtttgattgtcacggccatcgccgaacaatgcggtcgtcaagctggcgggcagacatgtcccaacaacctatgctgcagccagtacggttggtgtggaaacaccgaagaatactgttccccttctaagaactgccagagcaactgctggggaggcggcggcggtggcggtggcggcggcggcggtgaaagtgcttctaatgtccgcgccacatatcattactatgag

SEQ ID NO: 190620 - DNA, 257 bp, Glycine max
tgtctttaccgtgtcgacacggttcttcaattcaatcaaatcttgtttctatggaaggaaattggtgtttgattcattatcaaggtttctcatcagctaccagcacttcacattctacccagttttgtgctttgcaagggtcaatttgtacctccagactttgttgctgttgttctctaggagaaaggtgccagatagagcctttaacataatggggatccttgtgttttgggtttggttccctctgttgatctctt

SEQ ID NO: 190621 - DNA, 261 bp, Glycine max
ccaaaatccaagagaaatagacaagttacgctttcaaagacgaagaaaaagggaagagaccacaaagagacgatagtgaacggaataaaagatgctgcagaaaagtacgggcacgtgtacgtgttctcgttcgagaacatgaggaatcagaaattcaaggagttcagggaccagttgaaatcgagtagcaggttctttctcggctctaacaaagtaatgcaagttgctttaggtcgctctgcttcggatgagatcagaccc

SEQ ID NO: 190622 - DNA, 228 bp, Glycine max
caaaacttgctctacaatgagtttccttcgttcttttgcaagaaacaaggatatatcaaaagtaggacgcagaggtatccattgcatgcagaaactatgtgcagaaaaaatatctcctgattcactagagaaggcccaaaatcgtgtgatagatgctgcactcacacttgttcgagaaaatacaaggcttaagaaagaacttgtgcatagtttgggaggtgctgtagc

SEQ ID NO: 190623 - DNA, 147 bp, Glycine max
ggcgaacagagagacccgaagccagatttcaagatgaagttcaacattgcgaatcccaccactggttgtcagaagaagctggagatcgatgatgacctgaagctacgagcattttgggacaagaggatctcacaagaggttgttggt

SEQ ID NO: 190624 - DNA, 253 bp, Glycine max
gtcaaggctcagaaatcaaaagcctacttcaagagatatcaagtcaagttcaagagaagaagagagggaaaaaccgattaccgtgccaggattcggttgattaatcaggacaagaacaaatataacactccgaaataccgatttgtggttcgctttagcaacaaggacattgttgcacaaataatatctgctagcattgccggcgatttagttcttgctacagcatattcacatgagctgccacgatatggtc

SEQ ID NO: 190625 - DNA, 141 bp, Glycine max
cacaaaggtggacatctctggtgttaatgttgataaatttgatgacaagtactttgccaaggaagccaagataaagataacaaagggcgaaggcgagttcttcgaggcagagaaggaggagaaaaatgtgcttccccaaga

SEQ ID NO: 190626 - DNA, 253 bp, Glycine max
gcaagtatggggatggactactatgggattttggaggttgacaggaatgcctcagatgaagagttgaagagagcctacagaaagcttgcaatgaaatggcaccctgacaagaacccaaccaataagaaagaggctgagattcaattcaaacagatatctgaatcctacgaggttcttagtgatccccagaagagagcaatttttgatcggtatggagaaggtggccttaatggtggaatgcaacaccggatga

SEQ ID NO: 190627 - DNA, 258 bp, Glycine max
gagaatatgaagttgtttgttttctttgttgctgcagtagttttggtagcatggccatgccatggcgcaggctaccaaaggttccctctccgaatgaaaactggctatggtgagcgttcttcggaggtaaaatgcgcaagttttaggcttgctgtggaagcacacaacatccgagcatttaaaaccattcctgaagagtgcgttgaaccaacaaaggactacattaatggcgaacaatttagatcagactctaaaaca

SEQ ID NO: 190628 - DNA, 261 bp, Glycine max
atggcttctctagcaaccttggctgctgttcaaccagctacgatcaatggccattgctggaagtttccctctctggaactaagctctctttcaagccctctcgccacagtgtcaaatccaagaacttcaggagtggtgccgtggtagcaaagtatggtgacaagagtgtgtactttgatttggaggatctgggcaacactacagggcagtgggacttgtatggctcagatgcaccttcaccctacaaccctcttcagagca

SEQ ID NO: 190629 - DNA, 253 bp, Glycine max
gttgttactgctgctcttttctcttttcttttctctttagttctctcttcccctttctttttctttttcttcttcttctgagcttgtttaagcttttcttccattaacatattatcacaatgtgtggtattcttgctgttcttggttgttctgatgactctcgagccaaaagggtccgcgtgcttgagctctctcgcagattgaagcaccgtggccctgactggagtgggctccatcaacatggtgactgctt

SEQ ID NO: 190630 - DNA, 255 bp, Glycine max
gctccacccgaagtggtggcgcgtatggctgcggctaagcaagagtttgaggcacggcaaagatcttcagttggttcaagggaaacttcaaaagaccctgaacttgaccaattcatggaagcatactatgacatgcttgtgaagtatagagaggaattaacaaggcctattcaagaggctatggatttcatgcgaaggatagaaactcagctaaatatgctttgcaatggacccgtgcggatcttctctgatgat

SEQ ID NO: 190631 - DNA, 207 bp, Glycine max
actcgagccgaatcggctcgagaaaaaaagagcgacttttgagttacaaagatgactaacttaccattgatcaacttggagaagctcagtggtgaggaaagaaacgataccatggaaaaaattaaagatgcttgtgaaaactggggattctttgagctggtgaatcatggcattcctcatgacatattggacactgtggagaggttg

SEQ ID NO: 190632 - DNA, 254 bp, Glycine max
atccagccacagcacagcactctttgcaacacaacaaaaaaagacaacacagagagaagcgtcttaataaacgctcttctctgaaaaacctgatttcttctcttcttctcttctctttcgtttcgatcttcgatctctgaaaatgagagagtgcatttcaatccacatcggtcaggccggtattcaggtcggaaacgcctgctgggagctctactgcctcgaacacggcattcagcctgatgggcagatgccaa

SEQ ID NO: 190633 - DNA, 257 bp, Glycine max
agcaccgtcgcaccttccctgaggcttctcttgtctgtcgcgagtgaccatggtgagggttagtgtgctgaacgatgctctgaagagcatgtacaatgctgagaaaaggggaaagcgccaagtcatgattcggccatcctccaaagtcattatcaaattccttttggtgatgcagaagcacggatacattggagagtttgagtatgttgatgaccacagggctggtaaaatcgtggttgaattgaacggtagactga

SEQ ID NO: 190634 - DNA, 143 bp, Glycine max
aaaaaaacttgttacgatggtttcttccgacaaggatccacgagaggaagtccttcaagcatggtacatggatgatagtgatgaagatcaaagactcccccaccacaaagaacccaaggagtttgtctcgttggaccaacttg

SEQ ID NO: 190635 - DNA, 258 bp, Glycine max
gtgcaggaactgtaggaaggaagagtcaagcgaggaggatcattgaagcgattgaggttggagtgatgaagaagctgaagacgaaggaagaggagatagagaaaatcggaaaactgaattgggcgttggaagagaaagtgaagcatctctgcatggagaatcaggtgtggcgtaacatagcggaaaccaacgaagccacagcgaatgctctgcggtgtaatttagagcaggttctcgcgcagccggcggaatggcggc

SEQ ID NO: 190636 - DNA, 252 bp, Glycine max
tcaaccttctttcttcttatatatcgaacatggctaagtatcattcaagtgggaaaagctcttccatgactgctatagccttcctgtttatccttctaatcacttatacaggcacaacagatgcacaatccggggtatgttatggaagacttggcaacaacttaccaacccctcaagaagttgtggccctctacaatcaagccaacattcgcaggatgcgaatctacggtccaagcccagaagtcctcgaag

SEQ ID NO: 190637 - DNA, 250 bp, Glycine max
gtaaaccctaatttcggaaagatcggcgatgactgcctccaaggatcgcgagaacttcgtctacatcgccaaactcgccgagcaggccgagcgttacgaagagatggtggaatcaatgaagaacgttgcgaatctcgacgttgaactgacggtggaggagcggaatttgctttctgttgggtacaagaatgtgattggtgctcgcagagcgtcctggaggatcctgtcttccattgagcagaaggaagaa

SEQ ID NO: 190638 - DNA, 136 bp, Glycine max
gctttcctttgacgcttctgacactgctccttttctttctctccgtgtcctaatggctctccccgactcttcttcccgccgcaactccctgatcccctccttcatctactcctcttcctccaaaacgctccctcta

SEQ ID NO: 190639 - DNA, 252 bp, Glycine max
agcggctcttatgattctgaggatggcttccgcctgttggataaagagatttcagagcatgaatatttgaaaaacagtgttgagggtttatctcggaggcttttctatcttgctcttccaccttcagtatatccatcagtttgcaagatgatcaagacttgttgcatgaataaatctgatcttggtggatggacacgtgttgttgttgagaaaccttttggtaaggatctagaatctgcagaggaactcagt

SEQ ID NO: 190640 - DNA, 251 bp, Glycine max
tgcgactctctttccttccctctttttccgaatctgaatcgaaatggcttcggagactgagacgtttgcttttcaggccgagatcaaccagctcctcagtctaatcatcaacaccttctacagcaacaaggagatctttcttcgtgagctcatcagcaatgcctctgatgctttggacaagattcgatttgagagtcttacagacaagagcaagcttgatgctcagccagagttgttcattcacattattc

SEQ ID NO: 190641 - DNA, 244 bp, Glycine max
atactcctctgttctctctgtttctcttcaatcttcctgaaaaaacaaaaacacgaaaaatcatccaccctctcacattctctctctctctcctttcaactaatatggcaattgaaaaccaagacaacactgtcagagaaatcaagccaaagaacaggagaatcatgggtgctggaggccctgatgatgacgacaataggtggccaccgtggttgaagccactgctgaaagagagcttctttgt

SEQ ID NO: 190642 - DNA, 243 bp, Glycine max
cttgaagctcctgtttcgggtagcaagaagccagcagaagatggccaactcataatacttgctgctggagataaggcattgtatgatgaagtgcttccagcatttgatgtactggggaagaagtctttctttctgggtgaggttggaaatggtgcaaaaatgaaacttgttgttaacatgataatgggcagtatgatgaatgctttctctgagggactcacactagctgaaagaagtggtttg

SEQ ID NO: 190643 - DNA, 253 bp, Glycine max
ctcgagccggttaaggcttggactgcctggaaacggaggcactgaagaagtgctcatcaggtcgaggggtttctctgagactgaaactggtcatgaagatgagtctgccaccactgtggatttgatgcttaatctttcttctaaggaggccgcaaccactgctgctgctgctgcagatccaactgataagcacaagactttgcctaaggagaagacccttctgccagcagatcctgctaagcctccagccaag

SEQ ID NO: 190644 - DNA, 250 bp, Glycine max
ggaggtggtggtggtttgggtggttctggtcatggtggaggctttggtgcaggtggcggtgtagggggtggaggtggggccggtttaggtggaggtggcggcggtggcggcggccgtggtggagggattggtattgggattgggattggagtaggagttggggttggagctggtgctggtcatggtgttggtgttggtggtggtggtggtgttggtggaggaggtggaggtaaacattaagcatgcatgc

SEQ ID NO: 190645 - DNA, 259 bp, Glycine max
ctcgagccgattttactggggagatacctgcatccctttcaaattgtacctatcttaatactcttagacttgaccaaaaccaactcaccggtcacattcctgcaaacttgagtcagctcccgcggcttaagttgtttagtgttgccaataatcttttgacagggccagttccaccctttaaacctggtgtagctggtgcagataattatgcaaataattcaggcctgtgtggtaatcccttgggtacttgccaggtcgg

SEQ ID NO: 190646 - DNA, 258 bp, Glycine max
agagaatgatgatgaagtctgctatgtgtgcagtggtggttgtagcacttcttcttctggcggaggtggggcccatggctgaggctgtgacatgcaccccaacagagttgagtccgtgtcttccagcaatcacttccggtgctaaaccttccaatgcttgttgcacgaagctgaagcagcaaaaaccatgcttatgtggctacctcaaaaacgctagcttgaagcagtatgttaactctcctaatgcccgaaaaaccg

SEQ ID NO: 190647 - DNA, 251 bp, Glycine max
cagagagcgcgtcttaataaacgctcttctctgaaaacccccatttcttttcttctttcctcctctctttcgcttcttcgatcttcgatcttcgtcgctgaaaatgagagagtgcatttcaatccacatcggccaggccgggattcaggttggaaacgcctgctgggagctttactgcctcgaacacggcattcagcctgatgggcagatgccaagtgacaagaccgttggtggaggtgatgatgctttca

SEQ ID NO: 190648 - DNA, 252 bp, Glycine max
ggaggagctggtggccgctggcagcagaacgccgtcgccgaagacgacggcggtggaagctgctgaaccggtgcgtggagagcaaggcgtcggcggtgtcgctgcaggtgggggaacacgtgcagttggcttacacacaacacaacgaatcaccgtggcatcccagatcatttgctgttaaggatgagatattctgcttgtttgagggggctctagacaatttgggcagcctgagacaacagtatggactgg

SEQ ID NO: 190649 - DNA, 247 bp, Glycine max
attctacccgccgctcgatgggaattgcgcttcaaggcgtctcgtagggctaatccgcctcacgaggggtcaccaacggcacgtgcctttggggggccgaggccccctactgctggtcggcaaacggacggcgggcgcacgcgtcgcttctagcccggattctgacttagaggcgttcagtcataatccaacgcacggtagcttcgcgccactggcttatcaaccaagcgcgatgaccaattgtgcg

SEQ ID NO: 190650 - DNA, 246 bp, Glycine max
gctggattcaagggatgctatacaggtttgggtcctactgtaagtcgagcatttcctgctaatgctgcaacaattgtcgcatgggagctagcattgaaaatgctaggcattaagcatgactgagagtctacctaattgcggataatactacaaagttcaggtgttcattcagttatttctttcattcttgctttcattttggatcgtgctgctcatcatcacagacagtttgcattaatcctcgag

SEQ ID NO: 190651 - DNA, 261 bp, Glycine max
aaagaacaaggatcagaatcgtttaatcaagttgaggaagatggcactagtctccggaggaagatcaacactgaaccctaacgcccctctttacattcccgccgcgttccgccaagtggaggatttttctccagaatggtggcagctggtgacgacactgacatggtaccatgactactggctaagccagcagcacgatgatggagccttctatggcgaggatgggtttgatggcaatgatgtggttgatttgcttcctga

SEQ ID NO: 190652 - DNA, 241 bp, Glycine max
ctcgagccgctcgagccgctcacacccttcataagctttgtgtttttttcgtagaaacaaacatctgatacatgactatgatgagcagcagcaacaacaacgttggagaatttggagacaccactctgaccaaggtttttgttgggggcttagcttgggagactccgaaggatgcccttaaagaccactttgagaagtatggtcagatccttgaagctgtcatcatttccgataagcacac

SEQ ID NO: 190653 - DNA, 261 bp, Glycine max
tcttcccttcctctggtggcgacaatgtcgactcctgctaggaagaggctgatgagagacttcaagaggctgcaacaagacccgcctgcagggatcagtggtgccccccaggataacaacataatgctgtggaatgctgtcatatttggtcctgatgatactccatgggatggaggcacgttcaagttgacactccaatttactgaggactatccaaataaaccaccgactgtacgatttgtgtctcgcatgtttcatcca

SEQ ID NO: 190654 - DNA, 289 bp, Glycine max
cctgacactccttcttctccgcttcctcttcgatcatcgcttcagaatgccgccgaagttcgacccctcccagatcgtcgacgtcttcgtacgcgtcaccggcggtgaggtcggcgcggcgagttccctcgccccgaagatcggtcccctcggtctctcccccaagaagatcggagaagatatcgccaaggaaaccgccaaggactggaagggcctccgcgtcaccgtcaagctcaccgtgcagaaccgtcaggccaaggtcacggtggtcccatccgccgccgcgctc

SEQ ID NO: 190655 - DNA, 286 bp, Glycine max
gccaacttcacatctcaagtcattatcatgaaccaccctggccagattggaaatggatacgcaccggtgcttgattgccacacttctcacattgctgtcaagttttctgaaatcttgaccaagattgacaggcgatctggtaaggagcttgagaaggagcccaaatttttgaagaatggtgatgcaggtatggttaagatgattccaaccaagcccatggtggttgaaactttctctgagtatcctccccttggtcgttttgctgtgagggacatgcgtcaaactg

SEQ ID NO: 190656 - DNA, 289 bp, Glycine max
ttatcgagccgattcggctcgagccaattcgtgccactctcttcaatatggccgttaccttctacaaatctccacacagaatcatgtctcaagtccctcgacgacttcctctctgggaaggtctacgtttctggggatcagttcacaaaggacgacatcaaagtgtatggtgctgttttggagaagccaggtgactcttttcccaatgctgccaagtggtacgaggttgtctcatctcagcttgctgcaagcttccccggcaatgctcaaggggtgagattcagtggca

SEQ ID NO: 190657 - DNA, 283 bp, Glycine max
tctcgagccgaatcggctcgagatagccagcatcagcattcagtaacatcaatatcatcgacaacagacaacaatttcgggaatccgctggctatgactgcagttgtggtcgtcccattgggccttctcttcttcgcttccggcctcatcgttaacctcattcaggcaatatgctacgtggttgtgcggccggtgtcgaagaatctgtaccggcggatgaacagggtggtggcggactgctctggctggagctcgtgtggattattgattggtgggccggtgt

SEQ ID NO: 190658 - DNA, 287 bp, Glycine max
gaggcatcagttgcaatggctcgttacggtgagggcgacaagcggtggatcgtggaggaccgccccgacggcaccaatgtccacaactggcattggtccgagaccaactgcctcgactggtccaagaccttcttcaccagcctcctcactaacctccctatcctcgacggcgagggtaacctcttcctcaaaacgacgtcgcttcgctccctcgacggcgacgcctacatcaatgtccgaaaggggaagatcatccccggctacgagatcagcctcactctcaattg

SEQ ID NO: 190659 - DNA, 287 bp, Glycine max
tggatcatccacaagattgaggagaccctccatgtgggagggcacaagaaagaggagcacaaaggagaacaccatggtgagcacaaaggtgaacacaaaggagaacaccatggagagcacaaagatgaacacaaaggagaacaacaccatggggagcacaaggagggacttgtggataagatcaaggacaagatccatggtgatggccatgacaagggtgagaaaaagaagaagaaggacaagaagaagaaggagcatggacatgaccatcatggtcatagcagcag

SEQ ID NO: 190660 - DNA, 286 bp, Glycine max
gcagtcttcaggtttggttccagtcacggcacacgcgccggctgagaaaggggtgtctggatttttgttggatttcctgatgggcggagtgtcggcggctgtgtccaagacagctgcggctccaatcgaacgagttaagttgctcatccaaaaccaggatgaaatgatcaagagtggtcggttgtctgaaccatacaaaggaattggcgattgtttcactcgaaccatgaaggatgaaggggtgattgctctttggagaggaaacactgctaatgttatcagatac

SEQ ID NO: 190661 - DNA, 286 bp, Glycine max
gagaactcctatcttgttccctctcttctttcttctttgtgccttcacctcatatctaccttcagccaccgctgatgatgatcatgtgtacgacactgacggcgataagcttcaatacggtgtcaattatttcgtgttgccagtgataagaggaaatggcggtggaatacaagtagcaaaagcaggaaacgaaacttgccctctgactgtggtgcatctggcaacgagctctctgaggggttaccgataaagattgcatctcgatcagcaggagtcgctttcatca

SEQ ID NO: 190662 - DNA, 289 bp, Glycine max
tgcaacttcgagctgggtccgaagccctccgccctgaaaggaactgtggtgattggtggcagccactcgatcccagaatgggagatctctggcttcgtggagtacataaagtccggccagaagcagggcgacatgctgctcgtggtccccgagggggcctacgcggtgcgcctcgggaacgaggcctccatcaagcagaggatcaaggtgatcaagggcatgtactactccatcaccttcatggtggcccgcacctgcgcgcaggaggagaggctcaacatatccgtca

SEQ ID NO: 190663 - DNA, 290 bp, Glycine max
ctcgacttatccataacttgtggaagatccacagggaccctagtgtttggtcagacccattggaattcaaaccagaaaggttccttaccactcacaaagatgttgatctaaggggtcacaattttgagttgttaccctttggaagcgggagaagagtttgtgctggaatgtcccttggcttaaacatggttcatttcactttggctaatttattgcattcctttgacatcttgaatccatcggctgaacctgtagacatgactgaattctttggatttaccaacaccaag

SEQ ID NO: 190664 - DNA, 285 bp, Glycine max
agcggatcagttggattcaagaaggaatatctcgatcaaccggacattcccagcacatggaaagcaatggaggcactctatgactcaggcaaggcaagagccataggagttagcaatttctcttcaaaaaagcttcaagatctcatgaatatagcaagagtgcctcctgctgttaaccaagtggaattgcacccaggatggcagcagccaaagctgcatgcattctgtgaatctaaaggagttcatctgtctggatattctccactgggctcaccaggagttctc

SEQ ID NO: 190665 - DNA, 283 bp, Glycine max
tactcgagccgattcgtctcgagacaagtttctcgaggaaggatccatagcccaatgaatgaatggttatcgttttgaagaaacttttgatggcagtgctctgggactgaacaactgaaactattagattcaatttattcgctcctttcttcactgaaccaaaattgaattgaatggatgctatcagaaagcaagcctccaagcttcgagaacaggtcgctcgccagcaacaggctgttctgaagcagtttgggggtggcggttatggaggttcagataatgt

SEQ ID NO: 190666 - DNA, 249 bp, Glycine max
cattcccttcttcaatttcatcaacacaaccatcaatttcatcaaccatcgcataataatagtattatcatgatagccgtggcccgaaaggacatggaccggatcaagggcccgtggagcccggaggaggacgaggcccttcagaagcttgtggagcggcacgggcccagaaactggtcgctcatcagcaggtccattccgggccggtctgggaagtcatgcaggcttcggtggtgcaaccagctgtcg

SEQ ID NO: 190667 - DNA, 285 bp, Glycine max
ggcttcctctgcctcgcttttgaaaacgcgcgtttcaggcgaagatggttggcgacaacacgaagaagttgaaagtcgccgagaatttggaggatagcatcgacggcgaactcgtcctctccatcgagaagctgcaagaagtccaagacgagctcgataagatcaatgaagaggcgagtgataaggtcctcgaagtagagcagaagtacaatgagataaggaagccagtttacgataagcgaaatgatgtcgtcaaatctattcctgatttctggttcactgctt

SEQ ID NO: 190668 - DNA, 287 bp, Glycine max
tctcgagccgattcggctcgagggaatcgtgatgtgacaggaagcaagaacagcgttgagatacgatgctctagctcgctttactgttgaagaacacaacaaaaaacagaatgcccttttggagtttgaaaaggtggtaactgcgaaacagcaagtggtttctggtaccttgtacaccatcactttggaggcaaaagatggtgggcaaaagaaggtttatgaagccaaagtttgggagaagtcatggttgaacttcaaggaggtgcaagagttcaagcttgttggag

SEQ ID NO: 190669 - DNA, 282 bp, Glycine max
gggaaaggttccatgtgaacggcacttgcacatgggttagtcgatcctaagggacgggggaagcccgtctgatagcgctctgtgcgcgtactccgaaagggaatcgggttaaaattcctgaaccgggacgtggcggctgacggcaacgttagggagtccggagacgtcggcggggactccggaaagagttatcttttctgtttaacagcctgcccaccctggaaacggctcagccggaggtagggtccagcggctggaagagcaccgcacgtcgcgtggtgt

SEQ ID NO: 190670 - DNA, 286 bp, Glycine max
tggcaacgccactgcaatctgttctaattagaaatagaaggttcatcatctcaaaaaggcttttgtgattctcgatttgatttggatcgcacagaacgaaggcatgggtcaagcttttcggaagctcttcgacaccttcttcggcaacaccgagatgcgggttgtgatgcttggtctagatgctgctggcaaaacaactatactgtacaagctccacattggagaagttttatctactgttcctacaataggttttaatgtggagaaggttcagtataagaatgtt

SEQ ID NO: 190671 - DNA, 285 bp, Glycine max
cccagattccctccactcattgcaatttcttcgatccgctttctaaattccacacccctccgttccactgcttcgccgcgacaagttacaagaatggcttcgaagaatgctcaacaagacacgcgcttagccagaatcgcctctgcgatccgagtcatccccgactttcctaagccaggaattttgtttcaggacataaccacgctgcttcttgatacaaaggctttcaaagacaccgttgacttgtttgttgagaggtacagagatcaaaacatcaatgttgtc

SEQ ID NO: 190672 - DNA, 284 bp, Glycine max
cttataattcttgtgaccctttttgctggtagcattgaaagtgcaccagcaaacgtgaagccaagccattatgctgcacccttcaataggagtgtttttccttctggttttctatttggaataggctctgcagcttaccagatagaaggagcagcagctatagatggcagaggaccaagtatatgggacacctatactaaacagcaaccagggaagatttgggatcatagtgatggaagtctagcaattgatttttatcaccggtacaagagcgacataaagat

SEQ ID NO: 190673 - DNA, 259 bp, Glycine max
gaaaccctcttcatcttgttctatctgtgacgagcatcatggcctcaagagcagtgttattgttggctatgtgtgtgcttccggcgatggttgtggccattcgcccagcaaagaaccctttttgcgtgaagggtcgtgtctactgtgacccttgccgtgctggttttgagacctcagctaccacctacattgctggtgctgagattatgttgcaatgcaagagcagggttagcaacgaggttgtgtacacgaagaaggg

SEQ ID NO: 190674 - DNA, 285 bp, Glycine max
accgttgattcgcacaattggtcatcgcgcttggttgaaaagccagtggcgcgaactaccgtgcgttggattatgactgaacgcctctaaggaaacttcaaaagtagagttgtgatcatgtatagaagcagtgcaatatgagttcagcacagaaagcttggattgtggcaactagtgttggagttgtggaggccttgaaggaccagggcatctgcaggtggaactatgctttaagatcagctcagaaacaagtcaaaagccacgttggatctttgtcacaggcaa

SEQ ID NO: 190675 - DNA, 280 bp, Glycine max
ctctctccccgcccaaaccctaactccctaccctattccgctttctctcatccatcatgaaaggaggaaagtccaagaccgaatctaagagagccgatgccaaacttgctgtgaataagaagggcgccgccaccaagactaggaaacccgccggaaaggggaaggcagcgaaagatcctaacaagccaaagaggcctccaagtgctttcttcgttttcatggaggaattcaggaaggtgttcaacaaggaacatcccgacaacaaagcagtgtctgctgt

SEQ ID NO: 190676 - DNA, 280 bp, Glycine max
aagtataggcgactttctattcaataccatccagataaaaacccagatccagaggcacacaagtacttcgttgagtacattgccaaagcttatcaagctcttacagatccaacagctcgtgaaaattatgaaaaatatggccatcctgatggcaggcagggattccaaatgggtatagctcttcctcaattcctgctaaatattgatggggcatctggtggaatacttctgctttggattgttggtgtgtgtattctcttgccgttggtcattgctgttg

SEQ ID NO: 190677 - DNA, 279 bp, Glycine max
ggaatcatcaattgtccaacaagtacttcgaataaagcctttgttgatttgattcttaaaccctcagaagacgacatcaagatttggcctcacagttttgaatttcgtcttagggtagctcttggacctggaggagatctgttgatgacatctcggatcaggaacactaacattgatgggaagccattttcattcacatttgcttatcatacatatttctctgtgtcagatataagtgaagtgcgggttgaaggattagagacattggattatcttgac

SEQ ID NO: 190678 - DNA, 283 bp, Glycine max
caacaaagtaacgtgaaagagagagagatggaggcgattgttccagtggtggatttccagaggctttcagaggaagaggagcgcaagaagctgagaaaaacatgtgagaaaccagggtgtttcagaatcatcaaccactcaattccactaacactcatggctgacatgaagtcagtggttaaatacttgcatgaccttcccacggaaatcaaaatgcgcaacaaaccctccgtccctgagagtggctatagggcggcaatgccaacaagtcctctatacgagg

SEQ ID NO: 190679 - DNA, 281 bp, Glycine max
gtgctgtgaaccctagggtgaaattcagcgacgaacaaatcaacgcgatccttgatgaggtgttccgaacatacggcgaattcatcgacggcgacaagggtctcacgtacgagggtttgttgcgcacgtacgacgacggctccggcgacgtcgaccgtgacttcgacgcgctcggcctcgacctcgtcgccgctgacgccgcgaaggagcccctcgcggcgttggaggcgtcgtcctcgtcgattgtcgacgagaggatggcggtagagacgcagaagaag

SEQ ID NO: 190680 - DNA, 283 bp, Glycine max
agaaaatcataagtacccctgtgattttcatcaatggcagctaataacattttagaggtgtatttgttcgggatattctagaattcaaggaaagtctgccctcgtgagccattttcaaaattcaagtctgatgaatgaagataagcgatgtcgtcctattctcttccactccgagggttctgaagtttgtgatctggtaattggaaaacattgactagtgcatttgttatattttcttcacaggaaattgaaatttgaaacttgtagattgtacaagaccacc

SEQ ID NO: 190681 - DNA, 283 bp, Glycine max
gggaatcgcagcgaagtccactatgccgaagcaaattcacgagattaaggtcttcctcctcactgctaggaggaaggatgcacgctctgtgaaaatcaagcggacaaggatgtggtgaagttcaaggtccgttgctccaagtacctttacaccctctgtgtgtttgattctgagaaggctgacaagttgaagcaatcacttcctccaggtttaagcgtgcaggatgtgtgattcttactgctgtatgaagatcaggtttttctctggattttggggattcata

SEQ ID NO: 190682 - DNA, 280 bp, Glycine max
atcaaaaccagaaaaacacactgcaattgtttggactagttttaatttcttccaattccatggctgggaaagatagaatcctgattttgggacccactggagccattggaaggcacatagtctgggcaagtgtgaaggcagggaacccaacatttgtgttggtgaggaacacccctggctctaacaacagggtcaatctggtcaaagctgctaatcctgaaaccaaggaagagctcattgagagcttcaaaaattcaggagtaaatctaattcagggaga

SEQ ID NO: 190683 - DNA, 281 bp, Glycine max
ctttgctgttaaagatcatagaggagaattgtacaagaaacactacccacctgctttgcatgatgaagtttggagattggatcggatagctaaggatggtgcacttcacaaaaaattgattcaggcaaaaattgtaactgtagaagatttcctacgtcttcttgttcgtgagccacagaagttaagaagtatacttggtagtggaatgtccaatagaatgtgggagaatactgtggagcatgccaagacatgtgtcttgggtggcaagctctttgtatact

SEQ ID NO: 190684 - DNA, 280 bp, Glycine max
gcttgttgctgcatctgtactttctaatccctttgagtattgtgatattgtgaccaccacaacccacaagtctttacgaggtccaagaggtggtatgatattcttcaagaaagatactgtgcatggggttgatttggagcctgccattaacaatgctgtttttcctggtctacaggggggtcctcataaccacacaattggaggactagcagtttgcttgaagtatgctcagtctccagaatttaaaaattatcaaaatcaggtggttgctaactgtaga

SEQ ID NO: 190685 - DNA, 281 bp, Glycine max
ggaagctcctgcaagtgcggcaacggctgcggaggctgcaagatgtacccagacttgagctacactgagtcaaccaccaccgagaccttggtcatgggagtggcacctgttaaggctcaatttgagggtgctgaaatgggtgtgcccgctgagaacgatggctgcaaatgtggaccaaactgctcctgcaacccctgcacttgcaagtgaggtgttgggagagcaagcttcaagcagagatagcccttaattaggaataatgataaactattaatgtgtag

SEQ ID NO: 190686 - DNA, 137 bp, Glycine max
ctcgagccgatttcaacctacctatgtgtactgataagatctgcttccctacttaaagagaactatctcctgtgatcagtgtgcttcgtattctctctctctatatatatatggtaaaaagtggttatctcgtgcct

SEQ ID NO: 190687 - DNA, 257 bp, Glycine max
ggctcgagaggttggattgttgctagcagctatgggatacgacaataatcatcgtttatatcttgcctctcacaaggtctatggtggagaggcaaggatttcaactttgagggaattatttcctctgatggaagacaagaagagccttgcttcatctgaagagcgttctcagataaagggaaaagcttctctattagctgcacttgactactatgttggcttgcatagtgacatcttcatctctgcttccccaggaa

SEQ ID NO: 190688 - DNA, 281 bp, Glycine max
gtttaaagtaagagagaagaaagaagcaaatggcaaactttccagttgttgacatggggaagcttaacaccgaagagagacctgcagccatggagattataaaagatgcctgtgagaactggggtttctttgagttggtgaaccatgggatatccattgagcttatggacacagtggagaagctcacaaaagagcattacaagaagactatggagcaaaggttcaaagaaatggtgaccagcaaaggtcttgagtcagttcagtcagaaatcaatgacttg

SEQ ID NO: 190689 - DNA, 280 bp, Glycine max
gcttccttcccaaactgtaaatgaatggtttttgagcaacagcagttaaaagagaaaagggattcagcgaagatgacatctgttggtgtggcaccaacttcgggtttgagagaagccagtgggcatggagcagcagctgcggatagattgccagaggagatgaacgatatgaaaattagggatgatagagaaatggaagccacagttgttgatggcaacggaacggagacaggacatatcattgtgactaccattgggggtagaaatggtcagcccaagc

SEQ ID NO: 190690 - DNA, 282 bp, Glycine max
ccagactgggcatctctaaaccttggcatattgctgtgtattgaatgctctggagtgcaccgaaatcttggtgttcatgtctcaaaggttagatctataacgttagatgttagggtttgggaaaataccgttctggagttatttgataacttagggtaggtgaaccaaatgtgccaatgaaaccttgctctgcagatgccttccaacacaaggagaagtacatccaagcaaagtatgtagagaaatcactgatcatccgagaagaggatatacccgagaatc

SEQ ID NO: 190691 - DNA, 279 bp, Glycine max
cttccttcctctgaaacaagaaccaaaatggagaattcgaccgaataatcccatctccgatcggaaaactccgtcacttacgagtccccttaccctatctacggcatgtcattctccccctcccacccccaccgcctcgccctcggcagcttcatcgaagaatacaacaaccgcgtcgacatcctctctttccaccctgacaccctttcggtaactccccacccttctctctccttcgaccacccttaccctcccaccaaactcatgttccacccccgc

SEQ ID NO: 190692 - DNA, 278 bp, Glycine max
atcttgcttggttatgatattggagtgatgagtggagcagccatatacataaaaagggacctgaaagtctcggacgagcaaatcgagatcctgctcggaatcatcaacctatactctctgataggctcatgtctcgccggcagaacctccgactggataggtcgccgttacacgattgttttcgccggcgccatcttctttgtcggagcacttctcatgggtttctcccccaattattcctttctcatgtttggccgtttcgtcgctggcattggcat

SEQ ID NO: 190693 - DNA, 281 bp, Glycine max
aactagccgcagcacgaggagcagcctcaggaggagaaggatgtctcacaggaagttcgagcacccaaggcacggttcactgggatttcttcccaggaagcgtgctgctcgtcacaggggaaaagtgaaggcattccccaaggatgacccatccaaggcacccaagctcactgcattcttgggttacaaggccggtatgactcacattgttagagaggtcgagaagccaggatcaaagcttcacaagaaggaaacttgtgagcctgttacaattattgaga

SEQ ID NO: 190694 - DNA, 282 bp, Glycine max
ttctcgagccgattcggctcgagcttaaaaccatttgtcacgctgttacattgggacctcccacaagctcttgaagatgaatatacggggatttctcaaacctgaaatagtgtaaataaatactcaattatatatgattcactatagtatttttaaataatgaaaaagaaaatatagtaaatgtttatggaaaaataaaaatagggaggacttccgtaactatgctgacttttgcttcaagacatttggtgatcgggtgaagcactgggtaaccctaaatga

SEQ ID NO: 190695 - DNA, 274 bp, Glycine max
cccagatctgcagacaatatgcgaagaactggcttgttacatttgttatgccttgtcattgctttagtaagtgtgcaagcagaagatgcgtataagtattacacatggacggtgacttatggaactatttctccattgggtagtccccagcaggttattcttatcaatggtcagtttcctgggcctagacttgacttggtgactaatgagaatgtaattctcaaccttatcaacaagctggacgagccatttttactcacttggaacggtatta

SEQ ID NO: 190696 - DNA, 278 bp, Glycine max
ggatgaagaagccttctattatcctcacaatcttgattttcgagggcgagcttatcccatgcacccatatttgaatcatcttggttctgatttatgccgaggcatacttgagtttgcagagggacgttcactagggaagtcaggcttgcgctggttaaaaatacatcttgcaaatttgtatgctggtggtgtcgacaagttatcttatgatggccgaatatcatttactgagaaccacctggatgatatatttgattctgcagacaggcctcttgaag

SEQ ID NO: 190697 - DNA, 278 bp, Glycine max
gccaaacaccattttttcttccttccttttttgtttcctattccttcttcaattctctctcttcatttagtagtaaacatttttttggcctcgttgaagcaatggtggggggtggcaattccaaatccgatatctcctttgctggcacttacgctagcagtgctttcgctgcatgtttcgccgaggtgtgcactcttcctttggacactgctaaagttaggcttcagcttcaaaaacaggctgtacttggtgatgcagtgaccttacctagatatagg

SEQ ID NO: 190698 - DNA, 276 bp, Glycine max
gcggcattaaaaatgcagatcttcgtgaaaaccctaacggggaagaccataaccctcgaggtcgaaagcagcgacaccattgacaatgtcaaggctaagattcaagacaaggaaggcatccctccggatcagcagcgtttgattttcgccggaaagcaacttgaagatggaaggaccttggccgattacaacatccagaaggaatcaacccttcaccttgtcctcaggcttcgtggtggcatcatcgagccttccctcatggctttggctcgcaaa

SEQ ID NO: 190699 - DNA, 276 bp, Glycine max
caaatttcaggaaatcaattatggctcaaccctcaacaagaataggccttgctggactggctgttatgggccaaaatctagcactcaatattgctgagaaaggctttcccatttctgtttataaccgaaccacttccaaggttgatgagactgtagaacgagcaaaacaggaaggaaatcttccagtttatggctaccatgaccccgaagcttttgttcattccattcaaaagcctagggtgataataatgcttgttaaggctggggcacctgttg

SEQ ID NO: 190700 - DNA, 276 bp, Glycine max
attttccatctctaagaatgaccgtacttcaaattccaattccaaatttcttaccttgcccaccattttgactcttggccgtgtcgccgctgtacctcttcttgttgccaccttctacatggatggttggcgaggaacagttgttactacaagtatcttcactgctgcagcagttacagattggcttgatggttatattgctcgtaagatgaaaatgaaatctacatttggtgcctttttagatccagtagctgacaagcttatggtttctgccac

SEQ ID NO: 190701 - DNA, 274 bp, Glycine max
cactgtcggagtaacaccttctgatcctcgaaaatcacttcctcaatggggtcttcatttcctctcctacactcacaggctcaaccagattaagaaaaggtcaagtggggtatatgcatcactatccgagagagagagaggagagtattattcccagagaccgccaactccgctactagacaccgtcaactatcctattcatatgaaaaatctctctaccaattgtttctagaactgggggccatttgggctcaagtcttggtgtggtggaact

SEQ ID NO: 190702 - DNA, 275 bp, Glycine max
gtagggctaatccgcctcacgagggtcaccaacggcacgtgccttttgggggccgaggccccctactgctggtcggcaaacggacggcgggcgcacgcgtcgcttctagcccggattctgacttagaggcgttcagtcataatccaacgcacggtagcttcgcgccactggcttttcaaccaagcgcgatgaccaattgtgcgaatcaacggttcctctcgtactaggttgaattactattgcgacactgtcatcagtagggtaaaactaacctg

SEQ ID NO: 190703 - DNA, 280 bp, Glycine max
  unsure (1)..(280): unsure at all n locations
atggtcatagtgtacacctagttaggcaaacacatcaaacaccaaacaccaaactagttggctcaattctctttgaatggctttggaggctttgaattcaccaacagcagccaccactccgttccgtggctaccnnnnnnnnnnnnnnnnnnnnnnnnctgaccttcacttacgtgagccttgggctaaaaggaaacgctccaaacgaccgcgttttgagacggaggaagagtacctcgctctttgcctcatcatgctcgcacaaagcggtaacaccaga

SEQ ID NO: 190704 - DNA, 287 bp, Glycine max
aagaaaggaaagggaaaagaggaaaatggtgtgcataaggaaggcgacggtgaaggaccttctggcgatgcaggcgtgcaacctgttctgcctccctgagaactaccagatgaagtactacctctatcacatcctctcctggccccagctcctctacgtcgccgaagactacaacggccgcatcgtcggctacgtcctcgccaagatggaggaagaaaccaccgactgccacggccacatcacctccctcgccgtcctccgcacccaccgcaagctcggcctcgcca

SEQ ID NO: 190705 - DNA, 283 bp, Glycine max
atactcctctgttctctctgtttctcttcaatcttcctgaaaaaacaaaaacacgaaaaatcatccaccctctcacattctctctctctctcctttcaactaatatggcaattgaaaaccaagacaacactgtcagagaaatcaagccaaagaacaggagaatcatgggtgctggaggccctgatgatgacgacaataggtggccaccgtggttgaagccactgctgaaagagagcttctttgttcaatgcaagttgcatgctgactctcacaagagcggatg

SEQ ID NO: 190706 - DNA, 279 bp, Glycine max
atgaagttgtttgttttctttgttgctgcagtagttttggtagcatggccatgccatggcgcaggctaccaaaggttccctctccgaatgaaaactggctatggtgagcgttcttcggaggtaaaatgcgcaagttttaggcttgctgtggaagcacacaacatccgagcctttaaaaccattcctgaagagtgcgttgaaccaacaaaggactacattaatggcgaacaatttagatcagactctaaaacagttaaccaacaagctttcttttatgct

SEQ ID NO: 190707 - DNA, 278 bp, Glycine max
catggacttgtctttctctttctgggtctccattaaatttttcttctctcccttctttctctctctctctctctgaccattctcttcttcttctttttcttctcctctctctctctcccctccgccatggctgaggataaggagatgtctacctctgtcatcaatgggaatgattccctaactggtcacatcatatctacaactattggaggcaaaaatggggaacccaaacagactattagctacatggcagaacgggttgtaggaactggatcatt

SEQ ID NO: 190708 - DNA, 274 bp, Glycine max
  unsure (1)..(274): unsure at all n locations
gaagcgtcttaataaacgctcttctctgaaaaacctgatttcttctcttcttctcttctctttcgtttcgatcttcgatctctgaaaatgagagagtgcatttcaatccacatcggtcaggccggtattcaggtcggaaacgcctgctgggagctctactgcctcgaacacggcattcagcctgatgggcagatgccaagtgataagactgttggtggaggtgatgatgctttcaacaccttcttcagtgaaactggggctggnaagcacgtgc

SEQ ID NO: 190709 - DNA, 273 bp, Glycine max
accaaaactcactatcacactcatcttcttcttcgtgctgtttctgaccgcacttggcaacaccaacaccaacacggtgggatcggagttgctgaaggttgctccttccgaattcgctgggacagtgagaaccgtcgttgatgtgttgcaagatattacctccattctctccgagttcggttctggcttcggcgattcgcgtctttctaacgccgtttctgattgtcatgagttgcttgacatgtcctctgatgaactcgattggtctgtctc

SEQ ID NO: 190710 - DNA, 272 bp, Glycine max
ctgagtcaaccctagaaccttacacgcgtctgggtaaacacttttccttatctctgcgtacacttcacccacccacttcctccgtgccaactgctcccccaggcgcattgcagcctccaccgtgctctccgcgctatcgtgcgccgaatccacgattcccatcctcaccgcctccgccgccgttagcttcgcgccgcccagcaccaagtcgcgcatcaccgccggggacctgatcttggaccttatgacggcggcgaagtagcccggcagcg

SEQ ID NO: 190711 - DNA, 276 bp, Glycine max
attgttgaaaagtctcagccaatacaagttttgtttgtctatatagacgaactagttatcaagcctgaattgcatatctgtctatcagttcttctttcctcaaccttctttcttcttatatatcgaacatggctaagtatcattcaagtgggaaaagctcttccatgactgctatagccttcctgtttatccttctaatcacttatacaggcacaacagatgcacaatccggggtatgttatggaagacttggcaacaacttaccaacccctcaag

SEQ ID NO: 190712 - DNA, 224 bp, Glycine max
aggagattcatctctgcaggttgttttagaaaagaaaaaatggtgaagatttgctgcattggtgctggatatgtggggggtccaacaatggcagtcattgctctgaagtgcccctccattgaagtggctgttgttgacatctccaaatcccggattgcagcatggaacagtgaccagcttcctatctatgagccaggccttgatggtgtggtgaagcatgtcgt

SEQ ID NO: 190713 - DNA, 283 bp, Glycine max
aaacctcttctttcaggtccaattcactcgcttattcttttctttccatacacatgcagacaataagttcgaacaagttcaggactggcatggacttctttcaccgcgcgaaggcggtgcgcctccgcagccaccacgacaagtacctcctcgcggaggacgacgaggattcggtgacgcaggaccgcaaaggctcctcgaaaagcgcgcggtggacggtagaatacgtggctgaatacgataacataattcgcctgaagagctgttacggcaagtacctcac

SEQ ID NO: 190714 - DNA, 278 bp, Glycine max
gcaggaggcatcaccgttaccaaacatggtgaaagggcgacaaggagagcgtgttagactttacgtcaggggttcaatacttggatacaagaggtccaagtcaaatcaatacccaaacacctcattaatccagattgagaatgtaaacactaaggaagaagttgcgtggtactgtgggaagcgtatggcttacatttacaaagccaaggtaaagaaggacggaagccactatcgctgcatttggggtaaggtcaccaggcctcatggtaacagtggta

SEQ ID NO: 190715 - DNA, 276 bp, Glycine max
gtagccgcaagcttcgccgtttgaaacagtgcctcaaccatggcagaacaaacagagaaggcttttctgaagcaaccaaaagtgtttctatgctctaagaaaggtgggaagggaaagaggcctgggaaaggtgggaatcgcttttggaagtcaattgggcttggattcaagactcccagagatgccattgaaggaacatatattgacaagaagtgccccttcactggcaatgtttccattcggggtcgtatcctagccggtacttgtcacagtgct

SEQ ID NO: 190716 - DNA, 273 bp, Glycine max
ttctgaggttaaagcaaaaaacaaagagagagagagagagaaaatgatgaagccatcgatgctcagatctctccactccgccgccacccgcggcgcctctcatctcttccgccgtgggtacgcctccgagccggtgccggagcgcaaggtagccgttctcggcgccgccggcgggatcgggcagcctctctcccttctcatgaagctcaatcccctcgtttcgagcctctccctttacgatatcgccggaactcccggcgtcgccgccgatat

SEQ ID NO: 190717 - DNA, 275 bp, Glycine max
ttcagggttggaagaatttttgcgataaaatattttttcacccaaaaaaaatggtgttggatccaagactggtgctggtgctgttcatcggcacttgcattttggccatcaatggtgacacagatccaaatgacgttgcttctctaaaggttttgtttcaaagtatgaactcaccatcccagctaaattggaatggtgatgatccttgtggacagtcgtggcaaggcatcacttgctctggcaatcgagtcacagagattaagttacctggtcgt

SEQ ID NO: 190718 - DNA, 273 bp, Glycine max
gcggccgctcgcctcgagccgtcatcacttcacttcactaatacatcatggcagacgagacccagaacaagtaagagagctctgaggttgaggtccaggatcgtggtgtttttgactttctcggtaagaaaaaggatgaagaagacaagcctcatcctcaggaggaggtcatcgccaccgagtttcaaaaagtcactgtctcagaccaaggagagaacaagcacagcctcttagaaaagcttcaccgatctgacagcagctctagctcttcaa

SEQ ID NO: 190719 - DNA, 275 bp, Glycine max
tctcagccgaatcggctcgagcggctcgagattaaattcaaataaattttagatagaaaaaagacttaaaaaggaggatttgaaatgcgagatctaaaaacatatctttccgtggcaccagtagtaagtactctatggttcggggctttggcgggtctcttgatagagatcaatcgtttttttccagatgcattgatattcccttttttttcattctagttattgacacggaaaggggtgaagaagattatagatccaattaagtattaaatata

SEQ ID NO: 190720 - DNA, 270 bp, Glycine max
ttgcggtttccgcaattggttttgaaggtttcgagaaaaggttggaaatatcctttttccagccgggactttttgctgaccctgaaggaaggggtctaagggctcttacaaaatcccagttgggtgagattctaacaccagctgcttgcaccattgtttcttcgctcaaaaacgataatgtcgactcctatgttctatctgagtccagcctctttgtttatgcctacaagatcatcatcaaaacctgtggtactactaagctattgcttg

SEQ ID NO: 190721 - DNA, 274 bp, Glycine max
tttggaaaccaagaatttttgaagggtagcatcaacaagaagttctggaaatggagatcaccaatgtcagcgagtatgaagctattgcaaagcagaagttgccaaagatggtgtttgactactacgcatctggtgcagaggaccagtggactctgcaggagaacagaaatgccttttccagaattttgtttcggccacgtattcttattgatgtgagcaagatagacatcacaactactgtcctgggcttcaaaatatccatgccaatcatgct

SEQ ID NO: 190722 - DNA, 272 bp, Glycine max
ctatcctcggggtaactgtcgcttataacaaagatccaagtccagttaagctcaacttgggagttggtgcttaccgaactgaggaaggaaaacctcttgttttgaatgtagtgaggcgagttgaacagcaactcataaatgacgtgtcacgcaacaaggaatatattccgatcgttgggcttgctgattttaataaattgagtgctaagcttatttttggggctgacagccctgctattcaagacaacagggttaccactgttcaatgcttg

SEQ ID NO: 190723 - DNA, 267 bp, Glycine max
atgatcactattgctggatgcgtccggaggcatggactatgaccgccctgtgactgaatgccacagttgttccgatctcgcggctgagatggctgctgccttggcttctgcttccattgttttcaaggacaacaaggcctattccaagaaactggtgcatggtgcgaccacgctgttcaagttttccagggatcagagaggcaggtacagtgctgggagttcagaggcttcaatattttacaattctaccagttactgggatgagta

SEQ ID NO: 190724 - DNA, 269 bp, Glycine max
ctagtgaagatgacaatgaacttagaagagggccttggactcttgaagaggataatttgctctcccaatatatttctagtcatggagaagggcgatggaatttgctagctaaacgttcaggattaaagcgaactgggaaaagttgcagattaaggtggctaaattatctaaagccagatgtaaaacggggaaatttaaccccacaagagcaacttataatcctcgaactccactcaaagtggggaaacaggtggtcaaaaattgcacaa

SEQ ID NO: 190725 - DNA, 268 bp, Glycine max
atcatttttattttttccaatcaaaccaaacaaaacataagcaccgctcttttctctccgaaatccccatctcccttcacttctgagctctggacgagatcccagatctcaccatctttcacgcactcttccatcagattcaccctttcgtttaacgcaaactcataacttgaaggttaatggctgctccaccggcaagggctcgtgccgattacgattatctcataaagcttctcttgatcggtgacagcggtgttgggaaaagttg

SEQ ID NO: 190726 - DNA, 269 bp, Glycine max
attccccttatctttctctcttctctctccccgcccaaaccctaactccctaccctattccgctttctctcatccatcatgaaaggaggaaagtccaagaccgaatctaagagagccgatgccaaacttgctgtgaataagaagggcgccgccaccaagactaggaaacccgccggaaaggggaaggcagcgaaagatcctaacaagccaaagaggcctccaagtgctttcttcgttttcatggaggaattcaggaaggtgttcaacaa

SEQ ID NO: 190727 - DNA, 227 bp, Glycine max
aaaaaaaatgaggttttttacagtgaaagtagctctgtgctgtgtggtggttatgctactaaccctctcagatgcacagctagataactctttttacaaggacacgtgtccaagagtgcattctattgtgcgtgaagttgtcagaaatgtttccaaatctgatccccgcattcttgccagtctcataaggctccactttcatgattgtttcgttcaagggtgtgatg

SEQ ID NO: 190728 - DNA, 235 bp, Glycine max
gctgatcttatacaggcactgaacaatcgtctggtagctctatcatttcatattagagaatactattggattgatttgaaaaaattaaatgagatttaccgttacaagacagaggagtactcatatgatgcagttaataagttcaacatatacccagaccagatttctccttggttagtggaatggatgccaaacaaaggaggctatttaattggcaacctacaaccagctcaca

SEQ ID NO: 190729 - DNA, 266 bp, Glycine max
cgcagcgtagcagtaactcgtggaattgctagcaatggcgaggatcaaggtttacgagctgaggcagaagacgaaggctgatctgttgaatcagctgaaggacctcaaggccgagcttgccttgcttcgtgttgctaaggtcaccggcggtgcacctaacaagctctctaagatcaaggtggtgaggttgaacattgcccaggttttgacggtgatttctcagaagcagaaggccgcgttgagggatgcctacaagaacaagaagt

SEQ ID NO: 190730 - DNA, 269 bp, Glycine max
aagaggcatcagttgcaatggctcgttacggtgagggcgacaagcggtggatcgtggaggaccgccccgacggcaccaatgtccacaactggcattggtccgagaccaactgcctcgactggtccaagaccttcttcaccagcctcctcactaacctccctatcctcgacggcgagggtaacctcttcctcaaaacgacgtcgcttcgctccctcgacggcgaggcctacatcaatgtccgataagggaagatcatccccggctacgag

SEQ ID NO: 190731 - DNA, 269 bp, Glycine max
ccaaggtcctgaatctcacagagacagagagaatgagtacggtgggagaagggaaggtgagtagtaatggtcatggatgttgcaaatcagggccaggctatgcttccccactggaagccatttctggtcccagagagtctctcatttatgtaacctctgtctacacagggaccggaatagagaagccagactatttggcgacagtggatgtggatccaaactctccaacttattccaaagtcatccataggcttcctgttccttattta

SEQ ID NO: 190732 - DNA, 269 bp, Glycine max
ggaagaatcagagctcagcgataagcagaaagtggagatcgcgaaatggttcctcctcaactctcctctaggagaaatccaatacgttgccaaagatgtgaaatcgattctcaacaacgacgatttgtacaaggaagccgcttccgaggcttttccctattacaacaaatctcacttgatttccattccaatgcccaacagaagcggagacgtactggttacttcgttcggtgagcttgagggtaatgcatttcttgaacctaggactg

SEQ ID NO: 190733 - DNA, 270 bp, Glycine max
tcggctcgagctcgagccgtcttgtaggagttgaactgaagcatgcggcggagggcgtaccggagagcgatacgctccgccaagcccaccaagcagggcgagggcctccgccactactattctctcaacatccacgagcatcagctccttcttcgccaaaagactcataacctcaaccgtctcgaggctcagagaaacgacctcaattctagggtgaggatgctgcgcgaagaattacagcttctgcaggaacccggctcttatgtcggt

SEQ ID NO: 190734 - DNA, 270 bp, Glycine max
gttaacactcttcttcatcgtcgtcgcaatgggacgtgtgatccgtgcgcagcgtaagggagcaggctcggtcttcaagtcccacacgcaccaccgcaagggccctgcacgcttccggagcctggacttcggggagcgcaacggctacctcaagggcgtggtcaccgacgtcatccatgaccctggccgcggcgcgccgctcgccaaggtcgccttccgccaccctttcagatacaagaagcagaacgagctcttcattgccgccgaggg

SEQ ID NO: 190735 - DNA, 267 bp, Glycine max
gttaaactgggccatgttgactgtgatgctgaaaagtctctaatgagcaggttcaaagttcaaggattcccaactatcttggtgtttggtgctgataaagatagtcctattccttatgaaggcgcaagaactgccttggctattgaatcatttgcattagagcagctggaaacaaacgttgctcctccagaagtgacagagctacacagtccagatgttttggaagagaaatgtggttctgccgcaatctgttttgttgccttcctt

SEQ ID NO: 190736 - DNA, 268 bp, Glycine max
aaaaaatctacgaaagatcctaaaagtcagccgtcgcgtgacttcgtttaccttccaagagatgaatcatttggtcacctgaagtcatcggattttcttgtttatatacttaagtctgcatctcaaaatgtcatacccaaattacaatctgcacttaggctacagttcaatcagcctgagtttaatagcttcgatgacgtgcgaggactctatgatggtggaattaagttacctactgatacacttagccagcttagccctataccat

SEQ ID NO: 190737 - DNA, 271 bp, Glycine max
ggatggcagaggtgaagcttcatggattttggtatagtccctacactttgagggtggtatggaccttaaagttaaaggatataccatatcaaaacatagaagaagaccgctacaataagagtcttcaacttcttgaatacaacccagtatacaagaaaactccagtgcttgtccataatggaaaacccttatgtgagtccatgcttattgttgaatacattgatgagatttggtcacataattcattacttcctgctgatccctacgagag

SEQ ID NO: 190738 - DNA, 261 bp, Glycine max
gaggcattaaaaatgcagatcttcgtgaaaagcctaacggggaagatcataaccctcgaggtcgaaagcagcgacaccattgacaatgtcaaggctaagattcaaggcaaggaacgcatacctccggatcagcagcgtttgattttcgccggaaagcacacttgaagatggaaggacctttgccgattacaacatccagcaggaatcaacccttcaccttgtcctcaggcttcgtggtggcatcatcgagccttccctcat

SEQ ID NO: 190739 - DNA, 264 bp, Glycine max
atgcttccaatcctaagaacattttggactctgtcaaaaatgtattgtctgctttctactggttttcctatccatacacaatgattggcataacattatgcgcattttcttcatctcttctcgcggtggaaaaattatcagatatatctttatcatttttaattggcgtgttacagggtgtgctgcctcaattgtttattgaaatttatctttgtggtgtgaatcaactgtatgaccttgaaatagacaagataaacaaaccac

SEQ ID NO: 190740 - DNA, 263 bp, Glycine max
cgtcgctctttcttcaacttcaagcttaattcctcatgtctttcagaggcctcagccggccaaatgccacatcaggcatgggtgttgctgatcacagcaaaaacaccttcatggaattgaagcagaagaaggttcatcgttatgtgatctttaaggtcgatgagaagaaaagggaggttgtggttgagaagactggtggcccggctgagagctatgacgattttgctgcatctttgccggagaatgattgcagatatgctgtc

SEQ ID NO: 190741 - DNA, 266 bp, Glycine max
tctcgagccgctcgagccgctcgagcggctcgaggttttaagttacaaagtttttcattgtttacacttaatcaccaatggctgcttcaacaatggctctctcttcatcatcattggctggccaagctatcaagcttgccccctccacccctgagcttggtgttggaagggttagcatgaggaaaacagcctccaaaactgtttcctcaggaagcccatggtacggcccagaccgtgtcaagtacttgggcccattctcaggtgag

SEQ ID NO: 190742 - DNA, 266 bp, Glycine max
tctctcctctccgctccggcgagtaagaaaaatgcagcatttcgtggatttgcaagagaattcggagttgggtgagtcgaattcatggctttcagcgaaagagcagtccggtgcggcacccaacaccaatttggatcgcgtcctcttcaacgacctcgtcgagattgtccctctcgttcagtcactcatcgatcgtaaagcaagccgttcattcacgcggcgtggttccatgatctacaccaagacacccacaagagaatcattgt

SEQ ID NO: 190743 - DNA, 266 bp, Glycine max
gcgaaactggagggatggaacaactaccaacattgtagatcccacattaactgacggtttgcgaaatgaaataatgagatgtatccacattgggttattatgtgttcaagaaaatgtggctgccagaccaaccatggcttctgttgcactcatgcttaatagctattctctaactctaccggtgccttcagaaccagcatttgttggggatggtagaactagaagccttccagacatgcagtcctcatcagagcataattcaaggc

SEQ ID NO: 190744 - DNA, 259 bp, Glycine max
aagaggcatcagttgcaatggctcgttacggtgagggcgacaagcggtggatcgtggaggaccgccccgacggcaccaatgtccacaactggcattggtccgagaccaactgcctcgactggtccaagaccttcttcaccagcctcctcactaacctccctatcctcgacggcgagggtaacctcttcctcaaaacgacgtcgcttcgctccctcgacggcgaggcctacatcaatgtccgaaaggggaagatcatccc

SEQ ID NO: 190745 - DNA, 287 bp, Glycine max
gaaaaattaagatggaggggaaggagcaggatgtgtcgctgggagcgaacaagttcccggagagacagccgattgggacggcggcgcagagccaagacgacggcaaggactaccaggagccggcgccggcgccactggttgacccgacggagtttacgtcatggtccttttacagagcagggatagcagagtttgtggccacttttctgtttctatacatcactgtcttaaccgtcatgggagtcgccggggctaagtctaagtgcagtaccgttgggattcaagga

SEQ ID NO: 190746 - DNA, 260 bp, Glycine max
ctttgattctctgttctctgtactgttctgtttcgcgatacaggaacttaaacaatgaacactgcaaagggcaagggagcagcgaggccctcaaaagaatcactgaagcctgttgatgaccgaaaggttggaaagcggaaggcttctggtaagcctgagaaaagcagagcaccaaagaaggagaagaaggccaagaaagaccccaacaagcctaaaagaccaccgagtgctttcttcgtgttccttgaggagttcaggaa

SEQ ID NO: 190747 - DNA, 282 bp, Glycine max
cactcttctctgcagcttttgcctacaactcccttcaccatggctgaacaaaccgagaaagcttttctgaagcaaccaaaagtgtttctcagcacaaagaagactgggaagggaaagagacctggaaaaggtgggaaccgcttttggaagtccattgggcttggatttaagactcccagggaagccatcgaaggaacctatattgacaagaagtgccccttcactggcaatgtttccatccgtggccgtatcttggctggaacatgtcacagtgctaagatg

SEQ ID NO: 190748 - DNA, 276 bp, Glycine max
aagagagtgaggaagttgccccagttgagtagtaagtgatgatggagatggattccatgtgtatgtgggtggtccttgtggccattgctggtgctcttttagtcctaagatctatgctcaagaatgtaaattggtggctctatgaatccaaattgggtgtgaaacagtactctttgcccccaggtgacatgggatggcccttcattggcaacatgtggtccttcctcagagctttcaagtccaaggaccctgattccttcatctcctcctttgtct

SEQ ID NO: 190749 - DNA, 152 bp, Glycine max
gctgtgacttgttttgagttcaatcaaatcgcattggtatctgaactcaggaaagatggttagcgtactgatgatcaggcaggcacaaagggcagaaggcccagcaaccatccttgccattggaactgcaaacccaccaaaccgtgttgatc

SEQ ID NO: 190750 - DNA, 276 bp, Glycine max
atcacacactctcttcaatttctagggttttgctattgctttgcctccgttccccctttctcacaaaaacaacgccttttctcttctccttcgtatctattctttgcgttttgtttttggttgattgatggcattcacagcgtaattcgttgctgcattttaatcgatttatctaaccaggactgaatgacctaatggagtctaaaggtgggaaaaagaagtctagtagtagtagtagtaaatcaatcttttacgaagctcccctcggatacagca

SEQ ID NO: 190751 - DNA, 137 bp, Glycine max
caaagctgcatgcattctgtgaatctaaaggagttcatctgtctggatattctccactgggctcaccaggagttctcaaaagtgacattcttaagaatcctgttgtgatagagattgcagagaaattggggaagaca

SEQ ID NO: 190752 - DNA, 281 bp, Glycine max
ataccattcatcccttggggtcagatcataccaaaaacaaaacaagccaagtgaaagagagaagaaaagtcaaagacaatgtcagggatcattcacaagattgaggagacccttcatgtgggaggccacaagaaggaggaggagcacaagggtgagcagcaccatggtggagaatacaaaggggagcatcatggtgaacacagtactgaatacaaaggagagcatcatgttggtgagcacaagccggagcaccatggaggagaagagcacaaagaggggtt

SEQ ID NO: 190753 - DNA, 263 bp, Glycine max
ggcgacggtattgctcgtattttaagtgtttatggagtactggcgggtgaattagtggaatttgaagagggtactataggcattgctttgaatttggaatccaaaaatgttggtgttgtattaatgggtgatggtttgatgatacaagagggaagttcagtagaagcaacaggaagaattgctcagatacctgtaagtgaggcttatttgggtcgtgttttaaatgccctggctaaaccaattgatggtcgaggagaatttca

SEQ ID NO: 190754 - DNA, 279 bp, Glycine max
ggaggctcgggactctgaccgcgtgcctgttgaagaatgagccggcgactcataggcagtggcttggttaagggaaaccaccggagccgtagcgaaagcgagtcttcacagggcaattgtcactgcttatggacccgaacctgggtgatctatccatgaccaggatgaagcttgggtgaaactaagtggaggtccgaaccgactgatgttgaagaatcagcggatgagttgtggttaggggtgaaatgccactcgaacccagagctagctggttctccc

SEQ ID NO: 190755 - DNA, 274 bp, Glycine max
aagggtttaacctttctggctgtgttaatatgcgtttcagcactgtcactgagtccttctgttgcgggggaagggcaaaataatggccttgttatgaacttctacaaggaatcatgccctcaggctgaagacatcatcacagaacaagtcaagcttctctacaagcgccacaagaacactgctttctcctggctcaggaacatcttccatgactgtgctgttcagagttgtgatgcttcactgttgctggactccacaagaaggagcttgtctg

SEQ ID NO: 190756 - DNA, 274 bp, Glycine max
gttgtagcacttcttcttctggcggatgtggggcccatggctgaggctgtgacatgcaccccaacagagttgagtccgtgtcttccagcaatcacttccggtgctaaaccttccaatgcttgttgcacgaagctgaagcagcaaaaaccatgcttatgtggctacctcaaaaacgctagcttgaagcagtatgttaactctcctaatgcccgaaaaaccgttgcttcttgtgggattccctttccaacttgttaattaattaagccttcttata

SEQ ID NO: 190757 - DNA, 206 bp, Glycine max
aatggcactgttgaagttgttgaatctggtgcttttctaagcatggaatctgtttttcttgttactcttggggttgcactccttgtcctcctggggctatggattcatggtcaaatacaacacctatctaagaaaacaaagagggcgccaaaagttgaagttgggactaggactactgatgcttcaacagatgaatggctgcaggg

SEQ ID NO: 190758 - DNA, 276 bp, Glycine max
gcgacttttgagttcaaaagatgactaacttcccattgatcaacttggagaagctcagtggtgaggaaagaaacgataccatggaaaaaattaaagatgcttgtgaaaactggggattctttgagctggtgaatcatggcattcctcatgacatattggacactgtggagaggttgaccaaagagcactacaggaaatgcatggaagagaggttcaaggaattagtggcaagcaaaggtctagatgctgtccacactgaggtacaggatatggact

SEQ ID NO: 190759 - DNA, 284 bp, Glycine max
  unsure (1)..(284): unsure at all n locations
ctcgagacgctcgagccgattcggctcgagcatcactcgtggcagcgcgcacntactcggtggctactaatctttaccgtggtgagttgtcaagatgtacacaacaaggaagaaaatccacaaggataaggatgctgagccaactgaatttgaggaatcagtcggacaggcattgtttgatctggaaaataccaacaatgagctgaaaagtgatctgaaagatttatacataaactcagctgtccaaattgatgtttctgggaaccgcaaggctgtggttatcc

SEQ ID NO: 190760 - DNA, 273 bp, Glycine max
gccatggcgtcgtttcttcaatcgtttctggatccgaagaagaactggttcgccgctcagcacatgaaatccctctccaaacgcctccgcaaatatgggctccgatacgacgatttgtacgctccttactacgatctggatgtgaaggaggcgctgaatcggcttccgaaagaggtggtggacgctcgccacgcgcgtcttaaacgcgccatcgatctttccatgaagcacgagtacctccctgacaatctgcagtcaatgcaaacaccattc

SEQ ID NO: 190761 - DNA, 151 bp, Glycine max
gagaaatataataatggcaaagttaataaaattctttgagttgaacacaggggccaagattccttctgttgggttaggcacttggcaagctgagcctggtgttgtagccaaatctgtcaccacagccattctggttggatacaggcatatt

SEQ ID NO: 190762 - DNA, 173 bp, Glycine max
gctcgatgggaattgcgcttcaaggcgtctcgtagggctaatccgcctcacgagggtcaccaacggcacgtgcctttggtgggccgaggccccctactgctggtcggcaaacggacggcgggcgcactcgtcgcttctagcccggattctgacttagaggcgttcattcatat

SEQ ID NO: 190763 - DNA, 268 bp, Glycine max
gcagcacccatttggatcctctcttctcttctttgatctccgttaccctttttgttttctcaacagagagagagagagagaatctttcgaagttcgtttgcgtgtgttgtgtggtcagtcaccgatggcagcaccacctgcgagggcacgtgccgattacgattacctcatcaagcttcttcttattggcgatacggtgtgggaaagagttgtctgcttttgcgattttctgatggttccttcaaacagttttatcaccaccattggc

SEQ ID NO: 190764 - DNA, 141 bp, Glycine max
ggagctagcaatgctgaatggcactcttcgtgaggagggttctcccatgtctggttctgtttcacccttccacaacagccttggtatgaagagggccaagaccagggggtaaattatcctaaagggtgaaagggatttggg

SEQ ID NO: 190765 - DNA, 275 bp, Glycine max
cttgatccttctttttctccttgaactcaaacatggcagatgaggtggttctgctagatttctggccaagtccatttgggatgagggtcaggattgcacttgctgaaaagggtatcaaatatgagtacaaagaagaggacttgaggaacaagagtcctcttctcctccaaatgaacccggttcacaagaagattccggttctcatccacaatggcaaacccatttgtgaatccctcattgctgttcagtacattgaggaggtttggaatgacaga

SEQ ID NO: 190766 - DNA, 271 bp, Glycine max
gggggtcccagtcccgaacccgtcggctgtcggtggactgctcgagctgcttccgcggcgagagcgggtcgtcgcgtgccggtcgggggacggattgggaacgggcccttcggggcctcttccccgggcgtcgaacagtcaactcagaactggtacggacaaggggaatccgactgtttaattaaaacaaagcattgcgatggtccctgcggatgttgacgcaatgtgatttctgcccagtgctctgaatgtcaaagtgaagaaattcaac

SEQ ID NO: 190767 - DNA, 268 bp, Glycine max
ggcgccttcggggcctcttccccgggcgtcgaacagtcaactcagaactggtacggacaaggggaatccgactgtttaattaaaacaaagcattgcgatggtccctgcggatgttgacgcaatgtgatttctgcccagtgctctgaatgtcaaagtgaagaaattcaaccaagcgcgggtaaacggcgggagtaactatgactctcttaaggtagccaaatgcctcgtcatctaattagtgacgcgcatgtatggattaacgagattc

SEQ ID NO: 190768 - DNA, 265 bp, Glycine max
cacatttgaaggatgtgatacggaggaattctctggggctggacgctgaggtatctgaggcaggcgagaacttcagtgttggacaaagacaactgttgagtctttctcgggctttattgcgtagatcaaagatattagtacttgacgaagcaaccgcagcagttgatgttagaacagatgcactcatacagaaaacaattcgagaggaattcaaatcttgtacaatgctcattatagctcatcgccttaacaccataattgatgg

SEQ ID NO: 190769 - DNA, 262 bp, Glycine max
tctcgagccgattcggctcagcggcaagcaactccatccgcaatgggaatcgatttgaaggcaggaggtaagtccaagaagaccaaacgtacagcccccaaatccaatgatatttacctcaagctcctcgtcaagctgtaccgttttcttgttcggaggactggtagtaacttcaatgccgtcatcctcaaacgccttttcatgagcaaggtcaacaagcccccgctatccctctctagattgattcgttacaccaagggaa

SEQ ID NO: 190770 - DNA, 227 bp, Glycine max
gcaaactggtagtctctactctgattgggatcttctccctccaaagacaatcaaagatcccgaggctaaaaaaccagaagattgggatgacaaagaatttattcctgatcccgaggataagaaaccagaggggtatgatgacatcccaaaagagctcccagatcctgaagccaagaagcctgaagattgggatgatgaggaagatggtgagtggacaccccctacca

SEQ ID NO: 190771 - DNA, 232 bp, Glycine max
ctcccctgcaatcaacggcaccccccacaaaaatgacaggagagacagtgaacccaaaagcttaccctttggccgatgcgcaactcgcaataacaatcttggatcttgtgcaacaagctgccaactacaagcaactaaaaaagggtgctaatgaagcgactaagacactgaacagaggcatttctgagttcgttgtgatggccgcagacactgagcctcttgagattcttct

SEQ ID NO: 190772 - DNA, 263 bp, Glycine max
ctcgagccgatctgcttcccctagcaaccttcttcttacttctctccgcttcttatctccagattgctggggcggaagcacaaccgttgactagtctcaaacttaactctcatattcttcacaagtctactgctaaagagattaatgaaaatcccgaggcaggatgggaggctgctataaatcctcgtttctccaattatacagttgaacaatttaagcgccttcttggagtcaaaccaatgcctaagaaggaacttagaggt

SEQ ID NO: 190773 - DNA, 272 bp, Glycine max
cccggtcgtactcataaccgcatcaggtctccaaggtgaacagcctctggtcgatggaacaatgtaggcaagggaagtcggcaaaatggatccgtaacctcgggaaaaggattggctctgagggctgggcacgggggtcccagtcccgaacccgtcggctgtcggtggactgctcgagctgcttccgcggcgagagctggtcgtcgcgtgccggtcgggggacggattgggaacgggcccttcggtgcctcttccccgggcgtcgaacagtc

SEQ ID NO: 190774 - DNA, 270 bp, Glycine max
ggtctccttacgataacaacggaggatcatgtgttgcgattgctggagcagattactgcgttatcgccgcagatacgagaatgtccaccggttacaacatcctcactcgcgattactccaaaatctcccaactggctgagaagtgtgtgatggcttcatctggctttcaagctgatgtcaaagctttgcagaaggttttgtctgctaggcatttgatttatcagcatcaacacaacaagcaaatgagttgccctgcgatggctcagttgc

SEQ ID NO: 190775 - DNA, 268 bp, Glycine max
cctcgagccgattcggctcgagagcgtctccatcgccaccactcaccgcaaaaccctagaaaacgccggcgtcattttctgcaccatctccgaggccattaaggagtatcctgatttggtgagaaagcatttgggaagagttgtcccctccgacgacaactactacgccgcgttgaacgccgccgtcttcagcgacgggtcgttttgctacattccgaagacaccaagtgtcctatgcagatttcgacttacttcagaatcaacgcgt

SEQ ID NO: 190776 - DNA, 256 bp, Glycine max
cgatggtccctgcggatgttgacgcaatgtgatttctgcccagtgctctgaatgtcaaagtgaagaaattcaaccaagcgcgggtaaacggcgggagtaactatgactctcttaaggtagccaaatgcctcgtcatctaattagtgacgcgcatgaatggattaacgagattcccactgtccctgtctactatccagcgaaaccacagccaagggaacgggcttggcggaatcagcggggaaagaagaccctgttg

SEQ ID NO: 190777 - DNA, 201 bp, Glycine max
  unsure (1)..(201): unsure at all n locations
gaaagatggttagcgtactngagatcaggcaggcacaaagggcagaaggcccagcaaccatccttgccattggaactgcaaacccaccaaaccgtgttgatcagagcacctatcctgattactacttcagattcaccaacagtgaccacatgaccgagctcattgagaaatttcagcgcttgtgtgacaagtctatgtcca

SEQ ID NO: 190778 - DNA, 189 bp, Glycine max
gatcctccatggcctccaccaaggaacgtgaaaacttcgtctacgtcgccaagctcgccgaacaagccgaacgctatgaagaaatggtggaagcaatgaagaatgtggcgaactaaacgtggaattgacggtagaggagcggaaccttctgtcggttgggtacaagaacgtggtgggtgctcgtagggc

SEQ ID NO: 190779 - DNA, 261 bp, Glycine max
gtgggttcttcttcttctattacaacaacgtcgtccaagaccatgaccatggccatggccacgatcctgctcctgttcacggtcttcgcggtttcatcggccctagacatgtcgataatctcgtacgacaacgcccagcgccacgtcgcgcaccagtgagctgatgtccatgtacgagcagtggctagtaaagcacggcaaggtgtacaacgcgctcggagagaaggagaagaggttccagatcttcaaggacaacctgcg

SEQ ID NO: 190780 - DNA, 267 bp, Glycine max
cttgtctcaaagattaagccatgcatgtgtaagtatgaactaattcagactgtgaaactgcgaatggctcattaaatcagttatagtttgtttgatggtatctactactcggataaccgtagtaattctagagctaatacgtgcaacaaaccccgacttctggaagggatgcatttattagataaaaggtcaacacaggctctgcctgttgctttgatgattcatgataactcgtcggatcgcacggcctttgtgccggcgacgcat

SEQ ID NO: 190781 - DNA, 253 bp, Glycine max
ctattggtgaggatttattagccattgcagcagaccagccctttcggtttcctgctacattcacatttgttgttagggccttctcagtgttggatggcattggaaagggccttgatcctcgttttgatattactgagattgccaaaccttatgctctggagttgctaagattccgtgaggcaggagttgaagttatcctaaaggacttcagaaagagatgggacagacaatctcaagcattttacattttttt

SEQ ID NO: 190782 - DNA, 266 bp, Glycine max
ctcgagccgcgttacacaaactatcatggccacggcaacagcagtcgccacctcgtcctttatggggacgcgtctcctggaggctcactccggggcggggcgagtgcacgcccgattcggcttcggcaagaaaaaggctcccgccccaaagaaagcctccaggggatcgggccgagacaccgacagacccctttggtatccgggcgccaaagcgcccgaatatctcgatgggagtcttgtcggagactacgggttcgatccgtttg

SEQ ID NO: 190783 - DNA, 275 bp, Glycine max
gcagcaaccccacgtggaactaccccgtgaaattctctgtcaacgaatcgctggcgaaggaaaatcgtttatctcttgagatcaagctcatctccgacacgcaccctcggcgacaccgtcatcggcaccgtccatgttcctctcagggaactcctggataaccccggtgatgacagctccttccgccaagtcagttatcaggtgatcaagcaatcaataaaatccaaaggatccttgaagttctcctacaaattctgcgaacatattcccgcccc

SEQ ID NO: 190784 - DNA, 268 bp, Glycine max
caaaagtgtaaatcaggaggggatgaatatgatgaagatgaacctgatgccaaaagatggaaaattgaaggtgaaaatgagggtatgtcagcccctggaagtagaacagtgagagaacctagagttgtagttcagacaaccagtgacattgatatccttgatgatggctataggtggagaaaatacgggcagaaagtagtgaagggcaatccaaatccaaggagttactacaagtgcacacacccaggatgtccagtgaggaagcacg

SEQ ID NO: 190785 - DNA, 273 bp, Glycine max
ctctagactacctgcaagaaacatcgccaagagctgataagaaaatgcagttatatcatcatccgttggatttggacagccagagggtgagatttgcattggaggaggagggtgtagattatacatcccaccatgtcaatccgataactggcaagaacttggattcctctttcttcaagatgaatcgccatggaagggttccggttttccaaaatggctctcacatcatttacaatactattgatataatccagtacatagaaagaattgctg

SEQ ID NO: 190786 - DNA, 264 bp, Glycine max
ggtggagaaaaccacgagtggtcgcgagtacaaggtcaaggacctttcccaggccgacttcggccgcctcgagatcgagctggccgaggttgagatgcccggcctcatggcctgtcggaccgagttcggcccctcccagcccttcaagggggcccgcatcaccggctccctccacatgaccatccagaccgccgttctcactgagaccctcaccgcccttggcgccgaggtccgctggtgctcctgcaacatcttctccaccca

SEQ ID NO: 190787 - DNA, 263 bp, Glycine max
ataactctgccgccgcaacagccccaaatccaatggcttcagagaagaaactttcgaacccaatgagggagataaaggtgcagaagctcgtcctcaatatctccgttggcgagagtggagatcgtctcaccagagccgctaaggttttggaacagcttagtggccaaacccctgtgttttccaaagcaaggtacacggttcgttcctttgggattagaagaaatgagaagattgcatgctatgtcactgtcagaggtgacaag

SEQ ID NO: 190788 - DNA, 267 bp, Glycine max
ggacctcttggttccttctcatccccctccaatgatcttgtcaatttgattgtatctgttgaagatacaggtgaaggtattcctcttgaatctcagccactcatcttcaccccattcatgcaggtaggttcatccatctcccgaaagcatggaggaacaggcattggcctaagcattagcaaatgtttggttggcctcatgaatggggaaattggatttgtgagcatacccaagattgggtccacattcacttttactgctgtattc

SEQ ID NO: 190789 - DNA, 276 bp, Glycine max
ctagcttcctcccctaagaagaaaagcatgttagttgtgtctgaattcattggctgttccccatctttaagtggagcaatcagagtgaacccctggaatattgatgcagtagctgatgcaatggactcggcgctggaaatggctgatttggagaaggagcttaggcatgaaaagcattatagatatgttagtactcatgatgtcgggtactgggctcgaagcttcttgcaagatttggaaaggacctgtagtgatcatgtgcgacgaaggtggtgg

SEQ ID NO: 190790 - DNA, 274 bp, Glycine max
agtgtgtgtagagttaacaagaccagagagagagacgaagccgaacgaaacataaataaaaccttgctcttttttcacgccctagctcattttcttctccgttctcttctctctgttcctcactcactcgcatgaattcaccatgactaagcaacaagctaattggtctccatacgataacaacggaggatcatgtgttgcaattgctggagcagattactgcgtcatcgccgcggatacgaggatgtccaccggttacaatatcctcactcgc

SEQ ID NO: 190791 - DNA, 273 bp, Glycine max
gctagtttatcgtgaggagaatatgaagttgtttgttttctttgttgctgcagtagttttggtagcatggccatgccatggcgcaggctaccaaaggttccctctccgaatgaaaactggctatggtgagcgttcttcggaggtaaaatgcgcaagttttaggcttgctgtggaagcacacaacatccgagcctttaaaaccattactgaagagtgcgttgaaccaacaaaggactacattaatggcgaacaatttagatcagactctaaaac

SEQ ID NO: 190792 - DNA, 264 bp, Glycine max
attccttttgaaggttagaagtgctacaatacaaacaatggcagctactcaggaagatgtgaagcttttgggtattgtgggaagcccatttgtgtgcagggtccagattgcccttaagttgaagggagttgaatacaaatttttggaagaaaatttgggcaacaagagtgatttgcttctcaaatacaaccctgttcacaagaaggttccagtgtttgttcacaatgagcagcccatagcagagtctcttgtgattgttgaata

SEQ ID NO: 190793 - DNA, 261 bp, Glycine max
tgctcgctatcatatcacagtatatatcttcttatttgtttaatttttatgtttcttaggtgaattactcaagagggctcgacaatcccacaaagtagaaaaagaggttatgttatggcgggcaaaggtgttagttcggtggctaaggcggtagcagaatatcagtatccttggcgtgagaagttggggaaatataaggatgagcttgccaagggtgtgtggggatactgggagctgggggcatggaagccgctgagtatc

SEQ ID NO: 190794 - DNA, 265 bp, Glycine max
aaagagaggatttgggattgggaaggcgagggattgcgctgcgtctcttcctcttctctttcgattcatccctcattcataatcttccaatccaacaacctcaacctcacactcacacatacacacatctgaacgcgtatcgtccctcccatggcttcaaagcgcatcctcaaggagctcaaggacttgcagaaagacccaccaacttcttgcagcgctggtccagtagctgaggacatgttccattggcaagcaacgattatgg

SEQ ID NO: 190795 - DNA, 265 bp, Glycine max
ccactctttccttggtcgatgccgccgatcccacatttggcttcacccctcttggattatctagtagctcaaacttgcaaatccaaaagccttacgacgttgcagtcaacgagcgctacagcttttcaaatggagtgcacagattttgggtatactccacggacaagcctcatatgcaaggcagcaatacgaagccacgaactgagattcgtatcgctggatacgattatacatccggtgtgtggcaatttcaagggttttttta

SEQ ID NO: 190796 - DNA, 275 bp, Glycine max
attgtggggatgtgaaggcagaagaatggaagcaacaatttgaatttcattcaagtgcaaaatttgaatatagaatctagggagaattctataaaaagagctcttggtgagaattttctcaaatgttatgaatgattttgatttgggtttgatatattgtctaggtccaacacttgatgttgatcagcgcaacaatgtgtcttttgtcacaagttccacagacaatatgatctttgtttgcaaaattggagaaacccgccctataaaaacttttg

SEQ ID NO: 190797 - DNA, 269 bp, Glycine max
gttctatctgtgacgagcatcatggcctcaagagcagtgttattgttggctatgtgtgtgcttccggcgatggttgtggccattcgcccagcaaagaaccctttttgcgtgaagggtcgtgtctactgtgacccttgccgtgctggttttgagacctcagctaccacctacattgctggtgctgagattatgttgcaatgcaagagcagggttagcaacgaggttgtgtacacgaagaaggggtacaccgactcaaccggagcatacac

SEQ ID NO: 190798 - DNA, 266 bp, Glycine max
ctctcccttccttccatcccaaccactcatttcttgagaagacataaaaaatggagaagatttgctgcattggagctggctatgatggtggcccaaccatggctgtaattgccttgaagtgtcctgagatcgaggtggtcgtggtggacattgctgcaccgcgaatcaacgcgtggaacagcgaccacctcccgatatatgagcctggccttgatgatgtggtgaagcagtgcagggggaagaatctcttcttcagcactgatgta

SEQ ID NO: 190799 - DNA, 263 bp, Glycine max
gaaattcagatctgctgcttactctaactgttctcgcaaaccatcctgatacacatccggattgatagttcgttgcatgcaaccatagttttattaggattttttcttctttgttttcaattaggtttttttgttgctctccttcaaactccatctttccaaatcctctctttgcgattgtgttttgatctgcttcctactgcgatagtttctctactgttacatggccatggcggtttccgcaattggttttgaaggtttcg

SEQ ID NO: 190800 - DNA, 260 bp, Glycine max
ctcgagccgattcctaatcacctggttaatttcttcacatagagctatatgaatccaacgttaacatgaagaatgttttagtaaggtcagctgcgcgagctctgcttggcggcggtgggcggactactaccgccagctctcaacggcggcgatcgtggaacagagacaccagcacggtggcggcgcgtttggaagcttccacttgcggaggatgtccactcttccagaggtaaaggatcagcactcagaggagaaaaaga

SEQ ID NO: 190801 - DNA, 259 bp, Glycine max
cgagattcccactgtccctgtctactatccagcgaaaccacagccaagggaacgggcttggcggaatcagcggggaaagaagaccctgttgagcttgactctagtccgactttgtgaaatgacttgagaggtgtaggataagtgggagctggaaacagcgaaagtgaaataccactacttttaacgttattttacttattccgtgaatcggaagcggggcactgcccctctttttggacccaaggtcggcttcggccgg

SEQ ID NO: 190802 - DNA, 260 bp, Glycine max
cggcgatcctagcactctcttctgcagctttcgccgacagcttcattcaccatggctgagcaaaccgagaaggcttttttgaaacaaccaaaagtgtttctcagctcgaagaaaactgggaagggaaagagacccggaaagggtgggaaccgcttttggaaatccattgggcttggatttaagactcccagggaagccatcgaaggaacctacattgacaagaagtgccccttcactggcaatgtttccatccgtggccg

SEQ ID NO: 190803 - DNA, 262 bp, Glycine max
  unsure (1)..(262): unsure at all n locations
ggcttgatattatttccaatgctagctgcacaaccaactgccttgccccacttgccaaggttatcaatgacaggtttggcattgttgagggtttgatgaccactgttcattccatcaccgctacccagaagactgttgatggaccatcagccaaggactggagaggtggaagagctgcttcatttaacatcattcctagnngcactggagctgccaaggctgttgggaaagtcctccctgctttgaatggaaaattgactgg

SEQ ID NO: 190804 - DNA, 263 bp, Glycine max
gagaccatggccaaaagccccttcaagcttgaacatcccttggaaagaaggcaggctgagtctgctcgcattagagacaagtatcctgatagaatacctgtgattgttgagaaagctgaaagaagtgacatcccagacatcgataagaagaagtaccttgtcccagcagatttgactgttggccaatttgtttatgttgtccgtaaaaggattaaggtcagtgcagagaaggctatttttgtttttgtcaataacactctacc

SEQ ID NO: 190805 - DNA, 262 bp, Glycine max
tggttggtgtagtagctttttggagggttgacatggaagaacggtatgagccattgaaggagcttggtgctgggaattttggtgtggcaaggttggcaaaagacaagaaaactggagagcttgttgcggtcaaatacatagagaggggcaaaaagattgatgagaatgttcagagggagataattaaccaccgatctttaaggcatccaaatataatcaggtttaaagaggtgttactgacccctacacatttagctatcgt

SEQ ID NO: 190806 - DNA, 271 bp, Glycine max
gctgctcatcctccataacctccgagctctacaccgaagaacgaagccatggggaagacacatggaatgggagctgctcgcaagctcaagtctcaccgcaggaggcaaaggtgggctgataagtcatacaagaaatcccatcttgggaatgaatggaagaaaccttttgccggttcatcccatgccaagggaattgtccttgaaaagataggtattgaagctaagcagcccaactctgctattcgtaagtgtgccagagttcaacttatca

SEQ ID NO: 190807 - DNA, 267 bp, Glycine max
gcagccgtagcagtaactcgtggaattgctagcaatggcgaggatcaaggtttacgagctgaggcagaagacgaaggctgatctgttgaatcagctgaaggacctcaaggccgagcttgccttgcttcgtgttgctaaggtcaccggtggtgcacctaacaagctctctaagatcaaggtggtgaggttgaacattgcccaggttttgacggtgatttctcagaagcagaaggccgcgttgagggatgcctacaagaacaagaagta

SEQ ID NO: 190808 - DNA, 263 bp, Glycine max
gggaaaaggagggaaggggcttcttgcagcgaaaaccaccgcggcgaataaggacaaagacaaggacaagaagagacctatttctcgctcttcccgtgctggaatccagtttcctgtgggacgtatccataggcagctgaaacaaagggtccaagccaatggacgtgttggggcaacagctgcagtgtacttagcctcaattctagagtatctgactgctgaagttcttgaacttgctgggaatgcaagcaaggatctgaagg

SEQ ID NO: 190809 - DNA, 260 bp, Glycine max
gtgaaaaccttctcttacccttctctcaagtttcaagagatttcatcatggctccaaagaaggacaaggctccaccaccttcctccaagcccgccaaatctggcggtggcaagcagaagaagaagaagtggagcaagggaaagcaaaaggagaaggtgaacaatatggtgctgtttgatcagggcacctatgacaagctcctttctgaagctcccaaatacaagctcatcactccttccattctctctgatcgtttgagg

SEQ ID NO: 190810 - DNA, 256 bp, Glycine max
gcacttaccaacaccacttccaatggcttcatatcatgaagaagaagtgaggctattgggcaagtgggccagcccatttagcaacagagtagaccttgctctcaagctcaagggtgttccctacaaatactccgatgaatatcttgctaacaagagtgctgatcttctcaagtacaaccccgttcacaagaaggttccggttttggtccacaatgggaacccattgcccgagtcactcatcattgttgaatacata

SEQ ID NO: 190811 - DNA, 266 bp, Glycine max
  unsure (1)..(266): unsure at all n locations
ctcggttatttgctcgatctctatctgggttgttcttttgtncttctacttttttgcttgctgtttcattctcatatggtctcgttctgctacctacacatttggtgattcttgtggtttgaccttttacactgttgcttggtccataggttagctcnttcgggctggttacacacttgctttcaattatagccctggtactcacaatgtggtggccgttaacaaggctggatatgatagctgcaagattccaagatgagccaaag

SEQ ID NO: 190812 - DNA, 243 bp, Glycine max
cttaataaacgctcttctctgaaaaacctcatttcttctcttcttctcttctctttcgtttcgatcttcgatctctgaaaatgagagagtgcatttcaatccacatcggtcatgccgttattcaggtcggaaacgcctgctgggaggtctactgactcgaacactgcattcagcctgatgggcatattctaggtgataagaccgatggtggaggttatgatgctttcaacaccttcttcagtg

SEQ ID NO: 190813 - DNA, 262 bp, Glycine max
gacgggtcgagatcgagcctcggatgagggaatcgcagcgaagtccactatgccgaagcaaattcatgagattaaagacttcctcctcactgcaaggaggaaggatgcacgctctgtgaaaatcaagcggagcaaggatgtagtgaagttcaaggtccgttgctccaagtacctgtacactctgtgtgtgtttgattctgagaaggctgataagttgaagcaatcacttcctccaggattaagcgtgcaggatgtgtgattc

SEQ ID NO: 190814 - DNA, 263 bp, Glycine max
tctcgagccgaatcggctcgagggaacctattgacttatccctttgacagggatgcggttgtacagaagaaaacacttgccttacaaaggtgcacattacaatttcgttaagggcacatttgagctttgggatctggacttcaaaatctctaactctgtatccgtttaagaccactgaagaagcaataaacgaaagtgttcttgaccctgctgtgggatgtacatgacctagcttccccttgcaagtgtttcaaattgtataa

SEQ ID NO: 190815 - DNA, 258 bp, Glycine max
aaacattactgcttctcctttgtgtgaaactcttctgttatgcagtgattggtgctcctcaaacttgtcctgctaacaatgaggataaatgcggcgattcagatgaatggaaaggggagtttttccctgacattcccaaaattaaatatgagggtccgtcaagtaagaatgtgctttcatttaaatggtataatgcagaggaggaaattcttgggaagaagatgaaggattggttaagatttagtgttgcattttggc

SEQ ID NO: 190816 - DNA, 255 bp, Glycine max
ggcgggtagggtttcgacgtgcttcttcttcgtgtttgctctttctctccttcttccttttcagatctccgctgaggaatcatcggagaaagagttcgtactcacattggatcactctaactttcatgacactgtcagcaagcacgatttcatcgtcgtcgagttctacgctccatggtgtggccactgtaagaagcttgctcccgagtatgagaaagctgcttctatcttgagtagtcatgatcctccggttgt

SEQ ID NO: 190817 - DNA, 257 bp, Glycine max
gttcgcgtttgttctgtttttcctatctgcctcagcagacgacgtcggtgtgctctctgaagataacttcgagaaggatattggtcatgacagaggagctctcgttgagttctatgcttctttgtgtggacactgcaaaaagcttgctccagaatatgaaaagcttggtagcagcttcaagaaagccaaatctgttttaatcggcaaggttgactgtgatgagcacaagagtttgtgcatcaaatatggagtctctg

SEQ ID NO: 190818 - DNA, 259 bp, Glycine max
ctgctcgagctgctcgagcggctcgagctctgattccaagtttcttcggtggccgaaggagcagtgttttcgacactttctccatcgatgtgtgggagccctttaaggattttccatttcccagttctctttctgctgaaaattcagcctttgtgagcacacgagtggattggaaggagacaccagaagcacacgtgttcaaggctgatattccagggctgaagaaggaggaagtgaagctggagattcaagatgacag

SEQ ID NO: 190819 - DNA, 260 bp, Glycine max
  unsure (1)..(260): unsure at all n locations
gctacttcctactccaaccgcactncctgctccgcaattatcatgggcaaggtcaagatcggaatcaacggatttggaagaattggccgtttggtagccagagtggctctgcagagagacgangttgaactcgtngccgtnaacgaccctttcatcaccaccgattacangacatacatgttnaaatacgacagtgntcatggacactggaagcancacgangtcaccgttaaggacgagangacccntctnctcgggga

SEQ ID NO: 190820 - DNA, 259 bp, Glycine max
attccaaagcaaggaaggaagaaataaaccgaatgagagcattaacctcttcttcttccactttcattccaaagcgttattccttcttcttcttcctctccattctcttcgctcttcgatcctcgtccgggggctgctccgaataccaccaccaccacgcgccgatggccacgataggaggcttacgcgactcccaaggctctcagaacagcgtccaaaccgaggccctcgctcgattcgccgtcgatgaacacaacaa

SEQ ID NO: 190821 - DNA, 254 bp, Glycine max
tgactgctccagtggcagttccaagcacaagaagcgcaacaattgcagacggtggaggtgaaagtgaagatggactgcgaaggatgcgagaggaaagtgaggaaggcggtggaggggatgaaaggcgtgaaccaggtggatgtggagcgtaaggccaacaaagtcactgtggtcggctacgtcgaggcctctaaggtggtcgcccgcatcgctcaccgcaccggcaagaaagcagagctctggccctacgtccc

SEQ ID NO: 190822 - DNA, 254 bp, Glycine max
gtgcatctcatcgtctccgaaaatgaacgacgcagatgtctcgaagcaaatccagcagatggtgcggttcatccgccaggaagctgaggaaaatgccaacgagatctctgtctccgccgaagaggaattcaatatcgagaagctgcagttggtcgaagccgacaagaagaagatcaggcaagaatacgaacgcaaagagcgccaagttgaaattcgcaagaagattgagtactcaatgcagctgaatgcttctc

SEQ ID NO: 190823 - DNA, 253 bp, Glycine max
gttaacggttaaggtgtatgtatattcaggaccggcgaggtgttaccggcagataaagaacaaaccgtacccgaaatcccgtttctgccgcggcgtgccggagccgaagatccgaatctacgacgtgggaatgaagaagaaaggcgtggacgagttcccgttctgcgtgcacctggtctcgtgggagaaggagaacgtctccagcgaggctttggaggcggcgcgcatcgcatgcaacaagtacatggccaag

SEQ ID NO: 190824 - DNA, 280 bp, Glycine max
atatgcttgtctcaaagattaagccatgcatgtgtaagtatgaactaattcagactgtgaaactgcgaatggctcattaaatcagttatagtttgtttgatggtatctactactcggataaccgtagtaattctagagctaatacgtgcaacaaaccccgacttctggaagggatgcatttattagataaaaggtcaacacaggctctgcctgttgctttgatgattcatgataactcgtcggatcgcacggcctttgtgccggcgacgcatcattcaaa

SEQ ID NO: 190825 - DNA, 278 bp, Glycine max
tgaagttgtttgttttctttgttgctgcagtagttttggtatcatggccatgccatggcgcaggctaccaaaggttccctctccgaatgaaaactggctatggtgagcgttcttcggaggtaaaatgcgcaagttttaggcttgctgtggaagcacacaacatccgaaataaaaaaaccattcctgaagagtgcgttgaaccaacaaaggactacattaatggcgaacaatttagatcagactctaaaacagttaaccaacaagctttcttttatgct

SEQ ID NO: 190826 - DNA, 280 bp, Glycine max
attggacactgtggcgaggttgaccacagagcactacaggaaatgcattggagcgaggttccaggacttagttgctagcatttggtcagatgctgtcgaaactgcggtcaaagatatggcctgggagagcacctgtccacttgcgtcacctccctgcatcaaacctctcagcgatccctgatctcattgatgagtacaggaaggtgatgcaggattctgctttgaggttagcggaactagcagcgcatctgctggacttgctgtgtgagaatcttggcct

SEQ ID NO: 190827 - DNA, 281 bp, Glycine max
  unsure (1)..(281): unsure at all n locations
ctcttctcgctcttggcttttcgctcttcactcactctcattcattcatttccaccgaacataaaaaagaanaaagtatngggtaacacgcccttggcgacggtggatcccgaggtccatgacctcatcgagaaggagaagcgccgtcaatgctgcggaatcgagctcatcgactccgagaacttcagctccttcgccgtcatcgaggccctcggcagcgttctcacgcacaaatactccgagggcttgccgggcaaccgatactacggcggcaatgaata

SEQ ID NO: 190828 - DNA, 305 bp, Glycine max
acgtgagctcagactccacgaggagaaatgttcatcgagagtttcaaggttgagagtcctaacgtgaagtacacagagactgagattcagtccgtgtacaactatgaaaccactgaacttgttcacgagaacaagaatggcacttatcagtgggttgtcaagcccaaaactgtcaaatatgaatttaaaaccaacacccatgtccctaaactaggggtaatgcttgtggggtggggtggaaacaatggctcaaccctcaccggtggtgttattgctaaccgagagggtatttcatgggcaacaaa

SEQ ID NO: 190829 - DNA, 284 bp, Glycine max
cttcactactacaccaaattaatagcaattaaagatatatcattccacaacacaaattaaaggtagtgagacgtacccttattatggccaaagaaggtcttggacttgaaatcactgagctaaggttgggtctacctgatgcggagcatcaagtacgtgtagtcaataagaaaaatgagaagaagagggcattctcggaaattgatgatggtgttggagatgaaaatagctcctccggcggaggcgaccggaaaatggagacgaataagagtcaagtggtgggg

SEQ ID NO: 190830 - DNA, 280 bp, Glycine max
gaagtcttttatgtgtgcaccggtggttgtagcacttcttcttctggcggaggtggggcccatggctgatgctgtgacatgcaccccatcagagttgagtccgtgtcttccagcaatcacttccggttctaaaccttctaatgcttgttgcacgtagctgaagcagcaaaaaccatgcttatgtggctacctcaaaaatgctagcttgaagcagtatgttaactcttctaatgcccgaaataccgttgcttcttgtgggattccctttccaacttgttaa

SEQ ID NO: 190831 - DNA, 280 bp, Glycine max
  unsure (1)..(280): unsure at all n locations
ataactgttctgtcacctcataagcttagggcgaacgcgatggcgccatcggaaacttcggtcttccggactacggaggatctatcgntggctctgtgctgtatcccaccaaaggctccctcgggtgtcaggtcttcgagggcgataagcccttcaaaattcactcttatcgtcccactattgttctccttgatcgtggagagtgttactttgccttgaaggtttggcatgccgaacaggctggtgctgcggcagttttggtgactgacagcattgagga

SEQ ID NO: 190832 - DNA, 277 bp, Glycine max
attccatctggttcttgagcacagagctagagcttaatgggataatggtatttatcaagaagatcattgctaatggtgcttatgacttcacaagagctgctctaaggacttcattccttgcttcatgtgtctctgcttgccagagtagtacaatgagtcttgctgatacagttactgtaatggcccaaaggttgcatgaacgtctccaggaatgcaatggagatgaagtattgaaggcagaagctggtgctaaggttcaaaagtttactgaatgggc

SEQ ID NO: 190833 - DNA, 284 bp, Glycine max
gttactgtctgttcaagctaccatctctctgtctctttcttagtgcctccttgccagaagttaaaatggcccaagaaactttcctattcatatctgaatcagtgaacgaggggcaccctgacaagctctgtgaccagatctccgatgctgtgctcgatgcatgctttgagcaggaccctgacagcaaggttgcctgtgaaacctgcaccaagaccaacatggtgatggttttcggagagatcacaaccaaggccaacgtggactatgagaagattgtgcgtgac

SEQ ID NO: 190834 - DNA, 280 bp, Glycine max
tgccgaaggttcttccaatctccgtatgccttcaccggattgcaaccatgtcgaggagccatgttagagagccagaggaggaacacgtgactctgggcccagctgttagagatggtgaacatgtttttggagtcgctcgcatctttgcctccttcaatgacaccttcattcatgtcactgatctgtctgggcgggaaacacttgtccgcatcactggcgggatgaaggttaaagctgacagagatgaatcatctccatatgctgctatgcttgctgcgca

SEQ ID NO: 190835 - DNA, 277 bp, Glycine max
attggacactgtggagaggttgaccaaagagcactacacgaaatgcatggaagagaggttcaaggaattagtggcaagcaaaggtctagatgctgtccaaactgaggtctaggatatggactgggagagcaccttccactatgcgtcacctccctgaatcaaacatctcagagatccctgatctcattgatgagtacaggaaggtgatgaaggattttgctttgaggttagagatactagcagagcagctgctggacttgttgtgtgagaatcttgg

SEQ ID NO: 190836 - DNA, 274 bp, Glycine max
ctctccttgaggctcttgaccaaatcaatgagcccaagaggccctcagacaagccactcaggcttccattgcaggatgtctacaaaattggtggtattggtaccgtgccagtgggacgtgttgagactggtgtcgtgaagcccggtatggtggtgacttttggtcccactgggctgacaactgaggttaagtctgttgagatgcaccatgaggctctcacagaggctcttccaggtgacaatgttggctttcatgtgaagaatgttgcagtcaa

SEQ ID NO: 190837 - DNA, 276 bp, Glycine max
ccggtgaattgccccgtcaccgtctgcggcgatattcacggccagttttacgatctcatcgagctgtttcggattggagggaacgcacccgataccaattatctcttcatgggtgattatgtagatcgtggatactattcagtggagactgttacacttttggtggctttgaaagtccgttacagagatagaatcacaattctcaggggaaatcatgatagtcgtcaaattactcaagtgtatggcttctatgatgaatgcttgagaaaatatgga

SEQ ID NO: 190838 - DNA, 267 bp, Glycine max
ggtggcgacactcataacgtcttcgtgtacggtagtctgttagctgatgaagttgtccatacccttctgaagcgcgtccctccaaccgcacctgccatccttcacgactatcacaggtttaagatcaaaggtcgcgtttatcccgctattctccctgtccagaataacaaagtttatggcagggtgcttcttggtatctccggagtagaactagatattttagatgaatttgaggttgttgaatatactagaactgatgttgaggtt

SEQ ID NO: 190839 - DNA, 282 bp, Glycine max
gcttaacgcagggacattcgctaatgaagaatgatcctggaagctataagagtccaaatcttcgaaggtcgttgaccaatgaaacagaacatggtgacagatatgaactggttgcatatcgtaatgaaactcagggtagttttggagcatcaaagagtcaatctactggtccttggaatcaggattcaagagtaactaaggtggaaacatcaaatggggaatctagtgcaagttatgtagagagtaagacaagtgaggataagttgctggagacaattgtaa

SEQ ID NO: 190840 - DNA, 278 bp, Glycine max
gggaaatggctcccaaaccgcctagtacgggtctgtttgttggactgaacaagggacatgtcgtcaccaagaaggaattgcccccacgcccctcggatcgtaaggggaaaacaagcaagagggtgcactttgtgaggaacctcataagagaggttgctggttttgcaccctatgaaaagcgtataactgagttgctgaaggttgggaaggataagagggcacttaaggttgcacagagaaagcttggaacccacaaacgtgcaaagaagaagcgtgag

SEQ ID NO: 190841 - DNA, 277 bp, Glycine max
cataaagctggttactgtctgttcaagctaccatctctctctctctttcttagtgcctccttgccagaagttaaaatggctcaagaaactttcctattcacatctgaatcagtgaacgaggggcaccctgacaatctctgtgatcagatctccgatgctgtgctcgatgcatgcttggagcaggaccctgacagcaaggttgcctgtgaaacgtgcaccaagtccaccatggtgatggttttcggagagatcacaatcatggccaacgtggactatg

SEQ ID NO: 190842 - DNA, 276 bp, Glycine max
agtcacttttgtgactgacaatgaccgatcacttttaaaagccattgcaaagagggcaggttcaaagctgaaaagccgtattgttgccgagcaatctatacataagtgtgcacatataattgagcaaatggaagaccaaatttctgaagtacttcaagaagagagagaagaaagagttctaagaaaagccgaaatggaggccacaaaggctgaaaacatgattgcacatagggaagagatttttcccgccccaaaagaacctggtttgtcacagag

SEQ ID NO: 190843 - DNA, 276 bp, Glycine max
gcacaacagatgcacaatccggggtatgttatggaagacttggcaacaacttaccaacccctcaagaagttgtggccctctacaatcaagccaacattcgcaggatgcgaatctacggtccaagcccagaagtcctcgaagcactaagaggttccaacattgagcttttgtcagacattcctcatgacaacctcagtaacctagcatctagccaagacaatgcaaacaaatgggtgcaagacaacatcaaaaactatgccaacaatgtcagattca

SEQ ID NO: 190844 - DNA, 281 bp, Glycine max
caccgttccagggcagctcgtgtgggagatcgtgaagaaaaacaactcctttttggtcaagcagttcggaagggggacccagagcgtcgaattcagcagagagagcaacaatctctacaacctcaattcgttcaagtactctggtttggcaaacaagaaaactgttacggtacagcctgagggtaaagatcaggctgtgttgttggctacaacaaagacaaagaagcaaaacaagcctgctgcattgcttcacaaatctgtgatgaagatggtgttcagga

SEQ ID NO: 190845 - DNA, 229 bp, Glycine max
gtgacgttgataggcttgtgatagctaaggaggagttccatgcaattttggaggaggaagaactaaaaggtgcagttgttctcattttcgcaaacaagcaggaccttcctggtgcacttgatgatgctgcagtgaccgaggctctagagttacacaagatcaaaaatcgccaatgggctatttttaaaacttctgccataaaaggagaaggactttttgagggccttga

SEQ ID NO: 190846 - DNA, 276 bp, Glycine max
ctgcacaggtctccaaggttttctggttttcaatgctgtgggtgggggaactggctctggacttggttcccttttgctggaacgcctttcagtggactatggcaagaagtccaagcttggtttcactgtctatccttcaccccaagtttcgacctctgttgttgagccttacaacagtgtcctctccactcattctcttcttgagcacactgatgtggctgtcctgctcgacaatgaagccatttatgacatctgcaggcgttcactggacattga

SEQ ID NO: 190847 - DNA, 276 bp, Glycine max
ctcgagccgacttaatcgatcatcacttcacttcactaatacattctggcagacgactgcccagagcaagtatgagatgtctgaggttgaggtccaggatcgtggtgtttttgactttcttggtaagaaaaaggatgaagaagacaagcctcatcctcaggaggaggtcatcgccaccgagtttcaaaaagtcactgtctcagaccaaggagagaacaagcacagcctcttagaaaagcttcaccgatctgacagcagctctagctcttcaagtga

SEQ ID NO: 190848 - DNA, 283 bp, Glycine max
tttcgagccgattcggctcgagatttggctttacattatctcagcatgcatggagttagtgcacatcaggaggctgaggaaaactgataataatagaattgcaaaggcttgtggtgctgttattgtgaatagaccagatgaattgcaggagtctgatgttggtactggcgctgggttatttgaggttaagaaaattggagatgagtactttgcatttattgttgattgctgagaacccaaggcttgtactgttctactaaggggtgctagtaaggatctatta

SEQ ID NO: 190849 - DNA, 285 bp, Glycine max
cggctcgaggctcttttcctctttccattcacttgttctgttacgaaaacttcaggctgggataccatttctttatttttcagtttctcaatctgtgacctatgtgaactggagttaattagggtttttaaatttggatacagaaatgaatttgtgagttttatgtaggctagtgataggtttaacatcaattctcagctcgagcatctccaagccaaatatgttggaactggccatgctgatttgaacagatttgagtgggcagtgaacattcaacgtgatagc

SEQ ID NO: 190850 - DNA, 277 bp, Glycine max
  unsure (1)..(277): unsure at all n locations
tgtggcctcagggatggatattatatccatgggcaatgcgccattatcatgtttgatgttactgcccgactaacttacaaaaatgtccctacctggcatcgggatctttgccgggtctgtgagaacatcccaattgttctttgcggtaacaaggttgatgtgaagaacaggcaagtgaaggcaaagcaggttactttccacaggaagaagaatttancatactatgagatttcagctaaaagcaactacaattttgagaagcctttcctgtatttgg

SEQ ID NO: 190851 - DNA, 282 bp, Glycine max
  unsure (1)..(282): unsure at all n locations
tagctccgacgaccagctccagctctgtctcgagagtggcgactgcgaatccaaaacgtcgtcgttcacccacgtcctcttcgtcagcgccggcattgaccccttcgccaccattcaccacgccttccgtgcccttaggaacctccatcacacgttcctcantnntggacgagatgatactcnctggcatcgtcgcatgcttcggctggtgcacctgggatgccttctaccaggaagttactcaggaaggagtcgaggccggaatcaaatccctagccggcg

SEQ ID NO: 190852 - DNA, 275 bp, Glycine max
ctcgagccggacatctttgatgaaccaacgcaatttagatatgtgaataagaagtttagtaatcagtacaaggcaaccattggagcggattttttaaccaaagaagtgcaattcgaagataggcttttcaccttacagatttgggatacagctggccaagaaagattccaaagccttggagttgctttctatcgtggtgctgattgttgtgttcttgtatatgatgttaattcgatgaaatcatttgacaaccttaataactggagggaggaatt

SEQ ID NO: 190853 - DNA, 273 bp, Glycine max
gtaacctttggttcctttcccaacactcaccatggtggcagattctaagtccaaatccgacctctctttcggcaaaacctttgccagcagtgctttctctgcatgtttcgctgaggtgtgtactattcctttggacactgccaaagttaggcttcagcttcaaaagcaagctgcaactggtgatgtagtctccttacctaaatataagggtatgctgggaacagttgcaaccattgccagggaagaaggtctttcagcactctggaagggcat

SEQ ID NO: 190854 - DNA, 277 bp, Glycine max
ttctcgagccgaatcggctcgagcgatcttaaggctgggggtaagagactaaagaccaaaagaacagcaccaaaatccaatgacatctacctcaaattacttgtcaagctttatcggttccttgttcgaaggactggcagcaatttcaatgctgttatactcaagcgcttgttcatgagcaaggttaacaagcctccaatttctttgtcaaggttaattaagtatacaaaggggaaggaggataaaattgctgtaatagtggggactgtaactgatg

SEQ ID NO: 190855 - DNA, 249 bp, Glycine max
agaagccagaagacaagaaagatccaaaggaggaatatgctgaacttctgaacgccttttataatcagaccagacagcagcaataccccccttattatcacagaacagtggaagaggatccaactagctgtgttatttgctaagtattggaatatcatatggagtttgaaatgatggataataaaatgagatcaagaaaagatggtggctgcatggagttgaagaagaattatgtttcttttggagttc

SEQ ID NO: 190856 - DNA, 277 bp, Glycine max
gagaaaatgaccgaggtgtatcatttacatttggggctgacaccgttgttgaatttcttgaacatcatgatctcgatctgatttgcagagctcaccaggttgtagaggatggatatgagttttttgccaagcgtcagctggtgacgatattctccgcaccaaattactgtggtgaatttgataatgctggtgctatgatgagtgtggatgacaccttgacatgctctttccaaatacttaaatcttctgaaaagaaagggaaaggtggatttggcat

SEQ ID NO: 190857 - DNA, 282 bp, Glycine max
aaaagtttctgtcatcaacattactcaactatcagagtatagaaaggatggccatccttccatttttcgctattttgggagccccttcgcccggaacaattgtcaaatcccccatcttactctgattgcatacattggtgcttgcctggggtacctgatgtgtggaatgagttactattccattttttgtagaagttgtttattcaattttcttgattgaatatagcatccaatgtctgcattttttaaagagtggcaaaagctgcttacattagttgtttg

SEQ ID NO: 190858 - DNA, 275 bp, Glycine max
atagagtcttacagagaagagtgtgtgtgtgtgataattgggataagctctaatcaatcaatttcaatggcatcatccaattcgactcagcaagaagggaacaaacccgcaaagagaaaacccgtgttcaccaaagtggatcagctcaaacctggaaccaacggtcacacgttggtggctaaggtcttgtcctccgacaccgtcgtacacaaaccgagaccctcttccgcacacaacctcaaacccatgtcatcgccgagtgcctcatcggcgac

SEQ ID NO: 190859 - DNA, 263 bp, Glycine max
caaccctttgagagttagaatggctgctgctattgaaatccccaaaatagtgtttccaaactcctctgcccaacagaggatgccagtggttggaatgggatctgcccctgacttcacatgcaagaaagacacaaaggaggctatcattgaggccgtgaaacagggttacagacacttcgacactgctgctgcatatggctctgaaaaggctctcggtgaagctctcaagggagctatccatcttggactcgtctcccgccaag

SEQ ID NO: 190860 - DNA, 284 bp, Glycine max
attttactgggtccttactcaagcccttagatggaaccttgtgttcacacaacccttcaaaaacagactctctcaaagatatgagaaaaagttgccaagagtggacatatttgtgtgcacagcacttccagatattgagccagcaatgatggtgattaacacagtgctatctcttatggcttatgattatccaactgaaaaattgagtgtgtatctctctgatgatgctggatcgcaaatcacgttctatgctctgctagaggcttcaaactttgcaaaacatt

SEQ ID NO: 190861 - DNA, 131 bp, Glycine max
ataatagtcatgggtttgaaggaggattttgagcagtatgctgagaaagcaaagactttgccaccgactcaatcaaacgaggacttgcttatcctttatgggttgtacatacaggccaccgttggacctgt

SEQ ID NO: 190862 - DNA, 270 bp, Glycine max
aaatctttaatgaatttaatgctcgaaagccagatgaattcaacatattcaaaggagtcacaagaaactacctctttatgggtatcattggattaactgttgtgtttcagattgtcatcattttatttcttggcacttttacaacaacagtgaggcttaattggaagcagtggctcatctctgtcgttattggattgattggttggcctcttgctgtgattgggaaattgataccagtgccaacaactcccatcaacaatgttttttcaa

SEQ ID NO: 190863 - DNA, 194 bp, Glycine max
tgcgttttttgcacagaagaattaacacgtatatagcaagcatggcagtcacactctacgaccttagctctgcctctgggctgaagaagcttgatgagtaccttctcccacgcagctacatcaccgggtaccaagctacaaaggatgatcttactgtttatgcagctttgccaactgctccatcagatgaatat

SEQ ID NO: 190864 - DNA, 284 bp, Glycine max
gcaattttctattttctcctctcatggcttcagattccaaaaaggatttccctactgatgacaaagctggaacagaagagagcacaacatccaaagatgagacttcatctaaagattctccagcagaacaaagagctagcagtacttttggacctagacctggacctgctgggcatccaggcaacccttttgaactctcagcaatgtctggtctgctcaatgatccaagtatcaaggaattggctgaacagatagcaaaagatccatcgttcaatcagatggct

SEQ ID NO: 190865 - DNA, 283 bp, Glycine max
ggcacttcgttgcttggtgatgtccctttctgttctcttcactcttggtcttgcgagagaaagccatgccagagacgaagatttttggcatgctgtttggccaaacactcccattccaagttcattgcgagatcttctaaagcctggcactgcaagtgttgaaatcgatgatcaccctatgcaaattgaagaaacacagtacccgaaaaccttcttctataaagaagaccttcatccaggcaaaacaatgaaagtacaactcagcaagcctccctttcaacaa

SEQ ID NO: 190866 - DNA, 263 bp, Glycine max
ctcgagccgatttgtttctctctaaagagtctccgctgaacttattggtttcttgaagatgtcgttactctccgatcttatcaaccttaacctctccgacatcagcgataaggtgatcgccgagtacatatgggttggtggatctggcatggatatgaggagcaaagcaaggactctctcgggactggttaatgacccttccaagcttcccaagtggaactatgatggttccagcactggtcaagctcctggacaagatagtg

SEQ ID NO: 190867 - DNA, 264 bp, Glycine max
gatggctgcagctctgcgtcgcgaaggaaggcgtttgacccaaccaatcaacgccctccactattctctcaattcctccctcatctctcaagaccaagcccctcatggcgcgcgctccatttccactcaagttgtgacgaaccgaatgaagagtgtgaggaatatccagaagatcaccaaggccatgaagatggttgcagcgtccaagctgcgggcagttcagaccagaatggaaaattcccgaggcatctggaaacagttcac

SEQ ID NO: 190868 - DNA, 182 bp, Glycine max
gcggttctagaaagaagggaaagggtggcagtaagaagtacagtgacaagaagaaggcgatgggaagaactgaatccactgtacccatatttaatatggaagacatagaggagggtgttgaaggttatgatgatgaaaggacactacttatgtctcaaaagagcttggagaagcgttttggt

SEQ ID NO: 190869 - DNA, 280 bp, Glycine max
cagggtgcatgctggaaagctaggtgctgggtcttatgtactcaatgcaaacaaagggaaaaaggagagaattggtattcttttagaaatgcatgcaaacagcagagatgatgttaaagtggctttagctggtgatattattgctcttgcaggtttgaaagatactattacaggtgaaacattgtgtgaccctgataatccaatcgtgctcgagcggatggacttccctgatcctgttattaagggtgcaattgaaccgaaaactaaagctgatgttgac

SEQ ID NO: 190870 - DNA, 270 bp, Glycine max
gtttgggcattggctgtaggcagtacaacagaaaaccttgcaacgggtggcccagactccgctgcccaatagtggattcaatcggctgcaactggatctgcacatgacttcacatgcgaggaagacacaaatgaggctatcattgaggccgtgaaacagggttacagacacttcgacactgctgctgcttatggctctgaacaggctctcggtgaagctctcaaggaagctatccatcttggcctcgtctcgcgccaagacctctttgtc

SEQ ID NO: 190871 - DNA, 243 bp, Glycine max
ctgggtttggaaatggcagcggcaggttgtcagaagcttctggaattgagcacgaagatcgtcgctgttggcagaaactacgctgctcatgccacagaactaggcaacgccgttcccaaggagccggtgttgtttctgaaaccgacgtcgtcttacttgagtaacggcggaaccattcaaatcccacacaactagggctaaatgcatcacgaggttgagctcgctgtggtcatctcagagaaa

SEQ ID NO: 190872 - DNA, 186 bp, Glycine max
gttaatgcatcagaatggtactgttcatcaagactctcatctcaaagaacgtaaccatagcaaagctagcttaaactacacactgatgatgacactgatacattaggtgtccagattattttgttaacataattttctggttcccctccgaggccgtacgtgcatgccctcatatggaatgccctg

SEQ ID NO: 190873 - DNA, 284 bp, Glycine max
  unsure (1)..(284): unsure at all n locations
aacagccantaagatgttctntgagtcttggcacgccacgtgttcagaactgccaacagatagcnccatctctttctccttctccctaaacctcgaactcagcacccccatccactggtgattgtttgattgagccttgaagaaatggaccacagcgctgatgcacatcgcacggacttgatgaccataacgcggttcgtgctgaacgagcaatccaagcaccccgagtnacgcggcgatttcaccatcttgctcagtcacntgttctcggttgnagttcgttg

SEQ ID NO: 190874 - DNA, 95 bp, Glycine max
gctggcagcatgccttacacatgcaagtaggactggaagtggtgtttccagtggcggacgggtgagtaacgcgtaagaacctacccttctgctac

SEQ ID NO: 190875 - DNA, 153 bp, Glycine max
  unsure (1)..(153): unsure at all n locations
actctccctgcccaaaccctaactccctaccctattccgctttctctcatccatcatgaaaggaggaaagtccaagaccgaatctaagagagccgatgccaaacttgctgtgaataagaagggcgccgccacacanactaggaaacccgccgg

SEQ ID NO: 190876 - DNA, 252 bp, Glycine max
ggaaaggtggatcgtattcaacactatctttattgaggaaggaactacgagaaggaaatttgcaatccctttttggcggatcttcatgtatagtgtcctcatctaatgcagatccactgttgtcatcatttatattgcctttagctaatgaacatgccagttctcagcctcacttacacactgagacaagatcatctaaaaaatgcttagatgagactgtgtcaacaagaaatgtggagacatcaacttgtc

SEQ ID NO: 190877 - DNA, 272 bp, Glycine max
atctcctgtgatttaagattgatgaaagtgacgcacaacatctgaaggagcccataaatttgttattttttgtgatcccattgtgaattgtggggatctgaattgcgaagatgatccagcttctgttcacggtgatattttcggagacggcgatgatagcgttgcttctgttcaagacccctttgaggaagctggtgataatggggttggatcggttgaagcgtggccgtggacccttgatggttaaaaccgttgcagggaccgttctcgtg

SEQ ID NO: 190878 - DNA, 213 bp, Glycine max
aaattggacgatgaggtggtcctgctagatttatggcaaagtccatttgggatgagggtcaggattgaacttgctgaaaagggtatcaaatatgagtacaaagaagaggacttgaggaacaagagtcctcttctcctcaaaatgaacccggttcacaagaagattccggttctcatcaacaatggaaaaccatttgtgaatccatcattgctg

SEQ ID NO: 190879 - DNA, 167 bp, Glycine max
atttagtatgtggtaactgtgttgtgtggaagggtgctccaacaactcctttgataactattgctgtgacaaagctagtagctgaagttcttgagaggaacaaattacctggtgcaatattcacctcattctgtggaggtgctgacattggtcaggaaatagcaaaa

SEQ ID NO: 190880 - DNA, 278 bp, Glycine max
  unsure (1)..(278): unsure at all n locations
caacttcnnggaatgaacntnntcaaatccccactggaccatgatttgaactgtggtggaatattccacgactcancagnactgctcttattcgtctgaaacaaggagcaccccctcagancaagaagtgattctagcgtcaggcgggccaaagaagcgagcgggaagaagagtcttcaaggagacaatgcaccccgtctaccgaggagtgcgtcgcaggaacaagaacaagtgggtctgcgagatgcgagtccccaacaacaactcacggntttggc

SEQ ID NO: 190881 - DNA, 233 bp, Glycine max
aaaaatggcacctttcgtttccctctctttgttgcttctctttctcaaccaccccctcctttccctctcaaccaaccctgaagggaacgctctgcatgctttgagaagcaggctttctgatcccaacaatatgttgcagagttgggacccaacactggttaatccctgtacttggtttcatgttacctgtgactccaacaatcatgtgattcgcttagacttgggaaactcta

SEQ ID NO: 190882 - DNA, 279 bp, Glycine max
actggttctcctcccaagccttgtgataaccctattggagatcattacattttgaagtcgattaagaataagattgattactgtagattacacgggattgaaattgtgtataatttggctcatttggatgtggaacttgctgggtattgggctacgttgcctatgattaggaggttgatgttgtcgcaccctgaggtggagtggatttggtggatggatagtgatgctttttttactgatatggtgtttgagcttcctatgtctaagtatgatgagtat

SEQ ID NO: 190883 - DNA, 238 bp, Glycine max
gcggcattaaaaatgcagatcttcgtgaaaactctgacagggaagactataaccctcgaggtcgagagcagcgacaccatcgacaatgtcaaggccaagattcaagacaaggaaggcattcctccggatcagcagcgtttgattttcgccggaaagcagcttgaagatggaaggaccctggccgattacaacatccagagggaatcaacccttcatatcgtcatcaggattcgtggtg

SEQ ID NO: 190884 - DNA, 171 bp, Glycine max
caaagccttcctacaacgaaagaaaaaaagcagagtaattttccctcaccaaggaagaagaagcaaacaatggccgatcagcttaccgatgaccagatctccgagttaaaggaagccttcaagttgttcgacaaggacggcgatggttgcatcacaaccaaggggcttgga

SEQ ID NO: 190885 - DNA, 234 bp, Glycine max
gtaaggattgacagactgagagctctttcttgattctatgggtggtggtgcatggccgttcttagttggtggagcgatttgtctggttaattccgttaacgaacgagacctcagcctgctaaatagctatgtggaggtaaccctccacggccagcttcttagagggactatggccgcttaggccacggaagtttgagggcataccaggtctgtgcatgcccttagatgttctgg

SEQ ID NO: 190886 - DNA, 201 bp, Glycine max
ctttgagaaacaggttcctattgatgcagtgttccagaaggatgcgatgattgacatcattggtgtgaccaagggtaaaggttatgagggtgttgtcactcgttggaagtgttacccgccttcgccgtaagactcacagaggtttgaggacggttgcttatattggtgcctggcatcctgcaagagtttcattcactgttg

SEQ ID NO: 190887 - DNA, 250 bp, Glycine max
atagttgctgctgctttgcattcctgttagcataagaaagtgaacatattggagttcaagtttttcagataaggcaattcattccggtgcagatcttgaatctgctatttcaaattgtatgggctacaaatctgagggtcagggcttcattgtaggggtgaagataaatccagtgccgggtttgcctactggttttacagaattacttgagtttgtcatggaacacgttgaaagagagaatgttgaacca

SEQ ID NO: 190888 - DNA, 222 bp, Glycine max
ggcgccactcgatgtttccatttgcctggatgcctttggtattgtggggtgtgggtcgtttagtggtgtcaagtcttgcgaacgtgagggtgcatgagtggtaatcgggatgtttttgttgcacggctccatgcttgcgcatgcaacgtgtgacatgcatccttttcattgtcaccttagccttcgtggcttaggtgctgacgattggttctgtgttgccta

SEQ ID NO: 190889 - DNA, 258 bp, Glycine max
ctcgagccggaagaagatggtgtcaggttctggaatctgcgcaaagcgggtggtggtggacgcgcgccaccacatgctgggtcgtctagcctccatcgtggcgaaggagcttctgaacggccagaaagtggtggtcgttcgctgtgaagagatttgcatctcgggcgggctggtgaggcagaagatgaaatcacttgaggttccttcgcaaacgcatgaacaccagacccttccatggccacaatccattccgtgccc

SEQ ID NO: 190890 - DNA, 130 bp, Glycine max
gtcgaaggaagaaataatcgccaatggcaattgaacacgaagacgatctcaaagacgagaagaaccctcgacgcctcgacgaggatgacatcgccctcctcaaaacctacggtttgggaccttattccac

SEQ ID NO: 190891 - DNA, 193 bp, Glycine max
cgctgactgcgatcggatttcatggctcctaagaaagacaaggctcccccaccttcatccaagcccgccaagtctggtggtgggaagcagaagaagaagaagtggagccagggaaagcaaaaggagaaggtgagtaaccaggtgctgttcgatcaggctacctatgacaagctcctctccgaggcacccaaat

SEQ ID NO: 190892 - DNA, 200 bp, Glycine max
  unsure (1)..(200): unsure at all n locations
ggagaatatgaagttgtttgtattctttgttgctgcagtagatttggtagcatggccatgccatggcgcaggctaccaaaggttccctctccgaatgacaactggctatggtgagcgttcttcggaggtaaaatgcgcaagttttaggcttgctgtggaagcacacaacatccgaattttngnaaaacatccggaaaaat

SEQ ID NO: 190893 - DNA, 275 bp, Glycine max
tgagaggactcatcaccaaccctaatttcttagctaaaccctattcgtttagcatttcctctcttttctcccactcgtaaatcctctttcaaacttttcagatccaaataaatcatggttttctgggtttttggctacggttcactggcgtggaaccctggattcgattacaatgagtaagattataggtttcattaaggactacagacgcgtgtttgttttagcgtgcattgatctacggggaacacttgtattaccagcaagaacttgcacgt

SEQ ID NO: 190894 - DNA, 176 bp, Glycine max
gcagccacacctcccgcagcagccatggttctcaaaactgaactatgccgattcagtggtgccaagatctacccaggaaagggcatcagatttgttcgtggtgattcttaggttttcctgtttgcaaactcaaaatgtaagaggtatttgcacaatcgcctgaagccttcaaagct

SEQ ID NO: 190895 - DNA, 264 bp, Glycine max
gtaaacgacattcattcatctatggctacccttattgctcccagcaaccactctccccaagaagacgctgaggctctcagaaaggcttttgaaggatgggggactgatgagaaaactgtcatagtaatattgggtcatagaactgtttatcagaggcagcaaatcagaagagtctatgaggaaattttccaggaggatcttgtgaaacgcctagagtctgagatcaaaggagactttgagaaagccgtgtaccgatggatacta

SEQ ID NO: 190896 - DNA, 229 bp, Glycine max
ctttgtctgggtgctgaagttggatttaatacaacttctgcttagttcacaaaatataatgctggagttgccttcaataaaccagatttctctgtggcacttatgctggcacttaaaggacagaccctgaaggcatcttacattcattatgttgatcgccctgatggatttacggttgctgctgaaatctcccacaggttttcttccttggagaacagatttactattg

SEQ ID NO: 190897 - DNA, 170 bp, Glycine max
gaaaatggcagaggctaatgtagtgctgttggatttctggccaagctcttatggaatgagagtgaaaatcgctttggcagagaagggaatctcatatgagtgcaagcaagaagacttggaagctagaagctctctgcttttagagatgaacccggttcacaaaatgatac

SEQ ID NO: 190898 - DNA, 185 bp, Glycine max
gtttgtaaactgttggaatgtgactttggcgaaagctaatgtcattctcccagcagcataatgcagatgtttcaaagctcgcttttctgcttgcaaccccagggtgattcatacacgcgaagatctgcttttgattcaatgctggctggttgtatacctgtcttcttccatccaggctcagcata

SEQ ID NO: 190899 - DNA, 194 bp, Glycine max
caaattgaaaggatgtcgatcttcgagtacaacggaagcgccgtagtggctatggtcggcaagaactgcttcgccattgccagcgaccgatagctcggcgttcagctccaaaccatagccacgagatttccaacacttttccaagattcacgacaatctcttcatcgctctctctggcctcgccaccgttgctc

SEQ ID NO: 190900 - DNA, 246 bp, Glycine max
gggatcattcaccgtgaccttaaacctgataacttgatcttgacagaagatcataaaactgttaaacttgctgatttcggtctagccagagaagagtacctaacagagatgatgactgctgagacagggacatatcgatggatggctccagaactttacagcactgttactctgagacaaggggattagcagcattacaaccataaggtgcgcagcctatagctttgctccagtgttgtgggaact

SEQ ID NO: 190901 - DNA, 258 bp, Glycine max
aaaaataatgttcatcgagaattttaaggttgagtgtcctaatgtgaagtacaccgagactgagattcagtccgtgtacaactacgaaaccaccgaacttgttcacgagaacaggaatggcacctatcagtggattgtcaaacccaaatctgtcaaatacgaatttaaaaccaacatccatgttcctaaattaggggtaatgcttgtgggttggggtggaaacaacggctcaaccctcaccggtggtgttattgctaa

SEQ ID NO: 190902 - DNA, 136 bp, Glycine max
ggctgttccctgaggctgttacaattggtgcagatgtgagtggaatgccagaattctgccttcctacgcaagatggtggggttggctttcattatacacctgctatggccattgcagaccagcagattgtaggttc

SEQ ID NO: 190903 - DNA, 249 bp, Glycine max
cttctgagcttgtttaagcttttcttccattaacatattatcataatgtgtggtattcttgctgttcttggttgttctgatgactctcgagccaaaagggtccgcgtgcatgagctctctcgcagattgaagcaccgtggacctgactggagtgggctccatcaacatggtgactgccttttggcacatcaacggttagccatagttgatcctgcttctagggatcaacctctctttaacgaggacaaa

SEQ ID NO: 190904 - DNA, 272 bp, Glycine max
gcttcattctgtttccgattctctttgcatttacctttctgtcctcgcccgttctctctgcttcggatctggtcctcgccaaggttgaccgtcgcattgatctgacttcacagattgtgcgcatcactacttcactaaaggtgcagaatacgggatctgatgttgtgtctgagattttgctgtcctttcctgagaaccaggcaagtaacttggcatacttgaaggcaacacttggtgatgggaagggaaaatcaaaaccatcttctggtgtt

SEQ ID NO: 190905 - DNA, 265 bp, Glycine max
gatagatgtcattggggccatcgagcctgtagcttcgaatggtcaccgcttcattcttgtggcaatagacaccttccaccaaatgggtccaagcagatcttataatactgtcacgagaagtgtggtggtcagattcacaaagagggagctgatttgtcgatacggactccctaagaagatcataactgacaatggcacccatctgattcacacaatgcatcaagaaatgtgcgacgatttcaagatccaacatcataattccaca

SEQ ID NO: 190906 - DNA, 251 bp, Glycine max
acgacactcaagacgatggaccaaggatcaccagacataagattttgcttcatcatctcagaccttcatcatccacccaccccaacgaatcatcctccctccatgattcagcatgtgtggcgggggatatcactgattatcacaggcctcgacattcggagacgatgttgtgatactggctgcttatcggactgctcattgcaaagctaaacgaggtggcttcaaagacgatcttcctgatgatctactgg

SEQ ID NO: 190907 - DNA, 270 bp, Glycine max
ttttgaacccttctggcaggtttgtcattggagggccgcatggcgatgctggtctcaccggccgcaagatcatcatcgacacctatgcccgatggggtgcacatggtggtggtgccttctctgggaaggatcctgccaaggttgataggagtggtgcctacattgtgaggcaagctgcaaagagcattgttgcaaatggacttgctacgagggcaattgtgcaagtttcctatgccattggtgtgcctgagcccttgtctgtgcttgttg

SEQ ID NO: 190908 - DNA, 271 bp, Glycine max
ttaatatgaaggaggtggaagttgaagatggatatgtcttgaaagaagagatccatctcacggtgctaaaaacctctctgttcttcgcgggcgatggcttcagcgtctacgattgcaaaggtcaactcgtgttcagagttgactcttatggacccgacactcgcgacatagacgaactcgttctcatggatcctaacggacgttgcctcctcaccgttcgtcgaaagcggccgagtttgcatcaacggtgggaaggtttcaaaggggagag

SEQ ID NO: 190909 - DNA, 226 bp, Glycine max
gtttgagtcttcttgatccttctttttctccttgaactcaaacatggcagatgaggtggttctgctagatttctggtcaagtccatctgggatgagggtcaagattgcacttgctgaaaacggtatcaactatgagtacacagacgaggacttgaggtacaagagtacagttctggtcccactgaacccggttcacaagacgactccggttctcatccaccatggc

SEQ ID NO: 190910 - DNA, 275 bp, Glycine max
gtcatattggcgtaatccaccatacactgctgtgaggtttttcttcactactttcatagccctgatgtttggaacaatgttctgggacctcggaagcagacgtacaacaagaggaggcctgttgaatgctctaggttcaatgtctactgctgttctcttccttggaatacaaaatgcttcctctgttcagccagtggtagcagttgaaaggactgtcttttatagagaaaaagctgcgggaatgtattctgccttaccctatgcatttgcacagg

SEQ ID NO: 190911 - DNA, 273 bp, Glycine max
gaacaacatcgtcatcccatggcaaacgccgcatctggtatggcagtccatgatgactgcaagttaaggtttttggagctgaagacaaagaggacacaacgtttcatagtttttaagattgaggagcagcagaagcaggtcattgtggagaagcttggtgagccagcccaaggctatgaagatttcactgccagccttcctgctgatgagtgccgttatgctgtttatgattttgagtatctgactgaagggaatgtccctaaaagcagaatt

SEQ ID NO: 190912 - DNA, 266 bp, Glycine max
acatcaaagtcttgatggcaactaacaggcctgacactctggatccagcactactacgacctggacgattggatcgtacagttgcatttggccttcctgatttagagagtaggactcagatattcaagatacacacaagaaccatgaactgtgaaagggatatccgctttgaacttttagctcggctttgcccacattctactggagccgatataaggagcgtttgcactgaagctggtatgtatgctattcgagccagaaggaag

SEQ ID NO: 190913 - DNA, 225 bp, Glycine max
gtctaagtggtgccctgagataactttgggcaatggtgaaggctgtggcagttcttggcagcagcgagggtgtcactggaactattttcttcactcaggcgggaaatagtccaaccaccgtaactggatctcttgctggtcttaagcctggtctccatggcttccatgtccatgccttgggggacactaccaatggctgcctgtcaactggagcgcatttcaatc

SEQ ID NO: 190914 - DNA, 269 bp, Glycine max
gcttcatatcatgaagaagaagtgaggctattgggcaagtgggccagcccatttagcaacagagtagaccttgctctcgagctcaagggtgatccctacaaatactccgaggaagatcttgctaacaagcgtgctgatcttctcaagtacaaccccgttcacaagaaggttccggttttggtccacaatgggaacccattgcccgagtcactcatcattgttgaatacatagatgagacgtggacaaataacccactattgcatcaaga

SEQ ID NO: 190915 - DNA, 242 bp, Glycine max
ctggatctctcttctcttctttgatctccgttaccctttttgttttctcaacagagagagagagatagaatctttcgaagttcgtttgcatgtgctgtgtggtcagtcaccgatggaagcaccaacctgcgaaggtcactgccgaatacgattacctcatcaagccttctcttattggtgatagcggtgtgacaaacattcctctccctttgcggttttctgacggtaccatcacaaccagt

SEQ ID NO: 190916 - DNA, 252 bp, Glycine max
gatctctgtgaagtcgctttataacactcaacctaagatgcagaacgaggaaggacagatcaccgatctttacattcctaggaagcgctctgccacaaaccgattgattaccgctaaggaccatgcttcggttcaggttaacattgggcatgtggatgagaatggcgtctacaatggccatttctccacttttgctctctgcggcatcatacgtgctcagggtgatgctgacagtgccctagatagcttgtg

SEQ ID NO: 190917 - DNA, 254 bp, Glycine max
gtggttctggctctgaccatgggtcctactggcttgctacatttgatatggactgtcattgctttagtaagtgtgtcgcttgtgcaagcagcagatgcgtataactatttcacatggacggtgccttatgggactctttatcccttggctagtccccagcaggttattcttatcaatggtcagtttcctgggcctagacttgacttggtaactaatgacaatgtaattctcacccttatcaacaagctggacga

SEQ ID NO: 190918 - DNA, 274 bp, Glycine max
gtcgagccgcaaaaactaagttcatttcttgtgctttgctttattcctccaaaccaaacatgtcgaacacatgcggcaactgtgactgcgctgacaagactaactgcaccaagggaaacagctaatggtgttatagtagagactgagaagagctacatcgagactgttgacatggatgttccagcagctgagcatgatgggaagtgcaagtgtggcactaactgcacttgcacggactgcacttgtggccattaaggactatgtatgaaaatgt

SEQ ID NO: 190919 - DNA, 266 bp, Glycine max
gaaagatggaggggaaggagcaggatgtgtcgttgggagcgaacaagttccccgagagacagccaattgggacggcggcgcagagccaagacgacggcaaggactaccaggagccggcgccggcgccgctggttgacccgacggagtttacgtcatggtcgttttacagagcagggatagcagagtttgtggccacttttctgtttctctacatcactgtcttaaccgttatgggagtcgccggggctaagtctaagtgtagtacc

SEQ ID NO: 190920 - DNA, 268 bp, Glycine max
agattaaccttccctgatttatctggaacagggaagaacacgtgtgtaaaatttggtccagattctaaatacatagctgtgggatcaatggaccgaaatcttctgttattcggattgcccggtgaagatgctcctactgagtcttaaaatgcctcagttgtacaagccaaagtcttgctctggagtaaacagttgctacctgatattggcgcttggtctaaatatctatgatgagattggaaaagttaatgaaggtagtggtttcttt

SEQ ID NO: 190921 - DNA, 263 bp, Glycine max
cagcatcggcggcgacagtcatctccgacaacaacacttcctcggcgacaaatgtctctagtggcgaacgaggatttccagcacattctgcgtgtgctgaacaccaacgtggatgggaagcagaagataatgttcgctatgacctccatcaagggtattggcaggagattcgccaacatcgcttgcaacaaggccgatgttgacatgaacaaaagggctggtgagttgacccgtgcagagttggatagtgtgatgactgtcgt

SEQ ID NO: 190922 - DNA, 274 bp, Glycine max
gtttctggagcgtttgctgttggtacatggacactggtgttatcggcgtatatcaatgatgtaatcgctctatgcgtttttgatcaggatgtttctgccaaactttgcctaaagtatccttatctatatctagagggagtagaggatatcctcttcagctggccccggattcttggctggatgttgaatggagtccttagttctttagtgatcttcttcttgaccactaattctgtcttgaatcaagccttcagaagagatggcaaggtggtag

SEQ ID NO: 190923 - DNA, 188 bp, Glycine max
  unsure (1)..(188): unsure at all n locations
gttgaggctaagcagcccaactatgccattcgaaaatgtgccagggttcaactcatcacaaatggcaagaacattgctgnatccgtgccaaatgatggctgcttaacttacattgacgaggctgatgaagtcttgctagctggatttggacgaaagggtcatgcagacggtgatattcctggagtcag

SEQ ID NO: 190924 - DNA, 263 bp, Glycine max
gagcaggaggccattccgtgctctccagtagcctcaacatttccttcatactcctcatccatttcaagtgttttgaggactcttcgggccaacaggagacacctgcaataagctgcagcataatttgtaagccctacttcaagaccatatcgtggctgctcatgtgcatatgctgcagcaagaacaatatcgccagcaatgctagcagatattatttgtgctacaatgtccatgatactcatctctactgaccaaatctgaag

SEQ ID NO: 190925 - DNA, 262 bp, Glycine max
tgtcgttcgcgattcatatgtggtgttgttactgctgctcttttctcttttcttttctctttagttctctcttcccctttcttttcctttttcttcttcttctgagcttgtctaagcttttcttccattaacatattatcgtgatgtgtggtattcttgctgttcttggctgttgtgatgactctcgagccagaagggtcggcgtgcttgagctctctcgcagcttgaagcactgtggccctgactggagtgggctccatca

SEQ ID NO: 190926 - DNA, 286 bp, Glycine max
ggagaagctctggctgtaagttttccctatgttttgcaccacatgcctgatgagagtgtgagcactgagaatcacagagatagattgctgaggttggttaagaggttgtctcccaaggttgttaccattgttgagcaagaatccaacaccaacacgtccccattctttcacaggtttgttgagaccctggattattatactgcaatgtttgaatctatagatgtggcttgccccagagatgacaagaagcggattagcgcagagcagcattgcgtggcacgagaca

SEQ ID NO: 190927 - DNA, 198 bp, Glycine max
  unsure (1)..(198): unsure at all n locations
gatgaattcattcaacactcatgatgacactcanaagattgttgaaaaataccanaactcaaatattgagattcatacttttaaccagagccagtatcctcgattggttgttgaggactttttgccattgcttccaaagggcatactgacaaggatggatggtaccctcctggccatggtgatgtcttcccatcatta

SEQ ID NO: 190928 - DNA, 280 bp, Glycine max
  unsure (1)..(280): unsure at all n locations
gctctgcttccagcgagtgttctttcttcgtttcaacaccttaatttgcatacgctgcttcttcagcttgagnaatggcacaagaaacctttctattcacatctgaaactgtaaacgagggtcaccccgacaagctgtgcgaccagatctctgatgcagtgctcgatgcgtgccttgaacaggaccctgacagcaaggttgcctgtgagacatgcaccaagaccaacatggtcatggtctttggagagatcacaaccaaggccaacgtagactatgagaa

SEQ ID NO: 190929 - DNA, 276 bp, Glycine max
atggatcctcagcctgagccagtcagctacatatgcggagattgtggaatggagaatacgctgaagcccggtgacgttatacagtgccgtgagtgcggttaccgtattctttacaagaagcgcactcgtcgcattgtccagtacgaggcacgctgaagaaaactgctataacgtttgcaagtactttccatgaagaaattgttactacatctgtgttgtgtgatattgaagagctacttttaattctacagtagattgctttttgggtgatgttta

SEQ ID NO: 190930 - DNA, 283 bp, Glycine max
ggcgcctccatgacctccaaggagaagctggatgtggcgcggcagcttgccaagctcggcgtcgacatcatcgaggccggcttccctgccgcctccaaggatgacttcgaggccgtcaaaatgtacgcccaagaggtcggcaacgccgttgacgacgacggatacgtccccgtcatctgtggcctctcccgctgcaacgagaaggacattcgaacagcctgggaggccgtcaagtacgcagagaggcacaggattcacacttcatcgccaccagcgccattca

SEQ ID NO: 190931 - DNA, 292 bp, Glycine max
tatgaagttgtttgttttctttgttgctgcagtagttttggtagcatggccatgccatggcgcaggctaccaaaggttccctctccgaatgaaaactggctatggtgagcgttcttcggaggtaaaatgcgcaagttttaggcttgctgtggaagcacacaacatccacgcctttaaaaccattcctgaagagtgcgttgaacgaacaaaggactacattaatggcgaacaatttagatcagactctcaaacagttagccaacaagctttcttttatgctagtggacgcgag

SEQ ID NO: 190932 - DNA, 264 bp, Glycine max
gtgatccgtgcgcacgtaaggtgacagtcggtcttcaagtcccacacgaccaccgatagggtctgcccgcttccggagcctggatttcggagagcgcaacggctacctgaagggtgtcgtcactgacgtcatccacgatcctgggccgtggcgcgcctctcgctaaagtcgccttccgccacccgttccgtacaagaagcagaaaagagtcttcatcgcgcgaagggctctacaccggcaattcatctactgcggcaagaaggc

SEQ ID NO: 190933 - DNA, 252 bp, Glycine max
ggctcgatggtgtcgtcgcaggttgtgaatacttacccgttgtccagctacacgttcggcatgaaggagcccttgatggagaaggatacctccgtcgcggatcgtctcgctcgcatgaaagtcaactatatgaagtccggactgaggaccagtgtggaatcgaatttactggtacaagagcacaatcatcctcctatacttcttctccaagttgggaacacattctgcaaattcccaggcggttcgtctcaa

SEQ ID NO: 190934 - DNA, 285 bp, Glycine max
ggcaaaatcaccttgagtgtcaccaagaccaagcctgagacgggtgaggttatcggtgtgttcgagagtgttcaaccatctgacactgatttgggagcaaaggctccaaaggatgtcaagatccagggcatctggtatgctcagcttgagtcatagagtgtttagtatcctgttttgtttgttggctcagattctgttagtaacttcatgcatggtgttgctgcattatcccttgacccaactttcctagcactactgagagtactgtcatggttgtatattata

SEQ ID NO: 190935 - DNA, 279 bp, Glycine max
ctgcctcctcgtcggtgccaatggatccggaaagacgactttgctgaagattctggcggggaagcacatggttggaggaagagacgttgtgcgcgtcttgagtggttccgcttttcacgacactcagctcgtttgtagcggaggatctcgcttatttgggcggatcttggagcaaaaacgttggctccgctggagaaattccgctccaaggagacttctctgctgaacatatgatctttggagttgagggtgctgatccagaaaggagagataagttaa

SEQ ID NO: 190936 - DNA, 259 bp, Glycine max
tactgtgcatcgtctccgaaaatgaacgacgcagatgtctcaaagcaaatccagcagatggtgcagttcatccgccaggaagctgaggaaaaggccaacgagatctctgtctccgccgaagaggaattcaatatcgagaagctgcagttggtcgaagccgacaagaagaagatcaggcaagaatacgaacgcaaggagcgccaagttgaaattcgcaagaagattgagtactcgatgcagctaaatgcttctcggatta

SEQ ID NO: 190937 - DNA, 276 bp, Glycine max
cttccttccccttctctcttttccaaaactaatggaaggttctgtacttgaacgtcttgattttggggagatgggatacgggtgcaagcattatagaagaagatgcaggattagagcaccatgttgcaatgagctctacttttgccgtcattgtcataacgaggcaaccagcatgctgagcaacccttttgatcggcacgaactcgtccgccaggacgttcaacatgttgtttgttcagtttgtgacacagagcagccagttgctcaagtttgcac

SEQ ID NO: 190938 - DNA, 278 bp, Glycine max
caccccatcgcgcattggcagacctccaatgccaatgatgcagcagcagatgcttccaaggggacgtgtctatcgttaccctcctggccgcaacatgcaagatgtcccaactcaagttgcagctggtggaatgctgtcggtcccttatgacatgggaggtctgccaatgcgcgatgctgtgggacagccaatgcccattcagactttggctacagccctcgcaaatggctccaccaagacagcagaatactatgctcggtgaagtttataccacttgt

SEQ ID NO: 190939 - DNA, 271 bp, Glycine max
attcagaggatgtcgatcttcgagtacaacggaagcggcgtggtggctatggtcggcaagaactgcttcgccattgccagctaccgatagctcggcgttcagctccaaactatagccacggattttcaacgcatttccaagattcacgacaagctcgtcatcgctctatctgtgctcgccaacgatgctcaaacattgtatcagcaccttgttttccggcacaaactggtactacctgcgtgaagagagggatatggaaccaaagaccttt

SEQ ID NO: 190940 - DNA, 277 bp, Glycine max
  unsure (1)..(277): unsure at all n locations
ggaggcggctcgtcatttcatgaatgaaaaatcaaggagctgttcttgtgagacttgcaacttcagtggcacataccagatcttaggaagcatgcaagacttgaacatcctcttgagcgcccatctgcagtagacccagagcgtcagtnagctggaaggaggttggagcgccagagggatcttggcgacctccttagcacacttcaaacttcaatttgggggtgatggtcccatagatgatggtggtctgctggctgtgtttttcctcattcttcag

SEQ ID NO: 190941 - DNA, 269 bp, Glycine max
caagatagaatttcaataacttgcaacttgcctacaccatatttttttttgttcacaatttaatatatggtatctagccagtggtgtggccataacaagaagggagagaaaacaaaataatttaaggttgagatgaggaaatgtgagctctgtaacagtcccgcgaagttgttctgcgaatcagatcaagccagcctctgttggaaatgcgatgctaaggttcacagtgcaaacttcctcgtcaccaaacatcccaggattcttctctg

SEQ ID NO: 190942 - DNA, 284 bp, Glycine max
agaatgttggacatcaacctattcagagaggagaagggccacaaccctgaactcatacgcgaatcccaacgccgtcgtttcgccagcgtcgaaatcgtcgacgaggtcatcaatctcgacaaagaatggcgaaaacgtcaattcgagttggaaaatctccgcaaggaattcaacaagatcagcaaggaagtctccaaactcaagcgtgctggggaggatgcttctaagttcattactgaatcagaggagaccaaaaaatcgatagcggagaaagaagttgaagt

SEQ ID NO: 190943 - DNA, 277 bp, Glycine max
atagacttgggaaagtggatccgaacaaacttatgcaggttacgaccatggatagatatgtaaaataccatgtgcaggagtttgagaaagcttttaagataaagtttcctgcttgcacaattgccgccaagagacacattgattcaagcaccacgatactagatgttcaaggcgtgggactcaaggactttacaaagtctgctcgggatctcattatgcggttacacaagattgatggtgacaattaccctgggactctctgccaaatgtttatcat

SEQ ID NO: 190944 - DNA, 94 bp, Glycine max
tagtaagcgacgaaatgcttcggggagttgaaaataagcgtagatccggtgattcccgatataggtcaacctttcgaactgctgctgaatccac

SEQ ID NO: 190945 - DNA, 279 bp, Glycine max
ctgcgatgaagcccaataagcctggcttggaggagtcccaagaacagatccacaagataagggatcaccctttcctccaagcacgtcaaaaatctcgagaatgtttgtggagacttggttcgtggtgcaagggtaagaggctcgggtatagggacctgtcaggatgcccactaaggttttcagatcactacaagggagtccccctgtgtggaaggtacaaccacattgggacagatttgaacttcgtgtgcacaagagggtgattgacctctaacagtt

SEQ ID NO: 190946 - DNA, 295 bp, Glycine max
taagattcacaaaatcttgttgtagagaggcgtgaagagggacctatggcacctgtggcacctgtgactatggatgcacttgagcttatctctaaatctcagggcctcaatcttagtagtctttttgagaagcaaatgggactaattaaaaaggtgaacacgatttacatgcacatgttcaccacatgcaaataatttcaaaaatagacaaagctgcacggacccctgggcttcgatgtaaagcagatcaactgtaagtttaaagattcaaggtgaaaagacaagaacggaaaag

SEQ ID NO: 190947 - DNA, 274 bp, Glycine max
gcaatggtgtacgtcaaggctcagaaatcaaaagcctacttcaagagatatcaagtcaagttcaagagaagaagagagggaaaaaccgattaccgtgccaggattcggttgattaatcagtacaagaacaaatataacactccgaaataccgatttgtggttcgctttagcaacaaggacattgttgcacaaataatatctgctagcattgccggcgatttagttcttgctacagcatattcacatgagctgccacgatatggtcttgaagtag

SEQ ID NO: 190948 - DNA, 284 bp, Glycine max
  unsure (1)..(284): unsure at all n locations
atgtcctcaaagttgatagctggtgatagtgacttctttgccgttttggttgtggatgcagtgcaagctgtaaaaatgaccaatgctcgaggtgaagttaaatacccaatcaagggaatcaatatcttgaaagctcatggaaaaagtgctagagacagctttctgatgaatggttatgctctaaatactggccgtgctgctcaaggaatgcatctcaaaaaagtncctgcaagaattgattggcatgaattcaatcttcagaagacaaaaatgcagttgggtgt

SEQ ID NO: 190949 - DNA, 272 bp, Glycine max
attacaatgtagcggatgcaagattagcgcaacatgtggagagagggattgcagatggccttctaattagttgtgtggcttcttgttccaatctctgggctgctattatggatgctggaactggcttttcaagtcaagtttatacgttgtcaccatttttcttacacaaggagtggatcatgggacagtgggaaaagaactattacattacttctattgcaggggctaataatgggagctctcttgtggtgatgtcaaaaggcacacagtat

SEQ ID NO: 190950 - DNA, 274 bp, Glycine max
gctatccaatagggagtcagcccgtcgctctagaagaagaaagcaggctcatttaactgacctagaaacacaggtttctcaattaagaggtgaaaattctaccttgttaaagcgccttactgatgttagtcagaaatacagcgactctgctgttgacaacagagttttaaaagctgatgttgaaacattaagagcaaaggtgaagatggctgaagagaccgtcaaaagaattactgggttgaacccaatgcctcatgccatgtctgatatatcc

SEQ ID NO: 190951 - DNA, 267 bp, Glycine max
actgctcgagctcgagccgggcttcctcaatgatctcctccccagctgttaccaccgtcaaccgagccgacgccggcatggttgctccattcaccggcctcaaatccatggctggcttccccacgaggaagaccaacaatgacattacctccattgctagcaacggtggaagagtcctatgcatgcaggtgacgccaccaattggcaagaagaagttcgagactctttcctacttgccagacctcgatgatgcccaattggcaaagg

SEQ ID NO: 190952 - DNA, 272 bp, Glycine max
cgagaacccaaaccttttcctccacttggctttcattgctacgttctttgctgtagttttgcaagcatcactcggtctcttcaggttagggtttatcgtggattttctgtcacatgcaaccatagtagggttcatgggtggagcagctacagtggtttgtctgcaacagctaaaatcaatccttggccttgagcattttacccacgaggccgatctcgtgtcagtaatgcgctctgttttttctcaaactcatgagtggaggtgggaaagcg

SEQ ID NO: 190953 - DNA, 261 bp, Glycine max
atcactcccttatccatttccacacaacataatacagaaaaccaacgctctctcttcagcctccattctacgctctcccaacatgccagtctcacggtccgaagagcgaaccataatggaagagtaaattaccggaaaccgaataaccgtttctcggtgaaagcctccgccaaagagattgcctttgagcagcattcccgctctgctatgcaggccggcattgacaagctcgccgacgctgttgggctcactcttgggccc

SEQ ID NO: 190954 - DNA, 194 bp, Glycine max
gagagaaaatggtttcggggtcaggaatctgcgcgaagagggtagttgtggacgcgcggcaccacatgctggggatgctggcatcgatcgtggcgaaggaacttctgaatgggcagaaggtggtggtggtgcgctgcgaggagatttgcatctccggtgggctcgtcaggcagaagatgaagtacttgggtttc

SEQ ID NO: 190955 - DNA, 281 bp, Glycine max
gttacaacttcaccatggctgctttttggacaactcacttagtgaaatccaaagaagcagatgcaaagggtccaggcccaacaggcctttgcaacctttaccttgatgagccagatgagaaatggataacccaaattgaagattttgaccatgtcattctcaatggaggacattggtttacaaggtcaatggtgttctatgagaaacaaaaaattgttggatgccactattgcctcttagaaaatgttcctgacttaaccatgtactatggctacagaaag

SEQ ID NO: 190956 - DNA, 270 bp, Glycine max
cgaattagttatcttgagaaacattattcccattgctatatattatggctagcatgaaggttacatgggtggttgtgatcatgtgcatggccgtggtgggtgcaccgatgatggcgcaaccatgacatgcaatgatgtgacggtgaacatggcacagtgcctatcctacctgatgcagggaggaacaccttcaacactttgctgcagcggagtcaagaacattcttggctctgctgtcaccaccgttgacaaacaaactgtgtgcaactg

SEQ ID NO: 190957 - DNA, 271 bp, Glycine max
tctcgagccgaatcggctcgagggcggtgcctcttctctcgaagaacatcgtgaagaagagactgaagaagttcaagaggcaccaaagtgacaggaagatttctgtgaagacaaactggcgcagaccaaagggtatcgattcccgtactaggagaaagttcaagggatgcactttgatgccgaacattggttatgcttcagacaagaagacccgccactatctcccgaatggtttcaagaaatttgttgttcacaatgtgaaggatttgga

SEQ ID NO: 190958 - DNA, 281 bp, Glycine max
  unsure (1)..(281): unsure at all n locations
atttggttgctgcaaacattataaagggaggcttttcatacagtggtcagaggtgcactgctgttaaggttgtcctggtaatggagtccgttgccgatgctttggttgagaaggtgaaggctaaggtggcaaaactaactgttggaccaccagaggatgactgtgatatcaccccggttgtgtnagaatcnatcctgcccaatttccattgaaaggcctggtcttggatgcctaaggagaaaggngcaacanttctgccagggttacaaaagggagggcat

SEQ ID NO: 190959 - DNA, 275 bp, Glycine max
ctcttccgccctaatctctatcaagccccctctcttcctcgcctccgccctcatcggactcctcaccggcctcgacgactacctctacgcctgcggcgtggctcgccttccggtctccactttctctctaatccaagcctcccacctcgccttcaccgccgtcttcgccttcctcctcgtccgccacaggttcacgccctactccgtcaactccgtcgtgcttctcaccgtcgccgctgtggttctggctctgcgttccagcggggaccgccccg

SEQ ID NO: 190960 - DNA, 269 bp, Glycine max
cctcttcatcttgttctatctgtgacgagcatcatggcctcaagagcagtgttattgttggctatgtgtgtgcttccggcgatggttgtggccattcgcccagcaaagaaccctttttgcgtgaagggtcgtgtctactgtgacccttgccgtgctggttttgagacctcagctaccacctacattgctggtgctgagattatgttgcaatgcaagagcagggttagcaacgaggttgtgtacacgaagaaggggtacaccgactcaac

SEQ ID NO: 190961 - DNA, 267 bp, Glycine max
ctgaatttactgaccatttgacacacaagataaagtttcatcctggtcaaattgaggctgctgcaattatggagcatattttggatggaagttcctacatgaaagctgctaagaagttgcatgagattgatccattgcaaaagttaaaacaagatcgatatgcccttagaacttcaccacaatggcttggaactctcattgaagtgattcgtttctcgactaagtcaattgagagagagattaactctgtgaatgacaaccctttga

SEQ ID NO: 190962 - DNA, 197 bp, Glycine max
acttgttttgagttcaatcaaatcgcattggtatctgaaatcaggaaagatggttagcgtagctgagatcaggcaggcacaaagggcagaaggcccagcaaccatccttgccattggaactgcaaacccaccaaaccgtgttgatcagagcacctatcctgattactacttcagaatcaccaacagtgaccacatga

SEQ ID NO: 190963 - DNA, 263 bp, Glycine max
gagaattgctagatcggatattggccaagaaggacagtcgttatactgaaaaagatgcagctgtggttgtaaggcaaatgcttaaggttgcggctgagtgtcatttacatgggttggtacaccgggacatgaaaccagagaattttcttttcaagtcaaccaaagaagattcacctttaaaggctaccgattttggtttgtctgattttataaaacctggaaagaggtttcaagatattgttggcagtgcttactatgttgca

SEQ ID NO: 190964 - DNA, 266 bp, Glycine max
gtttcctttttgtttctcctttccagatctgcatcttccattttttaggattaagcggtgagattcgtgaatctgagaaatgtcggattcttctcgggaggagaatgtttacatggcgaaattggcggagcaggccgagcgttacgaggagatggttgagttcatggagaaggtagcaaagactgtggaggttgaggagttgacggtggaggagagaaatcttctctctgtggcttacaagaacgtgattggtgcgaggagggctt

SEQ ID NO: 190965 - DNA, 264 bp, Glycine max
ggggtcagtatagaagactggtggagaaatgaacaattctgggttatcggtgggacatctgcgcatctttttactgtgttccaagggcttcttaaagtgcttgctgggatcgatacaaattttactgttacatcaaaggcatcagatgaggatggtgactttgccgagctttacgtgtttaaatggacatcacttctcatccctcctacaacggtgcttattgtgaatttggtagggattgttgccggggtgtcctatgccata

SEQ ID NO: 190966 - DNA, 269 bp, Glycine max
ctgagaaaggatctctatctacgaaggagcggaataaaacccttctctctgtgattaagagaatggcttcagatcggaaacttcacacttttgaggaggtggcaaagcacaaccagaccaaggattgctggctcatcatttctggcaaggtgtatgatgtcacccctttcatggaggatcatcccggaggtgatgaggttttgttatctgcaacagggaaagatgcaaccaatgactttgaagatgtggggcacagtgattctgctaga

SEQ ID NO: 190967 - DNA, 269 bp, Glycine max
gtggttgcggaactcctgcaagtgcggcaacggctgcggaggctgcaagatgtacccagacttgagctacactgagtcaaccaccaccgagaccttggtcatgggagtggcacctgttaaggctcaatttgagggtgctgaaatgggtgtgcccgctgagaacgatggctgcaaatgtggaccaaactgctcctgcaacccctgcacttgcaagtgaggtgttgggagagcaagcttcaagcagagatagcccttaattaggaataatg

SEQ ID NO: 190968 - DNA, 234 bp, Glycine max
gctgatatcctcgttctctctgccagagatggcattgtttcgctaggaggtccccatatccctcttaagagcggaagaagggatggtagaaggagcagagctgatgtggttgagcagttcctcccagaccacaatgagtcgatttctgcagttcttgacaagtttggtgccatgggaattgacacccctggcgtcgttgcactgcttggagcacacagtgttggtcgaaccctt

SEQ ID NO: 190969 - DNA, 265 bp, Glycine max
aagaaagatgaaaatggcaaactttccagttgttgacatggggaaacttaacaccgaagagagagcagcagccatggagattataaaagatgcctgtgagaactggggtttctgtgagttggtgaaccatgggatatccattgagttgatggacactgtggagaggctcacaaaagagcactacaagaagactatggagcaaaggttcaaagaaatggtggccagcaaagggcttgagtcagttcaatcagaaatcaatgacttg

SEQ ID NO: 190970 - DNA, 149 bp, Glycine max
gagctatggcgcaagaagcagtctgatgttatgagattcttgcagcgggtgaggtgctgggagtaccgccagcaaccttctattgtccgtttgacaaggtctactcgcccagacaaggctcgccgcttgggtttcaaggctaagcaggg

SEQ ID NO: 190971 - DNA, 229 bp, Glycine max
  unsure (1)..(229): unsure at all n locations
ctcatagttagttcgacgcggcggttgcagaagaagattgcaagatgaagttcaacatcgcgagtcccaccactggatgccttcanaagctcgagatcgacgacgatcagaaactacgagcattttgggacatgtggatctcacaggaggtcagcggagatgcacttggtgaggaatttaagggctatgtcttcaaaattactggaggttgtgacaaacaaggattccc

SEQ ID NO: 190972 - DNA, 242 bp, Glycine max
ctcttatttgcttcttcgagtttcacagccaagtcgtaatagggtttcaagggatggaaaacatgcagagcttctggcaattgggtgatgaactccgtgggcactcaaaagcatcggaggatcacaagtggttaatggttgcctcgaaactggccgaacagacaagattgaagggggagcgtgtgaacaaccttgatctttcaaagggacccattgaaaacaggtcaagggataaatttggg

SEQ ID NO: 190973 - DNA, 262 bp, Glycine max
cgaagggattatagccgcgcaaagtaccgccttgaacacattgttcgcacgcataagggcttcgatgaccgcagcttcacgtgtgtgtaccaagaggaagatgagcaaaaactaaaggcactaaagatcagcaaagacttaattgatattggtggtgatgctctaggaggcaacatcaccacactcggacccttggtgctacccttttctgagcagcttctcttctttagcacccttgtgtggaggcactatttggcagcaa

SEQ ID NO: 190974 - DNA, 233 bp, Glycine max
atccttatcctgtttctttcaatggaagtcatttctgcttctagcttgaatcccaacgctccgatgttcgtgccactcgcctatcggacggtggaggatttcttcgaccaatggtgggacctcgttcactcctccccctggttccgcgactactggctccgcgagtgcttccaagatccccagttccaaaacgacgacgctttcgaattcgactttgaccagatctcccagat

SEQ ID NO: 190975 - DNA, 263 bp, Glycine max
ggcccttgagcttcagtctcgagcccatactcgtgaaataatgactgaggttcttaaagctttgcaagaattaaacgtttgtaggaagaagattggtcactacaacatgaagtgtaggtgggttgctggcattcacggtcaccacgaaggaatggataacaacaatgtgcatactaatcattactttggagatgattccaacattattgagaatgatgctgtttctacttcaaatgtggtcaagtttgaagtgacactttaca

SEQ ID NO: 190976 - DNA, 263 bp, Glycine max
cagaacagcaacgttaacaatgggttctcgctacgaggttgaactgaagctctcatcggcacgcgctctcaagaacgtgaactggcgccattgcccgaaccgcccatacgtcgtcgtttgggtcgacccaagcaacaagctctctacgcgcgtggacgaaagcggcgacactgacgcgaattgggaccaaacgctcacaattccgttgccaccaaagcctctcgaggatcaaacgttgtacatcgacgtggtccacgccggct

SEQ ID NO: 190977 - DNA, 264 bp, Glycine max
acagcctccaaatccaatggcttcagagaagaaactttcgaacccaatgagggagataaaagtgcagaagctcgtcctcaatatctctgttggcgagagtggagatcgtctcaccagagccgccaaggtgttggaacaacttagtggccaaaccccagtgttttccaaagcacggtacactgttcgttcctttgggattagaagaaatgagaagattgcatgctatgtcactgtcagaggtgccaaggcaaggcaacttttgga

SEQ ID NO: 190978 - DNA, 269 bp, Glycine max
agatgatcttaaagatggctaggatggttcagaagaacaagctgtgattggattatggagtggcattgcttggttggttggaatgactgtattcattgctgtgttgtcagaatatgtggtggatacaattgaggacgcatcagattcatggggtttgtctgtgagcttcctaagcataatcttgctgccgatagttggcaatgcagctgaacatgcaggagcaatcatatttgccttcaagaacaagctggacatctcattgggtgttg

SEQ ID NO: 190979 - DNA, 257 bp, Glycine max
atccgcggcaggacggtaaccctccaacaacaacacttcccatgcgaaaaatgtctctggtggcgaacgaggatttccagcacattttgcgtgtgctgaacaccaacgtggatgggaagcagaagataatgttcgcaatgacctccatcaagggtattggaaggagattcgccaacatcgcttgcaagaaggctgatgttgacatgaacaaaagggctggtgagttgactgctgctgagttggatactgtgatgact

SEQ ID NO: 190980 - DNA, 264 bp, Glycine max
ttttgaactccttttttctcttctcaaaccaaaccaagcaagcaattatattacactactcactctatgagaccatggctcctaatatcaccaccgtcaccgactctcaagccaatgccgccggcgggcgtggccgtgcctacgtcaccttcctcgccggaaacggtgtctatgtgaaaggtgtcgttggcttggccaaaggtctgaggaaggtgaaaagcatgtaccctctggtggttgcagtgttacccgatgttccagaac

SEQ ID NO: 190981 - DNA, 265 bp, Glycine max
gctgcgatgaaacccaccaagccagggttggaggagtcccaggaacagatccataagataaggatcaccctttcttccaagcacgtcaaaaacctcgagaaggtttgtgcggacttggttcgtggtgcaaaggacaagcgcctcagggttaagggacctgttaggatgcccactaaggttcttcacatcactaccaggaagtccccctgtggtgaaggtaccaacacatgggatagatttgaacttcgtgtacactagagagtga

SEQ ID NO: 190982 - DNA, 297 bp, Glycine max
ggcattcggctcgagattcctcatggagctaagctacatgcactaattgatgcctgccatagtggcactgttctagatttgccatttctttgcagaatgatcaggagtgggcaatatgtatgggaggaccatcgccctagatctggtgtatggaagggatctagtggtggagacattatctgcttcagtggatgcgatgatcatcaaacttcagctgatacatctgctctatcgaagattacatcgactggggcaatgacattttgcttcatccaagccatagagggtggtcatggg

SEQ ID NO: 190983 - DNA, 142 bp, Glycine max
cttcctcagtagtgcgattttcgattctcttctctgcaactatgcctaaccctaaggtcttcttcgacatgaccatcggcgttcaacctgccggccgcatcgtgatggagctctacgccgacgtgactccgagcaccgccga

SEQ ID NO: 190984 - DNA, 180 bp, Glycine max
ttcggctcgagggagcagtttcgactggggataacactgctgattgggatcacctaagagtttctatcccaatggttttgacccttggtcttactgggatgtcattctctggtgctgatattggtggattttttgggaatcctgaacctgagttattggttcggtggtatcagctaggag

SEQ ID NO: 190985 - DNA, 281 bp, Glycine max
aagctcaatgaagcaggagaagtggtttaaaacaaggctagactggttgtttaagaatacaatcaacaagtaattgactatgaataaacctttgcaccagtaacaatacttgaagccattagaatactctaagcttatgctggacaccaaacacatcaaactgtaccaaatggatgttaagaatgcctttctaaatggattcataaatgaagaggtgtatgtgaagcaaccactaggatttgaagataaagaaagaccttgtcatgtgtacaagcttatca

SEQ ID NO: 190986 - DNA, 277 bp, Glycine max
ctcgagccgcttttgggtattgtgggaagcccatttgtgtgcagggtccagattgccctacagttgaagggagttgaatacaaatttttggaagaaaatttgggcaacaagagtgatttgcttctcaaatacaaccctgttcacaagaaggttccagtgtttgttcacaatgagcagcccatagcagagtctcttgtgattgttgaatacattgatgagacatggaagaacaaccccatcttaccttctgatccttaccaaagagccttggctcgtt

SEQ ID NO: 190987 - DNA, 227 bp, Glycine max
atgataccaggggaaagaccgttacttgcaaagctgccgtggcatatggtcctggagagccctttgtggtggaacgtgttcttgttcatcctcctcagaaaatggaggttcgaatcaagatcctcttcacttcaatctgccacaccgatctcagtgtctggcaaggcgagaatgaggctcaacgtgcatatcctcggattttcggccatgaagcttcggggattgtg

SEQ ID NO: 190988 - DNA, 277 bp, Glycine max
caaaggcagtcaaagacatgggttcctctatccataaatgatggaactacttctcataccatgggaagtaaatattctaatggcacaacactgagtgctgcttcaaactttgagtaccgtgtcccttttgtggcggttcaggaggctacaaataatttcgatgagagttgggttattgggataggtggtttcggaaaagtgtacaagggagagttgagtgatggcacaaaagtggcagttaagagggggaatccacggtcccagcagggtcttgcag

SEQ ID NO: 190989 - DNA, 230 bp, Glycine max
gttctcagatagggcacgtctctcgcggcctcttctctcccctcgcgccgcctacacaaaaaggttattgctctattattgtttgacgatggctgatgctcatgggactgataagaacattgaggtgtggaaaatcaagaaattgatcaaagctcttgaggctgccagaggaaatgggacaagtatgatttcccttatcatgcctccacgtgatcagatatctcgtgtca

SEQ ID NO: 190990 - DNA, 274 bp, Glycine max
gcttgtctcaaagattaagccatgcatgtgtaagtatgaactaattcagactgtgaaactgcgaatggctcattaaatcagttatagtttgtttgatggtatcttctactcggataaccgtagtaattctagagctattacgtgcaacaaaccccgacttctggaagggatgcatttattagataaaaggtcaacacaggctctgcctgttgctttgatgattcatgataactcgtcggatcgcacggcctttgtgccggcgacgcatcattca

SEQ ID NO: 190991 - DNA, 186 bp, Glycine max
atcttcccggaatcgtgcatacctacgttcaatatgtcgctggtggcaaacgaggatttccagcacatacttcgtgttttgaacacgaacgtagatgggaagcagaagataatgttcgctcttacctcaatcaaaggtattgggaggcgattttctaacatttgctgcaagaaggctgatgttgac

SEQ ID NO: 190992 - DNA, 118 bp, Glycine max
ctaaaccccgttttcggtgagatcgagatcgatcgaacatggatgaggagtacgatgtgatcgtgttgggcacgggtctcaaggagtgcattctcagcggtcttctctctgtcgatgg

SEQ ID NO: 190993 - DNA, 129 bp, Glycine max
cggcattaaaaatgcagatcttcgtgaaaaccctaacggggaagaccataaccctcgaggtcgaaagcagcgacaccattgacaatgtcaaggctaagattcaagacaaggaaggcatccctccggatc

SEQ ID NO: 190994 - DNA, 178 bp, Glycine max
gctaggtggtggtgattagtgtacatatatatatggttgaagtgggtatttatcagatccctacgagcactttcgacccatttgcggaggcaaaagaaacagatgctcccggggcaaaagagtatgtgcatatccgcatacaacagaggaatgggaagaagagtctgacaacagtgca

SEQ ID NO: 190995 - DNA, 122 bp, Glycine max
gcagcccccgaaggagcactagaggtacaacttgaagaagctgacttatgaggagaggaaggctaagttgattgcacgtgtggcgtctctcaactctgctgctgataacgttgaagttgatg

SEQ ID NO: 190996 - DNA, 272 bp, Glycine max
ggagtgcaaaagtcttggtcaaaggcgaaccaaacatatcttatatctgctctatagtacctagaacagatataagatctgttctaggtactatagagcacctgagcttatatttggtgcaactgagtacaccacggccattgatatctggtcagccggttgtgtacttggtcgtctattgcttggccagcctctattccctagtgagagtggagtagatcagcttgttgaaattatcaaggttttaggaaccccgacaagggaagaaatca

SEQ ID NO: 190997 - DNA, 261 bp, Glycine max
  unsure (1)..(261): unsure at all n locations
atggcgggtagggtttcgacgtgcttcttcttcgtgtttgctctttctctccttcttccttttcagatctccgctgaggaatcatcggagaaagagttcgtactcacattggatcactctaactttcatgacactgtcagcaagcacgatttcatcgtcgtcgagttctacgctccatggtgtgtcncatgtaagaagcttgctcccgagtatgagaaagctgcttctatcttgagtagtcatgatcctccggttgttttg

SEQ ID NO: 190998 - DNA, 274 bp, Glycine max
cctcgagccgaatcggctcgaggattaagccatgcaagtataagtatgaactaattcagactagtgaaactgcgaatggctcattaaatcagttatagtttgtttgatggtatctactactcggataaccgtagtaattctagagctaatacgtgcaacaaacccggattctggaagggatgcatttattagataaaaggtcaacacaggctctgcctgttgctttgatgattcatgataactcgtcggatcgcacggcctttgtgccggcgac

SEQ ID NO: 190999 - DNA, 260 bp, Glycine max
  unsure (1)..(260): unsure at all n locations
gcaatcattgctgaagaatctaagcaatttgaagcttggagggactcgctggaaactgttcctactattaagaaattgagggcttatgctgaaagnntcaggcttgctgagcttgagaagtgcttaggtaagatggggntgtttncccaagaaaaccggggnncccnngggngnnnccncnananccgggnnaaantnaaacagtcgctnnagggcccnantgcaattttnaagggttnnaggggaaccnannggggggc

SEQ ID NO: 191000 - DNA, 124 bp, Glycine max
gtgaggagaatatgaagttgtttgttttctttgttgctgcagtagttttggtagcatggccatgccatggcgcaggctaccaaaggttccctctccgaatgaaaactggctatggtgagcgttc

SEQ ID NO: 191001 - DNA, 270 bp, Glycine max
  unsure (1)..(270): unsure at all n locations
gcgcttaganaaaagaggggnaactgggtnaggaatattcannacttttgcacgagttcatgactgctgtcaannaaaactacggngaaaaagtncttgttcagtttgaagattttgcaaaccacaatgcttttgagttgcttgcaaaatatggcacaactcatcttgttttcaacgatgatattcaggggactgcatctgttgttcttgctggggttgtggcagccttgaagctcatggaggtactctggctgaccacacatcttgttt

SEQ ID NO: 191002 - DNA, 276 bp, Glycine max
atttgcgtttcatttggcgttttgtttctttctggaagcttcgttcgggcatcaatggcgtccttcgatgaagctcctcccggaaactccaagaacggcgagaagatcttcaaaaccaagtgcgctcagtgccacaccgtcgacaaaggtgccggccacaaacaaggacccaatctgaatggtttgtttggaagacaatctggtacaactcctggatattcctattctactgctaacaaaaacatggccgtgatttgggaggaaaagaccctctat

SEQ ID NO: 191003 - DNA, 166 bp, Glycine max
atcaggaagccgtgcaggatagagaccacaaatttttaagaaaagctgttgaagaagcatataaaggggtagattgcaaagatggaggcccttttggtgctgttatagttcataatgatgaaatagttgctagttgtcacactatggtcctgtgaaccacacccca

SEQ ID NO: 191004 - DNA, 105 bp, Glycine max
  unsure (1)..(105): unsure at all n locations
atcctccatggcctccaccagggaacgttgatatntcgtctacgtcgccaagctcgccgaacaagccgaacgctaagttgaaatggtggaagcattgaagaatgt

SEQ ID NO: 191005 - DNA, 122 bp, Glycine max
  unsure (1)..(122): unsure at all n locations
cttgaatcgtcggtatccttctttttttcgccttgaactcgaatagtcactatggcagatgatgtggntctgctagatttctggccaagtccatttgggatgagggccaggattgcatttgc

SEQ ID NO: 191006 - DNA, 197 bp, Glycine max
taggttactctgctgttaatcagggacactgccatcctataattctgaaagcattgcaagaacaggcagaaaggttgactgtgagctctcgagccttctacaatgatcgcttcctagactttgctgagtatgtgacaaacatgtttggttatgatatggtacttcctatgaataccggtgctgaaggtggtggaaac

SEQ ID NO: 191007 - DNA, 146 bp, Glycine max
cgctgtaaccgagggtcaccccgacaatctgtgcgaccagatctctgatgcagtgctcgatgcgtgccttgaacaggaccctgacagcaaggttgcctgtgagacatgcaccaagaccaacatggtcatggtctttggagagatca

SEQ ID NO: 191008 - DNA, 121 bp, Glycine max
agcgtatatcaatcaagcagagattggttctgctcttaagaagctttttgatgatggtgtgccgaagcgtgaggacttattgatcaactccaaactctcgtgttcagttcatgcttcagaa

SEQ ID NO: 191009 - DNA, 198 bp, Glycine max
  unsure (1)..(198): unsure at all n locations
gggcaaggtcaagatcggaatcaacggatttggaagaattggccgtttggttgccagantcgctctgcaaagagacgatgtggagctcgttgccgttaacgaccctttcattaccacngattacnngncanncnttttaananagnanttttccgcgnnnccggcnacaccnatggncnacananngaggggggnaag

SEQ ID NO: 191010 - DNA, 251 bp, Glycine max
tgacaccgggggtttgagcagagagacttttccgaaaggcttcatattcggaacggcgacgtctgcgtaccaagtggagggtatggcccacacagacggtcgcggcccaagcatttgggacctcttcatcaaaaaacccgggattgttgcaaataatggcacgggagaagtttctgttgtccagtaccatcgctacaaagaagatatagatctcatggccagcttgaattttgatgcctaccggttctcaa

SEQ ID NO: 191011 - DNA, 270 bp, Glycine max
tacccctcttatccacaaagccaaggatgggaatttcctggtattggcgaatttcagtgctatgacaaatatttgaaggcagatttcaaagcagctgtagcaagggctggccatcctgaatgggaactgccagatgacgcaggcaagtacaatgatgtcccagaatctactggattcttcaaatcaaatggcacgtatgtcactgagaaagggaagttcttcttgacctggtattctaacaaattgctgaatcatggtgatcaaatacta

SEQ ID NO: 191012 - DNA, 269 bp, Glycine max
ctccgcaccagtttcaccgcacgaatatcttgttgtttggagcgatccgagaaaaactctgtaaacatgttggtttaccaggacctccttacaggtgatgagcttctctctgactccttccgttacaaggaaattgagaatggaatgctgtgggaagttgaggggaagtgggttgttaaaggagcagttgatgtagacattggtgcaaacccttctgctgagggtggaggagaagatgagggagttgatgatgcagctgttaaggttgt

SEQ ID NO: 191013 - DNA, 271 bp, Glycine max
ggagctagagaatgatgatgaagtctgctatgtgtgcagtggtggttgtagcacttcttcttctggcggaggtggggcccatggctgaggctgtgacatgcaccccaacagagttgagtccgtgtcttccagcaatcacttccggtgctaaaccttccaatgcttgttgcacgaagctgaagcagcaaaaaccatgcttatgtggctacctcaaaaacgctagcttgaagcagtatgttaactctcctaatgcccgaaaaaccgttgcttc

SEQ ID NO: 191014 - DNA, 269 bp, Glycine max
gaaattcgatccaaaaactgtggagctgattgtaacaacttaccaggcttcggcattgcttctatttaattcctcagatagactgagtaattcggagataatgtctcagttaaacttatctgatgacgatgttattagactgctccactccttgtcatgtgccaagtacaagattcttaacaaggaaccgagaacgaaaacaatatcttctaccgactattttgaatttaattcaaaatttacagacaaaatgaggagaatcaagattc

SEQ ID NO: 191015 - DNA, 285 bp, Glycine max
ggaattctgctcgagattgcagggatggaaaagccgtatgcatcaatacgcagaaaatgcttgtacggttatttaatattattttttttgcccatttttttattttcttatttgtatttatcccttttacctttatttgggaataaggataatctttaccaatataggagaaatcattatcaaaatctttatcaagataagggaaatacttattaagttataaaatcagggtaatgatccaccaacccgctagttctttttatgaggcacaaacgggagaattta

SEQ ID NO: 191016 - DNA, 269 bp, Glycine max
cggctcgagcttgagagcgagaaaccacgtttctctcttgaggttaattattattattattgagtattgagcatggaggcgccatctctcaccaaacccaacgacccaacaaaaccttccaacacttccagcaggggtagtctggagggggggccgggcgaagcgagcccactccgaaaaatgtttgcggtggcgtacatcgccgccggcatacagttcgggtgggctctgcagctgtctctcttaaccccctacgttcagctcttagg

SEQ ID NO: 191017 - DNA, 268 bp, Glycine max
gctccggctcttgccgctaagaagaagcctgagaaggtttcgaatccgttgttcgagaagcgtccaaagcagttcggaatcggaggggcgttgcctccgaagagagacttgactcggttcgtgaagtggccaaagaatgttcaaattcagaggaagaagaggattctgaagcagaggttgaaggttcctccagctttgaaccagttcaccaaaactcttgacaaaaacatagcaacaagtctgttcaagttacttctgaaatacaggc

SEQ ID NO: 191018 - DNA, 268 bp, Glycine max
gaaaagatggctcagcaggaagtggtagaagggttcaagttcgaacagaggcacgggaaagagcgcgtgagagtggcgcgcgtgtggaagacgaggcaggggcagcacttcgttgtggagtggcgcgtgggcatcactctcttctcagactgcgtcaactcgtatctccgcgatgacaactctgacatcgttgctactgataccatgaaaaacacagtgtatgcaaaagcaaaggaatgctcagacatactctctgctgaggactttg

SEQ ID NO: 191019 - DNA, 266 bp, Glycine max
cggctcgagcatggtttgtgaaattctgcgttccctggtgcaagcattgtaagaacctgggttctttgtgggatgatttggggaaggcaatggaaggagaagatgaaatagaggttggagaagtcgattgcggcatggacaaagcagtgtgttccaaagttgatattcattcatatcctacctttaaggttttctatgatggcgaggaagtagccagataccaaggtacaagagatgttgaatcaatgaaaacctttgttttggaa

SEQ ID NO: 191020 - DNA, 250 bp, Glycine max
  unsure (1)..(250): unsure at all n locations
gcgccctctcgaggacgactgccagctccagatcttcaagttcgacgacgacgaaggccgcgacaccttctggcactccagcgctcacattctcggccagtcacttgagtcggagtatggatgcaagctatgcattgggccttgcactacacgtggagttcggttctattatgatgcgttttacggggacttgggtctcaatgacgatcactttaagcagcttntggctggagcattgaaggctgttgcg

SEQ ID NO: 191021 - DNA, 267 bp, Glycine max
aatcccctcatattatctctctctctcttaaaccatcatgtcctccaccgcgcctcccgtcctccccatctccaactcccaaaccaccgcgggaaccaccggtgcaggcggcggcgccatcgaggctccggccaacaacccggccttccgcgctttcatcaacaacctctccaactccctccgccacggcctcgaccagcgccgcccctggtcggagctcgcggaccgctcagcgttctcgaaacccgagtccttctccgaagccac

SEQ ID NO: 191022 - DNA, 267 bp, Glycine max
gcatcatggcctcaagagcagtgttattgttggctatgtgtgtgcttccggcgatggttgtggccattcgcccagcaaagaaccctttttgcgtgaagggtcgtgtctactgtgacccttgccgtgctggttttgagacctcagctaccacctacattgctggtgctgagattatgttgcaatgcaagagcagggttagcaacgaggttgtgtacacgaagaaggggtacaccgactcaaccggagcatacacaatgtacgtggatg

SEQ ID NO: 191023 - DNA, 260 bp, Glycine max
caattttcaggctccgcttttgggacaagtaaagacagaagttgcacatttaatggccctgccaacctacgtgctggaactaataaaatagcacttcttagtgtagctgttggattaccaaatgttggattccattttgaaacatggaaggctgggatcactggagttttgcttaatggacttgatcatggacaaaaagatttgacttggcagaagtggtcataccagattggtctaagaggagaggctatgaatttggt

SEQ ID NO: 191024 - DNA, 265 bp, Glycine max
gggtgcaccagagacagagttttttaccgagtatggagaggcaagacaatatcagatccaagaggttgttggaaaaggtagttatggtgttgtgggttctgccattgatactcacacaggtgaaaaggttgcaatcaagaaaatcaatgatgtttttgagcatgtatctgatgccacgcggatccttagagaatttaagctcttgcggttgcttaggcatcctgatatcgtggaaattaagcatattatgcttcctccttcacgg

SEQ ID NO: 191025 - DNA, 266 bp, Glycine max
gaaaaagaaaagttagggttagggattttgagagatggcatcgactaagaagatcaccctgaagagttcggacggtgaggccttcgaggtggaggaggcggtggcgctggagtcgcagacgatcaagcacatgatcgaggacgactgcgccgacagtggaatccctctccccaatgtcaccagcaagattctggcgaaggttatcgagtactgcaagaagcacgttgaggcgaacagtgctgatgagaagcccagtgaggatgtgc

SEQ ID NO: 191026 - DNA, 261 bp, Glycine max
gttaaagatcagggtcactgtggttcttgttgggcatttggtgctgttgaatcattgtcagatcgcttttgcattcattttgatgtaaatatctctctctctgttaatgaccttcttgcatgctgtggctttctgtgtggatctggttgtgatgggggatatcccttgtatgcgtggcaatacttagcccaccacggtgttgtcactgaagagtgcgacccatattttgatcaaattggctgttctcatcctggttgtgag

SEQ ID NO: 191027 - DNA, 263 bp, Glycine max
ctagtttatcgtgaggagaatatgaagttgtttgtattctttgttgctgcagtagttatggtagcatggccatgccatggcgcaggctaccaaaggttccctctccgaatgaaaactggctatggtgagcgttcttcggaggtaaaatgcgcaagttttaggcttgctgtggaagcacacaacatccgagtacttaaaaccatacctgaagagtgcgttgaaccaacaaaggactacattaatggcgaacaatttagatcaga

SEQ ID NO: 191028 - DNA, 264 bp, Glycine max
ggcggcttgactcgagacatctgttggtatgtcaatggcaaagaaacccgtgaaatactatgtggtggacgcgtttactgagtcagcattcaaggggaaccctgcatctgtgtgtttcttagaggaagagagagatgaggagtggctgcaagcagtagccgctgaattcaatatctctgagacttgttacttatcacgcatcacccactcgctccatggaatctctaatccccgttttcgactcagatggtttactcctgttgc

SEQ ID NO: 191029 - DNA, 266 bp, Glycine max
gaaggcattctcctgggcattggtaaccctctcctcgacatctccgccgtcgtcgaccaagacttctttaaaaaatatgatatcacctcaaacaatgcgattcttgcggaggacaagcacacgcctatgtttgaagaattggttgagaaatataatgtggagtacattgctggaggtgccactcagaattcaatcaaggttgctcaatggatgctccaagttcctggtgcaacaagttacatgggtggcataggaaaggataagtt

SEQ ID NO: 191030 - DNA, 265 bp, Glycine max
  unsure (1)..(265): unsure at all n locations
ctcgagcctctcgagccgcttctttcttcttatatatcgaacatggctaagtatcattcaagtgggaatagctcttccatgactgctatagccttcctgtttatccttctaatcacttatacaggcacaacatttgttcaatccggggtatgttatggaagacttggcaacaacttaccaacccctcaagaagttgtggccctctacaatcaagccaacattcgcagtatgcgnatctacggtccaagcccagtagtcctcgaag

SEQ ID NO: 191031 - DNA, 257 bp, Glycine max
cttctagcccggattctgacttagaggcgttcagtcataatccaacgcacggtagcttcgcgccactggcttttcaaccaagcgcgatgaccaattgtgcgaatcaacggttcctctcgtactaggttgaattactattgcgacactgtcatcagtagggtaaaactaacctgtctcacgacggtctaaccccagctcacgttccctatttgtgggtgaacaatccaacacttggtgaattctgcttcacaatgcga

SEQ ID NO: 191032 - DNA, 266 bp, Glycine max
actcgagccgaatcggctcgaggttccgttccgttttcctctgtacttatttttctttcttacaaatccccgcttcgtggacatcccgaaccagaaaccatgcttctccgaaccgctgctgcttctgcttcgtccctctccctcttcagcccgaacgccgaacctccccgttcggttcccgctcgtggattggtggttcgcgcagcaaaggatccacgaaccaccgcgccctgaccggagtgatttttgaaccgttcgaagaggtg

SEQ ID NO: 191033 - DNA, 215 bp, Glycine max
ttggtggatatgggtagcctcaacggaacactgttgaattctacgccgatcaaccatccagacactggaagtcaggaatcaggggatccaatgaatcttactaatggagatactataacacttggatcaacatcaaaagtaatggttcatattacatcacaaactcagcatcacattccctttggacttggtatggcatcagatccgttggcttt

SEQ ID NO: 191034 - DNA, 263 bp, Glycine max
gttgtgaactgaacaacatatatattctaagctctttgaacttatccttcactgatcagattcagagaaatggaaaacatcaaagatccatcaatttaccgcaatccagtcatattgcagagcgaggacttaaccaagtatattctggaaactgctgtttaccctagagaacctgcgcctctaaaagagctgtcggaagccactaataatcacccttggggcttcattgctactttacctgaagcgggtcagctaatgacctt

SEQ ID NO: 191035 - DNA, 262 bp, Glycine max
attttggtagcatggcaatgccatgcgtacgatatgttccctctccgaatgaacactggctatggtgcacgtactccggaggtgaaatgcgcaagttggaggcttgctgtggaagcacacaacatctttggctttgagaccattcctgaagagtgcgttgaagcaacaaaggaatacatccatggcgaacaatatagatcagactccataacagttaaccaacaagcttacttttatgccagagacctcgaagtccatccca

SEQ ID NO: 191036 - DNA, 262 bp, Glycine max
ctttgatgactacatcaacgactctagacagagcaggggatcctcttctagcccagcaaacttctgaatcagaagctatgaggctggtcaaagctactccttttgattatgggagtggtcatgttgatccaactgctgcattggaccctgggctcatctttgatgcagggtacgaggattatataggcttcttgtgcacaacacctagcattgatgttcatgagataaggaactacactcacaccccatgtaacacctccat

SEQ ID NO: 191037 - DNA, 263 bp, Glycine max
  unsure (1)..(263): unsure at all n locations
tcatgctccacaacaacaacactgggcgatgataacaacaaaaccagcactaacactgggttagggtacatttcatgganagtgancaanntcnnnnnnnnnnnnnnnnnnnnnnnnnnnnnnnnnnnnnnnnnnnnnntgctgtcaaggccaagatcatggctcatcctcactatcaccgtctcttggcagcttacgtcaattgtcagaaggttggagccccaccggaagtggtggcaaggttagaagaagcatgtgcttct

SEQ ID NO: 191038 - DNA, 262 bp, Glycine max
agatggcaaaagcaggaagcagcattaacagatgagcaagatggtctctcaatggaacgacggctctcgtcaccggcggcacccgtgggatcgggcacgccatagtgagtgacttggccgcgtttggcgctgctgtgcacacttgctccaggacccaaacagagctcaacaaatgcttacaagagtggcagagtctgggctttcaggtaactgggtcggtgtgtgacgtgtcctcaccatcccagagagagaagctcattga

SEQ ID NO: 191039 - DNA, 256 bp, Glycine max
ctccgcaccagtttcaccgcacgaatatcttgttgtttggagcgatccgagaaaaactctgtaaacatgttggtttaccaggacctccttacaggtgatgagcttctctctgactccttccgttacaaggaaattgagaatggaatgctgtgggaagttgaggggaagtgggttgttaaaggagcagttgatgtagacattggtgcaaacccttctgctgagggtggaggagaagatgagggagttgatgatgcag

SEQ ID NO: 191040 - DNA, 257 bp, Glycine max
cgggacgtggcggctgacggctacgttagggagtccggagacgtcggcgggggccccggaaagagttatcttgtctgtttaacagcctgcccaccctggaaacggctcagccggaggtagggtccagcggctggaagagcaccgcacgtcgcgtggtgtccggtgcgcccccggcggcccttgaaaatcctcaggaccgagtgcctcccacgcccggtcgtactcataaccgcatcaggtctccaaggtgaacagcc

SEQ ID NO: 191041 - DNA, 261 bp, Glycine max
tggatcagcatgacgtggctgaagggttcaagttcgaacagaggcacgggaaagagcgcgtgagagtggcgcgcgtgtggaagacgaggcaggggcagcacttcgttgtggagtggcgcgtgggcatcactctcttctcagactgcgtcaactcgtatctccgcgatgacaactctgacatcgttgctactgataccatgaaaaacacagtgtatgcaaaagcaaaggaatgctcagacatactctctgctgaggactttg

SEQ ID NO: 191042 - DNA, 262 bp, Glycine max
tccatacatagccactttacactcactcttgtgttgttgccttcatggccaagccagtgtccattgaggtatggaacccaagtggcaaatacagagttgttagcaccaaaccaatgcctggaactcgttggatcaatcttctcgttcaaaatgatgttcgccttgaaatatgtaccgagaagaaaacgattctgtcagttgaagacatcattgctttgattggtgataagtgtgatggagttattggacagctgactgaaga

SEQ ID NO: 191043 - DNA, 258 bp, Glycine max
catcgagccgattcggctcgagcggcgatctcctcttcacctgcgccaagcaccacaacccaaccgtccggtttgccgacaatcgcgaacgcttgggcacttatcgccgccacaacggcgccgtttcgacctgcgacgtctcaagagattcggttcgtctgatcacgggtagtgccgatcagaccgccaagctatgggacgtgcaaagcggtctgcaattgtacaccttcaatttcgattcccctgccaggtccgtcg

SEQ ID NO: 191044 - DNA, 258 bp, Glycine max
tcgaagatgataactatgatctcgcctacgacctcttaactcaggccattggtctcagccccaacaacgcagacctatatgctgaccgtgcgcaagtcaacatcaaagtcaacaacctcaccgaggctgtttctgatgcaaacaaggcgattgagttgaatccttctcactcaaaagcatatttgcgaaaaggtaccgcatgcatcaagcttgaggaatatcagactgctaaggcagctctagagatgggtgcttcat

SEQ ID NO: 191045 - DNA, 261 bp, Glycine max
aggttgctgcagtagttttagtagcatggccatgccatggcgcaggctaccaaaggttccctctccgaatgaaaactggctatggtgagcgttcttcggaggtaaaatgcgcaagttttaggcttgctgtggaagcacacaacatccgagcatttaaaaccattcctgaagagtgcgttgaaccaacaaaggactacattaatggcgaacaatttagatcagactctaaaacagttaaccaacaagctttcttttatgcta

SEQ ID NO: 191046 - DNA, 259 bp, Glycine max
ctcgagccgcagagaagaaggacggcgtgtgttatatgagtcgaatcctccctcatatggaacacgtcaagcttcgccacattctctctcagttcggcgatattcaaagaatttttctcgctcctcaagattcttctgtccaagtgcctgctaagaggtcacgtggatcccgagaccaagcatattcagaaggatgggtcgaattcggtaataaaagtgttgctaagagggctgccaatatgttaaatggtgaacaaat

SEQ ID NO: 191047 - DNA, 263 bp, Glycine max
gtgatcatggacgtctcttattcatgcaatgaacaacaagcccccgagatcgttttctttgatttggaaactacagtgcccaaaaagggtggagagcgtttctgggttctggagtttggtgcaattgtggtcacaccccacaaactcaccgagattgagagctacaccacgctgataagacccaaagacctatctgtggtgtcagtgaaatccagcagaagtgatggaataactcgtaaagctgttgaaaatgcaccatcttt

SEQ ID NO: 191048 - DNA, 254 bp, Glycine max
cggctctagatagcaagtagatcttcttgtatagagcgatccgagataaactctgtaaacatgttgggttaccatgacctccttacaggtgatgagcttctctctgactccttccgttaccaggaaattgagaatggaatgctgtgggaagttaaggggcagtgggatgctaaaggagcagttgatgtacacattggtgcaaacccttctgctgagggtggaggagaagatgagggagttgatgatgcagctgt

SEQ ID NO: 191049 - DNA, 162 bp, Glycine max
ggaaaagctcttccatgactgctatagccttcctgtttatccttctaatcacttatacaggtacaacagatgaacaatccggggtatgttatggaagacttggcaacaacttaccaacccctcaagaagttgtggccctctacaatcaagccaacattcgca

SEQ ID NO: 191050 - DNA, 178 bp, Glycine max
tcggaatcggccgagctcgagcgcacagttccggtttctcaagggggagttcgaaataccggggagtgacactacacaaatgtggccgttgggaagctcgaatgggacaattccttgggaaaaaggcttatgacaaggcagctatcaagtgcaatggaagagaggctgtgactaactt

SEQ ID NO: 191051 - DNA, 130 bp, Glycine max
tgaccggtgcggccttgatcattggcatttatgatgaaccaatgactccaggtcaatgcaacatggtagttgaaaggcttggtgattatctcattgaacagggtctctaatctttgcttaatgtcttgtt

SEQ ID NO: 191052 - DNA, 137 bp, Glycine max
cggctcgagaatggcgcaaccttcctcctcctcgaagcctgttgtccctctcctgaaggacgagctggacatcgtgatcccgacaatccgaaacctcgacttcctcgagatgtggcggcccttcttcgaaccttaca

SEQ ID NO: 191053 - DNA, 284 bp, Glycine max
ccacactctcactctctcctttacttctcttcctactcttctccctagtccaaggactcacccccaaatgtgacacccaagaccatggctcaacccttgaagttttccatgtgttcagcccatgttccccatttaggccatcaaagccactctcatgggcagagagtgtcctccagctgcaggccaaggaccaagccaggctacagttcctggctagcatggtggctgggaggtcaattgtgcccattgcctcaggaaggcaaattattcaaagcccaacttac

SEQ ID NO: 191054 - DNA, 142 bp, Glycine max
gtgaaaaaaccactgcgatcaatggcaacgatcaaggccgtgaaagctcgccagatcttcgacagccgtggaaatccaaccgtcgaagttgacgttattctcagcgatggaagcttccacagagccgccgtgccaagcggtg

SEQ ID NO: 191055 - DNA, 267 bp, Glycine max
  unsure (1)..(267): unsure at all n locations
gngccggnnanacgacgagcngcgagtgngtggcggcgtgggacgaggtggaggagctgagcgcggnggcgagcnacgccaantacaagcaaaaaggaaaaggantccgacccgctcgagacctactgcaaggacaatcnngagaccattgagtgcaaaactttcgaagattganaaanggttttaaggggcnanangngcnccaaaggcnannnaaaaaaaaaacannggagngncacgaagagaannaaatncggnacaaggnat

SEQ ID NO: 191056 - DNA, 185 bp, Glycine max
tcacgccgtttgaaaagctaattagaggctcgaagattctgccattggctggcgctgaatactcaaagaaggtgatggaaaactgcgtggcacacatgaagtctgttgggacttacggtgatgctgaagccgcagccattgaaaagtttgctgaagccttcaagaatgtgaattttgcacctggt

SEQ ID NO: 191057 - DNA, 185 bp, Glycine max
ctatgcccaccatgggtatttcaaggaggcaattaatctatttaatgaaatgcaagaattaggtgtttgtgctaatgatgtcacctttgttggacttctgacggcttgcattcatactggtttagttgaggaggggtttaaatactttgatgaaattctgaaaaacagatcgatacaactcagag

SEQ ID NO: 191058 - DNA, 201 bp, Glycine max
cttaccaacaccacttccaatggcttcatatcatgaagaagaagtcaggctattgggcaagtgggccagcccatttagcaacagagtagaccttgctctcaagctcaagggtgttccctacaaatactccgatgaagatcttgctaacaagagtgctgatcttctcaagtacacccccgttcacaagaaggttccggtttt

SEQ ID NO: 191059 - DNA, 141 bp, Glycine max
caatggtgtacgtcaaggctcagaaatcaaaagcctacttcaagagatatcaagtcaagttcaagagaagaagagagggggaaaccgattaccgtgccaggattcggttgattaatctggagaagagcacatatatcactc

SEQ ID NO: 191060 - DNA, 271 bp, Glycine max
ggaaaatgcttcgattgagctgaacaagtttgtgttcttttgtttgttggtgctaatacaagtggcagtttctgaaatcatttttgaagagcgttttgatgatggatggcgaggtaggtgggtgaagtcagactggaaaagcagtgaaggcaaagcaggttcattcaagcacacagctggtaaatgggccagtgatccagatgataaaggtattcaaacatccagtgatgcaatacactttgccatctctgcaaaattaccagaattcaca

SEQ ID NO: 191061 - DNA, 266 bp, Glycine max
atcaaatttaagttctcattatcaaggtgttttgatctgttgagggggtttaatactgaaaatgggacaagtgttaggtctcgtgtaagtggatcagtcaagtttgtccatcaaggaggttttcgggtcgtacgatgatgttctcgaacctggttgccactgtgttccatggtgtttcggcagtcgtgtggctggtgctctttctttgcgtgtcaaacagctagatgttcgctgtgaaaccaagactaaggacaatgtctttgtgc

SEQ ID NO: 191062 - DNA, 263 bp, Glycine max
gttaagaggttgaagagtattggcatgattgatagcgttcctggaatgaaggctttggatatgaatgctgcagaggatgctattgtgaggctcacgagggagattgtgcccggcatgattgtcaccggcatggaggtggcagaaattgatggctccccaaggatgggtccgacgtttggggcgatgatgatatcagggcagaaggcggctcatttggcgttgaaggcgttggggaggaacaatgcaattgatggaacgtgtgg

SEQ ID NO: 191063 - DNA, 221 bp, Glycine max
caatatatgtcatggcaggacaagaaattactggcaggatgcacttgattgctcacactgctcagagttatacgatctttttaacattgtcagctaaaacgtggggtcctggtgctgaacaaggagggattcttcaaacatcatcctgtaaacttgatctgaaagaaccttactatagaatgtctcaaccaccagcttatccattaacccaagatcagcaa

SEQ ID NO: 191064 - DNA, 227 bp, Glycine max
ggcgtacaatgggacactccaacgtttggaactctcacccaaaaaactacggtcctggttctcgcacttgccgtgtgtgtgggaatccacatggactgatcaggaagtatggccttatgtgctgcaggcagtgcttccgtagcaatgccaaggaaattggcttcatcaagtatcgctaaaagagcagttgtcaactacagaccaatattgtgttctggcactaggat

SEQ ID NO: 191065 - DNA, 175 bp, Glycine max
tctcgagccgattcggctcgaggatctcattacaatctcccaagtttctaatctcagctaagaacaaccaaaagatgtctctgattccaggtttcttcggtggccgaaggagcaacgtgttcgatccattctcactcgacatgtgggatcccttcaaggattttcatgttccact

SEQ ID NO: 191066 - DNA, 259 bp, Glycine max
ggacactttcaaaggctacgctaaaggcgcagaagataacaaggttggcttcacaacctacagcgctaacacaaacgctacctttaaagattacgccaaacacggcgtttcctttgctagttacaacgtctcttcggaatctaaaacagtcagtagcagtgtggtaaaaaggtgggttgaaccgggtaagttttttcgcgagaccatgcttaaggaaggcactgttatgcccatgcccgatataagggataagatgccg

SEQ ID NO: 191067 - DNA, 266 bp, Glycine max
gtgacccatagattctcaactaatgagaacactctcacccttggtacccagcatcagttggatccattgaccacattgaaggcacgtgtgaacaactttggaaggacaagtgctctgatccagcacgagtggcgtcccaaatcgttctttaccatttctggtgaggtagacaccaaggccattgaaaagagtgctaaggttggattgagtttggttctcaaaccctaagaattttgatccatcctggcaagagaattgagtaggtg

SEQ ID NO: 191068 - DNA, 162 bp, Glycine max
catgtctcagactgttgtcctcaaagttggtatgtcatgtgaaggatgtgttggagcagtgaagagagttctaggaaaattggatggtgtggaatcatatgacattgatttgaaggaacaaaaggtggtagtgaaaggaaatgtccagccagacacagttct

SEQ ID NO: 191069 - DNA, 139 bp, Glycine max
agagaaagtagctgatcctccatggcctccaccaaggaacgcgaaaactttgtctacaccgccaagctcgccgaacaagccgaacgctatgaagaaatggtggaagcaatgaagaatgtggcgaactgaacgtggaatt

SEQ ID NO: 191070 - DNA, 117 bp, Glycine max
cctggaatgctggtgttctaggcccaattacattaagtggtctcaatgagggtaggagggacttaacttggcagaagtggtgatacaaggctggtcttaaaggtgaagccttgaatc

SEQ ID NO: 191071 - DNA, 276 bp, Glycine max
gcctcacgcttggaattatgatattgttggccatggtaattgtagcgtttaacagatccagccaatcgaagcgattgaggaaaggatccagcagaactgggcaaggtcctccaaaactggttattcttcacatggatatggctatccacaccttggatgatataatgagaagtactgagaatctcaatgagaaatatgtaatagggtatggtgcgtctagcactgtatacaaatgtgttttgaagaattcccgaccaattgcaattaagcgactgt

SEQ ID NO: 191072 - DNA, 274 bp, Glycine max
ctactgatgctgagctggaagctgagctttccaagtatgggtctgtgaaggaggtgaagtttttcgatgagaaggccagtgggaaatcaaaggggtattgccaggttgagttttatttagcttttgctgcgactgcttgtaaggaagggatgaatgggcatgtttttaatgggagaccttgtgttgttgcatttgcatcgccttttacggttaagaaaatgggggaggctcagattttctggtctcagcagatgaaccatactgctgttcctca

SEQ ID NO: 191073 - DNA, 275 bp, Glycine max
ctgctaccctcttctctctctctcggggctgatttcttgcgcggtttatcatgggggatagtcagtattcgttttctctcaccacatttagcccttctggaaagcttgttcagattgagcatgctttgacggctgtcgggtctggacaaacgtctttgggaattaaagctgcaaatggagttgtcattgctaccgagaagaaattgccatctatattggttgatgaagcatcagtccagaaaattcagttattaacaccaaatataggtgtcgta

SEQ ID NO: 191074 - DNA, 279 bp, Glycine max
  unsure (1)..(279): unsure at all n locations
aatcgcactaatggctgtcaccttctcagatctacacaccgaagagggtctcaaatccctcgatcaattcctttctgggaaaacctatatttctggggatcagttgacaaaggatgatattaaagtgtatgcagctgttgttgaaaagccaggggacacttttcctaatgctgccaagtggtacgatgctgtctcttctcaacttgctccaagctttcctggcttctctcanagggtaagattcagtggcgctgctgctccagctgaagctgcacctgc

SEQ ID NO: 191075 - DNA, 273 bp, Glycine max
cccttccttctttttcttttattacatccaattaatgttccattacctgtgtgcactaattatgttcaagtaacatttctgttattgttttcataaagtttgattaaaatttgtgttataggtgtatggccagaatctccgagctttagagatgaggggatgggacctataccatcaaggtggaaaggaacttgtcaacatgatcacaccggcttccgttgtaacaggaagctgataggagttaggtacttcaacaaaggttatatggcccat

SEQ ID NO: 191076 - DNA, 276 bp, Glycine max
caaaaatggtgaagtttctgaaaccaaacaaagccgtcatcgtccttcagggacgctacgccggcaaaaaagccgtgatagtgcgaaccttcgatgaaggcacgcgcgaggcccctacgggcactgcttggtggcagtgataaagaagtaccctgcgaaggtgatcaagaaggattcggccaagaagacggccaagaagtcgcgtgtgaaggcgttcgtgaagctcgtgaactaccagcacctcatgcccacgcgctacacgctcgatgtcgattt

SEQ ID NO: 191077 - DNA, 275 bp, Glycine max
atcacaatcgctatggctaggtacgaccgagcaatcaccgtgttctcccctgacggccatctcttccaggtcgagtacgccctcgaagccgtccgcaagggcaacgccgccgtcggcgtccgcggcaccgacaatgttgtcctcggcgtcgagaagaaatccaccgccaaactccaagactccaggtcggtgaggaagatagtgaatctggacgaccacattgcgctggcctgcgcggggctgaaggccgacgcacgcgtgctcataaacagggc

SEQ ID NO: 191078 - DNA, 276 bp, Glycine max
ggggaatccgactgtttaattaaaacaaagcattgcgatggtccctgcggatgttgacgcaatgtgatttctgcccagtgctctgaatgtcaaagtgaagaaattcaaccaagcgcaggtattactgcaccatgtgcaccagaaaactcgtccttcagtaatactgcatgatgctgatgctcatcttactttttttcccgggttttatttactacttaatttccatgtatatgtagggttttcataggatcattaggatcagcaccattaagatca

SEQ ID NO: 191079 - DNA, 273 bp, Glycine max
ctcgtgattatctttttaacatcaatgctggcattgttaagacgctgtgtactgctattgctaagtatctcccccatgcccattataacatgataagcaatcctgtgaactccactgttcctattgcttctgaagttttcaagaaggcaggaacttatgatgagaagagattgtttggtgttaccacccttgatgttgttagggcaaaaactttctatgctgggaaagccaatgttccagttgctggtgttaatgtacctgttgtgggcggcc

SEQ ID NO: 191080 - DNA, 284 bp, Glycine max
aaacgaggtacgattctggtcaccaacgacgatggtatcgatgctcctggcttaagagcattggttcactccctcgtcaacgccaaccttttcaacgttctagtgtgcgctcctgatagcgagaaatcagctgttagccacagcatcacttggctccatccagtagctgttaagcaagtacagatcgagggaaccaccgcatttgctgtttctgggactcacgcagattgtgcttctctagggatttccaaagctctctttcccacagtacctgatctggtggt

SEQ ID NO: 191081 - DNA, 287 bp, Glycine max
cgaatacctagtgcaggatgccatggagtctctcatgaaaggaagaacagttctagtcattgctcacaggttatccacagttaaaactgctgatactgttgcagttatatctgatggccaagtagttgagagaggcaaccatgaagagcttctcagcaagaacggtgtctatactgcattggtcaagagacaactgcaaacaacaaaagccgaaatctcggtttaacaagcaagatggtaggcttggttattcatgatttgcagagcaaagtataatgagtcaattg

SEQ ID NO: 191082 - DNA, 271 bp, Glycine max
gcatcagggagctttgagggttgattctctggtgtagtagcaatcagcacaatagaaaatgttttttgacggatatggatatcatgggacatcatttgagcagatatatcgatgctacccagcttcctttattgaaaagccccaaatcgaaagtggtgacaaaattatcatgcctccatcagcccttgaccgtctagcatctctgcatattgataaaaaaatgttgtttgaactccgtaatgatgctgccgagcgggtttctcattgtggg

SEQ ID NO: 191083 - DNA, 271 bp, Glycine max
gggcctaagagctcacactgatgctggtggcataatcctactgttccaagatgacaaggttagtggattgcagcttctcaaggatgatcagtggatcgatgtcccaccaatgcgtcactccattgtaatcaaccttggtgaccaacttgaggtcataaccaatggcaagtacaagagtgtcatgcaccgagtgattgcccaagccgatgataccagaatgtccatagcttctttctacaaccctggtgatgatgctgtcatttctcctgca

SEQ ID NO: 191084 - DNA, 273 bp, Glycine max
ctttcttcaagcaccctagttttcctctactctctctctaaaatggcgttctcttcttttctcggccgagtcctcttcgcctctgttttcatcctctccgcttaccaagaatttaatgcttatggagttgatgggggacccacagcaaaagcactcattccgaagtttgatgcctttgcacatcaagtacattctaaagctggctttcaacttccagatattgatatgaaaattttagttgctggggctattgctctcaagggcctcggaggg

SEQ ID NO: 191085 - DNA, 282 bp, Glycine max
tacgaagggtgggttcgtttgtgagagttgtggtgatgtgaggtttgtgccgtgtgggaactgcagtgggagtaggaaggtgtttgatgaggatgaaggggtgttgaagaggtgtttggagtgcaatgagaatggcttgattcgatgtcctaattgttgttcttgaagttggcaaacaaaataaacaaagaagagaaatttgaaacctttatgtgtgtagttgtttttttttgttgcatgaaacatagatgcggttccttacatgattctggtgttgttgtc

SEQ ID NO: 191086 - DNA, 272 bp, Glycine max
acaatgctgaaaatgagtatctgtactgtgagggcctcaaggtgcattacatcatggaatctgttgagagaagacctttctatttgtacagcaagccccagataactaggaacgttgaagcctataaggatgcattggaagggttgagttctataattggttatgccattaaggctaacaacaatttgaagattttggaacatttgaggcacttgggttgtggtgctgtgcttgttagtgggaatgagcttaggttggctcttcgtgctggc

SEQ ID NO: 191087 - DNA, 274 bp, Glycine max
tgtccctccttcctctgccttataattcttgtgaccctttttgctggtagcattgaaagtgcaccagcaaacgtgaagccaagccattatgctgcacccgtcaataggagtgtttttccttctggttttctatttggaataggctctgcagcttaccagatagaaggagcagcagctatagatggcagaggaccaagtatatgggacacctatactaaacagcaaccagggaagatttgggatcatagtgatggaagtctagcaattgattttt

SEQ ID NO: 191088 - DNA, 275 bp, Glycine max
atgaaggtccttgttttcttcgttgctacaattttggtagcatggcaatgccatgcgtacgatatgttccctctccgaatgaacactggctatggtgcccgtactccggaggtgaaatgcgcaagttggaggcttgctgtggaagcacacaacatctttggctttgagaccattcctgaagagtgcgttgaagcaacaaaggaatacatccatggcgaacaatatagatcagactccaaaacagttaaccaacaagcttacttttatgccagaga

SEQ ID NO: 191089 - DNA, 277 bp, Glycine max
aaaacttgctctacaatgagtttccttcgttcttttgcaagaaacaaggatatatcaaaagtaggacgcagaggtatccattgcatgcagaaactatgtgcagaaaaaatatctcttgattcactagagaaggcccaaaatcgtgtgatagatgctgcactcacacttgttcgagaaaatacaaggcttaagaaagaacttgtgcatagtttgggaggtgctgtagcaacttcaactcttcttggagttcctttgggtcataattcatcgtttcttg

SEQ ID NO: 191090 - DNA, 277 bp, Glycine max
gagagacttagaaaaaaggtaacactaaagaaaatgactatggttacacggaagaagatgatcaagagcatggaagtccagcagcagtgccagttccattgcctgatatggcgctgccaccatcctttgacagtgacaatccagcctatagataccgtttcttagagccaacttctcagctcctgacaaggccagtcttagacagccatgggtgggatcatgattgtggttatgatggtgtaaacattgaacagagtctagccatcatcaataaatt

SEQ ID NO: 191091 - DNA, 271 bp, Glycine max
ggcgctgttgtggtccaatgtcgcgaactgtcacttgtctggatgtggaccgggttcgtcctcggaccggacccggacctccgtggtcataggtttgaagaataagctgaaggattcgatggagagtttcaacgagatgtgcggtcttgtttcgtcggagtaccgcgagaccgtgcagcggcggtacttcaccgtcaccggcgagaatcccgatgataagacgctcgatctcttgatctccaccggtgagagtgagacttccttcagaaag

SEQ ID NO: 191092 - DNA, 286 bp, Glycine max
tggcagtagccgagattccgtgagttgcaaaaatgaagacgattctttccaccgagaccatgaacatcccggacggcgtgagcatcaaagttcatgccaaggtcatcgaagttgagggcccccgcggaaaattggtgcgagacttcaagcatttgaatctcgattttcagctcattactgacgaaaacggtaaaagaaagctgaaaatcgacgcgtggtttggttctcggaaaacatccgccgccattcgcaccgccttgagccacgtggagaatcttatcaccgg

SEQ ID NO: 191093 - DNA, 275 bp, Glycine max
atggatgtcgaggtaggtgggtgaagtcagactggaaaagcagtgaaggcaaagcaggttcattcaagcacacagctggaaaatgggccagtgatccagatgataaaggtattcaaacatccagtgatgccaaacactttgccatctctgcaaaaataccagaattcacaaacaagaacagaacattggtccttcagtattctgtaaaatttgagtaagagattgaatgtggtggaggttacatcaagcttctctctggaattgttaatcaaaag

SEQ ID NO: 191094 - DNA, 272 bp, Glycine max
acctatctttcttctctctctgtgtgtgcgcttcaacggcaaccagaagcagccatggccactgcaaggactgtgaaggatgtttcacctcatgagttcgttaaggcgtactcctctcacctcaagcgatccggcaagatggagctgccagagtggactgatattgtgaaaactgcaagatttaaggagttggctccttatgatcctgactggtactatgtcagagctgcttccatggcaagaaagatctacttgagaggaggacttggtgt

SEQ ID NO: 191095 - DNA, 148 bp, Glycine max
ggcgacgcaccggcattgccagagactcttaaaaattacaacaagctgttgtctcttggcttcaagattgtattcttgtcaggaagatatcttgacaaaatggccgtaacagaagcaaacctaaagaaggctggcttccacacaacat

SEQ ID NO: 191096 - DNA, 230 bp, Glycine max
atcttatgtgccagagattcttagattgccatgggtgcttatcaatcatttcatttggctgccaggcagcctgccaggggacagatccatggtttccgcatgacgttgtggcttgagcaccttggcttgcttcatgactctttcctccaccctgaaaatgaagactgtattaagaaggtgatccaaattgctgacaagtattgggatatctattcaagtgagtcacttga

SEQ ID NO: 191097 - DNA, 276 bp, Glycine max
aggcattcgtggagcactactacagtaccttcgacaccaacaggaacgtcttagcgaatctctaccaggagggttccatgctcactttcgaagggcagaagatccaaggcgcttccaacatcgttgccaagctcacctccctcccttttcagcagtgccaccactcaatctccaccgtcgactgccagccctccggcgtcaacgccggcatgctcgtcttcgtcagcggaaaccttcagctcgccggcgaacagcacactctcaagttcagccaga

SEQ ID NO: 191098 - DNA, 297 bp, Glycine max
aaaaaactcctaaaacaccaaaaggacctagttctgtagaagacattaaagcaaaaatgcaagcaagtatagaaaaaggtggttctcttcccaaagtggaagccaaattcatcaattatgtgaagaattgcttccggatgactgaccaagaggctattcaagatctctggcagtggaggaagtctctttaagaaaatagtttaaacaatttgttaaaaaattttccgtcttatttcatttctgtaacagttgatatctggctgtcctttttataatgcagagtgagaactttcccta

SEQ ID NO: 191099 - DNA, 308 bp, Glycine max
tcggctcgagaagaaattcagccgccatcatggacccaccattactgccaagctctacgggcgggcgccgcagctgcagggaaactctcctgcaggacttcagagtggttgcccagggtgtgggcatccctgaggactccatcttcaccatggctgaccgaggtgaatgtgtccctggggagcaggaaccagagcccatcttaatcccgagagtccggagggctgtgctaccccaagaagaggaaggatcagggggtgggcaactggtgaactgaagtcaccaagaaagaagattcctgccagctggg

SEQ ID NO: 191100 - DNA, 293 bp, Glycine max
attatacctaaatctgggacagggaggtgacagtggaacaggctaccaatcagaactagatgacttttaaggctcctcctattatgagacttcaatttccaaagagaagaactagcagagaaattgtatttcagtaattttaagctaccttctgtcttgtagagtcttgttatagttgtgtaaatcaaaaacacagaataaggaacatatttaactttttttcattataaaatggttagaggaccctaccccctctagattccctgatttccccaggcctgcagcatacagta

SEQ ID NO: 191101 - DNA, 296 bp, Glycine max
aacagcggccagcctcccaactacgagatgctcaaggaggagcaggaagtggctatgctgggggcgcaccacaaccctgctcccccgacgtccaccgtgatccacatccgcagcgagacctccgtgcctgaccatgtcgtctggtccctgttcaacaccctcttcatgaacacctgctgcctgggcttcatagcattcgcctactccgtgaaggtgcgtatggccctggcggaaatccagggggtgccggtgagcctggggctccacctgcccacatgctgcctggggtggggact

SEQ ID NO: 191102 - DNA, 290 bp, Glycine max
gtgaaacccgtctctactaaaagtacaaaaaattagccaggcgtggtggcgggtgtctgtagtcccagttacttgggaggctgaggcaggagaatcacttgaaccctgaaccctggaggcggagtttcagtgagccgagatcgtgccactgcactcggagcgagacttcgcctcaaaaattaattaatttaattaaaaaatgcagttttgctctcccagtgccaggtctgtagaggcccaggggaggaattttggcagcggggcattgctgctgtctttattctttttcc

SEQ ID NO: 191103 - DNA, 219 bp, Glycine max
gtgcccagggctgcatttgcaaaggggcgtcggacaagtgcagctgctgcgcctgatgctgggacagccccgctcccagatgtaaagaacgcgacttccacaaacctggatgttttatgtacaaccctgaccctgaccgtttgctatattcctttttctatgaaataatgtgaatgataataaaacagctttgacttgaaaaaaaaaaaaagagaaaag

SEQ ID NO: 191104 - DNA, 202 bp, Glycine max
aaaagactggttaatgataacaatgcatcgtaaaaccttcagaaggaaaggagaatgttttgtggaccactttggttttcttttttgcgtgtggcagttttaagttattagtttttaaaatcagtactttttaatggaaacaacttgaccaaaaatttgtcacagaattttgagacccattaaaacagttaaatgcagaaac

SEQ ID NO: 191105 - DNA, 96 bp, Glycine max
tgcaaatgcgagtctttgtggtgggggttaaggcccataacaaaggatcttaaaccatgcagtgtacgcaattgaaatggtattccacacaacata

SEQ ID NO: 191106 - DNA, 295 bp, Glycine max
gtgctcgcttggtctagtgcccatttactctggactccggatggctgccgcacgcctctgcctctccctgctgctcctgtccacctgcgtggctctgttactacagccactgctgggtgcccagggagccccactggagccagtgtacccaggggacaatgccacaccagagcagatggcccagtatgcagctgatctccgtagatacatcaacatgctgaccaggcctaggtatgggaaaagacacaaagaggacacgctggccttctcggagtgggggtccccgcatgctgct

SEQ ID NO: 191107 - DNA, 229 bp, Glycine max
tgcccaagtgtgaagactgtcagagcctggtgaagcctgatatcgtcttttttggtgagagcctcccagcgcgtttcttctcttgtatgcagtcagacttcctgaaggtggacctcctcctggtcatgggtacctccttgcaggtgcagccctttgcctccctacatcagcaaggcacccctctccacccctcgcctgctcatcaacaaggagaaagctggccagtcgg

SEQ ID NO: 191108 - DNA, 294 bp, Glycine max
ccggtattgtaagaacaagccgtacccaaagtctcgcttctgccgaggtgtccctgatgccaagattcgcatttttgacctggggcggaaaaaggcaaaagtggatgagtttccgctttgtggccacatggtgtcagatgaatatgagcagctgtcctctgaagccctggaggctgcccgaatttgtgccaataagtacatggtaaaaagttgtggcaaagatggcttccatatccgggtgcggctccaccccttccacgtcatccgcatcaacaagatgttgtcctgtgctgg

SEQ ID NO: 191109 - DNA, 295 bp, Glycine max
caccaatgttgtacatgtatgataatggtgtactgtatactttaacatgccccatactttgtattggagagtacaataatgtaaatcctaaaagcaccactattttagcataataaaagatagtccaaagagctcctatatagactactccagataacttcgcttctaagatacttgtagcttattgtaattttttttaagaaattcaaggtcattattattgtacaaaataagcgctttgtttaacacagctatatagttttgttaatttttaaaaaactgtggagacggtgat

SEQ ID NO: 191110 - DNA, 293 bp, Glycine max
gtctttaaaccctgcgtggcaatccctgacgcaccgccgtgatgcccagggaagacagggcgacctggaagtccaactacttccttaagatcatccatctattggatgattatccgaaatgtttcattgtgggagcagacaatgtgggctccaagcagatgcagcagatccgcatgtcccttcgcgggaaggctgtggtgctgatgggcaagaacaccatgatgcgcaaggccatccgagggcacctggaaaacaacccagctctggagaaactgctgcctcatatccggggg

SEQ ID NO: 191111 - DNA, 278 bp, Glycine max
aaatagctctgtgggttttaacatttttataaagatataccaagggccattcagtacatcaggaaagtggcagacagaagcttctctctgcaaccttgaagactattggtttgagaacttctcttcctataccacccaaaatcataatgccattggaaagcaaaaagttgttttatccatttgatttgaattgttttaagccaatattttacggtaaaactcactgaatctaaccatagctgacctttgtagtagaatttacaacttataattacaat

SEQ ID NO: 191112 - DNA, 293 bp, Glycine max
gcgctagaggaagcatcacagcaactggctggacaagaaagggaaaagaatcagggatttgattttgattcctttattgcaggaactattcagcttagttcccagcatgagcctactgatgttgttgataaattaaatgacttgaatagctcagtgtcccaactagaattgaaaagtttgatatcaaagtcagtaagccaagaaaaacaggaaaaaggaatggcaaatctggctcaattagaagccttgtaccagtcttcttgggacagccagtttgtgagtggtggggagga

SEQ ID NO: 191113 - DNA, 298 bp, Glycine max
gacagcgtttaacaaagcttagagaaacctccaggagactgctatcatggcagagaagcccaagctccactacttcaatgcacggggcagaatggagtccacccggtggctcctggctgcagctggagtagagtttgaagagcaatttataaaatctgcagaagatttggacaagttaagaacatgatggatatttgatgttccagcaagtgccaatggttgagcatgatgggatgaagctggtgcagaccagagccattctcaactacattgccagcaaatacaacctcttgggaaa

SEQ ID NO: 191114 - DNA, 292 bp, Glycine max
ggcggccgagctggttggtggcggcggtcgtgcggacgcaaacatgcagatctttgtgaagaccctcactggcaaaaccatcacccttgaggtcgagcccagtgacaccattgagaatgtcaaagccaaaattcaagacaaggagggtatcccacctgaccagcagcgtctgatatttgccggcaaacagctggaggatggccgcactctctcagactacaacatccagaaagagtccaccctgcacctggtgttgcgcctgcgaggtggcattattgagccttctctccgc

SEQ ID NO: 191115 - DNA, 291 bp, Glycine max
ggaaagatgctaaagcacttccagagcctgtccggagctcagaggttcggaagacttatcgaccatggagcgcgcgtcctgcttgttgctgctgctgctgccgctggtgcacgtctctgcgaccacgccagaaccttgtgagctggacgatgaagatttccgctgcgtctgcaacttctccgaacctcagcccgactggtccgaaagctacaagtgtgtgtctgcagtagaggtggagatccatgccgccggtctcaacctagagccgtttctaaagcgcgtcgatgcgga

SEQ ID NO: 191116 - DNA, 282 bp, Glycine max
tcttccttgaagccaactacatgaacctacagagatcctacactgtggccattgctggctatgctctggcccagatgggcaggctgaaggggcctcttcttaacaaatttctgaccacagccaaagataagaaccgctgggaggaccctggtaagcagctctacaacgtggaggccacatctatgccctcttggccctaatgcagctaaaagactttgactttgtgcctccgtcgtgcgttgggctcattgacagagttatacggtggtggctatggctcta

SEQ ID NO: 191117 - DNA, 293 bp, Glycine max
ggcaccaccactgacctgggacagtgaatcgacaatgccgtcttctgtctcgtggggcatcctcctgctggcaggcctgtgctgcctggtccctgtctccctggctgaggatccccagggagatgctgcccagaagacagatacatcccaccatgatcaggatcacccaaccttcaacaagatcacccccaacctggctgagttcgccttcagctctataccgccagctggcacaccagttccacagatcaacgattacgtggagaagtggtatcaagggaaaattgtggatt

SEQ ID NO: 191118 - DNA, 289 bp, Glycine max
gagaggagaacgcagttcacagtacagagccagttgtccaggagaatggggacgaagctggggaggggagagaggctaaagattgtgaccccggctctccaaggaggtgttacatcatcatcatctctggccggaaagaaaagtgtgaggctgccaaggaagctctggaggcattggttcctgtcaccattgaagtagaggtgccctttgaccttcaccgttacgttattgggcagaaaggaagtgggatccgcaagatgatggatgagtttgaggtgaacatacatgt

SEQ ID NO: 191119 - DNA, 292 bp, Glycine max
ccatgccagcccttcctgctgcctccctcctgtctggctcctggggcccatgcttagagcccaggctccagccctgagtgcttccgagctggcggactgcccaggggccatcagaggatggtggtgctgctgctgatccggggaccgctgtcttccctcccatacgcctttcatccctccttctagggcctatggcagttctcccaggatgtgtggcgagacctgggccagcccacagcgttcctagtcaggcagccacaccttggtcctcatcttggtcccttccaatctg

SEQ ID NO: 191120 - DNA, 290 bp, Glycine max
ctcggttcgctaccagtgtaagaactactacaaactgcgcacagatggagatggggaggcgatgccatgcagcctacctcatgtacatctcagagtcagatttacatctccagcagatgtgggaaaagaaggaatgctgatgatgatgtcaccctcacctagagtgtacaccttaaacaatgagaagcagtggataaataaggctgttggagataaacttcctgaatgtgaagcagtatgtgggaagcccaagaatccggcaaacccagtgcagcggatcctgggtggac

SEQ ID NO: 191121 - DNA, 242 bp, Glycine max
gcctggcctaccgcggcactcccggctgcacgctctgcttggcctcgccatgccggtggacctcagcaagtggtccgggcccttgagcctgcaagaagtggacgagcagccgcagcacccgctgcatgtcacctacgccggggcggcggtggacgagctgggcaaagtgctgacgcccacccaggttaagaattggaccaccagcatttcgtgggatggtcttgattcagggaagctctaca

SEQ ID NO: 191122 - DNA, 288 bp, Glycine max
cggaggtgcaggtcctggtgcttgatggtcgaggccatctcctgggccgcctggcggccatcgtggctaaacaggtactgctgggccgaaaggtggtggtcgtacgctgtgaaggcatcaacatttctggcaattcctacagaaacaagttgaagtacctggctttcctccgcaagcggatgaacaccaacccttcccgaggcccctaccacttccgggcccccagccgcatcttctggcggaccgtgcgaggtatgctgccccacaaaaccaagtgaggccaggccg

SEQ ID NO: 191123 - DNA, 287 bp, Glycine max
tgtttttctagtctctatttcattcatttctactctgatctttattattttctttttctaactttaggcttagtttgttctttaggcttagtttgttcttagtttgttctagttccttgaggtgtactcttaggttatttatttaggtcatttttcttttcaatgttagtgtttaatcccataaacttccctcttagacctgattttgctgcatcacataggttttggtatgttgtgtccccatttttatttatcttaaggtaatttttaatttcccttttaatatc

SEQ ID NO: 191124 - DNA, 292 bp, Glycine max
gcaccaccactgacctgggacagtgaatcgacaatgccgtcttctgtctcgtggggcatcctcctgctggcaggcctgtgctgcctggtccctgtctccctggctgaggatccccagggagatgctgcccagaagacagatacatcccaccatgatcaggatcacccaaccttcaacaagatcacccccaacctggctgagttcgccttcagcctataccgccagctggcacaccagtccaacagcaccaatatcttcttctcagcagtgagcatcgctacagcctttgcaa

SEQ ID NO: 191125 - DNA, 286 bp, Glycine max
cgcagcaccaatttccatcttattttgttcacattcacttcttatctcaatttttctgctttattgttattattttttgagacagggtctcactctgttgcccaggctggagtgcagtggcaccatctctgctcaccgcaacctcctgggctcaagcgatccttctgcctcagcttctgagtagctgggattacaggtacatggccaccgtccctggctgctttttgtatttttagtagagatgttggccaggctggtctcgaactcctggcctcaagtgatccac

SEQ ID NO: 191126 - DNA, 286 bp, Glycine max
gaattactgtggcctaccaggtgaatattggcttggaaatgataaaattagccagcttaccaggatgggacccacagaacttttgatagaaatggaggactggaaaggagacaaagtaaaggctcactatggaggattcactgtacagaatgaagccaacaaataccagatctcagtgaacaaatacagaggaacagccggtaatgccctcatggatggagcatctcagctgatgggagaacacaggaccatgacattcacacggcatgttcttcagcacgtatga

SEQ ID NO: 191127 - DNA, 291 bp, Glycine max
ccactgctgtgtgtcttgtcaggatgctcacttgttcctactgagatgctggatattgattttgtaacagcacctggtgtttcacggctgtccgagtgagctaacgtggcggtgtggctgcctggacctcctctttcaggttaacgctgacagaatggaggctcaggctgtctgcaagaaaacagttggtttggctgtgcattttgacctcctcttccccactgccatcttcctcagagactttgtagctgcctcctagaagcacattctgagcacatttgagcactctgt

SEQ ID NO: 191128 - DNA, 178 bp, Glycine max
gccacagaactaatcatattttatatcttcttcgaaaccacacttatccccaccttggctatcatcacccgatgaggcaaccagccagaacgcctgaaacaggcacatacttcctattctacaccctagtaggctcccttcccctactcatcgcactaatttacactcacaacaccct

SEQ ID NO: 191129 - DNA, 222 bp, Glycine max
taagattgatcgccgttctggtaaaaagctggaagatggccctaaattcttgaagtctggtgatgctgccattgttgatatggttcctggcaagcccatgtgtgttgagagcttctcagactatccacctttgggtcgctttgctgttcgtgatatgagacagacagttgcggtgggtgtcatcaaagcagtggacaagaaggctgctggagctggcaaggt

SEQ ID NO: 191130 - DNA, 285 bp, Glycine max
cctgtattgggctctcatttttaactgtacttgtcttctatcttccttcaaatgaaggtgaaaagatttgtctctgcacttcagtacttgtgtctttgactgtcttccttctggttattgaagagatcataccatcatcttcaaaagtcatacctctaattggagagtatctggtatttaccatgatttttgtgacactgtcaattatggtaaccgtcttcgctatcaacattcatcatcgttcttcctcaacacataatgccatggcgcctttggtccgcaaga

SEQ ID NO: 191131 - DNA, 281 bp, Glycine max
ccaagatgccgaaaggaaagaaggccaagggaaagatggtggctccggccccagctgtcgtgaagaagcaggaggctaagaaagtggtgaatcccctgtttgagaaaaggcctaagaattttggcattggacaggacatccagcccaaaagagacctcacccgctttgtgaaatggccccgctatatcaggttgcagcggcagagagccatcctctataagcggctgaaagtgcctcctgcgattaaccagttcacccaggccctggaccgccaaacagct

SEQ ID NO: 191132 - DNA, 291 bp, Glycine max
agcgctcagccaacggtggctccgaatctgacggggaggagaacatcggctggagcacggtgaacctggacgaggagaagcagcagcaggatttctctgcttcctccaccaccatcctggacgaggaaccgatcgtgaatagggggctggcagctgccctgctcctgtgtcagaacaaagggctgctggagaccacagtgcagaaggtggcccgggtgaaggcccccaacaagtcgctgccctcagccgtgtactgcatcgaggataagatggccatcgatgacaagtaca

SEQ ID NO: 191133 - DNA, 296 bp, Glycine max
attcggctcgaggtaagttcttatttggaaggcgaagttgccaaggaattcattgcttggctggtgaaatgccgaggaaggcgtgatttcccagaagaggtcgccattgttgaagaacttggccgcagacatgctgatggttctttcactgatgagatgaacaccattcttgataatcttgccgccagggactttataaactggttgattcagaccaaaatcactgacaggaaataactatatcactattcaagatcatcttcacaacatcacctgctagccacgtgggatgtttg

SEQ ID NO: 191134 - DNA, 284 bp, Glycine max
ggaagctttcgtctcgtgggtgcgaaaggtaaccgaagcggctcaggaaggcagctgtcactgagcccctggaacagagcgagagtatcgtagtgggcagcagtcagtgacaggtgtaacctctgtggatgacagcaacagttactggaggatacgggggaagagtgccacagtgtgtgagaggggaacccccatcaagtgtggccagcccatccggctgacacatgtcaacactggccgaaacctccatagtcaccacttcacttcacctctttctggaaacc

SEQ ID NO: 191135 - DNA, 237 bp, Glycine max
gacacagagcacatcaaaagttcccaaagagggcttgctctctcttcacctgctctgttctacagcacactaccagaagacagcagaaatgaaaagcatttactttgtggctggattatttgtaatgctggtacaaggcagctggcaacgttcccttcaagacacagaggagaaatccagatcattctcagcttcccaggcagacccactcagtgatcctgatccgatgaacgagga

SEQ ID NO: 191136 - DNA, 286 bp, Glycine max
cactgacctgggacagtgaatcgacaatgccgtcttctgtctcgtggggcatcctcctgctggcaggcctgtgctgcctggtccctgtctccctggctgaggatccccagggagatgctgcccagaagacagatacatcccaccatgatcaggatcacccaaccttcaacaagatcacccccaacctggctgagttcgccttcagcctataccgccagctggcacatcagtccaacagcaccaatatcttcttcatcccagtgagcatcgctacagcctttgcaat

SEQ ID NO: 191137 - DNA, 173 bp, Glycine max
gcgaacagcggtgggcctagccctactagtctcaatctccaacacatatggcctagactacgtacataacctaaacctactccaatgctaaaactaatcgtcccaacaattatattactaccactgacatgactttccaaaaaacacataatttgaatcaacacaaccaccca

SEQ ID NO: 191138 - DNA, 179 bp, Glycine max
caaacatcatcaagatcttgaggcatgacattggtgccactgtccatgagctttcacgagataagaagaaagacacagtgccctggttcccaagaaccattcaagagctggacagatttgccaatcagattctcagctatggagcggaactggatgctgaccaccctggttataaagat

SEQ ID NO: 191139 - DNA, 196 bp, Glycine max
gccatggactctgtcctgaaggcctgaggttactggaaattaggggattaacccactagctcttgttgagccgtgggcaattgtctgaaaagtgaagacagaaccacagggctattttgtttgcttcatgtgtcccagaagatgactgagggtgagttggcttacctggcccatcagggtaggctggagttaggga

SEQ ID NO: 191140 - DNA, 238 bp, Glycine max
attcttggcaggatggcttctcatcgtctgctcctcctctgccttgctggactggtatgtgtgtctgatgctagccctacgggcaccggtgaatccaagtgtcctctgatggtcaaagttctagatgctgtccgaggcagtcctgccatcaatgtggtcgtgcatgtgttcagaaaggctgctgatgacacctgggagccatttgcctctgggaaaaccagtgagtctggagagctgc

SEQ ID NO: 191141 - DNA, 122 bp, Glycine max
ggaaaccttaagtaaccagtggctaaacagaaaagccggttgcccaactgcattaatgaactctaattcgggagtctgttcccttttagtgccacgcgttgaatagttccacatactttcag

SEQ ID NO: 191142 - DNA, 287 bp, Glycine max
atcaccaccaagcacatgctacccacggttctgcgcatggctggggacccggttgccaatgtccgcttcaatgtggccaagtctctgcagaagatagggcccatcctggacaacagcaccttgcagagtgaagtcaagcccatcctagagaagctgacccaggaccaggatgtggacgtcaaatactttgcccaggaggctctgactgttctgtctctcgcctgatgctggaagaggagcaaacactggcctctggtgtccaccctccaacccccacaagtccctct

SEQ ID NO: 191143 - DNA, 284 bp, Glycine max
cttgaagataagtttaaaagcaataatttagagagagagcaggagcagcttgaccgcatcgtgaaggaatctggaggaaagctgaccaggcggcttgtgaacagtcagtgcgaatttgaaagaagaaaaccagatggaacaacgacgttgggacttctccatcctgtggatcccattgtaggagagccaggctactgccctgtgagactgggaatgacaactggaagacttcagtctggagtgaatactttgcaggggttcaaagaggataaaaggaacaaagt

SEQ ID NO: 191144 - DNA, 284 bp, Glycine max
gcagtttcatttcaaagacttcaacagggcctttgggttcatgacaagagtgtgcctgcaggctgagaaactggaccaccatcctgaatggtttaacgtgtacaacaaggtccacatcacgctgagcacccatgagtgtgccggcctttcagaacgggacataaacctggccagcttcatcgaacaagtagcagtgtccatgacatagaccctgcccttcctctttgaattcttccgggggaaagggtgactgaactgggagtccagggagggagctgaggagc

SEQ ID NO: 191145 - DNA, 287 bp, Glycine max
gcatactttaacttctatagttttctcctttagagggtcgtcttcagttttagaggtttacttctcccttgcctttgactcattggactagtgcagaggctttaagtagtttaaaatgggcttttgcttttctaggtcattaacgttttttatttagtttctttagccaatagtggctgagtttcgcacttgattttcaatattttatagtaagaaatgacaaactgctttgtttcatttcataaacaaactctgcatttagataactattaaaggttgttaagatg

SEQ ID NO: 191146 - DNA, 288 bp, Glycine max
cactttgttctggtattgacgcaattatattaggaaaaaagttggttgactgtttttgcttaattgacttctaaaatgttcaaattgtctagttctaaaagtttactaaatgcctagtgcagttaaacatactcttgtttaagtgtgtgttgctaaattttttactgtcattactaaataatctgtgtggcaaaatgtgtgtcagcacttttccctccttttttatctcctattttcaggagtcaaatgtagccataaactgtatccttgtctgacactttagctaaa

SEQ ID NO: 191147 - DNA, 284 bp, Glycine max
ctcttgccatggcctccctgcccgcctctctgcagagtatgtgaacatgcaggatcccgagatggacatgaagtcagtgactgaccgggcagcccgcaccctgctgtggactgagctcttccgaggcctgggcatgaccctgagctacctgttccgggaaccgaccaccatcaactacccgttcgagaagggcccgctgagccctggcttccgtggggagcatgcgctgcgccggtacccctccggggaggagcgttgcattgcctgcaagctctgcgaggcca

SEQ ID NO: 191148 - DNA, 283 bp, Glycine max
  unsure (1)..(283): unsure at all n locations
cgnccttcgacacggacgtcaacatactgacccgcttcgtcatggaggagggcaggaaggaccgctgcacgggggagttgacccagctgctcaactcgctctgcacagcagtcaaagccatctcttcggcggtgcgcaaggcgggcatcgcgcacctctatggcattgctggttctaccaacgtgacaggtgatcaagttaagaagctggacgtcctctccaacgcactggttatgaacatgttaaagtcatcctttgccacgtgtgttctcgtgtcagaaga

SEQ ID NO: 191149 - DNA, 268 bp, Glycine max
tatagctccatctctcctgcttctttaacttgataatgcatacttgatttttctatttgttatttcataaaccaattaatacacagataaaatgactgtatatcaaaccatgtttgtatagaaaaaatggattttggatgcctctcatatgtaattagttctattaaacatattaattgtattgtttaatttgtcaggtttttgacagaattttgtttacaagtaataaaaattttatctccaaaagaaaaaaaaatttttttttttg

SEQ ID NO: 191150 - DNA, 282 bp, Glycine max
actttataaactggttgattcagaccaaaatcactgacaggaaataactatatcactattcaagatcatcttcacaacatcacctgctagccacgtgggatgtttgaaatgttaagtcctgtaaatttaagaggtgtattctgaggccacattgctttgcatgccaataaataaattttcttttagtgttgtgtagccaaaaattacaaatggaataaagttttatcaaaatattgctaaaatttcagctttaaaatatgacagtgctagattctgttattt

SEQ ID NO: 191151 - DNA, 181 bp, Glycine max
gttggtttcctgaagcgcacccctgtgaataacaggtggcttttcatggatgtctctagtcagagaaaaatgataaaggcttaaattgaggattaacagaagcagattaacctcagaaatcctgtctggctggcagatttcaagtaaaaaaaaaaaaaaggtgggttggggggaccctttt

SEQ ID NO: 191152 - DNA, 283 bp, Glycine max
aggaggtcccccacggcccttcaggatgaaagctgcggtgctgaccttggccgtgctcttcctgacggggagccaggctcggcatttctggcagcaagatgaacccccccagagcccctgggatcgagtgaaggacctggccactgtgtacgtggatgtgctcaaagacagcggcagagactatgtgtcccagtttgaaggctccgccttgggaaaacagctaaacctaaagctccttgacaactgggacagcgtagactccaccttcagcaagctgcgcgaa

SEQ ID NO: 191153 - DNA, 183 bp, Glycine max
gcaatatgaaatgatctgctgcagtgctctgagccctaggattcatctttcttttcaccgtagtggcctgactggcattgtattagctgcctcatcactagacatcgtactacacgacacgtactacgttgtagcccacttccactatgtcctatcaatagggctgtatttgccatcatagga

SEQ ID NO: 191154 - DNA, 184 bp, Glycine max
tctgcctctccctcccttcctcaggcatcagagcggagacttcagggagaccagagcccagcttgccaggcactgagctagaagccctgccatggcacccctgagaccccttctcatactggccctgctggcatgggttgctctggctgaccaagagtcatgcaaggtgcgctgcactgagggc

SEQ ID NO: 191155 - DNA, 281 bp, Glycine max
ggtgactgtctcagtggagctgggtcatctcaggccttggctccttgaacttttgagcgccatgtgcttacccgaagtcctctctgaggacatgaagaagctgaaggcccgaatgcaccaggccatagaaagattttatgataaaatgcaaaatgcagaatcaggacgtggacaggtgatgtcgagcctggcagagctggaggacgacttcaaagagggctacctggagacagtggcggcttattatgaggagcagcacccagagctcactcctctacttg

SEQ ID NO: 191156 - DNA, 285 bp, Glycine max
caaaaattagccaggcatggtggcgcatgcctatagtcccagctactcgggaggctaaggcaggagaatcacttgaacccgggaggtggaggttgcggtggacggagattgcgccactgtactccagcctggttgtcttcaggcagagtgagaagctgcagcaatgtctgattttgtggaaagcgaggctgaggagtcagaggaagaatacaatgatgaaggcgaggtggtaccccgagtcaccaagaaatttgtggacgaggaggatgatgatgaggaggagga

SEQ ID NO: 191157 - DNA, 290 bp, Glycine max
  unsure (1)..(290): unsure at all n locations
catgaccatgacccctaaaatggggcctctcagcctcctaatagacttcgggctaaccctgtgatttcacttccactccataacgctcctcatactangcctactaaccaacacactaaccatatacccatgatggcgcgatgtaacacgagaaagcacataccaaggccaccacacaccacctgtccaaaaaggccttcgatacgggataatcctatttattacctcagaagtttttttcttcgcaggatttttctgagccttttaccactccagcctagcccctaccc

SEQ ID NO: 191158 - DNA, 162 bp, Glycine max
ggaaaacaaaatctgatactccatttgattattgtaaatatttgatcttgaatcacttgacagtgtttgtttgaattgtgtttgttttttcctttgatgggcttaaaagaaattatccccagggagaaagagcagttatgccacttcttaaaacagagcaaa

SEQ ID NO: 191159 - DNA, 154 bp, Glycine max
cttggcagctaatgggctcttaccaagtttaaacacaaaatttatcataacaaaaatactactaatataactactgtttccatgtcccatgatcccctctcttcctccccaccctgaaaaaaatgagttcctattttttctgggagaggggggg

SEQ ID NO: 191160 - DNA, 155 bp, Glycine max
tgccctttgacccccaagatactcatcagtcaaggttctacttgagcaagaaaaagtgggtaatggtgcccatgatgagtttgcatcacctgactataccttacttccgggacgaggagctgtcctgcaccgtggtggagctgaagtacacaggc

SEQ ID NO: 191161 - DNA, 209 bp, Glycine max
aaagagcaactcagtctgctggacaggttcacggaggatgccaagaggctgtatggctccgaggcctttgccactgactttcaggactcagctgcagctaagaagctcatcaacgactacgtgaagaatggagctagggggaaaatcacagatctgatcaaggaccttgactcgcagacaatgatagtcctggtgaattacctcttctt

SEQ ID NO: 191162 - DNA, 217 bp, Glycine max
caccaatggaagcagctggcttcactgctcaggtgattatcctgaaccatccaggccaaataagcgccggctatgcccctgtattggattgccacacggctcacattgcatgcaagtttgctgagctgaaggaaaagattgatcgccgttctggtaaaaagctggaagatggccctaaattcttgaagtctggtgatgctgccattgttgatatggt

SEQ ID NO: 191163 - DNA, 220 bp, Glycine max
caaccatcacgcctcaggagatcaatggcaaatgggaccacgtgcggcagctggtgcctcggagggaccaagctctgacggaggagcatgcccgacagcagcacaatgagaggctacgcaagcagtttggagcccaggccaatgtcatcgggccctggatccagaccaagatggaggagatcgggaggatctccattgagatgcatgggaccctggagga

SEQ ID NO: 191164 - DNA, 210 bp, Glycine max
cactcactaccacgtgaagggcatcaagccatttatgagggatctgcccccatgatccagacaactcccactaggccccacctcccaagaccgccacattggagatcaaatttcaatatgagttttgatagggacaaccaacccaaatccagaccatagcagtaggcaacataggaaaccaaaaaacctgaaaataatctatgggacagg

SEQ ID NO: 191165 - DNA, 183 bp, Glycine max
gaaaaaagtataggataaattacattaaaatagcacatgattttattttgttttcttcatttctcttgctcaccaagaagtaacaaaagtatagttttgacagagttggtgttcataatttcagttctagttgattgcgagaattttcaaataaggaagaggggtcttttatccttgtccgta

SEQ ID NO: 191166 - DNA, 251 bp, Glycine max
tgaaccagttatgtgtgttgcatgagaaaacgccagtaagtgacagagtcaccaaatgctgcacagaatccttggtgaacaggcgaccatgcttttcagctctggaagtcgatgaaacatacgttcccaaagagtttaatgctgaaacattcaccttccatgcagatatatgcaagctttctgagaaggagagacgaatcaagaaacaaactgcacttgttgagcttgtgaacacaagcccaaggcaacaa

SEQ ID NO: 191167 - DNA, 250 bp, Glycine max
gctggtcaacgcggtgtcgcgcgtgctcatggccttctcgcccaactacatgtccatgctgctcttccgcctgctgcagggcctggtcagcaagggcaactggatggctggctacaccctaatcacagaatttgttggctcgggctccagaagaacggtggcgatcatgtaccagatggccttcacggtggggctggtggcgattaccgggctggcctacgccctgcctcactggcgctggctgcagctg

SEQ ID NO: 191168 - DNA, 164 bp, Glycine max
ggctcggagctccgggcactcagacatcatgagttggtccttgcacccccggaatttaattctcaacttctatgctctgttatttctctcttcaacatgtgtagcatatgttgctaccagagacaactgctgcatcttagatgaaagattcggtagttattgtc

SEQ ID NO: 191169 - DNA, 134 bp, Glycine max
gctggagaaacagcagcaggacctgaaagcagatcacgatgccctgctcttccatctgaagcacttccccgtggacctgcgcttcgtggcctgccagatggagctcctccacagcaacggctcccagaggacct

SEQ ID NO: 191170 - DNA, 124 bp, Glycine max
tgcaatagtttacctgtactatagggacgcttgtagagctgaataaagccaatgaacttttctatctttctcataaactggtggatttatatcctagtaatcctgtatctaggtttgcagtggg

SEQ ID NO: 191171 - DNA, 176 bp, Glycine max
attcaagatcatcttcacaacatcacctgctagccacgtgggatgtttgaaatgttaagtactgtaaatttaagaggtgtattctgaggccacattgctttgcatgccaataaataaattttctcgtagtgttgtgtagccaaaaattacaaatggaataaagttttatcaaaata

SEQ ID NO: 191172 - DNA, 150 bp, Glycine max
gccccggcagatcgacgaccagattacaagggcacttggatccacccagaaattgacaaccccgagtattctcccgatcccagtatctatgcctatgataactttggcgtgctgggcctggacctctggcaggtcgcgtctggcaccatc

SEQ ID NO: 191173 - DNA, 259 bp, Glycine max
gaactttgaagcagatcttatcctagttgagcctccaagtaaggatttagctagctagctggtactttaatttgagccatatgagtctctgagcagaggacccagggaaataaagtcaggctcctaatgcatggtgatgatgacgtgataagtgtgttttgttaagctactaagtttgtggtaatttttaatgtagcaataaaaaactaatgcagagggtgaaaagtgctgtgtctaagatatgtggcaaaatcagggt

SEQ ID NO: 191174 - DNA, 263 bp, Glycine max
ctaaagcccatgtcgaagccccatcgctgggtcaatagtacttgccgcagtactcttaaaacaaggcggctatggtataatacgcctcacactcattctcaaccccctgacaaaacacatagcctaccccttccttgtactatccctatgaggcataattataacaagctccatctgcctacgacaaacagacctaaaatcgctcattgcatactcttcaatcagccacatagccctcgtagtaacagccattctcatcaaac

SEQ ID NO: 191175 - DNA, 157 bp, Glycine max
cgacctacgcacacgagaacatgcctctcgcaaaggatctccttcatccctctccagaagaggagaagaggaaacacaagaagaaacgcctggtgcagagccccaattgccacttcatggatgtgaaatgcccaggatgctataaaatcaccacggt

SEQ ID NO: 191176 - DNA, 157 bp, Glycine max
ccacccacagcctaattattagcatcatccctctactattttttaaccaaatcaacaacaacctatttagctgttccccaaccttttcctccgaccccctaagaggccccctcctaatactaactacctgactcctacccctcacaatcatggcaag

SEQ ID NO: 191177 - DNA, 168 bp, Glycine max
aagaaagtgaaagaccactgcagcaaacacagcccctgccagaaaggagggacctgtgtgaacatgccaagcggcccccactgtctctgtccacaacacctcactggaaaccactgccagaaagagaagtgctttgagcctcagcttctccggtttttccacacaaca

SEQ ID NO: 191178 - DNA, 248 bp, Glycine max
gtttgtcatgggggactgcctttaaattttaagtgacactacagccaaacacaaaaaggtgatgggttgtgttatgcttgtattgaatgctgtcttgacatctcttggcttgtcctccggtatgttctaaagctgtgtctgagatctggatctgcccatcactttggctagtgacagggctaattaatttgctttatacattttcagtaatctgcctttttcctttctggaggcatcacatgctggtg

SEQ ID NO: 191179 - DNA, 145 bp, Glycine max
ctctccatgctctgtccaatatggagcagccacatttaccaggactgggaaggctgcacaggtgactatccagtcttcagggacatttaccagcaaattccaagtggacaacaacaaccgcctgttactgcagcaggtctcattg

SEQ ID NO: 191180 - DNA, 189 bp, Glycine max
ctctcaaaacatgttctgtgctggacacccatctctaaagcaggacgcctgccagggggatagtgggggcgtttttgcagtaagggacccgaacactgatcgctgggtggccacgggcatcgtgtcctggggcatcgggtgcagcaggggctatggcttctacaccaaagtgctcaactacgtggactg

SEQ ID NO: 191181 - DNA, 241 bp, Glycine max
gtcccagcgaacccgcgtgcaacctgtcccgactctagccgcctcttcagctcatggatcccaactgctcctgcgccgccggtaagaggctggggatgcccagtgtagactgtagcgctagagaagcaatttctgacccctctttctttctctggtcactcaatttcaggacaggagttgctccttcccaaagagttttggggtatctttctctccatcctgggttattcggagccccttt

SEQ ID NO: 191182 - DNA, 161 bp, Glycine max
gcgaggtctgcggtgttcgattcaccaggaacgacaagctgaagatccacatgcggaagcacacgggagagcgcccctactcatgcccgcactgcccagcccgcttcctgcacagctacgaccacaagaaccacatgcacctgcacacaggggtccggccc

SEQ ID NO: 191183 - DNA, 219 bp, Glycine max
tagcaaatatggctttccttcttcccccacctgtggagactgcacaccggattcacgcacttccctgagttctggccaggagtgttctcaatcagctcaaattgttacaaagttcagctggaagttttactctcctgtggcttttcccggcatctctggtcgccctcctgaaggacccctgtgaggccaggctaaaaagacttgctaggagtcccagtg

SEQ ID NO: 191184 - DNA, 261 bp, Glycine max
gtcttgggaacggacaaggagaattcaagtgtgaccctcatgaggcaacgtgttatgatgatgggaagacataccacgtaggagaacagtggcagaaggaatatctcggtgccatttgctcctgcacatgctttggaggccagcggggctggcgctgtgacaactgccgcagacctgggggtgaacccagtcccgaaggcactactggccagtcctacaaccagtattctcagagataccatcagagaacaaacatattgt

SEQ ID NO: 191185 - DNA, 233 bp, Glycine max
cctcaacaccaccttcttcgaccccgccggaggaggagaccccattctataccaacacctattctgatttttcggtcaccctgaagtttatattcttatcctaccaggcttcggaataatctcccatattgtaacttactactccggaaaaaaagaaccatttggatacataggtatggtctgagctatgatatcaattggcttcactagggtttatcgtgtgggcacaccat

SEQ ID NO: 191186 - DNA, 224 bp, Glycine max
  unsure (1)..(224): unsure at all n locations
tgactggacccatctgtcttcaaaagaagtggacccgtctacaggtgaactccagtccctacagatgccagaatccgaagggccaagctctctggacccctcccaggagggacccacagggctgaaggaagctgccttgtacccacatctcccgcaanaggctgacccgcggctgattgagtccctctcccagatgctgtccatgggcttctctgatgaaggcg

SEQ ID NO: 191187 - DNA, 180 bp, Glycine max
gggaagcccaagacatcggcaaacccagtgcagcggatcctgggtggacacctggatgccaaaggcagctttccctggcaggctaagatggtttcccaccataatctcaccacaggtgccacgctgatcaatgaacaatggctgctgaccacggctaaaaatctcttcctgaacaattca

SEQ ID NO: 191188 - DNA, 155 bp, Glycine max
gcctattacaacctggaggaaagctgtacacggttctaccatccggaaaaggaggatggaaagctgaacaagctctgccgtgatgaactgtgccgctgtgatgaggagaattgcttcatacaaaagtcggatgacaaggtcaccctggaataacg

SEQ ID NO: 191189 - DNA, 205 bp, Glycine max
gcacaaatggggcccaagacgttctcataataataattccagtgacctccatccccataagcatcattcccatgaacagcatccccacggacaccatccccatgcacaccatcctcatgaacatgatacccatagacagcatccccatggacaccacccccaatggaaaccatcctcatggacacaccccccatggacaacatcc

SEQ ID NO: 191190 - DNA, 226 bp, Glycine max
  unsure (1)..(226): unsure at all n locations
gtttcttggagcttcacaaacttaaaaccaagnaacatctattattgctactattgtgtgtttttctagttaagtcccaaggtgtcaacgacaatgaggagggtttcttcagtgcccgtagtcatcgaccccttgacaagaagagagaagaggctcccagcctgaggcctgccccaccgcccatcagtggaggtggctatcgggctcgtccagccaaagcagctgc

SEQ ID NO: 191191 - DNA, 257 bp, Glycine max
gcgagaatgaagactattctcagcaatcagactgtcgacattccagaaaatgtcgacattactctgaagggacgcacagttatcgtgaagggccccagaggaaccctgcggagggacttcaatcacatcaatgtagaactcagccttctaggaaagaaaaaaaagaggctccgggttgacaaatggtggggtaacagaaaggaactggctaccgttcggactatttgtagtcatgtacagaacatgatcaagggttt

SEQ ID NO: 191192 - DNA, 260 bp, Glycine max
gtaaaacccagcccatgacccctaacaggggccctctcagccctcctaatgacctccggcctagccatgtgatttcacttccactccataacgctcctcatactaggcctactaaccaacacactaaccatataccaatgatggcgcgatgtaacacgagaaagcacataccaaggccaccacataccacctgtccaaaaaggccttcgatacgggataatcctatttattacctcagaagtttttttcttcgcagattt

SEQ ID NO: 191193 - DNA, 232 bp, Glycine max
gcaaggcagggggcgctgggatctggctgtgcaggaaagggcagcccggagccagtgcacctacagcaaccccgagggcaccgtggtgctcgcctgtgaccaggcccagtgtcgctggctgaacgtccagctctctccttggcagggctccctgggactgcagtacaatgctagtcaggagtgggacctgaggtcgagctgcggttctctgcggctcaaccgtgtctatcga

SEQ ID NO: 191194 - DNA, 91 bp, Glycine max
gatcgatacgtcttctccaacttcacggcagtcccgaagaggtctcctgtgggcgagttcctcctagcgggtggcaggaccaaaacctggg

SEQ ID NO: 191195 - DNA, 265 bp, Glycine max
gcctatcatatagtaagacccagcccatgaaccctaacaagggccctctcagccctcctaatgacctccggcctagccatgtgatttcacttccactccataacgctcctcatactaggcctactaaccaacacactaaccatataccaatgatggcgcgatgtaacacgtaaaagcacataccaaggccaccacacaccacctgtccaaaaaggccttcgatacgggataatcctatttattacctcagaagtttttttctcgc

SEQ ID NO: 191196 - DNA, 189 bp, Glycine max
aagacagaggacacgatctttctcagagagtaccagacccgccagaaccagtgcttctataactccagttacctgaatgtccagcgggagaatgggaccgtctccagatacgagggaggccgagaacatgttgctcacatgctgttccttagggacaccaagaccttgatgtttggttcctacctggac

SEQ ID NO: 191197 - DNA, 187 bp, Glycine max
cccgaccagcagaggctcatctttgcaggcaagcagctggaagatggccgcactctttctgactacaacatccagaaggagtcgaccctgcacctggtcctgcgtctgagaggtggtatgcagatcttcgtgaagaccctgaccggcaagaccatcactctggaggtggagccccatgacaccatca

SEQ ID NO: 191198 - DNA, 128 bp, Glycine max
cgcagcatggctcgtggtcccaagaagcatctgaagcgggtggcagctccaaagcattggatgctggataaattgaccggtgtgtttgctcctcgtccatccaccggtccccacaagttgagagagtg

SEQ ID NO: 191199 - DNA, 259 bp, Glycine max
attgtgatgtgatcgtagctgaggtatgtgcttctcaggcctccaaagcttccacatttttgttggtatcagttattcatgttgggtgtattctcatcccagatttttctcatttagatcataaacataatagaaagggctagaattgcaatcttgtgtaacttaaaaagcagctagtttttatttcctaggttcgttccaccagtcataaaccagatgaaatctatggcatgattgaaagactatctcctggcactcg

SEQ ID NO: 191200 - DNA, 220 bp, Glycine max
attagctgctgattttattgaaagtaaggatgtttgcaaaaactatgctgaggcaaaggatgtcatcctgggcatgtttttgtatgaatatgcaagaaggcatcctgattactctgtcgtgctgctgctgagacttgccaagacatatgaaaccactctagagaagtgctgtgccgctgcagcacctcatgaatgctatgccaaagtgtcgatgatttaa

SEQ ID NO: 191201 - DNA, 244 bp, Glycine max
ggactgggctgggaatgaagcttatgcagaatatcacttccgggtaggctctgaggctgaatgctatgccctccaagtatcctcctatgaaggcactgcgggtgatgctctgattgagggttccgtagaggaaggggcagagtacacctctcacaacaacatgcagttcagcacctttgacagggatgcagaccagtgggaagagaactgtgcagaagtctatgggggaggctggtggtataat

SEQ ID NO: 191202 - DNA, 242 bp, Glycine max
gagcacatcaaaagttcccaaagagggcttgctctctcttcacctgctctgttctacagcacactaccagaagacagcagaaatgaaaagcatttactttgtggctggattatttgtaatgctggtacaaggcagctggcaacgttcccttcaagacacagaggagaaatccagatcattctcagcttcccaggcagacccactcagtgatccctgatcagatgaacgaggacaagcgccat

SEQ ID NO: 191203 - DNA, 188 bp, Glycine max
gcacagagactcgcaggccccgagaactgtcgcccttccacgatgtggctccgcaccgttatcctggccactctctctgcttccgcggcttgggggcattacgtctcgccacctgtggtggacaccgtgcatggcaaagtgctggggaagttcgtcagcttagaaggatttgcacatcctgtggccat

SEQ ID NO: 191204 - DNA, 217 bp, Glycine max
catcactaaggtcttcagcaatggggctgacctctccggggtcacagaggaggcacccctgaagctctccaaggccgtgcataaggctgtgctgaccatcgacgagaaagggactgaagctgctggggccatgtttttagaggccatacccatgtctatcccccccgaggtcaagttcaacaaaccctttgtgcttcctaaatgattgaccaaaata

SEQ ID NO: 191205 - DNA, 188 bp, Glycine max
ggagaattgctcgaaccttggaggtggaggttgtggtgagccatgatcgcaccactgcactctagcctgggtgaccgagggaggctctgtctcaaaagcatagcaaaagcatacacaaaaacacctacaaaaacctgcagtttggtttgtactgtggatttaaattatgctgtctaattttgagatca

SEQ ID NO: 191206 - DNA, 182 bp, Glycine max
tgggaatacaggcacgtgccaccactaatttcttttgtattttagtagagacggggtttcaccgtgttgcccaggctggtctcgaactccttagctcaggcaatccgaccgccttggcctcccaaggttctgggaatataggcgtgagcaccgcacccagcctctacaaataattttttttt

SEQ ID NO: 191207 - DNA, 209 bp, Glycine max
caagcatcatcttggggcaggagcaggattccttcggtgggaactttgaaggaagccagtccctggtgggagacattggaaatgtgaacatgtgggactttgtgctgtcaccagatgagattaacaccatctatcttggcgggcccttcagtccgaatgtcctgaactggcgggcactgaagtatgaagtgcaaggcgaagggttcacc

SEQ ID NO: 191208 - DNA, 194 bp, Glycine max
ctgaaccagttatgtgtgttgcatgagaaaacgccagtaagtgacagagtcaccaaatgctgcacagaatccttggtgaacaggcgaccatgcttttcagctctggaagtcgatgaaacatacgttcccaaagagtttaatgctgaaacattcaccttccatgcagatatatgcacactttctgagaaggagag

SEQ ID NO: 191209 - DNA, 183 bp, Glycine max
gtgaatgaagaacgaacgctggaagtagaaatagagcctggggtgagagacggcatggagtacccctttattggagaaggtgagcctcacgtggatggggagcctggagatttacggttccgaatcaaagttgtcaagcacccaatatttgaaaggagaggagatgatttgtacacaaatgtg

SEQ ID NO: 191210 - DNA, 196 bp, Glycine max
cacgtgcctcctggtctcagtatggcgctgtcctgggttcttacagtcctgagcctcctacctctgctggaagcccagatcccattgtgtgccaacctagtaccggtgcccatcaccaacgccaccctggaccggatcactggcaagtggttttatatcgcatcggcctttcgaaacgaggagtacaataagtcgg

SEQ ID NO: 191211 - DNA, 287 bp, Glycine max
  unsure (1)..(287): unsure at all n locations
gtgactgaacggacccggtgacaggatcttgctgttggtattaggagatctgcacatcccacaccggtgcaaaaatataacagctanattcaaaaaactcctggtgccatgaaaaattcagcacattctctgcacaggaaacctttgcactaaagagagttatgactatctcaagactctggctggtgatgttcatattgtgagaggagacttcgatgagaatctgaattatccagaacagaaagttgtgactgttggacagttcaaaattggtctgatccatggac

SEQ ID NO: 191212 - DNA, 284 bp, Glycine max
ctcggcaagttctcccaggagaaagccatgttcagttcgagcgccaagatcgtgaagcccaatggcgagaagccggacgagttcgagtccggcatctcccaggctcttctggagctggagatgaactcggacctcaaggctcaactcagggagctgaatattacggcagctaaggaaattgaagttggtggtggtcggaaagctatcataatctttgaccccgttcctcaactgaaatctttccagaaaatccaagtccggctagtacgcgaattggagaaaaa

SEQ ID NO: 191213 - DNA, 283 bp, Glycine max
aggaggtttgactaagatcaatcatgacgacttacagtgacaaaggggcaaagcctgagagaggccgattcctccacttccactctgtgaccaaaacaaaaagcaacgccaagcaggccgcgtcattctactgcagcaagatgggctttgaacctctagcctacaggggcctggagaccggttcccgggaggtggtcagccatgtaatcaaacaagggaagattgtgtttgtcctctcctcagcgctcaacccctggaacaaagagatgggcgatcacctggt

SEQ ID NO: 191214 - DNA, 281 bp, Glycine max
gtttaaatagttctgttgtaacttttaatagttttgtgtatcattcaactttttttcttgcagcaccgaggcacatttgaaaagatggaattgaagtcgttttgtttaacgctgtgtgaatataaagagtagtttgcagctgtgtggtagtggtttaatttgcagccttagctctgtggtgtctggctctagagttacttctttttaccaagcattttcagcctccattttgaaggctgtctacacttaagaagtcttagctgtctaatttttagagaata

SEQ ID NO: 191215 - DNA, 278 bp, Glycine max
ctttcttttcaccgtagtggcctgactggcattgtattagcaaactcatcactagacatcgtactacacgacacgtactacgttgtagcccacttccactatgtcctatcaataggagctgtatttgccatcataggaggcttcattcactgatttcccctattctcaggctacaccctagaccaaacctacgccaaaatccatttcactatcatattcatcggcgtaaatctaactttcttcccacaacactttctcggcctatccggaatgccccg

SEQ ID NO: 191216 - DNA, 281 bp, Glycine max
tgcccatttactctggactccggatggctgccgcacgcctctgcctctccctgctgctcctgtccacctgcgaggctctgttactacagccactgctgggtgcccagggagccccactggagccagtgtacccaggggacaatgccacaccagagcagatggcccagtatgcagctgatctccgtagatacatcaacatgctgaccaggcctaggtatgggaaaagacacaaagaggacacgctggccttctcggagtgggggtccccgcatgctgctgtc

SEQ ID NO: 191217 - DNA, 279 bp, Glycine max
gaaaaaatttgcatatggctacatcgaggaccttaagtgccgtgtgctggaactgccttaccaaggcgaggagctcagcatggtcatcctgctgccggatgacattgaggacgagtccacgggcctgaagaagattgaggaacagttgactttggaaaagttgcatgagtggactaaacctgagaatctcgatttcattgaagttaatgtcagcttgcccaggttcaaactggaagagagttacactctcaactccgacctcgcccgcctaggtgtgca

SEQ ID NO: 191218 - DNA, 271 bp, Glycine max
gcggtccaagcgcacacgggcagggaaagcatgaggaataagtgacctagctggagagacatccggcgggtttccgtggcaaccctccggaactatgggatggggaaacagggcaatgagatgccggatccagagggaggcccacgtcctgctggaagcactcaggaagacccaaggccagcctttcgagcccaccttcgtcatcggctgcgcggcctgcaacgtcataggcgacatcctgttccggaagcatattgactagaatcatgag

SEQ ID NO: 191219 - DNA, 279 bp, Glycine max
ggaaggaggcgtccgatgggtgggctttgtggcaagccccttgctgaagcagaagggcgtgaagaaccgggagctcatccacatctctgactggctgccaacactcatgaagctggccaggggacacaccaatggcacaaagcctctggatggcttcgacgtgtggaaaaccatcagtgaaggaagcccatcccccagaattgagctgctgcataatattgacccgaacttcgtggactcttcaccgtgtcccaggaacagcatggctccagcaaagga

SEQ ID NO: 191220 - DNA, 201 bp, Glycine max
gcccaggaaggccttttgcaagaaggagaggaatgggggagaggacgtgagggaccacccccaaccacacagctgccgcagcatctcacaccccgaagggctgaagagaaggaactttgggccaagcttggaaggggccaactggggttactgggcccgcatgagcctcgggcaactctccctcctggcctctgcttgggg

SEQ ID NO: 191221 - DNA, 281 bp, Glycine max
atggcggctgggaccctgtacacgtatcctgaaaactggagggccttcaaggctctcatcgctgctcagtacagcggggctcaggtccgcgtgctctccgcaccaccccacttccattttggccaaaccaaccgcacccctgaatttctccgcaaatttcctgccggcaaggtcccagcatttgagggtgatgatggattctgtgtgtttgagagcaacgccattgcctactatgtgagcaatgaggagctgcggggaagtactccagaggcagcagccca

SEQ ID NO: 191222 - DNA, 280 bp, Glycine max
tggccagcctgctacgcatggtcaaacgaaaacccacaggagacctggagctgttgcaactggtgatattggcagagtctggcctggaactaaaatgcctggaaaaatgggaaacatatacaggacagaatatggactgaaagtgtggagaataaacacaaagcacaacataatctatgtaaatggctctgtacctggacataaaaattgcttagtaaaggtcaaagattctaaactgtctgcatataaggatctcggtaaaaatctaccattccctaca

SEQ ID NO: 191223 - DNA, 284 bp, Glycine max
agcccagtgacaccatcgaaaatgtgaaggccaagatccaggataaggaaggcattccccccgaccagcagaggctcatctttgcaggcaagcagctggaagatggccgtactctttctgactacaacatccagaaggagtcgaccctgcacctggtcctgcgtctgagaggtggtatgcagatcttcgtgaagaccctgaccggcaagaccatcaccctggaagtggagcccagtgacaccatcgaaaatgtgaaggccaagatccaggatacagaaggcatc

SEQ ID NO: 191224 - DNA, 280 bp, Glycine max
ggccagcctgctacgcatggtcaaacgaaaacccacaggagacctggagctgttgcaactggtgatattggcagagtctggcctggaactaaaatgcctggaaaaatgggaaacatatacaggacagaatatggactgaaagtgtggagaataaacacaaagcacaacataatctatgtaaatggctctgtacctggacataaaaattgcttagtaaaggtcaaagattctaaactgtctgcatataaggatctcggtaaaaatctaccattccctacat

SEQ ID NO: 191225 - DNA, 278 bp, Glycine max
gtgcccatttactctggactccgggtaagtgggctcagcctgcctggggctctgggggcctcacccaggctggggcctgggatcggagaggaggtggtgctttgcagggccaggggccttgggaggcctaaggtcctgcttgggtcttgctttctgcatctggacagacctgtcacgctagaagagccgtctgctgactgcacgtgtgtgtgcacactcgtgtgcatggctgtgaactggaatgtgtgactgtgaccttgtgagtgactggggtccct

SEQ ID NO: 191226 - DNA, 275 bp, Glycine max
ataaatttgaagctctggctgctcatgacgctctggttgagctcagtggagccatgaacactactgcctgcagtctgatgaagatagcaaatgatattcgatttttgggttctggtcctcggtcaggtctgggagaattgatcttgcctgaaaatgaaccaggaagcagtatcatgccaggcaaggtgaaccctactcagtgtgaagcaatgaccatggttgcagcccaagtcatggggaaccatgttgctgtcactgtcggaggcagcaatgga

SEQ ID NO: 191227 - DNA, 279 bp, Glycine max
ggaccccaacagcgaggagaacagcaacgatattgccctggtccacctctccagtcccctgcccctcacagaatacatccagcctgtgtgcctcccagctgccggccaggccctggtggatggcaagatctgtaccgtgacgggctggggcaacacgcagtactatggccaacaggccggggtactccaggaggctcgagtccccataatcagcaatgatgtctgcaatggcgctgacttctatggaaaccagatcaagcccaagatgttctgtgctgg

SEQ ID NO: 191228 - DNA, 139 bp, Glycine max
cctagaggcagctgctccaggaacagaggtgccatgcagccccgggtactccttgttgttgcctccggcgtctggcctctgccgactcaaggcgagtgcctccttctcagtcatgcaggctacatgaccgcacagcgca

SEQ ID NO: 191229 - DNA, 280 bp, Glycine max
cttgggcattaggttctccagcagagctctggccagctgcctctactttaactgggaacacaggctctcacaagatcagaacccccactcacccccaagatcttatctagcaagcctgtagtattcagtttctgttgtaggaagagagcgaggcatccctgaattccacgcatctgctggaaacgagccgtgtcagatcgcacatccctgcgcccccatgcccccatgcccctctgagtcacacaggacagaggaggcagagcttctgcccactgttatt

SEQ ID NO: 191230 - DNA, 238 bp, Glycine max
tgaattcagctcgaggcctggctaattatgtattgttagtagagacagggcttctccatgttggtcaggctggtctcgaactctcgacctcaggtgatctccctgccttggactcccaaagtgcggggatcacacgtgagagccagcacccccagccggctctatgctttctgactctcagacatatctaaacttaaggtcatatcaggacttcatgtgctgaatacaatggattctt

SEQ ID NO: 191231 - DNA, 283 bp, Glycine max
agcagacacaaccccttcctgcgaccctggagtcccaatcgtgctgccattgtccttctgcccaggactctttcgtcctcagtcaccttggacaaagaagtgtggatcctcagattccatcttttccaactccaaggtgccatggcagagaaggtgctggtaataggtggggctggctacattggcagccacacggtgctggagctgctggaggctggctacttgcctgtggtcatcgataacttccataatgccttccgtggagggggctccctgcctgaga

SEQ ID NO: 191232 - DNA, 283 bp, Glycine max
cgtgcctcctggtctcagtatggcgctgtcctgggttcttacagtcctgagcctcctacctctgctggaagcccagatcccattgtgtgccaacctagtaccggtgcccatcaccaacgccaccctggaccagatcactggcaagtggttttatatcgcatcggcctttcgaaacgaggagtacaataagtcggttcaggagatccaagcaaccttcttttacttcacccccaacaagacagaggacacgatctttctcagagagtaccagacccgacaggac

SEQ ID NO: 191233 - DNA, 282 bp, Glycine max
cagagcacatcaaaagttcccaaagagggcttgctctctcttcacctgctctgttctacagcacactaccagaagacagcagaaatgaaaagcatttactttgtggctggattatttgtaatgctggtacaaggcagctggcaacgttcccttcaagacacagaggagaaatccagatcattctcagcttcccaggcagacccactcagtgatcctgatcagatgaacgaggacaagcgccattcacagggcacattcaccagtgactacagcaagtatctg

SEQ ID NO: 191234 - DNA, 280 bp, Glycine max
atggcgtcccgtaaggaaggtaccggctctactgccacctcttccagctccaccgccggcgcagagggaaaggcaaaggcaaaggcggctcgggagattcagccgtgaagcaagtgcagatagatggccttgtggtattaaagataatcaaacattatcaagaagaaggacaaggaactgaagttgttcaaggagtgcttttgggtctggttgtagaagatcggcttgaaattaccaactgctttcctttccctcagcacacagaggatgatgctgactt

SEQ ID NO: 191235 - DNA, 277 bp, Glycine max
ggaaattatcaggaaaggaggtgaaacatctgaactgtatctcattcaacctgacagttctgtcaaaccgtatagagtatactgtgacatgaatacagaaaatggaggatggacagtgattcagaaccgtcaagacggtagtgttgactttggcaggaaatgggatccatataaacagggatttggaaatgttgcaaccaacacagatgggaagaattactgtggcctaccaggtgaatattggcttggaaatgataaaattagccagcttaccagg

SEQ ID NO: 191236 - DNA, 275 bp, Glycine max
ggaagacggggataagcgctgtaagcttctgctggggataggaattctggtgctcctgatcatcgtgattctgggggtgcccttgattatcttcaccatcaaggccaacagcgaggcctgccgggacggccttcgggcagtgatggagtgtcgcaatgtcacccatctcctgcaacaagagctgaccgaggcccagaagggcttccaggatgtggaggcccaggccgccacctgcaaccacactgtgatggccctaatggcttccctggatgcag

SEQ ID NO: 191237 - DNA, 276 bp, Glycine max
caaactcaaacagaaggtgtctgttaatgagagagtgatgcccatctgcctaccttcaaaggattatgcagaagtagggcgtgtgggttatgtactcggctgggggcgaaatgccaattttaaatttactgaccatctgaagtatgtcatgctgcctgtggctgaccaagaccaatgcataaggcattatgaaggcagcacagtccccgaaaagaagacaccgaagagccctgtaggggtgcagcccatactgaatgaacacaccttctgtgctgg

SEQ ID NO: 191238 - DNA, 282 bp, Glycine max
cagagccacaggacattgagtgttgtggggccctagaatactacgacaaagcctttgaccgcatcaccacgaggagtgagaagccactgcggagcatcaagcgcatcttccacactgtcaccaaaataaacgaccctgtcatccgcaagctggcaaaaacttaggggaatgtgtttgccactgatgccatcctggccacgctgatgagctgtacccgctcagtgtattcctgggatattgtcgtccagagagttgggtccaaactcttctttgacaagagag

SEQ ID NO: 191239 - DNA, 281 bp, Glycine max
gcgcgccctgcggcccggcctctagtcatcgccctcgcagcggcggccaacatcaccgccactgccacccctcccagactgtggacgggaggatggagtcgatggccgtcgctaccgacggcggggagaggccgggggtcccagcgggctcaggtctgtacggcttcccagcgtcgggcggagctgcgtcggagaaagctgctcatgaactcggaacagcgcatcaaccggatcatgggctttcacaggcccgggagcggcgcggagtgaaaagaagataa

SEQ ID NO: 191240 - DNA, 279 bp, Glycine max
  unsure (1)..(279): unsure at all n locations
gaccaacggacggatgccatgagggctctgctgctcctggggttcctgctggtgagcttggagtcaacactttcgattccaccttgaggaagcaactgaaaaagnataagtacaaagctgaaaagcacacagtcgttctcactgtcaccggggagccctgccacttccccttccagtaccaccggcagctcnaccacaaatgatancaccggngncggtcangccctcagccctggtgtgctaccacccccaactttgatcaggaccagcgatggggat

SEQ ID NO: 191241 - DNA, 277 bp, Glycine max
cttggcagctaatgggctcttaccaagtttaaacacaaaatttatcataacaaaaatactactaatataactactgtttccatgtcccatgatcccctctcttcctccccaccctgaaaaaaatgagttcctattttttctgggagagggggggattgattagaaaaaaatgtagtgtgttccatttaaaattttggcatatggcattttctaacttaggaagccacaatgttcttggcccatcatgacattgggtagcattaactgtaagttttgt

SEQ ID NO: 191242 - DNA, 276 bp, Glycine max
cgcccctggtcgctgccaccccagggatggagacgcaggggagtgggtggtcgggctccccatctaaaagcctgagggctctggggccacagcccatgtcatcccgggggggcctcctgtctaaccactttggcctccagccagacctccctctcccctcccagggcgacagcggtggtccctttgtgtgtgaggacagcatctctcggacgccacgttggcggctgtgtggcattgtgagttggggcactggctgtgccctggcccagaagccag

SEQ ID NO: 191243 - DNA, 276 bp, Glycine max
  unsure (1)..(276): unsure at all n locations
ctttattttgatgtttccttaatgtgtaatttacttattataagcatgatcttttaaaaatatatttggcttttaaagtanaaaaaaaaaaaaaaaaaaagaaaaaaaaaaaaaaggggggccccccaaaaatgaaccccgtcaccccggaaataaatccgggccgggaacctgagggggaaccattttccccaaaagggagccgaataaaacttgggggaaaccagggcaaaaccttttcccggggaaaaatttttacccgcccaaattcccaaa

SEQ ID NO: 191244 - DNA, 273 bp, Glycine max
caggatgtctacaaaattggtggtattggtactgttcctgttggccgagtggagactggtgttctcaaacccggtatggtggtcacctttgctccagtcaacgttacaacggaagtaaaatctgtcgaaatgcaccatgaagctttgagtgaagctcttcctggggacaatgtgggcttcaatgtcaagaatgtgtctgtcaaggatgttcgtcgtggcaacgttgctggtgacagcaaaaatgacccaccaatggaagcagctggcttcact

SEQ ID NO: 191245 - DNA, 276 bp, Glycine max
acaatcttcccatgcacaagatgattaatacagatcttagcagaatcttgaaaagcccagagatccaaagagcccttcgagcaccacgcaagaagatccatcgcagagtcctaaagaagaacccactgaaaaacttgagaatcatgttgaagctaaacccatatgcaaagaccatgcgccggaacaccattcttcgccaggccaggaatcacaagctccgggtggataaggcagctgctgcagcagcggcactacaagccaaatcagatgagaagg

SEQ ID NO: 191246 - DNA, 274 bp, Glycine max
cgttgctggtgacagcaaaaatgacccaccaatggaagcagctggcttcactgctcaggtgattatcctgaaccatccaggccaaataagcgccggctatgcccctgtattggattgccacacggctcacattgcatgcaagtttgctgagctgaaggaaaagattgatcgccgttctggtaaaaagctggaagatggccctaaattcttgaagtctggtgatgctgccattgttgatatggttcctggcaagcccatgtgtgttgagagcttc

SEQ ID NO: 191247 - DNA, 277 bp, Glycine max
acctgtctacttatcaaaccaaagtagacaaggatctacagtctttggaagacatcttacatcaagttgaaaacaaaacatcagaagtcaaacagctgataaaagcaatccaactcacttataatcctgatgaatcatcaaaaccaaatatgatagacgctgctactttgaagtccaggaaaatgttagaagaaattatgaaatatgaagcatcgattttaacacatgactcaagtattcgatatttgcaggaaatatataattcaaataatcaaaa

SEQ ID NO: 191248 - DNA, 275 bp, Glycine max
gcccttgccagattcacccagggtgaagccttcaaagctttttgctaccaaagcccactcaccctttgagctacagatcactttgctaggagatactcttctgcctcctagacctgttctttccatctttagaaacatcagtttttgtatggaagccaccgggagatttctggatggtggtgcatccgtgaatgcgctgatcgtttcttccagttagagtcttcatctgtccgacaagttcactcgcctcggttgcggacctaggaccatttctc

SEQ ID NO: 191249 - DNA, 282 bp, Glycine max
aacgaaaatctgttcgcttcattcattgcccccacaatcctaggcctacccgccgcagtactgatcattctatttccccctctattgatccccacctccaaatatctcatcaacaaccgactaatcaccacccaacaatgactaatcaaactaacctcaaaacaaatgataaccatacacaacactaaaggacgaacctgatctcttatactagtatccttaatcatttttattgccacaactaacctcctcggactcctgcctcactcatttacaccaacc

SEQ ID NO: 191250 - DNA, 278 bp, Glycine max
tcttggcaggatggcttctcatcgtctgctcctcctctgccttgctggactggtatttgtgtctgaggctgagcctacgggcaccggtgaatccaagtgtcctctgatggtcaaagttctagatgctgtccgaggcagtcctgccatcaatgtggccgtgcatgtgttcagaaaggctgctgatgacacctgggagccatttgcctctgggaaaaccagtgagtctggagagctgcatgggctcacaactgaggaggaatttgtagaagggatataca

SEQ ID NO: 191251 - DNA, 276 bp, Glycine max
cgagacctatggagctttaatttattaatgcaaacagtacctaacaaacccacaggtcctaaactaccaaacctgcattaaaaatttcggttggggcgacctcggagcagaacccaacctccgagcagtacatgctaagacttcaccagtcaaagcgaactactatactcaattgatccaataacttgaccaacggaacaagttaccctagggataacagcgcaatcctattctagagtccatatcaacaatagggtttacgacctcgatgttgga

SEQ ID NO: 191252 - DNA, 273 bp, Glycine max
ctggatttcgccccacggctggggccgccattgcctcccatgaggatgtggacaaagtggcattcacaggctccactgagattggccgcgtaatccaggttgctgacgggagcagcaacctcaagagagtgaccttggagctgggggggaagagccccaacatcatcatgtcagatgccgatatggattgggccgtggaacaggcccacttcgccctgttcttcaaccagggccagtgctgctgtgccggctcccggaccttcgtgcaggagg

SEQ ID NO: 191253 - DNA, 273 bp, Glycine max
tttggttgttactagagagttctaatatgaagggtagtttttcattatttaaaaacacatggaaaaatatgagacatatttctaacatacgaactatagtgcctggatacattcttcagcatttggcagttaatctgctgaaaccaaagtaagaactgaatgacagtgacagttgtgttttatagtaatagaatgtgagagttagaatctttggacaaagttaggctttgtcatttgcctattcagacttttaccaagttgtacctcgagatc

SEQ ID NO: 191254 - DNA, 271 bp, Glycine max
gaagatggcggaggtgcaggtcctggtgcttgatggtcgaggccatctcctgggccgcctggcggcatcgtggctaaacaggtactgctgggccggaaggtggtggtcgtacgctgtgaaggcatcaacatttctggcaatttctacagaaacaagttgaagtacctggctttcctccgcaagcggatgaacaccaacccttcccgaggcccctaccacttccgggcccccagccgcatcttctggcggaccgtgcgaggtatgctgcccc

SEQ ID NO: 191255 - DNA, 271 bp, Glycine max
ctaaggcaaaatagacgcttagctgctgatctacagagaacttcttgtaattaaaagatttcaattcatagcaaactggtgttttaaactattgcagtagctggaactttttagtgtaaccagcatttattggagaagtgaatcacaaggaaataaagatgagtaaaagcaaagatgatgctcctcacgaactggagagccagtttatcttacgtctgcctccagaatatgcctctactgtgagaagggcagtacagtctggtcatgtcaa

SEQ ID NO: 191256 - DNA, 274 bp, Glycine max
tgtagctatagttgttatgtgattgttttttaattgctgtaggatcctgttctttcagcaggtgaaaaataaaacgcagttcaaatttcatggttttaattttcaactcagaagcactcaaaaatgcaaaatgtgataatgggcacttgtttaaaagaattagtgtatccagccttcactccagctggttaaaaatgttgcacttatcagcaaccctaccactttcatctgctgaaaggacaaatgtgcttggttttactattatgtaatcaca

SEQ ID NO: 191257 - DNA, 276 bp, Glycine max
ccagcatgaaagtctctgccgcccttctgtgcctgctgctcatagcagccaccttcattccccaagggctcgctcagccagatgcaatcaatgccccagtcacctgctgttataacttcaccaataggaagatctcagtgcagaggctcgcgagctatagaagaatcaccagcagcaagtgtcccaaagaagctgtgatcttcaagaccattgtggccaaggagatctgtgctgaccccaagcagaagtgggttcaggattccatggaccacctgg

SEQ ID NO: 191258 - DNA, 276 bp, Glycine max
aaataaggctgttggagataaacttcctgaatgtgaagcagtatgtgggaagcccaagaatccggcaaacccagtgcagcggatcctgggtggacacctggatgccaaaggcagctttccctggcaggctaagatggtttcccaccataatctcaccacaggtgccacgctgatcaatgaacaatggctgctgaccacggctaaaaatctcttcctgaaccattcagaaaatgcaacagcgaaagacattgcccctactttaacactctatgtggg

SEQ ID NO: 191259 - DNA, 275 bp, Glycine max
gtcatgctgcctgtggctgaccaagaccaatgcataaggcattatgaaggcagcacagtccccgaaaagaagacaccgaagagccctgtaggggtgcagcccattctgaatgaacacaccttctgtgctggcatgtctaagtaccaagaagacacctgctatggcgatgcgggcagtgcctttgccgttcacgacctggaggaggacacctggtatgcgactgggatcttaagctttgataagagctgtgctgtggctgagtatggtgtgtatgt

SEQ ID NO: 191260 - DNA, 274 bp, Glycine max
ggactttgaacatgtcggggatcgccctcagcagactcgcccaggagaggaaagcatggaggaaagaccacccatttggtttcgtggctgtcccaacaaaaaatcccgatggcacgatgaacctcatgaactgggagtgcgccattccgggaaagaaagggactccgtgggaaggaggcttgtttaaactacggatgcttttcaaagatgattatccatcttcgccaccaaaataaataacacagggcctaaataagcccgtgtatcctggaag

SEQ ID NO: 191261 - DNA, 274 bp, Glycine max
attttaacacatgactcaagtattcgatatttgcaggaaatatataattcaaataatcaaaagattgttaacctgaaagagaaggtagcccagcttgaagcacagtgccaggaaccttgcaaagacacggtgcaaatccatgatatcactgggaaagattgtcaagacattgccaataagggagctaaacagagcgggctttactttattaaacctctgaaagctaaccagcaattcttagtctactgtgaaatcgatgggtctggaaatggat

SEQ ID NO: 191262 - DNA, 273 bp, Glycine max
ccacactccacggaagcaatatgaaatgatctgctgcagtgctctgagccctaggattcatctttcttttcaccgtaggggcctgactggcattgtattagcaaactcatcactagacatcgtactacacgacacgtactacgttgtagcccacttccactatgtcctatcaataggagctgtatttgccatcataggaggcttcattcactgatttcccctattctcaggctacaccctagaccaaacctacgccaaaatccatttcactat

SEQ ID NO: 191263 - DNA, 270 bp, Glycine max
caagagcaaccaagatgagtgccctgggagctgtcattgccctcctgctctggggacagctttttgcagtggactcaggcgatgatgtcacggatatcgcagatgacggctgcccgaagccccccgagattgcacatggctatgtggagcactcggttcgctaccagtgtaagaactactacaaactgcgcacagaaggcgatggagtatacaccttaaatgataagaagcagtggataaataaggctgttggagatacacttcctgaat

SEQ ID NO: 191264 - DNA, 270 bp, Glycine max
gtaagatcgtctccttgctggcagcgtccgaggctgaggtggagcagctcctgtccgagagatgcccgctcacggggcacagctgctacccagaggccctgctgcacttccggacccactgcttcaactggcactcccccacgtacgagtatgcgttgagacgtttgtacgtgctggtcaacctttgtgagaagccgtatccgcttcacaggataaaattgtccatggaccacgtgtgccttggtcactactgaagagctgcctcctgga

SEQ ID NO: 191265 - DNA, 268 bp, Glycine max
ggggtgcagcccatactgaatgaacacaccttctgtgctggcatgtctaagtaccaagaagacacctgctatggcgatgcgggcagtgcctttgccgttcacgacctggaggaggacacctggtatgcgactgggatcttaagctttgataagagctgtgctgtggctgagtatggtgtgtatgtgaaggtgacttccatccaggactgggttcagaagaccatagctgagaactaatgcaaggctggccggaagcccttgcctgaaa

SEQ ID NO: 191266 - DNA, 271 bp, Glycine max
cggaagcgttcagctgcttcaagatgaagctgaacatctccttcccagccactggctgccagaaactcattgaagtggacgatgaacgcaaacttcgtactttctatgagaagcgtatggccacagaagttgctgctgacgctctgggtgaagaatggaagggttatgtggtccgaatcagtggtgggaacgacaaacaaggtttccccatgaagcagggtgtcttgacccatggccgtgtccgcctgctactgagtaaggggcattcctg

SEQ ID NO: 191267 - DNA, 269 bp, Glycine max
cgataaaattatttttctatgatataatttgtaaatgtaaattattccgatctgacatatctgcattataataataggagaatagaagaactggtagccacagtggtgaaattggaaagagaactttcttcctgaaacctttgtcttaaaaatactcagctttcaatgtatcaaagatacaattaaataaaattttcaagcttctttaaaaaaaaaaaaaaaaaaaaaaaaaaaaaaaaaaaaaaaaaaaaaaaaggtgggggagtatt

SEQ ID NO: 191268 - DNA, 261 bp, Glycine max
cttcatagtaatacccatcataatcggaggctttggcaactgactagttcccctaataatcggtgcccccgatatggcgtttccccgcataaacaacataagcttctgactcttacctccctctctcctactcctgctcgcatctgctatagtggaggccggagcaggaacaggttgaacagtctaccctcccttagcagggaactactcccaccctggagcctccgtagacctaaccatcttctccttacacctagcagg

SEQ ID NO: 191269 - DNA, 262 bp, Glycine max
ctacccgccgcagtactgatcattctatttccccctctattgatccccacctccaaatatctcatcaacaaccgactaatcaccacccaacaatgactaatcaaactaacctcaaaacaaatgataaccatacacaacactaaaggacgaacctgatctcttatactagtatccttaatcatttttattgccacaactaacctcctcggactcctgcctcactcatttacaccaaccacccaactatctataaacctagcca

SEQ ID NO: 191270 - DNA, 259 bp, Glycine max
gcgatgggcatctctcgggacaactggcacaagcgccgcaaaaccgggggcaagagaaagccctaccacaagaagcggaagtatgagttggggcgcccagctgccaacaccaagattggcccccgccgcatccacacagtccgtgtgcggggaggtaacaagaaataccgtgccctgaggttggacgtggggaatttctcctggggctcagagtgttgtactcgtaaaacaaggatcatcgatgttgtctacaatgcat

SEQ ID NO: 191271 - DNA, 260 bp, Glycine max
cgtgagttggagaaggttgatgctgtaagattaattaatatagtttttgatgaaactggacacttcgtgctgtatggaacaatgctgggcattaaagttataaatgtagagacaaaccggtgtgtgcggattttaggcaaacaagaaaatattagagtgatgcaattggctttgttccaggggatagccaaaaagcatcgtgctgcaactactatagaaatgaaagcttctgaaaatcctgttcttcagaatattcaagc

SEQ ID NO: 191272 - DNA, 260 bp, Glycine max
ccattttaaagtgaacggctctgtggcatttactgcactccagctgttatgtaactaccacctctgtctagctccagaacattttcaccacccctaaaggagaccttgtacccattaagcagtctctctccttctcccctccccaccaccttcctccagcctctggcaaccacccatctgcattctgtctctatggatttacctattctaggtagtcaacaggatgagatatcccaaaagtccatccatggatgaacaga

SEQ ID NO: 191273 - DNA, 258 bp, Glycine max
ggggaaaggaggtctcactgagcaccgtcccagcatccggacaccacagcggcccttcgctccacgcagaaaaccacacttctcaaaccttcactcaacacttccttccccaaagccagaagatgcacaaggaggaacatgaggtggctgtgctgggggcacccccagcaccatccttccaaggtccaccgtgatcaacatccacagcgagacctccgtgcccgaccatgtcgtctggtccctgttcaacaccctctt

SEQ ID NO: 191274 - DNA, 259 bp, Glycine max
ggcagattattccctcagggctgttcgcatgaaaattaggccccttgtgacccaataggctgaagaagtgggaatgggagcactctgtcttctttgctagagaagtggagagaaaatacaaaaggtaaagcagttgagattctctacaacctaaaaaattcctaggtgctattttcttatcctttgtactgtagctaaatgtacctgagacatattagtctttgaaaaataaagttatgtaaggttttttttatcttta

SEQ ID NO: 191275 - DNA, 259 bp, Glycine max
gccgagctgggccagccaggcaaccttctaggtaacgaccacatctacaccgttatcgtcacagcccatgcatttgtaataatcttcttcatagtaatacccatcataatcggaggctttggcaactgactagttcccctaataatcggtgcccccgatatggcgtttccccgcataaacaacataagcttctgactcttacctccctctctcctactcctgctcgcatctgctatagtggaggccggagcaggaacag

SEQ ID NO: 191276 - DNA, 260 bp, Glycine max
ccacattccatttgtgctagaaaaacctatccactgatgagtctaactgttccaaacgcctcccacctggtgtgcacagctgcctgggtccattgtcacttgggtgcatcaggttgtcctccgatttttagatgagtttcctgtctagagatgtcctagtctgctcactggctggtggcagtagggtaccctgcgtcctcgaaaagccagagggttcacctagtcagacgaaactccagaacagtgcttgtggagggcct

SEQ ID NO: 191277 - DNA, 266 bp, Glycine max
aaaaatacaaaaattagttgggcgtggtggcagccttctgtaatcccagctacttgggaggctgaggcaggagaattgcttgaaaccagaagacggaggttgcagtgagtccagatcgtgccactgcactccagcctgggcaataagagcaaaactccatctcaaagaaaaaaaagcaaaagaaattgttttctattgcttgtctcttaataggctgctttgctggctctgcaagaaaatggactagacgcaactacagtgaaaca

SEQ ID NO: 191278 - DNA, 260 bp, Glycine max
ggcgtgagaagccatgagcagcaaagtctctcgcgacaccctgtacgaggcggtgcgggaagtcctgcacgggaaccagcgcaacgccgcaagttcctggagacggtggagttgcagatcagcttgaagaactatgatccccagaaggacaagcgcttctcgggcaccgtcaggcttaagtccactccccgccctaagttctctgtgtgtgtcctgggggaccagcagcactgtgacgaggctaaggccgtggatatccc

SEQ ID NO: 191279 - DNA, 260 bp, Glycine max
gaagcggttgcaatctggattcagcccgattccgttacctaatgggggaaaggctgggagttcacccattaagctgtcatgggtgggtccttggggaacatggagattccagtgtgcctgtatggagtggaatgaatgttgctggtgtctctctgaagactctgcacccagatttagggactgataaagataaggaacagtggaaagaggttcacaagcaggtggttgagagtgcttatgaggtgatcaaactcaaaggc

SEQ ID NO: 191280 - DNA, 259 bp, Glycine max
ccaggacagcttgggctcaaaggtcaaggacacctttaatggcaacctgcccttcctcttcaaagtgctctcagttgaaacacccctgtccatccaggcacaccctaacaaggagctggcagagaagctgcacctccaggctccgcagcactaccccgatgccaaccacaagccagagatggccattgccctcacccccttccagggcttgtgtggcttccggccagttgaggagattgtaacctttctaaagaaggtg

SEQ ID NO: 191281 - DNA, 262 bp, Glycine max
cggctcgaggaaaggagaaatgatgttataaaaaactcataaggcaagagctgagaaggaagcgctgatcttctatttaattccccacccatgacccccccaaagcaggagggcattgcccacattcacagggctcttcagtctcagaatcaggacactggccaggtgtctggtttgggtccagagtgctcatcatcatgtcatagaactgctgggcccaggtctcctgaaatgggaagcccagcaataccacgcagtccct

SEQ ID NO: 191282 - DNA, 259 bp, Glycine max
tgagcacatcaaaagttcccaaagagggcttgctctctcttcacctgctctgttctacagcacactaccagaagacagcagaaatgaaaagcatttactttgtggctggattatttgtaatgctggtacaaggcagctggcaacgttcccttcaagacacagaggagaaatccagatcattctcagcttcccaggcagacccactcagtgatcctgatcagatgaacgaggacaagcgccattcacagggcacattcac

SEQ ID NO: 191283 - DNA, 259 bp, Glycine max
cttggagaaacagcacaaacatgacctcctgactgagccagacctgggggtcaccatcgatctcatcaatcctgacacctaccgcatcgaccccaatgttcttctagatccagctgatgagaaacttttggaagaggagattcaggcccccaccagctccaagagatcccagcagcacgcgaaggtggtgccatggatgcgaaagacagagtacatctccactgagttcaaccgttatggcatctccaatgagaagcct

SEQ ID NO: 191284 - DNA, 259 bp, Glycine max
gcgcaacgaggagaaggcgcacgtgaggccaacaaaaagatcgagaagcagctgcagaaggacaagcaggtctaccgggccacgcaccgcctgctgctgctgggtgctggagaatctggtaaaagcaccattgtgaagcagatgaggatcctgcatgttaatgggtttaatggagatgagaaggcaaccaaagtgcaggacatcaaaaacaacctgaaagaggcgattgaaaccattgtggccgccatgagcaacctgg

SEQ ID NO: 191285 - DNA, 261 bp, Glycine max
cgccgcttgtgctgcagccatgtctctagtgatccctgaaaagttccagcatattttgcgagtactcaacaccaacatcgatgggcggcggaaaatagcctttgccatcactgccattaagggtgtgggccgaagatatgctcatgtggtgttgaggaaagcagacattgacctcaccaagagggcgggagaactcactgaggatgaggtggaacgtgtgatcaccattatgcagaatccacgccagtacaagatcccaga

SEQ ID NO: 191286 - DNA, 264 bp, Glycine max
cccatactccttacactattcctcatcacccaactaaaaatattaaacacaaactaccacctacctccctcaccaaagcccataaaaataaaaattataacaaaccctgagaaccaaaatgaacgaaaatctgttcgcttcattcattgcccccacaatcctaggcctacccgccgcagtactgatcattctatttccccctctattgatccccacctccaaatatctcatcaacaaccgactaatcaccacccaacaatgact

SEQ ID NO: 191287 - DNA, 259 bp, Glycine max
ggagcgcggcggcaagatggcagtgcaaatatccaagaagaggaagtttgtcgctgatggcatcttcaaagctgaactgaatgagtttcttactcgggagctggctgaagatggctactctggagttgaggtgcgagttacaccaaccaggacagaaatcattatcttagccaccagaacacagaatgttcttggtgagaagggccggcggattcgggaactgactgctgtagttcagaagaggtttggctttccagag

SEQ ID NO: 191288 - DNA, 257 bp, Glycine max
ggaagataagtggttttcccaaaaaccgtgttattggaagcggttgcaatctggattcagcccgattccgttacctaatgggggaaaggctgggagttcacccattaagctgtcatgggtgggtccttggggaacatggagattccagtgtgcctgtatggagtggaatgaatgttgctggtgtctctctgaagactctgcacccagatttagggactgataaagataaggaacagtggcaagaggttcacaagcag

SEQ ID NO: 191289 - DNA, 259 bp, Glycine max
gcccacgatgctcaggtttggtaacccgggagtgttcccaggtggccttagaaagcaaagcttgtaactggcaagggatgatgtcagattcagcccaaggttcctcctctcctaccaagcaggaggccaggaacttctttggacttggaaggtgtgcggggactggccgaggcccctgcaccctgcgcatcaggactgcttcatcgtcttggctgagaaagggaaaagacacacaagtcgcgtgggttggagaagccat

SEQ ID NO: 191290 - DNA, 259 bp, Glycine max
gtacaattcagattcacccgccctgatgctaaggaaaccctgacgtatgtactagatggcagggcactgggggtcaggctgaaggctgagcaacacctctctgccctccctccctttgtcccatctcccagcgacttccaatattcatgtgtctgagaattgtgtccctcttcaggttccctcttggtgcctaacctggattagtaatgtgcattcaggtgaattttcagctgaggctctgagaactggtactctcagt

SEQ ID NO: 191291 - DNA, 259 bp, Glycine max
cttcgccggggctcagaccagcctccctgccttctccccaggccggctcagccgtgggctttccgaacacaacgccctgctgcagagagaccccctcagccagcccctggcccctggctctcgaattggctctgacccttacctggggcagcgtctggacagtgaggcctctgtccacgccctgcctgaggacacgctcactttcgaggaggctgtggccaccaactcgggccgctcctccaggacttcctacgtgtcc

SEQ ID NO: 191292 - DNA, 259 bp, Glycine max
caggtattcctgatgacagtctgcctctatcttacagagcagcttgttgctatataccattgaaaagccttcagagctgagaggtactactaaccaataacctgcttggctcaaagggccagcaccttctctctaaagcccaagaggagtttgaggaaaactaggtgtctgtgttcactccaggctgaagttacaggtgagtaaacctaaatgtaaggtggactatgctaaaaattcccaatgaagaaactttcacatg

SEQ ID NO: 191293 - DNA, 245 bp, Glycine max
gcttttctcttctgtcaaccccacacgccttttgcacaatgaagtgggtaacctttatttcccttcttttatctctttagctcggcttattccaggggtgtgtttcgtcgagatgcacacaagagtgaggttgctcatcggtttaaagatttgggagaagaaaatttcaaagccttggtgttgattgccttgctcagtatctcagcagtgtccatttgaagatcatgtaaaattagtgatgaagt

SEQ ID NO: 191294 - DNA, 258 bp, Glycine max
gaagccaacaaataccagatctcagtgaacaaatacagaggaacagccggtaatgccctcatggatggagcatctcagctgatgggagaaaacaggaccatgaccattcacaacggcatgttcttcagcacgtatgacagagacaatgacggctggttaacatcagatcccagaaaacagtgttctaaagaagacggtggtggatggtggtataatagatgtcatgcagccaatccaaacggcagatactactggggt

SEQ ID NO: 191295 - DNA, 258 bp, Glycine max
tataattcaaataatcaaaagattgttaacctgaaagagaaggtagcccagcttgaagcagagtgccaggaaccttgcaaagacacggtgcaaatccatgatatcactgggaaagattttcaagacattgccaataagggagctaaacagagcgggctttactttattaaacctctgaaagctaaccagcaattcttagtctactgtgaaatcgatgggtctggaaatggatggactgtgtttcagaagagacttgat

SEQ ID NO: 191296 - DNA, 258 bp, Glycine max
gccggtgccccgaaggctccagaccatgaacatggacattctgaagtgctcttggaggatgtggaacatctgaaggtcaagcaggaaccaacagacatacagcttcagcctatggtgacacagctcagatatgaatctttttgcctccaccaatttcaagaacaagatggtgaaagtatacctgagaaccaggagttggcatcaaagcaagaaatcttaaaagaaatggaacatttgggggatagcagactccaaaga

SEQ ID NO: 191297 - DNA, 256 bp, Glycine max
cgaagaacaacccgggttgggtctacattcccccctttgatgaccccctcatctgggaaggccacgcttccatcgtgaaagagctgaaggagacactgtgggaaaagccgggggccatcgcgctgtcagtgggcggcgggggcctgctgtgtggagtggtccaggggctgcaggaggtgggctggggggacgtgcctgtcatcgccatggagacttttggtgcccacagcttccacgctgccaccaccgcaggcaa

SEQ ID NO: 191298 - DNA, 271 bp, Glycine max
gttttgttagaaaacatgttataggctgggtgcggatgctcaggcctgtaatctcagcgctctgggatgccaaggtgggaggatcacttgcagccaggagttcaagaccagccatggcaacatagcgagaccctcattcataccaaaagtttaaagattagctggacgtggtggtgcatgcctgtagtcctacctacttgggagactgagatgggaggattctttgagcccagaggtttgaggctgcagtgagttagcagttgtgtcattg

SEQ ID NO: 191299 - DNA, 237 bp, Glycine max
gatgagaaagaatacatttaaatagtaacattgtacatagggtgttttcctattaaaaattcagtttcccctgagacttaatgtaaccacttaatgtaatcactatctcattgtttcatctttataaacttgtaaacttcatctatttcaaatattttatgcagtacattatattattctgtacaaaggctttcaaacaaaatttttaaaataataaagtattaatctttctccctg

SEQ ID NO: 191300 - DNA, 257 bp, Glycine max
tgaagagaagatagtcagtctgatcaagaacctgttagttgctcttaaggacttccattctgaatatattgtcagtgcctctaactttacttcccaactctcaagtcaagttgagcaatttctgcacagaaatattcaggaatatcttagcatccttaccgatccagatggaaaagggaaagagaagattgcagagctttctgccactgctcaggaaataattaaaagccaggccattgcgacgaataaaataattt

SEQ ID NO: 191301 - DNA, 255 bp, Glycine max
gtaatgggaagaaataaaagcctacgtgttggtaaatccaacagcaagggagatttttgaatcataataactcataaggtgctatctgttcagtgatgccctcagagctcttgctgttagctggcagctgacgctgctaggatagttagtttggaaatggtacttcataataaactacacaaggaaagtcagccaccgtgtcttatgaggaattggacctaataaattttagtgtgccttccaaacctgagaata

SEQ ID NO: 191302 - DNA, 256 bp, Glycine max
gaagatcctcggctacatcaacacggggaagcaagagggggcgaactgctgtgtggtgggggcattgctgctgaccgtggttacttcatccagcccactgtgtttggagatgtgcaggatggcatgaccatcgccaaggaggagatcttcgggccagtgatgcagatcctgaagttcaagaccatagaggaggttgttgggagagccaacaattccacgtacgggctggccgcagctgtcttcacaaaggatttgg

SEQ ID NO: 191303 - DNA, 257 bp, Glycine max
ctcgagtctagagcggccccttttttttttttttttattttgagcgtgacacttctccactagataccaaggaaaagtggtaacaattccacattacacaaaagtactgtaccattgcctttatcttgaaggtttcggaaccctctacagttaataagttaaataaagggcttgagtacataaatatttgtctaggaaccctaccgtatctacaacacggtaagaatctacgggaggccaaacttttaccataccac

SEQ ID NO: 191304 - DNA, 220 bp, Glycine max
gttttctgttcctgtgttagtttgctgaggaggatggcttccagcttcatccatgtccctgcaaaggacatgatctcattcctttttatggctgcatagtattccattgtgtatatgtaccacattttctttattcagtctatcatcgacgggcatttgggctgattccaaatctttgctattgtgaatagtgctgcaataaactggctaagtctacctg

SEQ ID NO: 191305 - DNA, 261 bp, Glycine max
gtcaagccggttcccggcccagtcccgtcctgcagcagtctgcctcctctttcaacatgacagatgccgctgtgtccttcgccaaggacttcctggcaggtggagtggccgcagccatctccaagacggcggtagcgcccatcgagcgggtcaagctgctgctgcaggtgcagcatgccagcaagcagatcactgcagataagcaatacaaaggcattatagactgcgtggtccgtattcccaaggagcagggagttctgt

SEQ ID NO: 191306 - DNA, 260 bp, Glycine max
gacatgtacaacttcttctctcctctcaaccctgtgagagctcatatggagattggcacagatggaacagtgacgggtgaagcagatgctgagcatgctacccagggagaagctgtggcagctatgtccaaagacatggccaatatgcagcacaggtatatagtacgtctcttgcattcaatcacaggggccagcactggggcgtatagcagccaggtgatgcaaggcatgggggtgtctgctgcccaggacacttacag

SEQ ID NO: 191307 - DNA, 257 bp, Glycine max
gatagcccaggctctgggaacgcgaggcctaacaacccagactggggcacatttgaagaggtgtcaggaaatgtaagtccagggacaaggagagagtaccacacagaaaaactggtcacttctaaaggagataaagagctcaggactggtaaagagaaggtcacctctggtagcacaaccaccacgcgtcgttcatgctctaaaaccgttactaagactgttattggtcctgatggtcacaaagaagttaccaaaga

SEQ ID NO: 191308 - DNA, 75 bp, Glycine max
gctgtttgcagtttctctctgtgttagattcccttttcttcagcagtttcagttcatgtttctcttcagtaaatt

SEQ ID NO: 191309 - DNA, 258 bp, Glycine max
gagaaatgcagcattcactctccctgtcttttccccttccctcagcagaaacgtgtttatcagcaagtcgtgagtcaaactgctgccttttaaaaaacccacaaaatgctgattcagttcaaaattaatgcaaatgtttcaaaactgggtttctgatatttgtaaatgtgtttctttattagataagagtgtattaccattaaagtcattagtataatattgctttcaaaaagaaatggtagacaaaactataatcca

SEQ ID NO: 191310 - DNA, 256 bp, Glycine max
ggcaaagcctgagagaggccgattcctccacttccactctgtgaccttctgggttggcaacgccaagcaggccgcgtcattctactgcagcaagatgggctttgaacctctagcctacaggggcctggagaccggttcccgggaggtggtcagccatgtaatcaaacaagggaagattgtgtttgtcctctcctcagcgctcaacccctggaacaaagagatgggcgatcacctggtgaaacacggtgacggagtg

SEQ ID NO: 191311 - DNA, 255 bp, Glycine max
ggggcatcctcctgctggcaggcctgtgctgcctggtccctgtctccctggctgaggacccccagggagatgctgcccagaagacagatacatcccaccatgatcaggatcacccaaccttcaacaagatcacccccaacctggctgagttcgccttcagcctataccgccagctggcacaccagtccaacagcaccaatatcttcttctccccagtgagcatcgctacagcctttgcaatgctctccctgggga

SEQ ID NO: 191312 - DNA, 188 bp, Glycine max
aaaaattctgtataatagattaaattttacagtttcaatttttaggttatatattcaaagagagtccatgtgctgtcttggttttcagtactgtaataaagtaacctgtgctttaaaaaaaaaaaaaaaaaaaaaaaaaaaaaaaaaaaaaaaaaaaaaagaaaaaaaaaaaaaaaggagaaggggga

SEQ ID NO: 191313 - DNA, 255 bp, Glycine max
ctgtggcagaatgtcgtgtgctgcagaagctgggagcagacgctgttggcatgagtacagtaccagaagttatcgttgcacggcactgtggacttcgagtcttggcttctcactcatcactaacaaggtcatcatggattatgaaagcctggagaaggccaaccatgaagaagtcttagcagctggcaaacaagctgcacagaaattggaacagtttgtctccattcttatggccagcattccactccctgacaa

SEQ ID NO: 191314 - DNA, 257 bp, Glycine max
tgtgcgccacgctgtgaatccagtgggcagatactgttagactggagccaaatgaaaacagaaccacatcttgaaagggctgaaagacaacttgctacccatatttctatattcaatgaaaggctcttccagaatgaagacaaaatgatgacattcagagctaaacaaaaactaacagaactcatcaccagaagactcatacttgaagaaatgttacagaaagttactcatgtcgaagaaaaatgatatcagatgga

SEQ ID NO: 191315 - DNA, 255 bp, Glycine max
gacatttacaacttcttctctcctctcaaccctgtgagagtccatattgagattggcccagatggaagagtgacgggtgaagcagatgttgagtttgctactcatgaagaagctgtggaggctatgtccaaagacagggccaatatgcagcacagatatatagaactcttcttgaattcaacaacaggggccagcaatggggcgtatagcagccaggtgatgcaaggcatgggggtgtctgctgcccaggccact

SEQ ID NO: 191316 - DNA, 258 bp, Glycine max
caggtgctcgcttggtctagtgcccatttactctggactccggatggctgccgcacgcctctgcctctccctgctgctcctgtccacctgcgtggctctgttactacagccactgctgggtgcccagggagccccactggagccagtgtacccaggggacaatgccacaccagagcagatggcccagtatgcagctgatctccgtagatacatcaacatgctgaccaggcctaggtatgggaaaagacacaaagaggt

SEQ ID NO: 191317 - DNA, 260 bp, Glycine max
agcattttgtgatctggtttggtcagatcctgaagatgtggatacctgggctatcagtccccgaggagcaggttggctttttggagcaaaggtcacaaatgagtttgttcatatcaacaacttaaaactcatctgcagagcacatcaactagtgcacgaaggctataaatttatgtttgatgagaagctggtgacagtatggtctgctcctaattactgctatcgttgtggaaatattgcttcgatcatggtcttcaaag

SEQ ID NO: 191318 - DNA, 258 bp, Glycine max
tgcagcgcaagtaggtctacaagacgctacttcccctatcatagaagagcttatcaccttgcatgatcacgccctcataatcattgtccttatctgcttcctagtcctgtatgcccttttcctaacactcacaacaaaactaactaatactaacatctcagacgctcaggaaatagaaaccgtctgaactatcctgcccgccatcatcctagtcctcatcgccctcccatccctacgcatcctttacataacagacga

SEQ ID NO: 191319 - DNA, 256 bp, Glycine max
gagcgagctgagtggttgtgtggtcgcgtctcggaaaccggtagcgcttgcagcatggctgaccaactgactgaagagcagattgcagaattcaaagaagctttttcactatttgacaaagatggtgatggaactataacaacaaaggaattgggaactgtaatgagatctcttgggcagaatcccacagaagcagagttacaggacatgattaatgaagtagatgctgatggtaatggcacaattgacttccctg

SEQ ID NO: 191320 - DNA, 257 bp, Glycine max
gaaatctcaaacagaaatgttcatactgaaagagtaaatcatacctgccaggagtgaagaaagctttgggcaaatatggtcctgccgatgtggaagacactacaggaagtggagctacagatagtaaagatgatgatgacattgacctctttggatctgatgatgaggaggaaagtgaagaagcaaagaggctaagggaagaacgtcttgcacaatatgaatcaaagaaagccaaaaaacctgcacttgttgccaag

SEQ ID NO: 191321 - DNA, 243 bp, Glycine max
atctgacaagatagttatttaagaaacatgggaattgcagaaatgactgcagtgcagcagtaattatggtgcactttttcgctatttaagttggatatttctctacattcctgaaacaatttttaggttttttttgtactagaaaatgcaggcagtgttttcacaaaagtaaatgtacagtgatttgaaatacaataaatgaaggcaatgcatggccttccaataaaaaatatttgaagactg

SEQ ID NO: 191322 - DNA, 256 bp, Glycine max
ggcaccaccactgacctgggacagtgaatcgacaatgccgtcttctgtctcgtggggcatcctcctgctggcaggcctgtgctgcctggtccctgtctccctggctgaggatccccagggagatgctgcccagaagacagatacatcccaccatgatcaggatcacccaaccttcaacaagatcacccccaacctggctgagttcgccttcagcctataccgccagctggcacaccagtccaacagcaccaatatc

SEQ ID NO: 191323 - DNA, 258 bp, Glycine max
ctgatggaaggaatgctgttagcctgagactcaggaagacaacttctgcagggtcactccctggcttctggaggaaagagaaggagggcagtgctccagtggtacagaagtgagacataatggaatcaggcttcacctccaaggacacctatctaagccattttaaccctcgggattacctagaaaaatattacaagtttggttctaggcactctgcagaaagccagattcttaagcaccttctgaaaaatcttttca

SEQ ID NO: 191324 - DNA, 141 bp, Glycine max
ggccgtttcagcatcaggcaagtggctggatggtattcgaaaatggtattacaatgctgcaggattcaataaactggggttaatgcgagatgatacaatatacgaggatgaagatgtaaaagaagccatagaagacttcct

SEQ ID NO: 191325 - DNA, 255 bp, Glycine max
gggttttgctgtcagtagctcaaagtatggtgtagaaatggcctcctccctccatcctgggaagtcccagtcccatcctggtgtgagaatcaaccaggctttcctgctctacctgagataaccaactccctcccgtaatcaggaagccaaatgtcaccttcccaaagaaattttattttcacgtagctgaagtgcaaaacatagatgaccatttttaataagcacaatcaaatttttaaccacagaatgtctaca

SEQ ID NO: 191326 - DNA, 255 bp, Glycine max
aggagcgggaacagatgagtgaagcagaggtgggggtgtttgtccagcgactccggggcctgatgaatgacatcgcagccttccctgcacccaccattgcggctatggatgggtttgccttgggcggaggcctagagcttgccctggcctgtgacctccgagtggcagcttcctcggcagtcatgggactgattgagaccacgcgagggctcctcccgggggcaagagggactcagaggctgccccgttgtctgg

SEQ ID NO: 191327 - DNA, 256 bp, Glycine max
ccagaagacatccttacttttatgccccggaactccttttctttgctaaaaggtataaagctgcttttacagaatgttgccaagctgctgataaagctgcctgcctgttgccaaagctcgatgaacttcgggatgaagggaaggcttcgtctgccaaacagagactcaagtgtgccagtctccaaaaatttggagaaagagctttcaaagcatgggcagtagctcgcctgagccagagatttcccaaagctgagtt

SEQ ID NO: 191328 - DNA, 255 bp, Glycine max
gtctgaggggggtgcagatgactctgctgaggagggggacctactggatgatgatgataatgaagatcggggggatgaccagctggagttgatcaaggatgatgaaaaagaggctgaggaaggagaggatgacagagacagcgccaatggcgaggatgactcttaagcacatagtggggtttagaaatcttatcccattatttctttacctaggcgcttgtctaagatcaaatttttcaccagatcctctcccct

SEQ ID NO: 191329 - DNA, 260 bp, Glycine max
cttacctgccttggacagtcaggagggagacgagctccttgtggcgaagttagaggctgtggtccctcctcttcttgccctctctctgcctctgtgctcagtgtgagggtctgagtggatggtaggagtgagtgattcctccccctccccctctgggtgctgttcatccagcctaggggtgcccagcctgtctgaatggggcagtgcccaggcagggtcagtgttttcactcctccttccttggcctttctgggctcctc

SEQ ID NO: 191330 - DNA, 258 bp, Glycine max
gtacaattcgctggcggatctgtaccagaagaagctctggcaccagctcactctcaagatcgagcagtttgtggctctcgacgtcttccaggctggtgatgcttgaatacaattatatcacaatttcatcacagactttgaggcgaaaatcaaccttctcaagcttgcacattttgctgttatagtttctcggcagtattctgaaaaagaagctgctgttggttatcttggaggggtcattcagaaacttcaagacag

SEQ ID NO: 191331 - DNA, 251 bp, Glycine max
caacaacttcaccttcttcctcctcgatcatgtctcacttcaagggcaagtaccatgatgagcttattcgccaatgctgcgtacattggcactcctggaaagggtattcttgctgctgatgagtcaacagggacaattggcaagcgtttggccagcatcagtgtagagaacattgaatccaacaggcgagctcttagggagctgcttttcactgctcctggtgttcttcaatatctcagtggtgtcatcct

SEQ ID NO: 191332 - DNA, 245 bp, Glycine max
gggggtcccagtcccgaacccgtcggctgtcggtggactgctcgagctggttctgcggcgagagcgggtcgtcgcgtgccggtcgggggacggattgggaacgggcccttcggggcctcttgcccgggcgtcgaacagtcaactcagaactggtacggacaaggggaatccgactgtgtaattaaaacaaagcattgcgatggtccctgcggaggttgacgcaatgtgatttctgcccagtgctc

SEQ ID NO: 191333 - DNA, 247 bp, Glycine max
ctttgaaggtgactctttatcctggaaacgtgttatcacttaaaatgtcaaagccgcatgggtttagctacaaaagtggacaatacatgtttgtgaactgtgctgctgtgtctccatttgaatggtatgcatttgaagaaacatattctaaatgaaatgtttgcatgtaaataccttcataacaccctgaggtgctttgtttacgcattcataggcatccattttccataacttccgcccctgatga

SEQ ID NO: 191334 - DNA, 255 bp, Glycine max
gtcgagccgaatttcagcgcatgtgtgacaagtctatgatcaagacgagatatatgtacgtgaaacgaagagatcttgaaagagaatccaaacatgtgtgcttacatggcaccttctttggatgctaggcaagacatggtggtggtagaggtaccaaagctagggaaagaggctgcagtaaaggccataaaggagtggggccagccaaagtcaaagattacccacttgatcttctgcaccactagcggtgtggac

SEQ ID NO: 191335 - DNA, 263 bp, Glycine max
atgccatggagcagagttggtgggccaatatgcctcacgagcttctcagagaggtcctcctccgaattgaatcgtcggagtccacgtggccgctgcggaggagcgtcgtggcttgtggcggagtgtgccgcacctggaggaggctcatcgtcaaggagattgtcaagccacctcaattctcttccaacatacccttccccgtctctctcaaacaggttcagtgctctttctctctattcaaattaaatcaattttgtttattt

SEQ ID NO: 191336 - DNA, 253 bp, Glycine max
attaagtataacacccatagagcactcgggatcaccctcttctgccttggaacccttcaggtttttgctctgctcttgaggcccaacaaagaccacaaaatcagaatctactggaacatttaccactacgccgttggatactccaccataatcatcagcatcatcaacgtctttaaagggtttgatgcattggagacttctgtaggggatcgctacaatgactggaagcatgcttacattggcatcattgcag

SEQ ID NO: 191337 - DNA, 250 bp, Glycine max
gctactccttaattactttcattctttaatttgctgcaagctatagcttcattagttcattcacaaaattaattattacaatggtgagtgttgaagagatccgtcaggcacaacgtgcagaaggccctgccactgtcatggctattggcaccgccactcctcccaactgcgtggatcagagtacctatcctgactattatttccgcatcaccaacagcgagcacatgaccgagctcaaagaaaaattcaa

SEQ ID NO: 191338 - DNA, 248 bp, Glycine max
atggtattgctagttgggcttacattgcttttgggtctcttcctcgctgttcttctattcaacccacgacaccgcaaatctgggcataaggcaaaagctcaagccagtttaaacgttgataaggcatcaaaatcctacagtaaaacagaagtttcgttgcataacaagagaacagactgttggataatcatcaagaacaaggtatatgatgttacctcatatgtggaagaacatccaggtggtgattc

SEQ ID NO: 191339 - DNA, 252 bp, Glycine max
aagaacttcaggaattttgctccatatgattcggaaacaccaacgagctccgtggagttcgaccacagtgggtcctacctagcagttgctggttctgatataaggatttaccaagtagcaaatgtgaaatctgaatggaactgtatcaaaaccttccctgatttatctggaacagggaagaacacgtgtgtaaaatttggtccagattctaaatacatagctgtgggatcaatggaccgaaatcttcggata

SEQ ID NO: 191340 - DNA, 258 bp, Glycine max
gcttgacgtgcagagaattatcaatgagcccactgctgctgcactttcatatgggatgaacaagaaggagggtctcattgccgtttttgaccttggtggtggaacatttgatgtgtccatcttagaaatttctaatggtgtttttgaggtgaaagcaacaaatggtgacactttcttgggaggagaggattttgacaatgccttgttggattttctggtgaatgaattcaaaagaactgagagtattgaccttgcaaa

SEQ ID NO: 191341 - DNA, 249 bp, Glycine max
gaccaagttaataggtctttatatttagttgttgacatcaacaaagtcatggaggaagttaatgtggttcaaaccaagaatggaactgttgcagtagcttctgcgtttgctggacataaggaagctatacagcaaagggaccacaaatttttaagaattgctgttgaagaagcctataaaggggtagactgtgaagatgggggtccctttggtgctattatagtatgtaatgatgaaatagttgctcga

SEQ ID NO: 191342 - DNA, 246 bp, Glycine max
  unsure (1)..(246): unsure at all n locations
ggcttcacaaagatgaatcgggaaaagttgatgaagatggccggttcggttagaactgggggaaagggtaccatgagaagaaagaagaaggctgtccacaagacaacaaccacagatgacaaaaggcttcagagcaccctgaagagaataggggtgaatgccatcccggctattgaggaggtcaatatctngaaggatgacgtagttatccagtttctaaatcccaaagttcaagctccttgctgt

SEQ ID NO: 191343 - DNA, 244 bp, Glycine max
atccgctaaggagtgtgtaacaactcacctgccgaatcaactagccccgaaaatggatggcgctaaagcgcgcgacctatacccggccgtcggggcaaggaccaagccccgatgagtaggagggcgcggcggtcgctgcaaaacccagggcgcgagccgggtcggagcggtcgtcggtgcagatcttggtggtagtagcaaatattcaaatgagaactttgaaggccgaagatgggatttttcc

SEQ ID NO: 191344 - DNA, 243 bp, Glycine max
gatacactgggagaggagtcatacaaggatagcactctgatcatgcaactccttcgtgataacctcaccctttggacctctgacatgcaggatgatggagcagatgaaattaaagaagcagcaccgaaacaggatgaccagtaaaaatattttactgctaattagaattgagcttctcctccatatctttttgaagggagaaggtgtttgttgctaatatctctttggtactgagattttagg

SEQ ID NO: 191345 - DNA, 243 bp, Glycine max
ctcgagccgattccattgttgttgttattgtatcgtagccagagaagaagaagagaagagactcgcggcgaagaaagaaagatgacggaggcacatataaggaagaagcccgggatggcgagcgtgaaggacatgccggttctccaggacggtccaccgccgggcgggttcgctccggtccggttcgcccggcgcatcccgaacaagggccccagcgccgttgccatcttcctcaccaccttc

SEQ ID NO: 191346 - DNA, 243 bp, Glycine max
cactcttgttcttcagtctcctcctattatccgccaccgtagccgccgccgaacggatcgacgatgaagacgaccttctgatccgtcaagtggtgccggatgcggaggaccaccacctgctcaacgcggagcaccacttctccgccttcaagacaaagttcggcaagacctacgccacgcaggaggagcacgaccaccgcttccgtatcttcaagaacaacttgctccgcgccaagtcacacc

SEQ ID NO: 191347 - DNA, 245 bp, Glycine max
gaattggcaaatgctcataccttcattagtagtttgcagaagggttatgacacgttagtaggggagcgaggagttcaattatctgggggacagaagcagcgtgtggcaattgcacgagctatagtgaagagtccgaaaatattactactagatgaagccacaagtgcactggatgcggagtctgaaaaagtggttcaggatgcactagaccgtgttatggtggaccgaaccacaatagtagtggc

SEQ ID NO: 191348 - DNA, 251 bp, Glycine max
cacatagctagttgtttaaagtaagagagaagaaagaagcaaatggcaaactttccagttgttgacatggggaagcttaacaccgaagagagacctgcagccatggagattataaaagatgcctgtgagaactggggtttctttgagttggtgaaccatgggatatccattgagcttatggacacagtggagaagctcacaaaagagcattacaagaagactatggagcaaaggttcaaagaaatggtgac

SEQ ID NO: 191349 - DNA, 259 bp, Glycine max
gtgtacgtcaaggctcagaaatcaaaagcctacttcaagagatatcaagtcaagttcaagagaagaagagagggaaaaaccgattaccgtgccaggattcggttgattaatcaggacaagaacaaatataacactccgaaataccgatttgttgttcgctttagcaacaaggacattgttgcacaaataatatctgctagcattgctggcgatattgttcttgctgcagcatatgcacatgagctgccacgatatggtc

SEQ ID NO: 191350 - DNA, 247 bp, Glycine max
cgtaaaccctaatttcggaaagatcggcgatgactgcctccaaggatcgcgagagcttcgtctacatcgccaaactcgccgagcaggccgagcgttacgaagagatggtggaatcaatgaagaacgttgcgaatctcgacgttgaactgacggtggaggagcggaatttgctttctgttgggtacaagaatgtgattggtgctcgcagagcgtcctggaggatcctgtcttccattgagcagaagga

SEQ ID NO: 191351 - DNA, 246 bp, Glycine max
ctctattcgcatctgaattctcagtcgcttctcgaaccctacttcttccgcggtgattgcatttgaattcctgtaatggcgattgataatatttttaaacatgaagccagtgaagaaaaaggagagcgggccagaatggcttcttttgttggagccatggctattgctgacttggtgaagacaaccttggggccaaagggaatggataaaattttgcagtcaacaggtagaggacgtgaagttact

SEQ ID NO: 191352 - DNA, 240 bp, Glycine max
gcacaaactatcatggccacggcaacagcagctgccacctcgtcctttatggggacgcgtctcctggaggctcactccggggcggggcgagtgcacgcccgattcggcttcggcaagaaaaaggctcccgccccaaagaaagcctccaggggatcgggccgagacaccgacagacccctttggtatccgggcgccaaagcgcccgaatatctcgatgggagtcttgtcggagattacggg

SEQ ID NO: 191353 - DNA, 190 bp, Glycine max
gtgcagccaaagaacaaggatcagaatcgtttaatcaagttgaggaagatggcactagtctccggaggaagatcaacactgaaccctaacgcccctctttacattcccgccgcgttccgccaagtggaggatttttctccagaatggtggcagctggtgacgacactgacatggtaccatgactactggc

SEQ ID NO: 191354 - DNA, 233 bp, Glycine max
gttctcatttcgcaaccatcggccgcacttactcttgttctcaagggattcgattttctctgcactcacttctagggtttcctccgcgctatcagcaatcatggccgacgaaacaccaaatgagatgaaggaggaggttccagaaattgttccttttgatcctaccaagaagaagaagaagaagaagattacaattgtagatcctgctgatgaccctgtggagatattggctg

SEQ ID NO: 191355 - DNA, 245 bp, Glycine max
ctgttttgagtttccaaccttaaaagactctcttttctctctctgaactctgaagcaaaacaacattaccagagtggttctagtaattcagtgctgctagaagatggaaactagtgaatggcatatcgagcgaagatctagcttcggctctgaatcccccttagcaagagaggcaggaaatgtgcctgaaactgggtcactctctattgtggtgcttggtgcttctggtgatcttgctaagaaga

SEQ ID NO: 191356 - DNA, 250 bp, Glycine max
gcttacttagaaaagacaaatcaaccttcacatttgataagggttgggccttccctagaagaatttatttcaatggggataactgtgttatgcctcctccagatgcctacccctggcttccaaatgcaagttctaaactagttttctctttactcagtacagtcatagccactttagcttctttgttaatcttattgaatcaatcatagaaaatataaagatgccatctactctttcggagtattgtacc

SEQ ID NO: 191357 - DNA, 135 bp, Glycine max
gtgaccacatgaccgagctcaaagagaaatttcagcgcatgtgtgacaagtctatgatcaagacgagatatatgtacctaaacgaagagatcttgaaagagaatccaagcatgtgtgcttacatggcaccttctt

SEQ ID NO: 191358 - DNA, 255 bp, Glycine max
agagggttccgcagatggtacaatcgtccttggttctctgaggctattccatctgccccttatgatcctcttgttttaagacacgcctttgagcaggcagtcataaaaaggttgatgactgatgtgccttttggtgttctactctctggaggtttggactcttctttggttgcatccatcacttctcgttacttggccaacacaaaggctgctgagcagtggggatcaaagttacattcattctgtgtaggcctt

SEQ ID NO: 191359 - DNA, 246 bp, Glycine max
gacaaccccaaatatgaggttcatgtggtctcccctcgcaattactttgcattcactcctttgctgcctagtgttacctgtggcaccgtggaagctcgcagcattgtcgaacccgtccgcaatattttcaggaagaaaaagatggacatgcaatttagtgaagcagaatgtctcaagattgacgcagcaaacaggaaggtttactgtcgatctaatataagtgataatttgagcgagaaagaagaa

SEQ ID NO: 191360 - DNA, 244 bp, Glycine max
ctgtttgcagatgggttgaagattgggaagataacaaaattattatttgtaacagatgccaaatagcagtccaccaagaatgctatggggcaaagaatgttcaggattttacttcttgggtttgtagagtatgtgaaactcctgatgttgagagagagtgttgcctctgcccagtaaaaggtggtgctctaaagccaacggatgttgaaatgttgtgggttcatgtaacatgtgcttggtttcg

SEQ ID NO: 191361 - DNA, 162 bp, Glycine max
gcatgtatgaggtaatggctagcaaaacaaagatatacattgtattggaatttgtgactggtggggagctgtttgataaaattgcacgcagtgggaggttgaaagaagatgaagcaagaaaatactttcaacagcttatatgtgctgtggattactgtcata

SEQ ID NO: 191362 - DNA, 241 bp, Glycine max
gtcagtcatcaccctccaatgagtgctgggcatgctgaaactgaacatttcacttatgatgttacatcaaaattgaaaaccaaatttctcggcaactcagttgatgtatatcctgttggaagaacgcgtgttaccctcaaaagagatggtgtggtccttgatttggtgcctcctcctacaaaagttagcaacttgatttttggacgaacttggattgattcaccaggagagatgatcctga

SEQ ID NO: 191363 - DNA, 243 bp, Glycine max
agaagagaagatgtcgaccgtaccaggacagctcatctgggagatcgtgaagaagaacaactcctttttggtgaaagagttcggaaggggcactcagagcgtgcagttcagcagagagcccaacaatctctacaacctcaacactttcaagtactccggtttggcgaaccagaaaactgtcactgttcaacctgctggtaaagaccagtccgtgttgctcgcaacaaccaagacaaagaagca

SEQ ID NO: 191364 - DNA, 242 bp, Glycine max
cttgttctatctgtgacgagcatcatggcctcgagagcagtgctattgttggctatgtgtgtgcttccggccatggttgtggccattcgcccagcaaagaaccctttttgcgtgaagggtcgcgtctactgtgacccttgccgtgctggttttgagacctcagcaaccacctacattgccggtgctgagattatgttgcaatgcaagagcagggttagcaacgaggttgtgtacaccaagaa

SEQ ID NO: 191365 - DNA, 242 bp, Glycine max
cggtattgaacaagaatacaccttgttgcagaaagatatccaatggcctcttgggtggcctgttggtggtttccctggacctcagggtccatacgactgtggtgttggcgctgacaaggcttttggccgtgacattgttgacgcacactacaaagcctgtatttatgctggcatcaacatcagtggaattaatggagaagtgatgcccggtcagtgggaattccaagttggaccttcattgg

SEQ ID NO: 191366 - DNA, 254 bp, Glycine max
gcagccagataggaaggagatccgtctcggtttgcccagcaaaggtcgcatgtccgctgacaccctcgaacttctcaagaattgtcaattgtcagtgaagcaggtcaatcctcgtcagtatgttgctgaaattcctcagctatccaacctcgaagtttggtttcagaggcccaaagacatcacaagaaaattgttatctggagatcttgaccttggtattgttggactcgatactttcagtgaacatggccagg

SEQ ID NO: 191367 - DNA, 236 bp, Glycine max
tgtggaccatgaagaaattcttaattttgctaagtcacaggctgattacattttggggtccaacccaatgaacatgagctatttagttgggtatggccctaactaccctaaaagggtgcaccatagaggggcatccattgtgtcatacaaaaagaataaagggttcatagggtgcactcaagggtatgataattggtatggtagccaggcacctaatcctaatgttctggttgggg

SEQ ID NO: 191368 - DNA, 246 bp, Glycine max
ggcctcttcagtgatggcatctgtggccctcaaacctgcccctttcactgttgagaagtcctcagttagaggccttccctccctctcaaggaactcctcttcattcagagttgtggccagtggtggcaagaagatcaagactgacaagccttatggaattaatggtggcatggctttgagggaaggagttgatgcatctggcaggaaaggaaagggaaagggcgtttaccagtttgtagacaaata

SEQ ID NO: 191369 - DNA, 245 bp, Glycine max
acaacatcccctcacaccggcctcttccaaaaccgcaccaaaccttcttttcctttctcttcttcctccttcaagttcaaacccacatccatcaaatgcgccacccaactccacacccaagctccgcccctcacccactcccaagatcgcgtcttcaacttcgccgacggacccgccaccctcccggaaaacgtcctcctccgcgcccaatccgagctctacaactggcacggatctggcatgag

SEQ ID NO: 191370 - DNA, 183 bp, Glycine max
ctcgagccggtatcattcaagtgggaaaagctcttccatgactgatatagccttcctgttgatccttctaatcacttatacaggcacaacagatgcacaatccggggtatgttatggaagacttggcaacaacttaccaacccctcaagaagttgtggccctctacaatcaagccaacattcg

SEQ ID NO: 191371 - DNA, 242 bp, Glycine max
attcctatttacctcagagtcagtgaacgagggacaccctgacaagctctgtgaccaaatctctgatgctgtcctcgacgcttgcctcgaacaggacccagacagcaaggttgcctgcgaaacatgcaccaaaaccaacttggtcatggtcttcggagaaatcacgaccaaggccaatgttgactacgagaagatagtgcgtgacacctgcaggaacatcggctttgtctcaaacgatgtgg

SEQ ID NO: 191372 - DNA, 237 bp, Glycine max
tgtggcctcaaattggtctacctaaagatcaaagccctccaccttacaagaaaccacatgacctaaagaaggcatggaaggttggtgttctcactgcggtcatcaagcatatgtgccctgatattgccaaaattcgcaagcttgtgagggagtctaagtgtcttcaagagaaaatgactgcaaaggaaagtgcaacctggcttgccatcatcaaccaagaggaagccttggctagag

SEQ ID NO: 191373 - DNA, 181 bp, Glycine max
ggcctcaagagcagtgttattgttggctatgtgtgtgcttccggcgatggttgtggccattcgcccagcaaagaaccctttttgcgtgaagggtcgtgtctactgtgacccttgccgtgctggttttgagacctcagctaccacctacattgctggtgctgagattatgttgcaatgcaag

SEQ ID NO: 191374 - DNA, 296 bp, Glycine max
ctggcactcatgtcaaagcctctttcaaggttccactggatgcatacattcaatggactttgtattctctgagagtgaacatggtggagtttttgataacaaatttggaatggattatcacataccagtttttggaagtattgcaaaggaaccacctttgcatatcatccatattgctgtggagatggccccaattgcaaaagttggaggccttggtgacgttgttactagtctatcccgggctgttcaggatttaaatcacaatgtggacatcattcttccaaagtatgactgct

SEQ ID NO: 191375 - DNA, 286 bp, Glycine max
acagattctaatctcttcacaactatcactgtcaatgaacctgctcctggtctgaaggctatttttagcttcaaagttcctgaccaaaggtctggaaaggtggaagttcagtacttgcatgactatgctggaataagcaccagtgttgggttgacagcaaacccaattgtcaacttctctggtgttataggaactaatgttcttgctcttggtgctgatctttcttttgactccaaaattggggagttaacaaaatccaatgctggactgagcttcactaaagatg

SEQ ID NO: 191376 - DNA, 285 bp, Glycine max
accctcgatcactctcacgcgctcctatattcgctcctccaccgtcgctctctcgaacaaccacaacaccatcttcatcacatggcaaacgcagcatctggtatggcagtccatgatgactgcaagttgaggtttttggagctgaaggcaaaaaggacacaccgtttcatagtttttaagattgaggagcagcagaagcaggtcattgtggagaagcttggtgagcctgcccagggctatgaagatttcactgccagccttcctgctgacgagtgccgttatgct

SEQ ID NO: 191377 - DNA, 281 bp, Glycine max
gtttggatgatatgaatattgcggggtggaatgcaatgatggctggttatgcacagcatggggattatcaatctgcttttgaactgtttgagtctttggaaggttttggacttgtgcctgatgagtatacttttttggcgatattgactgctttgtgtaatgctgggatgtttctggagatttatcggtggtttacgaggatgagagtggattatggtttggaaccgagtttggagcattatacgtgtttggtgggtgcaatggcacgtgctggagaattg

SEQ ID NO: 191378 - DNA, 237 bp, Glycine max
attaggaagttgaacttgaagtctttgaggcttaaaattgggttggtgcagcaagagccagcactttttgcagcaagcattttcgagaacattgcatatgggaaagaaggtgcaaccgaggctgaggtgattgaggccgcgcgtgctgcgaacgtgcacggatttgtgagtggtttgcctgaaggttacaagacaccggttggcgaaaaaggcgtccccttctcttggagggcaaag

SEQ ID NO: 191379 - DNA, 284 bp, Glycine max
gttctgatggctctgcgatcattctcttacgatgtgttcctcagcttccgaggggaagatactcgttatggtttcactggctatctctacaatgtccttcgggaaaggggaattcacaccttcattgatgacgacgagccccaggaaggggacgaaatcacgacagcacttgaggcggctattgagaagtccaagattttcatcatcgtgctctctgaaaactaggcatctcccccctttggtaaaaactcactcactcacatcctaaatttaactagggaaaa

SEQ ID NO: 191380 - DNA, 210 bp, Glycine max
cgccgttgtctccgccatcgctgcctccgccatcccctccctcgtcctcgcccgcggccaccgcatcgagtccgtcccggagctcccactcgtcgttagcgactccgccgagagcgtcgagaaaacaaaagaagcaatcaaagtcctcaagcagatcggagcattccctgacgcagagaaagcaaaagacagtcgcagcattcgtcctga

SEQ ID NO: 191381 - DNA, 284 bp, Glycine max
ggagatgaggaacggtggtgaggattatagcaatggtcatggtggtggtgtaagggacttgtatggagaggattgtgccacagaggaccagcttatcaccccatggactttctctgtggccagtggatgcagtttgctgagagatccacgctacaacaaaggactggcctttactgagggagagagagatgctcattacttgcgtggccttttgcctccagctgtcttcaatcaagaacttcaggaaaagaggttgatgcacaatcttcgccagtatgaggttc

SEQ ID NO: 191382 - DNA, 278 bp, Glycine max
agagtgttgacgctccatcaagatgggtatttctagggattccatgcacaagaggcgtgccactggtggcaagaagaaggcatggagaaagaagagaaagtatgagcttgggcgtcaggccgcaaacaccaagttatcaagcaacaaaactatccggaggattcgtgttcgaggtggcaatgttaaatggagggcattgaggttggataccggcaattactcatggggtagtgaagcagttactcgcaagactcgtattctagatgttgtttacaatg

SEQ ID NO: 191383 - DNA, 233 bp, Glycine max
cacgcttgagaatctgagttcagacttggaacctttcgttgttcctaatctgccacaccatatcgaaattacgaggtctcaggttcctatttttctgagaagcccgtctccgtttcctgataggatgaggcagttagaggagaagagtttcggcattgttaccaacagcttctatgacttggaaccggattatgctgatttcttaaaaaagggaaggaaggcatagtttatag

SEQ ID NO: 191384 - DNA, 260 bp, Glycine max
ctaagaccctacgcgcacatcttgcaactccaatcgacatagcagcaatgtctacgctcgaaattgaagctcgagatgtcatcaagattgtgcttcagttttgcaaagaaaattcgttgcatcagacttttcagatgctgcagaacgaatgccaggtttctctgaacaccgttgacagcattgagacctttgttgctgatattaatagtggaaggtgggatgcaatattgcctcaagtttctcaactcaagcttcccagg

SEQ ID NO: 191385 - DNA, 287 bp, Glycine max
ccccgacgcgcttttgatttgcaacggcttcaaggatgcggagtacatttctcttgccctggttgccaacaagcttgcgctcaacaccgtgattgttctggagcaggaagaggaggttgatttgatcgttgaattgagcaagaagctctgcattaagcccgtgattgggcttcgtgcgaacttagaaccaagcattctgggcatttcggtgggacttcaggagagaaggggaagtttgggctcaccaccgcacagattctgagggttgtgaagaagctggcccacgc

SEQ ID NO: 191386 - DNA, 284 bp, Glycine max
tctagggttatcatatctccatttccatttcctctctctcagtttccaagaatcttaagctatgggaaagtcttacccaaccgtgagcgctgattaccagaaggccgttgagaaggcgaagaagaagctcagaggcttcatcgctgagaagagatgcgctcctctaatgctccgtttggcatggcactctgctggaacttacgacgtgagctcgaagaccggtggtcccttcggaaccataaagcacccctccgaactcgctcacggcgctaacaacggtcttg

SEQ ID NO: 191387 - DNA, 285 bp, Glycine max
ggcatcccttcttcaatgatctgcgggacccaaatgcatgcttgcctaatgggcgacctctacctcctttgttcaacttcacatctcaaggtaagatgatttgaacttacattttggttaagtgatacatttcttgccttaggcattgctcatgtaagaaaacaatgcagaactggctaatgcacctgaagagttgcgccaacgcctcattcctgagcatgcaaggagttgaatcaatttgaaagttgaaacatctctagggcattgtaaatgggttttgaatga

SEQ ID NO: 191388 - DNA, 272 bp, Glycine max
gaagtgtaagttttcattcaatggccagcgctcagctctcagcaatatcttcgtcgatctctacggcgtcgtttgaagggcttcgaccttcggctgttcagtttgcttccgcgggcagaattagaattggcaatctctcccaaaggtctttccggggcttggttgtcaaagccgccaccgttgttgcccccaaatacaccgcgattaagcctctgggagacagagtgctgataaaaattaaggaagcagaggagaaaactgagggtgggatt

SEQ ID NO: 191389 - DNA, 274 bp, Glycine max
attgcatcgctgtccatggctaccatcgttagcatcaaggcccgccagatcttcgacagtcgtggcaatccaactgtcgaggtggatttgacttgctccgatggtacttttgccagagctgctgttccaagtggtgcatccactgggatttatgaggcccttgaattgagagatggaggctctgactaccttggaaagggtgtatcaaaggctgttgacaatgtgaacaccgtcattggccctgctttgattggcaaggacccaactgagcaga

SEQ ID NO: 191390 - DNA, 234 bp, Glycine max
gaccaggcttccaacatcacaagaaggctggagctatgaatgctttgattcgagtttctgctgtcttgaccaatggtgcatatcttctgaatgtggattgtgatcactatttcaataatagcaaagccctcaaagaagccatgtgtttcatgatggatcctgttcttggaaagaagacatgctatgttcaatttcctcagagttttgacggcattgatttgcaggatcgatatg

SEQ ID NO: 191391 - DNA, 219 bp, Glycine max
gatcccccatctctggacctgcttgcaagggaaggaataattgctcttcggagagcaaagaggagaaacatggaaagattggttttggcctgtggaggggaggcagtaaactctgtagatgatttgactcctgaatgtctgggttgggcaggattggtatatgaacatgtccttggtgaagagaaatatacattcgtagaaaatgttaagaatcctttt

SEQ ID NO: 191392 - DNA, 253 bp, Glycine max
gggaattccggtgaagctgctccacgaggcttcggggcacgtggtgacggtggcgctcaagagcggagaactctacagaggcagcatgatcgagtgcgaggacaactggaactgccaactcgagagcatcacctacactgccaaggatggcaaaacatcgcaacttgagcatgtttttattcgaggaagcaaagtcaggtttatggtcatcccagacatgctgaagaatgcgcctatgtttaagcgttgggat

SEQ ID NO: 191393 - DNA, 279 bp, Glycine max
gttttcttcgttgctacaattttggtagcatggcaatgccatgcgtacgatatgttccctctccgaatgaacactggctatggtgcccgtactccggtggtgaaatgcgcaagttggaggcttactgtggaagcacacaacatctttggctatgagaccattcctgaagagtgcgttgaagcaacaaaggaatacatccatggcgaacaatatagatcagactccaaaacagttaaccaacaagcttacttttatgccagagacctcgatgtccctccc

SEQ ID NO: 191394 - DNA, 275 bp, Glycine max
cttatgtaacaaagtacagacgagttgtttctgctcaaactcaccgtgaagaaatcatccaagatctttataatacacatgaagatcctgtgaggggaaagacacattcgggaattatcaggtactggggacacgggattgatgtggtatttctgctcagactcaccgtgaagaaatcatccaattgcttttcttgcctctgttttttcagggaattacttcgtgctttccgtttatcaactaagactaagccagagaggattatattctacagg

SEQ ID NO: 191395 - DNA, 273 bp, Glycine max
cgagcttgcagcagcgatttctcatttcatttttcacacttcaacaatgataaaaaccttcaaatacatcatcctcggtggaggagtttccgctggttatgcggcgagggagtttgccaaacagggcgttaagccaggggagttggctatcatttcgaaagaagcggtagcaccttatgaacgtcctgctctgagcaaggcttacctttttccagagtcccctgctagacttcctgggttccatgtctgtgttggaagtggaggagaaaggtt

SEQ ID NO: 191396 - DNA, 186 bp, Glycine max
cttgttgtttggagcgatccgagaaaaactctgtaaacatgttggtttaccaggacctccttacaggtgatgagcttctctctgactccttccgttacaaggaaattgagaatggaatgctgtgggaagttgaggggaagtgggttgttaaaggagcagttgatgtagacattgggtgcaaaccct

SEQ ID NO: 191397 - DNA, 185 bp, Glycine max
gtggttgttccaccgccacagccgtttttcaagtctctaaagtactctttgaaggagactttcttccctgatgacacattgaggcagttcaagaacaagccagcttccaagaagttcatgcttggccttcagttcttcttccccattttcgaatgggttcccaaatacacctttcagttcttgaa

SEQ ID NO: 191398 - DNA, 180 bp, Glycine max
gaaaaaggagggaaatgctgccaaatttgttattaggtcacaggcactcaagcagcttcaaatcagtttacccctttttaggaaactatgtattttgaaaggtgtaactccccgggagcccaagaaaaagttcaagggaactcatcagacttattaccatgtcaaggatgtttccttcct

SEQ ID NO: 191399 - DNA, 281 bp, Glycine max
ctcgagacagttcgcagactcacaatggccgcaatatccaactctttatcactgaagcacagtttctctctgagtcgagcttctccttcttcctcttccatcaaattcaaattctgaagatgttacgccgcgttcgccaatgagaatcgcgagtacgtgatcgttggcggcggaaatgccgcgggatatgctgcgcgcactttcgttgagcatggaatggctgatggtcgtctctgtattgtaaccaaagagccgtatgcaccttacgagcgtcccgctct

SEQ ID NO: 191400 - DNA, 277 bp, Glycine max
ctcgagcgtcataaatcacatagctagttgtttaaagtgagagaaaaagaaagaagaaaatggcaaactttccagttgttgacatggggaaacttaacaccgaagagagagcagcagccatggagattataaaagatgcctgtgagaactggggtttctttgagttggtgaaccatgggatatccattgagttgatggacactgtggagaggctcacaaaagagcactacaagaagactatggagcaaaggttcaaagaaatggtggccagcaaagg

SEQ ID NO: 191401 - DNA, 223 bp, Glycine max
caaggggaagaaattcaatgccatttgccacttttttggttatcaagctcgtggatctctgccatcaaaatttgactgtgattacgcatatgttcttggacacatctgctaccacatacttgccgctggtctaaatggatacatggcaactgtaactaacctgaagaatcctgtaaacaagtggcgatgtggggctgctcaaatagcatctatgatgactgta

SEQ ID NO: 191402 - DNA, 271 bp, Glycine max
gtgtcacttcccaatagaaaaattacagcatttataagtaaccatacaagtataagctctattgtagtatatatagagaagttgtgagcatagctttcttcatcacttcatagtaagcactatagaaaaaacgacattcattcatctatggctacccttattgctcccagcaaccactctccccaagaagacgctgaggctctcagaaaggcttttgagggatgggggactgatgagaaaacggtcatagtaatatggggtcataaactgt

SEQ ID NO: 191403 - DNA, 277 bp, Glycine max
  unsure (1)..(277): unsure at all n locations
atagtgtacacctagttaggcaaacacaccaaacaccaaacaccaaactagttggctcaattctctttgaatggctttggaggctttgaattcaccaacagcagccaccactccgttccgtggctaccnnnnnnnnnnnnnnnnnnnnnnnnctgaccttcacttacgtgagccttgggctaaaaggaaacgctccaaacgaccgcgttttgagacggaggaagagtacctcgctctttgcctcatcangctcgcacaaagnggtaacaccagaaac

SEQ ID NO: 191404 - DNA, 221 bp, Glycine max
atgaacttcgcgatcttgtattgctagataataatagctttggtgtgataatacgtgtagaaagtgaggcatttcaggttcttaaggggattcctgacagacctgaagttgtgcttattaaattaagagagatcaaatgcaagatagataagaaaataagtgtgcaggataggtttaagaatacagtatcgtcaaaggatgttgtccggaccgttcatggt

SEQ ID NO: 191405 - DNA, 242 bp, Glycine max
ggaggttggtgctggtgaccagggtcacatgtttggctatgccactgatgaaacccctgagtacatgcccctcagccatgtccttgcaaccaaactcggtgctcgcctcaccgaggttaggaaaaatggtacctgtgcttggctgaggccagatggcaagacacaagtaactgttgagtactacaatgacaatggcgccatggttccagttcgtgtccacagtgtcctaatttccacccaac

SEQ ID NO: 191406 - DNA, 271 bp, Glycine max
ctgacatcattgatggtttgggtgctgagactggtcacgtgataagaaccagcgttggtggccgaaatggtcaatctaagcagaatgttagttatatttctgagcatgttgtgggaacaggctcttttggtgttgtttttcaagccaaatgtagagaaacgggagaaattgtggccatcaagaaagttctccaggacaagcgctacaagaatagagagttacaaattatgcaaatgctggatcatccaaatattgttgcccttaggcattg

SEQ ID NO: 191407 - DNA, 269 bp, Glycine max
ctcaaagcctgttggagcgcttgatactaaacgatttgaggtatttgaagatagataccgtaacttctgtgatcctgatatacccagtttctactatggatctcattactcaagtatgggcattgtgctttattaccttcttagattggagccctttacctctcttcaccgtaatctgcagggtggtaaatttgatcatgctgaccgtctttttcaaggtattgagggtacctacagaaattgccttacaaatactagtgatgtgaagg

SEQ ID NO: 191408 - DNA, 241 bp, Glycine max
ctgtaaagtcaacttccaagctttaacctttgttcctcatatcagagcacttggagatgcccttatcagccgccttcgctatcctgaaggctcagctggagaaatgggctccaactaccttcaagaggtcactggtgcaggtgctaggaaaaatgcagggaaatttgttgttctacacctccgatttgataaggatatggcagcccattcggcctgcgattttggtggaggaaaaccggaa

SEQ ID NO: 191409 - DNA, 219 bp, Glycine max
attttgtagtagagcttgaagaaagtgcaaagacagggatactagttgcatatgatgatatattaattggagtcttagggattgcagacccactaaagagagaagctgctgttgttatagagggcctacagaaaatgggagtcatacctgtgatggttacaggagataactggagaacagctcgagctgtagccaaagaggtttgtatatatataatat

SEQ ID NO: 191410 - DNA, 233 bp, Glycine max
caacattgaacccgatggtaggaattgtggaatacaagaacattagcttcactgtttgggatgttggtggccaggacaagattcgtcccttgtggaggcactacttccagaacacccagggtcttatttttgttgtagacagcaatgatagggacagagttgttgaggccagagatgagttgcataggatgttgaatgaggatgaactgagagatgcagtattgcttgtgttt

SEQ ID NO: 191411 - DNA, 225 bp, Glycine max
gctgttcttatcattgattcgaccactggtggttttgaagctggtatttccaaggatggacagactcgtgaacatgctctgctttcattcacccttggtgtgaaacagatgatttgctgctgtaacaaaatggatgctactacacccaagtattccaaggccaggtatgatgaaattgtgaaggaagtctcttcctacttgaagaaagtaggatacaaccctgac

SEQ ID NO: 191412 - DNA, 276 bp, Glycine max
cagtaaccatgcctaagcaagtccacgagattaaggacttccttatcactgctacaacgaaggacgcaaggtcggtgaacatcaacaccagcacacatgtggttaagttcaaggtcacatgctcgaagtacctctacacactttgtgtgtctgacccacacaaagctcataaattgaagcgatctcttcctcagggtttgagtgttcaagacctgtaaaggtacagggcgacagaccgacacgaagcaattcgttgattcttctgaacttcgtttc

SEQ ID NO: 191413 - DNA, 277 bp, Glycine max
cgatgttatctaccatgttgaagcatatgatgtgactacaattacagcaagcacacctatgtttctcatgtctcggaacattaaatcacttggtgtcaaatgggttatctcaggacaaggatctgatgagatctttggagggtatttgtgcttccacaaggcacccaacaacgaggagttccacacacaaacatgccgcaagatcaaagcacttcaccactatgattgcttgcgagccaataaatcaacatttgcttggggtctagaagcccgtgta

SEQ ID NO: 191414 - DNA, 274 bp, Glycine max
aggctcgagcggctcgacaaaacagggacaagcttctcacatcccttcgtcaacacctctcagactcttcgcgttctctccatggcttcgtcctccttcaaggtggcgacgagcaaacgcgttacgacgccgatcacttggagctcttcaggcaagagagtaacttcgcttgcttgtttggagtcatacagcctggattctatgcagctattgacgttgcaactgggaattctatcctatttgctcctaggttgccttctgagtatgctgtttg

SEQ ID NO: 191415 - DNA, 266 bp, Glycine max
taggcgacagtcgctctccgacaacgacgcttccgcggcgaaaggtgtctctggtggcgaacgaggatttccggcgcgttctgcgtgtgctgaacaccaacgtggatgggaagcacaagatagtgttcgctgtggcctccgtcgagggtattggaacgagattcgccgacgtcgcttgcaacaaggccgatgttgacgtgagcaaaacggatggtgagttgagtgctgcagagttggatagtgtgatgactgtggtggcgagccct

SEQ ID NO: 191416 - DNA, 280 bp, Glycine max
tgtttgttgtgagctataagctagtttatcgtgacgacaatatgaagttgtttgttttctttgttgctgcagtagttttggtagcatggccatgccatggcgcacgctaccgaatgttccctctccgaatgaaaactggctatggtgagcgttcttcggacgtaaaatgcgcaagttttaggcttgctgtggaagcgcacgacatccgagcctttaagaccgttcctgaacagtgcgttcaaccgacaaaggactacgttaatggcgaacaatttagatc

SEQ ID NO: 191417 - DNA, 296 bp, Glycine max
tcggagttcggctcgataatgtccgcaagggtcaagttcaaggtcacatatatcagactgtggaaggatcttcctggttccacagttttcggtcatcaaagctgctgaagatgtattctccttgaaaagcacagaagcgctttccttttctaaaccggtcatgcacatctcaaggccatggacggcttcggatgaccctttggtctgtgcacttgcggagtagatgtgccaaatctgtgacttcgaagggtcacccgtaacgtaagctttgctaccacaaccaaggttgctgaaat

SEQ ID NO: 191418 - DNA, 287 bp, Glycine max
  unsure (1)..(287): unsure at all n locations
tcggagttcgggcgggcgctcgacgctcggtgtgcttgttgtgggacttgttggcggtgttgcggaagctcgtggtggtttgtctgtgtttgctggtgttggacagcgagcccgacacggtggtgacttgtgcgnacaaatggttgagggtggtgtcgttgagcttgatgatgagcagactgaaagcgagtgtgctcttgtgtgtggtcgagtgagtgagccccctggtgcccgtgcccgtgttggtcttgctgggcttgctgtggctgagcgcttccgtgatgctg

SEQ ID NO: 191419 - DNA, 277 bp, Glycine max
cgtttgtcgtgacgacaatgtgaagttgtttgttttctttgttgctgcagtagttttggtagcgtggccatgccatggcgcacgctaccaaaggttccctctccgaatgagaactggctatggtgagcgttcttcggaggtaaaatgcgcaagttttaggcttgctgtggaagcacacgacgtccgagcgtttgagaccgttcctgaagagtgcgttgaaccaacaaaggactacgttaatggcgaacggtttagatcagactctggaacagttaac

SEQ ID NO: 191420 - DNA, 281 bp, Glycine max
cgctacagtttcactgcacatgattcggtgtctggcgttacatgaggcacatcggatgctggatatgggttttgagccacggatgaccaacattgtacaccaaatggacgtgcctccaccacgtgccacacagactatgttgttcggtgcgacgtttccaggagagatacagagattggcttctgatttcctttcaggttatattttccttgctgttggaacagtgggttcaagtactgatttgattgtccaaagagttgagtgtgttcaagagtctgaca

SEQ ID NO: 191421 - DNA, 282 bp, Glycine max
catacgcactctctattcccattcattgcacaacaacatgcacgctcacccctacgtcccacgcgatttgcacttacccggctacgctccctgcttcctttccatgtccaacattctttccgtcttcgcctcctcctcattgctcatcgtcactctcgtctggatcttctctggacgctttaacaaaaccaaagttgatacagtgctcatgtgctggtgggccttcacaggtctcacacacattattcttgagggttattttgttttctctcctgagttttt

SEQ ID NO: 191422 - DNA, 275 bp, Glycine max
taagcatcaatggtgtacgtcaaggctcagaaatcgaaagcctgcttcaagagatatcgagtcaagttcaagagaagaagacagggaaaaaccgattaccgtgccaggattcggttgattaatcaggacaagaacgaatataacactccgaaataccgatttgttgttcgctttagcaacaaggacgttgttgcgcaaatgatatctgctagcgttgctggcgatattgttcttgctgcagcgtatgcacatgagctgccgcaatatggtcttga

SEQ ID NO: 191423 - DNA, 272 bp, Glycine max
agctcgaccgaatcggctcaggtgatccttgtgtagtgctcaggctagggaatcagacgcgcgaacaccaaggtaattagtagctgcttgagtcctgtttggaatgaagagctgaatttcactctgacagagccgttgggagttctgaatttggaagtgtttgacaaagatcttttgaaggctgatgacaagatgggaaatgctttcttgagccttcgaccgatagtctctgcagccagattaagagacgtcttaagagtgtcctctggtga

SEQ ID NO: 191424 - DNA, 265 bp, Glycine max
cacacaacaccaacgttgacaatgggttctcgctacgacgtggaactgaacctctcatcggcacgcgctctcaacaacgtgaactggcgccatggcccgaaccgcccatacgtcgtcgtttgggtccaccgaacaccgagctctcgacgcgcgtggacgaaagcggcgacactgacgcgaattcggaccaaacgctcacgattccgttgccaccaaagcctctcgaggatcaaacgttgtacatcgacgtggtccacgccggctc

SEQ ID NO: 191425 - DNA, 281 bp, Glycine max
taagcaatggtgtacgtcaaggctcagaaatcgaaagcctacttcaagagatatcaagtcaagttcaacacaacaacacagggaaaaaccgattaccgtgccaggattcggttgattaatcaggacaagaccaaatataacactccgaaataccgatttgtggttcgctttagcaacaaggacattgttgcacaaataatatctgctagcattgccggcgatttagttcttgctacagcatattcacgtgagctgccacgatatggtcttgaagtaggact

SEQ ID NO: 191426 - DNA, 278 bp, Glycine max
tgggttccctacaagctatgactaaagggactgatgcaacgtacttgggtgatacagcaaagctaaaggttgctcacggggttgttggagctgttaaacataagggttctgtcttgaatttcgtgccgtacgccttgcaagcggtcaggcaagggtttcaggatatcggtgcctcctctctacagtctgctcatgaccttctaagatccagggagttaagactggaggtccggagtggagcagcacaggttgaaggtggagttcatgggctggtttct

SEQ ID NO: 191427 - DNA, 281 bp, Glycine max
  unsure (1)..(281): unsure at all n locations
tgcgtacgacaacacggtttcgttccgtttcggtggggagcgaacagcacaacggcgagttctgcctgcgttgctgcgtcggtcgcganggcaagtttggtcgcgagttcctggagttcgagttccgcccagacggcgagctccgctgcgccgacgactccgactgcggagacgacgccgtcgtccgcgaggaggtttgcctgacccccgccgttctccgcgagtgccgtcgcgtcgtcgccgacagcgagattgtgaaggaagatgatgacggctggccc

SEQ ID NO: 191428 - DNA, 271 bp, Glycine max
tgtgttcttcgtttgctaccttctcccagaaatggttacgttcaggtttcaccagtaccaggtggtcgggagggctctcccaacggaagcagatcagcatccgaagatctaccgaatgaagctctgggccaccaacgaggttcgcgccaagtctaagttctggtattttttgaggaagctgaacaaggtgaacaagagcaatggtcaagttcttgctatcaacgagatttttgagaagagcccaaccaagattaagaactacgggatatgg

SEQ ID NO: 191429 - DNA, 269 bp, Glycine max
gtgaggactcttttcggaggtgtggttcagttgcaggatgtacaaaggagtctgccaaggagttgtctcgaccaactagacccgacttcgtgcttctttcctcggaatatgatcgaacatgttgagaccccgttgtttctgctcggtgctgcttatgatgtgtggcaggtccaagccagtttggccccaccttcggctgaccgccttggttcttggaatgaatgcgaatcgaaccatgcaaattgtagctcgtctcagatgcggttcct

SEQ ID NO: 191430 - DNA, 275 bp, Glycine max
tgttgaatgcaatggagatcgtatcttctctgtgtgcagaacatgcgtctgggaatgccgaagttggcattgatttggagaaaggcgtatgtaacgatgtctcgaccttgagcgtttgggatctccatgtgactgagatgtttgctcttaaatatgctgcagatgctgcatgcactgtactacgtgtggaccagattgttatggcaaaaccagctggtggtccaaggagagagcaacctgctggtggcatggccaaagcacagcgccctcgtttc

SEQ ID NO: 191431 - DNA, 277 bp, Glycine max
taaacaaagcattgaatctttgaacaacaaacataaagaagccagcaatggccaagtccaacaacaatgccaagaagttgtcctacatctcagttccttctcagatcatcaactccgtctcatcttcttctcttcaaatctctgcttgaatctcccaagaagtgtgcaagacactccagattcttcacctttgtcaagtgcataaggccaagactcttccttttcactctctttttccttgctttctttgccatgctcaagtttggtctcgatcttt

SEQ ID NO: 191432 - DNA, 277 bp, Glycine max
tagggcacgtgtctttagtagccctagaagctctgaatcaggtgatacctcatccgtggttccaatggatgggacatattcttctactagcaaggatgacaatgaaactagcgaaaaccccatggctgattcggaaagatgtatcagtaccagggatagttgttcgactcgagttgccatactcagagatagggaaaaggatcgtagtgatccagattatgaccgtagttgtggaaggtatgctaggagtatcccaacctctgctgttaacttggtg

SEQ ID NO: 191433 - DNA, 280 bp, Glycine max
cgaacagcatcacttcgattctcaggcggatgcgggagcgtccaagacgtatcctcagcaggctggtaccattcgcaaatggctacatcgtcgtcaaatccaggccttgcgacgttgtagaggtctctacgtcaaagacaggcaagcatggacatgcaaagtgtcgctttgttgcgattgatgtttttgatgggaaaaagcttgaagatattgttccgtcgtcccgcgactgtgatgttccacgtgtgaatcgcgctgactatcagcttattgatatctc

SEQ ID NO: 191434 - DNA, 280 bp, Glycine max
cagggtttctccaccgacagggaaatggctcccaagccgcctactacgggtctgtttgttggactgaacaacggacatgtcgtcgccaacaaggaattgcccccacgcccctcggatcgtaacgggaaaacaagcaagagggtgcgctttgtgagcaacctcgtaagagaggttgctggttttgcaccctatgaaaagcgtatgactgagttgctgaaggttgggaaggataagagggcacttaaggttgcaaagagaaagcttggaacccacaaacgtg

SEQ ID NO: 191435 - DNA, 280 bp, Glycine max
tatacggaaactttggcaggtgtcagcccgtgtaccatccagtgcgtcaaggagtggcccttgagaactaaattacatccccagatctatggtccacccgaatcagctatcgctaaacaagtcattgaaccgcaaatgattggctattgcacagttgaacaggccattaaggacaacaagttgtttatgttacactaccatgatttgttcttaccatatgtaacaaaagtgacacaaatcaagggaaccacgttatatggatcacgaactctgttctttc

SEQ ID NO: 191436 - DNA, 267 bp, Glycine max
gcactcgaccccatggagaacaaaaccttgtcacatgggcacgtccactgttcagtgaccgcagaagtttccaaagttagcagatccaagaagactaccccaaaactatatacgtcagacttcacagtcagctgtccagtcgtagcgtattctggggcacagtaaccgtaagttcccgtgacacgggtggaaacgtgtgatttgtcaccgactggaccgagctttgcaagaccaaagtctgaaagctttggatgataaccttcgtca

SEQ ID NO: 191437 - DNA, 272 bp, Glycine max
  unsure (1)..(272): unsure at all n locations
agagccagttgaaaaggattgcccgaccaatgtactctaatccnccggtacacggggctaggatagttgccgatgttgttggaaacccngttctctttaatgaatggaaagcagagatggaaatgatggctggaangataaagantgttagacagcngctntatgatagtnttacttcnnaagacaaaagtggaaaggattggtcnttcntncttaagcagataggcatgttctcnttcactggcttgaacnagaaccagagtgacaacntg

SEQ ID NO: 191438 - DNA, 273 bp, Glycine max
caccccagtcgtcagctcagtcagcgaatgggtctgtggacggacgacaactcctcggtgatggaggccttcgtgccatcctccgatctctcctccatctggccccctcccgctcctccgcagccgcaatccacggcggtcttcaatcgcgacgccctccagcgccgcctccaggccttaatcgagggcgcccgagacacctggacctacgccatcttctggcagtcctcttacgactattccggctccactctcctcggttggggcgacggt

SEQ ID NO: 191439 - DNA, 275 bp, Glycine max
atccatgttgtctcacgtgacgatttcaacagtgtctttgacaaatttggtacagtgaagtacattgatttcgacattggagcacagtcagggtacattcgctttgaacaaactgaagctgctcacaaagcacgtgctgctgcagttatttcggaaaaggatggcttggttgtaaagaattatattgctattctagatccagtgactggtgaggccgaaaaagaatactggaacctgcttcgtggtaatcaaggcaagcaccgtgaatttaagaa

SEQ ID NO: 191440 - DNA, 277 bp, Glycine max
tggatattggtatagaaagggctactggaattgtatggaacataactggtggaagtgatttgaccttgtttgaggtaaatgttgcagcagaagttatatatgaccttgtggaccccactgctaatttaatatttggggcagtaatagatccatcgctcagtgggcaagtaagcgtaacattgatcgcaactggattcaagcgtcaagaggaaagtgaagggagacctatgcaggccagtcaactcacacaaggagataccgttggtatcaatcggcg

SEQ ID NO: 191441 - DNA, 280 bp, Glycine max
tatcggaaccctactcggctccgtccttcccgatggaaccgtcgatatccgcgattcctgtgctgttcctcgcaacgaatctatcgaacacgttgcgttggatatacagtacgaccgcagtatgttaatatcccgccgaaaagtgaatccgaaggaaatcatagtaggatggtattcaaccggtcttggagtaacaggtggtagtgcattgattcgcgagttttgttctcgagaagtccccaatcccgtacacttgacggttgatacaggatttacaaat

SEQ ID NO: 191442 - DNA, 268 bp, Glycine max
gctctagtcacagacaccgacacagatctgtcttccgaggcaggaactaaatatggctgacttgttggaatggtcgaagcaacataagaaacgagtgcttcgtgtcgtgtaccgtgttggtgaccttgatcgcgccgtcggattttgcgcagaatgtttaggaatgaagcttttgaggcaaagagatatcccagaggagaaatatgctaatgcttttcttggatttggccctgaagaatcccattttgttgttgaattaacatataat

SEQ ID NO: 191443 - DNA, 270 bp, Glycine max
gggagtagcggcattaaaaatgcagatcttcgtgaaaactctgacagggaagactataaccctcgaggtcgagagcagcgacaccatcgacaatgtcaaggccaagattcaagacaaggaaggcattcctccggatcagcagcgtttgattttcgccggaaagcagcttgaagatggaaggaccctggccgattacaacatccagaaggaatcaacccttcatctcgtcctcaggcttcgtggtggcatcattgagccttccctcatggc

SEQ ID NO: 191444 - DNA, 271 bp, Glycine max
cggctcgaggggggtcagagtgagaaagacaaagagacaattcgtaaaccctaatttcggaaagatcggcgatgactgcctccaaggatcgcgagaagttcgtctacgtcgccaaactcgccgagcaggccgagcgttacgaagagatggtggaatcaatgaagaacgttgcgaatctcgacgttgaactgacggtggaggagcggaatttgctttctgttgggtacaagaatgtgattggtgctcgcagagcgtcctggaggatcctgtc

SEQ ID NO: 191445 - DNA, 273 bp, Glycine max
taacaaaaacaacacagtgtacgtaaacagaagcacacactacacagttaccaaaatcaggttcaaacgcacagatctgggacaacacaacaacaacaacaacaacatgggacaggatcagaaccagagatcgctgatctacgcgttcgtgtctcgcggcacggtgattctcgccgagtacactgaattcagtggcaacttcgacgcaatcgcgttccagtgcctccagaagctccctgcctccaacaacaagttcacctacaactgtgacgg

SEQ ID NO: 191446 - DNA, 274 bp, Glycine max
cgaaaatcgttctaagcgatttgatttaggacaagggtatcgaacacaaaataatcgctcgaggaaaaaacacgctggggctggaagctttggcaatacaacggctagtgccttggtgctgagcaagagctttgaagatggtgccagcaaagctgttgaggatattgactgggatgctctagctgtgaagggtacttgccacgaaattgaaaagcgttacctgcgcctaacttctgcacctgatcctgccactgtaagacctgaagaggttctt

SEQ ID NO: 191447 - DNA, 272 bp, Glycine max
actccacccacacgtaccttggtaggccttggaaaccctattctaggacaatattcatgcgatcttacattagtgatgtgttgaggccagaagggtggttggagtggaatggtgattttgctttggacgctttgtactatgctgagtgcgtgaattatgggcctggtgctggagtggctaatagggttaaatggcaagggtaccatgtgatgaatgattctagtcaggctagtaatttcacggtgtcgcagtttattgaggggaatctttgg

SEQ ID NO: 191448 - DNA, 273 bp, Glycine max
tgcggcattaagaatgcagatcttcgtgaaaactctgacagggaagactataaccctcgaggtcgagagcagcgacaccatcgacaatgtcaaggccaagattcaagacaacgaacgcatgcctccggatcagcagcgtttgattttcgccggaaagcagcttgaagatggaaggaccctggccgattacaacatccagaaggaatcaacccttcatctcgtcctcaggcttcgtggtggcatcattgagccttccctcatggctttggctcg

SEQ ID NO: 191449 - DNA, 275 bp, Glycine max
tatcccccttcgaagtgagttatattgcagcgaatcgcacacactctgaacgacgcccaccatgcaggccagtgatacgtttgacgtcgattcccagcttgagcgtctccaagccaaatgtgttggaactggccatgccgatttgaacagatttgagtgggcagtgaacgttcgacgagatagctatgcatcgtatattggacgctgccctttactgggattctttgctattgctgagaatgaatctgttggaagagaacgctacagctttatgc

SEQ ID NO: 191450 - DNA, 270 bp, Glycine max
gtatgaagttgtttgttttctttgttgctgcagtagttttggtagcatggccgtgccgtggcgcaggctaccaaaggttccctctccgaatgaaaactggctatggtgagcgttcttcggaggtaaaatgcgcaagttttaggcttgctgtggaagcgcgcaacgtcagagcctttgagaccattcctgaagagtgcgttgaaccaacgaaggactacgttaatggcgaacgatttagatcggactctaaaacggttaaccagcaagctt

SEQ ID NO: 191451 - DNA, 274 bp, Glycine max
tacgttgtagagttcacagacttacccgacaagagacctagagaagaagaagaagaagaagaagaacaaaccaatggagtctccaacgacgccgtttcaacgctacccaatgaccctcaataccctggtatctctgctgttattcccggttggttctcagaaatcagcccaatgtggcatggggaggcgcactccttgaaggtggaaaagattttgtttcaagggaagtctgactatcagaatgtcatggtcttccagtcatcgacatatggca

SEQ ID NO: 191452 - DNA, 272 bp, Glycine max
cggacgtggcggtgcttcaccgtctgcaccgttgaaccaatacttacaggaattctcgaagctgtttcagtactatctggataagtccgctccccgtcccccctacacgtggattgggactttcgtcgttgcgtccgtctacgttttgcgtgttgtttatgtgcgggggttttacattgtctcttatggcctcggaatctacctcctcaatctcttcattggctttctctcccctttggttgatccacaactcgatcgctccaacgccccta

SEQ ID NO: 191453 - DNA, 276 bp, Glycine max
atgaagttgtttgttttctttgttgctgcagtagttttggtagcatggccatgccatggcgcaggctaccaaaggttccctctccgaatgaaaactggctatggtgagcggttcttcggaggtaaaatgcgcaagttttaggcttgctgtggaagcgcacaacatgccgagcctttaaaaccattcctgaagagtgcgttgaaccaacaaaggactacattaatggcgaacaatttagatcagactctaaaacagttaaccaacaagctttctttt

SEQ ID NO: 191454 - DNA, 277 bp, Glycine max
tagggtatcgaatatgagtacaaagaagaggacttgaggaacaagagtcctcttctcttacaaatgaacccggttcacaagaagattccggttctcatccagatggcaaacccgtttccgaatccctcattgctgaccagtacattgaggaggtttggaatgacagaaatcccttgttgccttcagacccttaccagagagctcaggctagattctgggctgattatgttgacattaagatacatgatcttggaaagaagatttggacatcaaaggg

SEQ ID NO: 191455 - DNA, 277 bp, Glycine max
ggtttctctagtcttcttctgtggagagcttgttttctcttgttcattcgtctcacttccaattaaggaacaagctttccaccgatttgaatcgccaatggctcgctctttctccggcctcaaggttctctctgctcttgtcgccgacggattctccaacactctcaccaggcgtgggtacgcagtagcgacacaaagcgcaacaagaggaggagcagcctccatcagcggcaagtcaggggaacacaaggtactacgaggaggtgctgaaaaggtt

SEQ ID NO: 191456 - DNA, 276 bp, Glycine max
aaacaagccagcaagctcagagagcaagttgccaaacagcaacaggctgtaataaagcagttcagtagtagtggttatgagagttcagatgttgtggtcatcgatgaggtcgaaatgcagagacatcaccagctggaaaagttgtatagggccacacgttcagggaaggacttccagaaggaaattgttaaagcagcagaaacatttacagctataggttataagcatattgaaacaggaacaaaactttctgaggattgctgtaaatatggagca

SEQ ID NO: 191457 - DNA, 276 bp, Glycine max
tggcggcacatctgacaatgtcttccgcccggatcgaccggccgaagccgaccttgggtccaaaaacaggggcagtgcccgcttccgattcacggaataagtaaaataacgttaaaagtagtggtatttcactttcgctgtttccagctcccacttatcctacacctctcaagtcatttcacaaagtcggactagagtcaagctcaacagggtcttctttccccgctgattccgccaagcccgttcccttggctgtggtttcgctggatagtagac

SEQ ID NO: 191458 - DNA, 277 bp, Glycine max
gcggtacccttgctctccaagaggatcgtgaagaagcgcgtcaagaagtttatacgcccccagagtgatcgcaagatctccgtcaagccaagctggcgcagacccaagggtattgattctcgtgtcaggagaaagttcaaaggatgcactttgatgcccaacattggttatggctcagacaagaaaacccgccattatctaccaaatggtttcaagaaatttgtcgtgcacaatgtgaaagacctggaacttctcatgatgcataacaggacatact

SEQ ID NO: 191459 - DNA, 267 bp, Glycine max
gaacttgccatttcaagggttttagggttagggttttctcaaattgcaaggacatgggtttcaaccttcaaccatatgggattcaatccatgctcaaggaaggccataagcacctttctggcctcgacgaagcggttctcaagaacatcgacgcttgcaaacaactttccactattactcgaacttccctcggtcccaatggaatgaataagatggttataaatcacttggacaagctttttgtcacgaacgatgctgggacaattg

SEQ ID NO: 191460 - DNA, 265 bp, Glycine max
caacactgtctctgtctctcctcctcctgttctcactcagcatcgccgtaaccgttagatcgagcgactacgactacgattgtatgtacactgcatacgttagaaccggttcggtgttgaagggcggaacggactctaagatcgggctgaagctgtacgacaagtacggctactacatctacattaaaaacctcgaagcatggggcggcttgatgggcaagggctacgactacttcgagcgcggcaacctcgacatcttcagcgg

SEQ ID NO: 191461 - DNA, 265 bp, Glycine max
atccaatagcagttatgccgtccgggaagggactagtaccagagcatcatccacatttcattgggacatactggggtgctgtcagctctagcttttgtggggaaattgtggagtctgctgatgcatatgtttttgttggccccatcttcaatgactatagctccgttggatactcgttgttgataaagaaggagaaagccataatagtgcagcctaatcgggtaaccattggcaatggtccttccttgggctgggttttcatggc

SEQ ID NO: 191462 - DNA, 265 bp, Glycine max
ctatttttgaaacaggcaaagcaatacgcagatgcaagaccaagctatcctccacaactcttccaattcattgcttccaagactccctctcacaacctcgcttgggacgtcggcactgggagcggccaagctgccaaatctttagctgcaatataccagaatgtgatagccacagatgctagtgacaaacaacttgaatttgcagccaagctcccaaatgtgagataccaacacaccccttcaaccatgtcgacggccgagcttg

SEQ ID NO: 191463 - DNA, 264 bp, Glycine max
caacactgtctctgtctctcctcctcctgttctcactcagcatcgccgtaaccgttagatcgagcgactacgactacgattgtgtgtacactgcatacgttagaaccggttcggtgttgaagggcggaacggactctaagatcgggctgaagctgtacgacaagtacggctactacatctacattaaaaacctcgaagcatggggcggcttgatgggcaagggctacgactacttcgagcgcggcaacctcgacatcttcagcg

SEQ ID NO: 191464 - DNA, 266 bp, Glycine max
gttgcctatggtgctgcagtgcaaggaagcattttgagtggagagggtggtgaagaaaccaaagacatccttctcctggatgtggctcccctcactctcggaattgaaactgttggtggagtcatgacaaagttgattcccagaaacactgttatcccaaccaagaaatctcaggtgttcaccacctatcaggaccagcagactacagtctccattcaggttttcgaaggcgagaggagtctcacaaaggattgccgccttcttgg

SEQ ID NO: 191465 - DNA, 265 bp, Glycine max
cggctcgagcttccatcttcttcccttttcacgtcattatcctaaaaacttgcagattttcacatcccaaacaacatgaagggtaggttcatgtttctgtcggtgctcctttgtgccacttttcatgtctccttctctattatcgacggtttagttgccaacggcaactttgagttgggtccaaagccctccgccctaaaaggaacagtggtgctgggcgggagcactcgatcccagaatgggagatctccggctttgtggagta

SEQ ID NO: 191466 - DNA, 264 bp, Glycine max
ggaggatgagtctccttgtatttttggttcaattgaaaagcagagatggtcctatgcctgtgctaagcagttgattgagaggcttgtttatgctgagggtgctgaaaatggcttggaattcacaattgtgaggccttttaattggattggaccacgaatggatttcattcccggcattgatggcccaagtgagggtgttcctcgggttctggcatgctttagcaataatctcctccgtggagagcccctcaagcttgtggatgg

SEQ ID NO: 191467 - DNA, 266 bp, Glycine max
cttcgtagtttcttaagtcaagagaagaagtgaagtgctgctatcaatggcttcaagtcaggaagaggtgatccttttgggggttattggaagcccatttctgcacagggtgcagattgctctcaaattgaagggagttgaatacaaatatttggaagatgatttgaacaacaagagtgatttgctcctcaagtataacccagtttataaaatgattccagtgtttgttcacaatgaaaagcccatatccgagtcccttgtgattg

SEQ ID NO: 191468 - DNA, 263 bp, Glycine max
cgacgatccaagtgatagacactcgttgcgatggaacttgtagctgaatccgagcgaactctgtacccatacgtgactggatcctctgtagtcgctatcaaatacaaagatgggattctaatggccgctgacatgggaggttcgtatggatctaccctgcggtataagagtgttgagcgtatcaagcctattggaaagcattctcttcttggtgctagcggggagataagtgactttcaggaaattttgcgctaccttgacga

SEQ ID NO: 191469 - DNA, 265 bp, Glycine max
gccacaccacaccacaattagcaagtatcaattgggttatttttggtcatctaataaaaagcaaaattaagcaagagttactttgaagaagacttgtacaaagatgagttcagcaagcagaacttgggctgtggcagcaagtgttggagttgtggaggccttgaaggaccagggcctgtgtaggtggaacattgctttaagatcagcacaacatcaagtgaaaaaccatgtgagatccttgtctcaggaaaagaaggtttcttct

SEQ ID NO: 191470 - DNA, 258 bp, Glycine max
caaccctccaatttgtttacaatatgaccctctcctttgaatttgagcatgaatttgttcaaaacacggcaagagtgaaatctgttgatatgcatccaactgagccatggcatctactgggtttgtattcaggaactatttctatttggaactatcagacaaagactgaagagaagtctttgaaaatcagcgaatctccagtgagatcagcaaagtttcttgctcgggagaactggattgttgcagctaggatgacaa

SEQ ID NO: 191471 - DNA, 275 bp, Glycine max
tcgctcgtctctacgagccgacatcgtgctcgagcggtctcgagcatcagtccatggcaacccccaaccctaacagattctcccttgccatagagagaaccgggcaatgggttttctccccagaaatcccagccgatgttattgttgcagttggagaatccactttttctctccataagtttattctggcggctaagagtaactacatcagaaaagtgataatggaatcagaggagagtgacctaacaagaatagagatttccaacatacctgga

SEQ ID NO: 191472 - DNA, 264 bp, Glycine max
aaaaaataaaaatcaaagagcataatgtcagggatcattcacaagattggggagacccttcatgtgggagggcacaagaaggaggaggagcataagggtgagcaccatgctggagaatacaaaggggagcaccatggtgaacacagtagtgagtacaaaggagagcatcatggtgaacacaaagctggagagtaccatggtgagcacaagccagagcacaaagaggggttcctagacaaagtcaaggacaagatccatggtgag

SEQ ID NO: 191473 - DNA, 262 bp, Glycine max
ctgctcccattgaacgtgttaagcttttgatccagtaccaggatgagatgatcaaaactggtaggctttctgagccctacaaaggtattggtgattgtttcaagagaacaatggcagatgagggtgctatttctccatggagaggaaacactgctaatgttatccgttatttccccacccaggctttgaactttgcatttaaggattacttcaagaggcttttcaactttaagaaggatagagatggctactggaaatggtt

SEQ ID NO: 191474 - DNA, 263 bp, Glycine max
gcacgctctgcttccagcgagtgttctttcttcgtttcaacaccttaatttgcacacgctgcttcttcagcttgagaaatggcacaagaaacctttctattcacatctgaatctgtaaacgagggtcaccccgacaagctgtgcgaccagatctctgatgcagtgctcgatgcgtgccttgaacaggaccctgacagcaaggttgcctgtgagacatgcaccaagaccaacatggtcatggtctttggagagatcacaaccaa

SEQ ID NO: 191475 - DNA, 261 bp, Glycine max
tgcacctcctgctagggattttattggtgctctaaaggcagccaacgaacgaactggacttccagggttgattgctgaagtgaagaaggcatcaccaagtagaggtatcttgagagaagactttgacccaagttagcctatacaattctatttcattttaggactgttagggggtatgaggggggattgtgtgttggtgaatagaatgtagaagctgttgatgttggaggttgtttggagtgaagatgttgtcgttgttca

SEQ ID NO: 191476 - DNA, 263 bp, Glycine max
gcgaccaccgagccggagcaccgccgcgacgaaaacgacgacgacagcgtgacggcggaggatgacgacaccggagcgcaggtcgctccgatcgtgaagctcgaataggtcgccgtcacaatcggcgacgaggacgaggatcccatccttgcacctgaaggcgaactgctatcggtttgacaaggagaggaaccagtggacggagcgtggctgcgggaacgttaagctgctgaaacataaggtcaccgagaaggtgagactag

SEQ ID NO: 191477 - DNA, 266 bp, Glycine max
gtgatggtcaacctataggacgatacgatgatatgtgggctggatggtgtgttaaggttatctgtgaccatttgggcttgggagtgaagactggccttccatacatctggcacagcaaagcaagcaatccttttgtgaatctcaaaaaggagtacaagggcattttctggcaagaagagatcattccattcttccaaagtgccaccattccaaaagaatgcacttctgtccaaaaatgctacattgaactctccaagcaagtcaaa

SEQ ID NO: 191478 - DNA, 264 bp, Glycine max
gttaggtcaaatactcaaagggcaaggagccagcttttggaaacgcatcttgcaaaattgtttaagcagaaagttgaaattttcacaaaagtagaatatacacaggagtctgttgttacaactttagttaaattgggccttaaaagttttcaagaatttgtccgactccagacttttaaccgaagtggattccagcaaattcaattggatatccagttcgtaaggatcccgttaagagaaatagttgaagatgaagctgcaatc

SEQ ID NO: 191479 - DNA, 262 bp, Glycine max
ctctcgctctctgccttccatcaccctcgccatttcccttccacagattgtagaagatggcagacgctgaggatattcaacctcttgtttgtgacaatggaacaggaatggttaaggctggttttgctggagatgatgccccacgtgctgtgtttcccagcattgtaggtcgtcctcgtcacactggtgtgatggttggcatgggccaaaaagatgcatatgttggtgatgaggcacagtctaagaggggtattttgactct

SEQ ID NO: 191480 - DNA, 262 bp, Glycine max
tctcgagcgaatcggctcgagcggctcgagctttttctgtgagcctttctttcaggttcttaacttgatcagtgtgcacgtgtccaaatcataagggtagttgcaaattgcaatggctaagcatgatgttgagggtggttccttctctgcaaaggactaccatgatcctcctccagcaccgttgattgatgctgaggaactcacacagtggtccttctacagggctttgattgctgagttcattgccacaatgctcttcctt

SEQ ID NO: 191481 - DNA, 263 bp, Glycine max
atatgaagttgtttgttttctttgttgctgcagtagttttggtagcatggccatgccatggcgcaggctaccaaaggttccctctccgaatgaaaactggctatggtgagcgttcttcggaggtaaaatgcgcaagttttaggcttgctgtggaagcacacaacatccgagcctttaaaaccattcctgaagagtgcgttgaaccaacaaaggactacattaatggcgaacaatttagatcagactctaaagcagttgaccaa

SEQ ID NO: 191482 - DNA, 258 bp, Glycine max
acctcccattgttgctgcactgtactgcttgtttttcgcttatgttggagcgggaggtctaagttttcttcaattctgcaacctcaacagttttagaacaatatttgtattaggctactccatcttcattggcttgtctgtgtcgcagtacttcaatgagtacacagcaattaatggttatggtccggttcacaccaaagcaagatggttcaatgatataatccaagtcccgttccaatcagaagcctttgttgcggg

SEQ ID NO: 191483 - DNA, 262 bp, Glycine max
cgagcatcagttgagtggggcattcctgttcctgatgacaagacccagactatatatgtatggtttgatgctttactaggctatatatcagcactatctgatgatcaggaacaacctgatttacttaaaactgtttcttcaggttggccagctgtcactgcacttgattggtaaggatattctacgcttccatgctgtttactggccagctatgctaatgtctgctggactaagccttcctaaaatggtatttggccatgga

SEQ ID NO: 191484 - DNA, 260 bp, Glycine max
ataaaatgggttccgataataccaacttggagttcttgaaggagatcggtttgggctcctccaacattggttcttacattaatggccaatggaaagccactggttcttctgtcacttctgttaatccttctaacaatcagagcatagctcaagtgactgaagcgactttgcaagattatgaggagggattgcaagcttgcagtgaagcagccaagacatggatgactattccggcaccgaagagaggtgagattgtgaga

SEQ ID NO: 191485 - DNA, 258 bp, Glycine max
ggcggattcttctcgggaggagaacgtttacatggcgaaattggcggagaggccgagcgttacgaggagatggttgagttcatggagaaggttgcaaagactgtggaggttgatgagttgacggtggaggagaggaatctcctctctgtggcttacaagaacgtgattggtgcgaggagggcttcgtggaggatcatatcctccattgagcagaaggaggagagcaggggcaatgaggaccacgtggccattataaag

SEQ ID NO: 191486 - DNA, 261 bp, Glycine max
acggggctacccgtgagtttaagcatatcaataagcggaggaaaagaaactaacaaggattcccttagtaccggcgagcgaaccgggaaaagcccaccatgaaaatcggtcgccctcggcgtccgaattgtagtctggagaagcgtcctcagtggcggaccgggcccaagtcccctggaagggggcgccagagagggtgagagccccgtcgtgcccggaccctgtcgcaccacgaggcgctgtcggcgagtcgggttgttt

SEQ ID NO: 191487 - DNA, 260 bp, Glycine max
ctcaatccagtcattgctgtgtgatccaaacccaaattcaccagcaaattctgaagctgctcggatgttcagtgaaaacaagcgtgaatacaacagaagagtacgtgagattgttgagcagagttggactgctgactaatcatcatagataagatagggcttctgtgacaatcaaaaggttgtcaaaaggatatatgattgaataaccagcagacttcaacaagaaccattatgattttctagtccttgacactgtgctt

SEQ ID NO: 191488 - DNA, 261 bp, Glycine max
gcccttcatggtggtaacttccaaggaacacctattggagtgtccatggataacacccgtttggctcttgcatcaattggcaagctcatgtttgctcaattctctgagcttgtcaatgactattacaacaatgggttgccctcaaatctcactgccagcagaaaccccagcttggattatggattcaagggagctgaaattgcaatggcctcttattgctctgaactccaatacttggcgaacccggtgacgagccacgtg

SEQ ID NO: 191489 - DNA, 259 bp, Glycine max
tgccacactacaccgatatttccaccaaacccgtttgcgttgttgtttgcgaataaatggcgactaagaggagcgtgggaacgttgaaggagggtgatttgaaggggaagagggtattcgtgagggtcgatctgaacgtgccttggatgacaaccttaacatcaccgatgacactagagtccgtgctgctgttcccaccatcaagtacttgactggttatggtgctaaagtgatccttctagccattgggacgtccaaa

SEQ ID NO: 191490 - DNA, 235 bp, Glycine max
gtgccggtttcattggcacccacaccgtcgttcagcttctcaaagctggcttcagcgtttcactaatcgctcaagttcgattactccgtcatggaagcagtggaccgcgtccgccgactggttggctctctgctttctcagaacctccaattcacccagggcgatactccgtcatagggatgccctggagagtctcgtctcgactacaacacttgctgccgcgatccacgttgct

SEQ ID NO: 191491 - DNA, 247 bp, Glycine max
cgtgaaatactatgtggtggacgcgtatactgagtcagcattcaaggggaaccctgcaactgtgtgtttcttagaggaagagatagatgaggagtggctgcaagcagtcgccgctgaattcaatatctctgagacttgttacttatcacgcatcacccactcgctccatggaatctctaatcccgtgtgacgtctcgatgggttaatctgttgctgaggttaaacttgtggtcatgccacattagct

SEQ ID NO: 191492 - DNA, 262 bp, Glycine max
aggagagcttgttattctctatcaacaaggaaaatgtcaggtgaagaggttgttgttgcagctgagccagctgctaccatcccaggcgagcctatggatatcatgactgccttgcaacttgtgctcagaaaatctctggcttatggtggtcttgcacgaggccttcacgaaggggcaaaagtgattgagaagcatgctgcacaactctgtgttctagcagaagactgtgaccagcctgactatgttaaactggttaaggccc

SEQ ID NO: 191493 - DNA, 260 bp, Glycine max
gttcgagcacccaatgcacggttcactgggatttcttcccaggaagcgtgctgctcgtcacaggggaaaagtgaaggcattccccaaggatgacccatccaaggcacccaagctcactgcaaccttgggttacaaggccggtatgactcacattgttagagaggtcgagaagccaggatcaaagcttcacaagaaggaaacttgtgagcctgttacaattattgagacccctccaatggttattgttggtgttgtgggtt

SEQ ID NO: 191494 - DNA, 259 bp, Glycine max
ctttaggtggtgaagaacaagagctcaaatcaaatcgaatcgaaaaaagagagaaagatcatattcatggcgatggcaagcctggctcgacggaagggttacgccgtcgttttgtcgtcgaggtcgtcgtgttgtctgacaagctggaggggattcgcgtccggatctgacgaaaacgacgtcgtcgtcatcggcggcggtcccggcggctacgtggccgccatcaaagccgcgcactcggtctgaaaaccacttgcat

SEQ ID NO: 191495 - DNA, 255 bp, Glycine max
atgaacccggttcacaagaagattccggttctcatccacaatggcaaacccatttgtgaatccctcattgctgttcagtacattgaggaggtttggaatgacagaaatcccttgttgccttctgacccttaccagagagctcaggctacattctgggctgattatgttgataagaagatatatgatcttggaaggcagatttggacatcgaaaggagaataacaagaagctgccacgaaggagttcatagaagcc

SEQ ID NO: 191496 - DNA, 262 bp, Glycine max
tttgggtcttttgccagggacaactgtttataggaatgttaaacagtatcctgaagcatatacatacaatggaattgtaatcgttcgtgttgatgctccaatttattttgcaaacacaagttacatcaaggacaggttgcgtgaatatgaagttgatgttgatcgttctaaaagacgtggacctgaggttgaaagaatttatttcgtgattctagagatggcacctgtgacatacatagattctagtgctgttcaggctttg

SEQ ID NO: 191497 - DNA, 261 bp, Glycine max
gggagcatggggatagttcggtggcgttatggtctagcattagcattgggggtgttccggttctgagctttttggagaatcaacagattgtgtatgagaaagagacgttggagaacatacacaagtcagtgatagacagtgcgtatgaagtgatcaagctgaaagggtacacttcatgggccattgggtactctgtggctaacctggcccggtcctttatcaggaaccagaggaagatccaccctgtgtctgttctggcta

SEQ ID NO: 191498 - DNA, 262 bp, Glycine max
gtttggaagaagctgatccgagaagatggtgcagcgtctcacctaccgcaaacgccacagctatgctaccaaatccaaccagcacagagtcgtcaagactcccggtggcaagcttgtttatcagaccacgaagaagagggccagcggacccaagtgccctgtcactggaaagaggattcaagggattccacatttaaggccatcagagtataatagatcaaggttacacagaaaccgaaggactgtgaaccgtgcatatggt

SEQ ID NO: 191499 - DNA, 275 bp, Glycine max
ccaccactgtgcaatggccgacgaggaacctgttgatcagaagagatatcttgaagagtcttgcaaaccaaaatgtgtaaaaccattactagaataccaggcgtgcattaaaaggatacatggtgatgaatctgggcagaaacactgcactggacaatattttgattattggtcttgtattgacaaatgtgttgcaccgaagctattcaccaaactgaagtaaatcgggaaggatttgatggctatcattgcattcttctgttttcattcccaaa

SEQ ID NO: 191500 - DNA, 268 bp, Glycine max
aaaagatccagttgtcggaggcgcagagtagagcagcagagaagagagaaaacggcactgcagccgtagaaggaaaaccgaccatggtgcacgtctccttttacaggaactatggtaagacgtttaagaagccccgccgtccgtacgagaaggagcgtctagacgcggagctgaagctggtgggggagtacgggctgcggtgcaagagggagctgtggagggtgcagtacgcgctcagtcgcatccgcaacaacgcggaatctcctta

SEQ ID NO: 191501 - DNA, 265 bp, Glycine max
atgggcctttgatcacatcaaatatttcaatggtggttctgacattcagcttcatcttgacaagtacactggtactggcttccagtccaaagggtcttacttgtttggtcacttcagcatgtacataaagatggttcctggagattctgctggcacagtcactgctttctatttatcttcccaaaacgcggagcatgatgagatagactttgagttcttgcggaacagaacaggacaaccttacattgcaaacaaatgtgttcac

SEQ ID NO: 191502 - DNA, 263 bp, Glycine max
gtttgtccaatttgcagacaggagctgtgctgaagaggcccttcgggtgttgaatgggacgctgttgggtggacaaaatgtgcgtctttcatggggtcgcagtccttcaaacaaacaggctcaggcagatccaaaccagtggaatggtgctgctggtgctggttctggtggtggatattatgggtatgctgctcaaggatatgaaaattatggttatgctcctgctggacaggatcccaacatgtagcagttatccgggatat

SEQ ID NO: 191503 - DNA, 258 bp, Glycine max
ggaaactcggtgcatgaggtggccgcgagggccggttcggcggacctaagcccggtccgggtcgcgggggcaattccggttcaccccggttttgtccggtccaaccggagccggtccgagatggaaatgccacagacaccgtttttaacgttggacatgctggacaagttcttagccttggcgcttcctgttggggccaccaaggaccacccctttacgtgcccgatgggtgaggcggcaccgcctcgaagggctgaa

SEQ ID NO: 191504 - DNA, 259 bp, Glycine max
ttcgagcgctcgagccgctcgagggagacaatgcgatcgctttggatgtcctcttgcttggtgagttatggagcatgtaaattgctgggtcagaaaatgccaagacttaatgttgaagtcattgatgaaagaggatctccagattcaaggccggagagtagtcctgttgagaagttatacatatacaggactgtttctgggccaagattggacatgccaggctatgtatggagaatgcaagatgtctgcattaaggatt

SEQ ID NO: 191505 - DNA, 264 bp, Glycine max
gaccctacgaatccgaagcactattggagattccgtgtgcatgtgactttggaatcattgatcaaggataatgacctccaaaccaccatcaaagatctcgtcagttggagtggaagatcactccctaaggaagacgactcagaaatagaagcgagcccagtgtcggtgttgtcagcagcagaagctctttctgagaagcagaagtttgccagtaccacggaaaagcctgttcttgtcaaataaaaattagctgatgttattcat

SEQ ID NO: 191506 - DNA, 261 bp, Glycine max
gggtgaggtgctgggagtatcgccagcaaccttctattgtccgtttgacaatgtctactcgcccagataaggctcgtcgcttgggtttcaaggctaagcagggttacgtgatttaccgtgttcgcgtacgaaggggtggccgtaagagaccagttccaaagggtattgtttatggtaagcccaccacccagggtgttccacaactaattttacaacgcaaaaggatttctgttcccgaggagaccgaaaggatgttgggtg

SEQ ID NO: 191507 - DNA, 263 bp, Glycine max
cgaaaccagctagcggaggctgacgagttcgaagacaagatgaaggagcttgagagcatttgcaacccaatcattgccaaaatgtaccagggtgcaggtgctcccgacatggctggaggcatggatgaagatgttcctccatctggatccggtggtgctggccccaagatcgaggaagttgattaaattgtttcattatttagatgggatgggcttgtgttggatctattccgtttctttttccttttttatttggtctagaa

SEQ ID NO: 191508 - DNA, 264 bp, Glycine max
agaaggtgtaacccctgcattcagtctatgcaattgcaagctggagatactgtaacatttagccgtatggaccctgaggggaaacttataatggggtttagaaaggcaacaaattctactgcagtacagtcacaaaagggttgttcagaaacccacctaaatgcgctgtctaagaaatggaactcagctggtggtgacatgaattggcatagcattgacatgcctgatagcagataaagagatggggccattgccacctgtgat

SEQ ID NO: 191509 - DNA, 266 bp, Glycine max
atgctgcattgcagtatcctgtgatgccctcatgcaaagctactatggatttgtctgctgctgcaacaactgcctcccccgtctttgttgctgctccagcagagaaaggccattttcttatagactttctcatgggaggtgtttcagcagctgtctcaaaaactgctgctgctcccattgaacgtgttaagcttttgatccagaaccaggatgagatgatcaaaactggtagactttctgagccctacaggtattggtgattgctt

SEQ ID NO: 191510 - DNA, 268 bp, Glycine max
  unsure (1)..(268): unsure at all n locations
gcgagctttgcattgcttggcagatttgcgaacaaggagcgaagagattcgagcccactggttcttaccatatttncataacagccgctttcaggatttcatcttcggtgtttntccaaacaccgcccttaatcataatcctcatcttcgcttcaactacagacagcaacaaaacaattcaaacaaagatgattagatgtgaaaaataggggaaaagaaaaataaagagaaatcagggtttaggttagggaatcagagacgcaccaca

SEQ ID NO: 191511 - DNA, 262 bp, Glycine max
ggggaaagaagaccctgttgagcttgactctagtccgactttgtgaaatgacttgagaggtgtaggataagtgggagctggaaacagcgaaagtgaaataccactacttttaacgttattttacttattccgtgaatcggaagctgggcactgcccctctttttggacccaaggtcggcttcggccggtcgatccgggcggaagacattgtcaggtggggagtttggctggggcggcacatctgaaaagataacgcaggtgt

SEQ ID NO: 191512 - DNA, 262 bp, Glycine max
gtcagggatcattcacaagattggggagacccttcatgtgggagggcacaagaaggaggaggagcataagggtgagcaccatgctggagaatacaaaggggagcaccatggtgaacacagtagtgagtacaaaggagagcatcatggtgaacacaaagctggagagtaccatggtgagcacaagccagagcacaaagaggggttcctagacaaagtcaaggacaagatccatggtgagggcggcgccgagggcgagaagaag

SEQ ID NO: 191513 - DNA, 263 bp, Glycine max
atcaggcaacgccttcacacttgctttcttcagttcctccatctacattgcaccatttgaagggaatagcatcaattattgaaaccggttcgtactcaaaggaagttcgtcgaattgctcgtgccctgcgccttacatttgcatttaggcgtaaattgacaacaccagttctctcatcttttcttgattatgttcttactcccgcttctgaacctcacactaggttatcctcttatctccctaatcaaggagggtgatcgaga

SEQ ID NO: 191514 - DNA, 262 bp, Glycine max
ctcaaaaatcgttctcttcgattttagggttttgttttgctgctgcctccgttccccccttctcataaacaacgcgttttctcttctgcttcgtatctattctttgcttttggttttggttgattcaaggccttcacagcattcgttgcggcattttaatcgatttatccaagcaggactgaatgaactaatggagtctaaaggtgggaaaaagaagtctagtagtagtagtagtaaatcattgctacgaagctcccctcgg

SEQ ID NO: 191515 - DNA, 264 bp, Glycine max
ggcaatctcacttcctccgcgccgtatattaattcccctcattttcgctcacaacttaagctttccagcaactcctctttgcacaagccactcatgcgcgacaagactgtgctggtaaccggcggagcgtttacaatccggcacccacaccgttcttcagctcttgctcggaggttgcagaaccgtcgtcgtcgacaatctcgacaattcctccgaggtttctatccaccgagtcagggagcttgccggaatttgggaacaact

SEQ ID NO: 191516 - DNA, 267 bp, Glycine max
ggaccctcgtgtcgtcgcgttcttggacggtgcctacttcccgatcctcttcgacaacgacaaggtcgagaagctcaacgttctcgacggcaccttcatgccttccaccaagttcaccggctcgttccgcgtctgcgcctacctcgacaccaccgaacccaaccacgcactcatcaaacagttcttccttaacgtcctcgccaagcgaaaagactcttttgtccctctgttccgaaactgcctccaggaggttcgcggagattgagg

SEQ ID NO: 191517 - DNA, 267 bp, Glycine max
actgtcactttacccaatcctaacactttcttctctctgttttccttcttcctcgcatcaatggagttggacggcgttctcctcggcatgtgcaaccctctcctcgacatctctgccgtcgtcgacgacgctttcttggaaaaatacggtatcaagttgaacgatgcgattctcgccgaggataaacacaaacctatgtatgaagaattggctaacaatcctaatgtggagtacattgctggaggtgctactgaattcaatcagggt

SEQ ID NO: 191518 - DNA, 261 bp, Glycine max
ccctccccgattcgttttgcccctttcgttgccctaatttcaaccatgcctcgccgtagctccggtggaagatctgcccgtcctgctcctcgtgcagcacctcgtcctgctccagttcaccatgctcctcctccagcccctgctcagagcggtggcggatctatgcttggtggcattggttcaaccatagctcaaggtatggcttttggcactggaagtgcagtggcacacagggctgtggatgctcatgggtcctcgtac

SEQ ID NO: 191519 - DNA, 263 bp, Glycine max
ggagatggttgccatgaggtttcaccagtaccaggtggtgggaagggctcttcctaccgaatccgatgagcatcctaagatctaccgcatgaaactctgggccaccaacgaggtccgtgccaaatccaagttctggtattttttgagaaaattgaagaaggttaagaaaagcaatggacaagtgctagccatcaatgcgatttttgagaagaatcctaccaagattaagcattatggcatttggctgttatcagagccgcact

SEQ ID NO: 191520 - DNA, 260 bp, Glycine max
cgcagcgtagcagtaactcgtggaattgctagcaatggcgaggatcaaggtttacgagctgaggcagaagacgaaggctgatctgttgaatcagctgaaggacctcaaggccgagcttgccttgcttcgtgttgctaaggtcaccggcggtgcacctaacaagctctctaagatcaaggtggtgaggttgaacattgcccaggttttgacggtgatttctcagaagcagaaggccgcgttgagatgcctacaagaacaag

SEQ ID NO: 191521 - DNA, 254 bp, Glycine max
ggaagcttctttttctgatcttttacgtgtcaatataaattcccttcaaagaaataagctttccactctttttcaatcaatcaccaatggctccttctttcacttacgtcaaaatcttctcttctctcgtcgcagaggatttctccaacgctctcaccagacgcgggtacgctgttgcatcacaaagtgcaacaaagggaggagtggcctacatgagcggcaatttggcaccaaattcaggggagtaacaaagg

SEQ ID NO: 191522 - DNA, 197 bp, Glycine max
aatcccccttcgccagaacgacatcaccgcagcgtcgtctccaatctgcgctgcctacgacaactacctccgcctccctgagctcagagccctctgggcctccaacgacttccctaattgggccaacgagcccatcttaaagcccaccttacacgccctcgaaatcaccttccgcttactcgcaaccgttttatcgg

SEQ ID NO: 191523 - DNA, 262 bp, Glycine max
gaaaaatggtgtcgctgaaactgcagaagcgcctctccgcaagcgtgctcaagtgcggcagaggaaaggtttggcttgaccccaatgaagtcaacgaaatctccatggccaattctcggcaaaacatcaggaagttggttaaggatgggtttatcatcaggaagccaaccaagattcactcccgctcacgtgctcgtaggatgaaggaggcaaagaggaagggccgccactccggttatggtaaataagggtacaagggagg

SEQ ID NO: 191524 - DNA, 262 bp, Glycine max
tgagtctggtaattggaatgagtacaatctaaatcccttaacgaggatccattggagggcaagtctggtgccagcagccgcggtaattccagctccaatagcgtatatttaagttgttgcagttaaaaagctcgtagttggaccttgggttgggtcgatcggtccgcctccggtgtgcaccggtcggctcgtcccttctgccggcgatgcgctcctgtccttaactggccgggtcgtgcctccggctgttactttgaagaaa

SEQ ID NO: 191525 - DNA, 259 bp, Glycine max
ctcgagcgcgcagcgtagcaaaagctcgtggaattgctagcaatggcgaggagcaaggtttacgagctgaggcagaagacgaaggctgatctgctgaatcaactgaaggacctgaaggcggacttgccttgcttcgtgttgctaaggtcaccggtggtgcccctaacaagctttccaagataaaggtggtgaggttgaacattgcccaggttttgacggtgatttctcagaagcagaaggctgctgagggatgcctaca

SEQ ID NO: 191526 - DNA, 263 bp, Glycine max
catcgttctccatttttggctttacaaaaccactgtgtctgattaagggttctttaatatttccaatatttcttgtagtgaaaaagttgtcagctaaaagaagaccaagtttttggtgttgtagaaggaagagaagaattaacatgaaaattcagtgtgacgtgtgtgagagagctccagcaacagtgatttgttgcgcggatgaggctgctttgtgtgccaaatgtgacgttgaagttcatgctgaaacaagcttgcaagca

SEQ ID NO: 191527 - DNA, 257 bp, Glycine max
aatgacttgagaggtgtaggataagtgggagctggaaacagcgaaagtgaaataccactacttttaacgttattttacttattccgtgaatcggaagctgggcactgcccctctttttggacccaaggtcggcttcggccggtcgatccgggcggaagacattgtcaggtggggagtttggctggggcggcacatctgttaaaagataacgcaggtgtcctaagatgagctcaacgagaacagatctcgtgtggaac

SEQ ID NO: 191528 - DNA, 221 bp, Glycine max
ggaggttttaccaacggtgaagttggtgaagaaggacgcccaagaagagcatttgaacaccacagtgggactggacgaggaaatgaattcaaacgggatggctctggacgtgggaactggggtacacagaatgatgacattgctgtggttactgaggaagtggtgtatgaaactgaaaagaattttgctgatgagaagcctgcacgaggaagatgcacctg

SEQ ID NO: 191529 - DNA, 264 bp, Glycine max
caaaaacttaccaaccctgccttggaaaacaagattggagatcatgcttggtgttgctcaaggactagcttatctacatgaaggactggaaattcaggtgatctaccgagattttaaatcttcaaatgttctattagatgcggacttccacccaaagctctcagattttggtctggctagagaaggaccacaaggtgatcagactcatgtatccactgcggtagttggaacacagggttatgctgcagagtacattgaaacggg

SEQ ID NO: 191530 - DNA, 264 bp, Glycine max
ctttatcactttcattctttaattgggttcaaagaagcttaattaattggttgcagagattgaaaattaggaaaatggtgagtgttgaagagattcgtaaggcacaacgtgcggaaggccctgccaccgtgatggctattggcacggccactcctcccaactgcgtagaccagagtacctatcctgactattatttcagaatcaccaacagtgatcacatgaccgagctcaaagaaaagttcaagcgcatgtgataagtcaatg

SEQ ID NO: 191531 - DNA, 265 bp, Glycine max
aaccgggcgaggtttatgttccaagagatgaaaattttggtcacttgaagtcatcggatttccttacatacggaatcaaatccttatctcacgatgtgatacctttgttcaaatctgcaatttttcaattaagggtcacatcgagtgagtttgaaagcttcgaagatgtgcgtagtctctatgagggtggaattaaattgccaacagatatactgagccaaattagccccttaccagccctcaaggaaattccgcactgatggtg

SEQ ID NO: 191532 - DNA, 262 bp, Glycine max
gggatgctgtatgttggacgaggagccatagtcacaaccttcattgtttgctatgctctcacatctttcatttctggttatgtgagtgggggaatgtactcacgtaatgggggtaaaaattggattaaatccatgatccttacagcatcactgttcccattcatgtgctttggaattggttttattttaaacacaattgctatattctatggatctctagctgcaatcccctttggtactatggtttgtctttgttatatgg

SEQ ID NO: 191533 - DNA, 258 bp, Glycine max
cttatggatcacttccaaactctggtgttcagatcatgcaccagaagatgtgccaaaagcattggataaaacattacaggaattgcaacttgactatcttgacctctatctggtatgcatgtattatatttactgatatgtgaattcatgttgaaaatttgggggaagattaagggtttgtttagtacaaggaaacattcatttttactttttgaatgaaaaactttcgaaccaactatttcatggaactaggtttgg

SEQ ID NO: 191534 - DNA, 259 bp, Glycine max
gttgagtggaaaccaagaaggagcttatcaatgggtaacaattaactatctactgggaaacttgggaaagcattattcagaaactgttgcagtagttgatcttggaggtggatctgttcaaatggcttatgcagtctcagagacagatgctgcgaaggctccacgagcaccggacggagtggaatcatacataacggagatgttccttaggggaaagaaatattacctctatgtacacagttttgcgatacggtatgct

SEQ ID NO: 191535 - DNA, 259 bp, Glycine max
ctaagttatcctcataaatacactctaattaggtggcaagataagtgtctaaccttagtaacattgccacatattgtgttcattttggaattgtgccactaaaattctattcaattcatctatggctgcctcttcttatgctatgcaatcaatcctggcaaaccctttgatccgcatttccagcgggtctagggtgaaccaatttggcgttcctgctttgcacatgagaaggaatgttggcgagagttaggtccatggc

SEQ ID NO: 191536 - DNA, 260 bp, Glycine max
cccgccgctcgatgggaattgcgcttcaaggcgtctcgtagggctaatccgcctcacgagggtcaccaacggcacgtgcctttggggggccgaggcccctactgctggtcggcaaacggacggcgggcgcacgcgtcgcttctagcccggattctgacttagaggcgttcagtcataatccaacgcacggtagcttcgcgccactggcttttcaaccaagcgcgatgaccaattgtgcgaatacggttcctctcgtacta

SEQ ID NO: 191537 - DNA, 263 bp, Glycine max
agaaggtgtaaccccctgcattcagtctatgcaattgcaagctggagatactgtaacatttagccgtatggaccctgaggggaaacttataatggggtttagaaaggcaacaaattctactgcagtacagtcacaaaagggatgttcagaaacccacctaaatgcgctgtctaagaaatggaactcagctggtggtgacatgaattggcatagcattgacatgcctgaacgcagaaaaagagatggtgccattgccacctgtg

SEQ ID NO: 191538 - DNA, 263 bp, Glycine max
gccaacctcaaataacccttgttatctctctttcattctcacttgtactcatctctttttcacaactttttttgtaccttctgatctaatggcagttccagtgattgatttttcaaagctgaatggtgaagaaagaaccaaaactatggcacagattgctaatgggtgtgaagagtggggattttttcagttgatcaaccatggtattccagaggaactccttgagagggtgaagaaggttgcctgagttctataagctggaa

SEQ ID NO: 191539 - DNA, 261 bp, Glycine max
agaactttccagttgttgacatgggaaacctgaataatgaagagagatcagcaaccatggagataatcaaagatgcctgtgagaactggggtttctttgagttggtgaaccatgggatatccatagagttgatgatggacaccgtggagaggatgacaaaagagcactacaaaaagtgtatggagcaaaggttccaagaaatggtagcaagcaagggcttcggagtctgctcaatctgaaatcagatttggactgggaaac

SEQ ID NO: 191540 - DNA, 262 bp, Glycine max
cggctcgaggccatctcccaaacccaccaagcccaaagcctcgtcttcccttcataggacaccttcatctcttaaaagacaaacttctccactacgcactcatcgacctctccaaaaaacatggtcccttattctctctctactttggctccatgccaaccgttgttgcctccacaccagaattgttcaagctcttcctccaaacgcacgaggcaagttccttcaacacaaggttccaaatctcacataagacgcctcacct

SEQ ID NO: 191541 - DNA, 258 bp, Glycine max
ggtaacagcgctggtgctgatagctttggcaacaatttctctccaatcttcagcttcagcttcatcagtgggtaaattcgtcgacgaaaccatcacttcccacaagatcgtcattttttccaagacctattgcccgtactgtagaagagcaaaagctgttttcaaagagttgaaccaagttccacatgttgttgagctcgacgagagagaggatggttcaaagattcaggatatcatggttaattgttgggaggcgta

SEQ ID NO: 191542 - DNA, 259 bp, Glycine max
cttatctctctctctctcccgaattattgttcgttcgacccttttacttagtattccctgtttccggtattcgctccctttttttctgcattctggttttacttagatctctgtcccgcaccagatctggtgcagggtgagatggttgggttcattaattttgtatcaatcttccttctgagcggtaggcgtggggataccagagtcttttcgggaagcaagagagggttctctccgttttctagatctctcactgtct

SEQ ID NO: 191543 - DNA, 257 bp, Glycine max
gctttctctcatccatcatgaaaggaggaaagtccaagaccgaatctaagagagccgatgccaaacttgctgtgaataagaagggcgccgccaccaagactaggaaacccgccggaaaggggaaggcagcgaaagatcctaacaagccaaagaggcctccaagtgctttcttcgttttcatggaggaattcaggaaggtgttcaacaaggaacatcccgacaacaaagcagtgtctgctgtgggcagctgctggagc

SEQ ID NO: 191544 - DNA, 257 bp, Glycine max
agcagatcatgttggatatcttggatatgtaccaaaactagttgctgctgttgcatttgagggaaggcgagaaacaatgtcatcaggtgaggtaaacaatgggagacatgcagaacaaacatatgacccagataaggaatcagcagagaacacacaaactcctcaagaacgtgtgcgcctgagttgtttgcgtgtcttgcatcaacttgcagctagtaccacctgtgcggaggccatggcagcacagtgttggaaca

SEQ ID NO: 191545 - DNA, 264 bp, Glycine max
tgtccctccttcctctgccttataattcttgtgacccttttggctggtagcattgaaagtgcaccagcaaacgtgaagccaagccattatgctgcacccttcaataggagtgtttttccttctggttttctatttggaataggctctgcagcttaccagatagaaggagcagcagctatagatggcagaggaccaagtatatgggacacctatactttacagcaaccagggaagatttgggatcatagatggaagtctagcaat

SEQ ID NO: 191546 - DNA, 293 bp, Glycine max
aatggctgccaccaccttagtctctgaagtcactctcccctcctcctccggccagcggaagatgccgctgatgggcctcggcaccgcgccggaagcaaccagcgcggttaccacaaaagatgctgttcttgaggccatcaagcagggctacaggcactttgatgctgcttctgcttatggtgtggaacagtctgtgggagaagccatagctgaagcacttaagcaaggactaattgcatccagatcaactcttcatcactaccaaattgtgggtcactgataaccatgcccat

SEQ ID NO: 191547 - DNA, 292 bp, Glycine max
aagctggtgccatgttatgtcttgagctctggtacaacacaatattggttcttttgacgggtaacatgaaaaacgcggaggttgaaattgatgctctatccatatgtctcaacatcaatggatgggaaatgatgatatcacttggtttcatggctgcagcaagtgttcgagtggcaaatgaacttggaagaggaagtgccaaagctgcaaagttctctattattgtgtcagtgctcacatcattgccatcggattccttctgttcatattcttcttattttttagagaaaga

SEQ ID NO: 191548 - DNA, 285 bp, Glycine max
aaacaagtagtgttccgaaaagatggctcagcaggaagtggtagaagggttcaagttcgaacagaggcacgggaaagagcgcgtgagagtggcgcgcgtgtggaagacgaggcaggggcagcacttcgttgtggagtggcgcgtgggcatcactctcttctcagactgcgtcaactcgtatctccgcgatgacaactctgacatcgttgctactgataccatgaaaaacacagtgtatgcaaagcaaaggaatgctcagacatactctctgctgaggactttgct

SEQ ID NO: 191549 - DNA, 286 bp, Glycine max
ctggactcatctccaagaatattgagaaggccttggttgaagccttccaacccttgggaatctccgattacaattctatcttctggattgcacaccctggtggacccgcaatttggaccaagtggaggctaagttaggcttgaagcctgaaaaaatggaagctactaggcatgtgctcagcgagtatggtaacatgtcaagtgcatgtgtgctattcatcttggatcaaatgcggaaaatcaatagaaaatggacttggcacaaccggcgaaggccttgactgggg

SEQ ID NO: 191550 - DNA, 283 bp, Glycine max
ctcgagcgattcttcttcttcttgttcttgttctatctgtgacgagcatcatggcctcgagagcagtgctattgttggctatgtgtgtgcttccggccatggttgtggccattcgcccagcaaagaaccctttttgcgtgaagggtcgcgtctactgtgacccttgccgtgctggttttgagacctcagcaaccacctacattgccggtgctgagattatgttgcaatgcaagacagggttagcaacgaggttgtgtacaccaagaaggggtacactgactca

SEQ ID NO: 191551 - DNA, 283 bp, Glycine max
ctctttctcgtcactagctctgtgcattcttctctcgctctctgccttccatcacactcggcattagctttcccaagatagtagaagatggcagacactgaggatattcaacctcttgtttgtaccaatggaacaggaatggttaaagctggattttctggagatgatgctccatgtgctgtgcttgccagcattgtaggtggtgctcgtcacactggtgtgatggttggcatgggcaaaaagatgcatatgttggtgatgaggcacaatctaagaggggtat

SEQ ID NO: 191552 - DNA, 286 bp, Glycine max
atctgtcgtcatgctaaggtgagtcttctccccaatcagttaccatccgatgcccgtatatcaagctttaggctgaaggtgccatcccctgagcttgaaaggtcattaaaaatcaaggaaagacttgagaattctctgactctgaagaagactctactatttttcgttcttgctggtacttctatggttattgctaatggtgttgttacaccagcgatgtcagtactgtcatctgttgtggtttaaaagttggggtagatgcaatcaagaaagatgaagtggtgat

SEQ ID NO: 191553 - DNA, 282 bp, Glycine max
ggggttgcaaattttgatgaaatccttgcaaattcagatgcatttatggtggcacgtggtgaccttggaatggaaattccaatagagaagatatttctcgcacagaaagtgatgatttacaagtgcaacatccaaggaaaaccagttgtcactgcaacccagatgttggagtcaatgatcaaatctcccaggccaaccagggccgaagctactgatgttgccaatgcagttctggaggcacagactgtgtgatgcttagtggtgaaacgctgctggagccta

SEQ ID NO: 191554 - DNA, 265 bp, Glycine max
agcctccatgggacaggatttgtccccagtggacttaatcaatgtccatcaatttgcacagagggtaatggacctatctgagtacagaaagaacttatatgattacctggttgctaaaatgaatgatattgcaccaaatttggccactttaattggtgaagttgttggtgctcgtttgatttcccatgctggtagcctcacaaatttggcaaagtgcccctcttcaactcttcattcttggtgcggagaaggctttgttcagggc

SEQ ID NO: 191555 - DNA, 291 bp, Glycine max
gcactaaccagcaccacttccaatggcttcaaatcatgaagaagtgatacttttgggcaagtgggccagcccatttagcaacagagtagaccttgctctcaagctcaagggagttccctacaaatactccgaggaagatcttgctaacaagagtgctgatcttctcaggtacaaccccgtgcacaagaaggttccggttttggtccacaatgggaacccattacccgagtcacttatcattgtgaatacatcgatgagacatggaaaaataatcccctcttgcctcgagac

SEQ ID NO: 191556 - DNA, 286 bp, Glycine max
atgaggttgctgcagcaggtgtctaatgtgtaccaatctatgaagattgaaaccttatcggggatgatccccttctttgatttctctcaagtggaaaaggtttcggtagatgctgttaagcagaagtttgtatcgatgagagttgaccacatgaaaaatgctgtgattttttgcaaaaagagtcttgagtctgatggcttaagggatcacttggccaattttgctgaacaattaaaaagcaagacagatgatttatcctcctgataggagatcatcaaaacttgga

SEQ ID NO: 191557 - DNA, 285 bp, Glycine max
ggctgcttttgggttcccagagactcctgaagatgctgccagagctggtcttattagtgggaaggataatatcattgatcgtagtattcaagatgcttatattaatgctattcgacgtgcaaagaacttcatctatattgaaaatcagtatttccttggaagctcttttgcctggagtgctgatgatattaagcctgcagacattggtgctttgcatctaatcccaaaggaactttctcaagattgttagcaagattgaagctggggaaaggtttgctgtgtatg

SEQ ID NO: 191558 - DNA, 288 bp, Glycine max
atccatcacaagcagaggaagaagatggtgaagttcctgaagcctaacaaggcagtgatcgtcctgcagggccgctacgccgggcgcaaggcggtgatcgtgaggtccttcgacgagggaaccagggagcgcccctacggccactgcctcgtcgccggaataaagaagtacccaagcaaggtcatcaagaaggactccgcgaagaagaccgcgaagaaatctagggttaaggccttctgaagctcgtgaactaccagcacctcatgcccacgcgctacacgctcgacg

SEQ ID NO: 191559 - DNA, 284 bp, Glycine max
gaagatggcatgattagtttggcgctgatttgctcgtttaatcgaatgcgaaaacaccttaatttgggtgatgttaagcccgatgaagtggcccaagaaaccgtgaatactgttgctcaaactttgagaaattcggcttcactcaaggtctccgaagatgggaaaaaagttggcaggaaaactgaacttccaaagctagaagatgttgagcaggtggagataagaacacttgctgatcaccatttgaatatgatctgaagcttgaagatgtggagaaatttttt

SEQ ID NO: 191560 - DNA, 282 bp, Glycine max
ctcgagcgatttcatcaaaacactgaggtatgatgtaaagattgttgaaagcataccagaaaatcagaaaaatggcaaaaagaagaaaataaagccatttcagcttcgtcctcctagagatgctcctgtaagttggtatactactgatgctctgaagaaaatgaaggaacatggtgccatctatcttactcccttttcacatcgcttagctgaagaaattgacaatcctgagtccaaaggttgaggtgtagagtcaactatcatgctttaagatttaagcca

SEQ ID NO: 191561 - DNA, 281 bp, Glycine max
  unsure (1)..(281): unsure at all n locations
ttaaagcctccaacgtcgctctcaagatcctcttccccagcgagcnccgtctctgcgaccgcgtcttcttcggattcgcctccgccgcggacttctctttcatggaggtctgcngcggatcggcgattcagctgctgaatttcgccgacgccgtcgcgatcgggagccggtcgccggaaaggctgttccgaatcctcgacgtgttcgagacgctgcgtgacctatttccggattcgnggctctgttttctgatcantttagtgtgtcgctcaggaatgaag

SEQ ID NO: 191562 - DNA, 291 bp, Glycine max
ccctaaatcgctcttactctctttcgtcagtttcgggggaagagatccagcagcaatggtgtacgtcaaggctcagaaatcaaaagcctacttcaagagatatcaagtcaagttcaagagaagaagagagggaaaaaccgattaccgtgccaggattcggttgattaatcaggacaagaacaaatataacactccgaaataccgatttgtggttcgctttagcaacaaggacattgttgcaaataatatctgctagcattgccggcgatttagttcttgctacagcatatt

SEQ ID NO: 191563 - DNA, 282 bp, Glycine max
gagatttgaacttcgtgtgcacaagagggtgattgacctctacagttccccagatgtggttaagcagattacctctatcacgattgaacctggtgtggaggttgaggtgaccattgcagatgcttgatctggatccaaattttaactgttatgcttcctagttttttttccctctctttttgtattttgtaagttttgattgtgggactgagttggattgttttctctagtttacggttgtagacattgatgaatacccgagaaatgtcatcttaatatatt

SEQ ID NO: 191564 - DNA, 278 bp, Glycine max
ctgaacgttggggccgatgcagtttcagtgttgagtggaaaccaagaaggagcttatcaatgggtaacaattaactatctactgggaaacttgggaaagcattattcagaaactgttgcagtagttgatcttggaggtggatctgttcaaatggcttatgcagtctcagagacagatgctgcgaaggctccacgagcaccggacggagtggaatcatacataacggagatgttctaggggaaagaaatattacctctatgtacacagttacttgcgat

SEQ ID NO: 191565 - DNA, 283 bp, Glycine max
ctcgaccgattccacttatctttctctcttctctctccccgcccaaaccctaactccctaccctattccgctttctctcatccatcatgaaaggaggaaagtccaagaccgaatctaagagagccgatgccaaacttgctgtgaataagaagggcgccgccaccaagactaggaaacccgccggaaaggggaaggcagcgaaagatcctaacaagccaaagaggcctccaagtgcttcttcgttttcatggaggaattcaggaaggtgttcaacaaggaacat

SEQ ID NO: 191566 - DNA, 286 bp, Glycine max
ggcgacggttactacaaaggcgacgacgacaaagccaaggcaaaggccaagtccaaagccacctccgccgccgagcaggaccaccgcaaaaaggttctccgggaacttaactccctcatctccggctcctcctccgcttccgcctccgacgacgtcgacgaggaagtcaccgacaccgagtggttcttcctcgtctccatgacgcagtccttcgtcaacggcggaggactgcccggcaggccttcttcaactcgacccccgtttgggtcaccgggagtgaccgtct

SEQ ID NO: 191567 - DNA, 283 bp, Glycine max
atctctctctctctctttgcgctttctgcaaaccgaacatttcatctccaaagggatcaacaggtcgaaggagaaatggggctgacattcacgaagcttttcagccggcttttcgcgaagaaggaaatgcgaattctgatggttggtcttgatgctgctggtaagaccactatcctctacaagctcaagctcggagagatcgttactacaattcctaccattgggttcaatgtgagactgtggaatacaagaacattagcttcactgtttgggatgttggtgg

SEQ ID NO: 191568 - DNA, 280 bp, Glycine max
gcgatccgagaaaaactctgtaaacatgttggtttaccaggacctccttacaggtgatgagcttctctctgactccttccgttacaaggaaattgagaatggaatgctgtgggaagttgaggggaagtgggttgttaaaggagcagttgatgtagacattggtgcaaacccttctgctgagggtggaggagaagatgagggagttgatgatgcagctgttaaggttgttgattgttgacacattcagacttcaggagcaacccgcattcgataagaagca

SEQ ID NO: 191569 - DNA, 278 bp, Glycine max
cttgcgcggtttatcatgggggatagtcagtattcgttttcactcaccacatttagcccttctggaaagcttgttcagattgagcatgctttgacggctgtcgggtctggacaaacgtctttgggaattaaagctgcaaatggagttgtcattgctaccgagaagaaattgccatctatattggttgatgaagcatcagtccagaaaattcagttattaacaccaaatatagtgtcgtatatagtggcatgggtcctgattttcgagttttggttcgg

SEQ ID NO: 191570 - DNA, 270 bp, Glycine max
ctcgagcgaattcggctcgagatcatggcctcgagagcagtcgctattgttggctacgtgtgtgcttccggccatagttgtggccattcgcccagcaaagaaccctttttgcgtgaagggtcgcgtctactgtgacccttgccgtgctggttttgagacctcagcaaccacctacattgccggtgctgagattatgttgcaatgcaagagcagggttagcaacgaggttggtacaccaagaaggggtacactgactcaactggagcatac

SEQ ID NO: 191571 - DNA, 287 bp, Glycine max
gtgtacgtcaaggctcagaaatcaaaagcctacttcaagagatatcaagtcaagttcaagagaagaagagagggaaaaaccgattaccgtgccaggattcggttgattaatcaggacaagaacaaatataacactccgaaataccgatttgtggttcgctttagcaacaaggacattgttgcacaaataatatctgctagcattgccggcgatttagttcttgctacagcatattcatgagctgccacgatatggtcttgaagtaggacttacaaattatgcagcag

SEQ ID NO: 191572 - DNA, 281 bp, Glycine max
gcaaagttaataaaattctttgagttgaacacaggggccaagattccttctgttgggttaggcacttggcaagctgagcctggtgttgtagccaaagctgtcaccacagccattctggttggatacaggcatattgattgtgctcaagcgtataacaatcaagcagagattggttctgctcttaagaagctttttgatgatggtgtggtgaagcgtgaggacttatggatcatccaaactctggtgttcagatcatgcttcagaagatgtgcccaaagcat

SEQ ID NO: 191573 - DNA, 283 bp, Glycine max
attcacaggccagagggcaaagattttgagcacaatggcctcgacacaatgctttttgcaccaccacgccctcaccactccagctagagcttcaacacagcgcctagttgtgagcaccaaaccaaaccacattgtttgcaaggcagcacagaagcaggttactgtccaagagggtgaggacactactactggccttgtctctcgcaggttggccctcactgtgctcattggtgtgctgctgttggctctaaggtggcacctgctgatgcagcctatggagaag

SEQ ID NO: 191574 - DNA, 283 bp, Glycine max
gctagctatgggggaattcaagcactttgtaattgttaagttcaaggaaggtgtggcagttgacgacctcactaaagggatggaaaagttggtctcagagattcatgctgtcaagtcctttgaatggggacaggacattgaaagcctagatgtgttgagacaaggattcactcatgccttcttgatgacattcaacaagaaagaagactttgttgcatttcagagccacccaatcatgtcgagttctcgacaaaattttcggcagctattgagaatattgtgc

SEQ ID NO: 191575 - DNA, 279 bp, Glycine max
ctcgagcgttcggacacgacttcctattggtgctacagctgcacgcgcttcgttcacatacaagaacagaacgacgtcgtttgcccgcgctgccacggcggcttcgtcgaaaaggtcaccgccccccaatcgtcaaggcaaggcttccgccgccgacgccgcaacgccgggaaccactcggcgttcaacccggtgatcgtgctccgcggaccgggagaggacgaggagagcatttgagttatactacgacggcttcgacggcgaggggctccgccgctg

SEQ ID NO: 191576 - DNA, 283 bp, Glycine max
tatcgagcacgattcggctcgagggtgggtgatgtgtgtggtggacttggcattcttggcattgcttgggcctttggtagcatgatcttcattctggtgtactgcactgctggaatctcagggggtcacataaacccagcagtgacatttgggctcttcttggctcgcaaggtgtctttgattagagcaataatgtacatggtggctcagtgcttgggagccatatgtggagttgttggttaaggccttccaaaaggcttactacaacaggtatggtggtggg

SEQ ID NO: 191577 - DNA, 281 bp, Glycine max
gtttttccacatagtactggagcgaaatatgcagcttcatccacgctactttggtcgtaaccttcgcgataatctcgtttccaagcttatgaaagacgtggaaggcacttgcagtggccgacatggatttgtggtggcagttacagggatagagaacatagggaaagggctaattcgtgatggaacagggtttgtgacatttccagttaagtaccaatgtgttgtcttcagagtttaagggagagatcttggaagcagttgttactatggtgaacaagatg

SEQ ID NO: 191578 - DNA, 279 bp, Glycine max
gtctctgtctctcctcctcctgttctcactcagcatcgccgtaaccgttagatcgagcgactacgactacgattgtgtgtacactgcatacgttagaaccggttcggtgttgaagggcggaacggactctaagatcgggctgaagctgtacgacaagtacggctactacatctacattaaaaacctcgaagcatggggcggcttgatgggcaagggctacgactacttcgagcggcaacctcgacatcttcagcggaaggggaccctgtcttgacggac

SEQ ID NO: 191579 - DNA, 279 bp, Glycine max
cggcgccgcaaggacctcacgctgccgctgccgcagcgggacaccaacttggcggtgccgcttcctctgcccccatcgacggcttctgctgcggcggcgcagcaggtgatccccttctcggagctggagagactgaaccgcatcgggagcgggagcggcgggacggtgtacaaggtggtccaccgcaccagcgggcgcgtgtacgcgctgaaggtgatatacggtcaccaaggagtccgtgcggcggcagatccaccgggaaatccagatcctccgtga

SEQ ID NO: 191580 - DNA, 279 bp, Glycine max
  unsure (1)..(279): unsure at all n locations
tgcaactccttcgtgataatctcacactttggacctctgacatgcaggacgatggagcagatgaaattaaagaagcagcaccgaaaccggatgaccagtanaaatattttactgctaattagaattgaacttctcctccatatctttttgaagggagaaggtgtttgttgctaatatctctttggtactgggattttaggcattcatgtctgttatgaattgtggatgtagggccgttttagtttgtccttccattttctcaagtgttttccaaattgc

SEQ ID NO: 191581 - DNA, 284 bp, Glycine max
gttgggccatagcactacacggcggcgccgcgacatcccgctttcccttccaccggagcgccgccagcctcgcgaggaggccctccgccactgcctccaaatcggcgtggaagctctcaaggccaaactgcctcctctcgacgtggttgaacttgtcgttcgggagttggagaacattccgcagtttaacgcgggaaggggatctgtgctgacttgcagaggcaccgtggaaatgaagcttccataatggacggcaccactatgaattgcggagctgtttccgg

SEQ ID NO: 191582 - DNA, 276 bp, Glycine max
cggaaagcacgtgccccgcgccgtcttcgtggatcttgaacccaccgtgatcgacgaatccgaaccggtgcgtaccggcagctcttccacccggagcagctgatcagcggcaaggaagacgccgccaacaacttcgcgcgtggccactacaccatcgggaaggagatcgtcgatctctgcctcgacaggatccgaaagctcgccgacaactgcaccggtctccagggttctcgtcttcaacgccgtcggtggcggcaccggttctggcttgggctc

SEQ ID NO: 191583 - DNA, 278 bp, Glycine max
gcaaatctcaatcgaatctcagaaaaatgagagaaatcatcagcattcacataggtcaggccgggatccaggtcggaaactcctgctgggaactctactgcctcgaacatggcatccagcccgacggcatgatgccttctgactccaccttcggtgtagcccacgacgccttcaacaccttcttcagcgaaaccggatctggcaagcacgtcccccgtgctgtcttcgtcgctcgaacccaccgtcatcgacgaggtccgctgcggcacctaccgtca

SEQ ID NO: 191584 - DNA, 250 bp, Glycine max
attcaaagagagagtttcttgttctgtattttttgatttgatcatttcaatcttcaatttttttttatatatccaccaatccgcaaagtgcaaatttctaatctttcacgtattgggttcttctcttttccctcttcgtctccgatcgatccaattctcttcccatggctacgatcggacacaacaatctcaatgccaaattggttcttctcggggacatgggtgctgggatcaagcctcgttttgcgct

SEQ ID NO: 191585 - DNA, 276 bp, Glycine max
gcaatgttgttgacgatatggtcaacagcaacgccatcctctatgagcctggtgaacatccggaccatgtggttgtcattaagtatgtaccttacgttggggacagcaagagggccatggatgagtactcttctgagatattcatgggcggaaagaacacaattgtgttgcacaacacttgtgaggattcactgttagctgctcctattatcttggacttggtccttctgctgagcttagcactcgaatcgagtttaaagctgaaaatgagggaaa

SEQ ID NO: 191586 - DNA, 278 bp, Glycine max
accctacgcacacatcttggtgtaagtccaatcgatatagcagcaatgtctacgcttgaaattgaagctcgagatgtcatcaaaattgtgcttcagttttgcaaagagaattcgttgcatcagacttttcagatgctgcagaacgaatgccaggtttctctgaacactgttgacagcattgaaacctttgttgctgatattaatagtggaagatgggatgcgatattgctcaagtttctcaactcaagcttcccaggaataagttggaggatttgtat

SEQ ID NO: 191587 - DNA, 253 bp, Glycine max
ggacccttttggggtggaaggataagaatcaagttgaggatgattcaccaatatttaggaacaaagagaagctattggtcacttgctctaggcgcatcaattacaggtaccggcatttgatgttgaatttggtcacacttttgcctcattgtaagaaggataacaaagttgaatcaaaggaaactaaaggagccaccctcaacgagcttgttgagctaaaaaattgttccttgtttattttttgagtgcagga

SEQ ID NO: 191588 - DNA, 243 bp, Glycine max
ccactgcacaattgccacatgaatcattagttagggtttattctccaagaaaagcaatgagtgcgtccaggttcatcaagtgtgtcactgtgggtgacggtgccgttggcaagacttgcatgctcatctcctacaccagcaacacttttcctacggactacgtgccaactgtctttgacaatttcagtgcaaatgtagttgtggatggaagcactgtgaatcttgggtgtgggatactgctgg

SEQ ID NO: 191589 - DNA, 271 bp, Glycine max
ggaacattcactatggaagaaccaacctctctaacggtctcactgcgttggaattaacaggaactgaccgagttggtcttttatcggaagtgtctgctgtactggctgatcttcaatgtgatgtggttgagtctaaggtttggacacacaatggccgtattgcctccataatctatgtaaaagattctagttctgggtctgctattgaggactctcagacaatataagattgaattgcgcttaagaaatgttttgaagggagacaatgact

SEQ ID NO: 191590 - DNA, 277 bp, Glycine max
aatggctgccaccaccttagtctctgaagtcactctcccctcctcctccggccagcggaagatgccgctgatgggcctcggcaccgcgccggaagcaaccagcgcggttaccacaaaagatgctgttcttgaggccatcaagcagggctacaggcactttgatgctgcttctgcttatggcgtggaacagtctgtgggagaagccatagctgaagcacttaagcaaggactaattgcatgcagagatcaactcttcatcactaccaaattgtgggtc

SEQ ID NO: 191591 - DNA, 270 bp, Glycine max
gattactatgggatacgttctaatacagaggctgttaagcagggaccttctgtaggaacagctgcaattgggggtccatttcaccttgtcaaccatcacggaaaacatgtaactgaaaaggatttcttgggaaagtggactttgttatattttggctttactcactgcccagatatctgtccagaggaactacagaagttagcagctgctgttgataaaataaaggagaaagctggaattgaaactgtaccggtttttatctctgttgat

SEQ ID NO: 191592 - DNA, 274 bp, Glycine max
ataaaattcaacatgggtggccctatatggtctgctcctatccatgaccaagaatgggtggctgctattctggctgatgtaaaatatatgaaagacagatatacagcttatgatcgcatttcagctgtgttgactacaatatcagaggaattgcctgatgttcccctctttttgagtctgcacaacctctgtgcaaccctcaaatgcacttctccgtcagcaattattttccgttctgcggtgatcaatgcaggctatcgtatatctggaactc

SEQ ID NO: 191593 - DNA, 279 bp, Glycine max
  unsure (1)..(279): unsure at all n locations
accctaaccgggaagaccatcacccttgaggtggagtcaagcgacaccattgacaatgtcaaagccaagattcaggacaaagaagggattcctccggatcagcagaggttgatcttcgccggtaaacagctggaagatggccgtaccctcgctgattataaccttccaaaaagagttnaacattggcatcttgttttaaggcttcgtggtggtattattgagnccatctttgatggcactggccgaggaantataaccaggttaggatgatctgcccgc

SEQ ID NO: 191594 - DNA, 264 bp, Glycine max
tcttgttgtttggagcgatccgagaaaaactctgtaaacatgatggtttaccaggacctccttacaggtgatgagcttctctctgactccttccgttacaaggaaattgagaatggaatgctgtgggaagttgaggggaagtgggttgttaaaggagcagttgatgtagacattggtgcaaacccttctgctgagggtggaggagaagatgagggagttgatgatgcagctgttaaggttgttgacattgttgacacattcaga

SEQ ID NO: 191595 - DNA, 275 bp, Glycine max
ctctgcttctgatagtacccatttcactggtaaccctctggatcggttacaccctataccagcggctacgcttcaagctccctcctggcccacggccctggccggtagtcggtaacctctacgacataaaacccgtccggttccggtgcttcgctgagtgggcgcagtcttacggccctatcatatcggtctggttcggttcgaccctaaacgtcatcgtttcaaactcggagttggccaaggaggttctgaaggagcacgatcagcagctggcg

SEQ ID NO: 191596 - DNA, 273 bp, Glycine max
tgtgcagccttgcttgcactcttggctatcaacttctccttgttgagccctcaaaccctgttttctccgcctgagattccgggctcgaaggaccaccttcacgctgctcggttactccatgtcaccggagccgtcgggccggagagtcttgtcttcgacgctgacggcggagggccctacaccggcgtcgccgatggccggattctcaagtgggaaggggaagagcgaggttggactgaatttgctgtcaccagttccaataggtcggactgt

SEQ ID NO: 191597 - DNA, 275 bp, Glycine max
gctcgatgggaattgcgcttcaaggcgtctcgtagggctaatccgcctcacgagggtcaccaacggcacgtgcctttggggggccgaggccccctactgctggtcggcaaacggacggcgggcgcacgcgtcgcttctagcccggattctgacttagaggcgttcagtcataatccaacgcacggtagcttcgcgccactggcttttcaaccaagcgcgatgaccaattgtgcgaatcaacggttcctctcgtactaggttgaattactattgcg

SEQ ID NO: 191598 - DNA, 273 bp, Glycine max
gaattttcttcatccttctctgttctcctagaacttgattacttgaacattccctatgacagatgaggtggttcttctggatttctggccaagtccatttgggatgagggtcaggattgcacttgctgaaaagggtatcgaatatgagtacaaagaagaggacttgaggaacaagagtcctcttctcttacaaatgaacccggttcacaagaagattccggttctcatccacaatggcaaacccatttccgaatccctcattgctgttcagta

SEQ ID NO: 191599 - DNA, 268 bp, Glycine max
  unsure (1)..(268): unsure at all n locations
atagaaggtgataatgttgtagaagaggctcncgcagatataccatctttgctggagttgaagcagatatattacgaactaatgattcggtattattcccataacaatgattatcttgaaatttgccgttgctacaaggcaatatatgagattccatctgtcaaagaagaccctgccaagtggattcaaatcctaaggaaaatatgttggtacttggttctagcgccctatgatccaatgcagtcaagccttctcaattccacttgga

SEQ ID NO: 191600 - DNA, 272 bp, Glycine max
gttttgagttcaaaagatgactaacttcccagtgatcaacttggagaagctcaatggtgaggagagaaacgacaccatggagaaaataaaggatgcttgtgaaaactggggattctttgagctggtgaatcatggcataccccatgacttattggacactgtggagaggttgaccagagagcactacaggaaatgcatggaagagaggttcaaggaatttatggcaagcaaagggtctagatgctgtccagactgaggtcaagggaatggat

SEQ ID NO: 191601 - DNA, 265 bp, Glycine max
ctcacaaaggacagaagaaacgcgaatgccaggagaactccaattaccacccgggttcagattccaccccactgacgatgagcttgtgaatcactacttgtgtagaaagtgtgctgcacaaaccattgctgttcccatcatcaaagaaatcgatttgtacaagtttgatccatggcagcttccagagatggctctttacggtgagaaagagtggtactttttctctcctcgagaccgaaaatacccaaacggttcgagaccgaac

SEQ ID NO: 191602 - DNA, 276 bp, Glycine max
gcgttgttgcattgcagaagcgtctccattttctttcgcgatggccgcgcgagccctgttgaccagaaaaaccctagccaccgttctccgcaacgacgcgaagcccataatcggagctggcatagctgcagctactcattctcgtgggttgcacgtgtacacgctccccgatctggattacgactatggcgctctggagccagccatcagcggtgaaatcatgcagctgcaaccacagaagcaccaccagacttacatcaccaacttcaacaaggc

SEQ ID NO: 191603 - DNA, 272 bp, Glycine max
gcttcttggcaccccaactgaggctgaccttgggttagtgaaaaatgaagatgcaagaagatatatcagacaacttcctcaatatcctcgccaacctttagctcaagtcttcccccatgttcatccggcagccattgatcttgttgataaaatgttgacagttgatcccaccaaaagaattacagttgaagaagcactagcccatccataccttgaaaaactgcatgatgtagctgatgaacaatctgcatggagccattttcatttgattt

SEQ ID NO: 191604 - DNA, 245 bp, Glycine max
cctttatctcgggacttctaagaagctctccctctccagaaatgtcatatgctccaagtgcactggtaagggttctaagtctggtgcttcgatgaagtgtgctggttgtcaaggaactggtatgaaggtttctataagacatcttggcccgtccatgattcagcagatgcagcatgcttgcaatgaatgcaagggtactggagaaaccatcaacgacagagatcgctgcccacagtgcaagggag

SEQ ID NO: 191605 - DNA, 273 bp, Glycine max
aaagatcctagggcttatagtaacagagcagcatgctacactaaattgggggcaatgcctgaagggttaaaggatgcagagaagtgcattgaacttgatccaacctttgtaaagggttatacccggaaatgtgcagtccagtatttcatgaaggaatacgacaaggctttggagacatatagggacgggttgaaatatgactctaacaaccaggggttgcttgaaggcatcagaacatgcatacaacaaattaacaaggcttagcgtgggaga

SEQ ID NO: 191606 - DNA, 261 bp, Glycine max
ggcgacagtcactctccgacaacaacacttccgcggcgaaaaatgtctctggtggcgaacgaggatttccagcacattctgcgtgtgctgaacaccaacgtggatgggaagcagaagataatgttcgctatgacctccatcaagggtattggaaggagattcgccaacatcgcttgcaagaaggccgatgttgacatgaacaaaagggctggtgagttgagtgctccagagttggatagtgtgatgactgtggtggcgaac

SEQ ID NO: 191607 - DNA, 270 bp, Glycine max
atcttcactgcacttgttgctcaattgttcctcatgtcactttgccacctcaaatttgggatcttcttgctctttgcttccttaattatcttcatgagcttctttgtcttcttccttttgcccgaaaccaagaaagttccaattgaggagatttatcttctttttgagaatcattggttctggaggagatttgtaactgaccaagacccagagacatcaaaggggactgcttaaaattctcaacaaaatagattgaacaagtgtaggttt

SEQ ID NO: 191608 - DNA, 221 bp, Glycine max
attcggctcgagaagaggtcgagtttcacagcagcaatggtgtacgtcaaggctcagaaatcaaaagcctacttcaagagctatcaagtcaagttcaagagaagaagagaaggaaaaaccgattaccgtgccaggattcggttgattaatcaggacaagaacaaatataacactccgaaataccgatttgttgttcgctttagcaacagggacattgttgc

SEQ ID NO: 191609 - DNA, 269 bp, Glycine max
tataagccacgcacacgtagcttccttcatttcggaaattctaagcaatcattaaaagatggcagatggtgaggatatacaacctcttgtttgtgataatggaactggaatggtcaaggctggatttgctggagatgatgctccaagggctgtgttccctagcattgtgggtcgtccacgccacactggtgtgatggttggaatggggcaaaaggacgcatatgttggtgatgaggctcaatccaagaggggtattttaacactgaaat

SEQ ID NO: 191610 - DNA, 251 bp, Glycine max
ggctcgagaaaaataagaccataatactagtaacccaccaagtggacttcttgcataatgttgactgtataatggtaatgcgagaagggaaaatcgtgcaaagtggcaagtatgatgaacttctcaaagcaggcttggattttggtgcacttgtggctgctcacgaatcctctatggagattgcagagtctagtgatagagttggtgaagattctgctgagtctcaaaacttgctcggatcccttcaaaag

SEQ ID NO: 191611 - DNA, 260 bp, Glycine max
aattatcttaatgatcatgcgtctaccaccaccgagcatgcatctaccaccacaccagactcaaaaggaaagaaaccagaagttgttgagtttgactcaactggcactgccaatactccagaatcaatccagcgggcaagggaaccattggttttgaaaaacaaagctcctagatggcacgaacaactgcaatgttggtgcttgaatttcaagggaagggttacagtggcctctgtgaagaacttccagcttgtagcagc

SEQ ID NO: 191612 - DNA, 261 bp, Glycine max
  unsure (1)..(261): unsure at all n locations
gaagaggtgactcttttgggagtaattggaagcccatttgcttgcagggtgaagattgcccttaagttgaagggagttgaatacaaatatgtggaagaaaatttggccaacaagagtgatttgcttctcagatccaacccagttcacaagatagttccagtatttatcacaaatgagagccatagcagagtctcttgtgattcgagtacattgatgagacatggnagatcacccccatctgcatctgatccctacaagagc

SEQ ID NO: 191613 - DNA, 248 bp, Glycine max
gctgtcagtgcccagttgggtttcgtggggatggtactaataaatgcgaagacgttgatgaatgtaaggaacgaagtgcttgtcagtgtgatggctgcagctgcaagaatacttggggtagttacgattgtaaatgcaaggggaacctcctatatataaaggaacaagatgcttgtatcgaaagaagtgaatcaaaatttggacggttccttgcctttgtggtcatagcagttgttgttggtgctggt

SEQ ID NO: 191614 - DNA, 245 bp, Glycine max
tctcgagccgaatcggctcgaggtcaaccacgaagaaacagcgtagttgtacccacactcagcttaaaggcttaggtctcacggcgagtggaaaagcattgccttttgctgctgggttcgtgggacaagttgaggcgagagaagcatctggtcttgtggttgacatgatacggcagaagaagatggccggccgggcacttcttctcgccggaccacccggaaccggcaagacggcgttactcttg

SEQ ID NO: 191615 - DNA, 267 bp, Glycine max
ggggcactgaagtgcattgtgttttatgccctcgcaatcctgatgatggtggaagctttgttcaggatttagaaatttccaccatgtttactcattaccagaaaattgtagtcgtggatggtgaattgccgagtggagattctaataagagaagaattgtgagttttgtggggggtaatgatctctgtgatggaagatatgacactcaattccattcacttttcagaaccctggacacagcacatcatgatgactttcatcagccta

SEQ ID NO: 191616 - DNA, 269 bp, Glycine max
gaccttgtatgatgaatgggttaacaagggcaatgcaccggcactgcccgagactcttaagaattacaacaagctggtgtctcttggcttcaagattatattcttgtcaggaagaacactggacaaacaggccgtaacagaagcaaacttaaagaaggctggctaccacacatgggaaaaattaattctcaaggatccacaagatccttccactccaaatgcagtttcatacaaaacagcagcgagagagaaactgataaggcagggat

SEQ ID NO: 191617 - DNA, 271 bp, Glycine max
gaagcggatcgctaagtatcatcctcgttgctttctctttgcacttcattcttggtttttccgacgagtcagctggttctaaagatgctacaaagacagaacctcatgccggcagaagcactagcactgtagttatcgttgtattaattttgcttgtgctcttttctttattctcctttgtactttttaagctgtggcggaagaagaaaagggaagagcaatatgctcgtcttttgaaattgtttgaagaggatgatgagttagagcttga

SEQ ID NO: 191618 - DNA, 268 bp, Glycine max
cacaactctctgccaacatgggtatctccagagattctatgcacaagaggcgtgccactggtggcaagaagaaggcctggaggaaaaagagaaagtatgagcttggtcgccagcctgctaacactaagctgtcaagcaacaagacagtcaggaggatccgtgttagaggtggaaatgtgaaatggagggcattgagattggatactggaaattactcctggggaagtgaagctgtaactcgcaagactcgtgtactagatgtggttta

SEQ ID NO: 191619 - DNA, 261 bp, Glycine max
catggcatctcaaggtttgtgtccttcgataaaaaatattcttcttttggactctgaagggaagtttgtggcagtcaagtattactcagatgactggccaacaaacaatgcaaagttagcttttgagaagtttgtatttactaagactgttaagacaaatgctcgtacggaagctgaggtaacactacttgagaacaatatcattatttacaaatttgtacaagacctgcatttctttgtcactggtggtgaagatgaaaa

SEQ ID NO: 191620 - DNA, 263 bp, Glycine max
cattaacaaggatagtcctgctgcaaaataccttctggagcgaggtgtggaacaaaaggacttcaactcttatggaagtcgtcgtggcaatgatgaagtgatggcaaggggaacttttgccaacattcgtcttgttaacaagctcttgaatggagaagttggccccaagacagttcacattccgactggggagaagctttatgtgtttgatgcagcccagagatacaaggctgaacggcaggacaccattgtgctggctggag

SEQ ID NO: 191621 - DNA, 266 bp, Glycine max
  unsure (1)..(266): unsure at all n locations
agcagttctagtgaagatgacaatgaacttagaagagggccttggactctggaagaggataacttgctctcccaatatatttttaatcatgggatagggcgatggaatttgctggctaaacgttcaggattaaagagaactgggaaaagttgcagattaaggtggctaaattatctaaagccagatgtanaacggggaaatttaaccccacaagagcaacttataattcttgaactccactcaaagtggggaaacaggtggtcaaa

SEQ ID NO: 191622 - DNA, 227 bp, Glycine max
tggggcactgaagtgcattgtgttttatgccctcgcaatcctgatgatggtggaagctttgttcaggatttagaaatttccaccatgtttactcatttccagaaaattgtagtcgtggatggtgaattgccgagtggagatgctaataagagaaggattgtgagttttgtggggggaattgatctccgggatggaagatatgacactcaattccattcacttttcag

SEQ ID NO: 191623 - DNA, 201 bp, Glycine max
agaaccatacaaagaacagttgcacgattaaatctgtgaatggagatccaattggtttggtgaacaaaatccagagggcttgcaccgctttgggtgaccacggcgaagcaagtgccttaccaactctctgggactctctccctgctatcgccgtcgtcggtggccagagctctggaaagtcctcggtgttggaaagtgttg

SEQ ID NO: 191624 - DNA, 260 bp, Glycine max
ctcaaagtgcttgctggaattgacaccaacttcactgtcacctcaaaggcctcggatgaagacggagactttgccgaactatacatgttcaaatggaccacccttcttattcctccaacaacccttctcataataaacttggtgggggttgttgctggcatctcctatgccatcaacagtggctaccaatcttggggacacctctttggtaagcttttctttgcattttgggtgatcatccatctataccctttcctcaa

SEQ ID NO: 191625 - DNA, 260 bp, Glycine max
ctcttgcggctagggttttagcgcacttcttctagatttaaggaagatgggtaaggaaaaggttcacatcagtattgtggtcattggccatgtcgactctgggaaatccactaccactggtcacctgatttacaagcttggaggcattgacaagcgtgttattgagaggtttgagaaggaagctgctgagatgaacaagaggtctttcaagtatgcctgggtgctggacaaacttaaggctgagcgtgaaagaggaatca

SEQ ID NO: 191626 - DNA, 264 bp, Glycine max
gcatggattcacttaaaaagggtgctcctgaacggtggagattggtcagggctcatggtactgctgtaggacttccaacagaagatgacatgggcaatagtgaagttggtcacaatgcccttggggctggtcgcatatttgctcagggtgctaagcttgtcgaccttgctctagcctctggaaaaatttttgaaggagaaggtttcaagtacataaaggaatgttttgaaaatggcacattgcatctcattgggctactgagtg

SEQ ID NO: 191627 - DNA, 265 bp, Glycine max
gctactctcagacatagatgaccaagatgggttacgtttccaaattccggtgatacagttctatcgccacgacccatcaatggcagggaaagaccctgtcgatgtgataagaaaggctgtggccaaaacgcttgtgttttactatccttttgcaggtaggcttagggaaggacttggtcggaaactgatggtggattgtactggggaaggtgttttgttcattgatgctgatgcagatgtcactcttaagcaatttggtgatgcc

SEQ ID NO: 191628 - DNA, 267 bp, Glycine max
gttccgttttcctctgttttttttttctttctttcaaatccccgcttcgtggaaatcccgaaccagaaaccatgcttctccgaaccgctgctgcttctgcttcgtccctctccctcttcagcccgaacgccgaacctccccgttcggttcccgctcgtggattggtggttcgcgcaggaagaggatccacgaaccaccgcgccctgaccggagtgatttttgaaccgttcgaagaggtgaagaaggagctcgatctcgttcccaccg

SEQ ID NO: 191629 - DNA, 217 bp, Glycine max
  unsure (1)..(217): unsure at all n locations
gacgccgcagccatggtgaagtactccagagaacccgacaatcncaccaagtcctgcaaggccagaggcgctgaccttagagtgcatttcaagaacactagggagactgcctttgccatcaagaagttgcccctggttaaagctaaaagatacctggaggatgttttggcccacaaacagggcaatccttttccgaagcttctgtggtggtgttggg

SEQ ID NO: 191630 - DNA, 197 bp, Glycine max
tctcgatacgctcgagcggctcgagcggctcgagaatggcttcaaatcaggaggaggtgaatttttgggacctactggaagcacatttgtgatcagggttcatattgccctcaagttgaagggagttcaatacaaatatgtcgaagaaaatttgaggaacaagagtgaactgcttctcaaatccaacccagttcaca

SEQ ID NO: 191631 - DNA, 244 bp, Glycine max
catcactaacactcagtctctgaattggggctgagggtttcgagtaacgtttatttttcacgagtttaagatatcatgggtaaagagaaggttcacattaacattgcggtcattggccatgttgactctgggaagtcaaccaccactggccacttgatttacaagcttggaggtattgacaagcgtgttattgagaggtttgagaacgaagctgctgagatgaacaagaggtcattcaaatacg

SEQ ID NO: 191632 - DNA, 260 bp, Glycine max
gccgctcgatgggaattgcgcttcaaggcgtctcgtagggctaatccgcctcacgagggtcaccaacggcacgtgcctttggggggccgaggccccctactgctggtcggcaaacggacggcgggcgcacgcgtcgcttctagccccgattctgacttagaggcgttcagtcataatccaacgcacggtagcttcgcacttctggcttttcaaccaagcgcgatgaccaattgtgcgaatcaacggttcctctcgtacta

SEQ ID NO: 191633 - DNA, 265 bp, Glycine max
caagggtttaatctttttggctgtgttatgcttctcagcactgtcactgagtcgttgtcttgcggaggataatggacttgttatgaacttctacaaggaatcatgccctcaggctgaagacatcatcaaagaacaagtcaagcttctctacaagcgccaaaagaacactgctttctactggctcagaaacatcttccatgactgtgctgttcagagttgtgatgcctcactgttgctggactccacaagaaggagcttgtctgag

SEQ ID NO: 191634 - DNA, 183 bp, Glycine max
gtttccccgctcaggtacgagtgataactaggaaaacttgtgaaccactggaggaggattccttcaggccaatccttcaccactatgatggtcccaagttccgtcttgagctgaatgtgcccgaggcgatgtctctgctggatatgtttgcagaacaagacaccttcagtgacacttttaagg

SEQ ID NO: 191635 - DNA, 272 bp, Glycine max
aatggatagttcctctcatcagctcctccccttcaacgaaaacgacccagaagacatgcttctctatggcatcatcacttcatgccaagaaaaaaaagtgaccatcaaccaagagcaagtgaataagaagaggagcagcttccgcggcgtgcggaggcggccgtgggggaagttcgcggcggagataagagactccacgcggcatggcgtgagggtgtggcttgggacattcgacaacgccgaggccgccgcgctggcgtatgaccaagccg

SEQ ID NO: 191636 - DNA, 270 bp, Glycine max
aagacaacccagagagcgcgtcttaataaacgctcttctctgaaaacccccatttcttttcttctttcttcttctctttcgcttcttcgatcttcgatcttcgtcgctgaaaatgagagagtgcatttcaatccacatcggccaggccgggattcaggttggaaacgcctgctgggagctttactgcctcgaacacggcattcagcctgatgggcagatgccaagtgacaagaccgttggtggaggtgatgatgctttcaacaccttctt

SEQ ID NO: 191637 - DNA, 276 bp, Glycine max
atgaaggtccttgttttcttcgttgctacaattttggtagcatggcaatgccatgcgtacgatatgttccctctccgaatgaacactggctatggtgcccgtactccggaggtgaaatgcgcaagttggaggcttgctgtggaagcacacaacatctttggctttgagaccattcctgaagagtgcgttgaagcaacacaggaatacatccatggcgaacaatatagatcagactccaaaacagttaaccaacaagcttacttttatgccagagac

SEQ ID NO: 191638 - DNA, 281 bp, Glycine max
cggctcgagggatggtcaatttcttcaacttcagcagctacaggatgagaacaacccggacttagtagttgaagtggtctctctcttctttgaagattctgagagacttctcaatgaccttacctttgctctaaatcagaaaagtattgacttcacaaaagttgatgctcatgttcaccagctaaagggtagcagctcaagcataggtgctcagagggtaaagaattgttgcattactttccgcaacttttgtgaggaacagaacatagacgcgtgcctca

SEQ ID NO: 191639 - DNA, 276 bp, Glycine max
gcacgccccaagagaatgtcgagaaatcgttcttagcgttctacgaggggtggcttgcgcgtcaagagaatttgctgaaacagcttctcagcgtggcgcgcaatggtcctctctcactaccagcaatttatggaagagaaatccaacgtggcaaacgacgacgtttaccttctcttttctccaccctggctttccgcgtacgaaagggctctcctctggattggggactacaagccctctctaattcaccgtttagtagacggcgccgtgaagggg

SEQ ID NO: 191640 - DNA, 279 bp, Glycine max
ctcgagccgctttagacgaacgcccttctgcgaaaaggtggcttcctcttgaagctaaccctgaagtcatgaaccagttcctttggggtcttggccttccactggacgaggcagagtgctgtgatgtgtttggcttagatgaagagcttctggacatggttccgaagcccgtcctcgccgtgcttattctttatccaattaccgcaaagtccgaagaagaaaggttgcaacaggaaaacgagaaacaggatatagcagcaaagtggtatgttatgaagc

SEQ ID NO: 191641 - DNA, 273 bp, Glycine max
gaaaaaatgaccaagatcttctttgtattgctgttatgtctgatcatagcagcttcttctgggtttgtgacatgctttgatgttgaaaagaaggaaaagattggaatatttgagctcaataaatgtgacctttctttgaaggtcaccaactggggtgcttcaattttgtccctggtgattcctgataagaatggaaagttgagtgatgttgttcttggatatgattctgttaaggattacactaatgatacaacatattttggagcaactgtt

SEQ ID NO: 191642 - DNA, 268 bp, Glycine max
cttgagcaacattattcccattgctctatattatggctagcatgaaggctacatgggtggttgtgatcatgtgcatggccgcggtgggtgcaccgatgctggcgcaagcatgacatgcaatgctgtgacggtgcacatggcacagtgcgtatcctacccgatgcagggaggaacaccttcaaccctttgctgcagcggagtccagaacattctccgctctgctgtcaccaccgtcgagaaccaaactgtgtgcaactgcatcacggcg

SEQ ID NO: 191643 - DNA, 270 bp, Glycine max
cggctcgagggcgtcgtcacaaccagagatggagcatccaaagaaggtttttggttgggctgctcgggactcatctgggcttctctccccattcaacttctccagaagagaaacgggggagaaagatttggtattcaaagtgcaatactgtggaatatgccactcagatctacatatgttaaagaacgagtggggcaacacaacctatcctctggttcctgggcacgagattgctggtgtggtaacagaagtaggtagcaaggtgcaaaa

SEQ ID NO: 191644 - DNA, 252 bp, Glycine max
gaaataatgtccgggatcatccacaagattgaggagaccctccatgtgggagggcacaagaaagaggagcacaaaggagaacaccatggtgagcacaaaggtgaacacaaaggagaacaccatggtgagcacaaaggtgaacacaaaggagaacaacaccatatggagcacaaggagggacttgtggataagatcaaggacaagatccatggtgatggccatgacaagggtgagaaaaagaagaagcaggac

SEQ ID NO: 191645 - DNA, 266 bp, Glycine max
  unsure (1)..(266): unsure at all n locations
ctcgagccgaatcggctcgagggttgaccacatgaagataatgacgaacaatgccattgtacgcaacattggtcactctgatcatgagatcgacatgctgggggtggaggactaccccggcgtgaagcgcatcaccatcaagccccaaaccgacagatgggtcatcancgagaccaatgtcggcatcattgtcttggccgagggtcgtttgatgaacttgggatgcgccacaggacaccctagttttgtgatgtcctgctccttca

SEQ ID NO: 191646 - DNA, 279 bp, Glycine max
cgggatgccaagctacgctcctccattgccttcttctaattccatagccatggaagcaactaatgttcatccttcccgcatttctgaatttggaaccctggagcaatctcttggatttcgcgttgaagataccattaatcttagcagaaatccgatgtttaatcaaatgaaatcaaatagccaagctctaggtgctgatattcaatttggtgctttaaataagtcaattgcaacatcagatataaacctctctgctgctattgctgggtctccaagcat

SEQ ID NO: 191647 - DNA, 269 bp, Glycine max
gatcctatggaagagtatattatggtgttcttaaaagtgggcatgctgcagcaatcaagaatttggatgccagtaaacagcctgatgaggaatttttagcccaggtttcaatggtatcaaggctgaagcatgaaaattttgttcagttgcttggatattgcattgatggaacctcccgtattcttgcttatcagtttgcatctaatgggtctcttcatgatattttacacggcagaaaaggtgttaaaggagcacagcctagtccagtt

SEQ ID NO: 191648 - DNA, 266 bp, Glycine max
tggtcatgttgcaccatttgttaagtctgaacccattcccgagactaacgatgaacctgttaaagtggtagttggggccagtcttgaggacattgttttcaaatctgggaagaatgttctgctggagttttatgctccctggtgtggtcattgcaaacagttggctccaatattggatgaagttgctatctcatatcaaaatgaagctgatgttgttattgcaaaactggatgcaatgccaacgatatcccaagtgaaactttgat

SEQ ID NO: 191649 - DNA, 275 bp, Glycine max
ctcgagccgctgcaatggcttcaagtcaggaggaggtgacccttatgggagctactggaagcgcatatgtgtgcagggttcatattgccctcaagttgaagggagttcaatacaaatatgtcgaagaaaatttgaggaacaagagtgaactgcttctcaaatccaacccagttcacaagaaggttccagtgtttattcacaatgagaagcccatagcagagtctcttgtgcatgttgaatacattgatgagacatgggagaacgaccccatcttg

SEQ ID NO: 191650 - DNA, 274 bp, Glycine max
tctcgagccgattcggctcgaggagaattgaatgtgaatggggaatcagaagcagaagtggacgcaggacgaagaagatgcactcatcgccggcgttgaaaagcacggccccggaaagtggaagaacattctcaaggatccccaattcgcccctttcctcacttcccgttccaacatcgacctcaaggataaatggcgcaatttgagcgtcacaacggtgctcagggctccaaagaaaaatctagggttcccaagcttaaagccctccctgctc

SEQ ID NO: 191651 - DNA, 269 bp, Glycine max
gggcctccgccactactattctcacaacatccacgagcatcagctccttctccgtcaaaagacgcataacctcaaccgtcttgaggctcagagaaacgagctcaattccagggtgaggatgctgcgcgaagaattacagcttttgcaggaaccaggctcttatgttggtgaagttgtcaaagtcatgggcaagaacaaagtccttgtcaaggtccacccagaaggaaaatatgtcgttgatattgacaaaagtattgacattacaaaga

SEQ ID NO: 191652 - DNA, 266 bp, Glycine max
cagaaccgttgaatcaagttgaggaagatggcactagtctctggaggaagatcaacactgaaccctaacgcccctctttacattcctgccgcgtttcgccaagtggaggatttctctccggaatggtggcagctggtgacgacgctgacatggtaccatgactactggctaagccagcagcacgatgagggagccttctacggcgaggacgacgggtttgatggcaatgatgtcgttgatttgcttcctgattcgtttgatcttga

SEQ ID NO: 191653 - DNA, 234 bp, Glycine max
attttccaattagcactagtaatacagtacaataaactagaagagcaaccaaaattttccaattgaaaaagaaattacaacgagaacaaaatcttatcgtgagatcgaataactgaaaaaaaaggaaagaagaacaaaatatgataacgtggaaagacctatacacggtcctgaccgcagtggtcccactctacgtggcgatgatcctggcgtacggctcggtccggtggtgga

SEQ ID NO: 191654 - DNA, 272 bp, Glycine max
cttcaaagtcttctctctcgagaatcatcgaataaaactagggtatccgatcgtcgtcgaggagaatgccgaagaacaagggaaagggaggaaagaaccggaagcgcgggaagaacgaggcggacgacgagaagcgggagcttgtgttcaaggaggacggccaggagtacgcgcaggtgctccggatgctggggaacggccgctgcgaggcgatgtgcatcgacggcaccaagcgcctctgccacatccgcggcaagatgcacaagaaggtc

SEQ ID NO: 191655 - DNA, 247 bp, Glycine max
tgccttcttcgccgtttcagctcaagagccaccagcaggtaagatatggttaagcataacaacgttatccccaatgggcacttcaggaaacactggcaaaactatgtgaagacttggtttaatcaaccagcacggaagaccagaaggcgtttagctcggcagaagacggctgtcaagattttgccaaggcctactgatggacctctcaggccaattgttcatggccagactctgaacatacaacatg

SEQ ID NO: 191656 - DNA, 274 bp, Glycine max
attgaagcttgctcctattgcatacttcagtatgtacagtggatcaatatctcatttaccaactggctatatgtggagtcctcatgttgttccaaaaccaagtgactggggccctttagttgatgttgttggttattgtttcttgaaccttggatcaaagtatcaaccacaagaagattttgttcgatggattcaaaaaggaccacaacctttatattttgggtttgggagcatgcctcttgatgatcctaaaagaactactgatgttatagtg

SEQ ID NO: 191657 - DNA, 128 bp, Glycine max
gtcttgatgaacagtaccattctgatgtattgctttccttgaaagttaatgcatgcttcttatcttctgtctaaaaaaaaaaaagaaaaagaagaagaaaaagagagagagaaaaagagggggggggg

SEQ ID NO: 191658 - DNA, 276 bp, Glycine max
ggccctcaaacttcctactcttccaaagactttagaaggtgttatcagccaagagaaatttgagaaatctagagcctatagtcttgataaaagccacttccattttgttcacgagtttgtgacaatagtgacagactctacaattttgtactttggggtattgccctggttttggaagaaatcaggcgattttatgacaatagctggtatcaatgctgagaatgaaatactgcatacccttgccttcttagcagggctgatgcattggtcacagat

SEQ ID NO: 191659 - DNA, 272 bp, Glycine max
ctaagatcaagtgtagtatctgttcttatcagtttaatatctgatatgtgggtcaggggaggattcttcacagtagcttgctgctggaatcatcatttagtgtcgctcaagtgttgcactacaccttcggcctgccacaccccaccatttcagttctaaccttagtaagtttcaggagccgtgtgtgcttcaactcttgccagaaatggggtttctgttactctctttgagtcagctagaggccctggtggacgcatgtcccaaagaagaga

SEQ ID NO: 191660 - DNA, 268 bp, Glycine max
ctccaaggaaataaaacaaatacaatcaaagaatcttctttgcttactctcctttgcactttccttctcctccttgtgattttttgtttgcatcaaagggagaaactgggagacacagaagatgagagagataattagtattcatattggacaagctggaattcaggtggggaattcatgctgggagttgtattgccttgagcatggaattttccccgatgggaccatgcctagtgacacctctgttggcattgcacacgatgctttt

SEQ ID NO: 191661 - DNA, 263 bp, Glycine max
gacggcaacgttgtgctgtccgccttgaccgagccagagcttcgtcttggccctcgattttgccctgtaaaactaatcccagtcacaacagaaataatcaatggcaccgaaacagaccaaggctgagaagaagatcgcttacgatgcgaactgtgcgacctaatggaggagtacggccaaatcctcgttgtaaactccgacaacgtgggatcgaaccagctccagaacattcgcaaaggtctccgcggcgactctattgtcct

SEQ ID NO: 191662 - DNA, 263 bp, Glycine max
gcttcttcactttctctcgtttcaatcgaaaaaaatcatgggcagaatgttcttcgtcggtggcaactggaaatgcaatgggaccactgaggaggtgaagaagattgttactactttaaatgaagctaaagtccctggagaagatgttgtagaagttgttgtgagccctccttttgtgttccttccatttgtaaaaagtttgctgcgccctgatttccatgtctcggcccaaattgttgggttcgcaaggtggtgcttatact

SEQ ID NO: 191663 - DNA, 272 bp, Glycine max
gagaactttccagttgttgacatgggtaacctgaataatgaagagagatcagcaaccatggagataatcaaagatgcctgtgagaactggggtttctttgagttggtgaaccatgggatatccatagagttgatgatggacaccgtggagaggatgacaaaagagcactacaaaaagtgtatggagcaaaggttccaagaaatggtagcaagcaaaggcttggagtctgctcaatctgaaatcaatgatttggactgggaaagcactttctt

SEQ ID NO: 191664 - DNA, 272 bp, Glycine max
ctgtactggtgggtgaacaattatgttcctcttcctacacgcagcatgaagaagaaggagaagcccaagatgggaacaatggagagcttgaagttcttggtgtcttcaaagtacatcagagatcttgccactttagtggttgcttatggaatcagcatcaatcttgttgaggttacatggaagtctaagctcaaagctcagtttcctagtcccaatgagtactcttcttttatgggtgacttctctactgcaactggaattgccacattcac

SEQ ID NO: 191665 - DNA, 267 bp, Glycine max
ggtttccgaagacgaggaaatcgaatccgataccaaccccttcgataaaaacgaaaactctctctatcaggttcttggtgtggagaaaacagcatctcaacaggaaataaagaaggcatactacaagttggcattgaggctgcatcctgataagaaccctggtgatgaggaagctacagcaaagtttcagcaattgcaaaacgttattgctattcttggggctgaagaaaaacgggccgtttatgatcagactggttttgttgatga

SEQ ID NO: 191666 - DNA, 265 bp, Glycine max
atgaagtctgctatgtgtgcagtggtggttgtagcacttcttcttctggcggcggtggggcccatggctgaggctgtgacatgcaccccaacagagttgagtccgtgtcttccagcaatcacttccggtgctaaaccttccaatgcttgttgcacgaaagctgaagcagcaaaaaccatgcttatgtggctacctcaaaaacgctagcttgaagcagtatgttaactctcctaatgcccgataaacgttgcttcttgtgggattc

SEQ ID NO: 191667 - DNA, 269 bp, Glycine max
gtgccctggctaccctcttggccttaaggtcattcaagcaagtttggccaatttgttgcatggatttaactggagactgcctgataatgtcaagaatgaggatttgaatatggatgagatttttgggctctctacacctaagaaaataccactggaaactgttgttgagcctaggcttccacaccatctttattctctctgagcagtgcccttgcacaaagggtttctctctaataagattgctgtaggaataaaatgggtcttgtgtg

SEQ ID NO: 191668 - DNA, 275 bp, Glycine max
cttgatccttctttttctccttgaactcaaacatggcagatgaggtggttctgctagatttctggccaagtccatttgggatgagggtcaggattgcacttgctgaaaagggtatcaaatatgagtacaaagaagaggacttgaggaacaagagtcctcttctcctccaaatgaacccggttcacaagaagattccggttctcatccacaatggcaaacccatttgtgaatccctcattgctgttcagtacattgaggaggtttggactgacaga

SEQ ID NO: 191669 - DNA, 277 bp, Glycine max
ctataatctcacatgggttctgcagtatatcaatcttttcatgatatatactggctacatcattttggccggttcagccttgaaagtaagagatttaggacacaaaagtatatattttctttctattcaattcatattaaaattgaatctttcaaatacatgtctattgaagtattttacttcttttctaaaccaattttttgttcattgtgattgcaggctacttatgttctattcaaggatgatggtctgctgaaacttccatattgtattgcca

SEQ ID NO: 191670 - DNA, 273 bp, Glycine max
  unsure (1)..(273): unsure at all n locations
aaagttaatgaagatggccggttcggttagaactggaggaaagggtactgtgagaagtctcatatggacatatgaatattttagcttttctccccctccccgctcttccactatgcactcggttgtgggttttcactcaatttgttggctttttagtttttttggattgaacacaaaatgcatctgttgtgttgaatgctctctttanttttgtcttatgtttgttctagaaagaagaaggctgtccacaagacaacaaccacagatgacaaa

SEQ ID NO: 191671 - DNA, 202 bp, Glycine max
attggattcatctctgatgatgttggtcttgatgctgacaaatgcaaggtgttggtcaacattgagcagcagagccctgatatcgcccagggtgtgcacggtcacttcaccaagcgcccagaggaggttggtgctggtgaccagggtcacatgtttggctatgccactgatgaaacccctgagtacatgcccttcagccatt

SEQ ID NO: 191672 - DNA, 292 bp, Glycine max
tcgaatatcttgttgtttggagcgatccgagaaaaactctgtaaacatgttggtttaccaggacctccttacaggtgatgagcttctctctgactccttccgttacaaggaaattgagaatggaatgctgtgggaagttgaggggaagtgggttgttaaaggagcagttgatgtagacattggtgcaaacccttctgctgagggtggaggagaagatgatggagttgatgatgcagctgttaaggttggtgacattgttgacacattcagacttcaggagcaacccgcattc

SEQ ID NO: 191673 - DNA, 293 bp, Glycine max
tggaccattcatcggtgcagctcttgcagcactctaccaccaggtcgtaatcagggccattcccttcaagtccaagtgattcaatcaaacggttcatgcttaatcaagttgggaacaacaacaacaacaaaaatcaagccaatgtttgtgggttttggtttcatttcattaagatgatctgtttatctcttttcttctttttaaaatttaaagtctttgtattttgtatgtaaagatgtaaaattatgattattaggtggtgcatgtgtcgcgtcatgggccaatgttatcct

SEQ ID NO: 191674 - DNA, 284 bp, Glycine max
aacagctctgtgttctagcagaagattgtgaccaacctgattatgtgaaactggtgaaggctctttgtgcaagagaaatgttagtcttttgacagttccaagtgcaaagacccttggagaatgggctggtttgtgtaagattgattcagagggaaaggctcggaaggtaactggttgctcatgtgtggttgtcaaggacttcggggaggaacatgaagcatacaatgttgttctgcagcatgtgaaagccaactgaggacttgctgcagcatgcctagatttgt

SEQ ID NO: 191675 - DNA, 289 bp, Glycine max
atcgccatcgcagcaaaggcaaacctgacagtgacatccctaggaggctttgacacatgctacacagtcccaatagttgcacccaccataacattcatgttctcaggcatgaacgtgaccctgccagaggacaacattctcatacacagcactgcgggcagcaccacatgcttggccatggcttcggctccagataacgtgaactcagtgctcaatgtcatagccaacatgcagcaacaaaaccaccgtgtgctctatgacgtgcccaattcaaggcttggagttgctc

SEQ ID NO: 191676 - DNA, 275 bp, Glycine max
taagaaggttaaggctcgtccagcagcagttgggtttaaggtgtttgcttcagagactcaggctacagagcctgatcttagtgtcactgttaatgggttgcacatgcctaacccctttgttattgggtcaggtccaccagggaccaattacactgtcatgaagagggcatttgatgaaggacggggtgctgtgattgctaaaactgtatcacttgatgctgcgaaagttataaatgtaactcctcgatatggccggctacgggcaggtgcagata

SEQ ID NO: 191677 - DNA, 169 bp, Glycine max
atacctagtgcaccgtaagggttgtgaagcaggcagagaagagccatggtgcacgtttctttctaccgaaactatgggaaaacgttcaagaagcctcgtcgtccctacgagaaggagcgattggacgccgagttgaagctggtcggtgagtacgggcttcgctgcaaga

SEQ ID NO: 191678 - DNA, 291 bp, Glycine max
taccatgatcgacgccctctccggcctcgaggcccaggatctcttcctctggttccaggtcatgagcatccgcgtcgacgtcgccaccaccggcctcatctacttcgacgtcggcgccgcctccaagcgcttccccctctccctcttcgaaacgccgcccgaatgcgtcgccgttagctcccaacaacaagacgccccttctcaccaccatggtcaggttcaatctggacggcgtatccataagctcagtcagggaacctctggaagagatggtctatagagtatatgggc

SEQ ID NO: 191679 - DNA, 285 bp, Glycine max
  unsure (1)..(285): unsure at all n locations
tttgtgaagcttgtttcttggtacgacaacgagtggggatacnnnctcacgtgtcattgatccttcttgaattcgttgccaagaagtctctttaaggtgttacttcaaagtagcttgtcttcacattattaccgtatgtttatgtttagctgcgatttangtcttgctcgagcaaanaatgagaggtctgaataaatnggtttctganaccagtngtgttacttgttggaggagcattagctcttttntggactttngatgtggtctctngtggagggggatgag

SEQ ID NO: 191680 - DNA, 282 bp, Glycine max
agcgtttggccaaagacctcgctgaaaacaacaagggtgctcgcgtgcttgtcgtttgttctgagatcaccgcagtcacattccgcggcccaactgacacccatcttgatagccttgtgggtcaagccttgtttggagatggtgcagccgctgtcattgttggatcagaccccttaccagttgaaaagcctttgtttcagcttatctggactgcccaaacaatccttccagacagtgaaggggctattgatggccaccttcgcgaagttggacttcatttcc

SEQ ID NO: 191681 - DNA, 288 bp, Glycine max
agccagcccagatacaataaggagagcacacgcaattcatcccatcacagctgtgcaaatagagtggtctttgtggactcgtgacattgaagaagagatagtccctctctgcagggaacttggtattggaattgtaccatatagtcctcttggtcgtggcttttttggcggcaaaggagttgtggaaaatgtgcctacaaatagctccctgaaagcacatccacgctttcaagccgagaacttagacaagaacaagaatatatatgaacgaattgaaggccttgctaa

SEQ ID NO: 191682 - DNA, 158 bp, Glycine max
ccaatagtcctccgtcaaacaccaaaactacatttttgaacccttttgatgctacacttcttggagcagtgaaagctggtgtgtttgtcgcacaggctgcaggaaatggtggtccttgtcctaagtcattagtttcatatagtccatggatagcaact

SEQ ID NO: 191683 - DNA, 159 bp, Glycine max
acccgaccctgttcccctctcgtatccgtcatgaaaggaggaaagtccaagaccgaatctaagagagccgatcccaaacttgctgtgaataagaagggagccgccaccaaggctaggaaacccgccggcaaggggaaggcagcgaaagaccctaacaag

SEQ ID NO: 191684 - DNA, 285 bp, Glycine max
cgaatgctgataagtccacttcttctacatgttggaatagctccagaggtgacagcagcaacatgttctttcatggttttcttctcatccaccatgtcagccttgcaatacctattattgggcatggatcacatagagactgccctcatgctggccctaatatgttttgttgcatcacttattgggttattagtggtgcagagagcaattcaaagctatggaagaccatccttaatagtattttcggttagcatagtgatgactttaagtattgttctaatgact

SEQ ID NO: 191685 - DNA, 283 bp, Glycine max
gggttttagcgcacttcttctagatttaaggaagatgggtaaggaaaaggttcacatcagtattgtggtcattggccatgtcgactctgggaaatccactaccactggtcacctgatttacaagcttggaggcattgacaagcgtgttattgagaggtttgagaaggaagctgctgagatgaacaagaggtctttcaagtatgcctgggtgctggacaaacttaaggctgagcgtgaaagaggaatcaccattgatattgctttgtggaagtttgaaacaaca

SEQ ID NO: 191686 - DNA, 282 bp, Glycine max
cgcaaactgtgtgcagattggattacctatgctcattctactggttataacacaacagtatttgaagcgccttcatcatgctgctcatcaagtacttgagaggtttgctttacttctctgcattgctgttatctgggcatttgctgctatccttactgtggctggtgcatacaatactgctaaaccacagacccaagtgagctgtcgcacagatcgctcgtaccttatgtcttctgctccttggattaaagttccatatccattccagtggggtaccccata

SEQ ID NO: 191687 - DNA, 179 bp, Glycine max
  unsure (1)..(179): unsure at all n locations
tactttcctactccaaccgcacttctgctccgcaattatcatgggcaaggtcaagatcgggatcaacggntnnggaagaattggccgtttggtagccagantggctctgcagnganacgatgttgaanncgttgccgttaacgannnttncancaccaccgagtacatgacatntntgt

SEQ ID NO: 191688 - DNA, 180 bp, Glycine max
aggactggaaaacagcacacgtatgttgaaactgagaatgtgcgctatgtttaccagccaatagaagcactgtacctgcttcttgtaacaaacaaaaacagcaacatactggaagatcagcaaactctgagacttctctctaaacttgtacctgaatattcttactcccttgatgaagag

SEQ ID NO: 191689 - DNA, 123 bp, Glycine max
aatttagttgctggcactatctgggggaccgtagttgccacctggtatgatgtccctcgtgtagagagaaatgttgctcttccagggctgattaggactttcaagatgaagggcaactatggt

SEQ ID NO: 191690 - DNA, 282 bp, Glycine max
atcttgttgtttggagcgatccgagaaaaactctgtaaacatgttggtttaccaggacctccttacaggtgatgagcttctctctgactccttccgttacaaggaaattgagaatggaatgctgtgggaagttgaggggaagtaggttgttaaaggagcagttgatgtagacattggtgcaaacccttctgctgagggtggaggagaagatgagggagttgatgatgcagctgttaaggttgttgacattgttgacacattcagacttcaggagcaacccgc

SEQ ID NO: 191691 - DNA, 282 bp, Glycine max
tatgctcgagctcgagccgcaacttcttctcagacatggcatctcagcgtttgtgcccttcgataggaaaagctcttcatttggactctgaagggaagcgtgtggcagtcaagtattactcagatgactggccaacaaacaatgcaaagttagcttttgagaagtttgtatttactaagactgttaagacaaatgctcgtacggaagctgaggtaacactacttgagaacaatatcattatttacaaatttgtacaagacctgcatttctttgtcactggtg

SEQ ID NO: 191692 - DNA, 169 bp, Glycine max
aatcgatccgctctaaagagtctccgctgaactttttggtttcttgaagatgtcgttactctgggatcttatcaaccttaacctctccgacatcaccgataaggtgatcgccgagtacatatgggttggtggatctggcatggatatgaggatcagagcaaggactctc

SEQ ID NO: 191693 - DNA, 279 bp, Glycine max
gtaaaggcaaagacttcttgtgcattgtctcttggttttggggaggataccatcaacacatcatcggttcttgtgatgccaatgatgtcatcaagaatgactggattcagaggaaatgggcttgaaagagcaagaatattgtccatgagaaatggttggagcaagattccaatggatgaagatgctggcaaattgcttgaaactagttcagttgttcctcctagcccttagcagtggttgttagtgtcataggatgtcccacggtatcattttttaccc

SEQ ID NO: 191694 - DNA, 280 bp, Glycine max
gcaggcatacgcacaaccggtgaatttatcagcgtcttcattttatgtacccggtaacaattccattaggtacattaattatggtgctgcagtaagtgaggtggaaatagatcttctgactggagaaaccagatgtttgcagacagatattatctatgattgtggacagagtctcaacccagctgtggatttaggacagattgaaggatcttttatccaagggttgggtttttttcatgcttgaagaatatgaaacaaatcttgacggtttgatcttggt

SEQ ID NO: 191695 - DNA, 281 bp, Glycine max
ccagtttctctgtacttcatacattttcacaaaccccaagaagaatggaacagggaagaagaagaagaagctcttttggtcctatgtcctcaactattccttgtcttctcctccttttgttctgtctctcaggatctgctgaggcctacaagaattacacagttggcgactctttaggatggtttgacaatactgagaaatccaatgtcaattaccagaagtgggctgacagtaaagaattcagcttaggagatttcctcattttcaacacggatactaac

SEQ ID NO: 191696 - DNA, 149 bp, Glycine max
agaacctaatgtatcagtgtcatcatcagtgtgtagtttaagctagctttgctatggttacgttctttgagatgagagtcttgatgaacagtaccattctgatgtattgctttccttgaaagttaatgcatgcttcttatcttctgtct

SEQ ID NO: 191697 - DNA, 278 bp, Glycine max
gaacaatctgcttcagctgccattatgactgttaattctggcattagaaaaattcttccagattctgagatttgtgactttgactttgagccatgtggttattcaatgaactctgttgaaggtgctgctgtttctaccattcatgttaccccagaagatggtttcagttatgcaagctttgagactgttgggtatgacttcaaagtggtgaatctgaacgaaatggttaagagggtattggcatgttttctcccaactgagttctctgttgcagttca

SEQ ID NO: 191698 - DNA, 163 bp, Glycine max
aaagtatggcggcggagtcatcactgagggtggcgactcccactatttgcaacctcaatggttctcagagaagaccaaccactctctctccgcttcgcttcatgggttttagccctcgaccctctcactctctcacttcctcttccctttcacacttcttcgg

SEQ ID NO: 191699 - DNA, 219 bp, Glycine max
tccggctcctccgatggaggggtaggagtgaattggctctgcatgagccctaagcgagatcacaaccccgaaaactatgacgaccttcaattcgagttcaatcctaatctcttcgcctctctcgagcactatttgcctcctcatatgctcaacctctcacgcgatgttaagcttcactacatcaggaacattcttcttcgctatttgcctgagaatgac

SEQ ID NO: 191700 - DNA, 276 bp, Glycine max
catcgagccgaatcggctcgagatatagcgcgtcttaataaacgctacctctctgaaaaccccacacttcttttcttctttcttactctctttcgcttcttcgatcttcgatcttcgtcgctgaaaatgagagagtgcatttcaatccacatcggccaggccgggattcaggttggaaacgcctgctgggagctttactgcctcgaacacggcattcagcctgatgggcagatgccaagtgacaagaccgttggtggaggtgatgatgctttcaac

SEQ ID NO: 191701 - DNA, 277 bp, Glycine max
gccccactcaaccaccacacctctcctcgttcacgctacccctttctgctcttcttctacctttcaagttttaaaagtataaagatggcagagacattcctatttacctcagagtcggtgaacgagggacaccctgacaagctctgcgaccaaatctccgatgctgtcctcgacgcttgcctcgagcaggacccagacagcaaagttgcctgcgaaacatgcaccaaaaccaacttggtcatggtcttcggagaaatcacgaccaaggccaacgttg

SEQ ID NO: 191702 - DNA, 277 bp, Glycine max
gtgtgaataccctaaatcggagtttcagtttcacccctcttttctcatctctaacatcatagtcctcagaggctagtcttcctattatcacaaacaatgtctgacagtcaagaatctgacaagaacattgagatatggaagatcaagaaattgatcaaggctctggaagctgctcgaggtaatggtaccagcatgatttctctgataatgcctccacgcgatcaaatttcccgggtcactaagatgttgggagatgaatttggaactgcttcaaaca

SEQ ID NO: 191703 - DNA, 276 bp, Glycine max
aatggtgtacgtcaaggctcagaaatcaaaagcctacttcaagagatatcaagtcaagttcaagagcagaagagagggaaaaaccgattaccgtgccaggattcggttgattaatcaggacaagaacaaatataacactccggaataccgatttgttgttcgctttagcaacaaggacattgttgcacaaataatatctgctagcattgctggcgatattgttcttgctgcagcatatgcacatgagctgccacgatatggtcttgaagtagggct

SEQ ID NO: 191704 - DNA, 274 bp, Glycine max
tggaaatttgcgttgtttttcgcggtacagctcacacacactgaacggtaagtatggcggacaaggctgttacaatccgaacccgaaagttcatgaccaacaggcttctttccaggaagcagtttgtcgttgatgttcttcatccagggagggcaaatgtttccaaggctgaacttaaggagaagctagctaggatgtatgatgtgaaagaccctaatactgtatttgtcttcaaattccgaacacattttggaggtggcaaatccactggatt

SEQ ID NO: 191705 - DNA, 272 bp, Glycine max
gctacttgcacaaattatggaagcttgctgttagctctgaaggatgggatcgagttccataccacgtgtgcatatgagggatgtgtccatagatcgccactccagagtcaccaaaagttgaagatgctaatgaaaggaggcagtctccatgagctatgatctgattggaataccaagagaggaagaagtccccataagtagactcccaagatgccccatcattgaagaagccattgtatgggggctggtcatagataggtgcatcatgagga

SEQ ID NO: 191706 - DNA, 274 bp, Glycine max
gcagtgatctatactatccatccctcaatcctggagagcgcccatttgtggttgacttgtattaccactcacacattgaataccgttggggtggagaagggttgaggaagactttagtgcgatgggctgattcaaccactgataagaagggtgataatgacgaacaaattgtgagtcctgctgaacagctttctaccgactattgttatgctttcaaagtgcgaaagccaggaatggctccccctgtgaaggagcttcggaagttattaaggat

SEQ ID NO: 191707 - DNA, 259 bp, Glycine max
gaaactatcccttctggcatgttcgtcaggggaacctatgcagcaagaaccaagtttgtagatgacgatcgaaaatgctacttggatgtcagttactactttgaaattcagaagaacagaccaacacctcaatgagatttaaacttgagtaacttgttggaataattttacttccttttgcatcttgtgtatctttggaacagattgaaattcaacttgtttgtcaattccagttagcacgattttacacgtgcatgct

SEQ ID NO: 191708 - DNA, 275 bp, Glycine max
attacctatcaaaaccagaaaaacacactgcaattgtttggactagttttaatttcttccaattccatggctgggaaagatagaatcctgattttgggacccactggagccattggaaggcacatagtctgggcaagtgtgaaggcagggaacccaacatttgtgttggtgaggaacacccctggctctaacaacagggtcaatctggtcaaagctgctaatcctgaaaccaaggaagagctcattgagagcttcaaaaattcaggagtaaatct

SEQ ID NO: 191709 - DNA, 284 bp, Glycine max
cagcgccaaaggaatcgatgacaatgattttctctccagcatagatccttatgtgattctcacatacagggcacaggagaaaaagagcactgtgcaagaagatgctggatccaagccacaatggaatgagagctttcttttcactgtctctgacagtgcttctgaacttaatctgaagataatggataaagacaactttagtcaagatgattgtcttggcgaggcaaccattcatttagatccagtgtttgaagccggtagcattccagaaactgcttacaagg

SEQ ID NO: 191710 - DNA, 268 bp, Glycine max
taagtcgatctgggtcgggtggagcagcgagttcaattaatcattcagatgttttggaggctctttctcgggctttaaagaagactgaggagtcttatctcgatgtggcggataagatggtgatggagaatcctgaattggctttgatgggatcgtgtgttcttgtgatgttgatgaagggggaggatgtttatgtgatgaatgtaggggatagtcgagctgtgctggctcagaaggctgagcctgattactggcttggcaagatcag

SEQ ID NO: 191711 - DNA, 275 bp, Glycine max
cttgaaattcttggtagcatcaaacaccgttatctagtgaatttacgaggatattgcaattcacctacgtcaaagttgttaatatatgattacctaccaggtggtagtcttgacgaagcacttcatgaaagagctgatcaactagactgggattcgcgcttgaatataatcatgggagctgcaaaagggcttgcctacttgcaccatgattgttcccccaggatcatacaccgagacataaaatctagcaacattatacttgatggaaacttgga

SEQ ID NO: 191712 - DNA, 272 bp, Glycine max
gcacttcaccaatatgattgcttgcgagccaataaatcaacatttgcttggggtctagaagcccgtgtaccatttttggacaaggcgtttatcaatgctgcaatgagtattgaccctgagtggaagatgataaaaagagatgaaggacgaattgagaagtggattctgaggagagcctttgatgatgaagagcatccttatctgccaaagcacattttatacaggcagaaagaacaattcagtgatggagttggctatagttggattgatgg

SEQ ID NO: 191713 - DNA, 273 bp, Glycine max
cttcagtttctcctcgttgttcttcgctttcctgttttcaatttcgattctttcgttaatttaataagatgtttgggagggcaccgaagaagagcgataatacgaggtactacgaaatcctcggcgtctccaagaacgcttcgcaggatgatctgaagaaggcttacaagaaagccgccattaagaatcaccccgacaagggcggtgatcccgagaagtttaaagagctggcgcaagttatgaggttctgagtgaccctgagaagcgtgagat

SEQ ID NO: 191714 - DNA, 275 bp, Glycine max
cttggaggtgaagattttgataacaggatggtgaaccactttgttcaagagttcaagagaaagaacaagaaggacattagtggaaaccccagagcacttagaaggttgaggactgcttgtgagagggccaagagaacactttcatcgactgctcagaccaccattgaaattgattctctatacgagggaattgatttctactccactgttactcgtgccagatttgaggagctcaacatggatctcttcaggaaatgtatggagcaggtggagaa

SEQ ID NO: 191715 - DNA, 275 bp, Glycine max
atcgcatcggatcttcactctcttctccgatctcaaaatgcccgccgtttatggagctcgcttgaccaccttcgaagactccgagaaggagagtgaatacggttacgttcgcaaggtatcaggaccagtcgtcgttgcagatggcatggctggggctgctatgtatgaactcgtgcgtgttggtcatgataatctcattggtgaaattattcgtctcgaagggaattctgctatcatacaagtttatgaggaaactgctggcttgatggttaatg

SEQ ID NO: 191716 - DNA, 274 bp, Glycine max
agaagctgcaagagcttatgatgctgaagcaaggaggatccggggcaagaaagccaaggtgaatttcccggatgagccttcaggcgctgctgcttcctcaaaacgcctcaaggtgaatccagaggctcagccaatgaaggaaaatctgaacaccgtgaagccgaaaatgaaccagatgttcaattttggtcacaatctggagggctactacagcccaatagatcaggtggaacagaaaccactggttaaccagtatgttaaccctgccccgttc

SEQ ID NO: 191717 - DNA, 270 bp, Glycine max
ctttccagttcatacttcatcctattattactttccctctttgcattccaaatggccactgttgaggttgcacagcaaacaccaacaactgtgacagagaatgaaacaacgactgaggtaaccaagattgaggaaactaccccagaacagccagccaccgaggttactgccccagaaacagtcaacgaagaagcaaaagaggaagcagcagttgagactaatgaggcaacagaagttacagaggaagggaaggctgagaaaacagaagaa

SEQ ID NO: 191718 - DNA, 269 bp, Glycine max
ctttggttgcgaaatttcagaagttacatgaggacctgactaatggtttccgcaaccttgaggacgaaacccgatgattgatgattgaagatttggtagtttgctcaaatattgtgttatttccaattgtaagacgcagtctagcatcgcagggttgcaacgtcccgagtgttctcatatttgactgttcgattcattcatatcacatttatttcctttcttggtgctggtttggcttttgatctagtctcatgtgtagctataatcat

SEQ ID NO: 191719 - DNA, 269 bp, Glycine max
gtttgacgttgttcacaatcactttctgcgcttcactcactcccttcatgcggttttctttctttgtcgaactcgtgcgaaaatgcgtgagattcttcacatacagggagggcaatgcggaaaccagatcggagcgaagttctgggaggtggtgtgcgcggagcacgggatcgattccacggggaggtaccagggggacaacgagttgcaactcgagcgagtcaacgtctattacaatgaagcgagttgcggaaggttcgtgccgaggg

SEQ ID NO: 191720 - DNA, 272 bp, Glycine max
aaggcaatgcaggatccagaaattcagaacatccttcaagaccctgttatgagacaggtattgattgatttccaggaaaatcccaaggctgcacaggaacacacgaagaatccaatggtgatgaataagatccaaaagctggtcagtgctggaattgtccagatgaagtaagtttgtggcaggtggcagttcgtgtgaaaaagcaatcaagcaatcgataatgatgtctcagtgtgactattttgacatttaaatagatgtgactgggaaaa

SEQ ID NO: 191721 - DNA, 275 bp, Glycine max
caattccaattcctctggatctcgtctcgatcgatagatctcgaacatgagcactggggagcttctcaacatcgaacctctcgaactcaagttcccctttgagctgaagaagcagatctcatgttctcttcaattgtccaataagaccgatagctatgtagccttcaaggtgaaaacaaccaatccgaagaagtattgtgttcgtccgaacactggggttgtcacgcctcgatctacgtgtgatgttatcgttaccatgcaagcgcaaaaagagg

SEQ ID NO: 191722 - DNA, 275 bp, Glycine max
cgttcaccaactagtggagaatgcagatgagtgcatggttcttgacaatgaagcactctatgacatttgcttcaggaccttaaaactcaccactcctagttttggtgatctgaaccacctgatttctgcgacaatgagtggagtgacatgttgcttgaggttccccggacaactgaactccgacctgaggaagctagcagtgaacctgatcccattcccacgtctccacttcttcatggtggggtttgcacctctcacctcacgcgggtctcagc

SEQ ID NO: 191723 - DNA, 277 bp, Glycine max
tccaaacttgctaactccgttaacctcatcggtcatatccagtccccgattcagttccatgtctctcccaacgatggctacgtctgggcctccaccgttatcacgcgtcaagactcctctgacctctctttctcgattccggttatatttgagggtgatctcgctcatactgccaaatttcatctcaatctaaatgattgcatccacattgctggaaaactcaccactgattcaccccaattggaacacctcccaccccaatctaatattcaggtta

SEQ ID NO: 191724 - DNA, 273 bp, Glycine max
atttgggtcaagctgcataccttatggaaaaccatgctgatgctggtaatgccttttattcttctgttccaagtggtgcattctggccaactttcctcattgctaacattgctgcattaattgcaagtcgggctatgacaacagccacattttcttgtataaaacagtcagctgctcttggttgtttccctcgtcttaaaataattcatacctctcggaaattcatgggccagatctatatccctgtcataaactggtttctcttggctgttt

SEQ ID NO: 191725 - DNA, 265 bp, Glycine max
ccgagaagaagtgccgggtagacgtggttatcctggatatatgtatacagatcttgcaacaatttatgaacgagctgggagaattgaggggcgtaaaggctctattacacaaattccaattctaaccatgcccaatgatgatattacgcacccaactcctgatctaacaggatatatcactgaggggcagatatacatcgacaggcagctgtataatagacagatatacccaccaatcaacgtcctcccatcactatctcggttg

SEQ ID NO: 191726 - DNA, 269 bp, Glycine max
aatatggcatttgcaggaacaacttcagaagtgcatggcttgtgacaaaacagtttatctggttgataagttgaccgcagataaccgagtgtaccataaggcttgcttcagatgccaccactgcaaaggaacactcaagctcagcaactataactcttttgaaggagttctttactgcaggccacactttgaccaactgttcaaaagaactggtagtctgacaaaagcttcgaagggacaccaaaaattgctaaaccagaaaaaaccgg

SEQ ID NO: 191727 - DNA, 267 bp, Glycine max
ggggaagcagctttgtggtgggacatttttgaaccctggatcatgggatgctgcacttcttgctgctgggactacactatctgcgatgaagcatttactgaatggggatggaaaagtttcctatgcattggttaggccccctggtcaccatgctcagccttctcaggccgatggctactgtttccttaacaatgcaggtctagctgtgcaattggctttagattccggctgcaagaaggttgcggtcatagatattgatgtgcatta

SEQ ID NO: 191728 - DNA, 267 bp, Glycine max
tgcagtccaacccttccgacgatttcatgagcctccctctcgaggaaaatatatttgagtggcaatttgcgattagagggcctcgtgatacggaatttgagggtggtatttatcatggaaggatccagttgccttcagagtatccattcaaacccccttcattcatgttgttgacacctaatggtcgtttcgagactcaaaccaagatttgcttgagcatatcaaatcatcaccctgagcattggcaaccatcatggagcgtgagga

SEQ ID NO: 191729 - DNA, 275 bp, Glycine max
tgtttatcgtgaggagaatatgaagttgtttgttttctttgttgctgcagtagttttggtagcatggccatgccatggcgcaggctaccaaaggttccctctccgaatgaaaactggctatggtgagcgttcttcggaggtaaaatgcgcaagttttaggcttgctgtggaagcacacaacatccgagcctttaaatccattcctgaagagtgcgttgaaccaacaaaggactacattaatggcgaacaatttagatcagactctaaaacagtta

SEQ ID NO: 191730 - DNA, 274 bp, Glycine max
tgcagcctccaattcgtgccactctcttcaaaatggccgttaccttctcaaatctccacacagaatcaggtctcaagtccctcgacgacttcctctctgggaaggtctacgtttctggggatcagttcacaaaggacgacatcaaagtgtatggtgctgttttggagaagccaggtgactcttttcccaatgctgccaagtggtacgaggttgtctcatctcagcttgctgcaagcatccccggcaatgctcaaggggtgagattcagtggcaa

SEQ ID NO: 191731 - DNA, 271 bp, Glycine max
aagcccacaaagcccggcttggaggagccccaggagcagatccacaagataaggatcaccctttcctccaagcacgtcaaaaacctcgagaaggtttgtgcggacttggttcgcggtgcaaaggacaagcgcctcagggttaagggacctgtcaggatgcccactaaggttcttctcatcactaccaggaagtccccttgtggtgaaggtaccaacacatgggacagatttgaacttcgtgtgcacaagagagtgattgacctctacagtt

SEQ ID NO: 191732 - DNA, 270 bp, Glycine max
cagaaaaataagatcactatcaccaatgacaagggtagattgtcaaaggaagatattgagaagatggttcaagaggctgagaagtacaagtctgaggatgaagagcacaagaagaaggttgaggccaaaaacgctttggaaaactatgcatacaacatgaggaacaccgtgaaggatgacaagattggtgagaaacttgacccggctgacaagaagaagattgaggatgcaattgagcaagcaatccagtggttagacagcaaccagctt

SEQ ID NO: 191733 - DNA, 265 bp, Glycine max
tgggagggagtgaagcttctctcttcttcctcggagtctccggtgagggatcatagtttcaagtgcttctctgtgtctgacctcaagaagaaggtgatggcagggctgtgtaaaacttgcgacaaggaagggcaatggagatacttggtgttgggtgaagcatgctgccacctaggcctaatggaggatgcaatggttcttcttcaaacagggaaacgcattgcaagcgcggcattccggcgcgagagtgtgtgctggtctgaag

SEQ ID NO: 191734 - DNA, 267 bp, Glycine max
ctcccagggctgtctttcccagtattgttggccgacctcgacacactggtgttatggttgggatgggtcaaaaggatgcctatgttggtgatgaagcccaatcaaaaagaggtattcttactctcaagtatcccattgagcatggtatagtcagcaactgggatgacatggaaaagatctggcatcacacattttataatgaacttcgtgttgctcctgaggagcacccagtgcttctcactgaggctcctctcaacccaaaggcca

SEQ ID NO: 191735 - DNA, 274 bp, Glycine max
tgtgagatccaagctttgacagaaatccgacatcgtaacattgtaaagttacatgggttttgttcacattcacaatactcatttttggtgtgtgaattcctggagaagggcgatgtcaagaagattttaaaggatgatgaacaagcaattgcattagattggaataaaagggtggatattgttaaaggtgtagcaaatgctttatgctatatgcaccatgattgctcacctccaatcgttcatcgtgatatttcaagcaagaacgttcttttgg

SEQ ID NO: 191736 - DNA, 273 bp, Glycine max
  unsure (1)..(273): unsure at all n locations
ggctcgaactcgagccgattcggctcgagcggctcgagggaagctctagctacggtaggtattccnactggcgagaggattaaagaagcatctgaagaggctaaatgccccaaagcattggatgcttgacaaactgggtggtgcatttgctcctaagccctcatctggaccacacaaatcgagggaatgcctgccactcatactcattttgcgacaccggctgaagtatgctctaacataccgtgaagtcattgctattctgatgaagcgaca

SEQ ID NO: 191737 - DNA, 266 bp, Glycine max
ggcagcactagcagctatgtttcaagcagcagcagcagcaaatggctgggcttcgtggcggccgtgtggattcaatgcatctccggcaacaactacactttctcaaactactccgacgccctcaaatccctcatgcacctcactcagctccaactcaacaacctctccgtcgctaaagacgttggcaaagcctttgggcttctggcgggcctcgcctccgaccgcttccccacttgggctattctcctcattggctccgtcgaagg

SEQ ID NO: 191738 - DNA, 258 bp, Glycine max
ctgagcttgagggcaagacagttggtctgtatttctgcgtgaagtcattcggatcatgcagtgactttaccccaaagcttgtggaggtttatgagaagctgaaggcccagggggagaactttgaggttgtgctgatacccctagatgatgatgaagagtcattcaaggaactattagaaagtgtgccttggttatccttgcctttcaaggacaaaatctgtgggaagctagctcggtacttcgagctttcaaccctcc

SEQ ID NO: 191739 - DNA, 266 bp, Glycine max
ggtgtacgtcaaggctcagaaatcaaaagcctacttcaagatatatcaagtcaagttcaagagaagaagagagggaaaaaccgattaccgtgccaggattcggttgattaatcaggacaagaacaaatataacactccgaaataccgatttgttgttcgctttagcaacaaggacattgttgcacaaataatatctgctagcattgctggcgatattgttcttgctgcagcatatgcacatgagctgccacgatatggtcttgaag

SEQ ID NO: 191740 - DNA, 267 bp, Glycine max
attggcaccgccactcctcccaactgcgtggatcagagtacctatcctgactattatttccgcatcaccaacagcgagcacatgaccgagctcaaagaaaaattcaaacgcatgtgtgataagtcgatgattaagaagcgatacatgtacttaaacgaagagatcctgaaggagaatcccagtgtttgtgcatatatggcaccttcgttggatgcaaggcaagacatggtggttatggaggtaccaaagttgggaaaagaggctgca

SEQ ID NO: 191741 - DNA, 270 bp, Glycine max
gcttcaagtcaggaggaggtgacccttttgggagctactggaagcccatttgtgtgcagggttcatattgccctcaagttgaagggagttcaatacaaatatgtcgaagaaaatttgaggaacaagagtgaactgcttctcaaatccaacccagttcacaagaaggttccagtgtttattcacaatgagaagcccatagcagagtctcttgtgattgttgaatacattgatgagacatggaagaacaaccccatcttgccttctgatcct

SEQ ID NO: 191742 - DNA, 257 bp, Glycine max
cttagcctgtttctttcaatggaagtcagttctgcttctagcttgaatcccaacgctccgatgttcgttccactcgcctagcggacggtggaggatttctccgacgagtggtgggacctcgttcactcctccccctggttccgcgactactggctccgcgagtgcttccaagatccccagttcgaaaacgacgacgctttcgacttcgactttgacctagatctccaagatgaagatgaaagggaacgaaaggaagg

SEQ ID NO: 191743 - DNA, 256 bp, Glycine max
cttggaaactcttcaatgaagccccttctttggttgaagaaggtgtggttgtatttgtcacccagcaaactgctttggtggtacggctgagccctacgttgcaagtttatgctcagctctctaggccagatggagttcgggaggcttccatgccagagactgcatggaaatacatgacacaaatatgtagttctactgaaaatatgtctgcagaagctgttgaaagagtttcattgcttgcaattgcttgggaacg

SEQ ID NO: 191744 - DNA, 248 bp, Glycine max
cggctcgagctccgcaccagtttcaccgcacgaatatcttgttgtttggagcgatccgagaaacactctgtaaacatgttggtttaccaggacctccttacaggtgatgagcttctctctgactccttccgttacaaggaaattgagaatggaatgctgtgggaagttgaggggaagtgggttgttaaaggagcagttgatgtagacattggtgcaaacccttctgctgaggggtgagagaagatgag

SEQ ID NO: 191745 - DNA, 255 bp, Glycine max
gctccaacacaggggaaaatgagggagatccttcacgtgcagggagggcaatgcgggaaccagatcggttccaagttctgggaagtggtgtgcgacgagcacggcatagatccgacggggaagtacgtcggaaactcagatctgcaactcgagcgcgtgaacgtctactacaatgaagcctcgtgcgggcgcttcgtgccacgcgcggtgctgatggacctggagcccggaaccatggacagcgtgcggaccggg

SEQ ID NO: 191746 - DNA, 257 bp, Glycine max
cggggcgtgcgttcaaaacgtgctcgattccctggtaaccgcattgctggcagataagaatcgcaagttcatagatgttgaagaggcatttttccagcgatggtggagggagcaaagtgatgagatccagaagagagtcaaggagctggtcaactctggtcaattggagttcagaaatggtggtttttgtatgcatgatgaggctgctactcatgacattgacatgattgatcagacaactcttggacatcaattta

SEQ ID NO: 191747 - DNA, 255 bp, Glycine max
ctcatatgcttgtctcaaagatgaagccatgcatgtgtaagtatgaactaattcagactgtgaaactgcgaatggctcattaaatcagttatagtttgtttgatggtatctactactcggataaccgtagtaattctagagctaatacgtgcaacaaaccccgacttctggaagggatgcatttatgagataaaaggtcaacacaggctctgcctgttgctttgatgattcatgataactcgtcggatcgcacgg

SEQ ID NO: 191748 - DNA, 256 bp, Glycine max
acagtgagagatagctagctcgctagctagggttagggttagggttagggtttctgcgtttatgcgaagatgactaagttcaggaaattgggtcgacacagcggtcaccgaatgtccatgctcagaaccatggtctcgcagttggtgaagcacgagcgcatcgaaactactgtcgccaaggcgaaagagatcagaagactcgcggataatatggtgcagcttggaaaggagggatcccaacatgctgcgagacgtg

SEQ ID NO: 191749 - DNA, 258 bp, Glycine max
aaaaaaagaagagaaaaaaaaatgattttctgtggcaacagcactgaagagagtgaactgcatcatgctcaaattcatttgtagcaaacacgtagacaactttgtgagttccatggctcttaagtctgctatggaattaggcatagcagacgtaatccatagccacggaaaacccatgactatttccgagttatcctcagctctcaaattgcacccttcaaaagtgagtgtcctccaacgctttctccgccttttaac

SEQ ID NO: 191750 - DNA, 253 bp, Glycine max
accgtcgcactttgcgttttctgcgtcatctccgattccccgacaatggccacccaaatgagcaagaagagaaagttcgtagctgatggagtgttcttcgctgaactgaacgaggttctgacaagggagttagccgaggacggatactccggcgtggaagttagggttacgccgatgcgcaccgaaatcatcatcagagccagcagaacccaagccgttctcggtgagaagggaaggagaatcagggaactta

SEQ ID NO: 191751 - DNA, 255 bp, Glycine max
cgaaggtggctttgcccctaacatccaggaaaacaaggaaggcttggaattgctgaaaactgccatcgccaaagctggttacacaggcaaagttgtcattggaatggatgttgcagcttctgaattctacaaggaagacaaaacatacgatttgaacttcaaggaagataacaatgatggctcccagaggatctctggagatgctttgaaagatctgtacaagtcatttgtgtcagagtacccaattgttgcaat

SEQ ID NO: 191752 - DNA, 251 bp, Glycine max
attgagaggtccacaaaccttgactggtagaagggtccaactctgcttgatgcacttgaccagattagtgagcccaagaggccctctgacaagcccctcaggcttccccttcaggatgtgtagaagattggaggtattggaactgtgccagtgggacgtgttgagaccggtgtcttgaagcctggaatggtggtgacttttgcaccaactggactgacaactgaagtcaagtctgtggagatgcaccatga

SEQ ID NO: 191753 - DNA, 255 bp, Glycine max
  unsure (1)..(255): unsure at all n locations
ccctaatgtcaagacganttcacttagaagtttgattgaccgctccattattgagagttttggggagaaagggagaatttgtattaccagtagagtttatccctcgttggctantgacaaagatgcacatcttnatgttttcaacaatggaagccagagtgtggtgatctctgaactgaatgcttggagcatgaaggaagcagaatttagnnaagaagaaagcacaattaagctgnaactaaaaagattnggata

SEQ ID NO: 191754 - DNA, 255 bp, Glycine max
cggagagtcctcttgattttgctgaaaggttgacggagcattacaagaggcctaatggtgaaggacctcacattgatctgaagagggaagatctcaatcacactggggctcacaaaattaagaatgctgttgctcaagctttgcttgctaagagattgggcaaaaaacgcatgattgctgaaactggagcgggtcagcatggagttgccactgctactgtatgtgctcgatttggtttagaatgcatgatttata

SEQ ID NO: 191755 - DNA, 260 bp, Glycine max
agaagtccctccttcctctgccttagaattcttgtgacccttttcgctggtagcattgaaagtgcaccagcaaacgtgaagccaagccattatgctgcacccttcaataggagtgtttttccttctggttttctatttggaataggctctgcagcttaccagatagaaggagctgcagctatagatggcagaggaccaagtatatgggacacctatactaaagagcaaccagggaagatttgggatcatagtgatggaag

SEQ ID NO: 191756 - DNA, 181 bp, Glycine max
ctatttccctacctctcccttcaagatgcagatcttcgtcaagaccctcaccggcaagaccatcacccttgaggtggaaagctctgacaccatcgacaacgtcaaggccaagatccaggacaaggaaggaatccccccggaccagcaacgtctcattttcgccggaaagcaacttgaggac

SEQ ID NO: 191757 - DNA, 253 bp, Glycine max
ccagagattccgtgagttgcaaaaatgaaaacaattctttctgcagagaccatgaacatcccggacggcgtgagcgtcaaggttaatgccaaggtcatcgaagttgagggcccccgcggaaaattggtgcgagacttcaagcacttgaatctcgattttcagctcatcactgacgaaaacggtaaaaggaagctgaaggtggaggcctggttcggttctcggaaaacagccgccgccattcgcaccgccctga

SEQ ID NO: 191758 - DNA, 251 bp, Glycine max
cagttgtggttaggggtgaaatgccactcgaacccagagctagctggttctccccgaaatgcgttgaggcgcagagttgactagacatctaggggtaaagcactgtttcggtgcgggccgcgagagcgtgaccaaatcgaggcaaactctgaagactagagatgacctcaaaagaacaagggtcaaggtcggccagtgagacgatgggggataagcttcatcgtcgagagggaaacagcccggatcaccag

SEQ ID NO: 191759 - DNA, 253 bp, Glycine max
agaaggcccagcaaccatccttgccattggaactgcaaacccaccaaaccgtgttgatcagagcacctatcctgattactacttcagaatcaccaacagtgaccacatgaccgagctcaaagagaaatttcagcgcatgtgtgacaagtctatgatcaagacgagatagatgtacctaaacgaagagatcttgaaagagaatccaaacatgtgtgcttacatggcaccttctttggatgctaggcaagacatg

SEQ ID NO: 191760 - DNA, 254 bp, Glycine max
agaaagtaggaagagaagagaggtctgatgaatagttttctctgtgaaatcgcaaagaaacagtgacacttattagcaccgtcaactctgcaatcaccgattccgaccatgctgcccctttcccttctcaagactgcccaaggccaccctatgctagtggaactgaaaaatggggagacttataacgggcacttggttaattgtgatacatggatgaacattcatctccgagaagtcatttgtacctctaaaga

SEQ ID NO: 191761 - DNA, 253 bp, Glycine max
tcgggactgtttacaagggcgtgttgccagagagcggcgacattgttgcggtgaagaggtgtaaccatagtggtcaggggaagaatgagtttttgtctgagttgtctataattggaagtctaaggcataggaatttggttcaccttcaaggttggtgccatgagaaaggtgagattttgttggtgtatgacttgatgccaaatgggagtctagataaggccttgtatgagtctagaatggctctgtcttggcc

SEQ ID NO: 191762 - DNA, 253 bp, Glycine max
tctcgagccgattcggctcgagtgaaaacattactgcttctccttatctgtgaaactcttctgattatgcagtgattggtgcttctcaaacttgtcctgctaacaatgaggataaatgcggcgattcagatgaatggaaaggggagtttttccctgacattcccaaaattaaatatgagggtccgtcaagtaagaatgtgctttcattgaaatggtataatgcagaggaggaaattcttgggaagaagatgaa

SEQ ID NO: 191763 - DNA, 250 bp, Glycine max
ctcgcgcgatgggaattgcgcttcaaggcgtctcgtagggctaatccgcctcacgagggtcaccaacggcacgttccttttgcgggccgaggccccctactgctggtcggcaaacggacggctggcgcacgcgtcgcttctagcccggattctgacttagaggcgttcagtcagaagccaacgcacggtagcttcgcgtcagtggcttgtcaaccaagcgcgatgagcaattgtgcgaagcaacggttcc

SEQ ID NO: 191764 - DNA, 250 bp, Glycine max
cgaagagctcattgagagcttcaaaaattcaggagtaaatctaattcagggagatatgaatgatcatgagagtctggttaatgcaatcaagcaagttgatgtcgtaatctgtgcatttggtagactactaattgaagaccagttgaagatcattgcagcaataaaagaagctggaaacgtcaagagattttttccatctgaatttggattggatgtggatcgtcacgattcagttgacccagttagagaa

SEQ ID NO: 191765 - DNA, 251 bp, Glycine max
ttcgaatcgaaactcagaattagaaaaaaacacaaatcacaatcacaatggcaaggtacgaccgagcaatcaccgttttctcccccgacggccacctcttccaggtcgagtatgccctcgaagccgtccgcaagggcaacgccgccgtcggcgtccgcggcaccgagaacgtcgtcctcggcgtcgagaagaaatccaccgcgaagctccaagactccaggtcggtgaggaagattgtgaatctggacaac

SEQ ID NO: 191766 - DNA, 259 bp, Glycine max
tgcgagcgaagccagcgctgagatgtcggaggacttgtcgggtaggagagatagggcgagcccttgagtgacgtggccgctcacggcggcgtcggctacttcaaccgatccaggttgctcagaatcatggccgctgaggccatggagtcgttgggcaagagtcagaaagggaagaagctcgacagtgtgctcagcagcaggcagggcctaatacgaggcgagaatatggatgctggacgggatgtctgacacggggggt

SEQ ID NO: 191767 - DNA, 251 bp, Glycine max
agcgaggagaaagatggaggggaaggagcaggatgtgtcgttgggagcgaagaagttccccgagagacagccaattgggacggcggcgcagagccaagacgacggcaaggactaccaggagccggcgccggcgccgctggttgacccgacggagtttacgtcatggtcgttttacagagcagggatagcagagtttgtggccacttttctggttctctacatcactgtcttaaccgttatgggagtcgccg

SEQ ID NO: 191768 - DNA, 252 bp, Glycine max
ccaaaccctaatttcggaaagatcggcgatggctgcctccaaggatcgcgagaacttcgtctacatcgccaagctcgccgaagaggccgagcgagacgaagagatggtggaatcaatgaagaacgttgcgaatctcgacgttgaactgactgtggaggagcggaattgactttctgttgggtacaagaatgtgattggtgctcggagagcagcgtggaggatcctgtcttccattgagcaaaaggaagaaac

SEQ ID NO: 191769 - DNA, 249 bp, Glycine max
ctgcactggggaaaaggggattggacgatctgggaaacctttacactacaaaggttctgtatttcatcgtattattccagaattgatgtgtcagggaggagatttcacaagagggaatgggaccgggggtgagtcaatctacggttccaaatttgaagatgagaatttcaatttgaggcataccggtcctggtattctctccatggcaaatgctggagctcatactaatggttctcagttcttcatatg

SEQ ID NO: 191770 - DNA, 249 bp, Glycine max
tctcgagccgattcggctcgaggcttgttagatttgttatgccttgtcagtgctttagtaagtttgcaagcagaagatgcggactaaggaggagagatggacggtgacttatggaactagttctccattgggtagtccccagcaggttattctgatcaatggtcagtttcctgggcctagacttgacttggtgactaatgagaatgtaattctcaacctgatcaagaagctggacgagccatttttact

SEQ ID NO: 191771 - DNA, 248 bp, Glycine max
cacagtggatcgactacaccaaatccctcttcctcgagagatcagaatggcgttgacttcaaaaaagttgatgctcatgtgcaccagttaaagggtagcagttcaagcataggtgcacaaagggtgaaaaatgcctgcattgctttccgcaacttctgtgaggagcagaacacagatgcgtgcgtcagatgtctgcaacaagtgaaacaagagtactgccttgtcaagaataagcttgaaacaatgtt

SEQ ID NO: 191772 - DNA, 246 bp, Glycine max
attgaccatggcttcttcattgaggatctcaaggctcctctctcgttcttttctttctgcttccactactactcctttgttttctagaggcggaagtggtgctcttggtgcagggctcagtaaattcagcactgctgctgccattgaagaaccaatgaaaccaccaatgaaagtagaacacacccagctctgaattgatggaaaatttgttgatgctgctactggcaaaacttttccaacgttgga

SEQ ID NO: 191773 - DNA, 246 bp, Glycine max
tctcgagccgaatcggctcgagagcacattagtgaatatgctgattctggtttgaggaccttactacttgcagatcgtgaacttaatgaggaagagtacaagaaatttagtaaagagtttacagaggccaagaacttagtaagtgaagaccaggagcagattgttgaggggatagtacaaaatattgagaaggattgaattcttcttggtgctactgcagttgaagacaaactacaagatggggtt

SEQ ID NO: 191774 - DNA, 249 bp, Glycine max
caaccttgtgccataccccaggatccacttcatgctttcttcttatgctccggttatctctgccgccaaggcctaccacgagcagttgtcggtgccagagatcacgaatgccgtgtttgagcccgcgagcatgatggccaagtgtgatcccaggcatggcaagtacatggcttgctgcttgatgtaccgtggtgatgttgttcctaaggacgtgaatgctgctgttgccagcagcaagactaagaggac

SEQ ID NO: 191775 - DNA, 248 bp, Glycine max
ctttccttcttcaccgcatcaatggagttggacggcgttctcctcggcatgtgcaaccctctcctcgacatctctgccgtcgtcgacgacgctttcttgcaaaaatacggtatcaagttgaacgatgcgattctcgctgaggataagcacaaacctatgtatgaagaattggctaacaatcctaatgtggagtacattgctggaggtgctactcagaattcaatcagggttgctcagtggatgcttca

SEQ ID NO: 191776 - DNA, 258 bp, Glycine max
tatgttgctcgatctcgagccgattcggctcgagctcgactcaattgctgtggtgagtttcttttcaggcactaacgcttgtataggaatcagaagacctggaggcagtgccatcactagaatctgtcaggtggtaatggcatccataagaaaatacaatgttgaagtacctgctgacgagtcacttttatatgagactgctgaaactgaatctgctataaaaggaagccgaaagcttgaccacacaaatgagctaag

SEQ ID NO: 191777 - DNA, 266 bp, Glycine max
cggacgtaagctcggtctttgctcgactcgagcgattcggctcgactcgaccaattgctgtggtgagcttcttttcaggcactacgctgtataggaatcagaaacctggaggcagtgccatcactagaatctgtcaggtggtaatggcatccagaagaaaatacaatgttgaagtacctgctgacgagtcacttttatatgagactgctgaaactgaatctgctagaaaaggaagccgaaagcttgaccacacaaatgagctaaga

SEQ ID NO: 191778 - DNA, 244 bp, Glycine max
gcaatgtcttcccctgatctacctgccacaactgactcacttgctctcgcaactgaggccaaagacccatctgaggccatctccattctttatcgggtgcttgatgatccttcttcttcaccagatgctctgcgtatgaaagagcaagcaatcacaaacctcactaagcttctcactgatgagaataggggagaggatctgcgcagcttcttactcagttgaggccattcttctccttgatacc

SEQ ID NO: 191779 - DNA, 245 bp, Glycine max
ccagcctaagcctcaaacatggcgagagggttaaagaaacacctgaagaggctcaatgctccaaaacattggatgcttgacaagcttggtggtgcctttgcacccaagccatcatctggaccccacaagtcccgggagtgtcttcctctgatcctacatcctacgaaacaggctaaagtatgctctaacatatagagaagttattgccatcttgatgcagcgccatgttcttgttgatggcaagg

SEQ ID NO: 191780 - DNA, 247 bp, Glycine max
agttcgggacaatgcgatggacaagctcatcaacagactcaaggacgagggcgaagaagataacgggcgtggttttggtgctcaaggatggcaggtttgctgttttttggatacttgtggctatgtgttttggtcttgagatggatgaggagacagtggagagaatagatcaggtgatgaagagtgttctcagcactttggacccgagaattgatgactagctgccaattctaagcccctttttctc

SEQ ID NO: 191781 - DNA, 280 bp, Glycine max
ctcacaaccagtcctacaaggcccacaagaatggcatcagaaagccaaagaggcaccgccacacttccaccaaagggatggatccaaagtttctgaggaaccaaaggtacgcgaggtagcataacaagaagagcggtgaaacagccacggaagaagagtaaagtgtcactctcaaatggggctattaggatttgatttgctattcaagtcccatatgttttgtgtcaaatctatatttagtagtatagtcattttgatgagttaatttaatccagagaga

SEQ ID NO: 191782 - DNA, 278 bp, Glycine max
taggtacccgcctatgtgatagctcaggtcgttggagccacacttgctagtggaactctcagacttatattcaatggcaagagtgaccactttacaggaacactccctggcggttctgacttgcaatcttttgtggtcgaattcataatcactttttatctcatgttcgtcatttctggcgttgccaccgataacagagcgattggagagttggcagggcttgcagttgggtctacggtactgctgaatgtgatgtttgccgggccactcacaggggc

SEQ ID NO: 191783 - DNA, 256 bp, Glycine max
ttactcattctccatacctcaacgaagaggttaaagagacggcaatactttgctgtccgccttgaccgagcagagcttcgtcttggccctcgattttgccctaaagtactctcagtcacaacagacaccgtcgtcgtcgtcgtcgtcatcaatggcaccgaagcagaccaaggctgagaagaagatcgcttacgatgcgaagctgtgcgacctaatggatgcagtacgaccagatccccgtagggattccgataac

SEQ ID NO: 191784 - DNA, 267 bp, Glycine max
ggataagtccctccttcctctgccttataattcttgtgaccctttttgctggtagcattgaaagtgcaccagcaaacgtgaagcccagccattatgctgcacccttcaataggagtgtttttccttctggttttctatgtggaataggctctgcagcttaccagatagaaggagcagcagctacagatggtagacggacaagtatatgggacactgatattaaacagcaaccaggggagatttgggatcatagtgatggaagtctag

SEQ ID NO: 191785 - DNA, 277 bp, Glycine max
acttccaatggcttcaaatcatgaagaagtgatacttttgggcaagtgggccagcccatttagcaacagagtagaccttgctctcaagctcaagggagtaccttactaatactccgaggaagatcttgctaacaagagtgctgatcttctcaggtacaaccccgtgcacaagaaggttccggttttggtccacaatgggaacccattacccgagtcacttatcattgttgaatacatcgatgagacatggaaaatatccctcttgcctcgagacctt

SEQ ID NO: 191786 - DNA, 283 bp, Glycine max
ctgatcttcatcttcatagagaaagtatgaagatctatattttgcatggtcattataacttccttcacatttggtttcattgagaaagttgtttcaaaaccaaatctctcgtccatatacggcaattttcaactttggtgactctctaagtgacaccggcaatttccttgcatctggtgccattttattcccagttatcggaaagcttcccttatggtcaaaccttttttaaacgggcaaacggtcgttgctcagatggacgactaatgattgattttatagg

SEQ ID NO: 191787 - DNA, 275 bp, Glycine max
gcttctcgaaccctactttcttccgcggtgattgcatttgaattcctgtaatggcgattgataatatttttaaaaatgaagctagtgaagaaaaaggagagcgtgccagaatggcttcttttgttggagccatggctattgctgacttagtgaagacaaccttggggccaaagggaatggataaaattttgcagtcaacaggtagaggacgtgaagttactgtcacgaatgatggcgctacaatcttgaagtccctccatattgataacccagct

SEQ ID NO: 191788 - DNA, 258 bp, Glycine max
atttcctctctctcagtttccaagaatcttaagctatgggaaagtcttacccaaccgtgagcgctgattaccagaaggccgttgagaaggcgaagaagaagctcagaggcttcatcgctgagaagagatgcgctcctctaatgctccgtttggcatggcactctgctggaacttacgacgtgagctcgaagaccggtggtcccttcggaaccataaagcacccctccgaactcgctcacggcgctaacaacggtcttg

SEQ ID NO: 191789 - DNA, 257 bp, Glycine max
gtagcacctgagtataacccaatatttttgaagaagcttatcactcttgctatggaccgaaagaacagagacaaggaaatggcatctgtactgctatctgctcttcatatagagatcttctcaacagaggatatagttaatggttttgtcatgcttctggaaagtgctgaagatacagcactggatatattggatgcttcaaatgagctggctctgttcttagctcgggctgtgattgacgagtattggccccactg

SEQ ID NO: 191790 - DNA, 280 bp, Glycine max
gctagctatatgcttaacacatgcaagtcgaacgttgttttcggggagctgggcagaaggaaaagaggctcctagcgtgaaggttgcttgtctcgcccaggaggtgggaacagttgaaaacaaagtggcgaacgggtgcgtaatgcgtgggaatctgccgaacagttcggggccaaatcctgcagcaaagctaaaaagcgctgtttgttgagactgcgtagtattaggtagttgggtcggtaaaggctgaccaagccaatgatgcttagctggtcctttc

SEQ ID NO: 191791 - DNA, 198 bp, Glycine max
cggaattcggcatcgattgcctcaaggactatgttaccaggatgaaggtcggccagaatgacatctactacattactggtgaaagcaagatagctgtcgagaattcccccttccttgaaaagcttaagaagaagggatacgaggttctctacatggttgatgctattgatgagtatgctgttggccaacttaaggaat

SEQ ID NO: 191792 - DNA, 284 bp, Glycine max
  unsure (1)..(284): unsure at all n locations
tggaatcgcataatatttganaagccatttggctttgatgcactttcttcccataggctgacacaatatcttctttcaaactttcaggaaaagcanatatatagaattgatcanctactaggaaggaatcncattgnaaatcttacagtttnaaggttttcaaatctagtttttgagccactttggagtcgtacttanataagataatgtagcaggncatttatcagaggncttggctgtgcatcctgggaagntattcnntggctatgggatnatccgtganc

SEQ ID NO: 191793 - DNA, 279 bp, Glycine max
ctcaacctcagctctcgaacccctctgctcttgctgttatgtttcaccactctcaccgaggctgtatggttaaccatccccagcaagggaaccaagtgcatgtccgaggaaatccagacacacgttgtcgttttagcagattactatgttgtagccgatgatgtccagggtcaccaccttcaaactatttccgccaaggtgacatccccttatggaaataatcttcaccagaatggaaaatgttacccacggtcagtttgcatttacaactaccgagtc

SEQ ID NO: 191794 - DNA, 199 bp, Glycine max
ttggctcgagagagacttccattcccatcaagttcctttgatatggctcattgctccagatgccttctcccatggacagaatatggtggagtttatctccttgaaattcaccggattcttcgtcctggaggattttgggtcttgtctggtccatccatcaactataagcgcaggttgcgtggatggaacacaactcatt

SEQ ID NO: 191795 - DNA, 269 bp, Glycine max
gtaaccatcgtcgtgagcgaagatccataataatacagttacaaattgcaataacacactcattgtggttatcgaaatttgatcgcagcgtcgagaagaatgggaagtttgggagcgattctgaaacatccagatgacttttaccctctgctgaagctgaaaatggcggcgaggaacgccgacgaagcagatcccgacggagccgcactgggcgttctgctacacaatgctccacaaggtttctcgaagtttcgccctcgtcattcagc

SEQ ID NO: 191796 - DNA, 273 bp, Glycine max
ctcgagccggtgttttctcagttcctcacatcatgtaccgccttgcaacctccctcgcctcacgagctagaattgccaggagcagcactcaacagattggaagtagggtcacttggaacaggaattatgcggccaaagacattaagtttggtgtggaggctcgggctctgatgcttaagggtgtcgaagagctcgctgatgccgttaaagtaacaatgggccctaaggggcgtaatgtggttattgagcaaagttttggagcacctaaagtga

SEQ ID NO: 191797 - DNA, 273 bp, Glycine max
catgttgtaccatatactaatatcagccccaatgactctcggaacctttttgcagatcttaacccattccaaataaaaggaatggggaaagcccctgtgcataacaaacctgtggaaaataaacctcctgagcttaaaagtactaaaaacaatactgtttctggtagacccccagtgccactgatgtggaagaatcgtcctgcattcaatgaagaacccaggacaactaatcataaacctaatgattacaacctcccttatgtgtttccaatg

SEQ ID NO: 191798 - DNA, 187 bp, Glycine max
tgcaagtctctgttctgtattctagggtttggattctgagtttcgtttcagtttgtgatcaccatgagagctacgtggaagaagaagcgtatgaggaggttgaaaaggaagcgctgaaagatgaagcacagatcgcagtattgtacttgtttccccagcaactattgctactagtcttgttgtattt

SEQ ID NO: 191799 - DNA, 260 bp, Glycine max
ggtcaatttcatttctacatccctggctctgttccgtcgatgacgatggcgtttagggtgcgaaacactgatctccgctttctcattcttctctctctcttgtccatcacttccgacaaggtcttcttcgaagagcagttcgatgacggatggggaaatcgttcggttaaatcagattggtgaaacgatgaaaacctggctggggcatggaaccacacctctggccaatggaaatggagaacctaacgccaaaggtattc

SEQ ID NO: 191800 - DNA, 284 bp, Glycine max
gattcattgagaaggtgaaggatttcattcatgacattggtgagaagattgaggaagctattgggtttgggaagccaactgctgacgttactgcgattcacattccatcgattaatcttcacaaggcagatcttgttgttgatgtgctcatcaagaacccgaatccggtgccaatccctctgattgacatagattacttggttgacagtgatgaaaggaagctagtttcctggattgataccagatgcgggtaccatcggtgcacatggagagcagactgtcaa

SEQ ID NO: 191801 - DNA, 273 bp, Glycine max
atggcaatgccggaaacaatccctcccactactcccagtgctcaagttgtcggcaacgcctttgtggagcaatattatcacattctgcaccaatccccagaattggtgcacagattttatcaggattcaagtttcttaaccagatcagacagcaatggtgtgatgacaactgtgacaactgtacaagaaatccatgaaaagattatttccctgaaatatgaagattatacagcagaactaaaaatgcagctgctcaggagtcacataagggag

SEQ ID NO: 191802 - DNA, 270 bp, Glycine max
ctgtgttttactatgagattcttaactctcctgatcgtgcatgcagccttgcaaaacaggcttttgatgaggctattgctgaattggatacgttgggagaggaatcatacaaggatagcactttgatcatgcaacttcttcgtgataaccttaccctctggacctctgacatgcaggatgatggtgcagatgaaattaaagaagccgcacccaaaggtgacggggaacaaaattaaacataccatacttctaattagtgattgaacttcc

SEQ ID NO: 191803 - DNA, 268 bp, Glycine max
cggtgtgtgcggctgaggattccgaacgagcgaccttcttcgtgtctcgcaaagtttaagtcatcatggatcaaggacaagactcacatcaacattgtcgtcattggacatgtcgactctgggaagtcaactaccactggtcatttgatctccaagcttggaggtattgacaagcgtgtgattgagaggttcgagaaggaggctgctgagatgaacaagaggtccttcaagtatgcctgggtgctgacaagctcaaggctgacgcgaa

SEQ ID NO: 191804 - DNA, 158 bp, Glycine max
gaggactgtggcataatcctaggagtgtaaaacagagacgcaaaatgaagacgatcttgtcgtctgagaccatgaatattcccgacggcgtgagcatcaaggttcacgctaaggttatcgaggttgaaggcacacgtggaaaacacgtgcgagattcc

SEQ ID NO: 191805 - DNA, 270 bp, Glycine max
ctttctttttctgtgagcctttctttcaggttcttaacttgatcagtgtgcagtgtccaaatcataagggtagttgcaaattgcaatggctaagcatgatgttgagggtggttccttctctgcaaaggactaccatgatcctcctccagcaccgttgattgatgctgaggaactcacacagtggtccttctacagggctttgattgctgagttcattgccacaatgctcttcctttacatcacagtgctcactgtgattggttacaagag

SEQ ID NO: 191806 - DNA, 140 bp, Glycine max
gtgaacggcacttgcacatgggttagtcgatcctaagggacgggggaagcccgtctgatagcgctctgtgcgcgtactccgaaagggaatcgggttaaaattcctgaaccgggacgtggcggctgacggcaacgttaggg

SEQ ID NO: 191807 - DNA, 269 bp, Glycine max
cttggatcccatttccatcaggtcagtgcctatgtacttttttcagaaaggttggtggtgactggtgattgttgaagagaataatggcaacttcaactatggatattcttcatttccaccacactcctttttattgtgaggagaatgtatacttgctttgcaaaaagttgtgcaatgatggaatagcaaatgctgatggatctgatctttttgttgctttcatctccaacgaaaagaaacagatcccctttggaatcaaaagctagcaa

SEQ ID NO: 191808 - DNA, 252 bp, Glycine max
gtaagctgtgcactcagcttcagcatgttgaattgagtggacttgagggagtgacagatgcagggcttcttccactccttgagagttccgaggctggtttggttaaagtcacccttagtggttgcacacacattaccgacaaagtagtttcatccttgggcaatctgcatggttggcctcttgcagaatctaaaccttgatggttgcaaaaatatcagtgatgctagcttgatggccattgctgacaactgt

SEQ ID NO: 191809 - DNA, 196 bp, Glycine max
gttggctcccaaaccgcctagtacgggtctgtttgttggactgaacaagggacatgtcgtcaccaagaaggaattgcccccacgcccctcggatcgtaatgggaaaacaagcaagatggtgcactttgtgaggaacctcataagagaggttcctggctttgcaccctatgaaaagcgtataactgagttgctgaag

SEQ ID NO: 191810 - DNA, 274 bp, Glycine max
ctcttgcttcaattggtaaactcatgtttgctcaattctctgagcttgtcaatgattattacaacaatggtttgccttcaaatctcactgccagcagaaaccccagcttggattatggattcaagggagctgaaattgccatggcatcttattgttctgaacttcaatatttggcgaatccggtgacaagccacgtgcaaagcgcggagcaacacaaccaagatgtgaactctctggggctgatttcatcaaggaagactcatgaggctatgag

SEQ ID NO: 191811 - DNA, 272 bp, Glycine max
ggtcccaagggtttaacctttctggctgtgttaatatgcgtttcagcactgtcactgagtccttctgttgcgggggaagggcaaaataatggccttgttatgaacttctacaaggaatcatgccctcaggctgaagacatcatcacagaacaagtcaagcttctctacaagcgccagaagaacactgctttctcctggctcagggacatcttccatgactgtgctgttcacagattgtgatgcgtgactgttgctggactccagacgaagga

SEQ ID NO: 191812 - DNA, 266 bp, Glycine max
ctcgagccgtcctcaaccttctttcttcttatatatcgaacatggctaagtatcattcaagtaggaaaagctcttccatgactgctatagccttcctgtttatccttctaatcacttatacaggcacaacagatgcacaatccggggtatgttatggaagacttggcaacaacttaccaacccctcaagaagttgtggccctctacaatcaagccaacattcgcaggatgcgaatctacggtccagcccagaagtcctcgaagcat

SEQ ID NO: 191813 - DNA, 270 bp, Glycine max
gattagtgggtcttaagagaccagaaaatcatggtgtcacatactctctaacagaggaatttgtgactgtttatagaatgcactcactcctacctgataacctacagctaagagacatatccgctactccaggacccaacaaatctcctccattagtcaaagaccttcctatgaagaatttgattggactgcaaggagaaaaaacattatctgaactaggagttgcaaggcaacttgtgtcaatgggtcaccagcttgtggggcattaga

SEQ ID NO: 191814 - DNA, 289 bp, Glycine max
cggaattcggctcgagctcgagccgcaactggaaggtattttctgactgatgaattataaggcaacacagatagatagcgggagatcatagaccattatatttctgaggtttgacattatacatctgttttatttcaagcggattcacaccagaaaattagataggattatcttagctactataacatgcaacgttaattcttgataaagtcctccaaggcaacaccatatgcccctgtctcctgtcggtcccatcattatctcgttgccttccccccacaataattca

SEQ ID NO: 191815 - DNA, 94 bp, Glycine max
gtcgaaaaggaatcccaatggctttggggctcttggcgatgatcctcttcttcattgcttcctcttcctctcacctcgttcgcgcttccgatga

SEQ ID NO: 191816 - DNA, 274 bp, Glycine max
ggaggctggagctgcttcaagtcttcaactatctgaatttctgaactcatccattcgttagcgcagtagcaacgaaaactgagtaatggaaagtggagggaactcccttccatcagggtcagatggtgtgaagagaaaggtttcatatttctatgatccagaggttggaaactattattatgggcaaggatcacccaatgaaaccacacaggattcgaatgacacaggctcttgttagcccactatggattgcttcaacacatgcaggttctgc

SEQ ID NO: 191817 - DNA, 263 bp, Glycine max
gcggcagcgacggtaaccctccaacaacaacacttccgctgcgaaaaatgtctctggtggcgaacgaggatttccagcacattctgcgtgtgctgaacaccaacgtggatgggaagcagaagataatgttcgcaatgacctccatcaagggtattggaaggagattcgccaacatcgcttgcaagaaggctgatgttgacatgaacaaaagggctggtgagttgacacttgctgacttcgatagtgtgatgactgtggtggcg

SEQ ID NO: 191818 - DNA, 263 bp, Glycine max
tttgctcgagcggatccctttcttctctcacaccaatttccaggatttgaaacatggcagattcaaacttaggattgaggaaaccagtgttcatcaaggttgatcagcttcgcccggggacaagtgggcacactttaactgtgaaggtagtcaatgctaagatggtgatgcactgaggtcgttctgatggtcctcaatcccggaaaatgcaaattgctgagtgcttggttaggtgatcgaactgggatgatcatattcactgc

SEQ ID NO: 191819 - DNA, 263 bp, Glycine max
gtttctctgcctaaaaggattgaaagatgggtcaagcattcggttgctaccaagtcgatcagtcaaatgtggctatcaaggagcattttcgaaaatttgatgatgtcctagagcctggatgtcactgcctgccttggtgtcttgggtaccagattgctggtagtctgtcgctgcgagtgcagcaacttgatgttcgatgtgagacgaaaaccaaggacaatgtctttgtcaatgtggttgcatctgtgcaatacgagctgtgt

SEQ ID NO: 191820 - DNA, 278 bp, Glycine max
atgaactaattcagactgtgaaactgcgaatggctcattaaatcagttatagtttgtttgatggtatctactactcggataaccgtagtaattctagagctaatacgtgcaacaaaccccgacttctggaagggatgcatttattagataaaaggtcaacacaggctctgcctgttgctttgatgattcatgataactcgtcggatcgcacggcctttgtgccggcgacgcatcattcaaatttctgccctatcaactttcgatggtaggatagtggc

SEQ ID NO: 191821 - DNA, 278 bp, Glycine max
  unsure (1)..(278): unsure at all n locations
aggcattcttctctcgctctctgccttccatcacactcggcatatgatttcccaagatagtagaagatggcagacactgaggatattcaacctcttgtttgtgacaatggaacaggaatggttaaagctggatttactggagctgatgccccacgtactgtgnttcccagcattgtaggttgttctcgtgacactggtgtgatggttggcatggggcaaatagatgcatatgttggtgatgaggcacaatctaagaggggtattttgactctcaagta

SEQ ID NO: 191822 - DNA, 233 bp, Glycine max
gttctcactaactattacttgcacatgacgtacgagtgtgctagagggggaagtgtagccaaagatgaggtttcatgggatgcagggaggggatttgcggttgaaggagtagaggtggcagcaccacaagctggtgaatagcgtttgaagatcgtctaaacctctctttgccagactgattaggagtggtgggaagggattggtgatgctggatgggttgctggtatatttgg

SEQ ID NO: 191823 - DNA, 274 bp, Glycine max
gagaaattcatggctgctccaccggcaagagctcgtgcggattacgattatctcataacacttctcttgattggcgatagtggttgcggaaagagttgccttcttctacgattctcttatggttctttcacaactagtttcatcacaactataggcattgattttaagataagaaccattgagcaggatggaaaacggatcaagctccaaatttgggatactgcaggtcaggagcggttccgaacaattacaaccgcttactatcgtggtgcta

SEQ ID NO: 191824 - DNA, 265 bp, Glycine max
gcgggtaatgtctgttcaagctaccatctctctctctctttcttagtgcctccttgccagaagttaaaatggcccaagaacctttcctattcacatctgaatcagtgaacgaggggcaccctgacaagctctgtgaccagatctccgactctgtgctcgatgcatgcttggagcaggacccagacagcaaggttgcctgtgaaacctgcaccaagaccaacatggtgatggttttcggagagatcacaaccaaggccaacgtgga

SEQ ID NO: 191825 - DNA, 267 bp, Glycine max
ctggttcatgtgtatagacatttgcttatgcatcatggaaattactttacatttgcacaaatatgtgtcaaggaccctttcttgttacttgaatgctttagttttgaattgcaggccatagattactgccattctcaaggcataatgcatagagatgtcaagcctcataatgacatgatagatcatgaattacggaaactccgcttgatagattggggtcttgctgaattttatcatcctggaaaggaatacaatgttcgtgtggct

SEQ ID NO: 191826 - DNA, 152 bp, Glycine max
tgaagttgcttgttttctttgtagctgcagtagttttggtttcatggctatgccatggcgtaggctaccaaagggtctctctccgaatccaaactggctatggtgagcgttcttcggacagtaatatgcgcaagttttaagcttgctgtgga

SEQ ID NO: 191827 - DNA, 281 bp, Glycine max
cccgctcagaaattcatggctgctccaccggcaagacctcgttcggtatttgatttatctcattcccactctcttgactggcgatagtggtcccggaaagagttgccttctcctacgattctcttatggttctttcacaactagtttcatcacaactatacgcattgattttaagataagaaccattgagcaggatggcaaacggatcaagctccaaatctgggatactggcggtcaggagcggttccgaacaattacaaccgcttactatcgtggtgcta

SEQ ID NO: 191828 - DNA, 270 bp, Glycine max
  unsure (1)..(270): unsure at all n locations
cgttgctgacgttctcatagcaggcatggatattaaccgtgggacgtgtataggtcgaaatgcagaatctcccaangttgatccgggagatgacccgattatccacctttcaaatgcatgcctcggggatgtcactaaggataaagaaggtctaccagtagccctgtacgtcaagtttggtaaccaatagcttgtacttggaacgctttcctctgaagcttttccctcgactatctgctgattggtatttgagaaggcaattgagctatc

SEQ ID NO: 191829 - DNA, 164 bp, Glycine max
acgacaatgagaaaagttctgatactgaattgaatgctccacttgacgttgctgatcctgagattgctgatataattgagcatgaaaaagctagacaatggaagggactggaactgataccctccgagaatttcacttctgtctctgtaatgcaagctattggc

SEQ ID NO: 191830 - DNA, 166 bp, Glycine max
  unsure (1)..(166): unsure at all n locations
ggacattgatgggctcgaggatgttccaccgtatgatgatccctccttgaagatagctgtcgctcatcaagccgtaagcattgctattgaacgctctggcagagacttgncactttaacaatcgggtgtctttactgctaaatgtgggacaaggtttagacatggt

SEQ ID NO: 191831 - DNA, 260 bp, Glycine max
cggaacctactgagctcacacccccacttctgcagcttattcaagtcagctttagctacccaaaccgggaggaactcaggctctcaaatgttgatgttggaattgatatggggactcgtgttgcgattgttggggctaatggagctggaaaatctacattgctgaatcttccagctggtgatttggttccttccgagggtgaaattcgaaggagtcagaagttgaggataggaagatattcccaacactttgtggacctt

SEQ ID NO: 191832 - DNA, 271 bp, Glycine max
gcatggcccttatgggctgggccacacacgtgctacaatgacttggactgggaaagcacctttttcctgcgccatcttccagtctccaacgtttcacacaactcagattataatgaagaatacaggaagacaatgaagaaatttgcactggaattggagaaacttgcagagcagcttctggacttgctgtgcgagaatctcgggctggagaaagggtacctgaagaaggtgttctatggatcaaagggtccaaattttgggactaaagtga

SEQ ID NO: 191833 - DNA, 260 bp, Glycine max
agcgacaagagagaaattcatcgtcgcagttatcatgggtaaggttcatggatcacttgcacgtgctggtaaggttagagggcaaaccccgacggagaccaagcaggataagaagaagaagccacgtggccgcgcccacaagaggatgcagtacaatcgccgattcgtcaccgccgtggtgggattcggcaagaagaggggacccaactcgtctgagaagtgaggccgacgcttgaggaatatgttgctactctatttga

SEQ ID NO: 191834 - DNA, 263 bp, Glycine max
  unsure (1)..(263): unsure at all n locations
cangntacttctggaatagatgttgtttacaagattgaagctgaaggaacacaaagtggccatcccaagagcaaggttgtgattgttgacagtggtgaactccctctataattgtactacttgattctcaatcaggtattgttgnaggtgttcccagttttcatttcaattccatctacgagactataaaccttttataagcatgttctaatagatcaatgactagttgtatgtttgtgatacttattagataaagtttttcc

SEQ ID NO: 191835 - DNA, 266 bp, Glycine max
cagccatctctctctctctctgcgtccatgacgttttggggtgttgaggtgaaaagtggagaatctctcaaggttgatccgggagatgacaagattatccacctttcaaatgcatgcctgggggatgtcactaaggataaagaaggtctaccagtagccctgtatgtcaagtttggtaaccaaaagcttgtacttggaacgctttcttctgaagcttttcctcagatatcttatgatttggtatttgagaaggaatttgagctatc

SEQ ID NO: 191836 - DNA, 137 bp, Glycine max
tttcatcacaactataggcattgattttaagataagaaccattgagcaggatggaaaacggatcaagccccaaatttgggatactgcaggtcaggagcggttccgaacaattacaaccgcttactatcgtggtgcta

SEQ ID NO: 191837 - DNA, 262 bp, Glycine max
cacttggcaggctttcatcttccttcaacaagcctttacgtcctctcttcaatgctggctcagtttactacaagtcctctttgcctgctgaagctgcgtacgacaatgagaaaagctgtgatacggaattgaatgctccacttgaggttgttgatcctgagattgctgatataattgagcttgaaaaagctagacaatggaagggactggaactgataccctccgagaatttcacttctgtctctgtaatgcaagctattgg

SEQ ID NO: 191838 - DNA, 252 bp, Glycine max
attacccataccgtggctttgatggcatctgtgatccaactaagaaaaatgcaaaggttgtgaacattgatgggttcgaggatgttccaccgtatgatgagaaagccttgaagaaagctgtcgctcatcaacccgtaagcattgctattgaagcctctggcagagatttgcaactttatcaatcgggtgtatttactggtaaatgtgggacaagtttagaccatggtgtggttgttgttggatatggctctg

SEQ ID NO: 191839 - DNA, 261 bp, Glycine max
cggaacctactgagctcacacccccacttctgcagcttattgaagtcagctttagctacccaaaccgggaggacttcaggctctcaaatgttgatgttggaattgatatggggactcgtgttgcgattgctgggcctaatggagctggaaaatctacattgctgaatcttctagctggtgatttggttccttccgagggtgaaattcgaaggagtcagaagttgaggataggaagatattcccaacactttgtggaccttc

SEQ ID NO: 191840 - DNA, 194 bp, Glycine max
atgacggtctcgtattcttcgatcgcacaactttggtagcatggccatgccatgcgtgaggaaatgtaccctctccgaatgaacactggctatggtgcccgtactccggaggtgaaatgcgcaagttggagccctgctgtggaagcacacaacatctttggctttgagacattcctgaagagtccgtgaagcac

SEQ ID NO: 191841 - DNA, 264 bp, Glycine max
aagaaaactctcaaaaaactattatagcaatggcagaacaaaaccaaaaccaaacaactgaagctggaaggcaccaagaggttggtcacaagagccttctccagagtgatgctctttaccagtatattctggagacaagtgtctacccaagagaacctgaatccatgaaagaactgagagagttgacagcaaaacacccatggaacatcatgacaacctctgcagacgaagggcagttcttgaacatgctccttaagctcatca

SEQ ID NO: 191842 - DNA, 268 bp, Glycine max
cacccatccacaaacgaacacacactttgattgagaatggggcgtgttcgcacaaagacagtgaagaagtcctcgcggcaagtgatcgagaggtactactctcgcatgacgctggactctccacacgaacaagaaggttctggaagaggtggccatcattccctccaagaggctccgcaacaagatcgcgggattctccacccacctcatgaagcggatccagaagggtcccgtacgtggaatctccctcaagctgcaggaggaggag

SEQ ID NO: 191843 - DNA, 230 bp, Glycine max
gcatcagaaatcactttgaaaagattatcaacatcctccaaggtggttgtttcatcgaaggcaacagtgatagtgttcccatcaacaacccgcaccttgacttcattcttgcgagcagcatcagcaattgtatgggcattggcagtcttaattttcacagtgtcaaagaatggatggtgctgaacttccacggtcccaagtttccataatccctgagcaaacaccccggc

SEQ ID NO: 191844 - DNA, 264 bp, Glycine max
ggtgttgttactgctgctcttttctcttttcttttctctttagttctctcttcccctttctttttctttttcttgttcttctgagcttgtttaagcttttcttccattaaaattataatataatgtgtggtattcttgctgttcttggttgttctgatgactctcgagccaaaagggtctgcgtgcttgagctctctcgcagattgaagtaccgtaggccctgactggagtgggctttatcaacatggtagattctttttggca

SEQ ID NO: 191845 - DNA, 262 bp, Glycine max
ctttctggctgtgttaatatgcgtttcagcactgtcactgagtccttctgttgcgggggaagggcaaaataatggccttgttatgaacttctacaaggaatcatgccctcaggctgaagacatcatcacagaacaagtcaagcttctctacaagcgccacaagaacactgctttctcctggctcaggaacatcttccatgactgtgctgttcagagttgtgatgcttcactgttgctggactccacaagaaggagcttgtct

SEQ ID NO: 191846 - DNA, 263 bp, Glycine max
cgttcttcttcttttgttgttctgtgtttgtgtttgtattttctctcacctgaaaatgtcttgctgcggtggtaactgtggttgcggaagctcctgcaagtgcggcaacggctgcggaggctgcaagatgtacccagacttgagctacactgagtcaaccaccaccgagaccttggtcatgggagtggcacctgttaaggctcaatttgagggtgctgaaatgggtgtgcccgctgagaacgatggctgcaaatgtggaccaa

SEQ ID NO: 191847 - DNA, 213 bp, Glycine max
tagcaagagagagcgttcgcagatggtacaatcgtcatggttctctgaggctattccatctgccccttatgatcctctgctttgaggcatgcctttgagaaggctgtggcaaaaaggttgatgactgatgtgccctttttttcatttttaatcattttacactcaggatcaatgtccattgcaactctgataaactctttgtccaaaactggt

SEQ ID NO: 191848 - DNA, 264 bp, Glycine max
ccggttcacaaggtggtggacaagagactacagcactcactgctatcactcaactggttcatcatggaatgatattcgttccaatcggttacacattcggtgccggcatgtttgagatggagaaagtgaaaggtggaagtccatatggtgctggaacttacgccggtgatggctcaagacagccaagtgagcttgagttacaacaagcattccaccaagggaagtacattgctggcatcacaaagaagctcaagcaagctgcat

SEQ ID NO: 191849 - DNA, 258 bp, Glycine max
tgacaagataccgtgtgaggaggatttcaggttacaagctatgaatccctatggacggaccaagcttttcctggaagaaattgcccgagatattcagaaagctgaaccagaatggaagatcatattactgaggtacttcaatccggttggggctcatgaaagtggtaaactcggtgaagatcccaagggcatcccaaataacctcatgccttacattcagcaagtagccgttggaagattgccggaactcaatgtata

SEQ ID NO: 191850 - DNA, 256 bp, Glycine max
gcataccttaggtcttccgaattcgaagttaatttgcaagatggctaaggaaaaggctcagatcatcattctggtggttggtcatgtggaccctgaggaggcaaccaccattaacgagctgaagaagcctgttgtggagaaagaagctccagggcatgccatatgagggcatgcacgtacggcctcggaggggaaccagaaaattatgttaacaaaataatctggaaccctaatgtatcagtgtcatcatcagtgt

SEQ ID NO: 191851 - DNA, 254 bp, Glycine max
cttccaaatggccactgttgcggttgcacagcaaacaccaacaactgtgacagagaatgaaacaacgactgaggttcccaagattgaggaaactaccccagaacagccagccaccgaggctactgccccagaaacagtcaacgaagaagcaaaagaggaagcagcagttgagactaatgaggcaacagaagttacagaggaagggaaggctgagaaaacagaagaagaagaagaagtgaaagaggagactaaag

SEQ ID NO: 191852 - DNA, 256 bp, Glycine max
caggcctaccctactcttatccctttccttcctgcctctctttgcttccctggctctttcagaagatgttgaacaagttgtcgacataagtgccaaccgcattttcccaggtggcacatattacattatgccatcaacttggggcgctgccggtggtggattgaaactaggccggacaggaaactcaaactgcccagttactgttttgcaagcttactcagaaatcttccgtggcacaccagtcaaattcagcata

SEQ ID NO: 191853 - DNA, 255 bp, Glycine max
ggttgcatttaacatgcaggggtatggtagatctctttggttgatgcagggaatgttcaaagccaatggcggatgcggttatgttaaaaaaccagattttctattaaaggttggtcaaaataatgaggtctttgatcctaaagctcatttgcctgtgaagacaaccttgaaggtgactatatatatgggggaaggatggtttcatgatttcaagcatacacactttgataaattctcacccccggacttctatgc

SEQ ID NO: 191854 - DNA, 265 bp, Glycine max
tccgaggctgcttttcgcggctgctaccggtcaccggagattctatccgacatcgttttccgatgacgataaaaactgttaaagtcagcaacgtttccttgggagcaactgagcaagacattaaggagttcttttcattttctggtgatattgaatatgttgaactacggagccatgatgaacgatctcaaattgcttatattaccttcaaggattcacagggagctgagactgcactactgctttcaggggcaacaatagtcga

SEQ ID NO: 191855 - DNA, 250 bp, Glycine max
ggctaccctaacctcgtcttcctctctactaatttcagctatggccgacgaagctgtggttgttccagataccacccagatcgatgtcaagatctttaaccgctggcgcttcgaggatattgaggttactgacatttcactggctgattacattggagttgcggcatccaagcacgccacatatgttcctcacaccgccggaaggtactccgtgaagcggttcaggaaggcgcagtgccccattgttgag

SEQ ID NO: 191856 - DNA, 269 bp, Glycine max
cagagcacagattaatgctactttgaatcactacaaagatgcatttggacaagatatcaacaaggacctgaaggctgatccaaaggacgagttcctgtctttactaagagcaactgtgaagtgcttgatccgtcccgagaagtacttcgagaaggttgttcgcttggcgatcaacaagcgaggaaccgatgaaggagcccttacaagagtggtggccacaagggctgaggttgatttgaaaaacatagcagatgagtatcaaggaggag

SEQ ID NO: 191857 - DNA, 193 bp, Glycine max
caaactgcgaatcgctcattaaatcagttatagtttgtttgatggtatctactactcggataaccgtagtaattctagagctaatatgtgcaacaaaccccgacttctggaagggatgcatttattatataaaaggttaacacaggctctgctgttgctttgatgattcatgataactcgtcggatcgaacgg

SEQ ID NO: 191858 - DNA, 272 bp, Glycine max
gcggcgtgacgtacaacccttccactgtgcagaatctgcgattagtgcctacaagtatgtttcagagctatggcgcaagaagcagtctgatgtcatgcgcttcttgcagcgggtgacgtgctgggagtataggcagcaaccttccattgttcgtttgacaaggtctacccgccctgacaaggctcgtcgcttgggcttcaaggctaagcagggctatgtgatttaccgtgttcgtgttaggaggggtggccgaaaaacacagttcccaggtt

SEQ ID NO: 191859 - DNA, 243 bp, Glycine max
caaacttgcagaaagagctgaatcgatacattcccactgccgcagcatttggaggcatctgtattggtgccctgacagtgatggcgtcatttggtgatccagagattatggctgctcttcaagatgttatgaagaaccctgctaattttgccaagcaccaatcaaatccaaaggtagctcctgtaattgcgaaaatgtagactaaacttggaggtggtccacagtgatacttttagaggcttg

SEQ ID NO: 191860 - DNA, 210 bp, Glycine max
caaagagacagtgtgtgaaaagtgaaacaaaaaacagatcaacaatggcgacacttaaggttcctcagcctcttctccccgttgcagatgattgtgagcagctcccaaaaggcttctcaggttggggaactaacgaggagctgattgtatcgatcttggctcataggaatgctgctcagaggaagcttatcagagaaacttatgcccaga

SEQ ID NO: 191861 - DNA, 269 bp, Glycine max
ctcacccaccctccatacacactctctctgagtcggtcgagttgaatcggtgtgagtcagtgaccgagtcgaaccatgtcggacgaagaacaccatttcgaatccaaggccgatgctggagcctccaagacctatcctcatcaagccggaaccattcgcaaaaacggttacatcgtcatcaagggtcgtccctgcaaggttgttgaagtttctacttccaagactggtaagcacggtcatgccacgtgtcactttgttgggatatattt

SEQ ID NO: 191862 - DNA, 266 bp, Glycine max
caggaagcacaatcctagaattaagaaattcgttgctccatatcacagtgttgtgtcttatttttggttttgttggtgtcatgtgctagaggggaatacccttatagattctacacttggaatgttacatatggagacatttatccacttggtgttaaacaacaggggattttgataaactggcaattcccagggccacaaattgaagctgtgaccaatgacaacttgattatcaatgtttacaacagcttggatgaacttcctct

SEQ ID NO: 191863 - DNA, 263 bp, Glycine max
cacaacttcatcacgttcaaaatctaactgatagaattcatggaaccgagctgcatcatggtgaagactggcatcacaatgagtcggtcaagcactggacttataccatagatggcaaggttacaacttgcaaggagagtattgaatccgttgatgaagagaacaaaacaatcaactacaagctcttcgatggagacatctataatcagtttaaggcctttaagctcatctttcaagcgattgataaggaaaatgactgctat

SEQ ID NO: 191864 - DNA, 243 bp, Glycine max
gaggcctgctcttgctttgcttcctcttctatttgctcttcttgttagctgccactacggaatcaagaaaagatccaggggaatattggaaaatgatcatgaaagatcaggaaatgccagaaggacttcaaggtcttgtttcatttcaatctgaaaataaccctaagactcaagagcagcttggtaaaggttcaaaaaaccattgtgaagagtctctagttacaaatacacaagttaacagtg

SEQ ID NO: 191865 - DNA, 261 bp, Glycine max
ctcgagccgttgagttcgaggagtcgccgccggacgatttcgatccggcgcatccgtacaaggacccggtggcgatgctggagatgagggagcacatcgtgagggagaagtggatccaaatcgagaaggccaagatcattagggagaagctccgatggtgctaccgcatcgaaggcgtcaaccacctccagaagtgccgccacctcgtcaaccagtatctcgagtccacccgcggcatcggttggggcaaggactcgtcat

SEQ ID NO: 191866 - DNA, 219 bp, Glycine max
atcctgccagtagtcatatgcttgtctcaaagattaagccatgcatgtgtaagtatgaactaattcagactgtgaaactgcgaatggctcattaaatcagttatagtttgtttgatggtatcttctactcggataaccgtagtaattctagagctaatacgtgcaacaaaccccgacttctggaagggatgcatttattagataaaaggtcaaaacagg

SEQ ID NO: 191867 - DNA, 270 bp, Glycine max
tgaaaatgaaggtcctagttttcttcgttgctacaattttggtagcatggcaatgccatgagtacgatatgttccctctccgaatgaacactggctatggtgcccgtactccggaggtgaaatgcgcaagtacgaggcttgctgtggaagcacacaacatctttggctttgagaccattcctgaagagtgcgttgaagcaacaaaggaatacatccatggcgaacaatatagatcagactccaaaacagttaaccaacaagctactttta

SEQ ID NO: 191868 - DNA, 268 bp, Glycine max
gcacccccaccgtaagcacagctatcgtcgttgcgcaggcgaaccttgctcaaggtcattgttctcggcgatagcggggttggaaagacctcgttgatgaatcaatacgtgcacaagaagtttagtcagcaatataaggctaccattggggctgattttgtcaccaaagagcttcagattgatgacagacttgtcactctacaaatatgggacactgctgggcaagagagattccagagtctcggggttgcattttacagagtgccga

SEQ ID NO: 191869 - DNA, 267 bp, Glycine max
aagacgttaaagagacggcaacactttgctgtccgccttgaccgagcagagcttcgtcttggccctcgattttgccctaaagtactctcagtcacaacagacaccgtcgtcgtcgtcgtcgtcatcaatggcaccgaagcagaccaaggctgagaagaagatcgcttacgatgcgaactgtgcgacctaatggaggagtacggccagatcctcgttgtgaactccgataacgtgggatcgaacaagctccagaacattcgagggtct

SEQ ID NO: 191870 - DNA, 288 bp, Glycine max
atgatgaccagcattctgctgctgcaaataaacagagggttgcaactgtagtagctcatgaactagcacaccagtggtttggcaaccttgttacaatggagtggtggacacatttgtggctgaatgaggggtttgcaacatgggtgagctatttagccactgatagctgttttcctgagtggaaaatatggtctcaatttcttcatgaatctactgagggtcttaagctggatggacttgcggagtcccacccaattgaggtagagatcaatcatgcttgtgagattg

SEQ ID NO: 191871 - DNA, 279 bp, Glycine max
ggcgttctatatattattgaattgacaatgaggcctgctcttgctttgcttcctcttctatttgctttcttgttagctgccactacggaatcaagaaaagatccaggggaatattggaaaatgatcatgaaagatcatgaaatgccagaaggacttcaaggtcttgtttcatttcaatctgaaaataaccctaagactcaagagcagcttggtaaaggttccaaaaaccattgtgaagagtctctagttacaaatacacaagttaacagtgacttcgaa

SEQ ID NO: 191872 - DNA, 276 bp, Glycine max
taggcgtggttttatcaagaacatgattactggtacctcccaggccgactgtgctgtccttattattgactccaccactggtggttttgaagctggtatttctaaggatggacagacccgtgagcatgctcttcttgctttcaccctaggtgtcaagcagatgatctgttgctgtaacaagatggatgccactacccccaagtactctaaggctaggtatgatgaaatcgtgaaggaagtctcttcttacttgaagaaggttggttacaacccaga

SEQ ID NO: 191873 - DNA, 275 bp, Glycine max
cttatcccctttctccttctaacgagtgaggaaaaatggcgcgtaagaagatcagagagtatgactcaaagaggttgttgaaggagcactttaagagactctctggcaaggagttgccgatcaagtctgcacaaattaccgcatcaactgatttcactgagctacaagagaaggaaccctggctttcatcttctaaattggttgttaaacctgacatgttatttggaaagcgtggcaaaagtggtttggttgccttgaatttggattttgcacaa

SEQ ID NO: 191874 - DNA, 272 bp, Glycine max
cgaggccaagaaactaccccgttgacatctattactcagcttgttcaccatggattgatcactgtccccattggatacacatttggcggtggcatgtttgagttggagaaggtgaaaggtggctccccatatggtgcaggaacttatgctggagatggctcaaggcagcctagtgaattggaattggctcaagctttccatcagggaaagtactttgcgggcattgcaaagaagctcaagggatctcaatgatgtttatcctccatatatct

SEQ ID NO: 191875 - DNA, 275 bp, Glycine max
aaacattattcccattgctatatattatggctagcatgaaggttacatgggtggttgtgatcatgtgcatggccgtggtgggtgcaccgatgatggcgcaagccatgacatgcaatgatgtgacggtgaacatggcacagtgcctatcctacctgatgcagggaggaacaccttcaacactttgctgcagcggagtcaagaacattcttggctctgctgtcaccaccgttgacaaacaaactgtgtgcaactgtctcaaggcggatgctgctagg

SEQ ID NO: 191876 - DNA, 274 bp, Glycine max
gatagatagagagcgcggcataacctaaacctatctttcttctctctctgtgtgtgcgcttcaacggcaaccagaagcagccatggccactgcaaggactgtgaaggatgtttcacctcatgagttcgttaaggcgtactcctctcacctcaagcgatccggcaagatggagctgccagagtggtctgatattgtgaaaactgcaagatttaaggagttggctccttatgatcctgactggtactatgtcagagctgcttccatggcaagaaag

SEQ ID NO: 191877 - DNA, 284 bp, Glycine max
gcaggaactaaatatggctgacttgttggaatggtcaaagcaagataagaaacgaatgcttcatgtcgtctaccgtgttggtgaccttgatcgcaccatcaaattttacacagaatgtttaggaatgaagcttttgaggcaaagagatatcccagaggagaaatatgctaatgcttttcttggatttggccctgaagaatcccattttgttgttgaattaacatataattatggggttacctcgtatgacattggcgatggctttggacattttgcaattgcaa

SEQ ID NO: 191878 - DNA, 282 bp, Glycine max
tgtgagaccattttgttcagccctgaggaaatcagtgccatgattctgactaagatgaaggaaactgcggaagattacttggaaagaaaattaatgatgccgtggtcactgtcctagcttacttcaatgatgctcagaggcaggccaccaaggatgctggtgtcattgctggtctcaatgttgctagaattatcaatgaacccactgctgctgccattgcctatggattggacaagaaaggtggcgagaagaacattctagtctttgatcttggtggtggga

SEQ ID NO: 191879 - DNA, 282 bp, Glycine max
tgcctcttcctcacccctttctccacctaacgagtaatgaaaaatggcgcgtaagaagatcagagagtatgactcaaagacgttgttgaaggagcactttaagagactttctggcaaggagttgccgatcaagtctgcacaaattactgcatcaactgatttcactgagctacaagagaaggaaccctggctttcatcttctaaattggttgtgaaacctgacatgttatttggaaagcgtggcaaaagtggtttggttgccttaaatttggattttgcaca

SEQ ID NO: 191880 - DNA, 279 bp, Glycine max
gttcttcgtcgcaaatccgaagtaggatctctcttgttttttctctaggtttttcgcgatggcgtcgaagcgaattttgaaggagcttaaggatttgcagaaggatcctccaacatcttgcagtgccggtcctgttcatgaagatatgtttcattggcaagctacaattatgggtcctccagacagtccctatgctggaggtgttttcctagtgactattcatttccctccagattatccctttaagccacccaaggttgcattcaggacgaaggtgtt

SEQ ID NO: 191881 - DNA, 278 bp, Glycine max
  unsure (1)..(278): unsure at all n locations
caccattctagatatcagatagatttgcagctctcttaggtttttaaaaaacaccacgcaaacagcaagatggccacttccgacagtaacatgctattcanattatgttccagtttatgtgatgctcccactcggagttgtcaatgttgacaatgtttttgaagacccagatggccttaaagaacagctcttgcagcttcgagctgcgggtgttgacggggttatggttgatgtgtggtgggggatcatagaactgaaggggcctaagcagtatgatt

SEQ ID NO: 191882 - DNA, 278 bp, Glycine max
ctcattctagcacaagggtacctcttgagacagattcaaatgtgtcttccactgtcacttgccactcatgtggagagcaattcaacaaatgggaagctgctgaagctcatcatctctccaagcatgctgttactgaacttgtggaaggtgattcatcaaggaaaatagtggagataatatgcaggaacagctggttgaagtctgagaaccaatgcggtagaattgagagagttttgaaagtgcataacatgcaaaagacactggctaggtttgaggag

SEQ ID NO: 191883 - DNA, 274 bp, Glycine max
ctggctgtgttaatatgcgtttcagcactgtcactgagtccttctgttgcgggggaagggcaaaataatggccttgttatgaacttctacaaggaatcatgccctcaggctgaagacatcatcacagaacaagtcaagcttctctacaagcgccacaagaacactgctttctcctggctcaggaacatcttccatgactgtgctgttcagagttgtgatgcttcactgttgctggactccacaagaaggagcttgtctgagaaggaaacagata

SEQ ID NO: 191884 - DNA, 273 bp, Glycine max
tattatttctgcccccagtaaggatgcccccatgtttgttgttggtgttaacgagcacgagtacaagccagagcttgacattatttccaatgctagctgcacaaccaactgccttgccccgctcgccaaggttatcaatgacaggtttggcattgttgagggtttgatgaccactgttcattccatcactgctacccagaagactgttgatgggccatcagccaaagactggagaggtggaagagctgcttcatttaacatcattcctagcag

SEQ ID NO: 191885 - DNA, 274 bp, Glycine max
caaaccatggcttccaggaaattcgacaaccctcactccggcgacggcgccagtccaggcaaaatcttcatcggagggttagccaaagacaccaccctagagacgttcgtgaagtactttgagaagtacggggagataacggactccgttataatgaaagaccgtcacacgggtcggccaaggggattcggcttcatcacctacgccgatccctccgtcgttgaccaagtcattcaggagaaccacgtcgtcaacggcaagcaggtcgagatta

SEQ ID NO: 191886 - DNA, 252 bp, Glycine max
atcatcagcattcacataggtcaggccgggatccaggttggcaactcctgctgggaactctactgcctggaacatggcatccagcccgatggcatgatgccaagtgactcctccttcggtgtagcccacgacgccttcaacaccttcttcagcgaaaccggatccggcaagcacgtccctcgcgccgtcttcgtcgatctcgagcccaccgtcatcgacgaatccgttgtggcacttaccgtcaactcttcc

SEQ ID NO: 191887 - DNA, 272 bp, Glycine max
gaagcacaaaatgaagtgaaggttaaagagcaagaggaaaaggatgtagttgcacaacagaacatgtatgctcaattgttgcctcttgctttgcctgcaccaccaatgcctggaatgggaggcccaggaggtatgggaggaggctttgctcctccccctccaatgggtggactggggatgcccccaatgcctccttatggcatgcctcccatgggcagcagtttttgacaagtttagcatgaacttggcccctgtgaagagcaatgtaggaa

SEQ ID NO: 191888 - DNA, 272 bp, Glycine max
ggatgtccaggcaatgaaagccgtggtcggagaagaagcactttcatctgaggacctgctgtatttggaatttttggagaagtttgagaggaagtttgttgcccaaggagcatacgatacacgcaatatcttccagtcactagatcttgcatggactttgcttcggattttccctcgcgagcttctccaccgtattcctgcaaagactcttgatcagttctacagccgagatgccagtaactgaggatataataatagcaaggtcttataag

SEQ ID NO: 191889 - DNA, 270 bp, Glycine max
gcttcttgctgcttcactctcagatggctcgtgctgccacctacacagttggagattctgggggttggacctttaacactgttgcctggcccaaaggaaagctctttcgggctggtgacacacttgctttcaattatagccctgggactcacaatgtggtggccgtgaacaaggctggatatgatagctgcaagactccaagaggagccaaagtgtataagtcagggacggatcagatcagacttgccaagggacagaactacttcatct

SEQ ID NO: 191890 - DNA, 284 bp, Glycine max
ggatgtccaggcaatgaaagtcgtggtcggagaagaagcactcacatctgaggacctgctgtatttggaattttcgtgagaagtttgagaggaagtttgttgcccaaggagcatacgatacacgcaatatcttccagtcactagatcttgcatggactttgcttcggattttccctcgcgagcttctccatcgtattcctgcaaagactcttgatcagttctacagccgagatgcaagtaactgaggatataataatagcaaggtcttataagttataccttag

SEQ ID NO: 191891 - DNA, 282 bp, Glycine max
gctgtacctacctccaaagggcaagcacttgctgatgagtatggtatcaagttctttgaaactagtgcaaaaaccaacatgaacgtggaagaggtcttcttttcaatagcaagagatattaagcaaaggcttgcagacacagattcaagagctgagcctcagactatcaagattaaccaacctgaccaggcaaccagtggtggtcaacctgcgcaaaagtcggcttgctgtggttcatgaaaagaatcagtatctgtagaaagaggtgcacaggtttctgca

SEQ ID NO: 191892 - DNA, 278 bp, Glycine max
ccacactccatcaaggcgcacttacaccacctatcactcccctaccaagctcccccctatcacagtggtcaacgaaatttttcgcactgatgccgaacagttcctcaagtatccaccacctaaagtgatgcaggtggataagtctgcatggatgactgatgaagaatttgctagagaaacgattgctggtgttaatccagatgtcattaagattctcgaggagttcccaccacgtagcaagcccgcttctcaagcctacgctgatcatacctctataa

SEQ ID NO: 191893 - DNA, 277 bp, Glycine max
actttctcctattcgttcttcttctttctcttcatcagctattgttgcattggctgtgttactgcttcttacagggacctcttcagctaacctctcaaagaacttctattccaagacatgtcccaacgttttcaacactgtaaaatctgtagttaaatctgctgttgtcagagaacctcgcattggggcatctattgttcgtctcttcttccatgactgctttgttcaaggctgtgatgggtcaatactacttgatgacactccaaccttccagggg

SEQ ID NO: 191894 - DNA, 277 bp, Glycine max
ctgagtttccacactgcataccttatgtcttccgaattcgaagttaatttgcaagatggctaaggaaaaggctcagatcaacattgtggtggttggtcatgtggaccctgaggaggcaaccaccattaacgagctgaagaagcctgttgtggagaaagaagctccagggcatgccatatgagggcatgcacgtacggcctcggaggggaaccagaaaattatgttaacaaaataatctggaaccctaatgtatcagtgtcatcatcagtgtgtagtt

SEQ ID NO: 191895 - DNA, 276 bp, Glycine max
ggatgcttcaagcaccaggtgccacaagttatataggttgcataggaaaggacaaatttggagaggagatgaagaagaaatgtacactagatggtgtaaaggttaactattatgaaatcgacaatacacctacaggaacttgtgctgtttgtgtggttggtggtgaaaggtcccttgttgccaatatatcagctgcaaattgctacaagtctgagcatttgacgagaccggaaaattgggcattagttgaaaaggccaagtattactacatttctg

SEQ ID NO: 191896 - DNA, 271 bp, Glycine max
gtagaggcttatgtttatgacacgagaaacaagcttaatgacaaataccaagagtttgtcgttgattcagagagggaatcatttactgctaaacttcaggaggtagaagactggctatatgaggatggtgaagatgaaactaaaggtgtatacattgccaagctagaagaactcaagaagcaaggtgatccaattgaagagcgttacaaagaatacatggagaggggtacagtaatagatcaacttgtctattgtataaatagttatagag

SEQ ID NO: 191897 - DNA, 271 bp, Glycine max
atcagccttatccagtttagggtttcggttccttaccctacctttgatgtatcgaaaccttaaatttgggattaggtctgagcaatctggttggtagaacctttggtcttagagagtcaagttttatgtctggattagacgatcaaattcctactgccttcgatccttttgctgatgcaaatgctgatgactcgggtgctgggtcaaaggagtatgtgcatattcgcgttcagcagcgaaatggtaggaaaagcctgacaaccgttcaggg

SEQ ID NO: 191898 - DNA, 272 bp, Glycine max
tcttgcttctttcatgtcctcttcaaggctgcagccttggcattttacattctctcggccctctttattgataactttgtcatcattttcgtggtgactgtccttcttgccgcccttgatttttgggtagtcaagaatgtcagtgggcgaattttagttggattgaggtggtggaatgaaattaatgatctgggtgagagtgtttggaaatttgaatgtcttgaccacgagtcattggctcggatgaacaagaaggactcatggcttttctt

SEQ ID NO: 191899 - DNA, 270 bp, Glycine max
ggcgtcgtttcttcaatcgtttctggatccgaagaagaactggttcgccgctcagcacatgaaatccctctccaaacgcctccgcaaatatgggctccgatacgacgatttgtacgatccttactacgatctggatgtgaaggaggcgctgaatcggcttccgaaagaggtggtggacgctcgccacgcgcgtcttcaacgcgccatcgatctttccatgaagcacgagtacctccctgacaatctgcagtcaatgcaaacaccattcag

SEQ ID NO: 191900 - DNA, 269 bp, Glycine max
atcttcttcttaaaagttaaaaggttaagagagagagagaaagatgagtagcgtgttggagcatggtgttgtgggatgttgcaaatcagggccaggctatgctaccccactggaagccatgtctggtccaagagagtctcttatttatgtaactgctgtctacacagggacaggaatagagaagccggactatttggccacagtggacatagatccaaactctccaacttattccaaagtcatccataggcttcgtgttccttatttag

SEQ ID NO: 191901 - DNA, 272 bp, Glycine max
aatcgatgtcttactccattttaaggaacaaaacaagagaacaatagcctgacaaagggtttagccataaaatcgaatccatcattgatttgagatattgataaggtgaatactcatttctcgtcaatgctaggcataatgcgggtatagggacctaaaaaagattatcttttcttcctatcttatgaactttaaggtgtatgaagtgtcatttcctatcttagattttaattttagtaggtagataaagagtccatttaacttaagttgat

SEQ ID NO: 191902 - DNA, 280 bp, Glycine max
aggactacgtagaccctccgccagcccccctcatcgacttggccgagattaagctctggtccttctacagatccctcatcgccgagtttatcgccacactcctcttcctctacgtcaccgtcgccaccgtcattggccacaaaaaacagaccggaccatgtgacggcgttggccttctcggcatcgcatgggccttcggtggcatgatctttgtcctcgtctactgcaccgccggcatttctggtggacacatcaaccctgcggtgacttttggcctgtt

SEQ ID NO: 191903 - DNA, 279 bp, Glycine max
ctcgagccgcacaacaggagacttccgtaagctcatactacctctggttagttcttatcgatatgaaggagatgaggtcaacttgaccctggcaaaaactgaggcaaaattgctgcatgagaagatttcaaacaaggcttataatgatgacgacttcatcaggattttggccacaaggagcagagcacacattaatgctactttgaatcactacaaagatgcatttggacaagatatcaacaaggacctgaaggctgatccaaaggacgagttcctgtc

SEQ ID NO: 191904 - DNA, 278 bp, Glycine max
cgaaaatgaacgacgcagatgtctcaaagcaaatccagcagatggtgcagttcatccgccaggaagctgaggaaaaggccaacgagatctctgtctccgccgaagaggaattcaatatcgagaagctgcagttggtcgaagccgacaagaagaagatcaggcaagaatacgaacgcaaagagcgccaagttgaaattcgcaagaagattgagtactcgatgcagctaaatgcttctcggattaaagttcttcaagctcaagatgacgtgatcagttcc

SEQ ID NO: 191905 - DNA, 271 bp, Glycine max
cgcaatcttcactattttcaccgagcatttgcattccacattgaatatggctccggctacacaatctaatgctgagttattggagtggcctaagaaagataagcgccgcttcctgcatgttgtgtatcgtgttggtgatcttgatcgcaccattaagttttatactgaatgttttgggatgaagcttttgaggaaaagagatattccagaagagaaatatgccaatgcttttcttggatttggccctgaacaatcccattttgttgtggaa

SEQ ID NO: 191906 - DNA, 267 bp, Glycine max
  unsure (1)..(267): unsure at all n locations
agctagctaggttgaaaatagtttggttttgtagtaagtgaggtgaggtgccaaaatggtgaagataactcttggtactttcgatgactcttttggtgttgcctctcttaaggcttatttggcagagttccatgcaactctgatcttagagntcgctggtgttggttcagccatcgcttacaacgagcttacaaaagatgcagccttggatccaacggggctggtggcagtagctgtggcccatgcatttgcactgtttgttggtgt

SEQ ID NO: 191907 - DNA, 269 bp, Glycine max
aagtagcaaagatgtttcctttcgggcaaaacggtcaaaagataaaggggactatggtggttatgcagaagaatgtgttggatatcaacagcatcaccagtgttggagggatcgttgaccaaggcttaggcttcataggcagtgcagtcgatgcacttacttttgcagccaccaaaatctccatccagttgattagtgctaccaaggctgatggtgggaaaggaaaaattggaaagagtacaaatttaagaggaaagataacattacca

SEQ ID NO: 191908 - DNA, 271 bp, Glycine max
attcagaccaaagattatatgactactggtctatgtcaaaggttgacttgccagagaacatgattctgtattggctgtgtaactaaaaccaaagcataaacccatctatgatgttttctcctaaagtagtagaccattttatgttgctggaaaaaaaaaaaaaaaaaaaaaaaaaaaaaaaaaaaaaaaaaaaaaaaaaaaaaaaaaaaaaaaaaaaaaaaaaaaaaagaaaaaaaaaaaaaaaaagggggggggggcccccttttttttt

SEQ ID NO: 191909 - DNA, 272 bp, Glycine max
atgctagtctacgttatcagttatgtatgtttctgtgtgtgttccatatatcttgcaaggcaactgcaagctggcagatcgacatatcttttctttttttcatggtactgcattgtacgtgtttgtttgaaaaaaataatatatgcatgcgtgttgtgttaaaaaaaaaaaaaaaaaaatccaaaaaaaaaaaaaaaaaaaaaaaaaaaaaaaaaaaaaaaaaaaaaaaggggggggcccccctttttgttccccccccccggggttttttt

SEQ ID NO: 191910 - DNA, 251 bp, Glycine max
caaaaaccctaaccccgattcactttctccgactcttacattcggattcgtaaccgaaaatcggatggagagaagtgttgattacagttcagaggagtcatgcacggaggattatcggcgtggaggataccacgcggttcgagtcggcgacgctttcaacaatggccgttacatcgtgcagtccaaactcggtttgggccatttttccaccgtctggctcacatcagacactctcaattcgcattatgtag

SEQ ID NO: 191911 - DNA, 266 bp, Glycine max
aaccacataagcttcaacaaagatggatgtagaaaagttgaagaagatggccagttctgttcgaactggtgggaagggtactatgagaaggaagaagaaagctgtccacaagactactactacagatgacaaaaggcttcaaagcaccctgaagaggataggagtgaatgctatccctgcaattgaagaagtcaacatctttaaggatgaaatagttatccagtttttaaaccccaaagtacaagcatctattgctgccaacactt

SEQ ID NO: 191912 - DNA, 265 bp, Glycine max
tctactcgctgctcgatgggtattgcgcttcaaggcgactcgtagggctaatccgcctcacgtgggtcaccaacggcacgcgcctttggggggccgaggccccctactgctggtcggcaaactgacggcgggcgcacgcgtcgcttctagcccggattctgacttagaggcgttcagtcataatccaacgcacggtagcttcgcgccactggcttttcaaccaagcgcgatgaccaattgtgcgaatcaacggttcctctcgtac

SEQ ID NO: 191913 - DNA, 262 bp, Glycine max
gagcatatgaagttgtttgttttctttgttgctgcagtagttttggtagcatggccatgccatggcgcaggctaccaaaggttccctctccgaatgaaaactggctatggtgagcgttcttcggaggtaaaatgcgcaagttttaggcttgctgtggaagcacacaacatccgagcctcttaaaaccattcctgaagagtgcgttgaaccaacaaaggactacattaatggcgaacattttagatcagactctaaaacagtt

SEQ ID NO: 191914 - DNA, 267 bp, Glycine max
tagaaacagtgtgatgaaaatgaaggtccttgttttcttcgttgctacaattttggtagcatggcaatgccatgcgtacgatatgttccctctccgaatgaacactggctatggtgcccgtactccggaggtgaaatgcgcaagttggaggcttgctgtcgaagcacacaacatctttggctttgagaccattcctgaagagtgcgttgaagcaacaaaggaatacatccatggcgaacaatatagatcagactccaaaacagttaa

SEQ ID NO: 191915 - DNA, 276 bp, Glycine max
ttcggctcgatggacgaccctgccaaggaagctgccaacttcacatcccaagtcattatcatgaaccatcctggccagattggtaatggatacgcaccagtccttgactgccacacttctcacattgctgtgaagttttctgaaatcttgaccaagattgacaggcgatctggtaaggagcttgagaaggagcccaaatttttgaagaatggtgatgctggtatggttaagatggttccaaccaagcccatggtggttgacactttctctgagtat

SEQ ID NO: 191916 - DNA, 260 bp, Glycine max
ggtacccactatacaacatcaaggcatacctccctgtcatcgagtcctttggtttctcgagcacattgagggctgcaacatcaggccaggccttcccacaatgtgtgtttgatcactgggacatgatgtcttctgacccattggaggctggatcacaagctgcacagcttgtcactgacattcgcaagaggaagggcttgaaggaacagatgactcctctctccgagtttgaagacaagctttaaatttgtttcatgaat

SEQ ID NO: 191917 - DNA, 261 bp, Glycine max
ggaggccaagaaactaccccgttgacatctattactcagcttgttcaccatggattgatctttgtccccattggatacacatttggcggtggcatgtttgagttggagaaggtgaaaggtggctccccatatggtgcaggaacttatgctggagatggctcaaggcagcctagtgaattggaattggctcaagctttccatcagggaaagtactttgcgggcattgcaaagaagctcaagggatctcaatgatttttatcc

SEQ ID NO: 191918 - DNA, 263 bp, Glycine max
gtcttcataaacgcctttcttctccgtttccgtttcctcgttcgaattcgctttttgatctgcgaaaatgagagagtgcatctcgatccacattggtcaggctggtatccaggtcggaaatgcttgctgggagctctactgcctcgagcacggcatcgggcctgatgggcaaatgccaagtgacaagacagttggcggtggtgatgatgctttcaatactttcttcagcgagactggtgctggaaagcacgtgccacgtgcag

SEQ ID NO: 191919 - DNA, 267 bp, Glycine max
ctcgagccgcatgttttattacagagatctctaatctagtttggactcaaattaaatacaataaatggaaaataaatcgtttgagacactttatttcaggataacctcaattttatcataagacggatgcagagcatcacaaagctacactcttaacatgacctagtccccggcgacattcaccatccaattcatggttctgtgcgcagaaacaggaaattttatactaatcagctctggattggccagcacgtgaagagaggatga

SEQ ID NO: 191920 - DNA, 264 bp, Glycine max
tggacgttgatagtaggtttctgaacactggcctcctccttgtggccacaatccttgtggtcaagctcatctcagccttcttagtttccaaatccagaaagagggtacccccaattgtgaaggggtggcccataattggaggactcatccgtttcctctaaggtccaatctttatgctccgtgacgagtaccctaagcttggaagtgtcttcactctcaaactcttccacaagaacatcacatcgcacattggccctgaggttt

SEQ ID NO: 191921 - DNA, 267 bp, Glycine max
ctcgagccgcaaccaacaatggcaatggcaacccaagcctctctcttcaccccacccctcaccggtctcaaacccagcgaccgagccaccgcgccatggaaacaatcctccaccctctccttctccacctcgaagcccctcaagttctcgcgaacaatcagagcagcagccaccgaccagaccacagaggcaccggttgggttcaccccaccggaactggacccaaacaccccttccccgatcttcggaggcagcaccggcgggctc

SEQ ID NO: 191922 - DNA, 266 bp, Glycine max
taaattttgatcttccaaatgacattgacgattatgtgcaccggataggaagaacgggacgagctggtaaaatgggattagcaacggccttcttcaacgaaggtaatttgaacttggctaaatcattggctgatttgatgcaagaggcaaatcaagaagtacctgcctggctcagccgatatgcagcaagggctatttacagtggtggcaacagaaataggaagtctgggggatctcgttttggtggccgcgattttaggaaagag

SEQ ID NO: 191923 - DNA, 265 bp, Glycine max
aatctattatggatcataggttacgttgttttgtgacaatacccaaaattccttttctattgctactttctctgatttccgtcttcagttacgttaacgcagccttcgacctcgctactatacccttcaacgatggctattctccgctcttcggagatagcaacgttgttcgctccgaggatggcaacggcgtacaactccgcctcgatcgctacacaggttcgggtttcatttcctccagtatgtaccagtatggattcttcag

SEQ ID NO: 191924 - DNA, 268 bp, Glycine max
ctctctctctctctgattgcttccttttcccttttattttgctctcttctctgcacaacaattccttctcattccagatattccaaccatcgaccgatctcaattctcaaccttaacctctcagaatgtcttacgcttatctcttcaaatacatcatcatcggtgacaccggagttgggaagtcttgtcttctacttcaattcacagacaagcgctttcagcccgtccatgacttgaccatcggtgttgaatttggtgccaggatgat

SEQ ID NO: 191925 - DNA, 257 bp, Glycine max
gttgcatcatagtaatagaatgaaatcctccatcacacgatcgttcagatggatggcgtttgcacgcagtatcatcaatcaacacttaacttctctatcgacattcatcaaccaggaatctctaactgtttcgacgacgatggtcgccccaaacgaaccgggacggtgtggactgcaagtgcacacataataactgcagtgattgggtctggggtgctgtctctggcttgggctatagctcagcttggatggattgc

SEQ ID NO: 191926 - DNA, 262 bp, Glycine max
tttctttgttgctgcagtagttttggtagcatggccatgccatggcgcaggctaccaaaggttccctctccgaatgaaaactggctatggtgagcgttcttcggaggtaaaatgcgcaagttttaggcttgctgtggaagcacacaacatccgagcttttaaaaccattcctgaagagtgcgttgaaccaacaaaggactacattaatggcgaacaatttagatcagactctaaaacagttaaccaacaagctttcttttat

SEQ ID NO: 191927 - DNA, 265 bp, Glycine max
gaaacatcgccatcggaaggcctgaagaggctactcaccccgacacgttgaaggcggggttggctgagttcatctccaccttgatcttcgtgttcgccggttcaggttccggcatcgcctacaacaagctcaccgacaacggcgccgccactcccgccggcctcatctccgcttccatcgcccatgctttcgccctcttcgtcgccgtctccgtcggcgccaacatgtccggcggccacgtcaaccccgccgtcaccttcggcgc

SEQ ID NO: 191928 - DNA, 261 bp, Glycine max
  unsure (1)..(261): unsure at all n locations
ggggtctccaatggcctctgccacattgactcttgtattggcaatcgtgtctctaagcttgccgtctcacatttcagctcataactacttgtactcatcacctccaccacccaagaagcctccancggtgtctcacccacaccctcatcctcaccctccctatgtctaccactctcctccaccacctcctaagaagccatactggtaccattctccaccacctccagtccgtcaccacccttatccccatcatgattccca

SEQ ID NO: 191929 - DNA, 263 bp, Glycine max
aatgcctcgtcatctaattagtgacgtttatagctatggtgttgtcttgctggaactgcttactggcaggaagcctgtggatatgtcacagccaactggactagagaatcttgttacttgggctaggccaatccttagagataaggaccggttggaagagattgctgatccaagacttggataaaagtatccaaaggaagattttgtacgtgtttgcactattgctgcagcctgtgttgctctagaagcaaaccaacgaccca

SEQ ID NO: 191930 - DNA, 265 bp, Glycine max
gacgcttcgcaaatctcaatcgaatctcagaaaaatgagagaaatcatcagcattcacataggtcaggccgggctccaggtcggaaactcctgctgggaactctactgcctcgaacatggcatccagcccgacggcatgatgccttctgactccaccttcggtgtagcccacgacgccttcaacaccttcttcagcgaaaccggatctggcaagcacgtcccccgtgctgtcttcgtcgacctcgaacccaccgtcatcgacgag

SEQ ID NO: 191931 - DNA, 257 bp, Glycine max
ctccgcaccagtttcaccgcacgaatatcttgttgtttggagcgatccgagaaaaactctgtaaacatgttggtttaccaggacctccttacaggtgatgagcttctctctgactccttccgttacaaggaaattgagaatggaatgctgtgggaagttgaggggaagtgggttgttaaaggagcagttgatgtcagacattggtgcaaacccttctgctgagggtggaggagaagatgagggagttgatgatgcag

SEQ ID NO: 191932 - DNA, 260 bp, Glycine max
  unsure (1)..(260): unsure at all n locations
ctctctcaacaacttcaccttcttcctcctcnatcatgtcttacttcaagggcaagtaccatgatgagcttatcgccaatgctgcgtacattggcactcctggaaagggtattcttgctgctgatgagtcaacagggacaattggcaagcgtttggccagcatcagtgtagagaacattgaatccaacaggcgagctcttagggagctgcttttcactgctcctggtgttcttcaatatctcagtggtgtcatcctcttt

SEQ ID NO: 191933 - DNA, 262 bp, Glycine max
gtttgttgtgagctataagctagtttatcgtgaggagaatatgaagttgtttgttttctttgttgctgcagtagttttggtagcatggccatgccatggcgcaggctaccaaaggttccctctccgaatgaaaactggctatggtgagcgttcttcggaggtaaaatgcgcaagttttaggcttgctgtggaagcacacaacatccgagcttttaaaaccattcctgaagagtgcgttgaaccaacaaaggactacattaat

SEQ ID NO: 191934 - DNA, 262 bp, Glycine max
tggtgatgtccctttctgttctcttcactcttggtcttgcgagagaaagccatgccagagacgaagatttttggcatgctgtttggccaaacactcccattccaagttcattgcgagatcttctaaagcctggccctgcaagtgttgaaatcgatgatcaccctatgcaaattgaagaaacacagtacccgaaaaccttcttctataaagaagaccttcatccaggcaaaacaatgaaagtacaattcagcaagcctccctt

SEQ ID NO: 191935 - DNA, 264 bp, Glycine max
ggacactgagttaaggcttggactgcctggaaacggaggcactgaagaagtgctcatcaggaagaggggtttctctgagactgaaactggtcatgaagatgagtctgccaccactgtggatttgatgcttaatctttcttctaaggaggccgcaaccactgctgctgctgctgcagatccaactgataagcacaagactttgcctaaggagcagacccttctgccagcagatcctgctaagcctccagccaagacgcaggtggt

SEQ ID NO: 191936 - DNA, 260 bp, Glycine max
gttggagacttcacaaattgatttttatgaaattaatgaagcctttgcggttgtggctctcgcaaatcagaaacttcttggacttaactcggaaaaagtaaacgtacatggtggagctgttgcactgggtcatcctcttggttgcagtggtgctcgcattctggtgacacttttgggggtactgaagcagaagaatgggaagtacggagttggtggcatttgcaatggaggaggtggtgcatctgcccttgttgttgagc

SEQ ID NO: 191937 - DNA, 266 bp, Glycine max
cagagacgcagccatggggcggagacctgcgaggtgttataggcaaattaagaacaagccataccccaagtcacgtttctgccgtggtgttcctgatcccaagatcaggatttatgatgttggtatgaagaagaagggtgttgatgagtttcctttctgtgtccatctggttagttgggagaaggaaaatgtttcaagtgaggccctggaagctgctcgcattgcttgcaacaagtacatggccaaatttgctggaaaggatgctt

SEQ ID NO: 191938 - DNA, 266 bp, Glycine max
cttcaccgttcgctctttctttctcccctacacaaaacatggctttgcccaatcagcaaaccgtcgattaccccagcttcaagcttgtcatcgtcggcgacggtggcacaggaaagacaaccttcgtgaagaggcatctcactggtgaattcgagaagaaatatgaaccgaccattggtgtggaggttcatccgttggattttttcacgaactgtggaaagattcgcttctattgttgggatactgctgggcaagagaagtttggt

SEQ ID NO: 191939 - DNA, 261 bp, Glycine max
tgggaaggcgagggattgcgctgcgtctcttcctcttctctttcgattcatccctcattcataatcttccaatccaacaacctcagcctcacactcacacatacacacatctgaacgcgtatcgtccctcccatggcttcaaagcgcatcctcaaggagctcaaggacttgcagaaagacccaccaacttcttgcagcgctggtccagtagctgaggacatgttccattggcaagcaacgattatgggtcctgctgatagt

SEQ ID NO: 191940 - DNA, 258 bp, Glycine max
aaaagaaagacccagagaagcctaaagcagaccctcccaaagccgaaaagcccaagaccgagcccgagaaaaagaaggacggtggtggcgagaagcccaaggaagagcccgaaaaaaagaaaggacggtggggagaagcctaagcccgggcccgagaagcccaaggataagccaacacccgcgccgttacctgtgcagccacatatagcggcaccgatggcggtcccagttgggatgctctatgctcctcctccgtgc

SEQ ID NO: 191941 - DNA, 255 bp, Glycine max
ctaaagttagttggaccaggtggatttgtagttactgaagctggttttggtgctgatattggagctgaaaagtttatgaacattaagtgtcgttatagtggtttgacacctcaatgtgcgattattgtggcaactataagagcactaaaaatgcatggtggagggcctgcagttgttgctggaaaacctcttgaccatgcatatttgactgaaaatgttgccctggttgaggctggttgtgtgaatatggcacga

SEQ ID NO: 191942 - DNA, 261 bp, Glycine max
cttcacttcactaatacatcatggcagacgagacccagaacaagtatgagagctctgaggttgaggtccaggatcgtggtgtttttgactttctcggtaagaaaaaggatgaagaagacaagcctcatcctcaggaggaggtcatcgccaccgagtttcaaaaagtcactgtctcagaccaaggagagaacaagcacagcctcttagaaaagcttcaccgatctgacagcagctctagctcttcaagtgaggaggaaggag

SEQ ID NO: 191943 - DNA, 261 bp, Glycine max
ctcctaacaatttctctctgtttccttcttcaccgcatcaatgctcttggacggcgttctcctcggcatgtgcaaccctctcctcgacatctctgccgtcgtcgacgacgctttcttgcaaaaatacggtatcaagttgaacgatgcgattctcgctgaggataagcacaaacctatgtatgaagaattggctaacaatcctaatgtggagtacattgctggaggtgctactcagaattcaatcagggttgctcagtggat

SEQ ID NO: 191944 - DNA, 261 bp, Glycine max
gttgtaacagtggaatgggctatctcagagctattgagaaggccagagattttcaagaaggcaacagaggagctagacagggtgataggtagagagagatgggttgaagagaaggacattgtgaatttgccttatgttaatgccattgtcaaggaagcaatgaggctgcacccagtggcaccaatgttggttccaagactagccagagaggactgcaatcttggagggtatgacatccccaaagggacacaagtgcttgtg

SEQ ID NO: 191945 - DNA, 177 bp, Glycine max
ttttgccatatcgtactctcagtcacaactgacaccgtcgtcgtcgtagtcgtaatcaatggcaccgaagctgaccactgatgagcagaagatcgcttacgatgcgaagtgtgcgacctattggaggagtactgccagatcctcgttgtgaactccgatactgtgggatcgaaccag

SEQ ID NO: 191946 - DNA, 263 bp, Glycine max
tctcgagccgattcggctcgaggtgaggagaatatgaagttgtttgctttctttgttgctggcgtagttttggtagcatggacatgccatggcgcaggctaccaaaggttccctctccgaatgaaaactggctatggtgagcgttcttcggaggtaaaatgcgcaagttttaggcttgctgtggaagcacacaacatccgagcctttaaaaccattcctgaagagtgcgttgaaccaacaaaggactacattaatggcgaaca

SEQ ID NO: 191947 - DNA, 257 bp, Glycine max
caagtaaacactgcaatagcaagagttttcaaatggcagagggaaaaggtagagtttgtgtcacgggaggcactgggttccttggttcatggatcatcaagagactccttgaagatggatatgctgttaataccactattagatctgacccaggacgcaagagagatgttagcttcctcacaaacctacctattgcatcagaaaagctaaaaattttcaatgctgatctcagcgacccagagagttttggtccagcc

SEQ ID NO: 191948 - DNA, 256 bp, Glycine max
caggttcttaacttgatcagtgtgcagtgtccaaatcataagggtagttgcaaattgcaatggctaagcatgatgttgagggtggttccttctctgcaaaggactaccatgatcctcctccagcaccgttgattgatgctgaggaactcacacagtggtccttctacagggctttgattgctgagttcattgccacaatgctcttcctttacatcacagtgctcactgtgattggttacaagagccagagtgatgt

SEQ ID NO: 191949 - DNA, 260 bp, Glycine max
gctcgcagtcacccaagaggcgaatccttaccattgctcgagatgggtgaagaagtgaaggccgtggttccagagtctgttttgaagaagcagaagagagaggaggaatgggcgttggccaagaagcaagacctcgaggctgcgaagaagaagagagccgagagccgcaaactcatctacaacagagctaagcagtacgctaaggagtacgatcaccaggagaaggaattgattcggttgaaacgcgaggccaagctgaa

SEQ ID NO: 191950 - DNA, 261 bp, Glycine max
ggcggacatcatcttaagaggatactctggttggaattcaaggcgggctttggaggttttggatgaaattttccccaaggatgcttatgtgcaaccatcattggtaattgtgtattttggtggcaatgattctattgatcctcacccatctggccttggtcctcatgtaccccttgaagaatatgttgaaaacatgaggaaaattgctaatcatcttaagagcctctcggaccatattcgcattatatttctcacttctcc

SEQ ID NO: 191951 - DNA, 243 bp, Glycine max
  unsure (1)..(243): unsure at all n locations
aggggtgtttccaccaaccggggnacctncaggaggctcacaagcgaacaagttcagttccntgaaaggaactttgaggtagagaacaagcttgaacccgaaaggaaagtccaacttgcaaaagancttggcttgcagccaaggcaagttgctatatggttcncaaaccgaaggcaaggttcaagaccaagcagctagaaaaagatatggcgtgttgaaagctagttatgacagactcaaaag

SEQ ID NO: 191952 - DNA, 262 bp, Glycine max
cttctctcctctgtctttttctctctcttgctatccttttggctagtgccactgctgcaagtgcaactccaagaagcgcagtgccaagccaccatgtttcaacattcaacagaagcctttttccttccacttttctctttggctttggttcttctgcttaccaggcagaaggagcagcaagtgtagatgggagaggaccaagcatatgggacacctacactagacagcatactgaaaagatttgggatcatagcaccggtga

SEQ ID NO: 191953 - DNA, 262 bp, Glycine max
cttcaaacttgacataaatggcaacatcattggcatcatctcccaattgggttccaagcgccccacatgtttggcagcctttgccgccctccttctcctcttcctccgcggtctccgccgccgccgatacaacctccccccaggcccaaagccctggcccatcataggcaacctaaacttaattgggtcccttccacatcggtcgatccacacgcttagcaaaaaatacgggcccatcatgcacgtatggttcgggtcgagc

SEQ ID NO: 191954 - DNA, 266 bp, Glycine max
gatggaggatgcattgggaaagcgaagaattgaaaatcatgtgaagaatgcagcgttcttcatcagtgccggtacgaatgacttcgttcttaattattttgctctaccagtacgaagaaagagcctcagtatcctggcgtaccaacagttcttaatccaacacgtgaaacaatttatacaggatttgttggtagaaggtgctcgaaaaattgcaataactggagtacctccaatgggatgcctaccgttgatgatcaccttgaatt

SEQ ID NO: 191955 - DNA, 294 bp, Glycine max
tgaaggtccttgttttcttcgttgctacaattttagtagcatggcaatgccatgcgtacgatatgttccctctccgaatgaacactggctatggtgcccgtactccggaggtgaaatccgcaagttggaggcttgctgtggaagcacacaacatctttggctttgagaccattcctgaagagtgcgttgaagcaacaaaggaatacatccatggcgaacaatatagatcagactccaaaacagttaaccaacaagcttacttttatgccagagacctcgaagtccatcccaagg

SEQ ID NO: 191956 - DNA, 289 bp, Glycine max
cgaaacggaggcactgaagaagtgctcatcaggaagaggggtttctctgagactgaaactggtcatgaagatgagtctgccaccactgtggatttgatgcttaatctttcttctaaggaggccgcaaccactgctgctgctgctgcagatccaactgataagcacaagactttgcctaaggagaagacccttctgccagcagatcctgctaagcctccagccaagacgcaggtggtgggttggccacctgtgcggtccttccggaagaacatgttggctgtgcaaaaga

SEQ ID NO: 191957 - DNA, 283 bp, Glycine max
cttttcgcctttgtctgcgaatggcgtcgttcgatcaggcaactcccggcgatgtcaaatccggtgacaaaatcttcaggaccaagtgcgctcagtgccacaccgtcgaaaaaggtgccggtcacaagcaaggacccaatctgaatggtttgtttggaaggcaatctggcacaactcccggatattcctactcttcagctaacaagaacatggctgtgacttgggaagaaaagacactatacgattacttgcttaaccccaaaaagtatattccagggacaaa

SEQ ID NO: 191958 - DNA, 279 bp, Glycine max
caaaaaagaagaaggcaaatcaaagttttgaaccttggttcaatatctagagtccctgcaagctcaacacatcagagattatcaaaatgcatcctgcgcagatcgttttgtatggatcaactttatgtgtcatgataacagtgcacttctccatgaagctactcgctgaacatgttttgaactggaagaaaccaaaggagcaaaaggccatagtaattataatccttatggccccattgtacgctgtggactcctatgttggtttgataaatttctttg

SEQ ID NO: 191959 - DNA, 261 bp, Glycine max
accaaacactgaacgtgaatggcataaacatgcacatagccgagaacggtgaaggcccattgatcctcttcatccatggcttccccgacctatggtactcctggcgccaccagatcacagctcttgcctccctaggttaccgctgcgtggcgccggaccttcgtgggtacggcgacactgacgtgccggccaaccccacagcctacaccagcctccacgtcgtcggcgacctcgttgggcttctcgacgcgatcgtcggcg

SEQ ID NO: 191960 - DNA, 268 bp, Glycine max
agaggctctagatggtcccttaagggaaccactgctctcgttactggaggaacgcgtggaattgggcacgctgtggtggaggaactagcggagtttggtgccacagtgtacacttgttcgaggaatgaagaagagctgaatgcatgcttgaaggagtggaaagagaagggattttcggtttctgggttggtttgtgatgcgtcttctccaccccatagagagaacctcattcaataagtggcctctgctttcaacggcaagctcaaca

SEQ ID NO: 191961 - DNA, 274 bp, Glycine max
cacttcactaatacatcatggcagacgagacacagaacaagtatgagagctctgaggttgaggtccaggatcgtggtgtttttgactttctcggtaagaaaaaggatgaagaagacaagcctcatcctcaggaggaggtcatcgccaccgagtttcaaaaagtcactgtctcagaccaaggagagaacaagcacagcctcttagaaaagcttcaccgatctgacagcagctctagctcttcaagtgaggaggaaggagaagatggagagaaaag

SEQ ID NO: 191962 - DNA, 280 bp, Glycine max
aaaagaatagagaagagagtgaggtttggtggtgtggtttagtgtcaaaatggcggcgagtagaagcactttacctctgatgaagtacttgagagtgcgcgtggacgctcttccccgcaacactcccttgaccctcgcttccaacttgttgattcgccgcttctccgaagaggttaggggttgttttctcgacaagtccgaggtcacagatcgcgtcatttcctgcgtcaaaaacttccagaaagtcgatccttctaaggttaaccctaatgctcacttc

SEQ ID NO: 191963 - DNA, 267 bp, Glycine max
gcaagattttgatcataggaggcaccggctacatcggcaaacatatagtggaagcaagcgcaaaggctggaaatcccacttttgctttggtgagggaatccacactctctgacccctccaaggcacaactcatccacaattttgaggctttgggcgttaatttggtccgcggggatctgtacgatcatgagaagttggtgaaagctatcaagcaagtagatgtcgtcatatccacgctgggtcacctgcagcttgccgatcagctca

SEQ ID NO: 191964 - DNA, 268 bp, Glycine max
gcgaggagaaagatggaggggaaggagcaggatgtgtcgttgggagcgaacaagttccccgagagacagccgattgggacggcggcgcagagccaagacgacggcaaggactaccaggagccggcgccggcgccgctggttgacccgacggagtttacgtcatggtcgttttacagagcagggatagcagagtttgtggccacttttctgtttctctacatcaccgtcttaaccgttatgggagtcgccggggctaagtctaagtgta

SEQ ID NO: 191965 - DNA, 276 bp, Glycine max
ctttttctctgccgccactggtttcgatcccacacccacaaacgcatatcctccatcctttgaatgctcttgcgttttcctttcactacctcattcctaactcacacacacacaacgggtgatatcactgtcgactcctgctaggaagaggctcatgagagatttcaagaggctgcaacaagacccgcctgcaggactcagcggggcacctcatgataacaacataatgctgtggaacgctgtcatatttggtcctgatgatactccatgggatgg

SEQ ID NO: 191966 - DNA, 297 bp, Glycine max
gtcggaattcggtcgagtaatgggagtgggaatatgctaagatcatggacgcggtgttgggcacggattacagcatgaagcggtatgtgattttggtaaagaagggtgtttatgttgagaacgtagagatcaagaggaagaagtggaatattatgatggttggagaggggatggattccaccattatctccggtaaccggagtgtcgtcgacggttggaccacattacggtcagctacattcgctgtgagtggcagaggattcatagcaagagacatatcctttcagaacaccgcag

SEQ ID NO: 191967 - DNA, 278 bp, Glycine max
gccacccttgctttccaggctgctatttggagatggatgacaccaatgaaaaagtcacagccctctgcgcatgatgcctttgtcggcaactggaagcctagcaagaatgatactatggagaatcgtcttcctggatttggcactacaatgaacattctctatggggatggtgtttgtggacaaggtgatgtggactcgatgaacaatatcgtttcccattaccagtattatcttgaccttctaggtgttggtcgagaacaggctgggccccatgaaat

SEQ ID NO: 191968 - DNA, 283 bp, Glycine max
aggctcgaggatcgcagcaaaccagagattgaactccgacgatgcctcccgtcgctcctcgatccggcgatgccatattcgccaacgtcgaacgcgtcaatgcggactgtttactttgacgtatggcgcaattgtgcgtcaattgctcacggatctggaagaggttgaggaggttaacgagcagcttgatcaaatgggttacaatattggaatccgattgattgatgagtttttagctaagtctaatgtctcaagatgcaacgatttcagagagactactgat

SEQ ID NO: 191969 - DNA, 279 bp, Glycine max
acttgctatagcagtaagctataactcatttgaggctctgtgagaattgagaaatggctaaagatgttgaggttcaagagcaaggaggagagtactctgccaaagactaccatgaccctcctccagcacctttgttcgacccagaggagctcacacagtggtccttctatagagccctcatcgctgagttcatagcaacccttctcttcctttatgtcactgtgctcaccattattggctacaaaaggcagactgatacaacggtaggtggcaccgact

SEQ ID NO: 191970 - DNA, 278 bp, Glycine max
tctcacacatgtctcgctccgtgcctttggtttcaaccatttttatcttgcttctgcttctggtggccactgagatgatggggccaacaatggtggcagaagcaagaacttgtgagtctcagagccaccgtttcaaggggccatgtttgagtgacaccaactgtggctctgtttgccgaaccgaacgtttcactggaggacactgccgtggcttccgtcgcagatgcttctgcaccaaacattgttaattttaaaaaattaattaagagtgctttgat

SEQ ID NO: 191971 - DNA, 277 bp, Glycine max
attagcgtcaaaatgttgggtgtgttcagcagctccatagtgtcgccgtcggacgagctcgtggccgccggcagccgtactccgtcgccgaagatgacggcggcggcgctgcggaagcggttcgaggagaagaacccctccgccgtgtcggtggatgtcggagagcatgtccagctcgcttatacccaccacaacgagtcgccgtttcagcacagatcctttgctgtcaaggatgaggtgttctgcttgtttgagggagcccttgacaatttgggaa

SEQ ID NO: 191972 - DNA, 286 bp, Glycine max
gcgacaggtcttgttggaaaattccgaccatctattcctcttagtctggaagaacttgacagataaggaatatgggactttaatcgcctaagtcgcccatatattaagcgggaattattgcaggaaaaatttggtgatgcttggacttttgttgcaacaacttttctaaatgaaattgacacgaacttctatgagttcaaggaggattgcaacacagagaaaaaaatagcttccaaactgaaaatttgtgcagaaagttctctactgttggagagtgtagaccaat

SEQ ID NO: 191973 - DNA, 281 bp, Glycine max
catggcgatacatttatacaaaacttctaccccaagcacacgcaatggagccgtagacagtcaagtaaaatccaatccacgaaatcatttgatctatggacagcatcgttgtggtaaaggccgtaatgccagaggaatcattaccgcaggcatagagggggaggtcataagcgtctataccgtaaaattgattttcgacggaatgaaaaaaacatatatggtagaatcgtaaccatagaatatgaccctaatcgaaatgcatacatgtgtctcatacacta

SEQ ID NO: 191974 - DNA, 274 bp, Glycine max
ttgatctctctgctgttgtgttttgttaatctcattcagacaatcacagttatactctctctctctcactttgatcactgatctcatctcaattttcagatatgtcgacatctgataagccagaagaggtggaaaggggtagcaaggatgaaaagcacaaggaagatgatcaagaggaggggaagggtggattcattgagaaggtgaaggatttcattcatgacattggtgagaagattgaggaagctattgggtttgggaagccgagtgccga

SEQ ID NO: 191975 - DNA, 260 bp, Glycine max
gcttcttccgccactcagcacttcgctccctctgtgcttcaccaaccatggccgaaatcgaagctaccgttccagatccctctcaaatcgacgtcaaacttttcaaccgctggagcttcgacgacgttgaggttactgatatgtctctggctgattacattggagtgtccccgtcaaagcatgctacatatgttcctcacactgctggtaggtactcagtgaagaggttcaggaaggcgcagtgccccattgttgagaga

SEQ ID NO: 191976 - DNA, 268 bp, Glycine max
aatcgatgtcttactccattttaaggaacaaaacaagagaacaatagcctgacaaagggtttagccataaaatcgaatccatcattgatttgagatattgataaggtgaatactcatttctcgtcaatgctaggcataatgcgggtatagggacctagaaaagattatcttttcttcctatcttatgaactttaaggtgtatgaagtgtcatttcctatcttagattttaattttagtaggtagataaagagtccatttaacttaagt

SEQ ID NO: 191977 - DNA, 269 bp, Glycine max
gacctaccagttcgagaattccttctccaagcggaactcgcacgtgcgccacgccgtcggattttgggactaccactcgttcatcgccgctgccgcgcttttcgagccgcaagggttcggcaccaccgggaacaagacgatgcagatgatggagattgcggcgttcctcggacacgtcggcagcaagacctcttgtggttatggagtggctaccggaggacctttggcctggggtctttgttacaaccatgaaatgagtcctatgcagt

SEQ ID NO: 191978 - DNA, 277 bp, Glycine max
gacaggtagagtttctacaatggctcctaaagttgataagaagaatgatccaaaggcccaggccttgaagactgctaaggcagttaagtcaggtgctacctttaagaagaaagtaaagaagatccgaacttctgtcactttccacaggccgaagaccttgaagaaggacaggaaccccaagtaccctcgcattagcgccccgccgaggaacaagcttgatcattatcagatcctgaaataccccctcaccactgagtctgccatgaagaagattgag

SEQ ID NO: 191979 - DNA, 277 bp, Glycine max
atactcataaatcacatagctagttgtttaaagtaagagagaagaaagaagcaaatggcaaactttccagttgttgacatggggaagcttaacaccgaagagagacctgcagccatggagattataaaagatgcctgtgagaactggggtttctttgagttggtgaaccatgggatatccattgagcttatggacacagtggagaagctcacaaaagagcattacaagaagactatggagcaaaggttcaaagaaatggtgaccagcaaaggtcttg

SEQ ID NO: 191980 - DNA, 258 bp, Glycine max
  unsure (1)..(258): unsure at all n locations
gtgccaaaggacgaattgagaacaggatagaacagaacaaagatgtgacaagccanaaatcagaaaaacttgaagaggagaaagaatctgtgcttgctcagatggctgaactcaagaaaattttatatgcgaagttcaatgactcgatcaatcttgaggaggattagtaacttcttgttgatagatttctagttgttgttttcttgttaatatgacctaatggacctttggcatttttgagtcactgcctattttctt

SEQ ID NO: 191981 - DNA, 259 bp, Glycine max
agatgatgctggcgggggtctagttttctagcacccaaagggtgctatggtcagacacataattgaagatttctggaaaaaaattcacatgaaacgtagctatgatctactgtacacaccgcatgtggcaaaacctgatctttggaagatcagtggtcatttggatttctacaaagagaatatgcatgatcagatgagcgttgaggatgagctttatcagcttcggccaatgaattgtccttatcatattttggtgtac

SEQ ID NO: 191982 - DNA, 285 bp, Glycine max
caaaatgtaaggatatatacctacaaagaactaaaagttgcctctgacaatttcagtccagccaataaaattggggagggtggatttggttcagtttataagggattgctaaaagacgggaaagtagctgccataaaagtactttcagcagaatcaagtcaaggggtaaaggaatttgtgacagagattaatatgatctcagaaatagagcatgaaaatttggttcagctatatggttgttgtgtggaagggaatcaacggattttggtctacaattatcttgag

SEQ ID NO: 191983 - DNA, 284 bp, Glycine max
ataacctaaacctatctttcttctctctctgtgtgtgcgcttcaacggcaaccagaagcagccatggccactgcaaggactgtgaaggatgtttcacctcatgagttcgttaaggcgtactcctctcacctcaagcgatccggcaagatggagctgccagagtggactgatattgtgaaaactgcaagatttaaggagttggctccttatgatcctgactggtactatgtcagagctgcttccatggcaagaaagatctacttgagaggaggacttggtgttgg

SEQ ID NO: 191984 - DNA, 282 bp, Glycine max
gcaagaatggcacttcgttgcttggtgatgtccctttctgttctcttcactcttggtcttgcgagagaaagccatgccagagacgaagatttttggcatgctgtttggccaaacactcccattccaagttcattgcgagatcttctaaagcctggccctgcaagtgttgaaatcgatgatcaccctatgcaaattgaagaaacacagtacccgaaaaccttcttctataaagaagaccttcatccaggcaaaataatgaaagtacaattcagcaagcctccc

SEQ ID NO: 191985 - DNA, 280 bp, Glycine max
tcgaaaaacgacctaaattgggtagtcatgcggtagatgtaaaagggaaagacaagatgtcaaaaggcagtgatgctgtggagtcagcaaaacctgatgagatgaaattacttaatttggctgaaaacgataaagtgtttaatattggtaagagcagcaagaatgaaaataaattttatgcacacagaatggtgaggactggtcttcaaaaagaaggatcaaaagtaatttttggtgttcctaaaccggggaagaaaaggaaatttatggaagtaagcaa

SEQ ID NO: 191986 - DNA, 265 bp, Glycine max
aaaacaatgggttccgataatcaccagaacttggagttcttgaaggagatcggtttgggctcttccaacattggctcttacattaatggccagtggaaagccactggttcttctgtcacttctgttaatccttctaacaatcagagtatagctcaagtgaccgaagcaactttgcaagattttgaggaggggttgcgagcttgcagtgaagcagctaagacatggatgactataccggcaccgaagagaggtgagattgtgagac

SEQ ID NO: 191987 - DNA, 290 bp, Glycine max
ctgatcgctcatagagagttcgacgcggcggttgcagaagaagattgcaagatgaagttcaacatcgcgagtcccaccactggatgccagaagaagctcgagatcgacgacgatcagaaactacgagcattttgggacaagaggatctcacaggaggtcagcggagatgcacttggtgaggaatttaagggctatgtcttcaaaattactggaggttgtgacaaacaagggatcccgatgaaacagggagtgcttactcctggtcgtgttcgacttttgcttcacagggg

SEQ ID NO: 191988 - DNA, 282 bp, Glycine max
gggagcttactaaaagctcttggcacacaggttgcagagcccttaagagcaatggtgatgggagctccattggaggatgcccggcatcttgctcaacgttatgacagaatgcggcaggaagccgaagcccaggctattgaagtttccaaacgccaggcaaaagtaagagaaacaccaggcaatgctgagaatgctatgaagctggaagcagctgaaacaaagctgcaagacctgaagactaacatggcaatattgggaaaagaagcagctgccgcaatggct

SEQ ID NO: 191989 - DNA, 277 bp, Glycine max
ggccattatgctagctatttaataatggcaattgagaagcatgaggatgttgagagtggatatttgcacgagaccttcattcaaccagaggatgctgctgatgcttgtaaagagaatggatcagataagagtgtgataaatggatccattggaatggatttgcttagcacacttgctgctgtttgtgggtctttcacatttggaacttgtgtgggctattcagcacccactccagcggctatcagggcagatcttaatctcactcttgctgcagttt

SEQ ID NO: 191990 - DNA, 280 bp, Glycine max
cggatcttcacaatccaagcctgatggggctgtaaaaaaaatccggaaacctaagccttggaagcatcctcaacccataacaaagactcagctcacacaattacgtgatgagttttgggacacagctcctcactacggtggccggaaagagatttgggatgctcttcgagccgctgccgaggctgatctaactttagcacaagcaattgtggatagtgccggggtcattgtccagagttctgatttgacagtatgctatgatgaaagaggagcaaagtat

SEQ ID NO: 191991 - DNA, 278 bp, Glycine max
cgcgagggaaagatgaaaaggactttgaaaagagagtggtgctcattgatatttaagattgatacaaggcttttttgttggttggagatgcatgattgtggtgtgctttgttttcatttcatcatatgacagccttgtgggtttctttggtgtttcttgatgcatacttaatttactttattattgtgtatttatctcttccatttacaaaaaaaaaagtttgtgtaggtttccttctttgaagtaaaaagaaattaaatatgtactgaaaatggaat

SEQ ID NO: 191992 - DNA, 276 bp, Glycine max
atccctgtaaccgcgttcgacgatttagggtttttttcggagacaatggcggatgaatcggagcacacggcggcgccggcgagcggtgaatcgctgcttgacaagattgccgagaagattcacggccaccacgactcatcctcttcctccgattccgattcggagaaaaaggaaacttcgtcaattaaggaaaaggttttccgcctctttggaagggagaagccagttcactccgtcctcggcggtggaaaacctgctgatgtgctcttgtggagg

SEQ ID NO: 191993 - DNA, 273 bp, Glycine max
ggctcgagctaaggcttcttctgctatggccacttttccttgttccagggtgaaaagtgggctgtgcgtgtggccagatgtgagacaactttgctttagaaaaggcatgctatatggatttatgcggttgttttctacaccgttgaaaacgatccgtggagctagccgctcgctgagagtgactcaattttgcagtgttgccaatatgtcttcctcattgcagattgaattggtaccttgcctgaaggacaattatgcttatctgttacatga

SEQ ID NO: 191994 - DNA, 281 bp, Glycine max
gttccatctcttgcttcttgcttctattacttgcttctttcttcaccatgtcacttgctgggaaaatcaccactgaaattggggttcatgcaaccgctgcaaagtggttcaacctctttgcaacacaacttcatcatgttcaaaaccttactgatagagtacatggaaccaagctgcatcaaggtgaagactggcatcacaacgagacagtcaaacactggacttataccatagatggtaaggctacaacatgtctggagagtattgaatccattgatgaa

SEQ ID NO: 191995 - DNA, 285 bp, Glycine max
cgagaagaaccgtaaagagatctgcaaatacctcttccaagagggagtttgctttgcgaagaaggacttcaatctggcgaacacccggagattgatgtgccgaatctgcaggtgataaagctgatgcagagcttcaaatccagagagtacgtgagggaaacatttgcgtggatgcactattactggttcctcaccaacgatggaattgagttccttaggacttacctcaaccttccatccgaaattgtccctgccactctcaagaagcaggccaagcccgccgga

SEQ ID NO: 191996 - DNA, 289 bp, Glycine max
cttctcgaagacgagcttcaacttctctgcgaatatgtaaaagagatccttattgaggagtccaatgtgcagcctgtcaatagtccagtgactgtttgtggtgatattcatggtcaattccatgatctaatgaaacttttccagactgggggtcatgtgcctgaaacaaattatatttttatgggagactttgttgatcgaggttacaatagtcttgaagttttcaccatccttttacttctaaaagctagatacccagctaatattacccttttacgtggaaatcatg

SEQ ID NO: 191997 - DNA, 285 bp, Glycine max
aaagccctctcttatttccagacgcggcggcttcttcttccgtttttgtctatcggcgtgaacaatggcgacttacgctgcgatgaagcccacaaagcccggcttggaggagccccaggagcagatccacaagataaggatcaccctttcctccaagcacgtcaaaaacctcgagaaggtttgtgcggacttggttcgcggtgcaaaggacaagcgcctcagggttaagggacctgtcaggatgcccactaaggttcttctcatcactaccaggaagtccccttg

SEQ ID NO: 191998 - DNA, 277 bp, Glycine max
atatggctaacttgttggaatggtcaaagcaagataagaaacgaatgcttcatgtcgtctaccgtgttggtgaccttgatcgcaccatcaaattttacacagaatgtttaggaatgaagcttttgaggcaaagagatatcccagaggagaaatatgctaatgcttttcatggatttggccctgaagaatcccattttgttgttgaattaacatataattatggggttacctcgtatgacattggcgatggctttggacattttgcaattgcaactca

SEQ ID NO: 191999 - DNA, 275 bp, Glycine max
ctctttgctcttgatttcttcccttgtattggcttctcaaatccatgtttcctctgggaaactagtccctggactatcatggaattactatttgttgacatgtcccaagcttgagaggattataaggaagcatcttgaggatgtcttcgagaaggacagtggagtagctcctggcatacttcgactcttcttccatgactgctttcctaatggatgcgatgcgtctatattgttgaatggagacggtgacgagaagcaacaccgtgctaactttg

SEQ ID NO: 192000 - DNA, 170 bp, Glycine max
tcaaaaactggtggaatgctctcgaaaccaattcacttgagtgagacagagggacatggaggtttgtgtatagagagacattcataataaaatattatggcctcgtttgatttaatatatttaaggacataatagaaaaagacttggccgttgtttttggtgttaattgt

SEQ ID NO: 192001 - DNA, 272 bp, Glycine max
aggggattttcccttgaagaactcaaggcagcagggattcccaaaaagcttgcaccaacaattggtattgctgttgatcatcgccgcaagaaccgttctttggaaagtctgcaagctaatgtgcagaggctgaaaacatacaaggccaaattggttgtgttcccaagacgggcacagaaggttaaggctggtgattctactcccgaggagcttgcaaatgcaacgcaagtccagggttctttcttgcctattgtgagggagaagccaactgt

SEQ ID NO: 192002 - DNA, 277 bp, Glycine max
cgtgatccatctccttgtttcttgctttctttcttcaccatgtcacttgctgggaaaatcaccactgaaatcggggttcatgcaaccgctacaaagtggttcaacctcttcgcaacacaactccatcatgttcaaaacctcactgatagagtgcatggaaccaagctgcatcaaggtgaagactggcatcacaacgagacagtcaagcactggacttataccatagatggtaaggttacaacatgtctggagagtattgaatccattgatgaacaga

SEQ ID NO: 192003 - DNA, 281 bp, Glycine max
acgagagcgtcgtagtcgcaaccctaatcagaagaagcgcagttcaagcgagtgacagccaccagccatgggtcgtatgcacagccgcggtaagggtatatcctcttctgctttgccctacaaaaggacacctcctagctggctcaagatctcttcgcaagatgtcgaagaaaatatctgcaagtttgcgaagaaaggtttgaccccgtctcagattggtgtcattctcagagattctcacggtattgctcaggtcaatagcgtcactggcagcaaaatcc

SEQ ID NO: 192004 - DNA, 283 bp, Glycine max
gaaacacagctcttctttgatatgctgatgatggtgttggtcactggaaaagagagaagcaagaaagaatgggctaagttgatttcctctgctggttataacaactacaagataactccagtctttggcttaaggtctctcattgagatctatccatagtaagttaatgagatgtgccagcactctatcattcatatatgtaagggctataatttttctgtttcgattcatgagtgaatggtgaataagtaacaatagcaatagactgaactctcttcatcat

SEQ ID NO: 192005 - DNA, 278 bp, Glycine max
caccacttctcatacccttttattcattccattcgtctctagggaattcttttctttgccgagaaaatgagagagtgcatttcgatccacataggccaggccgatatccaggttggaaacgcctgctgggaactctattgccttgaacacggcattcagcccgatggacagatgccgagtgacaagaccgttggcggaggagacgacgccttcaacacattgttcagcgagaccggcgccggaaagcacgtgccccgcgccgtcttcgtggatcttga

SEQ ID NO: 192006 - DNA, 269 bp, Glycine max
caactctactggaagaggaacaagaaattgaggttccagtttacaaagaaccagcaggagaaaattccaagatggaaactgatgaagctcctgctgatgctgctgctgctgctgcaactcctagcaccaatgacaatgatgttagcatgcaagatgctaataccaaggcaactgctaatgcccctggagccgaaaatggtacccctgaggcaggagataagcctgtgcagatggataacgataccaaggttgaggctccaaagaagaaa

SEQ ID NO: 192007 - DNA, 270 bp, Glycine max
cggacactggaagcatcacgatgtcaccgttaaggacgagaagacccttctcttcggtgacaagccagtcactgtttttggacacaggaaccctgaagagatcccatgggggtcaactggagctgatatcattgttgagtccaccggagttttcaccgataaggacaaggccgccgcacatttgaagggtggtgcgaagaaggttattatttctgcccccagtaaggatgcccccatgtttgttgttggtgttaacgagcacgagtacaa

SEQ ID NO: 192008 - DNA, 277 bp, Glycine max
ggcggcttgactcgagacatctgttggtatgtcaatggcaaagaaacccgtgaaatactatgtggtggacgcgtttactgagtcagcattcaaggggaaccctgcatctgtgtgtttcttagaggaagagagagatgaggagtggctgcaagcagtagccgctgaattcaatatctctgagacttgttacttatcacgcatctcccactcgctccatggaatctctaatccccgttttcgtctcagatggtttactcctgttgctgaggttaaactt

SEQ ID NO: 192009 - DNA, 280 bp, Glycine max
gagaaagatggaggggaaggagcaggatgtgtcgttgggagcgaacaagttccccgagagacagccgattgggacggcggcgcagagccaagacgacggcaaggactaccaggagccggcgccggcgccgctggttgacccgacggagtttacgtcatggtcgttttacagagcagggatagcagagtttgtggccacttttctgtttctctacatcaccgtcttaaccgttatgggagtcgccggggctaagtctaagtgtagtaccgttgggattcaa

SEQ ID NO: 192010 - DNA, 287 bp, Glycine max
cgcttcactctacgcagatcgcagcaaaccagagattgaactccgacgatgcctcccgtcgctcctcgatccggcgatgccatattcgccaacgtcgaacgcgtcaatgcggactgtttactttgacgtatggcgcaattgtgcgtcaattgctcacggatctggaagaggttgaggaggttaacgagcagcttgatcaaatgggttacaatattggaatccgattgattgatgagtttttagctaagtctaatgtctcaagatgcaacgatttcagagagactact

SEQ ID NO: 192011 - DNA, 279 bp, Glycine max
tgcctacaagtatgtttcggagctatggcgcaagaagcagtctgatgttatgagattcttgcagcgggtgaggtgctgggagtatcgccagcaaccttctattgtccgtttgacaaggtctactcgcccagataaggctcgtcgcttgggtttcaaggctaagcagggttacgtgatttaccgtgttcgcgtacgaaggggtggccgtaagagaccagtaccaaagggtattgtttatggtaagcccaccatccaaggtgttactcaactgaaatttca

SEQ ID NO: 192012 - DNA, 273 bp, Glycine max
ctttgccaaggcaacagataataactcaagacttcaattaacaaccaccaccaaaggtgtgatatggttggaccaagtgtctgctatgccactggacacatataagggacatggtttccgaactgaccttgttgaaatgctgacagctttgaaaccaagatttatcagatttccgggcggttgttttgttgaaggagaatggttaagaaatgcatttcgatggaaaacatccattggaccatgggaggagagacctgggcactttggtgatgt

SEQ ID NO: 192013 - DNA, 273 bp, Glycine max
cagagctcagcgataagcagaaagtggagatcgcgaaatggttcctcctcaactctcctcccggagaaatccaatacgttgccaaagatgtgaaatcgattctcaacaacgacgatttgtacaaggaagccgcttccgaggcttttccctattacaacaaatcgcacttgatttccatcccaatgcccaaccgaagcggagacgtactggttacttcgttcggtgagcttgagggtaatgcatttcttgaacctaggactgcgcaagttgcaa

SEQ ID NO: 192014 - DNA, 269 bp, Glycine max
ctcgagccgttcttcttcttgttcttgttctatctgtgacgagcatcatggcctcgagagacgtgctattgttggctatgtgtgtgcttccggccatggttgtggccattcgcccagcaaagaaccctttttgcgtgaagggtcgcgtctactgtgacccttgccgtgctggttttgagacctcagcaaccacctacattgccggtgctgagattatgttgcaatgcaagagcagggttagcaacgaggttgtgtacaccaagaagggg

SEQ ID NO: 192015 - DNA, 265 bp, Glycine max
  unsure (1)..(265): unsure at all n locations
tctgcttcttcactttctctcgtttcaatcgaaaaaaatcatgggcagaaaattcttcgtcggtggcaactggaaatgcaatgggaccactgaggaggtgaagaagattgttactactttaaatgaagctaaagtccctggagaagatgttgtagaagttgttgtgagccctccttntgtgttccttccttttgtaaaaagtttgctgcgccctgatttccatgtctcggcccaaaattgttgggttcgcaaaggtggtgcttat

SEQ ID NO: 192016 - DNA, 268 bp, Glycine max
actcgagccgaatcggctcgaggcccaatttccattgaacagaaaacgaccacctcatgggaccccaatggaaaaacttatcacagatactcaacagtcgtgactaacaaatctaacaagagtctcaattctctcaatctttcaatatccaagctttatggtccaatctggggtgtcacaaagtcaggtgattcatacacattcccatcatggctcagctcattatcagctggcaaaagccttgaatttgtctacatccattctgctt

SEQ ID NO: 192017 - DNA, 283 bp, Glycine max
catgaggctattgctgaattggatacattgggagaggagtcatacaaggatagcactttgatcatgcaactgctacgtgataacctcaccctctggacctctgacatgcaggacgatggtgcagatgaaattaaagaagccgcacccaaaggtgacggggaacaaaattaaacataccatactctctgcttattagtcattgaacttcccttctgtaatgttttcaaagggagaaggtgttgaatgctaatctcaatgttactgagattttgggcattcgtgt

SEQ ID NO: 192018 - DNA, 276 bp, Glycine max
gaactgttgacgttattgcatccagactgtatttttactagtcgtatagctatgagcttacaggagatcttgctgaaattcggggcaacctccttgcattgcaccgatttgcgactctccgccatgatgagctgggacaggaaacacttcttaatttgttacttcgaaactacgatcactacaacctatatgatcaggctgagaagttgaggtccaaggctcctcgatttgaagcacattcaaaccagcagttctgtcgttatctcttctaccttg

SEQ ID NO: 192019 - DNA, 272 bp, Glycine max
cacagttaaagatgccaggggaaataatgttaatctcgccgattacaaaggaaaggtccttctcattgtcaatgttgcctcacaatgcggcttgactaattcaaactacacagagcttaaccaattgtatgagaaatacaaagggaaaggacttgaaattctggcattcccatgcaatcagtttggggctcaggagccaggaactaatgaagagattgtggagtttgcctgtactcgcttcaaagctgagtttcccattttcgacaaggtgg

SEQ ID NO: 192020 - DNA, 271 bp, Glycine max
atacgcttgatccatatgggcctcctcgaccacttgtgggacgacaccgtcgccggcccaaggccggaaaacggtctcggcaagctccgaaaacaccacaccttcactttccgacctagctccggcaaggaaacggagggcgggagcgtgacgatcgtacggagacgaatcgtcggaggaagcgacgagagtgacgcgtagtatcatgatcgtgaaaccgcccgggtaccagagtggatcgcctccggtttctcccgccggttctactact

SEQ ID NO: 192021 - DNA, 264 bp, Glycine max
gcttgagatcaggaattaatttcagaggttcagagaatggcaacggattcttctaatggtaatggacatcaccaaacaacaacaaagcaacctcctttgccgtctcccctgcgcttttccaaattttttcagtccaacatgagaatcttggttactggaggagctggattcattgggtctcacttagttgacagattgatggaaaatgaaaaaaatgaggtaattgttgctgacaactacttcactggatccaaggacaacctc

SEQ ID NO: 192022 - DNA, 270 bp, Glycine max
ggaagttggtgtgtgtcaccggtgctgccggttatattgcttcatggattgtcaagttcctacttgaacgtggttacactgtcagggccactgttcgaaacccaaatgatcacacgaaggtagaacatttgctaaaacttgaaggtgcaaaggagagactgcacctttttaaggcagatcttttgggtgaaaattcttttgactccattgttgagggctgtgatggcgtctttcatactgcttctccttttattatcaacgtcaaagacc

SEQ ID NO: 192023 - DNA, 245 bp, Glycine max
caaatgttcaggtgcctatctcgaagttgcggtgatggcgctgtggcggctgtggacgtcacaatcgagcctccttcttcagaagcaggtcaaagatctttgcaaaaaccccgtcgatggcttttctgccggtttggtcgacgaaaccaacatttttgaatggagtgtaactataattggacctcccgatactctttatgaggggggatttttcaatgccattatgagctttccacacaacatac

SEQ ID NO: 192024 - DNA, 264 bp, Glycine max
cgataccatgcggaagaagctcgatacccgtttccccgctgctcggataaagaagataatgcaagcagatgaggatgtcggaaagatagcgttggcagttcctgttttagtttctaaagctctggagttatttttgcaagatctttgtgaccgcacttatgaagtaacccttcagagaggagcaaagaccatgaattcattgcatttgaaacattgtgtacaaagttatagtgtttttgactttctaagagacattgtcagcag

SEQ ID NO: 192025 - DNA, 262 bp, Glycine max
cttttctcttttcttttctctttagttctctcttcccctttctttttctttttcttcttcttctgagcttatttaagcttttcttccattaacatattatcatcatgtgtggtattcttgctgttcttggttgttctgatgactctcgagccaaaagggtccgcgtgcttgagctctctcgcagattgaagcaccgtggccctgactggagtgggctccattctaaaccggggaagtaaaggaaatttatcgaagtaagcaa

SEQ ID NO: 192026 - DNA, 266 bp, Glycine max
agagccttcagacttaggtttgagtagagacagtggcgttggtccttctaaaattcctaattcagggactcctaaccaactagaaaatttgccagccttgtctggtactactctgtacaaagggactcttggaatgaatacagttggtgatgggacaagattgaatgtcaatgttgtaccatatactaataacagccccaatgactctcggaacctttttgcagatcttaacccattccagataaaaggaatggggaaggcactgt

SEQ ID NO: 192027 - DNA, 253 bp, Glycine max
gtgaatttcatcaccttggtactatttcatttatcaccgttttgcagctttgaatgggggatctaacagtgaatttggtggttttgatttttcctgtttcagctatggttggtacttcacatttgttcaaggggttgtgtacctgttctgattaactccaaggcttcacaagcaagccaatggtgaatccatggaaacttatgtgaaactctctgctgtgcttatgggttctcatggcctaacaaaggggtca

SEQ ID NO: 192028 - DNA, 274 bp, Glycine max
cggctcgaggcacgctctgcttccagcgagtgttctttcttcgtttcaacaccttaatttgcacacgctgcttcttccgcttgagaaatggcacaagaaacctttctattcacatctgaatctgtaaacgagggtcaccccgacaagctgtgcgaccagatctctgatgcagtgctcgatgcgtgccttgaacaggaccctgacagcaaggttgcctgtgagacatgcaccaagaccaacatggtcatggtctttggagagatcacaaccaagg

SEQ ID NO: 192029 - DNA, 268 bp, Glycine max
cagggcagctcgtgtgggagatcgtcaagaaaaacaattccttcttggtcaagcagtttggaaggggcacccagagcgtcgaattcagcagagagagcaacaatctctacaacctcaattcgttcaagtactctggtttggcaaacaagaaaactgttactgttcagcctgagggcatagatcaggctgtgttgttggctacaaccaagacaaagaagcaaaacaagcccgctgcattgctccacaaatctgtgatgaagaaggagtt

SEQ ID NO: 192030 - DNA, 270 bp, Glycine max
tgcttctttgtattgctgttatgtctgatcatagcagcttcttctgggtttgtgtattgctttgatgttgaaaagaaggaaatgattggactatttgagctcaataaaggtgacctttctttgaaggtcaccaactggggtgcttcaattttgtccctggtgattcctgataagaatggaaagttgagtgatgttgttcttggatatgattctgttaaggattacactaatgatacaacatattttggagcaactgttggccgggttgct

SEQ ID NO: 192031 - DNA, 261 bp, Glycine max
ccagtagtcatatgcttgtctcaaagattaagccatgcatgtgtaagtatgaactaattcagactgtgaaactgcgaatggctcattaaatcagttatagtttgtttgatggtatctgctactcggataaccgtagtaattctagagctaatacgtgcaacaaaccccgacttctggaagggatgcatttattagataaaaggtcaacacaggctctgcctgttgctttgatgattcatgataactcgtcggatcgcacgg

SEQ ID NO: 192032 - DNA, 265 bp, Glycine max
gcgtggtcgtggtggttcggcggggaacaagttccgcatgtcgctgggtcttccagtggcggcgacggtgaactgcgccgacaacacgggggcgaagaacctctacatcatttcggtgaaagggatcaaaggccgtttgaaccgtcttccctcggcctgcgttggcgacatggtgatggccaccgtgaagaagggaaaacccgatctgaggaagaaggtcttgccagctgtcatcgttcgccacgcaagccatggcgccgaaagg

SEQ ID NO: 192033 - DNA, 258 bp, Glycine max
  unsure (1)..(258): unsure at all n locations
ctccacgcccttcttgggtttccgtctgaagtgcagcaatggcagatggattgcattcgcagcatccatcggtagttcagaagttatctggacagtcttatcttgtgtccaggcttgctcctaatcactccagaaactgttctaccactggtagttacttcaatggaggtttgcagtcttcaggtttggttccagtcacggtacagcccaaggnntgagaaaggggtgtctggatttatgttggattgcctgatgggc

SEQ ID NO: 192034 - DNA, 254 bp, Glycine max
  unsure (1)..(254): unsure at all n locations
gctccctgagagagctcgtcgcggcggtagcagaagaagattgcaagatgaagttcaacatcgcgactcccaccactggatgccagaagaacctcgagatccacgacgtcctgaaactgcgagcatnttgggacaagaggatctcacaggaggtcatctgagatgaaccccgtgacgaatttaagggctatgtcttcaaaattaacggaggctgtgacaaacaaggatctccaatgaagcagggagtgctgact

SEQ ID NO: 192035 - DNA, 263 bp, Glycine max
gctaatacgtgcaacaaaccccgacttctggaagggatgcatttattagataaaaggtcaacacaggctctgcctgttgctttgatgattcatgataactcgtcggatcgtatggcttttgtgccggcgacgcattattcaaatttctgccctataaactttcgatggtaggatagtggcctaccatggtggtgacgggtgacggagaattagggttcgattccggagagggagcctgagaaacggtaaccacatccaaggaa

SEQ ID NO: 192036 - DNA, 264 bp, Glycine max
  unsure (1)..(264): unsure at all n locations
ccgatcccgccattgcaaacaacgccacgctgaggctcgtcgccggtctcgtcttcctccatgaaaatgatttcaacgaagccctcaaacacaccaatgctggtggaaccatggacctgcacgcgttgaatgttcagatctttacgaagatgcataggtcggattatgctgagaggcagcttcggatcatgcagcagattgatgaagatcacactctcacccanatcgccaatgcctggctcaatttggctgtgggtgggtcaa

SEQ ID NO: 192037 - DNA, 275 bp, Glycine max
ctcgagccgctttgcaccaggtagatgttctaaatacgttgccaattgtagtgctggcgattcatccactgaaccctatatcgttggacactacttattacttgctcatgaatctgctgccacattatacaagacaaaatatcaggctcgtcaaaaaggacaaattgggatcactaatccaacacactactttttgccaaaatctcaaagtgctgcagattacaaggcagcaagtagagctctggacttcttctttggttggtattctgatccgg

SEQ ID NO: 192038 - DNA, 251 bp, Glycine max
ataaagggaaaagagaacacccttatttccatttctaaaagagttcattgaagaaatgaagatggatagtgcttccatgacaggctcaaagaggaggatatcatccaacagaggaattggaggagtcctcagagagcaaagggcaaggctatacattataagaagatgtgttgtcatgctcctctgttggcatgactagttttttcaagacttgaagaagttccacaagcagcatggcaatggaagaaaag

SEQ ID NO: 192039 - DNA, 255 bp, Glycine max
  unsure (1)..(255): unsure at all n locations
cttgtctcaaagattaagccatgcatgtgtaagtatgaactaattcagactgtgaaaccgcgaatggctcattaaatcagttatagtttgtttgatggtatctactactcggataaccgtagtaattctagagctaatacgtgcaacaaaccccgacttccggaagggatgcatttattagatanaaggtcaacacaggctctgcctgttgctttgatgattcatgataactcgtcggatcgcacggctttgtgc

SEQ ID NO: 192040 - DNA, 258 bp, Glycine max
gctggatttgctggagatgatgctccacgtgctgtgtctcccagcactgtaggttcgtctcgtcacactggtgtgatgcgtggcatgggccaataagatgcatatgttggtgatgaggtacaatctaagaggggtattttgactctcaagtaccccattgaacatggaattgtgagcaattgggatgatatggaaaagatttggcatcataccttctataatgagcttcgtgttgccccagaagagcatccagttctc

SEQ ID NO: 192041 - DNA, 257 bp, Glycine max
tgtttggctaccatgttttctcttcttatctatctctcattcataactagtctccttctagtgctcaagctctatggaattccatattggatatttgttatgtggctggactttgtcacatacttgcatcaccatggtcaccaccagaaactgccttggtaccgcggcaaggaatggagttatttaagaggtggcctcaccactgtggatcgtgactatggttggatcaataacattcaccatgacattggcaccca

SEQ ID NO: 192042 - DNA, 253 bp, Glycine max
ctttttcaacaccctctatgaactcttccgagaaggtgcagattttgttcgcggttaccccttcagtctccgggaaggtgtaccaactgcagtttctcatggtctttggctcaacatcccagattacgatgctcctactcagcttgtgaagccacttgagaggaacactaggtatgtggatgctattttgaccataccaaagggcactttgtttcccatgtgtggaatgaacttggcctttgatcgcgatctc

SEQ ID NO: 192043 - DNA, 250 bp, Glycine max
gttcacgctgctgatggtactccgttactcatcaagaacgcaatctgtgtctttgaacaatatggcagcatcatgtggcgtcacaccgaaacaggcattcccaatgaatcgtttcgaagaacgagaacggaagtcaacttagtggtaagaactgttgtaaccgtgggcaactacgataacatcattgattgggagtttaaaacaagtggctcaatcaaaccctcgattgctctctcgggtatattggaaa

SEQ ID NO: 192044 - DNA, 253 bp, Glycine max
cggctcgaggccctcaatcaccggagagagagtgagtgcaaagccatcgtcttcttctcagacaagtagtttggtaaaagatggctgatgctgaggatattcaaccccttgtctgtgacaatggaactggaatggtgaaggcaggatttgctggtgatgatgctcctagggctgtgtttcccagtattgttggccgacctcgtcatactggtgttatggttgggatgggtcaaaaggatgctatgtaggtgat

SEQ ID NO: 192045 - DNA, 254 bp, Glycine max
atgaaaatgaaagtgcttgtcttgtttgttgctacagttttggtatcatatgaatgccatggctcagactaccagaagttccctctccaaatgaaaactgggtttggtgggcaatacagcaatgaggtggcatgtgccagttggaggcttggcgtggaagcaaacaacgtagtcaagtggcaaactgttcctgcagcttgcggagagtacatagctgactacgttctaggagaccatatagatcagattccaaa

SEQ ID NO: 192046 - DNA, 256 bp, Glycine max
ctagcttacaaatctgctaaggtgtttgttgctggtcaccggggtcttgttggctcggccattggtcgcaagctcacccaacttgggttcactaatctagtcttgcgctcccatgccgagcttgatctcactcgacaatctgatgttgaagccttctttgcttatgaaaaacctgaatttgtcattgtagctgcagccaaagttggtggcatccatgccaacaacacctaccctgctgatttcattgccatcaacc

SEQ ID NO: 192047 - DNA, 256 bp, Glycine max
gagaatatgaagttgtttgttttctttgttgctgcagtagttttggtagcatggccatgccatggcgcaggctaccaaaggttccctctccgaatgaaaactggctatggtgagcgttcttcggaggtaaaatgcgcaagttttagggctgctgtggaagcacacaacatccgagcctttaaaaccattcctgaagagtgcgttgaaccaacaaaggactacattaatggcgaacaatttagatcagactctaaaa

SEQ ID NO: 192048 - DNA, 264 bp, Glycine max
gaaagcaagctcatcctagagctttaaacaatggcagcagcctcctccatggctctcacttccccatccttggctggcaaggccgtgaagctgggcccatcagcccccgaagtcgggagggtcagcatgaggaagaccgtcaccaagcaggcctcctccggaagcccatggtacggcccagaccgcgtcaagtacttgggcccattctctggcgagcccccgtcctacctcactggcgagttcccaggtgactacggctgggac

SEQ ID NO: 192049 - DNA, 97 bp, Glycine max
gctcgacctcgagccgggatatctcggctcttgcatcgatgaagaacgtagagaaatgcgatacttggcgtgaattgcagaatcccgtgaaccatcg

SEQ ID NO: 192050 - DNA, 274 bp, Glycine max
gcgcagttccctacctctcctttcaagatccgttgataaaagccttattcgttgattctgtatggtatttcaagagatattgctcagatgcagatcttcgtcaagaccctcaccggaaagaccatcacccttgaggtggaaagctctgacaccatcgacaacgtcaaggccaagatccaggacaaggaaggaattcccccggatcagcaacgtctcatcttcgccggaaagcagctcgaggacggccgtaccctcgccgactacaacatccaga

SEQ ID NO: 192051 - DNA, 262 bp, Glycine max
ggtgccgcaacccattttgcatctaacccttttgtcattaataatctctctgaccactctttccttggtcgatgccgccgatcccacatttggcttcacccctcttggattatctagtagctcaaacttgcaaatccaaaagccttacgacgttgcagtcaacgagcgctacagcttttcaaatggagtgcacagattttgggtatactccacggacaagcctcatatgcaaggcagcaatacgaagccacgaactgagatt

SEQ ID NO: 192052 - DNA, 270 bp, Glycine max
ctggaaaggtggtgtgtgtcaccggcgcttccggttacattgcttcctggatagtcaaatctctcctcaatcgcggctacaccgttaaggccaccgttcgcgacacaagtgatccgaaaaaaataaaccacttggttggcctcgacggtgctaaggagaggctgcacctctacaaggcgaatcttcttgaagaaggttcctttaactctgtcgttcaaggttgccatgctgtgtttcacactgcttctcccttttatcacaatgtcaagg

SEQ ID NO: 192053 - DNA, 260 bp, Glycine max
agaatggctcccaagggtttaatctttttggctgtgttatgcttctcagcactgtcactgagtcgttgtcttgcggaggataatggacttgttatgaacttctacaaggaatcatgccctcaggctgaagacatcatcaaagaacaagtcaagcttctctacaagcgccacaagaacactgctttctcctggctctcaaacatcttccatgactgtgctgttcagagttgtgatgcttcactgttgctggactccacaag

SEQ ID NO: 192054 - DNA, 258 bp, Glycine max
caatggtgtacgtcaaggctcagaaatcaaaagcctacttcaagagatatcaagtcaagttcaagagaagaagagagggaaaaaccgattaccgtgccaggattcggttgattaatcaggacaagaacaaatataacactccgaaataccgatttgttgttcgctttagcaacaaggacattgttgcacaaataatatctgctagcattgctggcgatattgttcttgctgcagcatatgcacatgagctgccacgat

SEQ ID NO: 192055 - DNA, 250 bp, Glycine max
tcaatcctttttttgtccttcaccatagaactcttcattggcattgcttcagcagcacaagaaccagtagttgatacctcaggccagatgctgagcacaggtgtcaagtactacattctaccagtcttcagaggcagaggtggcggcctaacagtttcaagcagtggcaacaacacatgccccctctttgtggtgcaagagatgcttgacgtctcaaagggcaccccagttaccttcacaccctaccatg

SEQ ID NO: 192056 - DNA, 271 bp, Glycine max
gtgatgactgcctccaaggatcgcgagatcttcgtctacatcgccaaactcgccgagcaggccgagcgttacgaagagatggtggaatcaatgaagaacgttgcgaatctcgacgttgaactgacggtggaggagcggaatttgctttctgttgggtacaagaatgtgattggtgctcgcagagcgtcctggaggatcctgtcttccattgagcagaaggaagaaacaaaagggacgagttgaatgcgagcggattaaggagtacagacag

SEQ ID NO: 192057 - DNA, 246 bp, Glycine max
ccgatttctaccagttggctggcgttgttgccgttgaggtcaccggtggacctgaagttcccttccatcctggaagagaggacaaacctgagccaccaccagagggtcgcttgcccgatgccactaagggttctgaccatttgagagatgtgtttggcaaagctatggggcttagtgaccgagatatcgttgctctgtctgggggtcacactattggagctgcgcacaaggagcgttctggattcg

SEQ ID NO: 192058 - DNA, 216 bp, Glycine max
actcgagccgattcggctcgagtacaggcacctattgttaataatctagctttttgggagagaataggtatcgaacaatatggacctgataccctgttctttgcattttactatcaacagaacacttaccaacagtatatggctgcaaaagagctaaagaagcagtcctggagatatcaccggaagtataacacatggtttcaacggcatgaagag

SEQ ID NO: 192059 - DNA, 250 bp, Glycine max
  unsure (1)..(250): unsure at all n locations
gatcgtccctataccagtgatcaaggatatttttcgaactgatggcgaacagttcctcaagtatccaccatctaaagtgatgcaggtggataagtctgcatggatgactgatgaagaatttgcaagagaaacgattgctggtttaaatccaaatgtcattaagattatagaggagttcccactaagtagcaagctagatactcaagcctatggtgatcatacctgtataatagcaanagcacatttggag

SEQ ID NO: 192060 - DNA, 236 bp, Glycine max
gggtttgcatgacaccacaaggataaactattacaaaggctatttgactcaactaaagaaagcagttgatgatggagcaaatgtggttgggtactttgcatggtcaatgctggataactttgaatggaaggtgggttacacatcaaggttgggcattgtctatgttgatttcaaaacctcaagagataccccagatgtcggcatactggttcaagcaactcattaccaaaagaagt

SEQ ID NO: 192061 - DNA, 261 bp, Glycine max
cttgtatatatctcattttgaggcagtggaaaatgttgtacgctgcataaggcgggctctgatgctaacttggaggaactatcatcagttatatcctctaatggtcattctattgaggaatttcttgcatctgaggccactgaagctggttcaatatttgacgatcttcagagaaccctttcaactcagcaggatgaactggaactatttgcagggaaactacgcagtagattcaatctcagtcttgaacaaataaaagat

SEQ ID NO: 192062 - DNA, 281 bp, Glycine max
agtagctcggaattggctcaatcgattgaatcggctgacttgacttggtgactaatgacactgtaattctcaaccacatcaacaagctggacgagccatttttactcacttggaacggtattaaacaaaggaagaattcatggcaagatggagttttgggaaccaactgtcccattcctccaaactcaaattatccatacaagtttcaggccaaggatcagattggtacatatacatactttccatcaactcaactgcatgaagcagctggagggtttgga

SEQ ID NO: 192063 - DNA, 264 bp, Glycine max; identical to SEQ ID NO: 189571

SEQ ID NO: 192064 - DNA, 84 bp, Glycine max
tgcaatttccagttatcttggtatggatttgttctttatttctgagaaaattagtgatttttcttttattccggactttattta

SEQ ID NO: 192065 - DNA, 261 bp, Glycine max
  unsure (1)..(261): unsure at all n locations
cgctattcctattaaatgaatcatagtcataganagatccattattcatagttnaaattaggaaccttttgtgttctgttctgttctgttacatctcgtgaatcgtttacaacttcttaaccgtttttctgttgcagatggcttcttcgtttctatccgcagcttcgcacgctgtctcaccctcttgttctctgtccaccacgcacaagggaaancccatgcttggaggcaacactttgagatttcncaaaggncccaatt

SEQ ID NO: 192066 - DNA, 265 bp, Glycine max
gcgagtcaacgggcgagtaaacccgtaaggcgcaaggaagctgattggtgggatccccctgtgggttgcaccgccgaccgaccctgatcttctgtgaagggttcgagtgagagcatacctgtcgggacccgaaagatggtgaactatgcctgagcggggcgaagccagatgaaactctggtggaggcccgcagcgatactgacgtgcaaatcgttcgtctgacttgggtataggggcgaaagactaatcgaaccgtctagtagct

SEQ ID NO: 192067 - DNA, 266 bp, Glycine max
cttatggcacacataaaggataaatacaagaatcttcctatttacatcactgaaaatggcatggctgaatcaaggaatgactcaataccagtcaatgaagcccgcaaggatattataaggattagataccatgatggccatcttaaattccttcttcaagcgatcaaggaaggtgttaatttgaagggctattatgcatgcccattttcggacagttttgaatgggatgctggttacacagttcgattcgggctcatatatgtgga

SEQ ID NO: 192068 - DNA, 261 bp, Glycine max
gtttgttttctttgttgctgcagtagttttggtagcatggccatgccatggcgcaggctaccaaaggttccctctccgaatgaaaactggctatggtgagcgttcttcggaggtaaaatgcgcaagttttaggcttgctgtggaagcacacaacatccgagcctttaaaaccattcctgaagagtgcgttgaaccaacaaaggactacattaatggcgaacaatttagatcagactctaaaacagttaaccaacaagcttt

SEQ ID NO: 192069 - DNA, 271 bp, Glycine max
cttcgttaccctcttcacatgccttctctctgctaattcccacactgaccatattgttcctaccggattcaacctccattgacgaatgactcagttgaagttgcaactggctaaccggacccaaactcttaactacaagccggtgatcggaatcctgacccaccccggcgacggtgcctctggccggctcagcaacgccaccggggtttcttacatcgccgcctcctacgttaaattcgtggagtccggtggtgctagagttatgcccctt

SEQ ID NO: 192070 - DNA, 257 bp, Glycine max
gcttacgctaattgaaggtgttcttgcagcaaatatttttgattggggatctcgtgcatgtgtggatctctatcataaaggaactattatcgaaatttatagaatgagtcgcaataaaatgcgtagaccttggcgggtggatgattttgatgagtttaaagagagaatgaaaatgccctgtcataagagggctttactttttgtagataactcaggtgctgacattgttctagggatgcttccactggctagggagc

SEQ ID NO: 192071 - DNA, 260 bp, Glycine max
agcaactatgcctaaccctaaggtcttcttcgacatgaccatcggcggtcaatctgctggccgcatcgtgatggagctctacgccgacgtcactccccgcaccgccgagaacttccgcgcgctttgcaccggcgagaagggcgtagggcggagcggcaagcccctccactacaagggctcgtccttccaccgcgtgatcccgagtttcatgtgtcagggtggcgacttcaccgccggaaacggaaccggcggcgagtcga

SEQ ID NO: 192072 - DNA, 259 bp, Glycine max
ggttcttcctcctgaagtcgcaaaactgcttcccaagaatcgtcttctctccgaaaatgagtggcgggcaattggggttcagcagagccgtggctgggttcattatgcaattcatcgccctgagccacacataatgctcttcaggaggcctttgaattatcagcagcagcaggaaaaccaggcccagcaaagcatgcttgtcaaatgaacactatctatgcaaatctgaaagtgggattacaatgttatataggtttta

SEQ ID NO: 192073 - DNA, 260 bp, Glycine max
atgaagttgtttgttttctttgttgctgcagtagttttggtagcatggccatgccatggcgcaggctaccaaaggttccctctccgaatgaaaactggctatggtgagcgttcttcggaggtaaaatgcgcaagttttaggcttgctgtggaagcacacaacatccgagcctttaaaaccattcctgaagagtgcgttgaaccaacaaaggactacattaatggcgaacaatttagatcagactctaaaacagttaacca

SEQ ID NO: 192074 - DNA, 265 bp, Glycine max
cctcgagcgaatcggctcgaggcaaaagtttgaagaacactcaacatggtatgagcataggcctaattgatgacatggtagcatatgcactcaaaagtgaaggtggatatgtttgggcttgcaagaattatgatggtgatgtccaaagtgatttacttgctcaaggttttggctcattgggtctcatgacttctgtgctgttatcttctgatggcaagacattagaagctgaggcagctcatggaactgtaactcgacattttcg

SEQ ID NO: 192075 - DNA, 263 bp, Glycine max
cctcgagcgaattcggctcgagggcagtccaaatgtcttcaagaccagatgacagcaaagacaaagtgcaacctggcttgcaatcatcaatcaagaggaggccttagcaagagagctataccctgattatatccccccattagcctcagctggaggtagtggatctttggtgatcaatgatagcaatgagtatgatgttgaagggggtgaggatgagcctaactttgacgtggaagactgcaaacatgagaatcttcacacat

SEQ ID NO: 192076 - DNA, 258 bp, Glycine max
cctcgagcgaatcggctcgaggtgggttgcaccgccgaccgaccactgatcttctgtgaaggcctcgactgagagcatacccgtcgggacccgaaagatggtgaactatgcctgagcggggcgaagccagaggaaactctggtggaggcccgcagcgatactgacgtgcaaatcgttcgtctgacttgggtataggggcgaaagactaatcgaaccgtctagtagctggttccctccgaagtttccctcaggatagct

SEQ ID NO: 192077 - DNA, 255 bp, Glycine max
gaaagaaactgcaacttcctctgttttgctcccctgtttaggccttttcataagcttagaatgacacacaaggaattttccattgctctagtgactctcattgctgttctctttgtcaacatgaacatccaaggtgccactgctgactatggtagttggcagagtgctcatgccactttttatggcgggggtgatgcttctggcacaatgggtggagcatgtgggtatggaaatttgtatagccagggctatgga

SEQ ID NO: 192078 - DNA, 212 bp, Glycine max
tcggtaaggaaaaggttcacatcagtattgtggtcattggccatgtcgactctgggaaatccactaccactggtcacctgatttacaagcttggaggcattgacaagcgtgttattgagaggtttgagaaggaagctgctgagatgaacaagatgtctttcaagtatgcctgggtgctggacaaacttaaggctgagcgtgaaagaggaatc

SEQ ID NO: 192079 - DNA, 257 bp, Glycine max
gattcccctccccagacgccgcagagtcagagagagagattcactgaaacagagcgcagaagaaaatacataaactaatccagaaaatgagcagcggcgctggaaaggtggtgtgtgtcaccggcgcttccggttacattgcttcctggatagtcaaattcctcctcaatcgcggctacaccgttaaggccaccgttcgcgacacaagtgatccgaaaaaaataaaccacttggttggcctcgacggtgctaaggag

SEQ ID NO: 192080 - DNA, 257 bp, Glycine max
gccagacgcactacaccgttggcaaagagatcgtagatctgtgcttggatcgcgtccgaaagctcgcagacaactgcactggtctccagggcttcctcgtcttcaacgctgtcggcggtggcaccggttccggtctcggatctctcttgttagagcgtctctccgtcgattacggcaaaaagtccaaattagggttcaccatttacccttcccctcaggtttcaaccgcagtcgtggagccctacaacagcgtcctc

SEQ ID NO: 192081 - DNA, 254 bp, Glycine max
gaagatttcggcgtatcgagatagaaggttcccgggacgcaagacgagtttgaccacgcgcttctgacctcaaccaccgtttacgtggggaacatgtcgttttacacgacggaggagcaagtttacgagctcttctcgcgtgctggggaaatcaaaaagatcatcatgggcttggacaagaacacaaaaacgccttgcggcttctgtttcgttttatattattctcgtgaagatactgaggatctttgcaaata

SEQ ID NO: 192082 - DNA, 247 bp, Glycine max
ctcgagccgtgggaagctatccaagcagttcgaagtagagctggggtgtgggttaggcgatttagattactgaagaggctgggttgtggggatattggcagtgtttacctctccgagttgagtggaactaaatgttactttgcaatgaaggtaatggacaaagggtctctagcaagtcgtaaaaagctacttcgtgctcagacagaacgagaaattctgcagtctcttgatcacccttttctcccaa

SEQ ID NO: 192083 - DNA, 255 bp, Glycine max
ctgagattgttggcactttcattcttgtctacaccgttttctctgccaccgatgccaagcgtagcgctagagactcacacgtccctattttggcacccttgccaattgggttcgctgtgttcttggtgcacttggccacaatcccaatcactggaactggtatcaaccctgcacgaagtctcggtgctgccatcatcttcaacaaagaccttggctgggatgatcactggatcttctgggttggacctttcgttg

SEQ ID NO: 192084 - DNA, 253 bp, Glycine max
cttctctctctgtgtgtgcgcttcaacggcaaccagaagcagccatggccactgcaaggactgtgaaggatgtttcacctcatgagttcgttaaggcgtactcctctcacctcaagcgatccggcaagatggagctgccagagtggactgatattgtgaaaactgcaagatttaaggagttggctccttatgatcctgactggtactatgtcagagctgcttccatggcaagaaagatctacttgagaggagg

SEQ ID NO: 192085 - DNA, 251 bp, Glycine max
  unsure (1)..(251): unsure at all n locations
ggcatcgttgagtatttgaagacacaaagtggtcctgcttcaactgaaattaaatcttgtgatgtangtactgcttttattggtcgaaataaagttgctattgttggagttttcccgaaattttctggagatgagtttgacaacttttctggcttagcagagaagttgcgttctgattatgactttggtcatactctgaatgccaaactccttccaagatgagagtcatcagtttctgggcccgtagttag

SEQ ID NO: 192086 - DNA, 250 bp, Glycine max
  unsure (1)..(250): unsure at all n locations
agatgatccacgttcttttcctctttgctcttgtctcgttcacttcccatgcttctgtcaatgatttctgtgtagcagacctaaaaactccagatagcccttcaggctatcagtgcaagccacctaacacagtcacagtggatgactttgtgttctctggctttgtagctggagacaccacaaacactttcaatgctgcattaacctccgcatttgttactgatnttccaggtgtgaatggtcttggtgt

SEQ ID NO: 192087 - DNA, 251 bp, Glycine max
gttctctccgtcgctgccgtagttttggtagcatgcctactgcatggcgccggctacgaaaggttccctctccgaatgaaaaccggctatggtgagcgttcttcggacgtaaaatgcgcaagttttaggcttgctgtggaagcacacaacatccgagcttttaaaaccattcctgaagagtgcggtgaaccaacaaaggactacattaatggcgaacaatttagatcagactctaaaacagttaaccaaca

SEQ ID NO: 192088 - DNA, 250 bp, Glycine max
aatccgagatcaaccccgacgaaggcaaggggtttttctcggcttcttcagatttctgaaatggcgcctgtttcagctttagccaagtacaagctcgtcttcctgggtgaccaatccgtgggcaaaaccagcatcatcactcgcttcatgtatgataaattcgataacacctatcaggctacaattggtattgattttctatcaaaaactatgtatcttgaagatcgaactgttcgactgcagttgtggg

SEQ ID NO: 192089 - DNA, 253 bp, Glycine max
caaaaaccatcgttatgcagaaaatgatactgcaacagataacacatcatctgagagtagctcatctttgcaagatcgattgctttgtcaaggacaggatccgtatgatatggagccttctagtcatgtaacacctaatggatctcttctgcctcccaataccaagggtgcaaataacatgggacataaaccatcaggatatttgaaagtgaagggagagatagagcatgctgctattactgctgttaaaaag

SEQ ID NO: 192090 - DNA, 248 bp, Glycine max
gtggaatcaatagccattaagatcgttcggaaagacctcgtacccaatggacctggcagcgttaagatggttgcagtggattcggatgatctctggtttgcgtataacctgatagctcccggagactctgtcatggccgttactgtcaggaaggttctaagagaagctgctagtggcggacgggaagcagaacgcgtcaagctcaaattggaaattaaagtccaagagcttgctgattatgacaaaga

SEQ ID NO: 192091 - DNA, 245 bp, Glycine max
gtttgttgtgagctataagctagtttatcgtgaggagaatatgaagttgtttgttctctttgttgctgcagtagttttggtagcatggccatgccatggcgcaggctaccaaaggttccctctccgaatgaaaactggctatggtgagcgttcttcggaggtaaaatgcgcaagttttaggcttgctgtggaagcacacaacatccgagcctttaaaaccattcctgaagagtgcgttgaaccaa

SEQ ID NO: 192092 - DNA, 247 bp, Glycine max
  unsure (1)..(247): unsure at all n locations
tcaaggtccacccagaaggaaaatatgtcgttgatattgacaaaagtattgacattacaaagattactccatccactagagttgcacttcgcaacgacagtnatgttctcacttagttctgccaagtaaagttgatccattggtcaatctgatgaaagttgagaaggttcccgattctacttacgacatgattggtggtttagaccagcaaattaaagaaataaaagaggtcattgagttaccaatc

SEQ ID NO: 192093 - DNA, 248 bp, Glycine max
ctcgagccggtgtattattacattttgcaccatgccttctctcttcgctagaaaccagaggttctcattggctactctcctggttcttctggaactattgacaggaaaccttcgcatggcagatgctcaaattggtgtgtgttatggcatgctgggcaacaatctaccgtcagcaaacgatgttataggtctttatagatcaaataacattaagaggatgagactctatgatcctaatcaagctgctc

SEQ ID NO: 192094 - DNA, 246 bp, Glycine max
gatgattgagaatgaagaagctgattttaattttctttgcagcatttaccttcgtctctgtggctatatctgcgtctgatcattctttcgataactatggcgtttcactggcagttgctgcaacgcccggacctccacctctcatggtccccctcactcttattcagggagctgcttccaaaggagccgtctgtttggatggtacattgcctggttaccactttcatcctgcgtttggatctgggg

SEQ ID NO: 192095 - DNA, 266 bp, Glycine max
caactctaatcgcagctgcatttctcctcctaactctagccctctccatgtatcttctcttcgagcatctttccgcttacaagaacccctaggagcaaaagttcctcatcggggttatcctaatggttccctgctattcttttgaatcttttgtatcattggtcaatccctcaatcagtgttgattgcgagattctaagggactgctacgaatcctttgccatgtattgctttggaagataccttgttgcctgcctcggtggtgac

SEQ ID NO: 192096 - DNA, 267 bp, Glycine max
tcgactacaaggctattgtacataatccaaatcctttgatccctcccatttttgcatcggatgataacacgtgttgcttagagtggaacactgcaatggaaaagcttactggttggagccgcgcggatgtcattggaaaaatgttggtgggagaggttttcggcagttgctgtcagttgaagggttcagattcaataacaaagttcatgattgtcttacacaatgcgcttggtggacatgatacagatagattccctttttcatttc

SEQ ID NO: 192097 - DNA, 267 bp, Glycine max
gtagtcatatgcttgtctcaaagattaagccatgcatgtgtaagtatgaactaattcagactgtgaaactgcgaatggctcattaaatcagttatagtttgtttgatggtatctactactcggataaccgtagtaattctagagctaatacgtgcaacaaaccccgacttctggaagggatgcatttattagataaaaggtcaacacaggctctgcctgttgctttgatgattcatgataactcgtcggatcgcacggcctttgtgc

SEQ ID NO: 192098 - DNA, 265 bp, Glycine max
gatctctgaaactcagagtttcatttcaattcagtcttattattagcggtttgccgattgagagagaaagagaaatgggacaacgaaaaggaatccctatggctttggggctcttggcgatgatcctcttcttcattgcttcctcttcctctcacctcgttcgcgcttccgatgacgccgacgacgcgatcttctacgagtcgttcgacgaggattttgatggacggtggattgtatccgacaaggaggattacaatggtgtctg

SEQ ID NO: 192099 - DNA, 97 bp, Glycine max
aaacaaaccaaggacgagaacacgatgttgcttgaacttgcacttggtttattggttttggctctgtttctgcacttgcgtcccacacccactgcaa

SEQ ID NO: 192100 - DNA, 267 bp, Glycine max
ctctcatcttcttattcttctgctttcactctctgactcaatcgttctaatccacaaaaaatgaccttaaattacaacattgccctcgccttctctgcggtgctcacgctgctcctctttcccctactgaccgtaggggagctcgtggaggagcagccactagtcctcaagtaccacaacggccagctcctgaagggccgcatcaccgtcaatctcatctggtacggcaccttcaccccgatccaacggtccataatcgtggacttc

SEQ ID NO: 192101 - DNA, 276 bp, Glycine max
ggactcgagtgattcgccattgactcgtgaactggctgggaaaagcaacgaaaagaagggaggaagaagagggagagcgtgcgtggtggttttgggagacattggacgaagccctcgaatgcagtaccacgctctttcactcgccaatcaggcttccctggaggttgacattgttgcatatggaggttcagagccccatactgcacttcttgccaacccatctattcatatttacataatgaagcagtggttaacagccagtcaaagcttaccaaa

SEQ ID NO: 192102 - DNA, 270 bp, Glycine max
agttggtgcaccgtttgtacccagagattgatccagctctgaaccctgaccacgtccctcacattctgaagaagtgccctgatgccattccagaccctaaggcggtgcagtacgtgagaaacgaccgtggcactcccatgattctagacaacaactactacagaaacatattagacagcaagggtctcttgatagtggatcaccaactagccaatgacaagaggaccaagccttatgtgaagaaaatggccaagagccaagactatttct

SEQ ID NO: 192103 - DNA, 274 bp, Glycine max
ggcagcagctactgttggtgctggtggttttgtcttgcatgaacaccatgagaaaaaggaagttaagaaagaagatgaggaagctcatggaaagaagcaccaccatctgtttggctgaacatgataaatattcatatataattaatattcaagctccaaagtatcaccatgcctgtgtatctctatcatatcttccatttctagtgtgcctttgaataaattctgtgcgagcttgaagagtgtttaattatgcctatggtgttacttcatatat

SEQ ID NO: 192104 - DNA, 262 bp, Glycine max
  unsure (1)..(262): unsure at all n locations
gttggcgtctangaccaccgacgacgtcgtcaganactcagancctctcgtatgcncgaaaacggcattcgcattctcaaggaagaggtgcagagatcgaatcgggaatgggaatcatacaaggagaagataaaaaataacgaggagaaggttaaacttcataagcagttgccctacctcgttgctaacattgttgagatattggatatgaatccagaagatgaagctgaagaagatggggccaacnttgatcttgactctc

SEQ ID NO: 192105 - DNA, 264 bp, Glycine max
ggagttggcattcttggcattgcttgggcctttggtggcatgatcttcattctggtgtactgcactgctggaatctcagggggtcacataaacccagcagtgacatttgggctcttcttggctcgcaaggtgtctttgattagagcaataatgtacatggtggctcagtgcttgggagccatatgtggagttgggttggttaaggccttccaaaacgcttaccaccagacgtatggtggtggggccaatgagctcagtgaaggg

SEQ ID NO: 192106 - DNA, 266 bp, Glycine max
tcacgaggagcagcctcatgaggagaaggatgtctcacaggaagtacgagcacccaaggcacggttcactgggatttcttcccaggaagcgtgctgctcgtcacaggggacaactgaaggcattccccaaggatgacccatccaaggcacacaagctcactgcattcttgggttacaaggccggtatgactcacattgttagaactgtcgacaagccaggatcaaagcttcacaagaaggagacttgtgagcctgttacaattatt

SEQ ID NO: 192107 - DNA, 262 bp, Glycine max
gtgaatctgagaaatggcggattcttctcgggaggagaacgtttacatggcgaaattggcggacaggccgagcgttacgaggagatggttgagttcatggagaaggttgcaaagactgtggaggttgaggagttgacggtggaggagaggaatctcctctctgtggcttacaagaacgtgattggtgcgaggagggcttcgtggaggatcatatcctccattgagcagaaggaggagagcaggggcaatgaggaccacgtgg

SEQ ID NO: 192108 - DNA, 190 bp, Glycine max
aaagaaaaataaaaacatcaaaaagcactaacgacctatcatcaatgctggctcagtttactacaagtcctctttggctgctgaagctgcgtacgacaatgagaaaagctgtgatacggaattgaatgctccacttgaggttgttgatcctgagattgctgatataattgagcttgaaaaagctagaccc

SEQ ID NO: 192109 - DNA, 264 bp, Glycine max
ggccgcacttactcttgttctcaagggattcgattttctctgcactcacttctagggtttcctccgcgctatcagcaatcatggccgacgaaacaccaaatgagatgaaggaggaggttccagaaattgttccttttgatcctaccaagaagaagaagaagaagaagattacaattgtagatcctgctgatgaccctgtggagaaattggctgagaagacagaaaacctctcagtttctgagggggttgagactgcatttgctg

SEQ ID NO: 192110 - DNA, 260 bp, Glycine max
tcgtgatcgaaaatggcgacgttgaaggttcctgcacaacttccttcaccattggaagacagtgagcaattgcgaaaagcttttcaagggtggggaacgaatgacggattgataatatcaatcctgggtcacagaaacgcggctcagcgtaagttgattcgtgaagcttatagtacaacccatggagaagatcttcttaaagatttagacaaagaactttcaagtgactttgagcgggctgtgatggtttggacattgga

SEQ ID NO: 192111 - DNA, 262 bp, Glycine max
ggaagactggattaatatcatcagttgccaatttatgtgctccggtagaagaatggactgttggtggaactgcactcacctcactgatggatgtggagaggaggcatggtaaattcaagcctgtgatcaagaaggcaatggtggaacttgaaggggcacccttcaaaaagtttgcctccttgcgggatgaatgggccctgaagaattgctacatcagtccaggtccaattcaattctctggcccaggatctgaagtaattaa

SEQ ID NO: 192112 - DNA, 268 bp, Glycine max
gtgacttttgcaccaactggactgacaactgaagtcaagtctgtggagatgcaccatgaatctcttacagaggcacatcctggtgacaatgtgggattcaatgttaagaatgttgctgttaaggatttgaagcgtggttatgttgcctcaaactcaaaggatgaccctgcaaaggaggctgctaacttcacagcccaagtcatcatcatgaaccaccctggtcagattggaaatggctatgcccctgtcctcgactgccacacttctc

SEQ ID NO: 192113 - DNA, 261 bp, Glycine max
  unsure (1)..(261): unsure at all n locations
ctttttctctgccgccactggtttcgattccacacaacataacacacaaactnnatcctttgaatgctcttgngttttcctttcactacctaattcctaacacacacacacacaacggcccatatccatgtcgactcctgntaggaagaggctcatgagagatctcaagaggctgcaacaagacccgcctgcaggactcagcggggcacctcaggataacaacataatgctgtggaacgctgtcatatttggtcctgatga

SEQ ID NO: 192114 - DNA, 262 bp, Glycine max
cttctctcctatctatatcttttctcacttagtcttgtgttgtcttcccccacaacacacttgtaagggagagataacaatggcttctgagaaggttgagactgttgttgcagggaattacttagaaatggagagggaaaaggaaggttctaagtccaccagtggcaaattgtctaggctcttttggcatggtggctctgtctatgatgcatggtttagctgtgcttctaatcaggttgcacaagtgttactgacactccat

SEQ ID NO: 192115 - DNA, 263 bp, Glycine max
gttctcttcactcttggtcttgcgagagaaagccatgccagagccgaagatttttggcatgctgtttggccaaacactcccattccaagttcattgcgagctcttctaaagcctggccctgcaagtgttgaaatcgatgatcaccctatgcaacctgaagaaacacagtacccgaaaaccttcttctataaagaataccttcatccaggcaaaacaatgaaagtacaattcagcaagcctccctttcaacaaccatggggtgt

SEQ ID NO: 192116 - DNA, 258 bp, Glycine max
gcgggttactgtctgttcaagctaccatctctctctctctttcttagtgcctccttgccagaagttaaaatggcccaagaaactttcctattcacatctgaatcagtgaacgaggggcaccctgacaagctctgtgaccagatctccgatgctgtgctcgatgcatgcttggagcaggaccctgacagcaaggttgcctgtgaaacctgcaccaagaccaacatggtgatggttttcggagagatcacaaccaaggcc

SEQ ID NO: 192117 - DNA, 257 bp, Glycine max
ggcaggctttcatcttccttcaacaagcctttacgtcctctcttcaatgctggctcagtttactacaagtcctctttgcctgctgaagctgcgtacgacaatgagaaaagctgtgatacggaattgaatgctccacttgaggttgttgatcctgagattgctgatataattgagcttgaaaaagctagacaatggaagggactggaactgataccctccgagaatttcacttctgtctctgtaatgcaagctattgg

SEQ ID NO: 192118 - DNA, 255 bp, Glycine max
gctagctatatgcttaacacatgcaagtcgaacgttgttttcggggagctgggcagaaggaaaagaggctcctagcgtgaaggttgcttgtctcgcccaggaggtgggaacagttgaaaacaaagtggcgaacgggtgcgtaatgcgtgggaatctgccgaacagttcgggccaaatcctgaagaaagctaaaaagcgctgtttgatgagcctgcgtagtattaggtagttggtcaggtaaaggctgaccaagcc

SEQ ID NO: 192119 - DNA, 254 bp, Glycine max
ggccggtcgatcctggcggaagacattgtcaggtggggagtttggctggggcggcacatctgttaaaagataacgcaggtgtcctaagatgagctcaacgagaacagaaatctcgtgtggaacaaaagggtaaaagctcgttttattctgatttccagtacgaatacgaaccgtgaaagcgtggcctatcgatcctttagtccttcggaatttgaagctagaggtgtcagaaaagttaccacagggataactgg

SEQ ID NO: 192120 - DNA, 253 bp, Glycine max
aagatcctgaaagtcatcaggaagaacttggtcaagaagtgcattgagatgttctttgaaattgctgaaaacaaggaagactataacaagttttatgaagccttctctaagaacctgaaacttggtattcatgaggattctcagaacaagacaaagctagctgaattgctcaggtatcactccactaagagtggtgatgagatgaccagcctcaaggactatgttaccaggatgaaggaaggacagaatgaca

SEQ ID NO: 192121 - DNA, 208 bp, Glycine max
ataccgtcctagtctcaaccataaacgatgccgaccagggatcagcggatgttgcttttaggactccgctggcaccttatgagaaatcaaagtctttgggttccggggggagtatggtcgcaaggctgaaacttaaaggaattggcggataagacaaatgttgttgagtttcgtcttatttatagattgaattctcagttttgatttg

SEQ ID NO: 192122 - DNA, 257 bp, Glycine max
  unsure (1)..(257): unsure at all n locations
tcctactccaatcactttcttttttccngtcagtcatgggcaangtcaagatcggaatcaanggatttggaagaattggncgtttggtggccagggtggctccncagagagangatgttgaactcgttgncgttaacgatcctttcattaccaccgattacatgacatacatgttncaatacganagtgttcacgggcactggaagcatcacgatgtcaccgttaaggatgagaagacccttctcttcggtgacaag

SEQ ID NO: 192123 - DNA, 254 bp, Glycine max
ccaggctcttccttgccttctgaatctgttgaccaataattataaaaaaagcatcaagaaggaagcttgttggaccatatcaaacatcacagctggtaataaacagcagattcaggctgtgattgaggctaatctaattgctcctttggtcaatctgcttcaaaatgctgagtttgatatcaagaaagaagctgcttggcctatctcaaatgctacatccggtggttctcatgaacaaatcaagttcctagtaa

SEQ ID NO: 192124 - DNA, 258 bp, Glycine max
cgaacatggctaagtatcattcaagtgggaaaagctcttccatgactgctatagccttcctgtttatccttctaatcacttatacaggcacaacagatgcacaatccggggtatgttatggaagacttggcaacaacttaccaacccctcaagaagttgtggccctctacaatcaagccaacattcgcaggatgcgaatctacggtccaagcccagaagtcctcggcgcactaagaggttccacattgagcttttgct

SEQ ID NO: 192125 - DNA, 254 bp, Glycine max
tgcgtattctcagatccatggagcaggctcatattattaagtcaaagcctctcagatccgcggtggcggcgtgacggaaatggagtcctcaagccgtctcttcacgatcggactggtgtcggcgtggtactcctccaacattggggtactgctcctcaacaagtaccttctcagcaactatggcttcacgtatcctatcttcctcaccatgtgccacatgaccgcctgctccctctttagatacgttgccatcg

SEQ ID NO: 192126 - DNA, 253 bp, Glycine max
gcgaaagtgaaataccactacttttaacgttattttacttattccgtgaatcggaagccgggcactgcccctctttttggacccaaggtcggcttcggccggtcgatccgggcggaagacattgtcaggtggggagtttggctggggcggcacatctgttaaaagataacgcaggtgtcctaagatgagctcaacgagaacagaaatctcgtgtggaacaaaagggtaaaagctcgtttgattctgatttcca

SEQ ID NO: 192127 - DNA, 251 bp, Glycine max
cgaataaatatggctgacttgttggaatggtcaaagcaagataagaaacgaatgcttcatgtcgtctaccgtgttggtgaccttgatcgcaccatcaaattttacacagaatgtttaggaatgaagcttttgaggcaaagagatatcccagaggagaaatatgctaatgcttttcttggatttggccctgaagaatcccattttgttgttgaattaacatataattatggggttacctcgtatgacattgg

SEQ ID NO: 192128 - DNA, 251 bp, Glycine max
  unsure (1)..(251): unsure at all n locations
ctggtgggtccgagctcataatcaccacgaaatctggtgatagatcatcaaccaaaacacttggttcccgtgaatttttgcgttattatcgtcagaaacctcggccatcactagcaaatntggctatcactgctgcattggcttcaaggtacaggagcctgggcttgaccactatccaatcaagggagaagattgtgaggatgaaagtgctgaaggaaatgaataggtcaggtgtggacaatatgcgtacc

SEQ ID NO: 192129 - DNA, 236 bp, Glycine max
tgacatggttggttttaaacttcttgagcatgttgggcttgttatggatcttcctgtcattatgatgtctgtggatggggaaacaagcaaggtgatgaaaggtgttcaacatggagcctgtgattatctccttcagcctataaggttgacagaactgagaaacatatggcagcatgtctttagaaaaaagatacatgaggcaaaagaatttgacagttttgagagcattcacttga

SEQ ID NO: 192130 - DNA, 252 bp, Glycine max
caagtcattacctgcaaagctgcggtggcctgggaacccaacaagcccttaaccgtccaagacgttcaggttgctccgcctcaggccggcgaggtccgtgtccaaatcctcttcaccgctctctgccacaccgatgcttacacttggggcggcaaggatcccgaaggtctcttcccctgtattctcggccacgaagctgcagggattgtggagagtgttggagaaggtgttactaatgttcagcctggggat

SEQ ID NO: 192131 - DNA, 251 bp, Glycine max
gctcatccttgagttaaaaaatggcagcagcttcttccatggctctctcatccccatccttggctggcaaggccgtgaagctgggcccatcagccccagaagtgggaagggtgagcatgaggaagaccgtcaccaagcaggtctcctcaggaagcccatggtacggcccagaccgagtcaagtacttgggcccattctctggcgagcccccgtcctacctaaccggtgagttcccaggcgactacggctgg

SEQ ID NO: 192132 - DNA, 253 bp, Glycine max
gactcagtcaaacactctgtaactctttattttattttctttctttctttctccgatcgcatagctcgctcgcaaccaccatgccttcccgaagaagaactctcttgaaggtcatcattctcggtgacagtggggtggggaagacatctttgatgaaccaatatgtgaataagaagtttagtaatcagtacaaggcaaccattggagcggattttttaaccaaagaagtgcaattcgaagataggcttttcac

SEQ ID NO: 192133 - DNA, 251 bp, Glycine max
ctggacgcgctcgagccgtggaaacagcgaaagtgaaataccactacttttaacgttattttacttataccgtgaatcggaagccgggcactgcccctctttttggacccaaggtcggcttcggccggtcgatccgggcggaagacattgtcaggtggggagtttggctggggcggcacatctgttaaaagataacgcaggtgtcctaagatgagctcaacgagaacagcaatctcgtgtggaacaaaagg

SEQ ID NO: 192134 - DNA, 250 bp, Glycine max
tcttcaagagatatcaagtcaagttcaagagaagaagagagggaaaaaccgattaccgtgccaggattcggttgattaatcaggacaagaacaaatataacactccgaaataccgatttgttgttcgctttagcaacaaggacattgttgcacaaataatatctgctagcattgctggcgatattgttcttgctgcagcatatgcacatgagctgccacgatatggtcttgaagtagggcttacaaatta

SEQ ID NO: 192135 - DNA, 251 bp, Glycine max
gcagtttccggtgcatctcatcgtcttccaaaatgaacgacgcagatgtctcgaagcaaatccagcagatggtgcgtttcatccgccaggaagctgaggagaaagccaacgagatctctgtatctgccgaagaggaattcaatatcgagaagctgcagttggttgaagccgaaaagaagaagatcaggcaagaatacgaacgcaaagagcgccaagtcgaaattcgcaagaagattgagtactcaatgcag

SEQ ID NO: 192136 - DNA, 255 bp, Glycine max
ctctctctctctctctgcttccgagttccgagttgcgagttgcagagagagcaatgagtcaggaatcgtttatatatcgcttcgtggctcgggggacgatggtgttagccgagtacaccgagttcactgggaacttccctgcaattgcagctcagtgcctccagaaactaccctcttccaataacaagttcacctacaattgcgaccaccacaccttcaattttctcgtcgaagacgttacgcttactgtgttgt

SEQ ID NO: 192137 - DNA, 250 bp, Glycine max
gttccgttccgttttcctctgttttttttttctttctttcaaatccccgcttcgtggaaatcccgaaccagaaaccatgcttctccgaaccgctgctgcttctgcttcgtccctctccctcttcagcccgaacgccgaacctccccgttcggttcccgctcgtggattggtggttcgcgcagcaaaggatccacgaaccaccgcgccctgaccggagtgatttttgaaccgttcgaagaggtgaagaagg

SEQ ID NO: 192138 - DNA, 249 bp, Glycine max
cgagatcttcattcgccgattttaaaagatgagtaagcttcagagtgatgctttgcgtgaagccatttcaggaatcatggccgattccaaggagaagaatcgcaaatttgtggagaccatcgaactccaaatcgggttgaaaaactacgatccacagaaggacaagcgtttcagtggctctgtcaagctgccccacatccctcgccccaagatgaaaatttgcatgcttggtgatgctcagcatgttga

SEQ ID NO: 192139 - DNA, 243 bp, Glycine max
  unsure (1)..(243): unsure at all n locations
cagctaccttcatgcaacccaccaaggtgggcatggccactcgcaacctcaaatctacacaatgcatattccccgctnttggcttggaacccgctgcagctaaactcatttgctcccttaagcccgatctcaaagattttgctcaaaaatgtgtcgacgccaccaaaattgcaggattcgcccttgctccctcagctctcgttgtttctggagcgagtgctcaaggtgttccaaagaggctaa

SEQ ID NO: 192140 - DNA, 166 bp, Glycine max
cagccccattatctgggtgaggcctatcagtggactcacaatggtggttgaccttgaactcatgaagatcgttcagtatcacgacggtggcattataccagtaccaactgccgacaacactgaataccgcttttcacatcagaacccacctactcgtccacacaac

SEQ ID NO: 192141 - DNA, 250 bp, Glycine max
agactgttagacctttttgattcagaggatcccagggagcgggattacttgaagacagttcttcatcgtatttatgggaaatttatggttcaccgaccattcatcagaaaagcaatcaacaatatattctaccgcttcatttttgaaactgagaaacacagtgggattgcagaactcttggaaattttgggaagtataattaatggatttgctttgccactgaaagaagatcaaaagctatttcttgtgg

SEQ ID NO: 192142 - DNA, 247 bp, Glycine max
gcaccatcctggtcaaattgaggctgctgctattatggagcatatcttggatggaagttcctacatgaaagctgctaagaagttgcatgagattgatcccttgcaaaagccaaaacaagatagatatgcccttagaacttcaccacagtggcttggtcctcttattgaagtgattcgtttctcaaccaagtcaattgagagagagatcaactctgtgaatgacaaccctttgattgatgtttcaagg

SEQ ID NO: 192143 - DNA, 245 bp, Glycine max
gtcagtagtcatatgcttgtctcaaagattaagccatgcatgtgtaagtatgaactaattcagactgtgaaactgcgaatggctcattaaatcagttatagtttgtttgatggtatctactactcggataaccgtagtaattctagagctaatacgtgcaacaaaccccgacttctggaagggatgcatttattagataaaaggtcaacacaggctctgcctgttgctttgatgattcatgataa

SEQ ID NO: 192144 - DNA, 244 bp, Glycine max
ggagaagactcttctgcctgcagatcctgctaagcctccagccaaggcacaggtggtaggttggccacctgtgcggtccttccggaagaacatgttagctgtacaaaagagcgtcggagaagagaacgagaagaacagcagcagccctaatgcaagctttgtcaaagttagcatggatggagcaccttacctccgcaaagtggacttgaagatgtacaagagttaccgagagctctctgattct

SEQ ID NO: 192145 - DNA, 241 bp, Glycine max
caggaatggaggtcgcaacaaacacggccgtggccacgtcaagttcattcgatgctccaactgcggcaaatgctgtcctaaggacaaggctatcaagaggtttctggtgaggaacattgttgaacaggctgcagtcagagatgttcaggaggcttgtgtctatgaacaatacacgcttccgaagctttatgtgaagatgcagtattgtgtttcctgtgctatccactctcatgttgtgagg

SEQ ID NO: 192146 - DNA, 247 bp, Glycine max
ctgaaaatgaaggtccttgttttcttcgttgctacaattttcgtagcatggcaatgccatgcgtacgatatgttccctctccgaatgcacactggctatggtgcccgtactccggaggtgaaatgcgcaagttggacgcttgctgtggaagcacacaacatcttcggctttgagaccattcctgaagagtgcgttgaagcaacaaaggaatacatccatggcgaacaatatagatcagactccaaaa

SEQ ID NO: 192147 - DNA, 245 bp, Glycine max
caagaccggcatggctaatgaagaggaacagaaaaaccacctcttcggcatcaaagatctcggtcacaagactctccttcagagtgatgcactctatcagtatatacttgaaaccagtgtctatcccagagagcacgagtgcttgaaagagatacgcaagatgactgcaaaacacccactgaacatcatggcaacaccagcagacgaaggacaacttctgagcatgcttgttaagctcacgaatt

SEQ ID NO: 192148 - DNA, 237 bp, Glycine max
tggatctggatgttgttactcggatggatttattggacttctttaaggaagaatgtgaacagagagaagctataatcgtatatgcaactcatatttttgatggactggagacatgggcaactcatttggcatacatacaagatggtgaactgagaagagcagaaaaaatatcaaatgttaaagagttgaaatcttcaactaatctgctgtctgttgttgaggcctggcttcgcgctg

SEQ ID NO: 192149 - DNA, 237 bp, Glycine max
  unsure (1)..(237): unsure at all n locations
catgcccccatgtttgtngttggtgtcaacgagcacgagtacaagccagagcttgatattatttccaatgctagctgcacaaccaactgccttgccccacttgccaaggttatcaatgacaggtttggcattgttgagggtttgatgaccactgttcattccatcaccgctacccagaagactgttgatggaccatcagccaaggactggagaggtggaagagctgcttcatttaac

SEQ ID NO: 192150 - DNA, 240 bp, Glycine max
gtttcagtcgcactctgcaatcctatcttgtttgcatttcaaaatctcattcatcatcatcttcttcttaaaagttaaaaggttaagagagagagagaaagatgagtagcgtgctggagcatggtgttgtgggatgttgcaaatcatggccaggctatgctaccccactggaagccatgtctggtccaagagagtctcttatttatgtaactgctgtctacacagggacaggaatagaga

SEQ ID NO: 192151 - DNA, 244 bp, Glycine max
aaactttcctcttcacctcagaatctgtaaacgaaggccatcccgacaagctgtgtgaccaggtttcagatgccatcctagatgcatgcttggagcaagacccagaaagcaaggttgcttgcgagacctgtacaaaaactaacatggttatggtctttggtgagattacaaccaaggccagcgtgaactacgagaaaatagttcgagacacttgcaaaggcattgggtttgtgtcaccagatgt

SEQ ID NO: 192152 - DNA, 248 bp, Glycine max
cttgtctcaaagattaagccatgcatgtgtaagtatgaactaattcacactgtgaaactgcgaatggctctttaaatcagttatagtttgtttgatggtatctactactcggataaccgtagtaattctagagctaatacgtgcaacaaaccccgacttctggaagggatgcatttattagataaaaggtcaacacaggctctgcctgttgctttgatgattcatgataactcgtcggatcgcaggcc

SEQ ID NO: 192153 - DNA, 266 bp, Glycine max
gcgtgctcaagtgtggcagaggaaaggtttggcttgaccccaatgaagtcaacgaaatctccatggccaattctcgccaaaacataaggaagctggttaaggatgggtttatcatcaggaagcccaccaagattcactctcgctcacgtgctcgtcgaatgaaggaagccaagaggaaaggacgtcactctggatacggtaagcgtaagggtacaagggaggcaaggcttcccactaaaattctatggatgaggagaatgcgtgtg

SEQ ID NO: 192154 - DNA, 267 bp, Glycine max
gccgggtctgtgagaacatcccaattgttctttgcggtaacaaggttgatgtgaagaacaggcaagtgaaggcaaagcaggttactttccacaggaagaagaatttacagtactatgagatttcagctaaaagcaactacaatcttgagaagcctttcctgtatttggccagaaaacttgcaggtgatcctaacttgcactttgtggagtctccagcattggctccaccagaagttctaattgatttagctgcacagcaacaacatg

SEQ ID NO: 192155 - DNA, 267 bp, Glycine max
acttgatctcatcataatcgtcagcgtcaattgaagaagatgccgatcagaaacatcgccgtcggaaggcctgaagaggcgactcaccccgacacgttgaaggcggctttggctgagttcatctcaaccttcatcttcgtgttcgccggctcaggctccggcatcgcctacaacaagctcaccgacaacggcgctgccacccctgccggcctcatctccgcctccatcgcccatgcattcgccctcttcgtcgccgtctccgtcggc

SEQ ID NO: 192156 - DNA, 266 bp, Glycine max
tagaagaggagcaggaggcatcaccattgccacaatggttaaaggtcgccaaggagaacgtgtaagactctacgtcaggggttcaattcttggatacaagaggtccaagtcaaatcaatacccaagcacctccctaatccagattgagaatgtaaactctaaggaagaagttgcgtggtactgtgggaagcgcatggcttacatctacaaagcgaaggtaaagaagaacggaagccactatcgctgcatttggggtaaggtcacca

SEQ ID NO: 192157 - DNA, 261 bp, Glycine max
gttgtgtacttgtgttaattgtgttgttgttgtaggaaatttaagtgaagagagaatgatgatgaagtctgctatgtgtgcattggtgcttgtggcactggttgtggttgaagtggggcccatggctgaggctgcggtgacttgcaacccaacacagttgactccttgtcttccggcaattaattcaggttctgcaccttcgagtgcttgttgccagaagctgaaggagcaaaagccatgcttctgtggctacctcaaaaa

SEQ ID NO: 192158 - DNA, 265 bp, Glycine max
gaaggctcctattactcaattccccaacaaaagtgcgcgcttttcggtcttcgctcaaaagaaggcaaagaaacttcggaagataattttgaaggaagatgtgactgatgtaggaaagcaagggcaacttcttgctctgagggctggctttttcagaaattacctgcttcccatgggaaaggcacaacttgttactccccagctactcaaggaaatgaagatagaagaggaaagaattgaggctgagaaaagacgggtaaaagaa

SEQ ID NO: 192159 - DNA, 264 bp, Glycine max
gggaaggagcaggatgtgtcgttgggagcgaacaagttccccgagagacagccgattgggacggcggcgcagagccaagacgacggcaaggactaccaggagccggcgccggcgccgctggttgacccgacggagtttacgtcatggtcgttttacagagcagggatagcagagtttgtggccacttttctgtttctctacatcaccgtcttaaccgttatgggagtcgccggggctaagtctaagtgtagtaccgttgggatt

SEQ ID NO: 192160 - DNA, 258 bp, Glycine max
gcttctttgtgaacatggagatgaggaaatcatgtggcttcttcttcttgctcctcctccttgtctttgcttcccaggtggtggtgcagacggagggaagagtgtgtgagtcacaaagccacgggttccatggtttgtgtaatagagaccacaactgtgctttggtctgcaggaacgaaggtttctccggtggcaggtgcaaaggcttccgccgccgctgcttttgcaccaggatttgttgagatctcatcaaacact

SEQ ID NO: 192161 - DNA, 260 bp, Glycine max
tgaaaagatttgggatcatagcaccggtgacatgggagctgatttttatcatcgatacaagggtgacataaaaatagcgaaagaaattgggctggactacttcagattctctatctcatggtcaagaatattcccaaagggcaagggagcagttaacccccttggggttaaattctacaacaatgtcatcgatgagatcctagcaaatggtttaaaaccttttgtcactctttttcattgggactttccacaagctcttg

SEQ ID NO: 192162 - DNA, 257 bp, Glycine max
gtacaggcaacaatggcaataacaaggagattttagcttacttgagtgctgcagaaacatatataggagtaaaaccagctccaatcatagcaggattctcatccaggggtcccagttccgtgcaaccattgatactaaagccagacataactgctcctggtgtgaacgtaattgctgcttttacacaaggagctggtccgtctaatcttccatcggatagacgccgatctcttttcaatgtgcacagggaacttcta

SEQ ID NO: 192163 - DNA, 145 bp, Glycine max
cacgcgtacctcagcactcggctcgacgcgtgaggcaatcaaggtgataaacactaaaactgagaagtattgggactgggtattggccaatgaaacgaagccaatatggatgcgcaatccaaaggaagttgaaaaggaggagtac

SEQ ID NO: 192164 - DNA, 265 bp, Glycine max
atgaccttcacgtttcggtgaccatgccctccattgaggttggtactgttggaggcggcacacaactcgcatctcagtcagcatgtcttaatttacttggtgtcaagggtgccaataaagaatctcccggtgcaaattccaggctactggccaccattgtagccggttcagtcctagctggggaactatcactcatgtctgcaattgcagctggacaacttgttaagagccacatgaaatacaacagatctagcagggatatatc

SEQ ID NO: 192165 - DNA, 263 bp, Glycine max
cggctcgagttcctcaatgccgtcgaatgggaaggcaaatatgtgggaggaacaacaacatctacaacaggggtcccccgagttcgtgccggcgttggggtacaaggttcgtgcttccgacatggccgacgtgccacagaagctggagcagttggagatggtcatgggttgtgcccaggaagagggaatttcccacctcgcctccgacaccgtccactacgatcccacggatctttattcctgggtccaaaccatgttaaccg

SEQ ID NO: 192166 - DNA, 267 bp, Glycine max
atcgaagacgaagatggaggacgcatcagcatcaaagttcattccacaccaaatcggaggagtccaaaacgacgcgcttcgattcggtctccatggagtcaagagcgacatcgttggttctcaccctcttcaatcttcactccaatctacaaggagaatggctgaagcgatgaagaggcaatgcaaagttaacctgtacggaactgcttttcccatgaaggaggagcttgacaggcaaatcctgtccaggttccagcggcctcctgg

SEQ ID NO: 192167 - DNA, 257 bp, Glycine max
ctcaaagtccagctgcactggaatgtcatcatcgctgctgaaaatctgcaaccggaaggtctgatgcttcatagggcaatcattgtccgccttctgagtgactttgctgtgaagaaggccaccaaagatctgggatactttcttgcagtgaccacactggagaaaataggggaaggaaaggtcagacaacatactggggatgtgctcttccctgtggttgttaatgccatcaccttcaagtttttcaagggtgagat

SEQ ID NO: 192168 - DNA, 261 bp, Glycine max
aagccaaggaatcttcccaagtcacgattgaggcaaatacagtttatggtgcattgcgcggattagagacattcagccagttgtgttctttcgattatacaactaaaacagtaaaaatatacaaggcaccttggtccatccaagataaacctagatttgcatatcgtgggcttatgctggatacatcaaggcactatttacctattgatgtaattaagcagattattgaatctatgtcctatgctaaacttaatgttctac

SEQ ID NO: 192169 - DNA, 257 bp, Glycine max
gaaacatgccactgaaagactctactgagacaaagacgggctgtcaagaacgtagaggaggtaggatgggcagttggtcagatctagtatggatcgtacatggacggtagttggagtcggtggctctcctagggtttcctcatttgggatcctggggaagaggatcaagctggcccttgcgaacagcttgatgcactatctcccttcaaccctttgagcgaaatgtggcaaaaggaaaaagaatccatggaccgacc

SEQ ID NO: 192170 - DNA, 261 bp, Glycine max
cttgtacgctaggaaggcggacatcatcttcagaggatactctggttggaattcaaggcgtatctttgaggttttggatgaaattttccccaaggatgcttatgtgcaaccatcattggtaattgtgtattttggtggcaatgattctattgatcctcacccatctggcctaggtcctcatgtaccccttgaagaatatgttgaaaacatgaggaaaattgctaatcatcttaagagcctctcggaccatattcgcattat

SEQ ID NO: 192171 - DNA, 265 bp, Glycine max
atgaaggtccttgttttcttcgttgctacaattttcgtagcatggcaatgccatgcgtacgatatgttccctctccgaatgaacactggctatggtgcccgtactccggaggtgaaatgcgcaaactggaggcttgctgtggaagcacacaacatctttggctttgagaccattcctgaagagtgcgttgaagcaacaaaggaatacatccatggcgaacaatatagatcagactccaaaacagttaaccaacaagcttactttt

SEQ ID NO: 192172 - DNA, 264 bp, Glycine max
tgagagaagcgtcttaataaacgctcttctctgaatcacctgatttcttctcttcttctcttctctttcgtttcgatcttcgatctctgaaaatgagagagtgcatttcaatccacatcggtcaggccggtattcaggtcggaaacgcctgctgggagctctactgcctcgaacacggcattcagcctgatgggcagatgccatctgataagactgttggtcgaggtgatgatgctttcaacaccttcttcagtgaaactgggg

SEQ ID NO: 192173 - DNA, 263 bp, Glycine max
acggtttccatcgcatcggatcttcactctcttctctgttctcattatgcccgtcgtttatgcagctcgtctgaccaccttcgcagattccgtgacggagagtgtctacggtcacgttcgcaaggtatcaggaccagtcgtcgttgcagatggcatggctggggctgctatgtatgaactcgtgcgtgttggtcatgataatctcattggtgaaattattcgtctcgaagggaattctgctaccatccaagtttatgaggaaa

SEQ ID NO: 192174 - DNA, 278 bp, Glycine max
gctctgaattcgtttcgaggtctcttgggatatgaagaatcgtctttctcgaagcatcacaacatttgagtgggataattgttttgtttctgtttacagcaaggataatccttacttgctttttagcatatgtggatttgaagtaaggatacttcctaaaattagaatgactcaagaagcattcagtaacacaagagatggtgtctggaatctccagaatgaacagacgaaagatcggacagctgttgctttgatcacgagttgatgatgtacacatg

SEQ ID NO: 192175 - DNA, 259 bp, Glycine max
gttcgcttgcagtcacacaagaggccaatcctattcatagctcgagatgggtgaagaagtgaaggtagttgttccagaatcagtgttgaagaagcgcaagagggaggaggaatgggcgttggccaagaagcaagaactcgatgctgccaagaagaagagagccgagagccgcaatatcatctacaacagagctaagcagtacgctaaggagtacgatcacctagagaaggaattgattcggttgaaacgcgaggccaag

SEQ ID NO: 192176 - DNA, 257 bp, Glycine max
ctggtcatcgttgggatctccatacgccggatctgctaaaatacgcttgatccatatgggcctcctcgaccacttgtgggacgacaccgtcgccggcccaaggccggaaaacggtctcggcaagctccgaaaacaccacaccttcactttccgacctagctccggcaaggaaacggagggcgggagcgtgagatcgtacggagacgaatcgtcggaggaagcgacgcgagtgacgcgtagtatcatgatcgtgaaac

SEQ ID NO: 192177 - DNA, 262 bp, Glycine max
caaccaccggccatactcactgttgttctcaagggattcgattctctctgcactcacttctagggttttctctgcgctataagcaatcatggcggatgaaacaccaaatgagatgaaggaggaggttccagaaattgttccttttgatcctaccaagaagaagaagaagaagaaaattacaattgtagatcctgctgatgaacctgtggagaaattggctgagaagacagaaaacctctcagtttccgagggggttgagact

SEQ ID NO: 192178 - DNA, 263 bp, Glycine max
ctcgagccgttgattgcaaccaccgacgtggagcttctgaagagagcgtggcgcaacgagaaggcggccccagagattctccgctacgaatctaaattggtttcccgcgtcaacaaagtcattcaactcatggaagaaattgtggaggaaaaatccagtggcggtactgatcctctttcggtgtctctatatcagatggacttggatagaactctctttttgttaagatcctatctcaggattcgcatccagaagattgaaaa

SEQ ID NO: 192179 - DNA, 263 bp, Glycine max
cctcgagccgaatcggctcgagtgaaagtgcttgtcttgtttgttgctacagttttggtagcatatgaatgccatggctcaacctaccagaagttccctctccaaatgaaaactgggtttggtgggcaatacagcaatgaggtggcatgtgccagttggaggcttggcgtggaagcaaacaacgtagtcaagtggcaaactgttcctgcagcttgcggagagtacatagctgactacgttctaggagaccaatatagatcaga

SEQ ID NO: 192180 - DNA, 259 bp, Glycine max
aacgtacctagttgttggtctttatatttagttattgacatcaacaaagtcatggaggaagttaatgtggttcaaaccaagaatggaactgtttcagtagcttctgcgtttgctggccataaggaagctatacagcaaagggaccacaaatttttaagaattgctgttgaagaagcgtataaaggggtagactgtgaagatgggggtccctttggtgctattatagtttgtaatgatgaaattgttgctagatgtcaca

SEQ ID NO: 192181 - DNA, 259 bp, Glycine max
acttgatctcatcataatcgtcagcgtcaattgaagaagatgccgatcagaaacatcgccgtcggaaggcctgaagaggcgactcaccccgacacgttgaaggcggctttggctgagttcatctcaaccttcatcttcgtgttcgccggctcaggctccggcatcgcctacaacaagctcaccgacaacggcgctgccacccctgccggcctcatctccgcctccatcgcccatgcattcgccctcttcgtcgccgtct

SEQ ID NO: 192182 - DNA, 258 bp, Glycine max
gccggcgatgcgctcctgtccttaactggccgggtcgtgcctccggtgctgttactttgaagaaattagagtgctcaaagcaagcctacgctctgtatacattagcatgggataacaccacaggattctgatcctattgtgttggccttcgggatcggagtaatgattaacagggacagtcgggggcattcgtatttcatagtcaacttagtggtaagaactgttgttaccgtgggcaactacgataacatcattgat

SEQ ID NO: 192183 - DNA, 257 bp, Glycine max
agcaccacatgctggttattcctattcaggaagagctgctgcttatgccttcggaaacattgatccatcaaatattacacgtgtgctccttcttggtccttctcaccactattacactccaaaatgtgctcttacgactgcaactgtctacaagacacccataggggacctgcctattgatttggaagtaactgaggagcttaaagctacggggaaatttgagctgatggatattcgtgttgatgaagctgaacata

SEQ ID NO: 192184 - DNA, 263 bp, Glycine max
ctagggtttggaggctatgccgaaaacgggttaaataagctcggaaaatgattctcacaaagcagtaccgatgcatacactcagctagttgtcaatgtactaaagggcatttaagtgaagatatgatattcttagtatttcataatttgaattggaatcccaagctaattgcaactctatcatgtgtgtgcaaatggtttgatgatcttgccaagcgagttctatggaaagagttttgtcgaacaagagctccgaaaatgttg

SEQ ID NO: 192185 - DNA, 261 bp, Glycine max
cgaatatcttgttgtttggagcgatccgagaaaaactctgtaaacatgttggtttaccaggacctccttacaggtgatgagcttctctctgactctcttccgttacaaggaaattgagaatggaatgctgtgggaagttgaggggaagtgggttgttaaaggagcagttgatgtagacattggtgcaaacccttctgctgagggtggaggagaagatgagggagttgatgatgcagctgttaaggttgttgacattgttga

SEQ ID NO: 192186 - DNA, 150 bp, Glycine max
ccagccacgtgttcaacgccgcgggtgtcacgggtagacccaatgtggactggtgcgaatctcacaaagttgaaaccatccgaaccaacgtcgtcggcactctcaccctcgccgacgtctgccatcataaaggcctcatcctcatcaact

SEQ ID NO: 192187 - DNA, 258 bp, Glycine max
gtagtcatgatcctcctattgttttggctaaagtagatgccaatgaggagaagaacaaagaccttgcatcacaatatgatgttaagggattcccaacaattaatattctgagaaatgggggaaagaatgttcaggaatacaaaggtccccgtgaagcagatggcatcgttgactatttgaagaaacaaagtggtcctgcttcaactgaaattaaatctgctgatgaagctactgcttttattggtgaaaataaagttg

SEQ ID NO: 192188 - DNA, 259 bp, Glycine max
aaaagaagcaccgagcgaagccagccaggttgtcttccgattccttcgtgcgtgcgattcttctgatattccaaggcgacgcaccgacaccggacccatctccggcgacatctcaccgatctccggcgaatccccggtccccactttcttccctcgaaatgaatcccgagtatgattatctgttcaagctccttcttattggagactctggtgttggtaaatcatgccttcttctgagatttgctgatgattcgtacat

SEQ ID NO: 192189 - DNA, 258 bp, Glycine max
gatggcttcttcagatgttgagtaccgttgctttgtcggtgggctcgcttgggccactgacgaccaagctctcgagagagccttctctcagtacggcgaaatcgttgaaacgaagattatcaacgatcgtgagactggaagatccaggggttttggatttgtgaccttcgcctcggagcagtccatgaaagacgccatcgaagggatgaacggccaaaaccttgacggccgtaacatcactgttaacgaagctcagtc

SEQ ID NO: 192190 - DNA, 255 bp, Glycine max
ggaagttggtgtgtgtcaccggtgctgccggttatattgcttcatggattgtcaagttcctacttgaacgtggttacactgtcacggccactgttcgaaacccaaatgatcacacgaaggtagaacatttgctaaaacttgaaggtgcaaaggagagactgcacctttttaaggcagatcttttgggtgaaaattcttttgactccattgttgagggctgtgatggcgtctttcatactgcttctccttttatta

SEQ ID NO: 192191 - DNA, 252 bp, Glycine max
cgcaccagtttcaccgcacgaatatcttgttgtttggagcgatccgagaaaaactctgtaaacatgttggtttaccaggacctccttacaggtgatgagcttctctctgactccttccgttacaaggaaattgagaatggaatgctgtgggaagttgaggggaagtgggttgttaaaggagcagttgacgtagacattggtgcaaacccttctgctgagggtggaggagaagatgagggagttgatgatgca

SEQ ID NO: 192192 - DNA, 259 bp, Glycine max
ttcacccacgtctctctcccgcttcagatcgtaaacgtctcgctgttccaagatgggtgtggctgagaacattcccgatatggaggagggtaccttggagattggaatggaatacagaactgtatctggagttgctggaccattggtcattcttgacaaagttaagggacccaaatttcaagagattgttaatattcgtttaggagatggaactactcggcgtggacaagttctagaggttgatggcgaaaaggctgtt

SEQ ID NO: 192193 - DNA, 259 bp, Glycine max
cttcaacctaacgcagcatcgctatactcttcattccatggctttgcccaatcagcaaaccgtggattaccctagtttcaaactcgttatcgtcggtgatggtggcacaggaaagacaacctttgtgaaaaggcatctcaccgtagaattcgagaagaaatatgagccaaccatcggtgtggaggttcacccattggattttttcacaaactgtggaaagattcgattctactgctgggatactgctggacaggagaag

SEQ ID NO: 192194 - DNA, 261 bp, Glycine max
actaattattgtgcttattattattgttgagaaagaaaagaatggcaaagttaataaaattctttgagtcgaacacaggggccaagattccttctgttgggttaggcacttggcaagctgagcctggtgttgtagccaaagctgtcaccacagccattctggttggatacaggcatattgattgtgctcaagcgtataacaatcaagcagagattggttctgctcttaagaagctttttgatgatggtgtggtgaagcgtg

SEQ ID NO: 192195 - DNA, 261 bp, Glycine max
cggctcgatgcgggttactgtctgttcaagctaccatctctctctctctttcttagtgcctccttgccagaagttaaaatggcccaagaaactttcctattcacatctgaatcagtgaacgaggggcaccctgacaagctctgtgaccagatctccgatgctgtgctcgatgcatgcttggagcaggaccctgacagcaaggttgcctgtgaaacctgcaccaagaccaacatggtgatggttttcggagagatcacaacc

SEQ ID NO: 192196 - DNA, 259 bp, Glycine max
cttggtgatgtccctttctgttctcttcactcttggtcttgcgagagaaagccatgccagagacgaagatttttggcatgctgtttggccaaacactcccattccaagttcattgcgagatcttctaaagcctggccctgcaagtgttgaaatcgatgatcaccctatgcaaattgaagaaacacagtacccgaaaaccttcttctataaagaagaccttcatccaggcaaaacaatgaaagtacaattcagcaagcct

SEQ ID NO: 192197 - DNA, 254 bp, Glycine max
acatcgtcaacttcgtacactccaacatctccaagaacagccgacaaccctatgcagtcagccgccgcgctggccaccagacttccgccgagtcctggggaaccggtcgtgccgtctcccgtatcccccgtgttcccggcggcggaacccatcgcgccggccagggagccttcggaaacatgtgtcgtggaggacgcatgtttgccccgaccaagatctggcgccgctggcacaggaaaatcaatgtgaaccag

SEQ ID NO: 192198 - DNA, 276 bp, Glycine max
ccatgctgtaattggccctttggaagacaataccgtgtacttctaccgatgtggtggaaaaggtcccgagttcgagctcaaaactcctccagctcaatttccaattacttttgctgtggctggggatctgggtcaaactggttggactaaatcaacactggcacatatagaccaatgtaaatatgatgtctacctgctaccaggagacctttcatatgctgattgtatgcagcatctgtgggacaattttgggaaacttgtggagccgcttgcaag

SEQ ID NO: 192199 - DNA, 266 bp, Glycine max
gagcagaggggctaaacagagaacagtacgtgtaccttgcgaactgtcggagcaggcggagcggtacgaagagatggtggagttcatgcagaaggtggtggtggggtggacgccggcgtcggagctcacggtggaggagcgcaacctcctctcggtggcctacaagaacgtgatcgggtctctgcgtgccgcgtggcgcatcgtgtcctccatcgaacagaaggaggaagggcgcaagaacgacgaccacgtgtccctcgtgaagc

SEQ ID NO: 192200 - DNA, 271 bp, Glycine max
tccatttccatttcctctctctcagtttccaagaatcttaagctatgggaaagtcttacccaaccgtgagcgctgattaccagaaggccgttgagaaggcgaagaagaagctcagaggcttcatcgctgagaagagatgcgctcctctaatgctccgtttggcatggcactctgctggaacttacgacgtgagctcgaagaccggtggtcccttcggaaccataaagcacccctccgaactcgctcacggcgctaacaacggtcttgacat

SEQ ID NO: 192201 - DNA, 272 bp, Glycine max
aaagtggtgatcaatatgtcaaagaatccaaaagttttctttgatattctaattggaaagatgaaagctggacgagtagtgatggagttgtttgccgatgcaaccccaaaaacagctgaaaacttcagggctctctgcactggggaaaaggggattggacgatctgggaaacctttacactacaaaggttctgtatttcatcgtattattccagaatttatgtgtcagggaggagatttcacaagagggaatgggaccgggggtgagtcaat

SEQ ID NO: 192202 - DNA, 288 bp, Glycine max
ttcggctcgagatttgttattagcttttgtcatgaattcacgtacactaacaattttatgtgcttttcagttcaatgatataatcaatgtcccattccaatcaaaagcatttgttgcgggttgtgtggcatatttcttggacaacacactacacaagaaggaagctgctattaggaaagatagaggaaaacattggtgggacaagtaccgttccttcaagactgacacaagaagtgaagagttttattcactgcctttcaacctaaataaatacttcccatctgtgta

SEQ ID NO: 192203 - DNA, 272 bp, Glycine max
gtgcagttccaccaaatgcaacattccagattactcttgaattagtttcatggaaaactgtttcagaagtacatgatgacaagaaggtcataaagaagatcctcaaggaaggggaaggatatgagcgtccaaatgagggggccattgttaaagtgaaactaattggtaagctacaagatggtaccgcttttttgaaaaagggccatgatgaagaagagaagctgtttgaattcaaaacagatgaggaacaagttgttgatggacttgataga

SEQ ID NO: 192204 - DNA, 272 bp, Glycine max
gggtcggatacctggttcgttatccgcatccaagttcatggggcatttggatctgagctacaaccacttatgtggaaccatcccaattgggtctccgtttgaacaccttgatgcggcgtcgtttagtaacaatgattgtttgtgtggaaaccccttgaaggcttgttgatgggtgacccgaataagtacgtattgggttgttgtcggtgaatattccaagatataatgatttggttatagtgaaggagcccaagtgtgattttaattttatg

SEQ ID NO: 192205 - DNA, 271 bp, Glycine max
aatctctctctctctctcaaccataatagtcatgggtttgaaggaggattttgagcggtatgctgagaaagcaaagactttgccaccgactcaatcaaacgaagacttgcttatcctttatggattgtacaaacaggccaccgttggacctgtcaacaccagccgtcctggaatgttcaacatgagggacagagctaaatgggatgcatggaaggctgttgaagggaaatccaaggacgaagcaatgggtgattacatcattaaggtgaaa

SEQ ID NO: 192206 - DNA, 271 bp, Glycine max
cttgatctcatcataatcgtcagcgtcaattgaagaagatgccgatcagaaacatcgccgtcggaaggcctgaagaggcgactcaccccgacacgttgaaggcggctttggctgagttcatctcaaccttcatcttcgtgttcgccggctcaggctccggcatcgcctacaacaagctcaccgacaacggcgctgccacccctgccggcctcatctccgcctccatcgcccatgcattcgccctcttcgtcgccgtctccgtcggcgccaa

SEQ ID NO: 192207 - DNA, 271 bp, Glycine max
gcagacttaacaacagcacaaagcgggttactgtctgttcaagctaccatctctctctctctttcttagtgcctccttcccagaagttaaaatggcccaagaaactttcctattcacatctgaatcagtgaacgaggggcaccctgacaagctctgtgaccagatctccgatgctgtgctcgatgcatgcttggagcaggaccctgacagcaaggttgcctgtgaaacctgcaccaagaccaacatggtgatggttttcggagagatcaca

SEQ ID NO: 192208 - DNA, 275 bp, Glycine max
aggacatcaacctcagctctcgaacccctctgctcttgctgttatgtttcaccactctcaccgaggctgtatggttaaccatccccagcaagggaaccaagtgcatgtccgaggaaatccagacacacgttgtcgttttagcagattactatgttgtagccgatgatgtccagggtcaccaacttcaaactatttccgccaaggtgacatccccttatggaaataatcttcaccagaatgaaaatgttacccacggtcagtttgcatttacaact

SEQ ID NO: 192209 - DNA, 267 bp, Glycine max
ccccaacaacctaatcccgtccctcccagacgacgtcgcattgaactgcctaggacgcatccctcggtcccagcacccaaccctctccgcggtctccaaacccatccgcaccctcctctcttccccaatcctcttcaccacgcgaaccctcctccaatgcacccaacccctcctctacctcactctccgctcacgccactcctctctcctccaattcttcacgctccaccgcacaaaccctaatcaccccctcctcgctccccttcc

SEQ ID NO: 192210 - DNA, 279 bp, Glycine max
ggcagcatggcggttaagcagggtggagctgcagttggagtctgagaaggctgggcgaaggagggagaagatggaggaaatcgaagcgaaaatcaaagctctgagggaggagcaaacggctgcattggatagaattgaagcagaatatagggagcagttggcagggctgagaagagatgctgaaagcaaggagcaaaagttggctgaacaatgggctgcaaaacacttgcgacttactaagtttctagaacaggtagggtgcagatcaaggctcactga

SEQ ID NO: 192211 - DNA, 273 bp, Glycine max
acccctcttaataccaattttctagggtttatacaattttcgatggcttcttcagatgttgagtaccgttgctttgtcggtgggctcgcttggccccatgacgaccaagctctcgagagagccttctctcagtacggcgaaatcgttgaaacgaaggtctgtttgttgcaggcatcacatctgatctcacacgattcggattcggaattctctcgatccctttctgatctgtgatctctgatctgtttgcgttacttgatcttatgatacttg

SEQ ID NO: 192212 - DNA, 268 bp, Glycine max
ggaatagtgctgcaatggcttcaagtcaggaggaggtgacccttttgggagctactggaagcccatttgtgtgcagggttcatattgccctcaagttgaagggagttcaatacaaatatgtcgaagaaaatttgaggaacaagagtgaactgcttctcaaatccaacccagttcacaagaaggttccagtgtttattcacaatgagaagcccatagcagagtctcttgtgattgttgaatacattgatgagacatggaagaacaaccc

SEQ ID NO: 192213 - DNA, 122 bp, Glycine max
ctgattgcaatgcttctctttcccagcagagaaagaagcgacagattcctgcaactttggctcctgttgaagctctagaggcatatacccagatatctagtcacccctttcacacaacatac

SEQ ID NO: 192214 - DNA, 268 bp, Glycine max
gccttcagaaggaatatagagccctttgtaaagagccagtttctcatgttgtggctcgtccttctccaagtgatattcttgagtggcattatgtgttggagggaagtgaaggaacaccttttgcaggtggatattactatggaaaaatcaagtttcctcctgaatatccatataaacctcctggaatcagcatgactacacctaatggacggttcatgacacagaaaaagatctgtttgtctatgagtgactttcatccagaaagttg

SEQ ID NO: 192215 - DNA, 284 bp, Glycine max
cggacttcggctcgagctttgctcttactctacattactgtgctcacagtcatagggtacaagcatcagactgacctcaaggaaaatggtgaaatctgtggtggggttggcattcttggcattgcatgggcctttggtggcatgatcttcatccttgtctactgcactgctgggatctcagggggtcacattaacccagcggtgacatttgggctgtttttggctcgcaaggtgtctttgatccgagccatcatgtacatggtggctcagtgcttaggtgctat

SEQ ID NO: 192216 - DNA, 263 bp, Glycine max
ggctttcgggctcttggcgctcatcctcttcttcattgcttcctcttcctctcatctccctcgcccttccgatgacgccgacgacgcgctcttctacgagtcgttcgacgaggattttcatggacggtggattgtatccgacaaggaggattacaatggtgtctggaagcatgccaagagtgatgggcatgatgattatggacttcttgttagtgaacaagccaggaaatatgctatagtcaaagaacttgccgagtctgtca

SEQ ID NO: 192217 - DNA, 266 bp, Glycine max; identical to SEQ ID NO: 152364

SEQ ID NO: 192218 - DNA, 268 bp, Glycine max
agagcactgtgcaagaagatgctggatccaagccacaatggaatgagagctttcttttcactgtctctgacagtgcatctgaacttaatctaaagataatggataaagacaactttagtcaagatgattgtcttggcgtggcaaccattcatctggatccagtgtttgaagcgggtagcattccagaaactgcttacaaggttgtgaaggacgaagaatattgtggagagattaaggtggctctcacttttactgttgagaaaaatga

SEQ ID NO: 192219 - DNA, 269 bp, Glycine max
ctcgagccgtttcttctctctctgtgtgtgcgcttcaacggcaaccagaagcagccatggccactgcaaggactgtgaaggatgtttcacctcatgagttcgttaaggcgtactcctctcacctcaagcgatccggcaagatggagctgccagagtggactgatattgtgaaaactgcaagatttaaggagttggctccttatgatcctgactggtactatgtcagagctgcttccatggcaagaaagatctacttgagaggaggactt

SEQ ID NO: 192220 - DNA, 269 bp, Glycine max
gcttggtgatgtccctttctgtgctcttcactcttggtcttgcgagagaaagccatgccagagacgaagatttttggcatgctgtttggccaaacactcccattccaagttcattgcgagatcttctaaagcctggccctgcaagtgttgaaatcgatgatcaccctatgcaaattgaagaaacacagtacccgaaaaccttcttctataaagaagaccttcatccaggcaaaacaatgaaagtacaattcagcaagcctccctttcaa

SEQ ID NO: 192221 - DNA, 268 bp, Glycine max
atgaaagtgcttgtcttgtttgttgctacagttttggtagcatatgaatgccatggctcagactaccagaagttccctctccaaatgaaaactgggtttggtgggcaatacagcaatgaggtggcatgtgccagttggaggcttggcgtggaagcaaacaacgtagtcaagtggcaaactgttcctgcagcttgcggagagtacatagctgactacgttctaggagaccaatatagatcagattccaaaacagttaaccaacaagctt

SEQ ID NO: 192222 - DNA, 274 bp, Glycine max
ctggtgccagcagccgcggtaattccagctccaatagcgtatatttaagttgttgcagttaaaaagctcgtagttggaccttgggttgggtcgatcggtccgcctccggtgtgcaccggtcggctcgtcccttctgccggcgatgcgctcctgtccttaactggccgggtcgtgcctccggtgctgttactttgaagaaattagagtgctcaaagcaagcctacgctctgtatacattagcatgggataacaccacaggattctgatcctcttg

SEQ ID NO: 192223 - DNA, 269 bp, Glycine max
cacggttcttcaattcaatcaaatcttgtttctatggaaggaaattggtgtttgattcattatcaaggtttctcatcagctaccagcacttcacattctacccagttttgtgctttgcaagggtcaatttgtacctccagactttgttgctgttgttctctaggagaaaggtgccagatagagcctttaacataatggggatccttgtgttttgggtttggttccctctgttgatctcttcactaccaaattggggagaaagggtcatg

SEQ ID NO: 192224 - DNA, 270 bp, Glycine max
aaatgaaggtccttgttttcttcgttgctacaattttcgtagcatggcaatgccatgcgtacgatatgttccctctccgaatgaacactggctatggtgcccgtactccggaggtgaaatgcgcaagttggcggcttgctgtggaagcacacaacatctttggctttgagaccattcctgaagagtgcgttgaagcaacaaaggaatacatccatggcgaacaatatagatcagactccaaaacagttaaccaacaagcttacttttatg

SEQ ID NO: 192225 - DNA, 269 bp, Glycine max
ctcgagccgatttggatcacttcctgttattcaagatggtgattatactctctatgaatctcacgcaataatcagatactttgcagagaagtataaagaccaagggacagacttgttgggaaagacaatagaagaaaaaggtctagtggaacaatggcttgaagtagaagctcataactttcacccaccactctacaatttggttattaatgttctgtttgccccattaacgggtgctccttctgaccaaaaagtgatagaagagagtg

SEQ ID NO: 192226 - DNA, 266 bp, Glycine max
tgatgatgatgatgggttcaaacacaaaaccccttgtgcacctttctcttctaattttggttctcttttcttcttcaaccgaatccctcagattcgaactccaatctgggcacaccaaatgcatctccgaggacatcaagagcaattccatgaccgtgggcaagtaccaaattgttaactccaacgagggtcagcctcttcccgattcccacagagtcaccgtcagggtgacttcgtcttatgggaacaactatcactacggggat

SEQ ID NO: 192227 - DNA, 263 bp, Glycine max
gagagatccatccatcaattccaatggccgatcagctcaccgacgaacagatctccgagttcaaggaagccttcagcctcttcgacaaggacggggatggttgtattaccaccaaggaacttgggaccgtgatgcggtcacttggccagaacccaactgaggcagagctgcaggacatgataaatgaggttgatgctgatgggaatggtaccattgatttcccagaattcctgaatctcatggctcgcaagatgaaagacact

SEQ ID NO: 192228 - DNA, 265 bp, Glycine max
aaaaaataaaaatcaaagagcataatgtcagggatcattcacaagattggggagacccttcatgtgggagggcacaagaaggaggaggagcataagggtgagcaccatgctggagaatacaaaggggagcaccatggtgaacacagtagtgagtacaaaggagagcatcatggtgaacacaaagctggagagtaccatggtgagcacaagccagagcacaaagaggggttcctagacaaagtcaaggacaagatccatggtgagg

SEQ ID NO: 192229 - DNA, 265 bp, Glycine max
ccagtccttaacgggatggtactgactttcatacaggtgctgcatggctgtcgtcagctcgtgtcgtgagatgtttggtcaagtcctataacgagcgaaaccctcgttttgtgttgctgagacatgcgcctaaggagaaagtctttgcaaccgaagtgagccgaggagccgagtgacgcgccagcgctactaattgagcgccagcacgtagctgtgctgtcagtaagaagggagccggcgcctttcgaattcgaagcactttcta

SEQ ID NO: 192230 - DNA, 269 bp, Glycine max
gccgcagcacgaggagcagcctcaggaggagaaggatgtctcacaggaagttcgagcacccaaggcacggttcactgggatttcttcccaggaagcgtgctgctcgtcacaggggaaaagtgaaggcattccccaaggatgacccatccaaggcacccaagctcactgcattcttgggttacaaggccggtatgactcacattgttagagaggtcgagaagccacgatcaaagcttcacaagaaggaaacttgtgagcctgttacaatt

SEQ ID NO: 192231 - DNA, 269 bp, Glycine max
ctcgagccgcggattcgccatcatggggaagaagaagaagagagtttcctcgaaggtgtggtgctattactgcgatcgcgaattcgacgacgagaagatcttggtgcagcatcagaaagccaagcacttcaagtgccatgtctgccacaagaagctctccaccgccggcggcatggccatccacgtcctccaggttcacaaggaatccgtcactaaggtgcccaatgcaaagcctggtagagagagtacggatattgaaatatatggaa

SEQ ID NO: 192232 - DNA, 267 bp, Glycine max
gaatgatttaccattgcaaccaggcacagcagatatagttttcagcatttgttataatacagatgattgggagttgattaataagtatgcaaaaagatttgtcatggctggcgtaaaactacgacaaacctcattggaaacatggatggaatttgctgccaaaagaggagacattcactcattgtggaaaatagaaaagttgagatccaattcaatgaagcagcacactttgataactgggttttcttgtgtcaagggtcttctgtt

SEQ ID NO: 192233 - DNA, 266 bp, Glycine max
cctaactcctctcgtcgtcacaaaaagtcttcttctccgatcgttacgatgttggaactccgtctcgtgcaaggttcccttctgaagaaggttctggaatcgatcaaggagctcgtaaacgacgcgaacttcgactgctcctccaccgggttctccctccaggccatggattccagccacgtcgccctcgttgcgctcctcctccggtccgagggctttgagcactaccgctgcgaccgcaatacctccatgggcatgaacctcaa

SEQ ID NO: 192234 - DNA, 264 bp, Glycine max
ctgaaaggcagcgatggaagaagacttcgacatccccggcggcgaggaaatggatctcggcgaagacgaggtcggcgaggagagggagatcggctctggcggcctcaagaagaagctcctcaaggaaggtcaaggctgggaaacccccgaagtcggtgacgaagtccaagttcattacacggggactttgctcgacgggactaagttcgattcgagccgcgacagggattctcccttcagcttcacgctcggacaagggcaagt

SEQ ID NO: 192235 - DNA, 270 bp, Glycine max
cctctctgcaatccacagccgaaaatgcctttcaagaggtacgttgagatcgggagggttgctcaaatcaactacggcaaggaatatggcaggctcgtcgtcatcgtcgacgtcattgaccagaacagagcacttgtcgatgcccctgatatggtgaggtcccaagtcaatttcaaaaggctttcccttaccgacatcaagattgacatcaagagggtccctaagaagaaagatcttgtcaaagccatggaggatgctgatgttaagaac

SEQ ID NO: 192236 - DNA, 270 bp, Glycine max
attttccctcactttctcgctcgccaaacgcccctctctctcctccaatggccgaccagctcaccgacgaccagatcgccgagttcaaggaggccttcagcctcttcgacaaggacggcgatggttgtattactactaaggaacttgggactgtgatgcggtcactagggcaaaacccaactgaggcagaactgcaggatatgattaatgaggttgatgctgatggcaatggaaccatcgacttcccagagttcctcaacctgatggctc

SEQ ID NO: 192237 - DNA, 275 bp, Glycine max
gcggattcagtgtcggtggacatggaagccatctctcctccacctgaggaacatataataagaactcgtcatggtcgtgtctccgttgctgtgtatggggaccaggacaagccagcgctaatcacgtatcctgatttggctttaaatctatgtctcctgctttcaggggttattattttgtccagaagcctgttcactgctgctccacaatttctgtatatatcatattagtccacctgggcatgagttgggagctgctgccattgatccagatg

SEQ ID NO: 192238 - DNA, 278 bp, Glycine max
caagatcaaaggcagggacaagcatggccgcaagatccttcgcattatcgccaaattcttcccagcacggttggtgagtgttgaggttctgaaaaagtacctggaggagagggttttcccgaagctgatggggaagaggaaattcgcggtgctgtacgtgcacaccggcgtccagaggagcgagacattttcccggaatctccggtctccggtggatctacgatgcgattccggcgaacgtgaaggagaatctcgaagccgtttattttattcaccgg

SEQ ID NO: 192239 - DNA, 292 bp, Glycine max
ctcgagccgctcccaagagcacgcaccaccactattgcacttcttcctcgttctccctctttttcttcttcttcgctaaacccttttttctatctcactaacacaacaatgggagacgagaagaagggcaagcctgctgcttccggcgtgtggtccaccatcaagcctttcgtcaatggtggagcctccggcatgctcgccacctgcgtcattcaacccatcgatatgatcaaggtgaggattcaacttgggcaaggatcagctgcgcaggtcacttccaccatgcttaaga

SEQ ID NO: 192240 - DNA, 110 bp, Glycine max
gttgttactgctgctcttttctctattgttttctctttagttctctcttcccctttctttatctttatcttcttctgctgagattgtttaagcttttcttccattaacat

SEQ ID NO: 192241 - DNA, 278 bp, Glycine max
  unsure (1)..(278): unsure at all n locations
ttcgtctcgagggttattgaatgcttcatggttttcattattgttgtttcccatcactatgcaacttctttatctcttattgatatacttaccgagatcatanttaagtacggtgcggtagaagatcgacgcatttttccatttttcttcgaggttgaaccgattcatgtacggtttcaaagtggtagttttgaaatagcttttgattctcatgccaaccgtgtggagtctgagtgtttacagaggtggaaaattactctgaaaaaagtaactgattt

SEQ ID NO: 192242 - DNA, 265 bp, Glycine max
ctcgagccgcgctcgatgggaattgcgcttcaaggcgtctcgtagggctaatccgcctcacgagggtcaccaacggcacgtgcctttggggggccgaggccccctactgctggtcggcaaacggacggcgggcgcacgcgtcgcttctagcccggattctgacttagaggcgttgagtcataatccaacgcacggtagcttcgcgccactggcttttcaaccaagcgcgatgaccaattgtgcgaatcaacggttcctctcgtac

SEQ ID NO: 192243 - DNA, 265 bp, Glycine max
acactgcataccttatgtcttccgaattcgaagttaatttgcaagatggctaaggaaaaggctcagatcaacattgtggtggttggtcatgtggaccctgaggaggcaaccaccattaacgagctgaagaagcctgttgtggagaaagatgctccagggcatgccatatgagggcatgcacgtacgggctcggaggggaaccagaaaattatgttaacaaaataatctggaaccctaatgtatcagtgtcatcatcagtgtgtag

SEQ ID NO: 192244 - DNA, 288 bp, Glycine max
  unsure (1)..(288): unsure at all n locations
ggaggcactgtggcagaagtcctaggagtgtaaaacagagacgcaaaatgaagacgatcttgtcgtctgagaccatgaatattcccgacggcgtgagcatcaaggttcacgctaaggttatcgaggttgagggccctcgtggaaaactcgtgcgagacttccaccantctgaacttggtccttccaacttattaccgacgatggcggtaaaaggaagctcaagattgattcttggtttggttctcgtaaaacctccgccgccatccgcaccgccctcagccacgttga

SEQ ID NO: 192245 - DNA, 282 bp, Glycine max
ctgacagacagcatagtctctggtgcaagaatcaattgagcaagcatgggaatgttgttggtggtggtctcatacgctgtccttttcctggttctattcctcggcgtgaagtttgttttccaaagcagaaaattgagaaacataccaccaggtcctcctcctcttcccataataggaaaccttaacctcctcgaacagccaatccaccgtttcttccaacgcatgtcgaaacagtacggcaacgtggtttccctctggttcggttcacgtctggccgttgtc

SEQ ID NO: 192246 - DNA, 278 bp, Glycine max
ggagggaggaagatggtgtaataccatcagaaactgtgtctatagaaaaaatactcgtcgtggatcctcaaaatacatggaaaatcaaataccattcacgggaatattgagcaacaaacctgaagaaaaccctgatttctttaactggaatagagttaaattacggtactgtgatggagcatctttcagtggagatagtgaagatgagtctgcacagctccagtttcgaggacaaaaaatatggctagctgcaatggaggaattaatgtccaaaggaa

SEQ ID NO: 192247 - DNA, 263 bp, Glycine max
gggagtttcagttaacgtacctagttgttggtctttatatttagttattgacatcaacaaagtcatggaggaagttaatgtggttcaaaccaagaatggaactgtttcagtagcttctgcgtttgctggccataaggaagctatacagcaaagggaccacaaatttttaagaattgctgttgaagaagcgtataaaggggtagactgtgaagatgggggtccctttggtgctattatagtttgtaatgatgaaattgttgcta

SEQ ID NO: 192248 - DNA, 264 bp, Glycine max
cgtccctccttcctctgccttataattcttgtgacccttttcgctggtagcattgaaagtgcaccagcaaacgtgaagccaagccattatgctgcacccttcaataggagtgtttttccttctggttttctatttggaataggctctgcagcttaccagatagaaggagcagcagctatagatcacagaggaccaagtatatgggacacctatactaaacagcaaccagggaagatttgggatcatagtgatggaagtctagca

SEQ ID NO: 192249 - DNA, 265 bp, Glycine max
gtcacacttcagtgaatacatcaagcgtgggatagaagctgatggtattgaggcactgtataaaaatgttcatgctgccatccgggctgatcctactctcaagaaatctgataagcagaccccgaaggagcacaagaggtacaacttaaagaagctgacatatgaggagaggaaggctaagttgatttcacgtgtggcagctctcaactctgctgctgataatgatgaagatgatgagtgaaagttcattgcagatgccttctca

SEQ ID NO: 192250 - DNA, 284 bp, Glycine max
gctatggatggaaaagggttcagagccattaaccgaaaccgagaaggcagaccttgaagccattgctgcactcaaagagtctgcagcctttgaattcaaggaaaagggtaatcaatatgtgaagatgggcaagaagcattactctgatgccattgattactacacgagggcaattgatcagaaagccttgagtgactctgagacctctattctctttgcaaatagagcccatgtgaatttgcttctagggaatcttagacgtgctctaacagattctaatgagg

SEQ ID NO: 192251 - DNA, 261 bp, Glycine max
caggtggataagtctgcatggatgactgatgaagaatttgctagagaaacgattgctggtgtaaatccaaacgtcattaagattcttgaggagttcccaccacgtagcaagctagatacacaagcctacggtgatcatacctgtataataacaaaacaacatttggaacctaacttgggtgggctcactgttgagcaggctatccagagcaagaagctgttcatcttagatcaccatgactatctcagtccatatttgagg

SEQ ID NO: 192252 - DNA, 266 bp, Glycine max
gcaaagttgggttatgctagtgaccttgcaggaagtcaggaacttgctgaaggtagtcgtgcaacacaggctcttctgactaattatgcacagacacctggccaaggaatgactcctttgcgaacccctcagagaacaccggctggtaaaggtgatgctatcatgatggaagctgaaaatctggccaggctgagggagtctcaaacaccattgttaggaggagagaacccagagttgcatccttcagatttttccggtgtcactcc

SEQ ID NO: 192253 - DNA, 252 bp, Glycine max
cttcctctcatggaatgagaggtttaatgtgattctcggaacagcgaaggccttggcacacttgcaccattccaacattattcactataacattaagtcaaccaatgtccttcttgatagttacggtgaaccaaaagtaggggactttggcctagcaagactgttgccaatgcttgatcgatacgttttgagcagcaaaattcagagcgcactcggctacatggcgccagagtttgcctgcaagacggtgaa

SEQ ID NO: 192254 - DNA, 275 bp, Glycine max
attcggatccagagcgccggagcagtaactcgtggaattgctagcaatggcgaggatcaatgtttacgagatgacgcagaagacgaaggctgatctgttgaatcagctgaaggacctcaaggccgagcttgccttgcttcgagttgctaaggtcaccggcggtgcacctaacaagctctctaagatcaaggtcgtgaggtatgaacattgcccaggctatgacggagatttctcagaagcagaaggccgcgttgagggatgcctacaagaacaag

SEQ ID NO: 192255 - DNA, 261 bp, Glycine max
gcattatcgccaaattcttcccaggtagattgattaattaattaattaaatccctaattcctttttttttatgtgcatgaattttttaaatcttcggtaattgttttcattgaggacagcacggttggtgagtgttgaggttctgaaaaagtatctggaggagagggttttcccgaagctgatggggaagaggaaattcgcggtgctgtacgtgcacaccggcgtccagaggagcgagaattttcccggaatctccggtct

SEQ ID NO: 192256 - DNA, 271 bp, Glycine max
gcccattgtgagggagaagccaactgttgaccttgttaaggtaacagatgaaatgaaggcattcaaagcttattataagcttcgtcttgaacgcaccaacaaacgccactacggtgcgcgcctaaagaaggccgcagaagcagagaaagaggacaaaaaatgaggtccttgagaagacagtttgtaattcatattatagttgtgagaaaattttgtttgatgttctgcacccttagctttatggagatcatgagttttaaaacaccgctat

SEQ ID NO: 192257 - DNA, 259 bp, Glycine max
aatcaagaaccctaactacaaagggaaatggaaaactccatggatagataatccagaatttgaagacgaccctgatctttatgtgcttaagcctatcaagtatgtgggcattgaagtttggcaggttaaaggcggttcagtttttgacaatgttttgatttgtgatgaccctgattatctaaaacaagttgttgaggaagtgtttgccaacagggagattgaaaaggaaggttttgaagaagcagagaaagtaaggaaa

SEQ ID NO: 192258 - DNA, 274 bp, Glycine max
attcggctcgagttacagcggggatggctgacttcatctccaccttgatcttcgtgttcgccggttcaggttccggcatcgcctacaacaagctcaccgacaacggcgccgccactcccgccggcctcatctccgcttccatcgcccatgctttcgccctcttcgtcgccgtctccgtcggcgccaacatctccggcggccacgtcaaccccgccgtcaccttcggcgccttcgtgggcggcaacatcaccttactccgcggcatcgtctacgt

SEQ ID NO: 192259 - DNA, 278 bp, Glycine max
gttcggctcgaggataaggtgatcatagagcatattataagagagtgaaaactaatggaggttggcctcaagaaggagaacatggggtttgaggaaactgagttaaggcttggactgcctggaaacggaggcactgaagaagtgctcatcaggaagaggggtttctctgagactgaaactggtcatgaagatgagtctgccaccactgtggatttgatgcttaatctttcttctaaggaggccgcaaccactgctgctgctgctgcagatccaactga

SEQ ID NO: 192260 - DNA, 272 bp, Glycine max
tggataaccagcaagcccctttcattgaaagggcgcagtgaactgtaattgtgaaaaggttggaagatctggccaaagaaggtgatagccctgtagattcgttcccatggttcgatccttcccagtaaaacgcggcgtgttcgaattctgatcgcttttacgcgagaaagggggaccaccctctaagcctaagtattcctcaatgaccgatagcgtacaagtaccgtgagggaaaggtgaaaagaaccctatttagggagtgcaatagagaa

SEQ ID NO: 192261 - DNA, 279 bp, Glycine max
ggagggaggaggatggtgtaataccatcagaaactgtgtctatagaaaaaatactcgtcgtggatcctcaaaatacatggaaaatcaaataccattcacgggaatattgagcaacaaacctgaagaaaaccctgatttctttaactggaatagagttaaattacggtactgtgatggagcatctttcagtggagatagtgaagatgagtctgcacagctccagtttcgaggacaaaaaatatggctagctgcaatggaggaattaatgtccaaaggaat

SEQ ID NO: 192262 - DNA, 293 bp, Glycine max
cacgcgtacggcacgacggctacctccatggtgaagcttatgcttttctctgctctcatactcttgtccttgcaagcagttgtgtctgtaacaccactgcattttcaacatccactagaccccttaaccaaacaagagataagtcttgtccaaaccatagtccaaaacaagtacccatgctcaagtaacaggttgagcttccactacattggactccccgctcctgaaaaggatgccatcctcaaatgggaatccatcaaaccaatagttataactgtccctcgcaaagcctt

SEQ ID NO: 192263 - DNA, 267 bp, Glycine max
agtggagccggaggaaggtcacgcacttcgggagtggcgccgtcaaaatgccattcagcttgaggagaaggagataaggcgaaaaagaaatgagactgaagattattgaggaagctgaggagtataaggtggctttctatgagaaaaggaagcttaatgttgagactaacaaggtgcaaaacagagaaagggaaaagttatacttggctaatcaagagaaattccacaaagtggctgttctaaattactggaaagctattggggaga

SEQ ID NO: 192264 - DNA, 259 bp, Glycine max
gtccccataaggaggtatcctaggaaaagtgaagcaacatacccctcaaggtcaatgtatgtgtacgggtcaatatgggatgcatcttcttgggcaacagaggatggaaaatacaaagctaattataattaccaacccttcgttggtaggtacaaaaacttcaaactgcaaggttgcactagtgaaagctctgcctcgtgcaagccaccttctttctccccatctggctttggtagcctcagtcctcagcagtttaggg

SEQ ID NO: 192265 - DNA, 254 bp, Glycine max
cagcaatggtgtacaagaaggctcagaaatcaaaagcctacttcaagagatatcaagtcaagttcaagagaagaagagagggaaaaaccgattaccgtgccaggattcggttgattaatcaggacaagaacatatataacactccgaaataccgatttgttgttcgtctttagcaacaaggacattgttgcataaataatatctgctagcattgctggcgatattgttcttgctgcagcatatgcacatgagct

SEQ ID NO: 192266 - DNA, 258 bp, Glycine max
tgggaacttcctctcatggaatgagaggtttaatgtgattctcggaacagcgaaggccttggcacacttgcaccattccaacattattcactataacattaagtcaaccaatgtccttcttgatagttacggtgaaccaaaagtaggggactttggcctagcaagactgttgccaatgcttgatcgatacgttttgagcagcaaaattcagagcgcactcggctacatggcgccagagtttgcctgcaagacggtgaa

SEQ ID NO: 192267 - DNA, 257 bp, Glycine max
cggctcgaggcttgttttgtttgttgctacagttttggtagcatatgaatgccatggctcagactaccagaagttccctctccaaatgacaactgggtttggtgggcaatacagcaatgaggtggcatgtgccagttggaggcttggcgtggaagcaaacaacgtagtcaagtggcaaactgttcctgcagcttgcggagagtacatagctgactacgttctaggagaccaatatagatcagattccaaaacagtta

SEQ ID NO: 192268 - DNA, 275 bp, Glycine max
tggagttggacggcgttctcctcggcatgtgcaaccctctcctcgacatctctgccgtcgtcgacgacgctttcttgcaaaaatacggtatcaagttgaacgatgcgattctcgctgaggataagcacaaacctatgtatgaagaattggctaacaatcctaatgtggagtacattgctggaggtgctactcagaattcaatcagggttgctcagtggatgcttcaagcaccaggtgccacaagttacataggttgcataggaaaggacaaattt

SEQ ID NO: 192269 - DNA, 254 bp, Glycine max
gtggctgcatcgaaagctgcaaaggctgcaagatctgcagccgaggaaaaagccgagactgcagcaaaggcagttgcagctgccaagagggctttggatttggttgcctctttctctgaagaggcagtgagcagcaaggagaggagcctgaagaagaacaagctcaagaagcacctcccagttcatctcttgtacaaaaaataccaacccattgaaaattgtgggactgatgaagaattggccaggaagttaca

SEQ ID NO: 192270 - DNA, 249 bp, Glycine max
gctacccactctcttcttccaagtccaaccacgcttttctctacagtcatgggcaaggtcaagatcggaatcaacggatttggaagaattggccgtttggttgccagagtcgctctgcaaagagacgatgtggagctcgttgccgttaacgaccctttcattaccaccgattacatgacatacatgtttaaatacgacagtgttcacggacactggaagcatcacgatgtcaccgttaaggacgagaag

SEQ ID NO: 192271 - DNA, 256 bp, Glycine max
gattgatgtatcctagtcatgctcgcatgtggatggcacctatccggactgggatagtagatcacaaattgggcgattacgagtcgactatggatgattggcaccactttgttgatgaaacaaaaacctactatggtgttgatatgagcactttaacgaggcctttttcggaggagcagagaaaatactatctacagacatcattgtggaacaaccttcatccacatcaagtcgtaggaactgctggtataataaa

SEQ ID NO: 192272 - DNA, 252 bp, Glycine max
tgagaagcgtgagagacttctcgtttatgatgagagctaagatagtttagttgtcaagtcataaatcagtatcatcactttaaatttcattagaagctgtcaaaatgtcacggaagggtttgatggagcaagacctgagtaagttggatgtaacaaagttgcatccactttctctagaagtcatatctcggcaggctactattaatatcggcactataggtcacgtggcccatggcaagtcaacagttgtga

SEQ ID NO: 192273 - DNA, 261 bp, Glycine max
tgaaaactggctatggtgagcgttcttcggaggtaaaatgcgcaagttttaggcttgctgtggaagcacacaacatccgagcctttaaaaccattcctgaagagtgcgttgaaccaacaaaggactacattaatggcgaacaatttagatcagactctaaaacagttaaccaacaagctttcttttatgctagtgaacgcgaagtccatcacaacgacatatttatattcggcatagataacaccgtactctctaatatcc

SEQ ID NO: 192274 - DNA, 195 bp, Glycine max
ctcgagccgctcgagccgattcggctcgaggagagtttgggtttggtctctccacggtctccttggtgaccaaccgtgattgcccatcgaatgctcagttcctagatacatatgttcacgctgctgatggtactccgttactcatcaagaacgcaatctgtgtctttgaacaatatggcagcatcatgtggcgtc

SEQ ID NO: 192275 - DNA, 198 bp, Glycine max
tctcgagccgaatcggctcgagttcacctccatcttttaacagttactcctcgaaacttctgctgatgggtggcattgcaatcggacgcttggatgattctttcagtttaacctcaatcaaggcctatattgctgagttccattcaaccttgctctttgtttttgccggtgttggttcagccatagcctatggtaagt

SEQ ID NO: 192276 - DNA, 219 bp, Glycine max
actcgtacgtgagctcggcacgcggctccactcaaccaccacacctctcctcgttcacgctacccctttctgctcttcttctacctttcaagttttaaaagtataaagatggcagagacattcctatttacctcagagtcggtgaacgagggacaccctgacaagctctgcgaccaaatctccgatgctgtcctcgacgcttgcctcgagcaggaccca

SEQ ID NO: 192277 - DNA, 195 bp, Glycine max
gtttccttcttcaccgcatcaatggagttggacggcgttctcctcggcatgtgcaaccctctcctcgacatctctgccgtcgtcgacgacgctttcttgcaaaaatacggtatcaagttgaacgatgcgattctcgctgaggataagcacaaacctatgtatgaagaattggctaacaatcctaatgtggagtac

SEQ ID NO: 192278 - DNA, 194 bp, Glycine max
  unsure (1)..(194): unsure at all n locations
cgcgttcactgcaatgttatatcccctactcatcagttctatgggcattattgtctgtttgattactactctntttgcaactgatttctttgngatcaaggctgtcaaggaaattgaaccagctctaaaaaagcagcttatcntctctacagtactcatgnctgttggaattgcnattnttagttggattgctc

SEQ ID NO: 192279 - DNA, 162 bp, Glycine max
tctcgcgccgagttccaagccttcgacctattttcccatttaaataggtaagacggagcagctgctctgttgcaccgtgccatggaatcgagatctcccagtgggccatttttggcctgcagtttcggcgattacggggtccaaatgcagtcactgatgaat

SEQ ID NO: 192280 - DNA, 208 bp, Glycine max
ctgaattcggctcgctctcgagccgattcggctcgaggttattgcatccagactgtattagtactattcgtatagctatgagcttacaggagatcttgctgaaattcggggcaacctccttgcattgcaccgatttgcgactctccgccatgatgagctgggacaggaaacacttcttaatttgttacttcgaaactaccttcactac

SEQ ID NO: 192281 - DNA, 193 bp, Glycine max
ctggaggcatcaccattgccacaatggttacaggtcgccaaggagaacgtctaagactctaagtccaggggttcaattcttggatacaagcggtccacgtcaaatcaatacccaagcacctccctactccagattgagactgtaaactctaaggaagaagttgcgtggtactgtgggaagcgcatggcttaca

SEQ ID NO: 192282 - DNA, 192 bp, Glycine max
ttcgagccgagcagccaaacactctctctctgtctctcgcaaattctccatttgcagagaagtattgaatcatgtccgtggaagcgtatgtcgacgatcaacttctgtgtgacatcgacggtaaccacctcactcacgctgctatcatcggccactacggcagcgtttgggatcacagtaccgacttcgctc

SEQ ID NO: 192283 - DNA, 190 bp, Glycine max
ctcgtcttcaacgccgtcggcggtggcatcggttccggtctcggatctctcttactcgagcgtctctccgtcgattacggcaaaaaatccaaattagggttcaccatttacccttccccacaggtttcaaccgcagtcgttgaaccctacaacagcgtcctctccacccactccctcctggaacacaccg

SEQ ID NO: 192284 - DNA, 186 bp, Glycine max
agagagcagtacgtgtacttggcgacctgtcggagcaggcggacggtacgcggagatggtggagttcatgcagacggtggtggtggggtcgacgccggcgtcggagctcacggtggaggagcgcaacctcctctcggtggcctacaagaacgtcatcggctcgctgcgtgccgcgtggcgcatcgt

SEQ ID NO: 192285 - DNA, 189 bp, Glycine max
gagaatatgaagttgtttgttttctttgttgctgcagtagttttggtagcatggccatgccatggcgcaggctaccaaaggttccctctccgaatgaaaactggctatggtgagcgttcttcggaggtaaaatgcgcaagttttaggcttgctgtggaagcacacaacatccgagccgttaaaaccatt

SEQ ID NO: 192286 - DNA, 183 bp, Glycine max
ctcgagccggcggggcactgccctctttttggacccaaggtcggtttcggccggtcgatcagtgcggaagacattgtgcggtggggagtttggctggggcggcacatctgtcaaaagataacgcaggtgtcctaagatgagctcaacgagaacagaaatctcgtgtggaacaccagggtaaaa

SEQ ID NO: 192287 - DNA, 187 bp, Glycine max
ctttaccttaggtcttccgaattcgaagttaatttgcaagatggctacggaaaaggctcagatcaacactgcggtggttggtcatgtggaccctgaggaggcaaccaccattaacgagctgaagaagcctgttgtggagaaagaagctccagggcatgccatatgagggcatgcacgtacggcctcg

SEQ ID NO: 192288 - DNA, 187 bp, Glycine max
gtccttcggggcctcatccccgggcgtcgaacagtcaactcagaactgctacggacaacgggactccgactgtttaattaaaacaaagcattgcgatagtccctgcggatgttgacgcaatgtgatttctgcccagtgctctgcacgtcatagtgaagctattcaaccaagcgcgggtaaacggcgg

SEQ ID NO: 192289 - DNA, 187 bp, Glycine max
ggtccaaatacttcttctctgtgtaaaaacatttagcactgaggaagaagctattgatctagcaaatgacactgtctctcgcttgggttctgctgtaatatcaaatgatctagaacgatgtgcgcgcattactaaggcttttaaggctggaattgtgtggattaattgctctcaaccatgcttcact

SEQ ID NO: 192290 - DNA, 186 bp, Glycine max
gggcgcaacgccctcgacctattctcaaactttaaataggtaggacggtgcggctgctctgttgagccgcgccatggaatcgagagctccaagtgggccatttttggtaagcagaaccggcgatagcggggttggaaagacctcgttgatgaatcaatacgtgcacaagaagtttagtcagccata

SEQ ID NO: 192291 - DNA, 185 bp, Glycine max
cgttcctctcgcccagaatccgagatcaaccctgacccctaaggccacgggtttttctcggcttcttcagattcctgaaatggcgtctgtttcagctttagccaagtacaagctcgtcttcttgggtgaccaatccgtagtttaaaccagcatcatcactcgcttcatgtacgataaattcgata

SEQ ID NO: 192292 - DNA, 186 bp, Glycine max
gttaggttctgcacgctctgcttccagcgagtgttctttcttcgtttcaacaccttaatttgcacacgctgcttcttcagcttgagacatggcacaagaaacctttctattcacatctgaatctgtaaacgagggtcaccccgacaagctgtgcgaccagatctctgatgcagtgctcgatgcgtg

SEQ ID NO: 192293 - DNA, 102 bp, Glycine max
tatccattgcatgcagaaactatgtgcagaaaaaatagcacctgattcactagagaacgcccaaaagcgagtgctagatgctgcactacacccttgttcgag

SEQ ID NO: 192294 - DNA, 273 bp, Glycine max
ctcaggcgttcattaggttgtcaattggttctctggggttgcgatgcactggaattgaactgagcactgcaaaatctggaattcaaacactctctttaccttgtgtttgtgagatacggcttcgaggttttcctgttcaaacatcatcaatccccttgatatcctccacagaagttatacctgatactcagaacgttgcttctagcttttatcttgaggaatccaatttaaaagcgttgttagctcctggttgcttctacaacactcatactt

SEQ ID NO: 192295 - DNA, 268 bp, Glycine max
gaaaagtaaacactgcaatagcaagagttttcaaatggcagagggaaaaggtagagtttgtgtcacgggaggcactgggttccttggttcatggatcatcaagagactccttgaagatggatatgctgttaataccactattagatctgacccaggacgcaagagagatgttagcttcctcacaaacctacctggtgcatcagaaaagctaaaaattttcaatgctgatctcagcgacccagagagttttggtccagcagttgagggt

SEQ ID NO: 192296 - DNA, 269 bp, Glycine max
cagacacagagagaggggtttgggattggagggattgacgctgcgtctcttcctcttctctttcgatccatccctcattcctaatcctccaatccaaccacctcagcctcacactcacatatacacatatctgaacgcgtatcgtccctcctatggcttcaaagcgcatcctcaaggagctcaaggacttgcagaaagacccaccaacttcttgcagcgctggtccagtagctgaggacatgttccattggcaagcaacaataatgggt

SEQ ID NO: 192297 - DNA, 267 bp, Glycine max
aagaggttaaagagacggcaacactttgctgtccgccttgaccgagcagagcttcgtcttggccctcgattttgccctaaagtactctcagtcacaacagacaccgtcgtcgtcgtcgtcgtcatcaatggcaccgaagcagaccaaggctgagaagaagatcgcttacgatgcgaactgtgcgacctaatggaggagtacggccagatcctcgttgtgaactccgataacgtgggatcgaaccagctccagaacattcgcaagggt

SEQ ID NO: 192298 - DNA, 268 bp, Glycine max
gaagaaagcatccaatagtttgaaagggaaggttaaactgggccatgttgactgtgatgctgaaaagtctctaatgagcaggttcaaagttcaaggattcccaactatcttggtgtttggtgctgataaagatagtcctattccttatgaaggcgcaagaactgccttggctattgaatcatttgcattagagcagctggaaacaaacgttgctcctccagaagtgacagagctacacagtccagatgttttggaagagaaatgtggt

SEQ ID NO: 192299 - DNA, 269 bp, Glycine max
caaaaattaggtttttttgtggcatataaaaagggttctgcttgctgcaatcggattcactccgcagctgcagagctcaaaaccctagagaggaggaagagagagcgtgcaagttccggccaccaccgaccatgacattcaagcgcaggaatggaggtcgcaacaaacacggccgcggccacgtcaaattcatccggtgctccaactgtggcaaatgctgtcccaaggacaaggccatcaagaggtttctggtgaggaacattgttgaa

SEQ ID NO: 192300 - DNA, 265 bp, Glycine max
gttggttgaagcttccgctatcctcatatggattgcttcagcccttcatgctgctgttaactttggacagtatccatatggaggtttaatcctaaacaggccaactattagcaggagattcatgcctgaaaaggggtctcctgaatatgatgcgttggctaagaaccctgagaaggagtttttgaagactattactggcaagaaggagaccctcattgaccttacagttatagaaatcttgtcaaggcacgcatctgatgagttc

SEQ ID NO: 192301 - DNA, 268 bp, Glycine max
gccgctcccacttctctccctctctattgcagcatggtgtcttcctcccaacacattctggtcaccggtggtgccggtttcattggcacccacaccgtcgttcagcttctcaaagctggcttcagcgtttcaataatcgacaatttcgataactccgtcatggaagcagtggaccgcgtccgccaagtggttggccctctgctttctcagaacctccaattcacccagggcgatctccggaatagggatgacttggagacactcttct

SEQ ID NO: 192302 - DNA, 258 bp, Glycine max
tagatatataactaaaaagaatcgacagaatacgcctagtcgattggaattgagaaaattttgtccccgttgttgcaaacatacaattcacgcagaaataaagaaatagatcaaattgatcgcttgtgtgttacccttcgaaccaaagaacttaacatgtaaaatgatctatttttcttatctatatagatagatctatctgtattctatcatttacagttgaatatatacaaatatcagtatataacaacatatatt

SEQ ID NO: 192303 - DNA, 264 bp, Glycine max
atccactcagagagctagaagaattcaacaatgcctcgctatgatgataaatacggcaatacccgcctctatgtgggacacttgtcttcgaggactcgttcccgtgatctggagcgtgcctttagcagatatggaagagttcgaggtgtggatatgaagaatgatttcgcttttgttgattttagtgatcctcgagatgctgatgatgcaagatataacctggatggtcgggatgttgatggaagtcggattattgtggaattt

SEQ ID NO: 192304 - DNA, 265 bp, Glycine max; identical to SEQ ID NO: 150899

SEQ ID NO: 192305 - DNA, 265 bp, Glycine max
aagagagccctaagaagcgcacacgcgctcgcaaggcaccacgtgcagccgcagctgctggcagcggaaccgcttttgcgacggaggcggcgaaatcgatatccccgtcggcggatcgcgtgaagtgggactaccgagggcagaggaagataatcccgttagggcagtggctccccaaagtggccgtggatgcttacgtagcacccaacgtggtcctcgccggccaagtcaccgtctgggacggagcctccgtctggcccggttg

SEQ ID NO: 192306 - DNA, 267 bp, Glycine max
cgctcatagagagttcgacgcggcggttgcagaagaagattgcaagatgaagttcaacatcgcgagtcccaccactggatgccagaagaagctcgagatcgacgacgatcagaaactacgagcattttgggacaagaggatctcacaggaggtcagcggagatgcacttggtgaggaatttaagggctatgtcttcaaaattactggaggttgtgacaaacaaggattcccgatgaaacagggagtgcttactcctggtcgtgttcg

SEQ ID NO: 192307 - DNA, 269 bp, Glycine max
gcaaattatggaatcccatgatgaagagcatgctgccaaactacttagagctcaaacccacatatggaatcacatatttagcttcataaactccatgtcccttaaatgtgtggttgacttaggcataccagatatcatacacaactatggccaacccatgccactctcaaacctcattgcttcactaccaatccacccatccaaaacttgcttcgtccatcgcttgatgcgaatcatgatccattctggcttcttctctcaacaaaagc

SEQ ID NO: 192308 - DNA, 267 bp, Glycine max
ctaagcctccactctgcaggtctgatgatgatcctgatgctgattggggagttaaaatgaaagtttgcatctcacgttattcagatcaaatgcacaaagcaaaaggaagtgatttggctccttggcctgctcgattgactactccacctcctcgtctggcagaaattcactattctactgaaatgtttgagaaggacatggaagtttggaaacaacgagttcgtaattactggagcaagctagccagtaagattaagccagacacaa

SEQ ID NO: 192309 - DNA, 265 bp, Glycine max
atcttgttccctctcttctttcttctttgtgccttcacctcatatctaccttcagccaccgctgatgatgatcatgtgtacgacactgacggcgataagcttcaatacggtgtcaattatttcgtgttgccagtgataagaggaaatggcggtggaatacaagtagcaaaagcaggaaacgaaacttgccctctgactgtggtgcaatctggcaacgagctctctgaggggttaccgataaagattgcatctcgatcagcaggag

SEQ ID NO: 192310 - DNA, 266 bp, Glycine max
ggttaggctatggctgatgagagcgtcgttgagtccccagtgaagaggcagagagatgatgatgaagaaaatgaggtctctgtttccatggatgtggagggtggcaaagaccctcttagtaacggtttatcatctgtgattcctgggtggttctctgaaattagttcaatgtggcctggagaggctcactccttgaaggtggaaaagattttgtttcaaggaaagtctgaataccagaatgtcatggtcttccagtcatcaacata

SEQ ID NO: 192311 - DNA, 87 bp, Glycine max
caggtggtcaagtctgcatggatgactgatgaagaatttgctagagaaacgattgctggtgtaaatccagacgtcattaagattctt

SEQ ID NO: 192312 - DNA, 259 bp, Glycine max
gtgttggacggaccttgaatactgcaagcaaaaggggttgtattatcccattgcaaagactctagcagagaaagcgggttgggactttgcgaaggagacaggttttgatgttgtcatgataaaccctggtacagcattgggccctctgcttcctccaagaatcaattcaagcatggctgtgcttgttagtgttctcaaagggggcaaagagacctacgaggacttctttatgggaacggctcacttcaaagacatagca

SEQ ID NO: 192313 - DNA, 263 bp, Glycine max
ctcgattttccatttccataaccttagtcatcttcttctttcatctttctccctaacggtatcgagggaaatctatggcggaagaacacagatgccaggcaccgcgcttctgcgccaacaattgcggtttctttggcagccctgccacgcagaatatgtgctccaagtgctaccgcgatttccagctcaaggagcagcaatcttccaacgccaagatggttctcaatcagtcgctggttccttcaccgccaccggggtgattt

SEQ ID NO: 192314 - DNA, 260 bp, Glycine max
cgaacgagacctcagcctgctaaatagctatgtggaggtaaccctccacggccagcttcttagagggactatggccgcttaggccacggaagtttgaggcaataacaggtctgtgatgcccttagatgttctgggccgcacgcgcgctacactgatgtattcaacgagtctatagccttggccgacaggtccgggtaatctttgaaatttcatcgtgatggggatagatcattgcaattgttggtcttcaacgaggaatt

SEQ ID NO: 192315 - DNA, 259 bp, Glycine max
cggcgctgccattctttctttctatcttcaatcaatttcaagatcgtaacactggtattatatggcctccttcagagcattctggaacagtccagttggtcccaaaacaactcacttttggggacctattgccaactggggatttgtggcagctggattggctgacttgaacaaacctccagaaatgatctctggcaacatgacaggagcaatgtgtgtctattcagcattgttcatgagatttgcatggatggtacag

SEQ ID NO: 192316 - DNA, 262 bp, Glycine max
cgatggtctacttaatttggatatcactctaaatttagcagaactggtaggtgaaactttcttattttgtttccacaataaagaactccacatgtttgatgtaatgggagttgcattgggagaggattttgatttattctatgtatcaataaaaaagttacatgaactagctgtagcatccaaaaaccaagagcaaattgaaactagttcattccgtgaccaaattaccatactgccatggattagattcaattgatttaac

SEQ ID NO: 192317 - DNA, 263 bp, Glycine max
agaaggtgttctctttttggcttaatggggatccaaatgcgaaaaaaggtggcgaattagtttttggtggtgttgacccaaagcacttcttaggaaaccacacttatgttccaattactgaaaaaggttactggcagattgaaataggagattttttcattggaggtgtttcaactggtgtttgtgagggaggctgtgctgctattgtggattcaggaacatctttgcttgctggtccaactcctgttgtggctgaaatcaac

SEQ ID NO: 192318 - DNA, 265 bp, Glycine max
aaaatttgaagggcttacggataaggtagcgccatggtatggaactgcatattcccttgagaaaatcactggctctgcaattcaggggtgggtgctttctgctccagatgaaaatatgcatcttccagctcctaacaaattcattccaactgacttgtcacttaaaattgtgcaagaaaaagtaaagtttccagttttgttaagcaggtctacttattcagccttatggtataagccagatacattgttttctacacccaaggct

SEQ ID NO: 192319 - DNA, 261 bp, Glycine max
cttgcttcttgcttctattacttgcttctttcttcaccatgtcacttgctgggaaaatcaccactgaaattggggttcatgcaaccgctgcaaagtggttcaacctctttgccccacaacttcatcatgttcaaaaccttactgatagagtacatggaaccaagctgcattgccggtgaagactggcatcacaacgagacagtcaaacactggacttataccatagatggtaaggctacaacatgtctggagagtattgaa

SEQ ID NO: 192320 - DNA, 260 bp, Glycine max
gagtattggcgcttcatcaagatgggtatttctagggattccatgcacaagaggcgtgtcactggtggcaagaaaaaggcttggagaaagaagagaaagtatgagcttgggcgtcaggcagcaaacaccaagttatcaagcaacaagacaatcaggaggattcgtgttagaggtggcaatgttaaatggagggcattgaggctggatactggcaattactcatggggtagtgaagcagttactcgcaagactcgtattct

SEQ ID NO: 192321 - DNA, 259 bp, Glycine max
ctcgagccgctcgagccgattcggctcaggaagcctaccctactattatccctttcctacctgcctctctttgctttcctggctctttcagaagacgttgaacaagttgtggacataagtggcaaccccattttcccaggtggcacatattacattatgccatcaacttggggcgctgccggtggtggattgaaactaggccggacaggaaactcaaactgcccagttactgttttgcaagattactcagaaatcttcc

SEQ ID NO: 192322 - DNA, 278 bp, Glycine max
aaatttctccatagttatgggcacttccattctcgacggcctgaacggtcgcgttggaaggttccggggacaagtacctggtcctggcccacggcttcggcacggaccaatccgcgtggcagcgcgtgctcccttacttcacccgcaactacagcgtcattctctacgacctcgtctgcgccggcagcgtcaaccccgaccacttcgactaccgccgttataccaccctcgacgcctacgtcgacgacctcctcaacatcctcgacgccctccgcttc

SEQ ID NO: 192323 - DNA, 272 bp, Glycine max
ctcgagccgtggaaatccgttttcacagctgatgagaaagagcgtgagaagaatgttgaggatgcaattgaggctctgcagtttcttgagaatgagataaacgacaagaagttctttggaggagtggagtttgggttggtagatattgctgctgtctacatagcattttggggtcctatggttcaagaaattgcagggttggagttattcgcaagtgagaaatttcctaagctccacaattggagccaagatttttgaaccatccattgtca

SEQ ID NO: 192324 - DNA, 277 bp, Glycine max
ttcatgtctcctcttttccatccatttcattgttatcatgtcaagttccttacccacaaatagtgatgaagtgtttgcaaaacagtctccaatgtctccatccacaaaacccgtggaaaaaatcacccaactacacttctatttccataacaacgtaacggagaaaaacccaactgctatgagaattgttgggcctcccaagggcttcattactcagtttgggactgttgtgatgatggatgaccctctaactgaaggaccaagtccaagttcaaag

SEQ ID NO: 192325 - DNA, 274 bp, Glycine max
ctgaactctgaaactcaaccttctttcttctcttctctctcgtgtttaactgttcagggcatcctagtttctctcagttagccaaaatggtagctgcaaatgagagggtcgtcgctgtgatcatggttggaggaccactaaaggtactagattccgaccattgtcattcaacgtacccaagccaatttttccattagcaggacaacccatggttcatcatccaatttctgcctgtaaaaggactcctaatttggctcagatttatctgcttggt

SEQ ID NO: 192326 - DNA, 276 bp, Glycine max
atccaatctagcttcttccataaatcatgtctcagttaagcaaaacacatttctcaaacaaaatgttgaagtaaactaattgatccaaagcaaaaatatgaaagttcgtccatcaatacacaggtccatctagtgaaactagaaaagagtaaataagacttatttcttcttgtctccagccccaccagccctcatcttcctaagaacattggacatttcctcacgcttcttctttgcacgtttgtgggttccaagctttctctttgcaaccttaag

SEQ ID NO: 192327 - DNA, 274 bp, Glycine max
gcttatccttattgagagaaaaaatggccaaatcaatcaaattctttgagttgaacacaagggccaagattccttctcttgggttagggacttgacacgctgaacctggtgttgtagctgaagctctcaccacagccattcaggttggatacaggcatattgactgtgctagtgcgtataagaatcaagcagagattggttctgctcttaagaagctttttgatgatggtatggtgaagcgtgaggacttatggatcacttccaaactctggtg

SEQ ID NO: 192328 - DNA, 270 bp, Glycine max
tctcgagccgaatcggctcgagcggctcgaggtcagatcctatggacttttgtaccattgaagtgtctggtgaacacattgacgctggtgacggagagcttcatcttgagatctgtttgaaggacttgcaggatgatttcatgggtggagctgagcatcattaaatctgaccctgttgtgtcattcagggagactgtcctggagagatcatgccgcactgtgatgagcaaaccacccaacaagcacaatcgtctgtacatggaagcaaga

SEQ ID NO: 192329 - DNA, 273 bp, Glycine max
gctccagtagccggcactaaacaacatggcggacaaggcagtcaccatccgaaccaggaagtttatgacaaacaggcttctctccagaaagcagttcgtcgttgatgtccttcatccagggagggctaatgtttccaaggctgaactgaaggagaagctgggaagaatgtatgacgtgaaagacaccaacactgtatttgtcttcaagttccgaactcattttggtggtggcaagtccactgggtttggtttgatctatgattcagttgagaa

SEQ ID NO: 192330 - DNA, 277 bp, Glycine max
gtcaacatgagctcaatcgttcagggtttcaccaagtcgctggccatgaccattctctctgagatcggcgacaaaactttttttgcagctgcgatcctggctatgcgacacccaagacgcctagtcttatcaggttgcttatcggctttgattgtgatgaccattctctctgttcttgttggctgggctgctccaaatctgatctctcgtacatggactcatcacattacaacatttttattcttgggatttggactttggtccttaaaagacgcta

SEQ ID NO: 192331 - DNA, 137 bp, Glycine max
gttagatactcaagcctatggtgatcatacctgtataatagcaagagaacatttggagcctaacttaggtcgggtcactgttgagcaggctatccaaaacaagaagttgttcatcttagatcaccatgactatctca

SEQ ID NO: 192332 - DNA, 262 bp, Glycine max
cttgaactcaaacatggcagatgaggtggttctgctagatttctgtgcaagtccatttgggatgagggtcaggattgcacttgctgcaaagggtatcaagtatgagtaccacgcagaggacttacagaaacagagtacctcttctcctccaaatggacccggttcacaggaagattccggttctcatccacaatggcaaacccatttgtgaatccctcattgctgctcagaccattgaggcggtttggcatgacagaaatcc

SEQ ID NO: 192333 - DNA, 273 bp, Glycine max
gtcatccgcaggtaagcaatggttaagcataataatgttatccccaatgggcacttccggaaacactggcaaaactatgtgaagacttggtttaatcaaccagcccgaaagaccagaagacggttagctcggcagaagaaggctgtcaagattttccccaggcctactgctggatctctcaggcctattgttcatggccagactctgaaatacaacatgaaagtcagagccgggagaggattttcactggaagaattgaaggctgcaggaatt

SEQ ID NO: 192334 - DNA, 275 bp, Glycine max
gtgccttttggtgttctactctctggaggtttggactcttctttggttgcatccatcacttctcgttgattggccaacacaaaggctgctgagcagtggggatcaaagttacattcattctgtgtaggccttgagggctcaccagatttgaaggctgcaaaagaggttgctgactatctaggcactgtccaccatgagtttaccttcactgttcaggatggaatagatgccattgaagatgttatctaccatattgaaacatatgatgtgactac

SEQ ID NO: 192335 - DNA, 269 bp, Glycine max
tttctatcagctttatataaaaagattttcaaggccaagttcacatgtgctccgtggttctctacaagtgcaaagaagctaatcaacaaaatcctagatccgaatcctgccactcggattacatttgctgaggtcattgagactggctggttcaagatgggatctaagcctaccgtatttgaccaggctaatgttagatctcatgatttcgaatctacattcagtgagtctacggattcacaaaatcttgtagtagagaggcgtgaaga

SEQ ID NO: 192336 - DNA, 263 bp, Glycine max
cttttgtggggttggattggagagtctgacagtgaatatgctgatgtagccaaaggttggagttcagttcagagtattcctagaactgtggagactgataggaagactggcagcaacttgcttcagtggcctgttgctgaggtggagagtttgagattgagaagtgatgaattcaaaaatttgaaggctaaaccagggtcagtcgtgtcaatagatattgaaacagccacacagttggacattgttgccgagtttgagataga

SEQ ID NO: 192337 - DNA, 276 bp, Glycine max
ttcgagccgtagctttcctttccagttcatacttcatcctattattactttccctctttgcattccaaatggccactgttgaggttgcacagcaaacaccaacaactgtgacagagaatgaaacaacgactgaggtaaccacgattgaggaaactaccccagaacagccagccaccgaggttactgccccagaaacagtcaacgaagaagcaccagaggaagcagcagttgagactactgaggcaacagaagttaccgaggcagggaaggctgcga

SEQ ID NO: 192338 - DNA, 267 bp, Glycine max
gaaagttaatgcatgcttcttatcttctgtctagctactgagtttccacactgcataccttaggtcttccgaattcgaagttaatttgcaagatggctaaggaaaaggctcagatcaacattgtggtggttggtcatgtggaccctgaggaggcaaccaccattaacgagctgaagaagcctgttgtggagaaagaagctccagggcatgccatatgagggcatgcacgtacggcctcggaggggaaccagaaaattatgttaacaa

SEQ ID NO: 192339 - DNA, 250 bp, Glycine max
tctctccaatggccaaagacatcgaaacggcgattcaaagtgggttgcctcacaaggactaccaagaaccacccaccgccccattctacgaccccgacgaactccgaaagtggtccttcttccgagccctcatcgacgagttcgtcgccaccctcctcttcctctacgtcaccatcctcaccgtcatcggctacaaccaccagacagccaccgccgccgagccctgcagcggcgtcgacgtcctcggcat

SEQ ID NO: 192340 - DNA, 272 bp, Glycine max
atgactttcaagcgcaggaatggaggtcgcaacaaacacggccgcggccacgtcaagttcattcgatgctccaactgcggcaaatgctgccctaaggacaaggctatcaagaggtttctggtgaggaacattgttgaacaggctgcagtcagagatgtgcaggaggcttgtgtctacgaacaatacacgcttccgaagctgtatgtgaagatgcagtattgtgtttcctgtgctatccactctcatgttgtgagggttcgatcccgcactga

SEQ ID NO: 192341 - DNA, 268 bp, Glycine max
gcaggcaattgtgggcttcaagagctgcctcttacctgaggatctctgtgtttcacagaggcttttctaatgttattaaagatttcaagtatgttgattctcatgagtgggtgaaagttgatggaaattacgcaaccatcggcataactgatcatgcccaagatcatttgggtgatgttgtatatgttgaattgccagaagtgggagcagctgtgacacaaggaggtagttttggtgcagttgaaagtgtgaaggctactagtgatat

SEQ ID NO: 192342 - DNA, 271 bp, Glycine max
ctcgagccgcgagatcttaattgatctaaaggcaaggcgcattgtctccgacaatattcactccgggaatggcttccctaccctttccgttgatgaacaagtcgttgccatagagctgccactgaaatacggtccattcattgagtcagtgaacaagagagggctgaacctctctgaggtggtgtgttccacattcacaatggggtggtttggagaaaccaaggacagaaggacagtgagagtggaatgcttcatgaaagaacgcagcccc

SEQ ID NO: 192343 - DNA, 276 bp, Glycine max
gtgagatagctagttgtttaaagtaagagcgaagacagtagcaaatggcaaactttccagttgttgatctggggaagcttaacaccgaagagagacctgcagccatgaagattataaaagatgcctatgcacactggggtttctttgagttggtgaaccatgggatatccattgagcttatggtcacagtggagaagctcacaacagagcattacaagacgactatggagcaaaggatcacagaaatgggtgaccagcaaaggtcttgcgtcagtt

SEQ ID NO: 192344 - DNA, 268 bp, Glycine max
gatctctctctattctttgaaaccaaagttcaaactctgtcttccctgggttctatttcgaaatcaacgacgatgagttccacagaggcagcagccacagagaagaaaggtggaagagggaaaccgaagacttcaaagtccgtttcccgttcctccaaagctggccttcagtttcacgttcgacgtgtcagtcgctacctcaaggccggtcgctacgcccagcgcgttggctccggttcccctgaatatctctccgcggttctcgaat

SEQ ID NO: 192345 - DNA, 269 bp, Glycine max
cgataacgaagggatagaggggaagaccttcgtggtcaccggtggactgggattcgtaggatctggtctctgcttggagctcatacgtagaggtgccgtagatgtgcgagcctttgacctccgcctctcttctccttggtcgcgtcctctcaaggacaagggagtcctctcgcatccaaggggatgttgcccgcaaagaagacgtggaaagggcccttcgcggtgccgactgtgtattccaccttgcggccttcggaatgtcaggcaaa

SEQ ID NO: 192346 - DNA, 256 bp, Glycine max
ctgaatcgcacctcaccacaacctctctttctcgtctccgtccgtgcaacctgggaactaatggcatggagaggaaatcttttgaaaaacataaaagaacttcggtttttgatgtgccagtcatcacctgcaagctcacccacaatggcttttgtggaaaggaattataaggaactaaagacattgaacccaaaattgcccatattaatccgtgagtgcagtggagttgaaccccacttatgggcaactctgattt

SEQ ID NO: 192347 - DNA, 274 bp, Glycine max
tatcgagccgaatcggctcgagcggctcgaggctagtttatcgtgagctgaatatgaagttgtttgttttctttgttgctgcagtagttttggtagcatggccatgccatggcgcaggctaccaaaggttccctctccgaatgaaaactggctatggtgagcgttcttcggaggtaaaatgcgcaagttttaggcttgctgtggaagcacacaacatccgagcctttaaaaccattcctgaagagtgcgttgaaccaacaaaggactacattaa

SEQ ID NO: 192348 - DNA, 265 bp, Glycine max
ctaaccccttcggtgatgctttctctgggcctgagatgtgggcccgtctcaccgcagaccccaccactagggcttacctccaacagcctgatttcgtgaagatgatgcaggatatccagtgagatcataatcacctcaacttgtacttgaaggaccagagaatcatgtagagcctaggagttttgctcaacgtcaagattcaaacccctcccacgggggctgacaccgatatgccggcttctccatcgcactctgcggcacgtct

SEQ ID NO: 192349 - DNA, 90 bp, Glycine max
ctgttctcttcactcttggtcttgcgagagacagctatgccagatgacgaagaatcttgggcatgctggtttggccaaacactcccattc

SEQ ID NO: 192350 - DNA, 269 bp, Glycine max
ggccatccaaacagttgcaaagatatctgggtgcagtgaattagctgccaaaagccaattctatttgattgataaagatggtctagtcacaactgagaggaacagtctagacccagctgcagctccgtttgctaaaaatccaagagacatagaagggcactactgagggtgctagtataattgaagtggttaagaagattaggccacatgtgctccttggtttgtctggcgttggtggtattttcaatgaggaggtgcttaaggcaatg

SEQ ID NO: 192351 - DNA, 268 bp, Glycine max
agcatcccctgttactgctccttcccttcatacaacaggtgttgccctacgtggacacattgagtaaggttgtgctggcttacagtggtggcttagacacatcagtcattgttccatggctcagagagaattatggttgtgaagtcgtttgcttcactgctgatgttggccaaggtatacaagaattggaaggtttagaagcgaaagctaaagccagtggggctagtcaattagtggtaaaagacttgaaggaggaatttgttagtgc

SEQ ID NO: 192352 - DNA, 257 bp, Glycine max
gcagtcactgctctgtttcaccgagtttgggcgtttagatcagaaccaaatcgtgttctcttccattggcaaacatggcaactcaaatgagcaagaagagaaagtttgttgcggacggagtgttctttgccgaactgaacgaggttctgacacgtgaattggcggaggacggttactccggcgtcgaagttagggttacgccgatgcgcaccgagatcatcatcagagccaccagaacccaagccgttctaggtgag

SEQ ID NO: 192353 - DNA, 264 bp, Glycine max
ggctcccaagggtttaacctttctggctgtgttaatatgcgtttcagcactgtcactgagtccttctgttgcgggggaagggcaaaataatggccttgttatgaacttctacaaggaatcatgccctcaggctgaagacatcatcacagaacaagtcaagcttctctacaagcgccacaagaacactgctttctcctggctcaggaacatcttccatgactgtgctgttcagagttgtgatgcttcactgttgctggactccac

SEQ ID NO: 192354 - DNA, 270 bp, Glycine max
cggctcgagcaggtttcaagatgcattgtcatggttggagatctgtatactgcatgccaaaaaggcctgcttttaaaggttcagctcctataaatctctcggatcgtctgcatcaagttcttcggtgggctcttggatctgttgagatctttttcagtaggcattgtcccatatggtatggctatggtggcggcttgaaatcgctggaacgattctcttacataaactcagttgtttatcctctgacttcaattcccttaattgcctatt

SEQ ID NO: 192355 - DNA, 268 bp, Glycine max
cgaatatcttgttgtttggagcgatccgagaaaaactctgtaaacatgttggtttaccaggacctccttacaggtgatgagcttctctctgactccttccgttacaaggaaattgagaatggaatgctgtgggaagttgaggggaagtgggttgtcataggagcagttgatgtagacattggtgcaaacccttctgctgagggtggaggagaagatgagggagttgatgatgcagctgttaaggttgttgacattgttgacacattca

SEQ ID NO: 192356 - DNA, 276 bp, Glycine max
cggctcgagggaccaacaagaagtgtaagttttcattcaatggccagcgctcagctctcagcaatatcttcgtcgatctctacggcgtcgtttgaagggcttcgaccttcggctgttcagtttgcttccgcgggcagaattagaattggcaatctctcccaaaggtctttccggggcttggttgtcaaagccgccaccgttgttgcccccaaatacaccgcgattaagcctctgggagacagagtgctgatcaaaattcaggaagcagaggagaaa

SEQ ID NO: 192357 - DNA, 262 bp, Glycine max
gacgcaacacactttcactgagaaaggatctctatctaccaaggagcagaataaaacccttctctctggtaagtgaataagagaatggcttcagatcggaaacttcacactttcgaggaggtggcaaagcacgacagaccaaggattgctggctcatcatttctggcaaggtgtatgatgtcacccctttcatggaggatcatcccggaggtgatgaggttttgttatctgcaacagggacagatgcaaccaatgattttgc

SEQ ID NO: 192358 - DNA, 260 bp, Glycine max
gtcgatcttcgagtacaacggaagcgccgtcatggctatggtcggcaagaactgcttcgccattgccagcgaccgaaggctcggcgttcagctccaaaccataactactcgctttccaacgcatttccaagattccgacaagctcttcatcgctctctcttgcctcgccaccgatgctcaaacattgtatcagcgtcttgttttccggcacaaactgtatcagcttcgtgaagagagggatatgaaaccagagacctttg

SEQ ID NO: 192359 - DNA, 256 bp, Glycine max
acgcctttcttctacgtttccgtttcctcgttcgaattcgctttttgatctgcgcaaatgagagcgtgcatctcgatccacattggtcaggctggtatccaggtcggaaatgcttgctgggagctctagtgcctgagcacggcatcgggcccgatgggcaaatgccaagtgacaagacagttggcggtggtgatcatgctttcaatcacgttcttcagcgagaatggtgctggaaagacgtgccagtgcagtgtct

SEQ ID NO: 192360 - DNA, 262 bp, Glycine max
ctcgagccgcaacgatcagcgcggttcaggtggagttcctggagtttccagcggtggttagttcaccagcctccggcaagacctatttcctcggcggcgcaggggagagaggattgacgattgaggggaagttataaagttcacaggcataggagtatacttggaggataaggcggtgccatcactcgccgctaagtggaagggtaaaacttcagaggagttagttcacaccctccacttctacagggatatcatttcaggg

SEQ ID NO: 192361 - DNA, 257 bp, Glycine max
gttcctctttggttcttcgtccccttcccaatcttcaactttagggttcctttaatctcgttattcctcttcactcccaaactccgctcactccaacaacactctgatttagacatggatggaccggctggtcgtgtggtgctggactggacatgtttctgccaaattataaattgggaacaacacttgggattggatcttttggcaaggccacaattgcagaacatgtattcactggccataaggttgcgatcaag

SEQ ID NO: 192362 - DNA, 260 bp, Glycine max
aggagctgaaaaaagctgcctctaagggtcatgagaaaatggtaacatcacaagaagagcatgcaaagatcactgaggttagagggttgatagggccactatcagataaggaatctgtgtactgttctgatgctccatctcaaggtatttaaggtcgcgaaattggaatgtcaagaaggcagctcaaatgttgaaattgagcctaaaatggagaaaagcatacaaacctgaagagattcgctgggaagaggttgctgagg

SEQ ID NO: 192363 - DNA, 254 bp, Glycine max
gttcatagcagacaagtttgctgctgatgctaacagcaagactgtgccggcatcaagcatcccagatgggtggatggggttggatattggtcctgattccatcaagacatttggtgaagcattggtacgactcagaccattatttggaatggaccaatgggtgtttttggacttgataagtttgccacaggaacagaggctatagccaagaaactggcagagctgagtgggaagggagtgacaaccatcattgg

SEQ ID NO: 192364 - DNA, 262 bp, Glycine max
ctcaactctgcttcttttcaatcagttacattttctttggtattacaatggccactgttgaggttgtgtcagcaaaggtttccctcccagaggacacaaaagaggcatcattgaaggctgatgagaagaagaaacagaagaagttgttgagactccaacaccaacaccagaaaatgtcgtcactgagcaaacaaaggaggaaagtactgaggccccacaacctgcagcttcagaagacaagccctcggttgaagttgtgtct

SEQ ID NO: 192365 - DNA, 261 bp, Glycine max
cttctcctcatccaaatggccgactccacccctctcctctcccaatccaacccatcatcatcatcgtctcccgacacacaagaagcaccgccatcgaaccaacaccatccctctctggggtccacagtagaacttgcatacgcgagttcaactggtcccagttcctccagtcgattctggtctccctcgcatggatattcgacgcccagcagaccttcatctccgtcttcaacgacgccctgcccgagtggcactgcaccg

SEQ ID NO: 192366 - DNA, 262 bp, Glycine max
gaaattgagtttctgagataaccacttttctctttgattcatcaatggcaaccgcgaggaccgtgaaggatgtttcgcctcacgatttcgtgaaggcttacgcctcccatctcaagcgttccggcaagatggacttcctgagtggactgatattgtaaaaacagcaaaatttaaggaattggctccatatgatcctgactggtattatgttagggctgcctcaatggcaagaaagatttatttgagaggcggtcttggtgtt

SEQ ID NO: 192367 - DNA, 261 bp, Glycine max
gctggttttgagacctcagctaccacctacattgctggtgctgagattatgttgcaatgcaagagcagggttagcaacgaggttgtgtacacgaagaaggggtacaccgactcaaccggagcatacacaatgtagtggatgaggatcacgcagatcagatctgcagtgccaagcttgtaagcagccctcaccctcaatgcaaggacatcaccccaggccgcgacgaagccgtcgtgattctcacccgctacaacggcattg

SEQ ID NO: 192368 - DNA, 261 bp, Glycine max
tggtgaaagaagttgggttggattcatacagattttccatctcatggtccagaatattccccaagggcaagggagcagttaacaccttgggggtcaagttctacaacgatctcattaataagattatagcaaatgcttaaagccatttgtcacgctgtttcattgggacctcccacaagctcttgaagatgaatatgggggatttctcaaacctgaaatagtggaggacttccgtaactatgctgacttttgcttcaagac

SEQ ID NO: 192369 - DNA, 260 bp, Glycine max
cacagcaagagtgttcaaatgggagagggaaaaggaagaatttgtgtcactggaggcacaggattccttggttcatggataatcaagagcctccttgaacatggatatgctgttaataccactataagatctgaccaggacgcaagagagatgttagcttcctcacaaacctacctggtgcatcagaaaagcttaaaattttcaacgctgatctcagcgacccagagagttttggtccagcagttgagggttgtgttgga

SEQ ID NO: 192370 - DNA, 263 bp, Glycine max
gcagcacagcaatacgtatcattgaggaagtttcctgtggatcgtctccgaaaatgaacgacgcagacgtctcaaagcaaatccagcagatggttcggttcatccgccaggaagctgaggaaaaagccaatgagtctctgtctccgccgaagaggaattcaatatcgagaagctgcagttagtcgaagccgagaagaagaagaccaggcaagagtacgaacgcaaagaacgccaagtcgaaattcgcaagaagattgagtact

SEQ ID NO: 192371 - DNA, 264 bp, Glycine max
ggtgcctacaagtatgtttcggagctatggcgcaagaagcagtctgatgttatgagattcttgcagcgggtgaggtgctgggagtatcgccagcaaccttctattgtccgtttgacaaggtctactcgcccagataggctcgtcgcttgggtttcaaggctaagcagggttacgtgatttaccgtgttcgcgtacgaaggggtggccgtaagagacctgttccaaagggtattgtttatggtaagcccaccaaccaaggtgtta

SEQ ID NO: 192372 - DNA, 259 bp, Glycine max
gcttgctttgaggttcaagggacagagggttgttttcctgaagcagctcccatctggattgcttcttgtaactggtccctttaagatcaatggggttcctctcagaagggtgaaccaatcgtatgtcattggtcatccacaaaggtgggcatctctggtgttaatgttgataaatttgatgacaagtactttgccaaggaagccaagaaaaagaaacaaacgggcgaaggcgagttcttcgaggcagagaaggaggaga

SEQ ID NO: 192373 - DNA, 261 bp, Glycine max
tttagattgtactcattccaattaccagactcaatgagcccggtattgttatttattgtcactacctccccgtgtcaggattgggtaatttgcgcgcctgctgccttccttggatgtggtagccgtttctcagctccctctccggaatcgaaccctaattctccgtcacccgtcaccaccatggtaggccactatcctaccatcgaaagttgatagggcagaaatttgaatgatgcgtcgccggcacaaaggccgtgcgat

SEQ ID NO: 192374 - DNA, 263 bp, Glycine max
ctctctctgtctctctctctctagacttagattttgtgaatggctgaagtggaagagggacaggtcatcggcgtccacaccgttgatgagtggatagctgcaactccagaatgcaaaagactccaaaaaactgatgtggtggattttactgcttcctggtgtggtccatgccgttttatggccccagttcttgcagagattgcaaagaaaactcctgaattgatcttcctcaaagtggatgtggatgaagtgaggcctgttgc

SEQ ID NO: 192375 - DNA, 262 bp, Glycine max
tcgattcagtcgaggttttaagcagcagcaagatgtctgggcgtggaaagggaggaaagggattgggaaaaggaggagcaaaacgacatcgtaaggtgctccgcgacaacattcagggaattacgaagccagcgttcgtcgtttggctcgcaggggtggcgtgaagcgtatcagcggtttgatctacgaggagactcgcggtgttctcaagatcttcttggagaatgtcatccgtgacgccgttacttacacggagcacgct

SEQ ID NO: 192376 - DNA, 258 bp, Glycine max
ggtctttatatttagttgttgacatcaacaaagtcatggaggaagttaatgtggttcaaaccaagaatggaactgttgcagtagcttctgcgtttgctggacataaggaagctatacagcaaagggaccacaatttttaagaattgctgttgaagaagcctataaaggggtagactgtgaagatgggggtccctttggtgctattatagtatgtaatgatgaaatagttgctcgatgtcacaacatggttctgaggaa

SEQ ID NO: 192377 - DNA, 259 bp, Glycine max
ctcgagccgctctgaacaacgcccaccatgcaggccagtgataggtttaacatcaattcccagcttgagcatctccaagccaaatatgttggaactggccatgccgatttgaacagatttgagtgggcagtgacattcaacgagatagctatgcatcatatattggacactaccctttactgggattctttgctattgctgaaaatgaatctattggaagagaacgctacagctttatgcagaaaatgctcctgccttg

SEQ ID NO: 192378 - DNA, 260 bp, Glycine max
atttcccagcagtggtaagcttataagacatttgttaatattcttcatacaattcctttgattgttgttgagtcaaggagggaagtggatgatgtgaaggaactaattgtcatagtcaaagagtatgttttggcatgcagatggagctgaagaggagggaagttaaggacaatatagtacggcagcaggagcttgcagcatatttcactcactgcaaccttcagacacctcacttgaggttagctttgcagaatgcaatg

SEQ ID NO: 192379 - DNA, 260 bp, Glycine max
gccgtccctatatgtgtggaactagctttcgtcattctaactgtcttgatcagtacaagaaagcttatactaaagtaatttcacctaataggcaacctatgcaaggcactccaggtgtgctacaagattcaacttgcctcttgagaagagtgaagccacagagcttgcatgtcctctatgcaggggtcaggtgaaaggttggactgttgtggaacctgttcgggactatctgaatgcaaagaaaagaggctgcatgcagg

SEQ ID NO: 192380 - DNA, 258 bp, Glycine max
ctgatttgggcactccgagtaaacagccaacaaactacttctgcaaaattttgacagccagtgacactagcactcatgggggattctctgttcctcgcagggcagctgaaaaagtttttcctccattggactttcacaacagcctccttgtcaagagttaattgctagggatttgcatggtaatgagtggaaatttagacatatcttccgtggccagcccaaaaggcatctacttacaacaggatggagtgtgtttgt

SEQ ID NO: 192381 - DNA, 260 bp, Glycine max
gctcgaagtgatccactccaggtgggccatgctcggggccttgggctgcgtcttccccgaactgttgtcccgcaacggggtcaagtttggagaagctgtgtggttcaaggccgggtcccagatcttcagcgaggtgggctggactacttgggcaacccaagccttgtccacgcccagagcatcctcgccatctgggccacccaagttatcctaatgggtgctgttgagggttatcgtattgctggtgggcccctcggtga

SEQ ID NO: 192382 - DNA, 256 bp, Glycine max
ggctgcctccaaggatcgcgagaacttcgtctacatcgccaagctcgccgaacaggccgagcgatacgaagagatggtggaatcaatgaagaacgttgcgaatctcgacgttgaactgactgtggaggagcgaatttactttctgttgggtacaagaatgtgattggtgctcggagagcatcgtggaggatcctgtcttccattgagcaaaaggaagaaacaaaagggaacgagttgaatgcgaacggattaagga

SEQ ID NO: 192383 - DNA, 261 bp, Glycine max
ctatgaggagcattcctgcatatgagaatgctatgaaagactgctttgaacgttgtttggatttgtatttatgtcctcgagttcggaaaaaacgtctcaatatcgatcctgaatctttaaagccaaagcttcaagtcgaaaggagcttaagccttatcccacaacatgctatatcgagtataaaggccatgaagatgctgttacatcaatttcactcgaagcttcaggacaatggatggcttcaggttcaagtgatggaac

SEQ ID NO: 192384 - DNA, 260 bp, Glycine max
atcctaacactttcttctctctgttttccttcttcctcgcatcaatggagttggacggcgttctcctcggcatgtgcaaccctctcctcgacatctctgccgtcgtcgacgacgctttcttgcaaaaatacgtatcaagttgaacgatgcgattctcgccgaggataaacacaaacctatgtatgaagaattggctaacaatcctaatgtggagtacattgctggaggtgctactcagaattcaatcagggttgctcagt

SEQ ID NO: 192385 - DNA, 259 bp, Glycine max
tgctgctattgataagcctatcactttgaaacctggtgaggaatggaagggaagactagaactttcaactgtttcttctagttattgtagtggacagcttgatcccaaaagagttattcaaggaagctgaagatcatcgttgtgttttgtgtcctgtacaggtagcttgttgccagaacgatgaacgttgaaaggaaagtgtctccaacaatttccccccttcatgttccacttaaaccttcttcatgttggacggatg

SEQ ID NO: 192386 - DNA, 260 bp, Glycine max
cggctcgaggttcgttcactttcactttactaactcctaacaatttctctctgtttccttcttcaccgcatcaatggagcaggacggcgttctcctcggcatgtgcaaccctctcctcgatatctctgccgcgtcgacgacgctttcttgcaaaaatacggtatcaagttgaacgatgcgattctcgctgaggataagcacaaacctatgtatgaagaattggctaacaatcctaatgtggagtacattgctggaggtgc

SEQ ID NO: 192387 - DNA, 258 bp, Glycine max
atggataaagcaattcaaagacagagagtcctgcttgatcatcttcaacccatttcttcaagttcaaatttttcttctcaaacccatcaatctacggatctctcagcttcattatgttttgccaagaattctcgcacggtcaaataggtggatcagatgacgacgtggtgattgtagctgcatatcgtactgccatctgcaaagcaaagcgtgggggctttaaggatacccttccagatgacctgcttgccacagttc

SEQ ID NO: 192388 - DNA, 256 bp, Glycine max
agattgctctgttactatcaaaaggccttctttcctcatttcggatgcacgctccccatccatgtctacttgtgtaaaatcccgagatgtttgtattgttggtgttgcacggacgccaataggtggtttactggcaccctatcatctctttctgccacagagttaggctcaattgctattaagactgctctcaagagagcaaatgttgatccatcactcgtgcaagaggtgttttttgggaatgttcttagtgcca

SEQ ID NO: 192389 - DNA, 259 bp, Glycine max
tgaatatgaagttgtttgttttctttgttgctgcagtagttttggtagcatggccatgccatggcgcaggctaccacaagttccctctccgaatgaaaactggctatggtgagcgttcttcggcggtaaatgcgcaagttttaggcttgctgtggaagcacacaacatccgagcatcttaaaaccattcctgaagagtgcgttgaaccaacaaaggactacattaatggcgaacaatttagatcagactctaaaacagt

SEQ ID NO: 192390 - DNA, 256 bp, Glycine max
tgggactcggttcgagccacttggatgccacaaggtgagaaaagaaagaagctagaggagaagggcattagcatgcgctttgtaattggacacagtgctacatcaggtggtattctagacagagctattgagcagaggacagaaagcatggagatttcttgaggctgaatcatgtggaaggataccttgaattgtcaccaaagacaaaaacctactttgccactgctgtgaacttatgggatgctgatttctatgt

SEQ ID NO: 192391 - DNA, 258 bp, Glycine max
  unsure (1)..(258): unsure at all n locations
tccaactcctacaacgcttttctctgcactcatgggcaaggtcaagatcggaatcaacggntttggaagaattggccgtttggttgccagantcgctctgcaaagagacgatgttgaactcgttgccgtaacgaccctttcattaccaccgattacatgacatacatgtttaaatacgacagtgttcacggacactggaagcatcacgatgtcaccgttaaggacgagaagacccttctcttcggtgacaaggcagtc

SEQ ID NO: 192392 - DNA, 256 bp, Glycine max
ctcgagccgatcctgcatactacgtacttaaggaggatgagtctccttgtatttttggttcaattgaaaagcagagatggtcctatgcctgtgctaagcagttgattgagaggcttgtttatgctgaggtgctgaaaatggcttggaattcacaattgtgaggccttttaattggattggaccacgaatggatttcattcccggcattgatggcccaagtgagggtgttcctcgggttctggcatgctttagcaat

SEQ ID NO: 192393 - DNA, 261 bp, Glycine max
tcttgttcttcagtctcctcctattatccgccaccgtagccgccgccgaacggatcgacgatgaagacgaccttctgatccgtcaagtggtgccggctgcggaggaccaccacctgctcaacgcggagcacacttctccgccttcaagacaaagttcggcaagacctacgccacgcaggaggagcacgtacaccgcttccgtatcttcaagaacaacttgctccgcgccaagtcacaccagaaattggatccctccgccgt

SEQ ID NO: 192394 - DNA, 258 bp, Glycine max
gcttgacttccagcttcctgatcgttttaagttggaattctcagctgaggatgaagccaaaattgagagacctgtaatgatacacagagccatcctaggatctgttgaacgcatgtttgccatacttttaagcactacaagggtaaatggcctttctggctcagtcctcgtcaagcgattgtatgccctgtgtctgaaaagtcacaatcttatgcactacaggtgcgagatcagatccaccaagcagggtatcacgtt

SEQ ID NO: 192395 - DNA, 257 bp, Glycine max
ataccctgaacatgctgagccttgatgtaacaaaaaaatgtcttgtggctgaggggtggagtcctgtttttgcaactaagcagatccaggatgcattacagcgggcagcattggactctaattctcaagcaatgccattttccaagttttgcaaactagggagttgccacctacatattttcgcacaaacaaatttacttcttcttttcaaggaattattgattcatatggggttgctaagtatcaggaggcaaatc

SEQ ID NO: 192396 - DNA, 256 bp, Glycine max
atcaagtatgggtttggacctttctgaagggaaaatcagaaacaacttggaggctggagtcattgagcctgcaatgagcaaagtaaaaattattcagtttgcaactgaagctgccattactatccttcgattgatgacatgatcaagcttatcaaggatgaaagtcaaaatgaggattaaagtataactgaatctaggaggcatctactccccagtgcttacaaaagggagggttgtgctagtgtgcatttgaaga

SEQ ID NO: 192397 - DNA, 258 bp, Glycine max
gttggtgcaaagcatccttcgcttcaatctctctctctctctttgcgctttctgcaaaccgaacatttcatctccaaagggatcaacaggtcgaaggagaaatggggctgacattcacgaagcttttcagcggcttttcgcgaagaaggaaatgcgaattctgatggttggtcttgatgctgctggtaagaccactatcctctacaagctcaagctcggagagatcgttactacaattcctaccattgggttcaatgt

SEQ ID NO: 192398 - DNA, 259 bp, Glycine max
ctcgagccgtgcgatcgaagaagaacaacgacgatggcgatggctgcagctctgcgtcgcgaaggaaggcgtttgacccaaccaatcaacgccctccactcttctctcaattcctccctcatctctcaagccaagcccctcatggcgcgcgctccatttccactcaagttgtgaggaaccgaatgaagagtgtgaggaatatccagaagatcaccaaggccatgaagatggttgccgcgtccaagctgcgggccgttca

SEQ ID NO: 192399 - DNA, 258 bp, Glycine max
tgacaatgaggcctgctcttgctttgcttcctcttctatttgctttcttgttagctgccactacagaatcaagaaaagatacaggggaatattggaaaatgatcatgaaagatcaggaaatgccagaaggcttcaaggtcttgtttcatttcaatctgaaaataaccctaagactcaagagcagcttggtaaaggttccaaaaaccattgtgaagagtctctagttacaaatacacaagttaatagtgacttcgaacc

SEQ ID NO: 192400 - DNA, 289 bp, Glycine max
caaaatgtaaggatatatacctacaaagaactaaaagttgcctctgacaatttcagtccagccaataaaattggggagggtggatttggttcagtttataagggattgctaaaagacgggaaagtagctgccataaaagtactttcagcagaatcaagtcaaggggtaaaggaatttgtgacagagattaatatgatctcagaaatagagcatgaaaatttggttcagctatatggttgttgtgtggaagggaatcaacggattttggtctacaattatcttgagaaca

SEQ ID NO: 192401 - DNA, 284 bp, Glycine max
agatgctcaagttcttggtgaagccccttataagtttacaaatgctcttgaagctgtcaagaagctgagggcagaaccaaaggccaatgaccaatatttgcctccttttgttattgttgacgagagtgggaaacctgttggtccgatagttgatggtgatgctgttgttacattcaacttccgagctgatcgtatgacaatgattgctaaagctcttgagtatgaaaattttgacaaatttgatagagttcgttacccaaaaatccgctatgctggaatgcttg

SEQ ID NO: 192402 - DNA, 283 bp, Glycine max
gcaagaatggcacttcgttgcttggtgatgtccctttctgttctcttcactcttggtcttgcgagagaaagccatgccagagacgaagatttttggcatgctgtttggccaaacactcccattccaagttcattgcgagatcttctaaagcctggccctgcaagtattgaaatcgatgatcaccctatgcaaattgaagaaacacagtacccgaaaaccttcttctataaagaagaccttcatccaggcaaaatattgaaagtacaattcagcaagcctccct

SEQ ID NO: 192403 - DNA, 277 bp, Glycine max
gtttcgattcgctctcaatttgcagtgcgtgagtgaagcacatggatacttccgaattgcccaacctaaagaaatggattgtgatgtatcccgtttacataaactccaagaaaacgatggccgaaggaaggcgcattggcctcgccaaagcctgcgaaaatcctacttgcgccgaaatcggtgattgctgcagctatctgaagctcccttttgcaattgagatagacaaggcgtaccctcgtgatttcatgcagagagggcgcgtgacggtgttgct

SEQ ID NO: 192404 - DNA, 275 bp, Glycine max
gttggaatcctcttcttcccctctggtgttctcagtacggaggagtgaaccggagctggtggctccggccaagcccactccccgcgaaattaagatcctatctgagatagattctcaggcgggtcttcgtacccaaattccaatcatacagttctaacgtaacgacccatcattggcaggcaaggacccagttcaagccattcgaaacgctcttgcggaagcacttgttttctactacccgtttgcgggtagaattaaggaagaaggttcggatg

SEQ ID NO: 192405 - DNA, 271 bp, Glycine max
gcaccccttaccgttgtttgtgatggctgtttctcaaacttgcgccgatctctttgtaatcctaaggtagatgttccctctcatttcgttggcttaattttggagagttgtgaacttccttatgctaatcatggccatgtcatactgggagatccttcgccagttctgttctatcggataagtagttcagaaattcgttgtctggttgatgttcctggtcagaaggttccatctatttcgaatggtgaaatgacaaattatttgaagacag

SEQ ID NO: 192406 - DNA, 274 bp, Glycine max
ctcacaagattcccaatatgaaacttggtctggttctcgttacgttgaagaagatattgctcaaagtttcagggagttatggagaaatcctccagaaattgatgcctcactgcatcttccttcccaaaatgagtctattcctagtgacttttctatacgtgctagtgacacctgtgttgatgattttgcaaattcaacttctcctagatgtttaattgatgaggcattgataaaattctggtacaaaccggatagcactttcaaagttcctcgt

SEQ ID NO: 192407 - DNA, 274 bp, Glycine max
ccatacgtcgtgttgttactgctgctcttttctcttttcttttctctttagttctctcttcccctttctttttctttttcttcttcttctgagcttgtttaagcttttcttccattaacatattatcatcatgtgtggtattcttgctgttcttggttgttctgatgactctcgagccaaaagggtccgcgtgcttgagctctctcgcagattgaagcaccgtggccctgactggagtgggctccatcaccatggtgactgctttttggcacat

SEQ ID NO: 192408 - DNA, 289 bp, Glycine max
attgcaaagcaaaaaccttgcaaattgcaatggcttccaacaaggttattgccaccatcttggttctttctctccttgcctactcaacatcattcaccaatgcatgtgcgcacatgccacccaaaacctactccttctccccctcctccatcagggaagtgccccaaggacacattgaagctaggggtgtgtgctgatgttctaggacttgttaatgttgttgttggttcccctgtctctagcaagtgttgtgcattgcttgaaggtttggctgattcggaggctgcac

SEQ ID NO: 192409 - DNA, 285 bp, Glycine max
gcgagatcttgagtcgccgatttgaaaagatgagtaagcttcagagtgatgctttgcgtgaagccatctcaggaatcatggccgattccaatgagaagaatcgcaaatttgtggagaccatcgaactccaaatcggtttgaagaactacgatccacagaaggacaagcgacctcagtggctccgtcaagttgccccacatccctcgccccaagatgaaaatttgcatgcttggtgatgctcagcatgttgaagaggcagagaagataggactggactggatggat

SEQ ID NO: 192410 - DNA, 280 bp, Glycine max
cgagatgtcgtcgacaaggtgggagaaggaggaggaagaagaagaagaagaggcccaaatggatatctggaagtacatatttgggtttgtggaactggcagtgataaaatgtgcgattgagcttggcatagctgaagccatagagaagcatggaagtcccatgacactatcggagatatcatcaagtttagggcgtgatacttcacatctgaagcgcatcatgaggttcctggtgcaaagaaagatattcaaaggcgacgggtgcagcaggggctattct

SEQ ID NO: 192411 - DNA, 277 bp, Glycine max
gtcatatgcttgtctcaaagattaagccatgcatgtgtaagtatgaactaattcagactgtgaaactgcgaatggctcattaaatcagttatagtttgtttgatggtatctactactcggataaccgtagtaattctagagctaatacgtgcaacaaaccccgacttctggaagggatgcatttattagataaaaggtcaacacaggctctgcctgttgctttgatgattcatgataactcgtcggatcgcacggcctttgtgccggcgacgcatca

SEQ ID NO: 192412 - DNA, 265 bp, Glycine max
gaacaacatcaacatctctgattcgtataagaaaaatcgcattcaggtctctaacaccaagaagcccctcttcttctacgttaatctggccaagagatatatgcaacagcatgatgaggtcgagctctcagctctaggaatggctattgccacagtagtaactgttgctgaaattttgaaaaacaacagacttgctgttgaaaagaaaatcaggacatcaactgttgacataaaggatgactctagaggtcgacctgttcaaaag

SEQ ID NO: 192413 - DNA, 273 bp, Glycine max
atcgtcttctgcttcaaggaaggagagcttgttattctctatcaacaaggaaaatgtcaggtgaagaggttgttgttgcagctgagccagctgctgccatcccaggcgagcctatggatatcatgactgccttgcaacttgtgctcagaaaatctctggcttatggtggtcttgcacgaggccttcacgaaggggcaaaagtgattgagaagcatgctgcacaactctgtgttctagcagaagactgtgaccagcctgactatgttaaactgg

SEQ ID NO: 192414 - DNA, 282 bp, Glycine max
cacatgaatggtccttggtgaacaagcagaagcctatttggatgaggaagcctgaggagatcacaaaagaggagtattctgctttctacaagagtcttaccaatgactgggaagagcatttggctgtcaagcacttctctgttgagggtcagttggagtttaaggctatactctttgttcccaagagggcaccttttgacctctttgacacaaggaagaagcctaacaacattaagctctatgtccgccgtgtctttattatggacaactgtgaggagttga

SEQ ID NO: 192415 - DNA, 270 bp, Glycine max
tggaggggaaggagcaggatgtgtcgttgggagcgaacaagttccccgagagacagccgattgggacggcggcgcagagccaagacgacggcaaggactaccaggagccggcgccggcgccgctggttgacccgacggagtttacgtcatggtcgttttacagagcagggatagcagagtttgtggccacttttctgtttctctacatcaccgtcttaaccgttatgggagtcgccggggctaagtctaagtgtagtaccgttgggattc

SEQ ID NO: 192416 - DNA, 269 bp, Glycine max
attgtctcaaagattaagccatgcatgtgtaagtatgaactaattcagactgtgaaactgcgaatggctcattacatcagttatagtttgtttgatggtatctactactcggataaccgtagtaattctagagctaatacgtgcaacaaaccccgacttctggaagggatgcatttattagataaaaggtcaacacaggctctgcctgttgctttgatgattcatgataactcgtcggatcgcacggcctttgtgccggcgacgcatca

SEQ ID NO: 192417 - DNA, 269 bp, Glycine max
gtttttcttcttccatttctcttcctttctaagcttttttcgattacccatttggagattctgtcctaatggctcttgctccttccaaagtttcatccttttccgggttttctcccaaacccagtgttggggatgctctgaaaaacccaacttgctctgtttctctgagctttgcgaatgtgaaacttggaagcagaaaccttagggcttgagcctcaactgtgcctatctcaggggtctctgtcgaaccttcgacgaatctaacaatc

SEQ ID NO: 192418 - DNA, 272 bp, Glycine max
ctcgagccgtaacaactcacctgccgaatcaactagccccgaaaatggatggcgctaaagcccgcgacctatacacggccgtcggggcaaggaccaagccccgatgagtaggagggcgcggcggtcgctgcaaaacccagggcgcgagccggtgcggagcggtcgtcggtgcagatcttggtggtagtagcaaatattcaaatgagaactttgaaggccgaagaggggaaaggttccatgtgaacggcacttgcacatgggttagtcgatcc

SEQ ID NO: 192419 - DNA, 260 bp, Glycine max
ctattgttgagaaagaaaagaatggcaaagttaataaaattctttcagttgaacacaggggccaagattccttctgttgggttaggcacttggcaagctgagcctggtgttgtagccacagctgtcaccacagccattctggttggatacaggcatattgattgtgctcaagcgtataacaatcatgccgagattggttctgctcttaagaagctttttgataatggtgtagtgacacctgaggacttatggatcacctc

SEQ ID NO: 192420 - DNA, 179 bp, Glycine max
caggggatctgcagcagttccgtggtgtcgccgccggaggagctggtggctgccggcagcagaacgccgtcgccgaagacgacggcggggaagctgctgaaccggttcgtggagaacaaggcgtcggcggtgtcgctgcaggtgggagaacacgtgcagttggcttacacgcaccataa

SEQ ID NO: 192421 - DNA, 270 bp, Glycine max
gtttgcggctgaggattccgaacgagcgaccttcttcgtttctcgcaaagtttaagtcatcatgggtaaggaaaagactcacatcaacattgtcgtcattggacatgtcgactctgggaagtcaactaccactggtcatttgatctacaagcttggaggtattgacaagcgtgtgattgagaggttcgagaaggaggctgctgagatgaacaagaggtcattcaagtatgcctgggtgcttgacaagctcaaggctgagcgcgaaagagg

SEQ ID NO: 192422 - DNA, 281 bp, Glycine max
catacacaagctcttccattcattgtatttctttctttgcctttcaactcaaaacaatgggcttccgcttacctggtattagaaggtcatcttttgctgtaaccaaagcagcttccaaggctgtggaggtccccaaaggctaccttgcagtctatgttggggagaaaatgaagcggtttgtgattcctatttcatacttgaatcaacctttatttcaacaattactgagccaagctgaggaagaattcggatatgatcatccaatgggtggtctcacaatt

SEQ ID NO: 192423 - DNA, 273 bp, Glycine max
cttcttcttcgttgcgctttttcccagaaccaattgcatcactctacgtccgttaccgccgatgccctagaccaccgcaagcgacgtcgcacaccgcattcatccgttagggcaccaatgagtcgaggaagtggaggtggatacgatcgtcacatccactattttctcccctgaaggacgtctctttcaagtggagtatgctttcaaggctgtgaaggctgcaggaatcacctcgatttggggtccgacgaaaggattcaatttgtgtcgtta

SEQ ID NO: 192424 - DNA, 246 bp, Glycine max
cttcttcttcgttgcgctttttcccaaaaccaattgcatcactctcgtcagttaccgccgctgccctagaccaccgcaagcgactacgcaaaacgccttcatcagttagggccaaaatgagtcgaggaagtggacgtggatacgatcgtcacatcactatcttctcccctgaaggacgtctctttcaagtggagtatgctttcaaggctgtgaaggctgaaggaatcagctcgatctcgtgtccga

SEQ ID NO: 192425 - DNA, 258 bp, Glycine max
caaaaacgaagtacaatgggtcggcttaatctcctacttgtgggcgtcatctctttaacacttttccttaattatctacacccagcctctgcccagctcagtccgaaccactatgctaacatatgacacaaccttgaaggcatcgctagacaagccgttactaatgagttccagcaaacctttgtcaccgtcccagacaagcttcgcctattctttcacgattgctttgtccatggtcctactggttccgttttgact

SEQ ID NO: 192426 - DNA, 268 bp, Glycine max
acggttgttgcgttggcgcaaatggcattcttcagaagcgtttctgcactttctcgactcagctctcgcgtgggccaacaatctaatctggcgaattcagttagatggctccaaactccgagctccactaacactgatctttattctgagttgaaggaactggttccagagtatcaggaacgtgttaagaagctgaagaaagatcatggaagtgttgaattaggaaaaatcactgttgatatggtacttggtggaatgagaggaatga

SEQ ID NO: 192427 - DNA, 177 bp, Glycine max
ggctacctccatggtgaagcttatgcttttctctgctctcatactcttgtccttgcaagcagttgtgtctgtaacaccactgcattttcaacatccactagacgcattaaccatacaagagataagtcttgtccaaaccatagctccacacaagtacccaagctcaagtaacaggtt

SEQ ID NO: 192428 - DNA, 267 bp, Glycine max
atgagactgagctcaaggacaagaaattgagagttgaagatgctcaaattgctacaaaggcagctgtagacgagggtattgcagttcgtggtggttgcactcttctgagacttgcatcaaaggtggacacaatcaaggatagccttgataatgatgaagacaaagttcgagctgatattgtgcaaagagctcttagttaccctttgaaattaattggcaaaaacgctggtgtcaatggtagtgctgtcagtgacaaggtattgtcca

SEQ ID NO: 192429 - DNA, 251 bp, Glycine max
aaactgcagaagcgacctatccgcaagcgatgtcaagtgcggcagaggaaaggtctggcttgaccccaatgaagtcaacgaaatctccatggcaaattctaggaaaaacatcaggaagttggataaggatgggtttatcatcaggaagccaaccaagattcactcccgatcacgtgctcgtaggatgacggaggcaaagaggaagggccgccactccggttatggtaaacgtaagggtacaagggacgcaa

SEQ ID NO: 192430 - DNA, 268 bp, Glycine max
ctcatgggctgtccactttctcttcagaatactgtcactgctggaattgtaagttgtgttgaccgcaaaagtagtgatctgggttttagtggcatgccaagagagtatttacaaaccgattgtgaaattaatatgggaaattctggagggcctcttgtcaacatggatggagaaattattggggttaacatcatgaaagtggccgctgcggatgggttgagtttttctgtgccaattgattccgtgtgtaaaattttagagcatttca

SEQ ID NO: 192431 - DNA, 279 bp, Glycine max
ggagaatatgaagttgtttgttttctttgttgctgcagtagttttggtagcatggccatgccatggcgcaggctaccaaaggttccctctccgaatgaaaactggctatggtgagcgttcttcggaggtaaaatgcgcaagttttaggcttgctgtggaagcacacaacatccgagcctctcaaaccattcctgaagagtgcgttgaaccaacaaaggactacattaatggcgaacaatttagatcagactctaaaacagttaaccaacaagctttctt

SEQ ID NO: 192432 - DNA, 275 bp, Glycine max
gctgtttgtgccataccaagacccaacagatgatttttactataagactttctttgatgctggagagtttgggtttggtctctccacggtctcattggtgcccaaccgtgattccccatcgaatgctcagttcctagatacatatgttcacgctgctgatggtactccgttactcatcaagaacgcaatctgtgtctttgaacaatatggcagcatcatgtggcgtcacaccgaaacaggcattcccaatgaatcgttcgaagaaacgagaacgg

SEQ ID NO: 192433 - DNA, 273 bp, Glycine max
gggactctgaccgcgtgcctgttgaagaatgagccggcgactcataggcagtggcttggttaagggaaaccaacggagccgtagcgaaagcgagtcttcacagggcaattgtcactgcttatggacccgaacctgggtgatctatccatgaccaggatgaagcttgggtgaaactaagtggaggtccgaaccgactgatgttgaagaatcagcggatgagttgtggttacgggtgaaatgccactcgaacccagagctagctggttctccccg

SEQ ID NO: 192434 - DNA, 277 bp, Glycine max
tccaaagtttgtatagtgtaggatttgttggtattcgtgataaaaacacctcatcctattcattttgccatgacgggcgaactccagataaaggttttgaaagtaatgagaaattattaattcatccatgttactggcttggtttgaatctaaatcgtaatgcacttgctccagaggaagcagaggagataaatgacgaatatgatattaatattatttcagataattcagccattagaaataaaacaataggtcaaataactactcatctagatca

SEQ ID NO: 192435 - DNA, 261 bp, Glycine max
  unsure (1)..(261): unsure at all n locations
cttcttcctcctcgatcatgtctcacttcaagggcaagtaccatgatgagctnatccgccaatgctgcgtacattggcactcctggaaagggtattcttgctgctgatgagtcaacagggacaattggcaagcgtttggccagcatcagtgtagagaacattgaatccaacaggcgagctcttagggagctgcttttcactgctcctggtgttcttcaatatctcagtggtgtcatcctctttgaggaaaccctctaccag

SEQ ID NO: 192436 - DNA, 260 bp, Glycine max
  unsure (1)..(260): unsure at all n locations
cgacgtctctctgcgagccaggttcagttnctagagaagagcttcgaggaggagaacaagcttgaacccgagacgaaagaccaaactagccaaagaccttggtttgcagccacggcaagttgctatttggttccagaaccgtaganctcggtggaagaacaaacagctggagaaggattacgagactctgcatgcaagttttgagagtctcaagtccaactatgactgtctcctcaaggagaaagacaagttaaaagctg

SEQ ID NO: 192437 - DNA, 275 bp, Glycine max
ctagtttatcgtgaggagaatatgaagttgtttgttttctttgttgctgcagtagttttggtagcatggccatgccatggcgcaggctaccaaaggttccctctccgaatgaaaactggctatggtgagcgttcttcggaggtaaaatgcgcaagttttaggcttgctgtggaagcacacaacattcgaagcattaaaaccattcctgaagagtgcgttgaaccaacaaaggactacattaatggcgaacaatttagatcagactctaaaacagt

SEQ ID NO: 192438 - DNA, 269 bp, Glycine max
ggacactcccaaattacatgcacaaccacaccttttaattctccgcaccaatcttttagtagataaaaagcgaaaagaggttcgttccatttcccgcttcttcttttttccctcacttttccccggcgagaaaatgagagaaatcctccacattcagggcggccagtgcggcaaccagatcggagccaagttctgggaggtgatctgcgatgagcacggcatcgaccacaccggaaagtacagcggcgactccgaactccaattggaac

SEQ ID NO: 192439 - DNA, 267 bp, Glycine max
cgcgctcgccgcgcctcctggcgcatcatctcctccattgagcagaaggaggagagccgcggcaacgaggaccacgtcgccgtcatccgtgactaccgctccaagatcgaggccgagctctccaccatctgcgacggaaccctcaagctcctcgacacgcgcctcgtcccctccgccgcctccggcgactccaaggtcttctacctcaagatgaagggagactaccacaggtacctcgactgagttcaagaccggcgccgaccgcaa

SEQ ID NO: 192440 - DNA, 263 bp, Glycine max
tgcttcaattaacataaacaagtccatctggaaaatgtatttcaaagagttacttccatagtgaatccttctagagatggactgcaataatgaaaggtcattagctgcagtttgcgcctcgtccgagaacttgtatagagaaggatttcccgcggcgcagagttcttccataccaacttagcagcccggcgctgctattggcataacaaccggtacaccataggttggcccaacccagtcctctcgtactagggttggctcct

SEQ ID NO: 192441 - DNA, 261 bp, Glycine max
cctcgagccgaatcggctcgaggggatggaaaacatgcagagcttaccggcaattgggtgatgcactccgtgggcactcaaaagcatcggaggatcacaagtggttaatggttgcctcgaaactggccgaacagacaagattgaagggggagcgtgtgaacaaccttgatctttcaaagggacccattgaaacaaggtcaagggataaatttgggttccaggaagagaacaaatttgattctcttaacttgagcatgttga

SEQ ID NO: 192442 - DNA, 254 bp, Glycine max
taagcttgctactgagtttccacactgcataccttaggtcttccgaattcgaagttaatttgcaagatggctaaggaaaaggctcagatcaacattgtggtggttggtcatgtggaccctgaggaggcaaccaccattaacgagctgaagaagcctgttgtggagaaagaagctccagggcatgccatatgagggcatgcacgtacggcctcggaggggaaccagaaaattatgttaacaaaataatctggaac

SEQ ID NO: 192443 - DNA, 255 bp, Glycine max
gcggtggcaagcagaagaagaagaagtggagcaagggaaagcaaaaggagaaggtgaataacatggtgctgtttgatcagggcacctatgataagctcctttctgaagctcccaaattcaagctcatcactccttccattctttctgatcgtttgaggattaatggatcacttgcaaggaaggctataagagaattgatggctaggggttcaatcaggatggtgtctgcccatgcaagccagcaaatttacacca

SEQ ID NO: 192444 - DNA, 255 bp, Glycine max
ggtttttacttgaaagggttgaaactcgttactgtggaccgtccttttgctgagaagcactatgctgatttgtctgcaaagcctttctttagtggtttggtggattacattgtctctggccctgttgttgccatgatctgggagggtaagaatgttgttacaactggccgaaagattatcggagccacaaacccagctcaatctgagcctggaactattcgtggtgactttgctattgacattggaaggaatgtt

SEQ ID NO: 192445 - DNA, 262 bp, Glycine max
ctcgagccgtatgattgcttgcgagccaataaatcaacatttgcttggggtctagaagcccgtgtaccatttttggacaaggcgtttatcaatgctgcaatgagtattgaccctgagtggaagatgataaaaagagatgaaggacgaattgagaagtggattctgaggagagcctttgatgatgaagagcatccttatctgccaaagcacattttatacaggcagaaagaacaattcagtgatggagttggctatagttgga

SEQ ID NO: 192446 - DNA, 261 bp, Glycine max
gcttattgcaagttccgtgattttgacatgaacccacgagcacatcaagttttttattctggctgccaggccatcatgtatattatgtgttttcgcatgagatctttgatggatgttcctaggcttaagttgcagctgcttaatatgcccatggaggcaatcttgaaacataaattgagtcccttgaaggtgtgtttgcccactgtagtagtggaatttcttagacaggcaaaggctgctcaacttttcatggcatcagag

SEQ ID NO: 192447 - DNA, 258 bp, Glycine max
ctccgcaccagtttcaccgcacgaatatcttgttgtttggagcgatccgagaaaaactctgtaaacatgttggtttaccaggacctccttacaggtgatgagcttctctctgactccttccgttacaaggaaattgagaatggaatgctgtgggaagttgaggggaagtgggttgttaaaggagcagttgatgtagacattggtgcaaacccttctgctgagggtggaggagaagatgagggagttgatgatgcagct

SEQ ID NO: 192448 - DNA, 252 bp, Glycine max
ggctagggttcggaaacgaagaagggttctgttttcttttcgcgatgagggccaagtggaagaagaagcgtatgaggaggctgaagaggaagcgccgaaagatgagacagagatccaagtagtgcgttaaacctagtttgtttccgttgcttttacaattgcttatgttgtcaaataggacacccagttgttagtggcactggtctctcctttttgatgttctgatacattttgttggattttatttcgtct

SEQ ID NO: 192449 - DNA, 207 bp, Glycine max
gcttctccgtcatatcgcgaccttcttcgtcaaatccccaattcatcctcttcaacgccgctccccgaaccggaacccctcattcccgaaccggttcggcccggttcaggtgcttggccggccagaccgggttcttcacgaaactagggcggttgataaaggagaaggcgaagagcgacgtggagaagctcttctcgggattctcca

SEQ ID NO: 192450 - DNA, 253 bp, Glycine max
gcaaattcgcggcctcgagtcttttctttttctgtatcgtttttactttccatcacttccattttccgtcatcaacgcgaggatgctgctgcttctgctaatgctgcagaggatagagaaaacaagttcctaactatggcaattgaagaagcatataaggcggttgaaagtggccatggtcgcccatttggtgcagttattgttcgaaacgatgaaatactttcaagctgtcataacatggttgtaagaaatg

SEQ ID NO: 192451 - DNA, 274 bp, Glycine max
ataacctccgagctctacaccgaagaacgaagccatggggaagacacatggaatgggagctgctcgcaagctcaagtctcaccgcaggaggcaaaggtgggctgataagtcatacaagaaatcccatcttgggaatgaatggaagaaaccttttgccggttcatcccatgccaagggaattgtccttgaaaagataggtattgaagctaagcagcccaactctgctattcgtaagtgtgccagagttcaacttatcaagaatgggaagaaaatt

SEQ ID NO: 192452 - DNA, 269 bp, Glycine max
gcttggactgcctggaaacggaggcactgaagaagtgctcatcaggaagaggggtttctctgagactgaaactggtcatgaagatgagtctgccaccactgtggatttgatgcttaatctttcttctaaggaggccgcaaccactgctgctgctgctgcagatccaactgataagcacaagactttgcctaaggagaagacccttctgccagcagatcctgctaagcctccagccaagacgcaggtggtgggttggccacctgtgcggt

SEQ ID NO: 192453 - DNA, 261 bp, Glycine max
cgcctcttcctcacccctttctccatctaacgagtaaggaaaaatggcgcgtaagaagatcagagagtatgactcaaagaggttgttgaaggagcactttaagagactttctggcaaggagttgccgatcaagtctgcacaaattactgcatcaactgatttcactgagctacaagagcaggaaccctggctttcatcttctaaattggttgtgaaacctgacatgttatttggaaagcgtggcaaaagtggtttggttgc

SEQ ID NO: 192454 - DNA, 253 bp, Glycine max
gcacgctctgcttccagcgagtgttctttcttcgtttcaacaccttaatttgcacacgctgcttcttcagcttgagaaatggcacaagaaacctttctattcacatctgaatctgtaaacgagggtcaccccgacaagctgtgcgaccagatctctgatgcagtgctcgatgcgtgccttgaacaggaccctgacagcaaggttgcctgtgagacatgcaccaagaccaacatggtcatggtctttggagaga

SEQ ID NO: 192455 - DNA, 251 bp, Glycine max
attgtgcttattattattgttgagaaagaaaagaatggcaaagttaataaaattctttgagttgaacacaggggccaagattccttctgttgggttaggcacttggcaagctgagcctggtgttgtagccaaagctgtcaccacagccattctggttggatacaggcatattgattgtgctcaagcgtataacaatcaagcagagattggttctgctcttaagaagctttttgatgatggtgtggtgaagc

SEQ ID NO: 192456 - DNA, 269 bp, Glycine max
ggaagtgtcaagagttaccaatgcccatcacaatgctcgaggagatgtagccagacccaataccacaagccctgcatgtttttctgtcagaagtgctgcaggacatgcctgtgtgtgcccccggggtattatggtaataaagctgtgtgcccttgctacaacaactggaagaccaaggaaggaggacccaagtgcccttgagcttcaacttgttcaacttcaattgtcgctttcctacatttttattgcttccttccttgtgccaattt

SEQ ID NO: 192457 - DNA, 259 bp, Glycine max
gtgaccgaaaagggacaaagagagttatcagctaaagatactgctttgtgcacttcctgtcagatgcttgtggtttggattcagaatcaactaaaacaaaagaagaccaaggagatagtattcaactatgtaaatcagctgtgcgagagcttgccaagtccaaatggagagtcagtagtagactgtaatagcatttatggattgccaaacatcacgtttactgttggagacaaacctttcaccctcacccctgagcagt

SEQ ID NO: 192458 - DNA, 258 bp, Glycine max
gaggcgttctatatattattgaattgacaatgaggcctgctcttgctttgcttcctcttctatttgctttcttgttagctgccactacagaatcaagaaaagatacaggggaatattggaaaatgatcatgaaagatcaggaaatgccagaaggacttcaaggtcttgtttcatttcaatctgaaaataaccctaagactcaagagcagcttggtaaaggttccaaaaaccattgtgaagagtctctagttacaaata

SEQ ID NO: 192459 - DNA, 255 bp, Glycine max
gccccactcaaccaccacacttctcctcgttcacgctacccctttctgctcttcttctacctttcaagttttaaaagtataaagatggcagagacattcctatttacctcagagtcggtgaacgagggacaccctgacaagctctgcgaccaaatctccgatgctgtcctcgacgcttgcctcgagcaggacccagacagcaaagttgcctgcgaaacatgcaccaaaaccaacttggtcatggtcttcggagaa

SEQ ID NO: 192460 - DNA, 257 bp, Glycine max
ctcgagccgctttcttgattctatgggtggtggtgcatggccgttcttagttggtggagccatttgtctggttaattccgttaacgaacgagacctcagcctgctaaatagctatgtggaggtaaccctccacggccagcttcttagagggactatggccgcttaggccacggaagtttgaggcaataacaggtctgtgatgcccttagatgttctgggccgcacgcgcgctacactgatgtattcaacttttcaaa

SEQ ID NO: 192461 - DNA, 270 bp, Glycine max
ggaggcactacttccagaacacccagggtcttatttttgttgtagacagcaatgatagggacagagttgttgaggccagagatgagttgcataggatgttgaatgaggatgaactgagagatgcagtattgcttgtgtttgccaacaaacaagatcttcctaatgcaatgaatgctgctgagattaccgacaagttgggtctacactctctcagacagcgccactggtacattcagagcacctgtgcaacctctggggagggcctttacg

SEQ ID NO: 192462 - DNA, 267 bp, Glycine max
atcggtgttcacttgatctcatcataatcgtcagcgtcaattgaagaagatgccgatcagaaacatcgccgtcggaaggcctgaagaggcgactcaccccgacacgttgaaggcggctttggctgagttcatctcaaccttcatcttcgtgttcgccggctcaggctccggcatcgcctacaacaagctcaccgacaacggcgctgccacccctgccggcctcatctccgcctccatcgcccatgcattcgccctcttcgtcgccgt

SEQ ID NO: 192463 - DNA, 254 bp, Glycine max
  unsure (1)..(254): unsure at all n locations
ctcgagccgattcggctcgagcttgattgtgatcactacataaacaccagtaaagccttgaaggaagctatgtgctttatgatggatcccaaccttgggaaaaatgtttgctatgtccagtttccacagaagataggagttagngataggaatgatggatatgccaatcgcaatagtgttttcgttgatataaacttgagaggtttggatggcattcaaggtcctgtttatgtggtgtactggatgtgtcttta

SEQ ID NO: 192464 - DNA, 259 bp, Glycine max
gggtcacaaccttccgtggacgctaaggcaaaggtccaacaaagaggtaaggaagaaggtttatatctgccccgaacaaacctgcgtccaccacgaccctgcaactgcactcggcgacctcactggcatcaaaaagcacttcagcagaaagcacggtgagaagaagtggaagtgtgaaaagtgctccaagaaatacgcagtccaatcagattggaaagcccacaccaaaacctgtggcactagagaatacaaatgcgac

SEQ ID NO: 192465 - DNA, 254 bp, Glycine max
cttcttgcttctattacttgcttctttcttcaccatgtcacttgccgggaaaatcaccactgaaattggggttcatgcaaccgctgcaaagtggttcaacctctttgcaacacaacttcatcatgttcaaaaccttactgatagagtacatggaaccaagctgcatcaaggtgaagactggcatcacaacgagacagtcaaacactggacttataccatagatggtaaggctacaacatgtctggagagcattg

SEQ ID NO: 192466 - DNA, 261 bp, Glycine max
caaacagtcggtaactctttcttttcttttctttctttctccgatcgcatcgctcgcaaccacaatcatgccttcccgaagaagaactctcttgaaggtcatcattctcggtgacagcggggtggggaagacgtctttgatgaaccagtatgtgaataagaagtttagtaatcagtacaaggcaaccattggagcggattttttaaccaaagaagtgcaatttgaagataggcttttcaccttacagatttgggatacagc

SEQ ID NO: 192467 - DNA, 260 bp, Glycine max
cagagagggtagggagcgggagagaagattctccgatcgaagatctaccagaacacgtactggaaggagcaatgtttcgggttaacggcggcgacgttggtggacaaggccatggagctcgaccacctcggcggcacctacggcggcaaccgcaaacccacgccgttcatgtgcctcgtcacgaagatgctccagattcagcccgagaaagaaatcatcatcgagttcatcaagaacgaggattacaagtacgttaggat

SEQ ID NO: 192468 - DNA, 263 bp, Glycine max
attcggctcgagcgcactttgcgatctctgcgtcatctccgattccccgacaatggccatccaaatgagcatgtagagacagttcgtagctgatggcgtgttcttcgctgaactgaacgaggttctgacaagggagtgagccgacgacggatactccggcgtggaagtgagggttacgccgatgcgcatcgaaatcatcatcagagccaccagaacccaagccgttctcagtgatcacggaacgagaatcatggcacttacct

SEQ ID NO: 192469 - DNA, 248 bp, Glycine max
gaatattcttccatggcctccaagcggattctgaaggagctcaaggacctacagaaagactctccaacctcttgcagtgccggtcccgtagcagaagatatgtttcattggcaagcaactataatgggtccccctgatagccctcatgctgggggtgtttttctagttactattcattttcctccggattatccattcaagccacccaaggttgcatttaggactaaagttttccacccaaatatcaa

SEQ ID NO: 192470 - DNA, 249 bp, Glycine max
gaaactctcacttactaagctttttcctaaactccattagatccttgagttcttcttcttcatccgccgattcttctgctcagaaccctaagactaagaaatcgaagcgaagaaagaagaacttgttcgatgtggctcagttcttacctaactggggaatcggctaccacatggccaagactcactggaatgaagtttcttacgaaatcactaaaatcaatctctacaaggatggcagacatggaaaag

SEQ ID NO: 192471 - DNA, 251 bp, Glycine max
gagagtccaacctttcattttcaattttcaaagatgcctcgtggaacacttgaagttgttctgatcagcgccaaatcgaatcgatgacaatgattttctctccagcatagatccttatgtgattctcacatacagggcacaggagaaaaagagcactgtgcaagaagatgctggatccaagccacaatggaatgagagctttcttttcactgtctctgacagtgcttctgaacttaatctgaagataatgg

SEQ ID NO: 192472 - DNA, 246 bp, Glycine max
  unsure (1)..(246): unsure at all n locations
gcgtctgagaccgcttctcggtcgagttccgcggctgattcgtacattgggagcttgataagcttgacctctaagantgagatcagatacgaaggcattctctacaacatcaacaccgaagagtccagtattggcctcagaaatgtgcgatcttttggaacagaaggaagaaaaaaggatggcccacaaattcctccaggtgacaaggtttatgagtatatattttcgtggnactgacatcaaggt

SEQ ID NO: 192473 - DNA, 250 bp, Glycine max
ggtgatgtccctttctgttctcttcactcttggtcttgcgagagaaagccatgccagagacgaagatttttggcatgctgtttggccaaacactcccattccaagttcattgcgagatcttcacacagcatggccctgcaagtgttgaaatcgatgatcaccctatgcaaattgaagaaacacactacccgaaaaccttcttctataaagaagaccttcatccaggctcaacaatgaaagtacaattcag

SEQ ID NO: 192474 - DNA, 253 bp, Glycine max
ctcgagccggcgaattctaatggttggtcttgatgccgctggtccgaccaccatcctgtaccagctcaaacttggagagatcgttaccacaattcccaccattgggttcaacgtggagactgtggaatacaagcaacattagtttcactgtctgggatgttggtggccaggacaagattcgtcccttgtggaggcactacttccaaaatacacagggtctcatttttgttgttgacagcaatgacagggacag

SEQ ID NO: 192475 - DNA, 253 bp, Glycine max
gttccagatgatgaagacagagaattgttgcaggacatcataaacacattctaagttaagtgaaggatatctcacccttgctcgtgatattgaagtcatggagcccaagtcccctgaggatatatacaaggcacatttgcttgatggccgggctagtgctggtgcaagtgttgattcagctagacagaaccttgctgcaacttttgttaatgcatttgtaaatgctggctttggtcaggataaattaatgact

SEQ ID NO: 192476 - DNA, 247 bp, Glycine max
cggaaggtgagtagtaatggtcatggatgttgcaaatcagggccaggctatgcttccccactggaagccatttctcgtcccagagagtctctcatttatgtaacctctgtctacacagggaccggaatagagaagccagactatttggcgacagtggatgtggatccaaactctccaacttattccaaagtcatccataggcttcctgttccttatttaggtgacgaattgcatcacacaggctgga

SEQ ID NO: 192477 - DNA, 242 bp, Glycine max
ctataactcatttgaggctctgtgagacttgagaaatggctaaagatgttgaggttcaagagcaaggaggagagtactctgccaaagactaccatgaccctcctccagcacctttgttcgacccagaggagctcacacagtggtccttctatagagccctcatcgctgagttcatagcaacccttctcttcctttatgtcactgtgctcaccattattggctacaaaaggcagactgataca

SEQ ID NO: 192478 - DNA, 244 bp, Glycine max
ggagaatatgaagttgtttgttttctttgttgctgcagtagttttggtagcatggccatgccatggcgcaggctaccaaaggttccctctccgaatgaaaactggctatggtgagcgttcttcggaggtaaaatgcgcaagttctaggcttgctgtggaagcacacaacatccgagacactaaaaccattcctgaagagtgcgttgaaccaacaaaggactacattaatggcgaacaatttaga

SEQ ID NO: 192479 - DNA, 249 bp, Glycine max
  unsure (1)..(249): unsure at all n locations
tcgaangcgcaaataatggccttgtcatgaacttctacaaggaatcatgccctcaggctgaagacatcatcacagaacaagtcaagcttctctacaagcgccacaagaacactgctttctcctggctcaggaacatcttccatgactgtgctgttcagagttgtgatgcttcactgttgctggactccacaagaaggagcttgtctgagaaggaaacagatagaagctttgggttgagaaatttcaggt

SEQ ID NO: 192480 - DNA, 258 bp, Glycine max
ttcggctcgagcaatattgtgcttattattactgttgagctagacaagaatggcatagttaataaaattctttgagttgaacacatgggccaagattccttctgttgggttaggcacttggcaagctgagcctggtgttgtagccaaagctgtcaccacagccattctggttggatacaggcatattgattgttctcaagcgtataacaatcaagcagagattggttctgctcttaagaagctttttgatgatggtgt

SEQ ID NO: 192481 - DNA, 248 bp, Glycine max
  unsure (1)..(248): unsure at all n locations
gctgtttggccaaacactcccattccaagttcattgcgagatcttctaaagcctggccctgcaagtgttgaaatcgatgatcaccctatgcaaattgaagaaacacagtacccgaaaaccttcttctataaagaagaccttcatccaggcaaaacaatgaaagtacaattcagcaagcctccctttcaacaaccatggggtgttggtacatggttaaaggaaacgtggacnatactaaagaaggatat

SEQ ID NO: 192482 - DNA, 212 bp, Glycine max
ggcaattgtgggcttcaagagctgcctcttacctgaggatctctgtgtttcacagaggcttttctaatgttattaaagatttcaagtatgttgattctcatcagtgggtgaaagttgatggaaattacgcaaccatcggcataactgatcatgcccaagatcatttgggtgatgttgtatatgttgaattgccagaagtgggagcagctgtg

SEQ ID NO: 192483 - DNA, 253 bp, Glycine max
gtttcacagcagcaatggtgtacgtcaaggctcagaaatcaaaagcctacttcaagagatatcaagtcaagttcaagagaagaagagagggaaaaaccgattaccgtgccaggattcggttgattaatcaggacaagaacaaatataacactccgaaataccgatttgttgttcgctttagcaacaaggacattgttgcacaaataatatctgctagcattgctggcgatattgttcttgctgcagcatatgc

SEQ ID NO: 192484 - DNA, 230 bp, Glycine max
gagcctaacagcaaaaccagaagcgaaatcgcaatcgcaatccagcgaatatgaaggtcgtcgctgcatacttgctcgcagtgttgggagggaatccttccccttctgccgatgacatcaaacacatcctcggcgcagttggagctgaggctgataatgagttgattgagtggcccttgactgaagtcaagggaaaagacttcaatgagctaattgctagtggaagtgaa

SEQ ID NO: 192485 - DNA, 234 bp, Glycine max
cggaattcagctcgcgcgcacattcaccctttaaagagggacggccaaatggttttttcagtatgcgaagccatatatggactgatactggcaaggatcgcacaggcatgctgcctgttgtctttgatgactcgtgtgggtttcagcagtatattgattatgcacttgatgttcctaggtattatgtctatcggaaacacagatatatcgactgtactggaaaggaccttcagg

SEQ ID NO: 192486 - DNA, 250 bp, Glycine max
gttcaggcaatattggattggcagaggagaacaatggatatgatgtacaaggatgttgttcaggcgctccgggccaagggaatagtggaaaatcctcgtaactatttgacattcttctgccttggtaatagggaggtgaagaaacaaggagagtacgagcctccagaaagaccagatcctgatacagattatatcagagctcaggaggcccggcgcttcatgatttatgttcatgccaagatgatgatag

SEQ ID NO: 192487 - DNA, 247 bp, Glycine max
ctcgatgggaattgcgcttcaaggcgtctcgtagggctaatccgcctcacgagggtcaccaacggcacgtgcctttggggggccgaggccccctactgctggtcggcaaacggacggcgggcgcacgcgtcgcttctagcccggattctgacttagaggcgttcagtcataatccaacgcacggtagcttcacgccactggcttttcaaccaagcgcgatgaccaattgtgcgaatcaacggttcct

SEQ ID NO: 192488 - DNA, 245 bp, Glycine max
cgttgcttggtgatgtccctttctgttctcttcactcttggtcttgcgagagaaagccatgccagagacgaaactttttggcatgctgtttggccaaacactcccattccaagttcattgcgagatcttctaaagcctggcccagcaagtgttgaaatcgatgatcaccctatgcaaattgaagaaacacagtacccgcaaaccttcttctataaagaagaccttcatccaggcaaaacaatgaa

SEQ ID NO: 192489 - DNA, 166 bp, Glycine max
gcagaggtatccattgcatgcagaaactatgtgcagcaaaaatatctcctgattcactcagagacggcccaaaatcgtgtgatcgatgctgcactcacacttgttcgagaaaataccaggcttaagacagaactcgtgcatagtttgggaggtgctgtggcaactt

SEQ ID NO: 192490 - DNA, 244 bp, Glycine max
gcaaggcaaactgacaatgacaaagagtggagataatgtctctcctaaatgatgcaatcagagcacaaaaaccaaaaccatccctctgttgctgcatagatattgatgccatttccttgtgtatattgtgagggtgtggaatgtaattctttttctcactattttttctagtttctcttatccctgagaccgtgcattcaaagatttggaacaaatcatctagtaagtcaccaaatcgtgtaca

SEQ ID NO: 192491 - DNA, 210 bp, Glycine max
  unsure (1)..(210): unsure at all n locations
gaagttgtttgtcttctttgttgctgcagtagttttggtagcatggccatgccatggcgcaggctaccaaaggatccctctccgaatgaaaactggctatggtgagcgttcttcggaggtaaaatgcgcaagttttaggcttgctgtggaagcacacaacatacgaatcacnanaaccantccngaagagngcgttgaaccaacacagga

SEQ ID NO: 192492 - DNA, 253 bp, Glycine max
ctcgagccgctcgagccgcgaagacccaccaacgcacgaaagccgggatctttcagaaaatgcgattcctagccgaagggtgcataaccgcatggataagctcacactaacccgtcaatttgggatccaattcggttccttaggaggtatcgggacggaattttggaatgtaataatatcgattcatacagttacagaagaaagggttctctattgattcaaacgctctacctacgagatagggatagagaaa

SEQ ID NO: 192493 - DNA, 247 bp, Glycine max
ctaccagttgctccagtagccggcactaaacaacatggcggacaaggcagtcaccatccgaaccaggaagtttatgacaaacaggcttctctccagaaagcagttcgtcgttgatgtccttcatccagggagggctaatgtttccaaggctgaactgaaggagaagctgggaagaatgtatgacgtgaaagacaccaacactgtatttgtcttcaagttccgaactcattttggtggtggcaagtcc

SEQ ID NO: 192494 - DNA, 239 bp, Glycine max
gcaatggcttcaagtcagtgtgaggtgacccatttgggagctattggaagcccatttgtgtgcagggttcatatcgccctcaagttgaagggagttcaatacaaatatgtcgaagacaatttgaggagcaagagtgaactgcttctcaaatccaactcagtgcataagacggttccagtgttgattcacaatgagaagcccatagcagagtctacttgtgattgttgactacattgatg

SEQ ID NO: 192495 - DNA, 265 bp, Glycine max
tcggacttcggctcgcgcattatcgtgcttactattactgttgagacagacaagactggccaagttaataccattctttgagttgtacacaggggccaagattccttctgttgggttaggcacttggcaagctgagcctggtgttgtagccaaagctgtcaccacagccattctggttggatacaggcatattgattgtgctcaagcgtataacaatcaagcagagattggttctgctcttaagaagctttttgatgatggtgtg

SEQ ID NO: 192496 - DNA, 246 bp, Glycine max
cttgaattttcttcatccttctctgttctcctagaacttgattacctgaacattccctatgacagatgaggtggttcttctggatttctggccaagtccatttgggatgagggtcaggattgcacttgctgaaaagggtatcgaatatgagtacaaagaagaggacttgaggaacaagagtcctcttctcttacaaatgaacccggttcacaagaagattccggttctcatccacaatggcaaacc

SEQ ID NO: 192497 - DNA, 199 bp, Glycine max
cagacgcttttctcctgttatttaagatttcaagtacgttgattctcatgagtgggtgaaagttgttggaaattacgcaaccatcggcataactgatcatgcccaagatcatttgggtgatgttgtatatgttgaattgccagaagtgggagcagctgtgacacaaggaggtagttttggtgcagttgaaagtgtgaag

SEQ ID NO: 192498 - DNA, 154 bp, Glycine max
cggctcgagtccaaaaccaatcacatcagcatcactctcgtcgcggccgtcgtcgacaacggcaagagccatcgcactcggcggtcatcggttagggcaaaaatgagtcgaggaattggaggtggatacgatcgtcacatcacaatttcctccc

SEQ ID NO: 192499 - DNA, 257 bp, Glycine max
tcggctcgagggcgaattgcaagctaaggcgtggtaattctaaggattccccccgggaaaaatagagatgtcagctacgttacacgtaccatgtggaagtagcgacgtaatttcatagagtcattcagtctgaatgctacatgaagaacataagccagatgaaggaacgggaagacctaggatgtagaagatcataacatgagtgattcggcagatttggattcctatatacccactcgtgcggtacttcattgtat

SEQ ID NO: 192500 - DNA, 245 bp, Glycine max
gagcatcatggcctcaagagcagtgttattgttggctatgtgtgtgcttccggcgatggttgtggccattcgcccagcaaagaaccctttttgcgtgaagggtcgtgtctactgtgacccttgccgtgctggttttgagacctcagctaccacctacattgctggtgctgagattatgttgcaatgcacgagcagggttagcaacgaggttgtgtacacgaagaaggggtacaccgactcaaccg

SEQ ID NO: 192501 - DNA, 241 bp, Glycine max
  unsure (1)..(241): unsure at all n locations
cctccgtgggcgtggcggtgctggtttcccttcgggcctcaactggtcattcatgccaaaagcatccggcctgncgnncttcatatcttgttgttaatgctgatgaccgtgaacctggaacttgcaaagacagggaaattatgcggcatgacccacataaattgttacaaggttgcttgattgctcgagtaggaatgagggctagtgctgcttacatctacatcaggggtgaatatgtgaa

SEQ ID NO: 192502 - DNA, 235 bp, Glycine max
gctcacgacattcgcgctcaaactcgagacgcttctctgcgagactctggatctgtccatattggtcaccggcctgtcactgagattttctgctgcgggggaacggcagaataatggccttgttatgaacttctacaaggaatcatgcactcaggctgaagctctcatcacagaatcagtcaagcttccctacaagcgcaacaagcacagtgtttccccgtggttccggaacatg

SEQ ID NO: 192503 - DNA, 243 bp, Glycine max
ctttacttcccaaaacttgctctaccatgagtatccttcgttcttatgcaagaaacaaggatatatcaaaagtaggacgcagaggtatccattgcatgcagaaactatgtgcagaaaaaatatctcctgattcactagagcaggcccaaaatcgtgtgatagatgctgcactcacacttgttcgagaaaatacaaggcttaagaaagaactcgtgcatagtttgggaggtgctgtggcaactt

SEQ ID NO: 192504 - DNA, 244 bp, Glycine max
cttgactgataagcaaatgatgtctattagttctgaatatggcattgacataagcagagtccgaggagttgttgataatgctaaccaaattttagagattcagaaagactttggttcatttgacaagtacatttgggggtttgtgaatcataaaccaatctccactcaatacaagttacgccacaagattccagtgaagacatcaaaatcagcagagcataagcaaagacatggttagaagagg

SEQ ID NO: 192505 - DNA, 217 bp, Glycine max
gtccgctgcaaggatagcaacaggcatcatgctcaggaggctcatcgacgtgccaagttcaagttccctaggtcgtcgacaagttatagttaggaggtaccttgggctgcatccgttgagccgtactgattatctcaatttcaagttagcggaatagcgttgtgctcgatggtgtagctacaaagcttactggggtaccattgatctctggtagctc

SEQ ID NO: 192506 - DNA, 268 bp, Glycine max
ctctgcattccgctcgagcggatatctcggctcatgcatcgatgaagaacttatcgctatgcgatacttggtgtgaattgcagaatcccgtgaaccatcgagtctttgatcgcattccgcgtccgaagtcattaggccgttggctagcctgccataatgttccgtggttgcatcatgtctgacagcactactcatttgtacagaattctaatgctgtagacgtagctaagagctgtcttgatactgaattcctgtgttcaatttcatg

SEQ ID NO: 192507 - DNA, 244 bp, Glycine max
cttccctacaggagtggaagattatgttcataggattggaaggacacgaagagctggagccactgggctagcttacactttctttggtgaccaggatgctaaatatgcttcagatctcatcaaagtcttggaaggtgcaaaccagaaggtacctccagaacttcgtgatatgtcatcacggagtggtggtgggatgggtagatccagacgatggggttctgggggacgaggtggacatggtgat

SEQ ID NO: 192508 - DNA, 238 bp, Glycine max
ctcaccctgtgaaacatgcataccccctgtggttgacaccagttatttgtcagatctggttcgccttataccggcctcttgatcagtttccaaaatgctctcccattaatcgtgccagctatcttgaacgccttgctttaaggtatgatcgtgaaggagaaccatcacagttagatcctgttgatgtgtttgttcatacagtggatcccctcaatgagccgcctcttgtaactgccaa

SEQ ID NO: 192509 - DNA, 136 bp, Glycine max
caacagtgtgatgaaagtggaggtccttgttttcttcgttgctagaattttggtagcatggcaatgccatgcgtacgatatgttccctctccgaatgaacactggctatggtgaccgtacttcggagatgacatgc

SEQ ID NO: 192510 - DNA, 244 bp, Glycine max
cggctcgaggtgtctttgaacaatatggcagcatcatgtggcgtcacaccgaaacaggcattcccactgaatcgttcgaagaaacgagaacggaagtcaacttagtggtaagaactgttgtcaccgtgggcaactacgataacatcattgattgggagtctaaaacaagtggctcaatcaaaccctcgattgctctctcgggtatattggaaattaagggagtggctattacgcacaagagtgc

SEQ ID NO: 192511 - DNA, 250 bp, Glycine max
cgcgaagagacgagaaaaattaagatggaggggacggagcaggatgtctcgctgggagcgaacaagttcccggagagacagccgattgggacggcggcgcagagccaagacgacggcaaggactaccaggagccggcgccggcgccactggttgacccgacggagtttacgtcatggtccttttacagagcagggatagcagagtttgtggccacttttctgtttctatacatcactgtcttcaccgtca

SEQ ID NO: 192512 - DNA, 262 bp, Glycine max
cgagaatgtaccattagctgttgctcatccccaattcctcccgttcaaatggccacccaagtccaaactcccctccgtcgtcggaattcgatgctcctcctcccctttcaacgacaaaaccctcatttccatcacacctaacacttcccacctcaatcccaaccctctcgcttgtcgctttcacgcttcccagtttggagaacaggagagcaacaaatacgtggaagcctatgctgtaggacgaaatattcgtatgtctgct

SEQ ID NO: 192513 - DNA, 257 bp, Glycine max
cctcgagccgaatcggatcgagcggctcgaggaaagaagcttgaagaccttgaaaagaagctacacagagaagaacaaagatgacccattgagcaaccgctatgggccagctaaaatgccttacactctgctctatccttctagtgaggagggattgactttcagaggaattcccaacagtatctctatctaaggaccctatggttgcttaagtactgttcctggttttaaataaatgtgaaattgaaggaaccaga

SEQ ID NO: 192514 - DNA, 241 bp, Glycine max
agcagcaatggctcccaaacgaggtggaaaggctccggctcttgccgctaagaagaagcctgagaaggtcacgaatccgttgttcgagaagcgtccgaagcagttcggaatcggaggggcgttgcctccgaagagagacttgactaggttcgtgaagtggccaaagaatgttcaaattcagaggaagaagaggattctgaagcagaggttgaaggttcccccagctttgaaccagtttacc

SEQ ID NO: 192515 - DNA, 249 bp, Glycine max
acatgagagaaattcgcaaaccctaatttcggaaagatcggcgatggctgcctccaaggatcgcgagaacttcgtctacatcgccaagctcgccgaacaggccgagccatacgaagagatggtggaatcaatgaagaacgttgcgaatctcgacgttgaactgactgtggaggagcggaatttactttctgttgggtacaagaatgtgattggtgctcggagagcatcgtggaggatcctgtcttccat

SEQ ID NO: 192516 - DNA, 233 bp, Glycine max
ggctcgagctcagcgtgaaactcttggcacaggtggaccaaccgacaagccttattgacaactatgcaaccaaattgagctttgtgctttctcgcaaagcagctagtctcgtgggtcttcaagctcgtcttgcaagattccaacatcgactaaaagagcaagaaattctaagtagaaaaagagttccccgtcaataagagactcggtttctcttattcaacgtcatctgtatt

SEQ ID NO: 192517 - DNA, 252 bp, Glycine max
atatgcttgtctcaaagattaagccatgcatgtgtaagtatgaactaattcagactgtgaaactgcgaatggctcattaaatcagttatagtttgtttgatggtatcttctactcggataaccgtagtaattctagagctaatacgtgcaacaaaccccgacttctggaagggatgcatttattagataaaaggtcaacacaggctctgcctgttgctttgatgattcatgataactcgtcggatcgcacgg

SEQ ID NO: 192518 - DNA, 259 bp, Glycine max
cctcgagccgattcggtcgagtggaaacggaggcactgaagaagtcctcatcaggaagaggcgtttctctgagactgaaaacggtcatgaagatgagtctgccaccactgtggatttgatgcttaatctttcttctaaggaggccgcaaccactgctgctgctgctgcagatccaactgataagcacaagactttgcctaaggagaagacccttctgccagcagatcctgctaagcctccagccaagacgcaggtggtg

SEQ ID NO: 192519 - DNA, 258 bp, Glycine max
gaaacttatatgatgaatgggttaacaagggcgacgcaccggcattgccagagactcttaaaaattacaacaagctgttgtctcttggcttttctattgtattcttgtcaggaagatatcttgacaaaatggccgtaacagaagcattcctaaagaaggctggcttccacacatgggagcagttaattctcaaggatccacatcttatcactccaaatgcactttcatacaaatcagcaatgagagagaatctgttga

SEQ ID NO: 192520 - DNA, 251 bp, Glycine max
ctgagctatagcctaaagggagagacatataaatagtttctactttctattcatagatagatggctggcccaattatgagacctcagattgtgctatttggctcctccataattcaaatgagcttcgacaatggtggttggggtgctattctagctaacttgtacgctaggaaggcggacatcatcttaagaggatactctggttggaattcaaggcgggctttggaggttttggatgaaattttccccaa

SEQ ID NO: 192521 - DNA, 251 bp, Glycine max
gaagttcaacattgcaaatcccaccactgggtgccagaagaagctggaaatcgatgacgacctgaagcttcgagcattttgggacaagaggatctcccaggaggttcttggtgatgctctgggtgaggagtttaaaggatatgttttcaaaatcaccggtgggtgtgacaaacaaggattccctatgaagcagggagtgctgacccctggtcgtgttcgacttttgctccatagaggaactccttgtttcc

SEQ ID NO: 192522 - DNA, 249 bp, Glycine max
caccatatggctgcttgtcgcctaaagaatcaagaagcttttgttaatttgggtgttgtacttaataaagccatgactggtttggaaacagagaaggttccttttggtttctttgctcggaatggcaagtatgtggaatgcctgctttctgtgagtaagaaattggacgtagagggcctagttactggggtcttctgcttcttacagctagctagcccagagctccaacaagcattacatattcagcgc

SEQ ID NO: 192523 - DNA, 256 bp, Glycine max
attggtttttaccgcgacaaagaatggccattcttttctcctcggcaccggaaatacccgcacggttcacggccgaaccgcgccgccggaatccgctattggaaagccaccggcgctgataaaccgatcggaaaaccgaaagcgcttgggatcaagaaagctctggttttttacgccggaaaagcccccaaaggtgtgacaaccaattggattatgcacgaatatcgcctcgccaatgttgaccgatctgcctcca

SEQ ID NO: 192524 - DNA, 274 bp, Glycine max
gaattcggcacgcgcgtctggaccgtccctgaaaaactccgtacacatgttggtttaccaggacctccttacaggtgatgagcttctctctgactccttccgttacaaggaaattgagaatggaatgctgtgggaagttgaggggaagtgggttgttaaaggagcagttgatgtagacattggtgcaaacccttctgctgagggtggaggagaagatgagggagttgatgatgcagctgttaaggttgttgacatgttgacacattcagacttc

SEQ ID NO: 192525 - DNA, 262 bp, Glycine max
ctcgagccgattgacaatgaggcctgctcttgctttgcttcctcttctatttgctttcttgacagctgccactacagaatcaagaaaagatacaggggaatattggaaaatgatcatgaaagatcaggaaatgccagaaggacttcaaggtcttgtttcatttcaatctgagaataaccctaagactcaagagcagcttggtaaatgttccaaaaaccattgtgaagagtctctagttacaaatacacaagttaatagtgac

SEQ ID NO: 192526 - DNA, 262 bp, Glycine max
cgcccgcatgtaccattactcattgcacatcccgaccccctaacgctcacacggacacccaagtcaaactcccctacgtcgtaggaattcgatgctcctccccccctttcaccgacaaaaccctcatttccatcacacctaacacttcccacctcaatcccaaccctctcgcttgtcgctttcacgcctcccagtttggagaacaggagagcaacaaatacgtggaagcctatgctgtaggacgaaatattcgtatgtctgg

SEQ ID NO: 192527 - DNA, 216 bp, Glycine max
caatgtcgctcaatagtaaagagaatctgtatacaagttgtctggtgacactttggtagtcttcagatattggtaatatccttctgaacaagtacctggtttcaaactatgggttcaagttcccaatcttcctcacaatgtgccacacgtcagcttgtgctgttgtcagctaaatctccattgtgatcttcaaggtggtggctcagcaggtgatca

SEQ ID NO: 192528 - DNA, 264 bp, Glycine max
  unsure (1)..(264): unsure at all n locations
cgagtgctatggctgctctgcaaaacttggactcgctgcgtaattcgcaccctgagctctccgattggtacaattcgctggcggatctgtaccagaagaagctctggcagcagctcactctcaagctcgagcagtttgtggctctcgccgtcttccaggctggtgatgctttaatacgattatgtcacaatttcatcacagactttgactcgananaccancttctcaagcttgcaacatttgctggtatacgttctcggcaga

SEQ ID NO: 192529 - DNA, 260 bp, Glycine max
cgaccttctcatggctcggcattgacttggcacatgaggatgaagattgctcttgacacagcaagaggattagaatatctgcacgagcactgtcaccctgcagtgataccatagggatactgaaatcttctagtattctcttagatgcaaacttcgatgcgaagctgtctgatttaggtcttgccttaactgatgggtcccaaagcaagaagagcattaagctatcgggtaccttgggatacgtagcaccggagtatctt

SEQ ID NO: 192530 - DNA, 258 bp, Glycine max
aaggtatggagaggaaggatgtgatgactaagaacgtctccatttacaagtcccaggcttctgcccttcaaaagcatgctgctgccaactgcaaggttcttgttgttgctaacccagcaaacaccaatgcaccgatcttgaaggaatttgctccatctattcccgagaagaacatttcttgtttgactagattggatcacaacagggcattgggccaaatctctgaaagactgaccgttcaggtttctgctgtaaaga

SEQ ID NO: 192531 - DNA, 251 bp, Glycine max
agatttttgggtttggggataatgggcaaggctatggcaatcaatcttctacgccatggcttcaaagtcactgtttggaacagaaccctctccaagtgtgacgaactcgtgcaacatggtgcttcagttggagaaaccccagcaactgtagtcaagaaatgcaagtatacaattgcaatgttatctgatccttcggctgctttatcggttgtgtttgataatgatggtgttcttgagcatattaatggaaa

SEQ ID NO: 192532 - DNA, 250 bp, Glycine max
caggtccagacatagtaaggattgacagactgagagctctttcttgattctatgggtggtggtgcatggccgttcttagttggtggagcgatttgtctggttaattccgttaacgaacgagacctcagccaccatcatatgatcagcagcaaggttatagctcagctgctagctatggtagcaacccagccccagagggccacactgccaattacggatcccaaggggattcaacccaagctccacctgc

SEQ ID NO: 192533 - DNA, 244 bp, Glycine max
ctcccctctcaggtttttgtggataagattgagctataatggctgccaggagaccgggtttgattgctttgtttgatgttgatggaactcttacagctcccaggaaggtggtcacaccggagatgttgacattcatgcaagaactgcggaaggttgtaactgttggagttgttgggggttctgacgttataaagatatcagagcaacttggcagcacagttaccaatgactatgattatgtatt

SEQ ID NO: 192534 - DNA, 247 bp, Glycine max
ctggaatgagaggtgcttttggaaagccacagggtacttgtgctagagtggctattggacaggtccttctttctgtccgctgcaaggacagcaacagccatcatgcccaggaggcccttcgccgtgccaagttcaagttccctggtcgtcaaaagattattgttagcaggaaatggggcttcaccaagtttagtcgttctgattatctcaagttcaagtcagagaatagaattgtgcccgatggtgt

SEQ ID NO: 192535 - DNA, 267 bp, Glycine max
  unsure (1)..(267): unsure at all n locations
gtcgctncatgagctttaggcgatggtcttgcggctcaaaaatcggcttgctgtggttcatgaaataaataacaagtcagaatctgcagttagagggtgcagattcaacactcgccctcatatgggtgctatagttattttgatgacatttaaaagtgggagcatgtatttgtccttgtatttcccaactgcaaagattatgttttgaagatagtgttttaaatttttcgattacttagcagtcggatttgttgtgattagttcgtt

SEQ ID NO: 192536 - DNA, 257 bp, Glycine max
  unsure (1)..(257): unsure at all n locations
gccgtctgggtcctcttccacctcgccttctctctcaanatgncttcnctnagancgggagccgtcgccgatcctcgtccccggtcaactcgcccgtgactcaccgcagagctgccccgcccctgaccccaacctctactacaagccagtcaccggaatcgtcagccatcccggcgacggcgcctccggccgcctcagcaacgccaccggcgcctcctacatcggcgcctcctatgtcaaattcgttgaggccgccg

SEQ ID NO: 192537 - DNA, 253 bp, Glycine max
ctcactggcttcttctactggattgcacagcttcttggctccatcgtggcatattttcttctcaactatgtcacaggaggcttgccaactccaatccacagtgtggcttcaggggttggagcagttgaaggagttgtgaccgagatcatcatcacatttggtttggtgtacacagtgtacgccacagcagcagatcctaagaagggctcattgggaatcattgcaccaattgccattggtttcattgttggtg

SEQ ID NO: 192538 - DNA, 254 bp, Glycine max
tctcgagccgattcggctcgagcagcacagtgaggtggaagtgaagactctgaagcttcacgtacgcagagattggaagtggctacaaaacagtggtattcttgcatggattcccagagatctggtacacatggaggcaccaaatgatttctgtggcaaacgctggttatagggctattgcctttgatttcagaggctatggactttctcagcaaccagcagagcctgaaaaggaaaccatgtttgatctggtt

SEQ ID NO: 192539 - DNA, 249 bp, Glycine max
cggaagacaatgtcccccaacagcaaggagaatctgtttatagtttttctggtgacactttggtactcttcaaacattggtgtgatccttctgaacaagtacctgctttcaaactatggattcaagttcccaatcttcctcacaatgtgccacacgtcagcttgtgctgttctcagctatatctccattgtgttcttcaaggtggtgcctcagcagatgatcaaatcaaggtcccagttcatcaagatt

SEQ ID NO: 192540 - DNA, 251 bp, Glycine max
ggttttcgttctgattctgcaaaatcatggagatggagcgcatcgttgaattccctcacacctacatggatcgacccccaagaaagagagcgcgtttgggctgggacatcgctgaggcccccaaggctcaggtaggattgttttgtggacaagaggttgagaatatttcaagctatgctccttcagaacgaccccctagttctctgtttaagggagttgcccgaaatggttctcccccatggcgagatgat

SEQ ID NO: 192541 - DNA, 246 bp, Glycine max
gagcgtggttcaccctatttacaaacttctgtttcctcactatcgtgacaatgcgaacattaattcacttgcccgcaaatccttggtcaatgccgaccgtattatagagaaaacattcttgtggggtaggtactctttggaaatgtctgctgttatttacaaggattgggttttcaccgatcaagcattgcctaatgatcttgtcaagagaggagttgctgttaaggatccatctgctccccatgg

SEQ ID NO: 192542 - DNA, 252 bp, Glycine max
tgcagctgttaaggttgttgacattgttgacacattcagacttcaggagcaacccgcattcgataagaagcagtttgttaccttcatgaagaggtttatcaagaatttgactcccaagctcgatgcagagcaacaggagttgtttaagaagcacatcgagggagcaactaaatacctgctctctaagattaaagatttccaattttttgttggtgagagcatgggtgatgatgcttgcttggtctttgccta

SEQ ID NO: 192543 - DNA, 255 bp, Glycine max
ctctttttctccttgaactcaaacatggcagatgaggtggttctgctagatttctggccaagtccatttgggatgagggtcaggattgcacttgctgaaaagggtatcaaatatgagtacaaagaagaggacttgaggaacaagagtcctcttctcctccaaatgaacccggttcacaagaagattccggttctcatccacaatggcaaacccatttgtgaatccctcattgctgttcagtacattgaggaggtt

SEQ ID NO: 192544 - DNA, 255 bp, Glycine max
ctcacccgtgtggtcgtgagccgggctgagaaggacttgaagataatctcagaggtttactacaagagaaacagtgttcttcttgagcatgctattgccaaggaaacctctggggactacaagaagttccttctcacactgttgggaaaagaagactaaaaacttttcttcgagggcatttgtgattatgagtttaggacagtaagctatacttgtgtgtgatggtctcatgtgtgttggttttccttgagtctg

SEQ ID NO: 192545 - DNA, 253 bp, Glycine max
tcgaaaaattcacctctccaatcccaatcccatcgttgcaaatgatccgattcattctgttgcagaacaggcagggcaagacccgtcttgccaaatactacgttcctctcgaggactccgagaagcacaaggtcgaatacgaggttcatcggctcgtcgtaaacagagacccttcatacacaaatttcgtcgagtttcgtacgcacaagataatatacaggcgatatgctgggttatttttctcactctgtgt

SEQ ID NO: 192546 - DNA, 245 bp, Glycine max
  unsure (1)..(245): unsure at all n locations
acaatgacataaagaactattggaacacncatttgagnaagaagctgaagaagaccgcaagtaggttgtgaaggtggtagctttggagaagggttttcagcctcaaggcaaatccctagaggccagtgggaaagaaggctccaaactgatatccaaatgccaaagagagccctcagtgaagctcttntcaccagagaanccatcttgtaatttagctgcctcaaactnaaacccttcagatagta

SEQ ID NO: 192547 - DNA, 255 bp, Glycine max
ctcgcttcttccttctctcatcaacaacatgcagatcttcgtcaagactttgaccggcaagaccatcaccctcgaggtcgagagcagcgacaccatccacaacgtcaaggccaagatccaggacaaggaaggtatccctcctgaccagcagaggttgatttttgctggtaagcagctggaagatggtcgcactcttgctgattataacatacaaaaggactcaacacttcacttggtcttgaggctaaggggagg

SEQ ID NO: 192548 - DNA, 269 bp, Glycine max
gccacgacccatcaatggcagggaaagaccctgtcgatgtgataagaaaggctgtggccaaaacgcttgtgttttactatccttttgcaggtaggcttagggaaggacttggtcggaaactgatggtggattgtactggggaaggtgttttgttcattgaggctgatgcagatgtcactcttaagcaatttggtgatgctcttcaacctcctttcccgtgctgggaggaactcctttatgatgtacctggttctcaaggagtgcttaac

SEQ ID NO: 192549 - DNA, 269 bp, Glycine max
ggtaaatatggcatactctcaacttcaaaagctggaagctaacgtgagtatcaaggcttcagctgaacagttctatgatgttttatgccacaagacacaccaaattcccaaaattttccctgaaaaagcactgtctgttgaaattctgaaaggtgcatggggcaccgagggatctatcatctcctggaattatttatacgagggaaaagtttgtgtggctaaggaggtgattgaaggcatagacaagaaaaacaaaaaaatgagcttca

SEQ ID NO: 192550 - DNA, 265 bp, Glycine max
ccctcgagccgaatcggctcgagcggctcgaggtggttaggtcaaccctaacctactagtagtactgataggcagcattgggaaagaagcactacgcttgggaatcaagaacacgaaaactttgtatctatatatagagcgatagatatccatgtcttatcgagattgcgacaaacaagaatggttgggacaataaatatccatctcgttcatattttggatacccatataaccatcgaagattattgaggtgactaattccgcg

SEQ ID NO: 192551 - DNA, 265 bp, Glycine max
gctggttttcctgaaactgtgcctgttaggactgttaataggcaatgttcatctgggctccaggctgttgctgatgtagctgctgctataagggctgggttctatgacattggtattggtgccggtttggaatctatgatcactaatccaatgggatgggatggatcagtgaatcctaaggtaaaaatgtttgaacaagcacaaaactgccttcttcctatgggaattacctccgaaaatgttgcacagcgctttggggtttcaa

SEQ ID NO: 192552 - DNA, 268 bp, Glycine max
atcttatttaaaagtattttttcagaacattttgttcccaagtctcaacacatataaaacaatgggttttcgtttacctggtatcaaaaaagcatcattaaaccaagcatcttcaaaagctgtggacgtgccaaagggctacttccagtctatgttggagagaaaatgaagtgatttgtgatccccttatcatacttgaagcaaacttcatttcaagacatgctcagtctatccgatgaagaatttgggtataaacgtccaatgggtg

SEQ ID NO: 192553 - DNA, 266 bp, Glycine max
ggtccacaaaccttgactggtacaagggtccaactctgcttgatgcacttgaccagattagtgagcccaagaggccctctgacaagcccctcaggcttccccttcaggatgtgtacaagattggaggtattggaactgtgccagtgggacgtgttgagaccggtgtcttgaagcctggaatggtggtgacttttgcaccaactggactgacaactgaagtcaagtctgtggagatgcaccatgaatctcttacagaggcacatcct

SEQ ID NO: 192554 - DNA, 266 bp, Glycine max
cctcgagccgaatcggctcgctgtccgatgattatcgtaaacttactagttatcgacatgacgacagttaacatcgaagtgatagcagctgccatggagattataggagacgcctatgagatctagggtttcttagcctttgtgaaccatgggatatccattgagttgatggacactgtggagaagctcactatagagcactagttgaagactatggtgcccaggttcagagatatggtagcccgctcagggttcgagtccgttca

SEQ ID NO: 192555 - DNA, 265 bp, Glycine max
tagaggtccaggttgaaaatatgggatacggctggtcaagaatcattcagatctattacaaggtcttattacagaggggccgcaggtgcattgcttgtttatgatataaccaggagggagacatttaatcatttggctagctggttggaagatgcaagacagcatgcaaatgcaaatatgactattatgctgattggcaacaagtgtgatcttgctcatagaagggctgtaagcacagaggaaggcgagcactttgcaaaggagc

SEQ ID NO: 192556 - DNA, 253 bp, Glycine max
ccgaagcaggaactaaatatggctgacttgttggaatggtcaaagcaagataagaaacgaatgcttcatgtcgtctaccgtgttggtgaccttgatcgcaccatcaaattttacacagaatgtttaggaatgaagcttttgcggcaaagagatatcccagaggagaaatatgctaatgcttttcttggatctggccctgaagaatcccattttgttgttgaattaacatataattatggggttactcgtatga

SEQ ID NO: 192557 - DNA, 271 bp, Glycine max
cacacacaaacacacaacaaaagcccggcggaacatctttctccggcgacctggaattccgacgaaggtagttgcggctccttcgtcccgaaactgaggccctcaaagtataaactttggtggtggtggactaggatctggcggtgtatgatgggatcttgcatatgcccgttggagactccggcgaggttgctttggaccacaagcttcttccgtcataagcttatgatcttctaataattaataattcacgcacacaaacaaacaaaca

SEQ ID NO: 192558 - DNA, 266 bp, Glycine max
cgacgaccgtcttccccaatcgcctgcctctctctctgaattgacaagcttaaagacaaagtcttaaatggctggtccaaggattgcccatgctaccttgaaaggtccgagtgtggttaaggagataataattggaataacacttggcttagctgctggtagcgtgtggcagatgcaccactggaatgaacagaggaaaaccaggaccttctacgatttactggaaaagggtgagatcagtgttgttgcagaggaacagtgaaaat

SEQ ID NO: 192559 - DNA, 258 bp, Glycine max
  unsure (1)..(258): unsure at all n locations
ccgtcggccgcgcgcctcggctgcgcccgcttcntcacctacattaccacaccagcggcctcgccaggagcacctctggctgcatctttcacgtaccgtgaacgtcacacttcactcacttatgacgatctctccacacacagcacggcctctcgccaaacgtctcttctattacgaagaccacctggtcgcgcacttatccaggggatgttttctatttacattcgcgtcttttggcaagagccgctaaattaagtt

SEQ ID NO: 192560 - DNA, 263 bp, Glycine max
ttcaacttcacccattcatacgtggtgttgttactgctgctcttttctcttttctgttctctttagttctctcttcccctttctttttctttttcttcttcttctgagcttgtttaagcttttcttccattaacatattatcacaatgtgtggtattcttgctgttcttggttgttctgatgactctcgagccaaaagggtccgcgtgcttgagctctctcgcagattgaagcaccgtggccctgactggagtgggctccatc

SEQ ID NO: 192561 - DNA, 263 bp, Glycine max
ccgaatcctttaatcgcattgcaaccatgtcgaggagaaaggtcagagagccaaaggaggaaaacgtgactcttggcccagctgttagagatggcgaacatgtctttggcgtcgctcgcatatttgcctcctttaatgataccttcattcatgtcactgatctgtctgggagggaaacgcttgtccgcatcactggtggaatgaaggttaaggctgacagagatgaatcatctccttatgctgctatgcttgcagctcaggat

SEQ ID NO: 192562 - DNA, 268 bp, Glycine max
ctcgagccgcgcgaggggaagagagactctctctcctcttccttctacacgtttagagagcccaaggtttcattcgccactcatcgaatggaacctcgggttgcgaacaagttccgtcttggccgcaagattggtagcggatccttcggcgagatctatctcggtacgaatactcagccaaatgaagaggttgcagttaagctcgaaaatctcaaaactaagcatcctcaattgttgtacgaatcaaagttgtatacactactgcaag

SEQ ID NO: 192563 - DNA, 271 bp, Glycine max
gtagtcatatgcttgtctcaaagattaagccatgcatgtgtaagtatgaactaattcagactgtgaaactgcgaatggctcattaaatcagttatagtttgtttgatggtatctgctactcggataaccgtagtaattctagagctaatacgtgcaacaaaccccgacttctggaagggatgcatttattagataaaaggtcaacacaggctctgcctgttgctttgatgattcatgataactcgtcggatcgcacggcctttgtgccggc

SEQ ID NO: 192564 - DNA, 269 bp, Glycine max
cgccgattgggacggcggcgcagagccaagacgacggcaaggactaccaggagccggcgccggcgccactggttgacccgccggagtttacgtcatggtccttttacagagcagggatagcagagtttgtggccacttttctgtttctatacatcactgtcttaaccgtcatgggagtcgccggggctaagtctaagtgcagtaccgttgggattcaaggaatcgcttgggccttcggtggcatgatcttcgccctcgtttactgcacc

SEQ ID NO: 192565 - DNA, 267 bp, Glycine max
atccgggcggaagacattgtcaggtggggagtttggctggggcggcacatctgttaaaagataacgcaggtgtcctaagatgagctcaacgagaacagaaatctcgtgtggaacaaaagggtaaaagctcgtttgattctgatttccagtacgaatacgaaccgtgaaagcgtggcctatcgatcctttagtccttcggaatttgaagctagaggtgtcagaaaagttaccacagggataactggcttgtggcagccaagcgttcat

SEQ ID NO: 192566 - DNA, 265 bp, Glycine max
ctcaaacctcattgcttcactaccaatccacccatccaaaacttgcttcgtccatcgcttgatgcgaatcatgatccattctggcttcttctctcaacaaaagcatgacttggagaatgagctagaagccaagtatgtgctaaccgatgcatctgtactattgcttaagaaccatccgatgagtgtgacacctttcttgcatgccatgcttgatccagttttgacaaatccatggaatcaattttctacttggttcaaaaatggt

SEQ ID NO: 192567 - DNA, 262 bp, Glycine max
gcaggaactaaatatggctgacttgttggaatggtcaaagcaagataagaaacgaatgcttcatgtcgtctaccgtgttggtgaccttgatcgcaccatcaaattttacacagaatgtttaggaatgaagcttttgaggcaaagagatatcccagaggagaaatatgctaatgcttttcttggatttggccctgaagaatcccattttgttgttgaattaacatataattatggggttacctcgtatgacattggcgatggc

SEQ ID NO: 192568 - DNA, 267 bp, Glycine max
gaaacatgaaggtctcccccttagcattttcaatcctttttttgtccttcaccatagaactcttcattggcattgcttcagcagcacaagaaccagtgcttgacacctcaggccagaagctgagaacaggtgtcaagtactacattctaccagtcttcagaggcagaggtggaggcctaacagtttcaagcagtggcaacaacacatgccccctctttgtggtgcaagagaagcttgaagtctcaaagggcaccccagttaccttca

SEQ ID NO: 192569 - DNA, 263 bp, Glycine max
agaagtggttgccgcggcgcggaggagccgcgccggaggcagggttgaagcaccaactggagagaaaatggacgttttggtgcgacaaccaatccaaacccaagcaaggcgctgcttggggaacctctcttcgcaaggtctacaccttcgacaccgttgaagagttctggtgtttgtatgatcaggtattcaagcccagcaagttgcaaatcaatgccgattttcacttgttcaagactgggattgaccctaaatgggaagat

SEQ ID NO: 192570 - DNA, 267 bp, Glycine max
cgagggtctacttaatttggatatcactctaaatttagcagaactggtaggtgaaactttcttattttgtttccacaataaagaactccacatgtttgatgtaatgggagttgcattgggagaggattttgatttattctatgtatcaataaaaaagttacatgaactagctgtagcatccaaaaaccaaaagcaaattgaaactagttcattccgtgaccaaattaccatactgccatggattaaattcacttgatttaacatcaa

SEQ ID NO: 192571 - DNA, 266 bp, Glycine max
gccgcctttaaggtcggtgtgttggggagtggaatttcaggagccgtgcgtgcttcaactcttgccagaaatggggtttctgttactctctttgagtcagctagaggccctggtggacgcatgtcccaaagaagagagagaactgaagatgggacggagctgcattttgaccatggtgctccatttttctcggttagcaagtctgaagttttacatctggttcaagagtgggaatcaaggggtctcgtagctgaatggaaagagaa

SEQ ID NO: 192572 - DNA, 262 bp, Glycine max
caacgaagaggttaaagagacggcaacactttgctgtccgccttgaccgagcagagcttcgtcttggccctcgattttgccctaaagtactctcagtcacaacagacaccgtcgtcgtcgtcgtcgtcatcaatggcaccgaagcagaccaaggctgagaagaagatcgcttacgatgcgaactgtgcgacctaatggaggagtacggccagatcctcgttgtgaactccgataacgtgggatcgaaccagctccagaacat

SEQ ID NO: 192573 - DNA, 262 bp, Glycine max
gctccatcttcttcgatctctcaaactctatcggcgcagaaccaatcctatatcactatggggaagacacatggaatgggagctgcccgcaagctgaagtctcaccgtaggagacaaaggtgggctgacaagtcatacaaaaagtctcatcttggaaatgaatggaagaagccttttgctggttcatcccatgcaaagggtattgttcttgaaaagataggtattgaggctaagcagcccaactctgccattcgaaaatgtg

SEQ ID NO: 192574 - DNA, 267 bp, Glycine max
gatcacagaagatgaaacgactcttacagcaagcaaagaacaacaaagtgaaatgatgcacggagacaaggacaatcatggaagcgaagatgacaactccaaagagtggttgaacctgagcataggtggaactactactttactctcaacagctgtaccaccagccactgccaaagttttttcatgcaacttctgcatgaggaagttctttagctcacaggcactaggaggccatcagaacgctcacaagagggaaaggggtgctgc

SEQ ID NO: 192575 - DNA, 262 bp, Glycine max
gtttgatgttagtggggttcatgcccgtgtcaacaatgggtcgattcgtggtacagaagaacagcctgagagtgacatcgccggagaaaataagagggacacacgacagtgccattggcaacttcggaatacctcaatacggtggtagcatggccgggaacgtaatttaccctaaggataacaaaaagggttgcaaagagttcgatgagttcgggatttccttcaaatcaaccccggtgctctgtccacattgtttactcga

SEQ ID NO: 192576 - DNA, 265 bp, Glycine max
gagcatattcagtgcgtcgtaaagcaaaaagatactactggctaaagtcatgtttggtttggtctgcagcttcctcgtattatgctgtttcacaatcaacactagcgccttctcaccttctggatggaccaatgcccatgccactttttatggaggtagcgatggctcggggaccatgggaggagcttgtgggtatgggaatctgtattccacagggtacggaactgatacagcggcattaagtactgccatatttaacgatgga

SEQ ID NO: 192577 - DNA, 261 bp, Glycine max
aaacaagaggggtttgccttgtgccgtttgtgttgttttcgggacgaagaagaagatggtgtcaggttctggaatctgcgcaaagcgggtggtggtggacgcgcgccaccacatgctgggtcgtctagcctccatcgtggcgaaggagcttctgaacggccagaaagtggtggtcgttcgctgtgaagagatttgcatctcgggcgggctggtgaggcagaagatgaaatacttgaggttccttcgcaaacgcatgaacac

SEQ ID NO: 192578 - DNA, 260 bp, Glycine max
ggaaaatcaccactgaaattggggttcatgcaaccgctgcaaagtggttcaacctctttgcaacacaacttcatcatgttcaaaaccttactgatagagtacatggaaccaagctgcatcaaggtgaagactggcatcacaacgagacagtcaaacactggacttataccatagatggtaaggctacaacatgtctggagagtattgaatccattgatgaacagaacaaaacaatcacctacaagctcttcagtggagac

SEQ ID NO: 192579 - DNA, 262 bp, Glycine max
caacacttttgtcttcgttccattatctagttctcaattctcttcaccctttgcctctgaaagaaatgggtagtcttgaagcggaaagaacaacagtaggattggcagcaagagacccttcagggattctctcccctacacctacaatctaagaaacacaggccctgatgatgtttacattaaagttcactactgtggaatttgccattctgatctccaccagattaaaaatgatcttggcatgtccaactatcccatggtc

SEQ ID NO: 192580 - DNA, 258 bp, Glycine max
tggatattgaattgaaggttcctccccgccctccatgttattgctttgttgagtttgataatgctcgagatgccgaagatgcaattcggggtcgagatggatatcactttgatggttgtcggttaagagtggagttgctcatggtggtagagggccatcatcaagtgatcgacgtggatatggaggaggaggtggtaatggtggagcaggcgggggtcgttttggcatctcacgccattctgaatttcgagttattgt

SEQ ID NO: 192581 - DNA, 258 bp, Glycine max
gtgccttttggtgttctactctctggaggtttggactcttctttagttgcatccatcacttctcgttacttggccaacacaaaggctgctgagcagtggggatcaaagttacattcattctgtgtaggccttgagggctcaccagatttgaaggctgcaaaagaggttgctgactatctaggcactgtccaccatgagtttaccttcactgttcaggatggaatagatgccattgaagatgttatctaccatattgaa

SEQ ID NO: 192582 - DNA, 260 bp, Glycine max
cgagaagcgagctatggacacgccacactggagataaaaaacaggacccatgctatctaccactggtatcgcaatgatgacggaaagaaagtcccagctgactctctcgtattgcataaccagtattggggaagaatggaagaaaacagaatgaggttattgatgaagttgtcaatgttaaatgaagttggagcactcgtaaatcgtaaatatggtgttttgaaaagaataaaaatgtgcctatatattgtaatgtatgt

SEQ ID NO: 192583 - DNA, 179 bp, Glycine max
cacaggggaaaatgagggagatccctcacgtgcagggcgggcaatgcgggaaccagatcggttccaagttctgggaagtggtgtgcgacgagcacggcatagatccgacggggaagtacgtcggaaactcagatctgcaactcgacgcgcgtagaacgatctactgacacatgaacgcc

SEQ ID NO: 192584 - DNA, 259 bp, Glycine max
cgaagagaaaaatggcaatctccatacccagtagacaacttttcatagatggagagtggaaagtccctcttctcaacaatcggtttccgatcatcaaccccgctactgaagacatcatagggcatattccagccgctactaaggaagatgttgaccttgcggtggatgctgctaaaagagccttttcccataacaaaggcaaagattggtcttcagctcctggctctgttcgtgctcgctatcttcgagccatcgcttc

SEQ ID NO: 192585 - DNA, 259 bp, Glycine max
cttcagcagcagcagccatggttctcaaaaccgaactatgccgattcagcggtgccaagatctacccagggaaaggcatcagatttgttcgtggtgattctcaggttttcctgtttgctaactcgaaatgtaagaggtatttccacaacaggttgaagccatcaaagctcacctggactgcaatgtacagaaagcaacacaagaaggacattgctcaagaagctgtgaagaaaagaagacgtgctgccaaaaagcctta

SEQ ID NO: 192586 - DNA, 232 bp, Glycine max
ccctccaccgaatcggctcgagcagagacgatgaagggcgtagtacgcgacgaaatgcttcagggagttgaaaataagcgtagatccggggattcccgatataggtcaacctttcgaactgctgctgaatccacgggcaggcaagagacaacctggtgaactgaaacatcttagtagccagaggaaaagaaagcaaaagcgattcccgtagtagcggcgagcgaaatgggag

SEQ ID NO: 192587 - DNA, 264 bp, Glycine max
atgcaatgctcttctccttaaggtcaaccaaattggttctgtgactgagagtattgaagctgtcaggatgtccaaaaaagctggatggggtgtcatggcgagtcacagaagtggagagactgaggataccttcattgctgacctttctgttggtttggcaacgggtcaaattaagactggagctccatgcaggtcagagcgtcttgctaaatataaccagctcttgagaattgaggaggagcttggtgcggaacagtgtatgct

SEQ ID NO: 192588 - DNA, 260 bp, Glycine max
caaaaatgagagaaatcatcagcattcacataggtcaggccgggatccaggttggcaactcctgctgggaactctactgcctggaacatggcatccagcccgatggcatgatgccaagtgactcctccttcggtgtagcccacgacgccttcaacaccttcttcagcgaaaccggatccggcaagcacgtccctcgcgccgtcttcgtcgatctcgagcccaccgtcatcgacgaagtccgttgtggcattaccgtcaat

SEQ ID NO: 192589 - DNA, 241 bp, Glycine max
cagcagtccaaaaactgaaaagttttctgaagatggtgaaaatgactgtcttagatatggtttatcgtccatgcaagggtggcgtgcaacaatggaagatgctcatgctgcatatactgatctggatgagtccacttcattttttggtgtctatgatggtcatggaggtaagctgttgcaaagtttttgtgccaagtttcttcatcaacaggtgctcacaagtgagacatacttaactgga

SEQ ID NO: 192590 - DNA, 265 bp, Glycine max
tggataatccaccgggacattaaggcttcaaacattttgttaacaaaggattttgaaccacagatatctgattttggactagcaaagtggcttccatctcaatggactcatcattcaattgcccctatagaagggacatttggacatttggcctcagagtactacttgcatggagttgttgatgagaagacagatgtgtttgcctttggtgtgttcttgttagaagtaatctctggcagaaaaccagtggatgggtctcaccaaa

SEQ ID NO: 192591 - DNA, 269 bp, Glycine max
cagtagtcatatgcttgtctcaaagattaagccatgcatgtgtaagtatgaactaattcagactgtgaaactgcgaatggctcattaaatcagttatagtttgtttgatggtatctactactcggataaccgtagtaattctagagctaatacgtgcaacaaaccccgacttctggaagggatgcatttattagataaaaggtcaacacaggctctgcctgttgctttgatgattcatgataactcgtcggatcgcacggcctttgtgc

SEQ ID NO: 192592 - DNA, 228 bp, Glycine max
ctcgagccggtttccacactgcataccttacgtcttccgaattcgaagttaatttgcaagatcgctaaggaaaaggctcagatcaacattgtggtggttggtcatgtggaccctgaggaggcaaccaccattaacgagctgaagaagcctgttgtggagaaagaagctccagggcatgccatatgagggcatgcacgtacggcctcggaggggaaccagaaaattatg

SEQ ID NO: 192593 - DNA, 263 bp, Glycine max
ccctcgagcgctcgagcggtcgacttttgtcttcgttccattaaccagttctcaattctactcaccctacgcctctgaaagaactgggtagtcttgaagcggaaagaacaacagtaggattggcagcaagagacccttcagggattctctccccatacacctacaatctaagacacacaggccctgatgatgtttacattaaagttcactactgtggaatttgccattctgatctccaccagattaaaaatgatcttggcatg

SEQ ID NO: 192594 - DNA, 261 bp, Glycine max
caatgaggcctgctcttgctttgcttcctcttctatttgctttcttgacagctgccactacggaatcaagaaaagatcaccgggcatattggaaaatggtcatgaaagatcaggaaatgccagaaggacttcaaggtcttgtttcatttcaatctgaaaataaccctaagactcaagagcagcttggtaaaggttccaaaaaccattgtgaagagtctctagttacaaatacacaagttaacagtgacttcgaacccatac

SEQ ID NO: 192595 - DNA, 263 bp, Glycine max
cgcaactatttcaaggagggctctgctccactcaacttgtacgtcgaggaaaactttgaccgtgcttctagccgcggcactggaaacgttaaaaccatttccaattatgcaccggtcttgatggcacaaattcaagccaagaaaagaggattttcggatgtgctataccttgattcagacaccaagaaaaatctcgaggaggtctcttcttgtaacatttttattgccaagggcaaatgcatctcaacacctgctactagtgg

SEQ ID NO: 192596 - DNA, 260 bp, Glycine max
ctctctctctctctctctctctcttactttgtgtctttctatctctctcttcaattccaaaaccctacccccatccaattccaattcaccctcaatcatgggttctgaaggttccactgtcgtcgttcctaggaacttcagattattggaagagcttgagagaggtgagaagggaattggagatggaactgttagctatggaatggatgatgctgatgatatctacatgcagtcctggactgggactattattggccccc

SEQ ID NO: 192597 - DNA, 201 bp, Glycine max
gttcaagggggcttcttccccgggcgtcgaacagtcaactcagaactggtacggacaaggggaatccgactgtttaattaaaacaaagccccgatgagtaggagggcgcggcggtcgctgcaaaacccagggcgcgagccggggcggagcggtcgtcggtgcagatcttggtggtagtagcaaatattcaaatgagaactt

SEQ ID NO: 192598 - DNA, 257 bp, Glycine max
cctgagaccaacaccggtatcattgtcttggctgagggtcgattgatgaacttgggatgcgccactggacaccccagttttgtgatgtcctgctccttcaccaaccaggtcattgctcagcttgagttgtggaaggagaagagtaccggcaagtacgactcgaaggtttacgttttgcccaagcaccttgatgagaaggtggctgcacttcacctgggcaaacttggagctaagctgacccagcttagcaagtccca

SEQ ID NO: 192599 - DNA, 266 bp, Glycine max
tctctctcgatcaatcatggctttgcccaatcagcaaaccgtcgattaccctagtttcaaactcgtcatcgtcggtgacggtggtacaggaaagacaacgttcgtgaaaaggcatcttaccggtgaatttgagaagaaatacgaaccgaccattggagtggaggttcacccattggatttcttcacaaactgtggaaagattcgcttctactgttgggatactgccggacaagagaagtttggtggcctcagggatggatattata

SEQ ID NO: 192600 - DNA, 265 bp, Glycine max
tggacaaaccagcaagcccctttcattgaaacggcgcactgaactgtaattgtgaaaaggttggacgatctggccaaagaaggtgatagccctgtagattcgttcccatgcgttcgatccttcccagtaaaacgcggcgtgttcgaattctgatcgcttttacgcgagacagggggaccaccctctaagcctaagtattcctcaatgaccgatagcgtacaagtaccgtgagggaaaggtgaaaagaaccctatttagggagtgc

SEQ ID NO: 192601 - DNA, 257 bp, Glycine max
gggcactttgtttcccatgtgtggaatgaacttggcctttgatcgtgatctcataggagcagcaatgtactttggtctcatgggtgatggtcagcctattggacgctacgacgacatgtgggctggctggtgctgcaaggtaatctgtgatcacttgggattgggaatcaagactggtctgccctatatctatcacagcaaggccagcaacccatttgtgaacttgaagaaagagtacaaaggcatattctggcaag

SEQ ID NO: 192602 - DNA, 261 bp, Glycine max
gcttaaccgagcttcgcaaagatgaatcgggaaaagttaatgaagatggccggttcggttagaactggaggaaagggtactgtgagaagaaagaagaaggctgtccacaagacaacaaccacagatgacaaaaggcttcagagcaccctgaagagaataggggtgaatgccatccctgctattgaagaggtcaatatctttaaggatgacgtagttatccagtttctaaatcccaaagttcaagcatccattgctgctaat

SEQ ID NO: 192603 - DNA, 202 bp, Glycine max
ctgctcaagtcatctgtcaatcactcaaagaaattcaagattgatccattctactagcaagattgttccaaattctgaaattcagaatataactactgagatggtgaagacaccagaggtctcaagatggatggatcaagtcatcctacatagcccttgtgatgagcagaacatggaatagggttcagatgcagcacactat

SEQ ID NO: 192604 - DNA, 266 bp, Glycine max
actcccttctcatcgttggcaagatgagtgccatgaaattttgccgtgaatgcaataacattctgtaccctaaggaagacagagaccagaaagttcacctcttcgcttgccgcaactgcgaccatcaggaggttgctgataacttctgtgtgtataggaatgagatacatcactctgttggagagcgcactcaggtgttgcaggatgtcgctgcagatccaacgcttcctcgaaccaagtctgttcgctgcagtcaatgcaatcat

SEQ ID NO: 192605 - DNA, 263 bp, Glycine max
cgaatatcttgttgtttggagcgatccgagaaaaactctgtaaacatgttggtttaccaggacctccttacaggtgatgagcttctctctgactccttccgttacaaggaaattgagaatggaatgctgtgggaagttgaggggaagtgggttgataaaggagcagttgatgtagacattggtgcaaacccttctgctgagggtggaggagaagatgagggagttgatgatgcagctgttaaagttgttgacattgttgacac

SEQ ID NO: 192606 - DNA, 264 bp, Glycine max
gtaacgcctttgtttgcgttttttgcacagaagaattaacacgtatatagcaagcatggcagtcacactctacgaccttagctctgcctctgggttgaagaagcttgatgagtaccttctcccacgcagctacatcaccgggtaccaagctacaaaggatgatcttactgtttatgcagctttgccaactgctccatcagatgaatatggaaatgtttccaggtggtacaagcacattgatgctttgttgagaatctctggtgt

SEQ ID NO: 192607 - DNA, 243 bp, Glycine max
  unsure (1)..(243): unsure at all n locations
ctcgagncncttcggctcgagctttcgtcgcaaaagggtcacaacattaaggggactatggtcggttatgagaagaactgtgtattctatgaacagcatcagtagtgttggagggatcgttgtacaaggcttaggattcatagggagtgcagtcgatgcgattagttttgcagggagcaaaatgtgcatccagttgattagtggtaccaaggctgatggtgggacaggagaaattggaaagag

SEQ ID NO: 192608 - DNA, 260 bp, Glycine max
cagccttctctcctctattttggcttccaacctttttgctccattcattctcaacaacaaaccaatctctatattttgcttagacaatgagggggagcttgtggcaacttgggcaatcgatcactcgccgtcttgcccatggagataagaaggctgttgctcgccgatgttttgcctcagaagctgagctgaaaaagacagtgttcatgacttccatgttgctcatggtgtggggaagatggcaccatttcgctggatgg

SEQ ID NO: 192609 - DNA, 259 bp, Glycine max
gaaccatatttttcttgaaagatgatggaactttgacaccattggccattgagttaagtaagccacatcctcagggtgaagaatatggtcctgttagcgaagtctacgtgcctgccagcgaaggagtggaagcttatatttggttactggcaaaggcttatgttgttgtgaatgatgcatgctaccatcaaatcattagccattggtaccatattatgaattggaaattagatccatgcaattaaatttgataatgtat

SEQ ID NO: 192610 - DNA, 259 bp, Glycine max
cggcatgttcatgtttttggttagcagagtaactaaggattcaatttcacgcaaccgcaatgccattgcttcttttcctttctctaggtgtgctcattcattatcatttgccacagtagaagcagaagagatatcaggttctaggcctgctgaagttttgaacctggtgcaaggtaaatcggtaggatcttcaaattggaacacaattgcagctcctttaaatggtgactcatttattaaagttgctgaagttgatgaa

SEQ ID NO: 192611 - DNA, 261 bp, Glycine max
caagatgtcgtctctgatagcagaagatgtgaagagcagatcagaggtgtaccacggggacgaaatgtgccaagtgaagtccaaggagcttctcaaggaaatcgccctccccaacggccttcttcccctcaaggacatggaggagtgcggctacgacagacaaaccggcttcgtctggctcaaacaaaagaagagttacacccacaagttcgacaagatcggaaagcttgtctcctacgcgcccgaggtaactgctcatgt

SEQ ID NO: 192612 - DNA, 258 bp, Glycine max
acaactctcaggttccacttgatggcttcatgattcaatttaacaagaacacatttggtcttgcagctgctggaccccttcaggtttcacagttgcaacccagaatgtcagctaggacactcctccctatggttatgttccagaatatgtcgcaaggtcctcctagctcagctttacaggtcgctgtgaaaaacaatcaacaacctgtgtggtatttcagtgataaaatctcattacttgtattcttcaccgaggatg

SEQ ID NO: 192613 - DNA, 258 bp, Glycine max
cggctcgagaagacatccttctagagatggatcgcatcctaaggcctgaaggagcaatcatcatccgggatgaagttgatgttcttaaccaggttaagaaaattgttgggggcatgagatgggatgccaaactggtggatcatgaggatggccctcttgtgcctgagaagatattggttgctctcaaagtgtattgggttggcaccagcaaaaacaaaacatccaatgaggaataccaccactattgttcgggtgtga

SEQ ID NO: 192614 - DNA, 260 bp, Glycine max
ggccatgaagaaggccaacaaggatgtggaactttatgttagcaaagggatgacacatagtttttatctgaataagattgctgtggatatggaccccaatgttagtgctcaaaccgatgctctcatttctaggatcaaggagttcattgagaagcactgaatggatcggttatccggagttgctatagtattcagagaagcttaattaagggttttgatatatatagtttatttgttgcactaataattaatcgagtttg

SEQ ID NO: 192615 - DNA, 260 bp, Glycine max
  unsure (1)..(260): unsure at all n locations
ctaaaactagaacccctcttcaagcgatccatcacttatgtggaacaagatgattcagatttgggagaccaagctgctgcttttggagatgcacatgagtttggagatatactgtggtacccaagtcaacgcaaggttctctatcgtgttgatgatcgtgtcncaactaatacatcgggaaatggtctttacgacattatttctttccgtcccactccttcaaatacgtcggctttcataagaccagagagggtattcca

SEQ ID NO: 192616 - DNA, 257 bp, Glycine max
  unsure (1)..(257): unsure at all n locations
ggatttcccgcggcgcacagttcttccataccaacttagcactcacngcgntgntattggcataacaaccggtacaccataggttggcccaacccagtcctctcgtactagggttggctcctcgcagttctccctttaacaccaacggtagataggaaccgaactgtctcacgacgttctaaacccaactcatgtaccacttgaatcggcgaacaaccgaacccttcggaccttcttcaaccccaggatgtgatgag

SEQ ID NO: 192617 - DNA, 256 bp, Glycine max
cgagtctcctacgcgcgcatgcctcgtgtcaaaatccgcgagccgcaggacgactacgccaagttcgagctccgcgacaccgacgcgactatagccaacgcgctgcggcgcttgatgatcgcggaggtgccgacggtcgccatcgacctcgtggagatcgatgtcaactcgtcggtgctcaacgacgagttcatcgcgcacaggctcggtctcattcccctcacgagcgagcgcgccatgtccatgcgcttctcac

SEQ ID NO: 192618 - DNA, 228 bp, Glycine max
accgccctcgccgccacaatgtaccaagccaccggcaccgcccccggatccgccggcttcgtcaacatcaccgacctccacggcggaaaagtcgcattcgcccctgaaaacaacgacggcacactctcctcaacgttcgtcaaatcggtggaagaaatcccttacaacatctccgtaattcagatcagtaaggttctcccctctgccgcagcggaagcccctgcaccc

SEQ ID NO: 192619 - DNA, 257 bp, Glycine max
tgctattcttcgtggccatattgatttcgcatcagatccttggccttccatatcgagtagtgccaaagatctggttaagaagatgttacgagctgaccccaaacaaagactctcagcagttgaagttcttaatcatccttggatgagagaagatggagcatctgataaacctctagatgttgctgttttatccagaatgaaacaatttagggcaatgaacaagctagagaaagttgctctgaaggttattgctgaaa

SEQ ID NO: 192620 - DNA, 262 bp, Glycine max
ctcatgatgttgcacatgggcaaatgctggttaaggaggtttatgaggctctaagagcaagtcctcagtggaatgaaacacttttcatcattacatatgatgaacatggtggattttttgatcatgtgaagaccccttttgtcaacattcctaatccagatgggaacactggacctgctccctatttcttcaagtttgataggttaggggttcgggtgccaactattatggtctctccttggatcaagaaagggactgtgat

SEQ ID NO: 192621 - DNA, 259 bp, Glycine max
aagctagtttatcgtgaggagaatatgaagttgtttgttttctttgttgctgcagtagttttggtagcatggccatgccatggcgcaggctaccaaaggttccctctccgaatgaaaactggctatggtgagcgttcttcggaggtaaaatgcgcaagttttaggcttgctgtggaagcacacaacatccgagcctttaaaaccattcctgaagactgcgttgaaccaacaaaggactacattaatggcgaacaattta

SEQ ID NO: 192622 - DNA, 235 bp, Glycine max
gggagccgtggtggcggtggtgccggtgccggtgccggtagaggggtggtggtgaaggcggagaaagtctgtaattattggattcaggggaattgtagttatggagagaggtgcaagttccttcacacttggagtgtgggggatgggttttctttgctgacccagcttgaagggcatcaaagggctgtgagtgcaattgcctttccctctggttcagataagctgtataccggaa

SEQ ID NO: 192623 - DNA, 255 bp, Glycine max
gtagtcatatgcttgtctcaaagattaagccatgcatgtgtaagtatgaactaattcagactgtgaaactgcgaatggctcattaaatcagttatagtttgtttgatggtatctgctactcggataaccgtagtaattctagagctaatacgtgcaacaaaccccgacttctggaagggatgcatttattagataaaaggtcaacacaggctctgcctgttgctttgatgattcatgataactcgtcggatcgca

SEQ ID NO: 192624 - DNA, 256 bp, Glycine max
ctcgagccgcgaattagttatcttgagaaacattattcccattgctatattttatggctagactgaaggttacatgggtggttgtgatcatgtgcatggccgtggtgggtgcaccgatgatggcgcaaccatgtacatgcaatgatgtgacggtgaacatggcacagtgcctatcctacctgatgcagggaggaacaccttcaacactttgctgcagcggagtcaagaacattcttggctctgctgtcaccaccgt

SEQ ID NO: 192625 - DNA, 239 bp, Glycine max
tcgagcgaggagaaagatggaggggaaggagcaggatgtgtcgttgggagcgaacaagttacccgagagacagccgattgggacggcggcgcagagccaagacgacggcaaggactaccaggagccggcgccggcgccgctggttgacccgacggagtttacgtcatggtcgttttacagagcagggatagcagagtttgtggccacttttctgtttctctacatcaccgtcttaaccg

SEQ ID NO: 192626 - DNA, 258 bp, Glycine max
cggctcgaggaagcagaaagaggagacgaagcaatggcgccgaagaagccccgaaccacgtcgaggaaccctgatttggtcaggggaattggcaaatattcgatgtcgcagatgtaccacaagaggggcatctgggccatcaaggccaaaaacggcggtgttttgcccctccacgatcccaagcccaaattccaggccccggcccagaacccgcccaagttctacccggtcgatgacgtgaagaagcccctcgtcaac

SEQ ID NO: 192627 - DNA, 264 bp, Glycine max
cggggaggtagtgacaataaataacaataccgggctcattgagtctggtaattggaatgagtacaatctaaatcccttaacgaggatccattggagggcaagtctggtgccagcagccgcggtaattccagctccaatagcgtatatttaagctgttgcagttaaaaagctcgtagttggaccttgggttgggtcgatcggtccgcctccggtgtacaccggtcggctcgtcccttctgcctgcgatgcgctcctgtccttaac

SEQ ID NO: 192628 - DNA, 273 bp, Glycine max
gctacttcctactccaaccgcacttctgctccgcaattatcatgggcaaggtcaagatcggaatcaacggatttggaagaattggccgtttggtagccagagtggctctgcagagagacgatgttgaactcgttgccgttaacgaccctttcatcaccaccgattacatgacatacatgtttaaatacgacagtgttcatggacactggaagcatcacgatgtcaccgttaaggacgagaagacccttctcttcggtgacaagccagtcacta

SEQ ID NO: 192629 - DNA, 275 bp, Glycine max
tcggaaggcgagggattgcgctgcgtctcttcctcttctctttcgattcatccctcattcataatcttccaatccaacaacctcagcctcacactcacacatacacacatctgaacgcgtatcgtccctcccatggcttcaaagcgcatcctcaaggagctcaaggacttgcagaaagacccaccaacttcttgcagcgctggtccagtagctgaggacatgttccattggcaagcaacgattatgggtcctgctgatagtccttatgctggagg

SEQ ID NO: 192630 - DNA, 272 bp, Glycine max
ggtctttatatttagttattgacatcaacaaagtcatggaggaagttaatgtggttcaaaccaagaatggaactgtttcagtagcttctgcgtttgctggccataaggaagctatacagcaaagggaccacaaatttttaagaattgctgttgaagaagcgtataaaggggtagactgtgaagatgggggtccctttggtgctattatagtttgtaatgatgaaattgttgctagatgtcacaacatggttctgaggaacacagaccccact

SEQ ID NO: 192631 - DNA, 273 bp, Glycine max
aaaaaatccgcgattagctcttctcttggaaaagtgaaaaccagaagtacgaacgaaagataagagcgatttagaagtgagagaagatggcgttgtcgttcacgaagctgttcagcaggttgtttgcgaagaaggaaatgagacattctgatggtaggtctcgatgctgctggtaagacaaccatcttgtacaagctcaagcttggagaaatcgtcaccactatccccaccatcggatttaatgttgagactgtggagtacaagaacatcagc

SEQ ID NO: 192632 - DNA, 265 bp, Glycine max
ctcgagccgtgttttcccaccaccgcgacccctttcgctctccctctgcgcaaacatgttgttcttctcgtacttcaaggatttggtggggagggaagtaatcgtggagctgaagaacgatttggccatcaaagggacgttgcattctgttgatcagtacctcaacatcaagctcgaaaacactagcgtcgtcaatcaagaaaagtaccctcacatgctttgcgtaaggaactgcttcatcagaggttcggtagtgagatatgtg

SEQ ID NO: 192633 - DNA, 274 bp, Glycine max
agggctttactccccatacacctacaatctaagaaacacaggccctaatgatgtttacattaaagttcactactgtggaatttgccattctgatctccaccagattaaaaatgatcttggcatgtccaactatcccatggtcccaggacatgaagtggttggtgaggtactggaggtgggatcaaacgttagcaggttcagagtgggagagttggtgggagttggactcctcgtaggttgctgcaaaaactgccagccatgccaacaagacatt

SEQ ID NO: 192634 - DNA, 274 bp, Glycine max
agttgccattgaagtcaaccctccagcaatgactatcaaagcgggcgcatcgcgtcagttttcggtgtcacttacagtgcgctcagtgacaagaaggtatagttttggagaggttttgatgaaagggagcagagggcacaaggtgaggattcctgttctggccaatggacaccgacgatagatagcttagtaaagtttggtcggcaaacggaaggaaagcagtgctgcttgtaatattctttgtaacttgtggggaataaggtatggtgctaca

SEQ ID NO: 192635 - DNA, 271 bp, Glycine max
gaaaaattaagatggaggggaaggagcaggatgtgtcgctgggagcgaacaagttcccggagagacagccgattgggacggcggcgcagagccaagacgacggcaaggactaccaggagccggcgccggcgccactggttgacccgacggagtttacgtcatggtccttttacagagcagggatagcagagtttgtggccacttttctgtttctatacatcactgtcttaaccgtcatgggagtcgccggggctaagtctaagtgcagtac

SEQ ID NO: 192636 - DNA, 275 bp, Glycine max
  unsure (1)..(275): unsure at all n locations
ctcgnaccgngaagacccttctcttcggtgacaaggcagtcactgnttttggacacagaaaacctgaagagatcccatgggggtcaactggagctgacatcattgttgagtccaccggagttttcaccgataaggacaaggctgccgcaacatttgaagggtggtgccaagaaggttattatttctgcccccagtaaggatgcccccatgtttgttgttggtgttaatgagcacgagtacaagccagagcttgatattatttccaacgctagctg

SEQ ID NO: 192637 - DNA, 269 bp, Glycine max
ctcgagccggagaaattcgcaaaccctaatttcggaaagatcggcgatggctgcctccaaagatcgcgagaacttcgtctacatcgccaagctcgccgaacaggccgagcgatacgaagagatggtggaatcaatgaagaacgttgcgaatctcgacgttgaactgactgtggaggagcggaatttacattctgttcggtacaagaatgtgattggtgctcggagacatcgtggaggatcctgtcttccattgagcaaaaggaagaaac

SEQ ID NO: 192638 - DNA, 275 bp, Glycine max
cttcgctttcctgaaactagggttttcaatttcgattcattcgtcaataattaaagatgtatgggaaggcaccgaagaagagcgataatacgaggtactacgaaatcctcggcgtctcgaagaacgcttcgcaggatgatctgaagaaggcttacaagaaagccgccatcaagaatcaccctgacaagggcggtgatcccgagaagtgtaaagagctggcacaagcatatgaggttctgagtgacactgagaagcgtgagacatatgatcagtat

SEQ ID NO: 192639 - DNA, 266 bp, Glycine max
gtttgagggaagacaatgtagagggaagggatctgaagaagccatttcttcacacaggaagttggtatcgtatgagtgggagacaatccagtgtgtttggttccacacaggctattccacactcctccatctctgtctttgcacgtgttctaatcgttgctttgggtccaattcagtttggtttcactgctggttacacctcacctacacaatctgctatcatcaatgacctaggcctctcagtctctgcgttttctttgtttggt

SEQ ID NO: 192640 - DNA, 273 bp, Glycine max
cggaacgccgtcctggctatggtcggcaagaactgcttcgccattgccagcgaccgaacgctcggcgttcagctccaaaccatagccacggatttccaacgcatttccaagattcacgacaagctcttcatcgctctctctagcctcgccaccgatgctcaaacattgtatcagcgtcttgttttccggcacaaactgtatcagcttcgtgaagagagggatatgaaaccagagacctttgccagcttagtctctgctctgctttatgagaaa

SEQ ID NO: 192641 - DNA, 270 bp, Glycine max
agtaaatatggcatactctcaacttcaaaagctggaagctaacgtgagtatcaaggcttcagctgaacagttctatgatgttttatgccacaagacacaccaaattcccaaaattttccctgaaaaagcactgtctgttgaaattctgaaaggtgcatggggcaccgagggatctatcatctcctggaattatttatacgagggaaaagtttgtgtggctaaggaggtgattgaaggcatagacaagaaaaacaaaaaaatgagcttcaa

SEQ ID NO: 192642 - DNA, 227 bp, Glycine max
tgatgctagagatagtggtgatcaatatgtgcaagaatcgaaaagtttgctgtgatattctaattggaaacatgatagctagacgagtagtgatggagtagtttggcgatgctaccccaaaaggagctgaaaacttcagggctatctgtactggggacgtatagatgggtagatctgggaaacctgggcactacaggggctctgtagttcatcgtagtagtccagaa

SEQ ID NO: 192643 - DNA, 272 bp, Glycine max
ctcgcgccgatttgctagagaggtgattgccggtgtaaacccaaatgtgatccgtcgtcttcaagaattcccaccaaagagcacacctgatcccacactctatggtgatcaaaccagtaccataacaaaagaacaattggagattaacatgggaggggtcacagtagaagaggcacttagtactcagagattattcatattagattaccaagatgcattcatcccatatttgacgaggataaacagcctacctactgcaaaagcttatgcca

SEQ ID NO: 192644 - DNA, 269 bp, Glycine max
ctggttatcatcttcttcttcctctttcttagatctcttctttctctacgccgcacgccgaaaccatggccggaaaaggagagggtcctgctatcggaatccatctcggaaccacctactcttgcgtcggtgtgtggcaacatgaccgcgttgaaatcatcgccaacgaccaagggaacagaaccacgccgtcttacgtcggattcactgacaccgagcgtctcatcggtgatgcggccaagaatcaagtcgccatgaaccccatcaac

SEQ ID NO: 192645 - DNA, 270 bp, Glycine max
agttggtcccattccataggaagagatcaaagagaagagaaaagatgtttgagccgcagcagctatacactcgagcgaagaccgaggaattcgacctcgaatcaggggaaaccctctacccagggctgagcgtcggcgagaaccagctccgatggggcttcatccgcaaggtctacggcatcctctccgcccagatcgtcctcaccaccctcgtctctgtcaccaccgttttctatactccaatcaaatgactccccaaagggaaattca

SEQ ID NO: 192646 - DNA, 267 bp, Glycine max
ggcgtagtaagcgacgaaatgcttcggggagttgaaaataagcgtagatccggggattcccgatataggtcaacctttcgaactgctgctgaatccacgggcaggcaagagacaacctggtgaactgaaacatcttagtagccagaggaaaagaaagcaaaagcgattcccgtagtagcggcgagcgaaatgggagcagcctaaaccgtgaaaacggggttgtgggagagctatacaagtgtcgtgctgctaggcgaacagcagaga

SEQ ID NO: 192647 - DNA, 208 bp, Glycine max
ataccgtcctagtctcaaccataaacgatgccgaccagggatcagcggatgttgcttttaggactccgctggcaccttatgagaaatcaaagtctttgggttccggggggagtatggtcgcaaggctgaaacttaaaggaattggcggataagacaaatgttgttgagttacgttttatttatagattgaattctcagttttgatttg

SEQ ID NO: 192648 - DNA, 275 bp, Glycine max
ctctccaacctttcactttcgtttctcagttttattcgaatccctctctcaatctcctttccaaatggccagcgttgaggttgcacagcaaacaccaacaacagttccagaaaatgaaacaaccgaggtaagcaagacccaggaaacaaccccagtcactgaggctcctgcaacagaacaaccagcagctgaggttcctgcaacagaacaaccagccgctgaggctcctgccccagaatcaaccaccgaagcaccaaaggaagaaaccaccgagg

SEQ ID NO: 192649 - DNA, 265 bp, Glycine max
acttgatctcatcataatcgtcagcgtcaattgaagaagatgccgatcagaaacatcgccgtcggaaggcctgaagaggcgactcaccccgacacgttgaaggcggctttggctgagttcatctcaaccttcatcttcgtgttcgccggctcaggctccggcatcgcctacaaccagctcaccgacaacggcgctgccacccctgccggcctcatctccgcctccatcgcccatgcattcgccctcttcgtcgccgtctccgtcg

SEQ ID NO: 192650 - DNA, 270 bp, Glycine max
actcgagccgaatcggctcgactaaaaatgaaggtccttgttttcaccgttgctacaattttcatagcatggcaatgccatacgtacgatatgttccctctccgaatgaacactggctatggtgcccgtactccggaggtgaaatgcgcaagttggaggcttgctgtggaagcacacaacatctttggctttgagaccattcctgaagagtgcgttgaagcaacaaaggaatacatccatggcgatcaatatagatcagactccaaaaca

SEQ ID NO: 192651 - DNA, 269 bp, Glycine max
ctcgagccgcctctgtacccttcgctaaaatgagagagtgcatttccatccacattggccaacacggaattcaggtcggaaatgcttgctgggagctctattgcctcgagcatggcattcaggctgatgggcagatgccaagtgctaagaccattggtggaggtgacgatgctttcaacaccttcttcagcgagaccggtgcaggaaagcacgtgcctcgtgcagttaccgtagatcttgagcccactgtcattgatgaagtcagaact

SEQ ID NO: 192652 - DNA, 269 bp, Glycine max
agcagagctagttatcataaagggatctggtagggctttttgcgctggaggggatttgagagtgttctatgacggcaggaaaataaaggatgcctgtcttgaagtggtctacagattttactggctttgctatcacattagtacctataagaaaacccaggttgcgcttgttcatggaatttcaatgggtggaggtgcagctttgatggtcccattgaagttctcagttgtaacagaaaaaactgtttttgccactcctgaagcaagtt

SEQ ID NO: 192653 - DNA, 270 bp, Glycine max
ccaaggtgggcgccatagggtgcatgctggtgtccctcttcttcctcgggacatggcctgctgtcatgactctgctagaaaggcgcggtcgtcttcctcaacacacctaccttgattacaccctcaccaacctcatggctgctgttatcattgctttcacctttggtcagattggcaacgctcaacccaacttcttgtctcagctttctcaggataactggccttctgttctgtttgccatggggggtggagtggtccttagtgttggaa

SEQ ID NO: 192654 - DNA, 267 bp, Glycine max
acactaatgaaacgagtacgtcatccaaatgtggtgttgttcatgggtgcagttactaaacgtccccatctatctatagtaacagaatatttgcctaggggcagtttatttcgcctaatacataagccagcatctggtgagattctagatccaaggagaagattacggatggctttagatgtggctaaagggatcaattatctccactgtctaaagcctccaattgtgcactgggatctcaaaaccccaaatctgttagtggacaga

SEQ ID NO: 192655 - DNA, 268 bp, Glycine max
ttctagagctaatacgtgcaacaaaccccggcttctggaagggatgcatttattagataaaaggtcaacacaggctctgcctgttgctttgatgattcatgataactcgtcggatcgcacggcctttgtgccggcgacgcatcattcaaatttctgccctatcaactttcgatggtaggatagtggcctaccatggtggtgacgggtgacggagaattagggttcgattccggagagggagcctgagaaacggctaccacatccaagg

SEQ ID NO: 192656 - DNA, 266 bp, Glycine max
tactgctgctcttttctcttttcttttctctttagttctctcttcccctttctttttctttttcttcttcttctgagcttgtttaagcttttcttccattaacatattatcacaatgtgtggtattcttgctgttcttggttgttctgatgactctcgagccaaaagggtccgcgtgcttgagctctctcgcagattgaagcaccgtggccctgactggagtgggctccatcaacatggtgactgctttttggcacatcaacggtt

SEQ ID NO: 192657 - DNA, 268 bp, Glycine max
tcgggattttactctcacgagattagagattgaagatggtgtctgacgcgagcaagaagaaggctgcgcagaagaaggcggcggcagcggccaagagaggaggcaaagcagcagctgcttcgtcgaaaacgacgtcgtcggagaaggccgccgacaagcttgccaacggatctggggaaattcagatatccgatcgaacctgcaccggtgtcctctgctcgcatcctctttccagggatattaggatagaatctctgtcagttacttt

SEQ ID NO: 192658 - DNA, 266 bp, Glycine max
tctttctctctttctagttcgtgttcttcgtcgcaaatccgaagtaggatctctcttgttttttctctaggtttttcgcgatggcgtcgaagcgaattttgaaggagcttaaggatttgcagaaggatcctccaacatcttgcagtgccggtcctgttcatgaagatatgtttcattggcaagctacaattatgggtcctccagacagtccctatgctggaggtgttttcctagtgactattcatttccctccagattatcccttt

SEQ ID NO: 192659 - DNA, 261 bp, Glycine max
ccgcctcaaccgtgctgtgccactagacaggcttgccactcttcttcgcggtgctcctcacttggttgagttgggcaccggagcttacacgacagagatgcgaccggagtcttcacaaaccttgcggaggcatttactcggtgcaagcaattgaagggcttatctggattttgggacgtgctcccttcctaccttccagctgtctatcctatttgctccaacctgacttcactgaacttgagttatgcaactattcaaagc

SEQ ID NO: 192660 - DNA, 136 bp, Glycine max
agcttgcactgcttcccctgtccactacaagttcaaccccgtcaagactatcaagacgaatgtagtggggcccttgaacatgctggggcttgcaaagagagtgggcgcgaggttcttgttgacgagtaccagtgag

SEQ ID NO: 192661 - DNA, 228 bp, Glycine max
caaaaaacagtttcattgtgatgattgtgggatttgtagacttggtggtcgtgagaattattcccactgcagtaagtgtgggtgttgctactcaaatactctgcgtgataatcatttgtgtgtggagaactccatgaggcatcattgtcccatttgttatgagtatctttttgactcattgaaagacattgctgttatgaaatgtggtcaacacaatgcatagtgatg

SEQ ID NO: 192662 - DNA, 267 bp, Glycine max
aaaccgaggttagtgtgagattggaagccctctgggcagttctgtccaaggatttcgtcaccgtagctccaaaggtactccccaatattgtgaaggatgtgcaagtgattgaaggtgatggaggggttggtacaatcctcatctttaattttttgtctgatgtgtccccaagttaccaaagggagaagatcacagagtttgatgaaatttcacatgaaattgggctgcaagtgattgaaggaggttatctgagtcaaggattgtcat

SEQ ID NO: 192663 - DNA, 265 bp, Glycine max
acgtgccgtctttgtagatcttgagcccactgttattgatgaagtgaggaccggaacttaccgccagctttctccacccagagcagctcatcagcggcaaagaagatgccgccaacaactttgcccgtggtcattataccattgggaaagagatcgttgatctgtgcttggaccgcatcagaaagcttgctgacaactgcactggactccaagggttcttagtattcaatgccgttggtggaggaactggttctggacttggttc

SEQ ID NO: 192664 - DNA, 265 bp, Glycine max
ttttaattgataaaaatgggatgcttaagattgcagattttggtcttgccaatttttatggtccagatcgtcaccaccctctcacaagccgggttgtgacactatggtacagagctcctgagttattgttaggcgacacagattatggagttggtgttgatctatggagtgctggatgtctcctggcagaaatgtttacaggaattccaatcatgcctggcagaaatgaggttgagcagcttcataaaattttccggctatgtgg

SEQ ID NO: 192665 - DNA, 265 bp, Glycine max
ctactcatatgcttgtctcaaagattaagccatgcatgtgtaagtatgaactaattcagactgtgaaactgcggatggctcattcgatcagttatagtatgctcgatggtatctactactcggataaccgtagtcattctaaagctaatacgtgcaacgaatcccgacttctggtagggatgcatttattagatagaaggtcaacacaggctctgcctgttactttgatgattcatgatagctcgtcggatcgcacggcctttgt

SEQ ID NO: 192666 - DNA, 268 bp, Glycine max
ctcgagccgagaaccttgaagcgagtctgggccacagcaaccagcgacaacaactcaatcagctagggttgctttgcttgctatcttgttggaggattttctgttcaagagaagatggtaactagaattgtggatcttcgttcagacacagttacaaagccaactgaagcaatgagagctgctatggcaagtgctgaagttgatgacgatgttctaggctatgatccaactgcttttcgcttagaaacagagatggcaaagacaatgg

SEQ ID NO: 192667 - DNA, 265 bp, Glycine max
ggtgggggagggccaaacagtgcacactgagaaagcaatttctgttctgattcagcttgtggaaaaggagagggtcttgaagtgtgttaaaatgatccaagagctggcatcaaatagtggtggttctgccaagggtgctagtgcttctgtttctgtccctagcgtgcccgaaagcccactaggggtgttggtcactgcatgcttcagctacaaaagtgatgacacaaatgctgcttcatatgcaaattcttcacataacattagt

SEQ ID NO: 192668 - DNA, 239 bp, Glycine max
gcttccttaagctccttagtgctgctccttgcagctctaattctatcccctcaagttcttgcaaactatgagaatcccccagtgtataagcctcccactgagaaaccaccagtttaacagcccccagttgagaagcctcctgtttacaaacctccagttgaaaagcctccagtgtataagccaccagtagagaagccaccagtgtacaagccaccagttgagaatcctccagtttacaa

SEQ ID NO: 192669 - DNA, 265 bp, Glycine max
gaaaaaggcagtgttgatcggaataaactacccaggaacaaaggcggactgagaggatgcataaacgacgtgtggagaatgcatcgctgcctgatcgagcgatacgggttctccgaagacgacatcaccgttttgatcgacacggacgagtcctacacggaggccaccgggaagaacatccggtcagcgctgaccaggctggtccgatcggcagagccggggacgttctgtttgtgcactacagcggacacggcacgcgcctccc

SEQ ID NO: 192670 - DNA, 252 bp, Glycine max
ggctcgaggcctcaggtaagccaaagccatggctaagcataacaatgtacatccccaacggacacttccgtaagcactggcagaactatgtgaagacctggttcaatcagccagcacggaagacaagaagacggttggctcgtcagaagaaagctgtgaagattttccccagacctacagctggacctcttagacccattgtacatggtcaaactttgaaatacaacatgaaagtgagagctggaaggggat

SEQ ID NO: 192671 - DNA, 263 bp, Glycine max
agcagctggcttgtgtagatgtcattgaacatggaatagtccatggaggctacagtggtgttctaaaggaggcagaagtattcaaacaattggttgtatctgacaccgcaaaaggtttaattaatgtcttcttttctcagcgggcgatatcaaaggtgcctggcgtaaccgatatcggccttaagcccagaaatgtgaaaaaagctgctgttattggaggaggtctaatgggttctggcattgctacagctcttatactaggc

SEQ ID NO: 192672 - DNA, 263 bp, Glycine max
caacattattcccattgctatatattatggctagcatgaaggttacatgggtggttgtgatcatgtgcatggtcgtggtgggtgcaccgatgatggcgcaagccatgacatgccatgatgtgacggtgaacatggcacagtgcctatcctacctgatgcagggaggaacaccttcaacactttgctgcagcggagtcaagaacattcttggctctgctgtcaccaccgttgacaaacaaactgtgtgcaactgtctcaaggcg

SEQ ID NO: 192673 - DNA, 260 bp, Glycine max
caagcagtgggaggaggctcgggactctgaccgcgtgcctgttgaagaatgagccggcgactcataggcagtggcttggtcaagggaaaccaccggagccgtagcgaaagcccgtcttcacagggcaattgtcactgcttatggacccgaacctgggtgatctatccatgaccaggatgaagcttgggtgaaactaagtggaggtccgaaccgactgatgttgaagaatcagcggatgagttgtggttaggggtgaaatg

SEQ ID NO: 192674 - DNA, 259 bp, Glycine max
cttttgatcagagtgtaaaatggtgatgtgattttacaagggtctaccatgcccctttgagtttcagttttcaattttgaacccccttttttgtaatccataaccatagctggacaggatccttggttgagtcgagggatttgattatggataagtctgaggctgtcaaggatttgggagctgggaattttggggtggctaggctcatgaggaacaaggagaccaaggagcttgttgccatgaaatacatcgagcgtgg

SEQ ID NO: 192675 - DNA, 264 bp, Glycine max
caaccatgcgggagtgtggtgtacgtggcctttggaagcgaagacaaaccaagtcaagatgaagtgacacagatagctctaggtttggaggaatcaaagattcggtttttctgggtgcttagggttcaacgtgggccatgggacccagatgtgttacggttaccagaagggttcgaagagcgaaccaaagggcgtggaatagtgtgcaccagttgggcaccacagttgaagatactgagccacgtagcagttggtgggtttttg

SEQ ID NO: 192676 - DNA, 268 bp, Glycine max
attgaattgacaatgaggcctgctcttgctttgcttcctcttctatttgctttcttgttagctgccactacggaatcaagaaaagatccaggggaatattggaaaatgatcatgaaagatcaggaaatgccagaaggacttcaaggtcttgtttcatttcaatctgaaaataaccctaagactcaagagcagcatggtaaaggttccaaaaaccattgtgaagagtctctagttacaaatacacaagttaacagtgacttcgaaccca

SEQ ID NO: 192677 - DNA, 288 bp, Glycine max
gggtcgaacagtacgaaactctggttcatccacgcagtgatactgacgtgcaaatcgttcgtctgacttcggtatatcggcgaaagactaatcgaaccgtctagtagctggttccctccgaagtttccctcaggatagctggagcccgcgggcgagttctatcgggtaaagccaatgattagaggcatcgggggcgcaacgccctcgacctattctcaaactttaaataggtaggacggtgcggctgctctgttgagccgcgccatggaatcgagagctccaagtggg

SEQ ID NO: 192678 - DNA, 182 bp, Glycine max
cggatccagctacagcctacaacctacagatcaaggaaggaagatgttgggtgttataaggcacaagagtattcgccccgccttctccgcaatcagacacttctcttctgcagctaaagagattactgtcagggctgctctcaactccgcactcgatgaggaaatgtcagctgatcctaaag

SEQ ID NO: 192679 - DNA, 287 bp, Glycine max
aacatggctagggttagtgctttgtttcactctttgctcttgatttcttcccttgtattggtttctccaaatccatgtttcctcctgggaaactagtccctggactatcatggaattactatttgttgacatgtcccaagcttgagaggattataaggaagcatcttgaggatgtcttcgagaaggacagtggagtagctcctggcatacttcgactcttcttccatgactgctttcctaatggatgcgatgcgtctatattgttgaatggagacggtgacgagaag

SEQ ID NO: 192680 - DNA, 230 bp, Glycine max
ggccagagctctggaaagtcctcggtgttggaaagtgttgttggcaaggatttcttacctcgtggatcagggattgttactcggagacgccttgttttgcagcttcacaagattgatgagggtggcagagagtatgctgaatttctacacctccccaggaaaaggttcaccgattttgctgctgtgagaaaagagattcaagatgaaaccgatagagagactggacgaac

SEQ ID NO: 192681 - DNA, 286 bp, Glycine max
ggagaccacagaggcgaaagcaggacctttaagcttcctaatcccatgtactacattgagtagtaccttcacctctctcaacaatctagctagagtttgttgtgagctataagctagtttatcgtgaggtgtatatgaagctgttagtagccttagttactgcagtagttgtggtagcatggccatgccatggcgcaggctagcaaaggttcgctctccgaatgaaaactcggctaggtgagcgttcttcggcggtaaaatgcgcaagttttaggcttgctgtgga

SEQ ID NO: 192682 - DNA, 304 bp, Glycine max
  unsure (1)..(304): unsure at all n locations
ccaattgnatcttctcttctcccagaatcggtgtaggttacaggtttaagggttttgtcttcatttaggtcactaatccgatatcatgaagctcgatacgactagtctcgaatcgtttcccacactgattgcacctcaaaacgacgtcgccggagaactctccgacgctccgttctttgaccttccgaattccaatgacttcgatgggttcttgaaagacgctattcagatggtgaagcccgcgaagggtactacaactcttgcttttatatttaaagaaggtgttatggtagctgctgattct

SEQ ID NO: 192683 - DNA, 284 bp, Glycine max
acttaatcgatcatcacttcacttcactaatacatcatggcagacgagacccagaacaagtatgagagctctgaggttgaggtccaggatcgtggtgtttttgactttctcggtaagaaaaaggatgaagaagacaagcctcatcctcaggaggaggtcatcgccaccgagtttcaaaaagtcactgtctcagaccaaggagagaacaagcacagcctcttagaaaagcttcaccgatctgacagcagctctagctcttcaagtgaggaggacggagaagatgg

SEQ ID NO: 192684 - DNA, 290 bp, Glycine max
aaggtgttgatgagtttcccttctgcgttcatctggttagctgggaaaaagaaaatgtttcaagtgaagcattggaagctgctagaattgcatgcaacaaatatatggcgaaatttgctggaaaggatgctttccacttgagagtcagagtacatccattccatgttcttaggatcaacaaaatgctttcatgtgctggagctgataggcttcagactggaatgagaggtgcatttggaaagccacagggaacatgtgctagagtcgccattggtcaggttcttctttct

SEQ ID NO: 192685 - DNA, 205 bp, Glycine max
cctagttgttggtctttatatttagttattgacatcaacaaagtcatggaggaagttaatgtggttcaaaccaagaatggaactgtttcagtagcttctgcgtttgctggccataaggaagctatacagcacagggaccacaaatttttcagacttgctgttgaagaagcgtataaaggggtagactgtgaagatgggggtcctt

SEQ ID NO: 192686 - DNA, 289 bp, Glycine max
tcagtttccaagaatcttaagctatgggaaagtcttacccaaccgtgagcgctgattaccagaaggccgttgagaaggcgaagaagaagctcagaggcttcatcgctgagaagagatgcgctcctctaatgctccgtttggcatggcactctgctggaacttacgacgtgagctcgaagaccggtggtcccttcggaaccataaagcacccctccgaactcgctcacggcgctaacaacggtcttgacatcgctgttaggcttttggagccaactcaaccggagtttcc

SEQ ID NO: 192687 - DNA, 294 bp, Glycine max
gctatctctcccattctctcgcatctcaatacccttttgatttgtgaaaggaaagcaaacatgcttgatcaggtccaacaccctacaatcatggacaaggttgctggccagctccatctccgttctggtgtttctggtattaggagttatgaaggagcctactgccaccccacaatgtaccaaagaccctcttttgggaattactcgaatgctgcattgcagtatcctgtgatgccctcatgcaaagctactatggatttgtctgctgctgcaacaactgcctcccccgtcttt

SEQ ID NO: 192688 - DNA, 287 bp, Glycine max
gctgtcactgagaaaggatctctatctacgaaggagcggaataaaacccttctctctgtgattaagagaatggcttcagatcggaaacttcacacttttgagcaggtggcaaagcacaaccagaccaaggattgctggctcatcatttctggcaaggtgtatgatgtcacccctttcatggaggatcatcccggaggtgatgaggttttgttatctgcaacagggaaagatgcaaccaatgactttgaagatgtggggcacagtgattctgctagagatatgctggc

SEQ ID NO: 192689 - DNA, 284 bp, Glycine max
ctttaaataggtaggacggtgcggctgctctgttgagccgcgccatggaatcgagagctccaagtgggccatttttggtaagcagaactggcgatgcgggatgaaccggaagctgggttaccgtgcccaactgcgcgctaacctagaccccacaaagggtgttggtcgattaagacagcaggacggtggtcatggaagtcgaaatccgctaaggagtgtgtaacaactcacctgccgaatcaactagcgccgacactggatggcgctaaacgcacgacctatac

SEQ ID NO: 192690 - DNA, 286 bp, Glycine max
cggctcgagcaaaatttcgtgctcttctctccctctcccttcattcatctccttcctcctccaagctcttatccatggcctcctatggtggtgagcttcttctagactcatcttctccttgaagtggcgtctcctctctctctccctttctccattccgctgccattcatctcccaagaagcaaaggaatccattgatgaagaagaccctaggcctacaagctccaatggagcttgcatcatgtggtatcaagagcatcttcatgtgttgaggaaaaaacccagag

SEQ ID NO: 192691 - DNA, 200 bp, Glycine max
tccttgtctactgcactgctgggatctcagggggtcacattaacccagcggtgacatttgggctgtttttggctcgcaaggtgtctttgatccgagccatcatgtacatggtggctcagtgcttacgtgctatctgtggagttggtttggttaaggctttccaaaagtcttacttcaacaagtatggtggtggggctaat

SEQ ID NO: 192692 - DNA, 154 bp, Glycine max
gcgagatcttgagtcgccgatttgaaaagatgagtaagcttcagagtgatgctttgcgtgaagccatctcaggaatcatggccgattccaaggagaagaatcgcaaatttgtggagaccatcgaactccaaatcggtttgaagacctacgatcc

SEQ ID NO: 192693 - DNA, 274 bp, Glycine max
acttcatcctattattactttccctctttgcattccaaatggccactgttgaggttgcacagcaaacaccaacaactgtgacagagaatgaaacaacgactgaggtaaccaagattgaggaaactaccccagaacagccagccaccgaggttactgccccagaaacagtcaacgaagcagcaaaagaggaagcagcagttgagactaatgaggcaacagaagttacagaggaagggaaggctgagaaaacagaagaagaagaagaagtgaaaga

SEQ ID NO: 192694 - DNA, 210 bp, Glycine max
aagggccaggtagaattacagcatacttgccatctggaggtccatttgttagaatggatagccatgtttatcctgattatgtggttcctccaagctatgactcccttcttggaaagctgattgtatgggctccaacaagagaaaaagcaattgaacgcatgaaaagggcacttgatgacactattatcacaggagttctactacaattga

SEQ ID NO: 192695 - DNA, 286 bp, Glycine max
gcagcttttgcctacaactcccttcaccatggctgaacaaaccgagaaagcttttctgaagcaaccaaaagtgtttctcagcacaaagaagactgggaagggaaagagacctggaaaaggtgggaaccgcttttggaagtccattgggcttggatttaagactcccagggaagccatcgaaggaacctatattgacaagaagtgccccttcactggcaatgtttccatccgtggccgtatcttggctggaacatgtcacagtgctaagatgaacaggactattatt

SEQ ID NO: 192696 - DNA, 276 bp, Glycine max
tagggtttgatcagactcaagggtttaagccatgggaaaaaggaaggcaaaggcaaagcctcctccaaagaagcgaatggataagctcgataccgtcttcagctgccctttctgcaatcatggcagcagcgtcgaatgccgccttgacatgaagaacttgataggggaagctatttgcgggatatgccaagagagctttagcactaccatcacagctttatcagagccaatagacatatacagtgagtggattgatgcaatctgaatggtaaacca

SEQ ID NO: 192697 - DNA, 192 bp, Glycine max
atcgagccgcgcgattcgctcttctcttggaaaagtgaaaaccaacagtacgaacgaaagaacaagagcgatttagaagtgagagaagatggggttgtcgttcacgaagctgatcagcaggttgtttgcgaagaaggggatgagacttctgatggtaggtatcgatgctgctggtaagacaagcatcttgta

SEQ ID NO: 192698 - DNA, 285 bp, Glycine max
acagcgctcaaccaaagatgcagaacgaggaaggacagatcactgagctttacattcctaggaagtgctccgccacaaacagattgattaccgctaaggaccatgcttcggttcagatcaacattgggcatgtggatgagaatggcgtctacaatggccatttctccacttttgccctctgcggattcatccgtgctcagggtgatgctgacagtgctctagaccgcttgtggcagaagaagaaagttgaagttaagcaacagtagacacccctgatagtttgtt

SEQ ID NO: 192699 - DNA, 294 bp, Glycine max
  unsure (1)..(294): unsure at all n locations
gctcagcgaagtcacagcattcagaatcagtatcggagaattttatatttttctctaaaatctctctgtagtgtgaataaatagacatgtctgagactgaggtaaatcaaactatcagcacgtcaactggattgcctcgaaagcgcttctatcgagcacgagcacacagcaatccactgagtgactctcacttcccagtgccaatttcacccagccatgttgactattctctccattaccctcagttatttcccttgtctggtcaagctgatagttccanaaagatccagtttg

SEQ ID NO: 192700 - DNA, 244 bp, Glycine max
ctctctgcactcccatatcggcacaaagtcgttttgagttccgccgaaggcacagtatgttgcagcagctatggatttggcatccaatctcggtggcaagattgacaaagccgaagttctctctgccgttcagaagtatgagaagtatcatgtttgccatggaggtcaagaggaagcgaggaaagctaattataccgatatggttaatagatcctatgatcttgttaccagcttttatgagttt

SEQ ID NO: 192701 - DNA, 281 bp, Glycine max
accgtcgcaccttccctgaggcttctcttgtctgtcgcgagtgaccatggtgagggttagtgtgctgaacgatgctctgaagagcatgtacaatgctgagaaaaggggaaagcgccaagtcatgattcggccatcctccaaagtcattatcaaattccttttggtgatgcagaagcacggatacattggagagtttgagtatgttgatgaccacagggctggtaaaatcgtggttgaattgaacggtagactgaacaagtgtggggttattagtccccgtt

SEQ ID NO: 192702 - DNA, 280 bp, Glycine max
attccacctcatcgttatacccctctcaagaaagcttggatggatatctatagtcccatatatgaacagatgataattgatgtccgtatgaatttgaaggctcgtagagtggagctgaagacaaggcctgatacacctgatattagtaacctgcgaaaatgtgctgattttgtccatgctttcatgttgggttttgatgtgatagatgccattgctcttctgcgtatggatgagctctacattgagtcctttgagatcaaggatgttaaaacacttcgag

SEQ ID NO: 192703 - DNA, 208 bp, Glycine max
agaaggccttcaggttctgaccttggaggatgttgtttctgaggctgatatctttgtcaccaccaccggtaacaaggacatcatcatggttgaccacatgaggaaaatgaagaacaatgccattgtttgcaacattggtcactttgacaatgagatcgacatgcttgggctggagaactaccccggcgtgaagcgcatcaccatcaag

SEQ ID NO: 192704 - DNA, 282 bp, Glycine max
aaaaatggcagatattcctcgggtgaagcttggaagccaaggcctggaggtttccaagttaggatttggttgtatgggcctaagtggagtgtacaacgatcctgttcccgaagaggttggcatctctttgatcaaacacgcattcactaaaggggtcactttctttgattctgcagatttttatggagcacgtgccaatgaagttttggtcggaaaggctctcagggactttcctcgagatcaatttcagattgccacaaagtttgggattgtcaaaatgga

SEQ ID NO: 192705 - DNA, 280 bp, Glycine max
ctcgagccgtttcgcttttccattccaacctctttcacacttcagatctgtttcttcatcgactgttcaagtaaatggcctttgtcaccactgctgaagtgtgtgatgcgaacccacagttaattttgagtggggagcttcgtgcccttcagccagtttttcagatttatggccgtcgacaggttttctctggacctataggcaccttgaaggtgtttgaagacaatgttttggttcgtgagttccttgaagagaaaggcaatggaagagttctagttgt

SEQ ID NO: 192706 - DNA, 277 bp, Glycine max
gcgtgtgtgagagagaatcagaatcagaagatgaagaaagaagacaccccgaagctgatcagttccgaaagtttcgaatttgtggtcgacaaagaagctgcaatagtttcacagaccatacataacatgcttacttctccagggagtttcgctgagaggcagcacggcgaagttacctttcctgagatcagcaccaccattctcgagaagatttgccagtacttttattggcatctccaattcgccagtgggaaggagacggaattttccattgaac

SEQ ID NO: 192707 - DNA, 243 bp, Glycine max
ctgttataactgtccctcccaaagccttggccattcttataatcaacagccaaacccacgagatcttaattgatctaaaggcaaggcgcattgcctccgacaatattcactccggcaatggcttccctaccctttccgttgatgaacaagtccttgccatagagctgccactgacatacggtcccttcattgagtcagtgaacaagagagggctgaacctctctgaggtggtgtgttccacat

SEQ ID NO: 192708 - DNA, 287 bp, Glycine max
cggctcgaggcagatggcactgcaacaagcacaaaggaaaatgaagattgcccattatggaagatcaaagtctgcaaagtttgaaagagttgttcctcttgatccttcaaacactagtcttgcatcaaagccaactgaggaggagaagagatgcagctttatcacacccaattcagatcccatctatattgcttatcatgatgaggaatggggagttccagttcatgatgacaagatgctgtttgaacttttagttttgagcggtgctcaagttggatctgattgga

SEQ ID NO: 192709 - DNA, 280 bp, Glycine max
ggggtgccctgagatcactttgagcaatggtgaaggctgtggcagttcttggcagcagcgagggtgtcactggaactattttcttcactcaggagggaaatggtccaaccaccgtaactggatctcttgctggtcttaagcctggtctccatggcttccatgtccatgccttgggggacactaccaatggttgcctgtcaactggagcgcatttcaatcctaataacaacgagcacggtgcccctgaggacgagaatcgtcatgctggtgatcttgggaa

SEQ ID NO: 192710 - DNA, 264 bp, Glycine max
ctctctctcagcaaagccttcctagaacgaatagagaaaagaggagcaattttccctcaccaaagaagatgaagcaaacaatggccgatcaacttaccgatgaacagatctccgagttcaaggaagccttcagcttgttcgacaaggacggcgatggttgcatcacaaccaaggagcttggaactgttatgcgttcattggggcaaaacccaactgaggcagagctccaggacatgatcaatgaagtggatgctgatgggaatg

SEQ ID NO: 192711 - DNA, 275 bp, Glycine max
ctcgagccgaactgagctgaggcttggactgagactaggactccctggaaatggagccgcaccaacaactgaagctgctgcggaattaggagtgaggaagagagggttctctgaaactgaaaccgatgaaacaacctccgttgatttgatgcttaacctctctcccaaggaagcttctgctgctgctactactgatggagcagatccacgtgagaatccaaagacttcgccgaaggagaagaatcttcctcttctcgatcccgcaaagcctcctg

SEQ ID NO: 192712 - DNA, 256 bp, Glycine max
cctctctgaggtggtgtgttccacattcacaatgggatgggtttggagataccaaggacagaaggacagtgagagtggaatgcttcatgaaagaaagcagccccaatatctgggtgaggcctatcagtggactcacaatggtggttgaccttgaactcatgaagatcgttcagtatcacgacggtggcattataccagtaccaactgccgacaacactgaataccgcttttcacatcagaacccacgaatcggtcc

SEQ ID NO: 192713 - DNA, 275 bp, Glycine max
ctgccagtagtcatatgcttgtctcaaagattaagccatgcatgtgtaagtatgaactaattcagactgtgaaactgcgaatggctcattaaatcagttatagtttgtttgatggtatctactactcggataaccgtagtaattctagagctaatacgtgcaacaaaccccgacttctggaagggatgcatttattagataaaaggtcaacacaggctctgcctgttgctttgatgattcatgataactcgtcggatcgcacggcctttgtgccg

SEQ ID NO: 192714 - DNA, 278 bp, Glycine max
  unsure (1)..(278): unsure at all n locations
tttccacttgtctccgaattagttatcttgagaaacattattcacattgctatatattatggctagcatgaaggttacatgggtggttgtgatcatgtgcatggccgtggtgggtgcaccganntgatggcgcaagctcatgacatgcaatgatgtgacggtgaacatggcacagtgcctatcctacctgatgcagggaggaacaccttcaacactttgctgcagcggagtcaagaacattcttggctctgctgtcaccaccgttgacaaaccaactg

SEQ ID NO: 192715 - DNA, 277 bp, Glycine max
tgaaagtgcttgtcttgtttgttgctacagttttggtagcatatgaatgccatggctcagactaccagaagttccctctccaaatgaaaactgggtttggtgggcaatacagcaatgaggtggcatgtgccagttggaggcttggcgtggaagcaaacaacgtagtcaagtggcaaactgttcctgcagcttgcggagagtacatagctgactacgttctaggagaccaatatagatcagattccaaaacagttaaccaacaagcttatttctatgc

SEQ ID NO: 192716 - DNA, 278 bp, Glycine max
tcggagttaggttctgcacgctctgcttccagcgagtgttctttcttcgtttcaacaccttaatttgcacacgctgcttcttcagcttgagaaatggcacaagaaacctttctattcacatctgaatctgtaaacgagggtcaccccgacaagctgtgcgaccagatctctgatgcagtgctcgatgcgtgccttgaacaggaccctgacagcaaggttgcctgtgagacatgcaccaagaccaacatggtcatggtctttggagagatcacaaccaa

SEQ ID NO: 192717 - DNA, 286 bp, Glycine max
cagattccgtgagttgcaaaaatgaagacgattctttccaccgagaccatgaacctcccggacggcgtgagcatcaaagttcatgccaaggtcatcgaagttgagggcccccgcggaaaattggtgcgagacttcaagcatttgaatctcgattttcagctcattactgacgaaaacggtaaaagaaagctgaaaatcgacgcgtggtttggttctcggaaaacatccgccgccattcgcaccgccttgagccacgtggagaatcttatcaccggcgtcaccaagg

SEQ ID NO: 192718 - DNA, 274 bp, Glycine max
gctagctattagttcgattttgtagtaagtgaggtgccaatatggtgaagatagctcttggtactttggatgactcttttagcgctgcctctcttaaggcttatttcgcagagttccacgcaactctgattttcgtgttcgctggtgttggatcagccatcgcttacaacgagcttacaaaagatgcagccttggatccaacggggctggtggcagtagctgtggcacatgcatttgcactgtttgtaggtgtctccgtcgccgccaacatctc

SEQ ID NO: 192719 - DNA, 273 bp, Glycine max
tgaaagtgcttgtcttgtttgttgctacagttttggtagcatatgaatgccatggctcagactaccagaagttccctctccaaatgaaaactgggtttggtgggcaatacagcaatgaggtggcatgtgccagttggaggcttggcgtggaagcaaacaacgtagtcaagtggcaaactgttcctgcagcttgcggagagtacatagctgactacgttctaggagaccaatatagatcagattccaaaacagttaaccaacaagcttatttct

SEQ ID NO: 192720 - DNA, 270 bp, Glycine max
gcttggtgatgtccctttctgttctcttcactcttggtcttgcgagagaaagccatgccagagacgaagatttttggcatgctgtttggccaaacactcccattccaagttcattgcgagagtatctaaagcctggccctgcaagtgttgaaatcgatgatcaccctatgcaaattgaagaaacacagtacccgaaaaccttcttctataaagaagaccttcatccaggcaaaacaatgaaagtacaattcagcaagcctccctttcaac

SEQ ID NO: 192721 - DNA, 279 bp, Glycine max
gttcacttgatccttcataagtcgtcatcatcatcatcatcatcaccgttcattgaagaagatgccgatcagaaacatcgccatcggaaggcctgaagaggctactcaccccgacacgttgaaggcggggttggctgagttcatctccaccttgatcttcgtgttcgcccgttcaggttccggcatcgcctacaacaagctcaccgacaacggcgccgccactcccgccggcctcatctccgcttccatcgcccatgctttcgccctcttcgtcgccgt

SEQ ID NO: 192722 - DNA, 280 bp, Glycine max
ggagagagtattggcgcttcatcaagatgggtatttctagggattccatgcacaagacgaaaggacatggtggcaagaaaaaggcttggagaaagaagagaaagtatgagcttgggcgtcaggcagcaaacaccaagttatcaagcaacaagacaatcaggaggattcgtgttagaggtggcaatgttaaatggagggcattgaggctggatactggcaattactcatggggtagtgaagcagttactcgcaagactcgtattctagatgttgtttacaa

SEQ ID NO: 192723 - DNA, 257 bp, Glycine max
ctcccaagggtgtaaccttcctggctgtgttaatatgcgtgtcagcactgtcactcagcccttctgttgcgtgggaagggcaaaataatggccttgttaggaacttctacaaggaatcatgccctcaggctgaagacatcatcacggcacaagtcacacttctctacaagcgccacaagaacactgctttctcctggctcaggaacatcttccatgactgcgctgttccgagttgtgatgctgagcagttgctggac

SEQ ID NO: 192724 - DNA, 271 bp, Glycine max
cattaaccccggtctccgcactgtcgtatcgccattatcggggttgacgcctgtccagtgtcggacggtcaaggacgttggtgacctgatgacaggggagccgacgaccgaagccccggtgaacggcggccgtaactataacggtcctaaggtagcgaaattccttgtcgggtaagttccgacccgcacgaaaggcgtaacgatctgggcactgtctcggagagagactcggtgaaatagacatgtctgtgaagatgcggactatctgcac

SEQ ID NO: 192725 - DNA, 271 bp, Glycine max
cggctcgatgcagtgcacaacatcgattatccaaatgggcgaagaaaggccttggttccggaatcggtggtgaagaaggagaaaaggaacgaggagtgggctttggcgaagaagcaggaactcgatgccgctaagaaaatgaggttcgaaacgcggaagctgatttttaacagagccaaacaatactcaagggaatacgacgagcagcaaaaggaactgattaggttgaagcgtgaagccaagcttaagggagggttttatgttgaacccg

SEQ ID NO: 192726 - DNA, 274 bp, Glycine max
gagcggtcgtcggtgcagatcttggtggtagtagcaaatattcaaatgagaactttgaaggccgaagaggggaaaggttccatgtgaacggcacttgcacatgggttagtcgatcctaagggacgggggaagcccgtctgatagcgctctgtgcgcgtactccgaacaggaatcgggttaaaattcctgaaccgggacgtggcggctgacggcaacgttagggagtccggagacgtcggcgggggccccggaaagagttatcttttctgtttaa

SEQ ID NO: 192727 - DNA, 280 bp, Glycine max
caaaaacctactatggtgttgatatgagcactttaacgaggcctttttcggaggagcagagaaaatactatctacagacatcattgtggaacaaccttcatccacatcaagtcgtaggaactgctggtataataaaggaaattgattgtttaactgccacggtggctgacatagagaaagtcagatcagatttttcaatgtcaataaccgtggataacacaaagttatgtggatttggagggtggtttgatgtacattttcggggaagaagtgaggatcc

SEQ ID NO: 192728 - DNA, 281 bp, Glycine max
cgctcgcaaacgcaaataataaaaaacaaggttttagccatggcatcgaagcggatcttgaaggaactcaaggatctccaaaaggatcctcctacctcatgcagcgccggtcctgttgctgaagacatgtttcactggcaagcaacaattatgggtcctccagacagtccttatgctggaggtgttttcctagtcactattcatttccctccagattatccctttaagccacccaaggttgcattcaggacgaaggtatttcacccaaatataaatagcaa

SEQ ID NO: 192729 - DNA, 277 bp, Glycine max
cttcgatcaaagggaagaacaaacattcaattcatggcggctgcaaagcttcaagctttatggaatcacccagctgggcctaaaaccattcacttctgggcacctacctttaagtggggcatcagcattgccaacattgctgatttctcaaaaccacctgagaaactttcctatcctcagcaaatagcggtcacagctactggaattatctggtctcgttacagcactgtaatcaccccaaaaaattggaacctgtttagtgtaaacattgcaatgg

SEQ ID NO: 192730 - DNA, 277 bp, Glycine max
ctgactcaactggagcatacacaatgtacgtggacgaggatcacgcagatcaaatatgcagtgccaagcttgtaagcagccctcaccctcaatgcaaggaagtcaccccgggccgcgacgaagccgtcgttattctcacccgctacaacggcattgcatccgatgataggttcgccaatgccatgggcttcatgtctcaggaggttgcttctggctgtgctgaggtcctcaggcaatacgaggagttcgacaatgagaattaattacgtaattaatt

SEQ ID NO: 192731 - DNA, 293 bp, Glycine max
gctcggaattcgagtcgaaagttgattgaacatccaaattttttgtcaactagattgtacattggtggcgattcatactctggcattactattccagcaattgttcaagacatttctctaggaaatgaaaaagggctccaaccatggataaatctccagggatacctgctgtggaatccagcaacaactcgaaggcatgaaaactatcgaatatcctttgctcatggaatgggacttatttctgatgaactatacaggtcactgcaaaaaaattgtaaaggagagtacataaa

SEQ ID NO: 192732 - DNA, 267 bp, Glycine max
gcggggttggatttgtgcatgaccaagatcgttcttgtggtagaactaacactttgcatcttcaaaatgctcctaaaagccctagctctctctcctttttgctctccgtgcgagcttcagaaagtagatcagatgccgttgttgttcagagcaagggtcgatcgtctttttctcaaacagctgctgtgaggcatcttacaggttctgttaccagagcccatggacttcgttttgctgtggttgttgctagatttaatgaaattgtta

SEQ ID NO: 192733 - DNA, 270 bp, Glycine max
aaaccctagcagccggcgagaatggcagacgttgaggttgatgtggcggcggcggcggcggcggcggctgcagggcagccaaagaagagaacgttcaagaagttcagcttcaggggggtggatctggacgcgcttctggacatgtccactgacgaactcgtgaagatgttcagtgctcgcgcacgcagaaggttccagagaggtctcaccagaaagcccatggccttgattaaaaagctccgcaaagcgaaaagggaagcacagcaggtg

SEQ ID NO: 192734 - DNA, 268 bp, Glycine max
cgcggctagggttttagcgcacttcttctagatttaaggaagatgggtaaggaaaaggttcacatcagtattgtggtcattggccatgtcgactctgggaaatccactaccactggtcacctgatttacaagcttggaggcattgacaagcgtgttattgagaggtttgagaaggaagctgctgagatgaacaagaggtctttcaagtatgcctgggtgctggacaaacttaaggctgagcgtgaaagaggaatcaccattgatattg

SEQ ID NO: 192735 - DNA, 266 bp, Glycine max
aaaacagagacgcaaaatgaagacgattctatcgtccgagaccatgaatattcccgacggcgtgagcatcaaggttcacgctaaggttatcgaggttgagggccctcgtggaaaactcgtgcgagacttccaccatctgaacttggacttccaacttattaccgacgatggcggtaaaaggaagctcaagattgattcttggtttggttctcgtaaaacctccgccgccatccgcaccgccctcagccacgttgagaatttgatca

SEQ ID NO: 192736 - DNA, 271 bp, Glycine max
gctgtcactgagaaaggatctctatctacgaaggagcggaataaaacccttctctctgtgattaagagaatggcttcagatcggaaacttcacacttttgaggaggtggcaaagcatcaccagaccaaggattgctggctcatcatttctggcaaggtgtatgatgtcacccctttcatggaggatcatcccggaggtgatgaggttttgttatctgcaacagggaaagatgcaaccaatgactttgaagatgtggggcacagtgattctg

SEQ ID NO: 192737 - DNA, 279 bp, Glycine max
agcgcaatccctcgccttcccaatcccaaatcctcagcctcacactcacacatacacacatctgaacgcgtatcgtccctcccatggcttcaaagcgcatcctcaaggagctcaaggacttgcagaaagacccaccaacttcttgcagcgctggtccagtagctgaggacatgttccattggcaagcaacgattatgggtcctgctgatagtccttatgctggaggtgtattcctagtcactattcactttcctccggattatcctttcaaacctccca

SEQ ID NO: 192738 - DNA, 276 bp, Glycine max
ctagcactctcttctgcagctttcgccgacagcttcattcaccatggctgagcaaaccgagaaggcttttttgaaacaaccaaaagtgtttctcagctcgaagaaaactgggaagggaaagagacccggaaagggtgggaaccgcttttggaaatccattgggcttggatttaagactcccagggaagccatcgaaggaacctacattgacaagaagtgccccttcactggcaatgtttccatccgtggccgtatcttggctggaacatgtcacag

SEQ ID NO: 192739 - DNA, 274 bp, Glycine max
cctagctagggtttggaagaagctgatccgagaagatggtgcagcgtctcacctaccgcaaacgccacagctatgctacaagagaacaaccagcacagagtcgtcaagactcccggtggcaagcttgtttatcagaccacgaagaagagggtcagcggatccaagtgccctgtcactggaaagaggattcaagggattccacatttaaggccagcagagtataatagatcaaggttacacagaaaccgaaggactgtgaaccgtgcatatggtg

SEQ ID NO: 192740 - DNA, 270 bp, Glycine max
cgaataggggtcgtgttggagtgatcaagaacagagagaagcataagggaagctttgagactatccatgttcaggatgccactggccacgagtttgcaactcgtatgggcaatgtgttcaccattggcaagggaacaaaaccatggatatctcttcccaagggtaaaggtattaaactatcaatcattgaggaagctaggaaaaggattgccgcccaacaagcaactgctgcttaaatctttaggaaatgaatagactttgagtgtttgg

SEQ ID NO: 192741 - DNA, 271 bp, Glycine max
cgatcatcacttcacttcactaatacatcatggcagacgagacccagaacaagtatgagagctctgaggttgaggtccaggatcgtggtgtttttgactttctcggtaagaaaaaggatgaagaagacaagcctcatcctcaggaggaggtcatcgccaccgagtttcaaaaagtcactgtctcagaccaaggagagaacaagcacagcctcttagaaaagcttcaccgatctgacagcagctctagctcttcaagtgaggaggaaggaga

SEQ ID NO: 192742 - DNA, 271 bp, Glycine max
ccaaaatccgttccccctttctttcaaaccctttttttttttcttccaacaaatcagcgatgccgacgacgtcggtggtgccggcgaatcggcggcgtgcggcggcgaaccccgccgaggatatggacttcgagacgacggagggcgtgaaggccatcgcgagcttcgaggagatggggatcaaggacgatctgctccgcggaatctaccagtacggcttcgagaagccctcagccattcagcagcgggccgtgactccgatcattcaggg

SEQ ID NO: 192743 - DNA, 271 bp, Glycine max
  unsure (1)..(271): unsure at all n locations
gttcatactcagccacttccttccacacaacataaaacaccanaaagtcaatataagagcataaanaggccgaggtcaatgagccggtagtgtttagctcttgcaattgcatcagcagggaatagcagtccaacattaggatcatcaagtaggaatggagcttggcacaaagcagcaacctgacgagggcagctcagtggtttctgtcccaatgcatgtgggttgccaacacaggcctagggaatggctgctatcttagctcggaaatcac

SEQ ID NO: 192744 - DNA, 273 bp, Glycine max
ttctctctctctctctctcttcagaaaagcagaaagaaataacccattcaaaaaaagaaagagcaatcaattccaatcacaatggcaactcaactcaccgatgaacagatctctgagttcaaggaagccttcagtttgttcgataaggatggagatggttgcatcacaacaaaggagcttgggaccgttatgcgttcgttgggtcagaacccaacagaggctgagctccaagacatgatcaacgaagtagatgctgatggcaatggcaccatt

SEQ ID NO: 192745 - DNA, 265 bp, Glycine max
aatgtacataggcataaatgggtgctctctgaagacgactgagaaccttgatgttgttaagggtattccagttgagagaatgatgattgagacggactcaccatactgtgaaatcaagaatactcatgctggaattggttttgttaaatctacatggccttctaagaagaaagagaagtatgatcaagagtgcattgttaaaggccgcaatgaaccttgtttagttaagcaagttcttgaagtggttgctggctgtaaaggcatc

SEQ ID NO: 192746 - DNA, 264 bp, Glycine max
ggcgttctatatattattgaattgacaatgaggcctgctcttgctttgcttcctcttctatttgctttcttgttagctgccactacggaatcaagaaaagatccaggggaatattggaaaatgatcatgaaagatcaggaaatgccagaaggacttcaaggtcttgtttcatttcaatctgaaaataaccctaagactcaagagcagcttggtaaaggttccaaaaaccattgtgaagagtctctagttacaaatacacaagtt

SEQ ID NO: 192747 - DNA, 281 bp, Glycine max
ttccgaacgagtgaccttcttcgtttctcgcaaagtttaagtaatcatgggtaaggaaaaggttcacatcaacattgtcgtcattggacatgtcgactctgggaagtcaactaccactggtcacttgatctacaagcttggaggtattgacaagcgtgtgattgagaggttcgagaaggaggctgccgagatgaacaagaggtcattcaagtatgcctgggtgctcgacaagctcaaagctgagcgtgaaagaggaattaccattgatattgctttgtgga

SEQ ID NO: 192748 - DNA, 271 bp, Glycine max
cttgttctagtctttgcatttctcttcctcagttgtgtgtatgcacaagacacaacaatccatgtgcctgcaatcataacttttggtgattctgctgtggatgtagggaacaatgactatcttcccacccttttcaaggctgattaccctccttatgggagggactttgttaaccaccaacctactgggaggttttgcaatggcaaattagctactgatttcactgctgacacattgggtttcaagacctatgctccagcatatcttagcc

SEQ ID NO: 192749 - DNA, 278 bp, Glycine max
ggaaaaccctaagagatgaagagaactcctatcttgttccctctcttctttcttctttgtgccttcacctcatatctaccttcagccaccgctgatgatgatcatgtgtacgacactgacggcgataagcttcaatacggtgtcaattatttcgtgttgccagtgataagaggaaatggcggtggaatacaagtagcaaaagcaggaaacgaaacttgccctctgactgtggtgcaatctggcaacgagctctctgaggggttaccgataaagattgc

SEQ ID NO: 192750 - DNA, 277 bp, Glycine max
gcagcagagccctgatatcgcccagggtgtgcacggtcacttcaccaagcgcccagaggaggttggtgctggtgacctgggtcacatgtttggctatgccactgatgaaacccctgagtacatgcccctcagccatgtccttgcaaccaaactcggtgctcgcctcaccgaggttaggaaaaatggtacctgtgcttggctgaggccagatggcaagacacaagtaactgttgagtactacaatgacaatggtgccatggttccagttcgtgtccac

SEQ ID NO: 192751 - DNA, 192 bp, Glycine max
tatcccacgagatcttaattgatctataggcaaggcgcattgtctccgacaatattcactccgggaatggcttccctaccctttacgttgatgatcaagtcgttgccatagagctgccactgaaatacggtcctttcattgagtcagtgaataagagagggttgattctctctgatgtggtgtgttccacat

SEQ ID NO: 192752 - DNA, 277 bp, Glycine max
cttttgctgagaagcactatgctgatttgtctgccaagcctttgcttagtggtttggtggattacattatctctggcctcgttgttgccatgatctgggagggcaagaatgttgttacaactggccgaaagattatcggagccacaaacccagctcaatctgagcctggaactatccgtggtgactttgccattgacattggaaggtatagacttgttttcatcatcgttcaagcaagtttacgttttcaaatcttttgttttaacacatgaatatg

SEQ ID NO: 192753 - DNA, 273 bp, Glycine max
ctagctctgtcgttccgtcgttgagatggacttcggtggaaccctgacctccgctctctcgttcttctctctctcttgtccatcgcttccgtcaatgtcttcttcccagagcgtttcgatgacgggtgggaaaatcgatgggttaaatcagattggaaaaaagatgagcacgtggcttgggagtggaaccacacctctggtcaatggaatggagacgctaatgacaaaggtattcaaaccagtgaggattacagattctatgctatttcagct

SEQ ID NO: 192754 - DNA, 281 bp, Glycine max
  unsure (1)..(281): unsure at all n locations
ggattagcgagtgagatcctccatggaagatatcggtccgaactcatgcacgaggcaagtggcagagaagaaagcaagacctcaagagcaattgaattgtccaaggtgcagttcaaccaacacaaagttctgttattacaacaactatagtctcacacagcccagatacntctgcaagacttgtagaaggtattggacagaaggagggtctctcagaaacgttcccgttggaggtggctctaggaagaacaagagggtcacctcatcaaaggttcntcctg

SEQ ID NO: 192755 - DNA, 278 bp, Glycine max
aaacgctattgagagtaaaatggcggattcagtgtcggtggacatggaagccatgtctcctccacccgaggaacactgtgttagaactcgtcatggttgtgtctcagttgctgtgtatggggaccaggacaagccagcgcttatcacgtatcctgatttggctttaaattatgtctcctgctttcaggggttattattttgtccagaagcctgttcattgctgctccacaatttctgcatagctcatatcagtccacctgggcatgagttgggagctg

SEQ ID NO: 192756 - DNA, 280 bp, Glycine max
gtttatcgtgaggagaatatgaagttgtttgtcttctttgttgctgcagtagttttcgtagcatggccatgccatggcgcaggctaccaaaggttccctctccgaatgaaaactggctatggtgagcgttcttcggaggtaaaatgcgcaagttttaggcttgctgtggaagcacacaacatccgagcctttaaaaccattcctgaagagtgcgttgaaccaacaaaggactacattaatggcgaacaatttagatcagactctaaaacagttaaccaac

SEQ ID NO: 192757 - DNA, 279 bp, Glycine max
tccatctcttgcttcttgcttctattacttgcttctttcttcaccatgtcacttgctgggaaaatcaccactgaaattggggttcatgcaaccgctgcaaagtggttcaacctctttgcaacacaacttcatcatgttcaaaaccttactgatagagtacatggaaccaagctgcatcaaggtgaagactggcatcacaacgagacagtcaaacactggacttataccatagatggtaaggctacaacatgtctggagagtattgaatccattgatgaa

SEQ ID NO: 192758 - DNA, 276 bp, Glycine max
gtcttcataaacgccgcccaaaacttctcatacccttttattcattccattcgtttctagggttttcttttctttgccgagaaaatgagagagtgcatttcgatccacattggccaggccgctatccaggttggaaacgcctgctgggaactctattgccttgaacacggcattcagcccgatggacagatgccgagtgacaagaccgttggcggaggagacgacgccttcaacacatttttcagcgagaccggcgccggaaagcacgtgccccgc

SEQ ID NO: 192759 - DNA, 120 bp, Glycine max
agcacacctatgtttctcatgtctcggaagattaaatcacttggtgtcaaatgggttatctcaggagaaggatctgatgagatctttggagggtatttgtacttccacaaggcacccaat

SEQ ID NO: 192760 - DNA, 276 bp, Glycine max
tcggtgctccgctgaattcggttgtggcccctgcgctccgctgcaattttacactcaaaaggacctcatgtctaacatagaggagaacaaagatctgggacagatggacgtggatgcatctgatgagtcagctaacatgccatcaccccaaaagcaggaggagtctgtaaagaaaaagtatggaggaatgctgcccaaaaagccaccactcatatctaaggaccatgaacgtgcttacttcgattctgcggattgggcacttggaaagcaaggcgg

SEQ ID NO: 192761 - DNA, 276 bp, Glycine max
cccacctccacctgacaagtctccagctccaactccttattactacaagtctcctccaccaccatccccatcccctccacccccttactatgtgagccctccactaccttctccatctcctcctccaccataccattacacatcaccacctcctccttccccagctcccgctcccaagtacatttacaaatcacctccacctccagtttacatatatgcttctccacctccacctatctacaagtaagttcgaattgcggaagaccattcacgata

SEQ ID NO: 192762 - DNA, 276 bp, Glycine max
  unsure (1)..(276): unsure at all n locations
gcccaatccagcataagcccagcatggccaccgcaacagcaaccgccanntcgtccttcatggggacgcgcctcctggaggcccactccgcggcggggcgggtgcaggcccggttcgggtttggcaagaagaaagccgccgccccgaagaaagcttccagggggtcgggctctagctccgataggcccctgtggtatccgggcgccaaagcgcccaactacctggatgggagccttgtcggagactacggattcgacccatttgggctaggaaccc

SEQ ID NO: 192763 - DNA, 274 bp, Glycine max
catagagaaagcaactgctgagattagtatcttgaaggtagctgctacatcattgaaattggaacttgaacaagaaaaagcaactcttgcctccattaggcaaagagaaggaatggcctccgttgcagtggcatctctggaagctgaattggaaaagaccagatcagaaatagctttggttcagatgaaggagaaagaagctaaagagaaaatgaccgagcttcccaagaaactacaactaacagctgaagagactaatcaagccaacttgctt

SEQ ID NO: 192764 - DNA, 270 bp, Glycine max
ctgcctgtcaacggaggcactgaagaagtgctcatcaggaagagcgggttctctgagactgaaactggtcatgaagatgagtctgccaccactgtggatttgatgcttaatctttcttctaaggaggccgcaaccactgctgctgctgctgcagatccaactgataagcacaagactttgcctaaggagaagacccttctgccagcagatcctgctaagcctccagccaagacgcaggtggtgggttggccacctgtgcggtccttccgg

SEQ ID NO: 192765 - DNA, 271 bp, Glycine max
atttccttccccagaaattgatatgtatggcagatttgaaaatgttgacgggtatttatttttgagtctgggtgttagttcaaaacaaaatgcatgggcagggcctgatcattggaagtatcgaaaatccaaagtctcagaggttcatcctacttctgaagatgggtcgaccctaaaaagtagacagccaaagagtaagagacaaactgaagttgatttaaatttcacaaattctcttgagaaaaaaatgctagatacattttctcctccc

SEQ ID NO: 192766 - DNA, 273 bp, Glycine max
agatgagtcccatgatgaagagcatgctgccacactacttagagaccatagacacatatggaatcacatatttagcttcataaactccatgtcacttaaatgtgtggttgacttaggcataccagatatcatacacaactatggccaacccatgccactctcaaacctcattggttcactaccaatccacccatccaaaacttgcctcgtccatcgcttgatgcgaatcatgatgcattctggcttcttctctccacaaagcatgacttggag

SEQ ID NO: 192767 - DNA, 271 bp, Glycine max
aggaggaggaggttctgatcttctttctttgttgtctggttccctttcttccttctaccaatttcgagatccgaaaccggcatcagatccgatccgaaatgtacggattcgaagctctcaccttcaacatccacggcggcttcctagaggccatcgtccgcggccaccgcgccggcctcctcaccaccgccgattacaacaacctctgccaatgcgaaaccctcgacgacatcaagatgcacctctccgccaacgagtacggtccttacct

SEQ ID NO: 192768 - DNA, 270 bp, Glycine max
cggagtgtcaaatggcaagcccaccatagttaacttagctcagcatacctactggaacttagctggccacaactcagggaatatacttgaccattcaattcagttatgggctaatcatatcacacctgtgaacgagaataccgtgccaaccggtgaaatcatgccagtgaagggtaccccttttgattttacatcttttaatagaataggcagcaccatgagtcaggttggactgggatatgatcacaattattttgttgattgtgggga

SEQ ID NO: 192769 - DNA, 270 bp, Glycine max
gggtgcaccgatgatggcgcaagccatgacatgcaatgatgtgacggtgaacatggcacagtgcctatcctacctgatgcagggaggaacaccttcaacactttgctgcagcggagtcaagaacattcttggctctgctgtcaccaccgttgacaaacaaactgtgtgcaactgtctcaaggcggatgctgctaggtacaacatcaatgaccagtatgctcaggcactccctggtttctgcaaggtcaatgtcccttacaagatcagccg

SEQ ID NO: 192770 - DNA, 270 bp, Glycine max
ggtgtgtgttatggcatgctgggcaacaatctaccgtcagcaaacgatgttataggtctttatagatcaaataacataaagagaatgagactctatgatcctaatcaagctgctctagaagcacttagaaattctggcattgaactcattcttggggtgccaaactctgaccttcaaggccttgccaccaatcctgacacttctcgtcaatgggtgcaaaaaaacgtgttgaacttttggcctagtgtcaaaatcaagtacgtggcagtt

SEQ ID NO: 192771 - DNA, 280 bp, Glycine max
tgctcgagctgcaaacaggttatttcagtttatggcgtattaatactgctactaataactttgacccagcaaataagataggtgaagggggctttggaccagtatacaagggtgtactatcagatggtgctgtgattcctgttaagcagctctcctccaaatcaaagcaagggaatcgcgaattcatcaatgaaataggcatgatatctgctttgcagcatccaaatcttgtgaaactttatggctgttgcattgacagaaaccagttgctgctagtata

SEQ ID NO: 192772 - DNA, 278 bp, Glycine max
aattcagctcaatcgactctatgtagatacatgtttactttgttgacgcagtagttttggtagcatggccatgccatggcgcaggctaacaaaggttccctctccgaatgaaaactggctatggtgagcgttcttcggaggtaaaatgcgcaagttttaggcttgctgtggaagcacacaacatccgagcctacaaaaccattcctgaagagtgcgttgaaccaacaaaggactacattaatggcgaacaatttagatcagactctaaaacagttaac

SEQ ID NO: 192773 - DNA, 265 bp, Glycine max
gtccttacttgcaacaatgaagcttgtctttggcaccctactattatgttctcttcttctaagcttctctttcttggagccagtcatagcctatgaagactcatcttattgcagcaacaagtgtgcggacagatgctcatcggcaggggttaaggataggtgtgtgaagtactgtggaatatgctgtgctgagtgcaaatgtgttccttctgggacctatgggaacaagcacgagtgtccttgctacagggacaagctcaacaag

SEQ ID NO: 192774 - DNA, 262 bp, Glycine max
gcagcctccaattcgtgccactctcttcaaaatggccgttaccttctcaaatctccacacagaatcagttcccaagtccctcgacgacttcctctctgggaaggtctacgtttctggggatcagttcacaaaggacgacatcaaagtgtatggtgctgtcttggagaagccaggtgactcttttcccaatgctgccaagtggtacgaggttgtctcatctcagcttgctgcaagcttccccggcaatgctcaatgggtgaga

SEQ ID NO: 192775 - DNA, 265 bp, Glycine max
gcaagattctgttcatcggagggagtggttacatcggaaaattcatcgtggaagccagcgccaaagctggccacccaactttccttttggtgagggagtccactctctccaaccccgcaaaatcacccctcatcgacaatttcaaaggcctcggtgtcaatcttgttttaggagatctatacgatcaccaaagtttggtgagtgctataaagcaggtcgatgtggtaatttctactgtaggacacctgcagctagctgatcaaga

SEQ ID NO: 192776 - DNA, 265 bp, Glycine max
gtggtttgacacctcaatgtgcgattattgtggcaactatcagagcactaaaaatgcatggtggagggcctgcagttgttgctggaagacctcttgaccatgcatatttgactgaaaatgttgccctggttgaggctggttgtgtgaacatggcacgacatatatcaaatacaaaatcttatggtgtaaatgttgtagttgccatcaacaagttttcaactgacactgaagccgagctaaatgcagttcgaagtgctgcattagc

SEQ ID NO: 192777 - DNA, 258 bp, Glycine max
ctactctacgctctaaaccctctctctctctctctctcgatctatcatggctttgcccaatcagcagaccgtggattaccctagtttcaaactcgtcatcgtcggtgacggcggtacaggaaagacaacgttcgtgaaaaggcatcttaccggtgaattcgagaaaaaatacgaaccgaccattggagtggaggttcacccattggatttcttcacaaactgcggaaagattcgcttctactggtgggatactgctgg

SEQ ID NO: 192778 - DNA, 268 bp, Glycine max
ctttagccaagagtccctagccaaaaaattaacatggcatggtcaacttcctcctctagcacccctcatcaaaagcatgaagtgttcctcagcttcagaggtgaggacacacgctacaccttcactgggcaccttcatgcctctttaacaagactccaagtcaacacatacattgactacaaccttcagagaggtgaagagatatcatcctcacttcttagggccattgaggaggcaaaactctcagtcgttgttttctccaaaaact

SEQ ID NO: 192779 - DNA, 271 bp, Glycine max
gccctaactacgcacgcactcattcttgagaaagctcaatattcattcgtccatggcactctcttctcgtctcttttccaaatccaaattgatctatggctgtcaaatacttctgcaaaaggagcatgctattccagttcgtcactttgctaaagagtctgcccctcctgcccttaagggagatcagatgctgaagaacatttttgtggaggtgaagaacaaatttgagactgccataggaatattaaagaaggagaagatcaccattgac

SEQ ID NO: 192780 - DNA, 272 bp, Glycine max
gctacccgctgagtttaagcatatcaataagcggaggaaaagaaactaacaaggattcccttagtaacggcgagcgaaccgggaaaagcccaccatgaaaatcggtcgccctcggcgtccgaattgtagtctggagaagcgtcctcagtggcggaccgggcccaagtcccctggaagggggcgccagagagggtgagagccccgtcgtgcccggaccctgtcgcaccacgaggcgctgtcggcgagtcgggttgtttgggaatgcagcccca

SEQ ID NO: 192781 - DNA, 263 bp, Glycine max
ctcaaccttctttcttcttatatatcgaacatggctaagtatcattcaagtgggaaaagctcttccatgactgctatagccttcctgtttatccttctaatcacttatacaggcacaacagatgcacaatccggggtatgttatggaagacttggcaacaacttaccaacccctcaagaagttgtggccctctacaatcaagccaacattcgcaggatgcgaatctacggtccaagcccagaagtcctcgaagcactaagagg

SEQ ID NO: 192782 - DNA, 173 bp, Glycine max
ctcgagccggcttaattagtccatgcatcttgagcaccatgagaatgagattgtgtataaaataaattatcatgtgctgtgtgttgtgcaagtactaccttctctagctagattgctagagctagaatttcaacctacctatgtgtactgataagatctgcttccacactaca

SEQ ID NO: 192783 - DNA, 262 bp, Glycine max
atcacggccctgttgttctccccagtggcgctttcggaactgtgcaacccacaggacaagaaagtgctgctccaaatcaagaaggacttcaacaacccttacctgctagactcctggaaccctaacaccggttgctgcaactggtactgcgtccagtgccaccccgaaacgcaccgcatcaactccctcgtcatattatcctctgttccccaaaccaatttatccgggccaataccaccctccgtcggtgacctaccttttc

SEQ ID NO: 192784 - DNA, 259 bp, Glycine max
gttttcgggacgaagaacaagatggtgtcatgttctggaatctgcgcaaagcgggtggtggtggacgcgcgccaccacatgctgggtcgtctagcctccatcgtggcgaaggagcttctgaacggccagaaagtggtggtcgttcgctgtgaagagatttgcatctcgggcgggctggtgaggcagaagatgaaatacttgaggttccttcgcaaacgcatgaacaccaaaccctcccatggccccatccacttccgtg

SEQ ID NO: 192785 - DNA, 262 bp, Glycine max
ggaactctttgactgctccagtggcagttccaagcacaagaagcgcaacaattgcagacggtggaggtgaaagtgaagatggactgcgaaggatgcgagaggaaagtgaggaaggcggtggaggggatgaaaggcgtgaaccaggtggatgtggagcgtaaggccaacaaagtcactgtggtcggctacgtcgaggcctctaaggtggtcgcccgcatcggtcaccgcaccggcaagaaagcagagctctggccctacgtcc

SEQ ID NO: 192786 - DNA, 257 bp, Glycine max
gtctgctatgtgtgcagtggtggttgtagcacttcttcttctggcggaggtggggcccatggctgaggctgtgacatgcaccccaacagagttgagtccgtgtcttccagcaatcacttccggtgctagaccttccaatgcttgttgcacgagtctgaagcagcaaaaaccatgcttatgtggctacctcaaaaacgctagcttgaagcagtatgttaactctcctaatgcccgaaaaaccgttgcttcttgtggga

SEQ ID NO: 192787 - DNA, 265 bp, Glycine max
ctggctttcaacaatgtcatgactctgtttatgaaactgggtgaaccccagaaagtgcctcagctagtggagcttatgaaaaagaggaccattcccatgtccccattcacatatcatatctggatgaacagctgcgcctcttcaaacgatcttggtggggcggagagagtctatgaggagatgaaaactgaaaatgaaggccaaattggttggcacacttacagcaaccttgcttctatttatgtaaagtttaaggactttgaga

SEQ ID NO: 192788 - DNA, 268 bp, Glycine max
cctcgagccgaatcggctcgaggaagagcatcacttcgattctcaggcggatgcgggagcgtcccagacgtatcctcagcaggatggtaccattcgcaagaatggctacatcgtcatcaaatccaggccttgcaaggttgtagaggtctctacgtcaaagacaggcaagcatggacatgcaaagtgtcactttgttgcaattgatatttttaatgggaaaaagcttgaagatattgttccatcatcccacaactgtgatgttccacat

SEQ ID NO: 192789 - DNA, 287 bp, Glycine max
ttcggctcgcactcgagccgattcggctcgacccagagagcgcgtcttaataaacgctcttctctgaacacccccatttcttttcttcactcttctctctctttcgcttcttcgatcttcgatcttcgtcgctgaaaatgagagagtgcatttcaatccacatcggccaggccgggattcaggttggaaacgcctgctgggagctttactgcctcgaacacggcattcagcctgatgggcagatgccaagtgacaagaccgttggtggaggtgatgatgctttcaac

SEQ ID NO: 192790 - DNA, 275 bp, Glycine max
agaaggaggagttcttgagagaaaacggcgacaacgaaaaccgttccgtctcgcggagtgacttccctcacaacttcatcttcggagttgccacttctgcatatcagatagaacgtgcttgtaaggagggtggtagaggtcctagcatatgggatgcctttacacacacggaaggaaaacattcttgacaaaagcaatggtgatgttgcagttaatcattatcatcggtacatggacgatattgatcttatagccaagttgggatttgatgctta

SEQ ID NO: 192791 - DNA, 280 bp, Glycine max
attggtacacttgtgttgtgcctctaattaaatctaagaagaaatgtctggggtttgggttttcaagaacggtgtggtgaggctagtggagaaccatggctcagatcgcaaggtgttggttcacactgcaagcaacgaaatcatcacttcctatgcagttttggagcacaagcttacctcactggggtgggagcgttactatgatgaccctgatcttctacaattccacaaacgctccaccgtgcatctaatttctcttccaagggatttcaacaagttc

SEQ ID NO: 192792 - DNA, 275 bp, Glycine max
gccggcctcaaattcctgtcccttttccttctcctgccggggacattaccatacttgctggagattggttcaagcttgaccaccgaagactgagacgactcctagagaatggtcataatctccccttccctgatggccttcttatcaatggacgtggttggaatggaaacaccttcactgttgatcaaggtaagacttatagattcaggatatcaaatgtggggctcacaacatcagtcaacttcagaatccaggggcacagtttgaaacttgtg

SEQ ID NO: 192793 - DNA, 275 bp, Glycine max
ctcttctctcttccttttttgatcacacgcacacagttacgctcttcaaatctatctcttctcagcgattcttgcttcaagttccagaaatgggtgtggcccaaaacattcccgatgcggaggagggaaccttggagattggaatggaatacagaactgtttcttccgttgctgggccattggtcattcttgataaagttaagggacccaagtttcaagagattgttaacattcgcttaggagatggtactactcggcgtggacaagtgctagaa

SEQ ID NO: 192794 - DNA, 271 bp, Glycine max
gcgggttactgtctgttcaagctaccatctctctctctctttcttagtgcctccttgccagaagttaaaatggcccaagaaactttcctattcacatctgaatcagtgaacgaggggcaccctgacaagctctgtgaccagatctccgatgctgtgctcgatgcatgcttggagcaggaccctgacagcaaggttgcctgtgaaacctgcaccaagaccaacatggtgatggttttcggagagatcacaaccaaggccaacgtggactatg

SEQ ID NO: 192795 - DNA, 262 bp, Glycine max
ggcgatcctagcactctcttctgcagctttcgccgacagcttcattcaccatggctgagcaaaccgagaaggcttttttgaaacaaccaaaagtgtttctcagctcgaagaaaactgggaagggaaagagacccggaaagggtgggaaccgcttttggaaatccattgggcttggatttaagactcccagggaagccatcgaaggaacctacattgacaagaagtgccccttcactggcaatgtttccatccgtggccgtat

SEQ ID NO: 192796 - DNA, 262 bp, Glycine max
ctcgagtttcattctcacttgtactcatctctttttcacaacttatacagccccttctgatctaatggcagttccagtgattgatttatccaagctgaatggtgaagaaagaaccaaaactatgtcacagattgctaatgggtgtgaagagtggggattttttcagttgatcaaccatggtattccagaggaactcactgcacacggtgaagaaggttgcctctgagttctatacgctggaaagagaggagaatttcaagaa

SEQ ID NO: 192797 - DNA, 282 bp, Glycine max
ttcggctcgagccgtaacctccgagctctgcaccgaagaacgaagccatggggaagacacatggaatgggcatctgctcgcaagctcaagtcccaccgcaggaggcaaaggtgggctgacaagtcatacaagaaatcacatcttggaaatgaatggaagaaaccttttgctggttcatcccatgccaagggaattgtccttgaaaagataggtattgaggctaagcagcccaactctgccattcgtaagtgtgccagggttcaacttatcaagaatgggaag

SEQ ID NO: 192798 - DNA, 156 bp, Glycine max
attctcgccattgacatctacttccctcccgcttgcgttcagcaggaagcattggagactcatgatggtgcctgtcaagggcagtataccattggacttggccaagactgcatgtcattctgtaccgaagtagaagatgtcatctcaatgagtttg

SEQ ID NO: 192799 - DNA, 267 bp, Glycine max
gggaattgcacttcaaggcgtctcgtagggctaatccgcctcacgagggtcaccaacggcacgtgcctttagggggccgaggccccctactgctggtcggcaaacggacggcgggcgcacgcgtcgcttctagcccggattctgacttagaggcgttcagtcataatccaacgcacgactgcttcgcgccactggcttttcaaccaagcgcgatgaccaattgtgcgaatcaacggttcctctcgtactaggttgaattactattgc

SEQ ID NO: 192800 - DNA, 158 bp, Glycine max
ggcatcccaatattgtcaggttcaaggaggtaatattgacccctacacatttggctattgtgatggaatacgcttctggaggagagttatttgagcggatatgcaatgcaggacggtttagtgaggatgaggcacgcttcttcttccaacaacttata

SEQ ID NO: 192801 - DNA, 261 bp, Glycine max
actcgagccgaatcggctcgagaccgtgggcaactacgataacaagcttgattgggagttactaacaagtggctcaatcaacccctcgattgctctctcgggtatattggatcttaagggagtggatattaagcacaagagtgagatcaagagcgatcaacatggtatcttggtgtcggcaaacagcattggtgtttaccacgaccacttctacatttaccatcttgaccttgacattgatggtgttgccaactcttttga

SEQ ID NO: 192802 - DNA, 260 bp, Glycine max
tggcactatgcgaccatcagtcaatatgaatacgatcttcacaacaaggtgtcactagattggcttctagccttaggtccaagcttgggaattgctagagtcccaggaataggcctagtgttcactgacctcaccactggcatcccagcaaacttctcccgctttgttaccaacctccctgcatatcaccgcatccttgttttcgtgtgtgtaaaatcagtgcctgtccctcatgtccctgctgctgagaggtatctggt

SEQ ID NO: 192803 - DNA, 263 bp, Glycine max
ccgtggcatcccagatcatttgctgttaaggatgagatattctgcttgtctgagggggctctagacaatttgggcagcctgagacaacagtatggactggccaagtcagccaatgaagtggttttggtgattgaggcttacaaagctttacgtgatcgagcaccataccctgccaatcgtgttgtatgccatctcagtgggagctttgctttcatagtttttgacaagtccacttctaccctttttgtggcttctgatcaagc

SEQ ID NO: 192804 - DNA, 127 bp, Glycine max
taggtattcggctcgaggaatatgggtatgtccttggaagctcttttgcctggagtgctgatcatattaagcctgaagacattggtagtttgcatctaatctcaaaggaactttcactgaagattgt

SEQ ID NO: 192805 - DNA, 273 bp, Glycine max
cggctcaatctgtcgtccggaagcagggtggcctcagtcacacgtgcagggttcacagttagagcacagcaacaacaagtgaatggtggtgcggtacaaagtagccgtagggcagtgctttcacttgttgctgctggtttgaccactggctcttttgttccagctgtgcttgctgatgccaaacctatcaaagttggaccacctcccccaccttctggcggattacgtatgtctctctcatactcctccctctccttctcctcttataattca

SEQ ID NO: 192806 - DNA, 265 bp, Glycine max
atctttaacagtgcacgagactaaactgaaggttgacctaactcagtatgtagaaaagcatgaatttgtctttgatgctgttttaaatgaagaggttacgaatgatgaggtgtatcgtgaaacagtagagcccatagttccaataatatttgaacgcactaaggcaacttgctttgcatacgggcaaacaggaagtggaaaaacttacacaatgaagccactgccacttaaagcatcaagggacatccttagattgatgcatcat

SEQ ID NO: 192807 - DNA, 270 bp, Glycine max
gtcacaaccatcatattttggaccatttacgcacagttgatcaccttttcagttgagcaagcctccactatggagaggaatattgggagtttccaaatccctgcaggctctgtcacagtcttttttgtggctgcaatactaatcactctggctgtctatgaccgactcatcatgcccctttggacaaagtggaacggcaaaccaggtttcactgacctacaaaggatagcaattgggcttgtattttccatttttggaatggcggctgct

SEQ ID NO: 192808 - DNA, 269 bp, Glycine max
gggcaaatggttcctgaatttgaagaggctgcatttactgcacctttaaaccaagttgtaaggtgcaaaactaaatttggatggcacctgctgcaggttttatctgaaagggaagaatcaattcttcaagacattcaacctgatgagctgcatatgaaaattcacgatcccagctttttggatgaggcacaattaattgatgtgcgagcgcctgatgaagtggccaaagcatctttgccaggatttactgttcttcccctccgacaatt

SEQ ID NO: 192809 - DNA, 269 bp, Glycine max
tgctccagtagccggcactaaacaacatggcggacaaggcagtcaccatccgaaccaggaagtttatgacaaacaggcttctctccagaaagcagttcgtcgttgatgtccttcatccagggagggctaatgtttccaaggctgaactgaaggagaagctgggaagaatgtatgacgtgaaagacaccaacactgtatttgtcttcaagttccgaactcattttggtggtggcaagtccactgggtttggtttgatctatgattcagtt

SEQ ID NO: 192810 - DNA, 263 bp, Glycine max
acgaaactcaagaagatggagaaagcgatcaacagacagaagattttgcttcatcatctcaacccttcatcatccacccaccccaacgaatcatcctccctccatgcttcagcatgtgtggcgggggatagcgctgcttatcaaaggacatcgacattcggggacgatgttgtgatcgtggctgcttatcggactgctcattgcaaagctaaacgaggtggtttcaaagacactcttcctgatgatctactggctcctgtttt

SEQ ID NO: 192811 - DNA, 259 bp, Glycine max
ctaataccacaaagacttatgctacaagaaccatatttttcttgaaaaatgatggaactttgacgccattggccattgagttaagtaagccacatcctcagggtgaagcatatggtcctgttagtgaagtctacgtgccttcgagtgaaggagttgaagcttacatttggttactggcaaaggcttacgttgttgtgaatgatgcttgctaccatcaaatcattagccattggctaaacactcatgcggttgtggagcc

SEQ ID NO: 192812 - DNA, 279 bp, Glycine max
ttcggttcgagttcagttcaacctcaatctttatgtggtgttgttactgctgctcttttctcttttcttttctctttagttctctcttcccctttctttttctttttcttcttcttctgagcttgtttaagcttttcttccattaacatattatcacaatgtgtggtattcttgctgttcttggttgttctgatgactctcgagccaaaagggtccgcgtgcttgagctctctcgcagattgaagcaccgtggccctgactggagtgggctccatcaac

SEQ ID NO: 192813 - DNA, 268 bp, Glycine max
tgaagagggccctgccggaagaagataaataccgtctttcattttccggcgatctcttttttcttccatcaccgttttccggctatccctaatccttaacagaaatgacgacatcaaggcgccttgcggacaggaaggtggagaagtttgagaaaaacatcaccaaaagaggatttgtgccagacacaaccactaaaaaggggaaagactaccctgttggcccagtgctgctcggtttcttcgtctttgttgtcattggatcatctct

SEQ ID NO: 192814 - DNA, 270 bp, Glycine max
tccatttccattttctctctcacttttcaagaatcgtaagctataggaaagtcttacccaactgtgagtgctgattaccagaaggccgttgagaaggcgaagaagaagctcagaggcttcatcgctgagaagagatgcgctcctctaatgctccgtttggcatggcactctgctggaacctttgccaagggcacgaagaccggtggacccttcggaaccatcaagcaccctgccgaactggctcacagcgctaacaacggtcttgacatc

SEQ ID NO: 192815 - DNA, 215 bp, Glycine max
attcggctcgagaacccagtgatctcaccctcactctgtttctgatttctcactcttcgtttctcgatcggttcatcagcgtgtgtctcagccatggcgtttccctacatagaatccgttgtcggatttatgatattaatgtacatttttcaaacttacttggatgtgcgacaacatagggccctcagacttcctactcgtccaaagaccttagg

SEQ ID NO: 192816 - DNA, 269 bp, Glycine max
gagcaacgctgtcactgagaaaggatctctatctacgaaggagcggaataaaacccttctctctgtgattaagagaatggcttcagatcggaaacttcacacttttgaggaggtggcaaagcacaaccagaccaaggattgctggctcatcatttctggtaaggtgtatgatgtcacccctttcatggaggatcatcccggaggtgatgaggttttgttatctgcaacagggaaagatgcaaccaatgactttgaagatgtggggcaca

SEQ ID NO: 192817 - DNA, 258 bp, Glycine max
ggccgaagaggggaaaggttccatgtgaacggcacttgcacatgggttagtcgatcctaagggcagggggaagcccgtctgatagcgctctgtgcgcgtactccgaaagggaatcgggttaaaattcctgaaccgggacgtggcggctgacggcaacgttagggagtccggagacgtcggcgggggccccggaaagacttatcttttctgtttaacagcctgcccaccctggaaacggctcagccggaggtagggtcc

SEQ ID NO: 192818 - DNA, 255 bp, Glycine max
ctgctccgtaccagtttcactgcataaatttgagagaaaactctgcaaacatgttggtttatcaggacctccttacaggtgatgagcttctctcggactccttccgttacaatgaaattgagaatggaatgctgtgggaagttgaggggaagtggcttgttaagggagcagttgatgttgacattggtgcaaacccttctgctgagggtggagaagatgagggagtcgatgacgcagctgttaaggttgttgaca

SEQ ID NO: 192819 - DNA, 258 bp, Glycine max
agggcactatcgtcatatcgaggaaagtcttagggtttcgcctcacaaggtggcatatataatagcccacctacatcttccccgaaattctgttccgcagaaaaccttagcccaaccggatcttcacgattaggagatggctaagtcgaagaaccacaccgctcacaaccagtcctacaaggcccacaagaatggcatcaaaaagccaaagaggcaccgccacacttccaccaaagggatggatccaaagtttctgag

SEQ ID NO: 192820 - DNA, 257 bp, Glycine max
cgcttcggttgatgctgtttatgctgcattggagacagcaggaggcgggtcattgaacatagtcgtgcctgagagtggatacgcctcttctggtggaactgcaacttcacttgataatgcaagaacttacaacacaaacttggttcggaatgtgaagcaaggcacccctaaaaggcctggtgcaccccttgaaacttatgtgtttgccatgtttgatgaaaatcagaagcagccagagtttgaaaaattttgggggc

SEQ ID NO: 192821 - DNA, 262 bp, Glycine max
cgcggggaagtcagaaacagacaaaaatggcgccaaacgctctctttctcttctctgtcctcgccattcccctcctccttctgccctgcccaaccgccgccggccacgaccaccgcgacgccctccgcaaaagcattctcttcttcgaaggccagcgctccggcaaactccccgccgaccagcgcctccgctggcgccacgactctgcattgcacgacggcgccaccgccggagtggacttgagcggagggtactacgacgc

SEQ ID NO: 192822 - DNA, 269 bp, Glycine max
cagttctatcagactgcacttcgcgccactctctgcaaaatggccgctaccttctcaaatctccagacagaatcaggtcccaagtccctcgtcgacttcctctctgggaaggtctacgtttctggggatcagttcacaaaggacgacatcaaagtgtatggtgctgttttggagaagccaggtgactcttttcccaatgctgccaagtggtacgaggttgtctcatctcagcttgctgcaagcttccccggcaatgctcaaggggtgag

SEQ ID NO: 192823 - DNA, 159 bp, Glycine max
cggctcgagctcgagccgaatcggctcgagcacccattcatacgtggtgttgttactgctgctcacttctattttcttttctctttagttctctcttcccctttctttttctttttcttcttcttctgagcttgtttaagcttttcttccattcaaaat

SEQ ID NO: 192824 - DNA, 267 bp, Glycine max
ctcgagccgaccaaatcctctaattcaagtttgcaccaagttttcctgagaaaatgtctggtacgtggaaagggtggaaagggtttgggaaagggaggtgccaagaggcacaggaaggttcttcgcgacaacattcagggcattacgaaacctgcgattcgtaggttagcgagaagaggtggcgtgaagaggatcagtggtttgatctacgaggaaaccagaggggttctgaagatattcttggagaacgtgattcgcgatgctgtg

SEQ ID NO: 192825 - DNA, 262 bp, Glycine max
accgatctcgcgccaaatacaaattcgtgtcaacccaacccagggttccggcgagcatggccgacggtccggctagcccaggcggcggcagccacgagagcggcgaccacagccctcgctctaacgtgcgcgagcaggacaggtacctccctatcgctaacataagccgcatcatgaagaaggcacttcctgccaacggtaaaatcgcaaaggacgccaaagagaccgttcaggaatgcgtctccgagttcatcagcttcat

SEQ ID NO: 192826 - DNA, 246 bp, Glycine max
tatttctcagcgcgtaaagcatggctttgttggtggagaaaaccacgagtggtcgcgagtacaaggtcaaggacctttcccaggccgacttcggccgcctcgagatcgagctggccgaggttgagatgcccggcctcatggcctgtcggaccgagttcggcccctcccagcccttcaagggggcccgcatcaccggctccctccacatgaccatccagaccgccgttctcattgagaccctcaccg

SEQ ID NO: 192827 - DNA, 254 bp, Glycine max
tgagccttggttggatggaactttcaaagggaatggttttctctatgaaagacaatggcgtggacttgttactaaacaaggctctacagattcgactgctgattttgggtttggaatttacaatgatcaccatttccatttgggctacttcatttatggaattgctcgttcttgcaaagattgatcctcaatggggacaaaagtacaagccacaggtttattcacttgtgacagatttcatgaacttgggtcaa

SEQ ID NO: 192828 - DNA, 258 bp, Glycine max
gaaaaaagaatcctattcagacaagtttctccaacaagtggcgttgaattttatcctagctggtcgtgacacctcatcggtggcattaagttggtttttttggttggtgattcagaaccctaaggtggaagagaaaattctacgtgaaatttgtacagtcctgatggagacacgtggcaatgatgacatggcaaagttgtttgatgagcctttggcctttgaggaagttgaccgtttggtttatctcaaggctgcatt

SEQ ID NO: 192829 - DNA, 266 bp, Glycine max
ctcgagccgcgaaaatggtccttttcagcttaccaagaacttgtctcttgtgtggaatgactacggctgggacaaggcatcaaatattatatttgtagaccaacccactgggacgggtttcagctatacttctgatgagagtgacattcgccatgatgaagagggtgttagcaatgatttgtatgacttcttgcaggcatttttcaaggagcaccctcagctcactaagaatgacttttatattactggagagtcatatgctggac

SEQ ID NO: 192830 - DNA, 264 bp, Glycine max
gcgatccgagaaaaactctgtaaacatgttggtttaccaggacctccttacaggtgatgagcttctctctgactccttccgttacaaggaaattgagaatggaatgctgtgggaagttgaggggaagtgggttgttaaaggagcagttgatgtagacattggtgcaaacccttctgctgagggtggaggagaagatgagggagttgatgatgcagctgttaaggttgttgacattgttgacacattcagacttcaggagcaacc

SEQ ID NO: 192831 - DNA, 261 bp, Glycine max
tttctctgtctgcttcttcactttctctcgtttcaatcgaaaccaaaacaaaaacatgggcagaaaattcttcgtcggtggcaactggaaatgcaatgggaccactgaggaggtaaagaagattgttactactttgaatgaggctaaagtccctggagaagatgtcgtagaagttgttgtgagccctccttttgtgttccttcctgttgtaaaaagtttgctgcgccctgatttccatgtttcggcacaaaactgttgggt

SEQ ID NO: 192832 - DNA, 262 bp, Glycine max
tgaaaataaccctaagactcaagagcagcttggtaaaggttccaaaaaccattgtgaagagtctctagttacaaatacacaagttaacagtgacttcgaacccataccaagtgttaccaaatatgatgatttggaattcaagtcaagcattatcaagaacgatgattttgaatcgagaccaagtgttactaagtatgatgattttgaactcaagtcaagcgttaccaagaacaatgattttgaaccgagaccaagtgctacc

SEQ ID NO: 192833 - DNA, 256 bp, Glycine max
atgaaaatgaaggtccttgttttcttcgttgctacaattttggtagcatggcaatgccatgcgtacgatatgttccctctccgaatgaacactggctatggtgcccgtactccggaggtgaaatgcgcaagttggaggcctgctgtggaagcacacaacatctttggctttgagaccattcctgaagagtgcgttgaagcaacaaaggaatacatccatggcgaacaatatagatcagactccaaaacagttaacc

SEQ ID NO: 192834 - DNA, 252 bp, Glycine max
gcaaaagcttaattcacgtatttttttctcagagaggaacatccaaggtacctggggttacagattgtggtttggttccaagacacgtcaagaaggttgccctcattggcggaggactaatgggctctggaatagcaacagctttaattcttagcagctatcctatcatattgaaagaagtaaatgagaagttcttagaagctggtatcaataggattaaagcaaacttacagagccgtgttaagaaaggta

SEQ ID NO: 192835 - DNA, 269 bp, Glycine max
gttcgcttgcagtcacacaagaggccaatcctattcatagctcgagatgggtgaagaagtgaaggtagttgttccagaatcagtgttgaagaagcgcaagagggaggaggaatgggcgttggccaagaagcaagaactcgatgctgccaagaagaagagagccgagagccgcaaactcatctacaacagagctaagcagtacgctaaggagtacgatcaccaggagaaggaattgattcggttgaaacgcgaggccaagctgaaaggtg

SEQ ID NO: 192836 - DNA, 267 bp, Glycine max
ctgggggtaagagcaaaaagaccaaaagaacagcaccaaaatccaatgacatctacctcaaattacttgtcaagctttatcggttccttgttcgaaggactggcagcaatttcaatgctgttatactcaagcgcttgttcatgagcaaggttaacaagcctccaatttctttgtcaaggttaattaagtatacaaaggggaaggaggataaaattgctgtaatagtggggactgtaactgatgatatcagagtatatgaagttccag

SEQ ID NO: 192837 - DNA, 215 bp, Glycine max
tttctctctcacttttcaagaatcgtaagctatgggaaagtcttacccaactgtgagtgctgattaccagaaggccgttgagaaggcgaagaagaagctcagaggcttcatcgctgagaagagatgcgctcctctaatgctccctttggcatggcactctgctggaacctttgacaagggcacggagaccggtggacccttcggaaccatcaagc

SEQ ID NO: 192838 - DNA, 266 bp, Glycine max
ctctgctctcagatctcatcaaccttaacctctccgataccaccgagaaggtgatcgcagagtacatatggatcggtggatcaggaatggacctgaggagcaaagcaaggactctcccaggaccagttagcgacccttcagagcttcccaagtggaactatgatggttccagcacaggtcaagctcctggtgaagacagtgaagtgatttagcacccacaagccattttcagggatccattcagaaggggtaacaatatcttggtt

SEQ ID NO: 192839 - DNA, 261 bp, Glycine max
tgaccccaatatacttagccatatctttacttcccaaaacttgctctacaatgagtttccttcgttcttttgcaagaaacaaggatatatcaaaagtaggacgcagaggtatccattgcatgcagaaactatgtgcagataaaatatctcctgattcactagagaaggcccaaaatcgtgtgatagatgctgcactcacacttgttcgagaaaatacaaggcttaagaaagaactcgtgcatagtttgggaggtgctgtgg

SEQ ID NO: 192840 - DNA, 265 bp, Glycine max
gaattcgtaaaccctaatttcggaaagatcggcgatgactgcctccaaggatcgcgagaacttcgtctacatcgccaaactcgccgagcaggccgagcgttacgaagagatggtggaatcaatgaagaacgttgcgaatctcgacgttgaactgacggtggaggagcggaatttgctttctgttgggtacaagaatgtgattggtgctcgcagagcgtcctggaggatcctgtcttccattgagcagaaggaagaaacaaaaggg

SEQ ID NO: 192841 - DNA, 241 bp, Glycine max
gaaaatgaaggtccttgttttcttcgttgctacaattttcgtagcatggcaatgccatgcgtacgatatgttccctctccgaatgaacactggctatggtgcccgtactccggaggtgaaatgcgcaagttggaggcttgctgtggaagcacacaacatctttggctttgagaccattcctgaagagtgcgttgaagcaacaaaggaatacatccatggcgaacaatatagatcagactcc

SEQ ID NO: 192842 - DNA, 256 bp, Glycine max
ctcgagcgattcggtcgacggctcgagggggtattccaactaacaaagcatatggcctgacagcctttgaataacatggaacagatccaaggtttaacaaggttttcaacaaggggatggctgatcactccacaatcacaatgaagaaaattcttgagacctacactggctttgagggtcttaaatctctggttgatgttggtggaggaactggagccgtagtcaacatgattgtctcaaagtatcccactatcaa

SEQ ID NO: 192843 - DNA, 265 bp, Glycine max
cacaaacgcacactgaattcaaaaacatcgaaagacagaggcatggccgagcaaaccttcatcatgatcaagccagatggcgttcaaagaggccttattggcgagattattagcagatttgagaggaagggtttttacttgaaagggttgaaactcgttactgtggaccgtccttttgctgagaagcactatgctgatttgtctgcaaagcctttctttagtggtttggtggattacattgtctctggccctgttgttgccatga

SEQ ID NO: 192844 - DNA, 265 bp, Glycine max
ggcgttctatatattattgaattgacaatgaggcctgctcttgctttgcttcctcttctatttgctttcttgttagctgccactacggaatcaagaaaagatccatgggaatattggaaaatgatcatgaaagatcaggaaatgccagaaggacttcaaggtcttgtttcatttcaatctgaaaataaccctaagactcaagagcagcttggtaaaggttccaaaaaccattgtgaagagtctctagttacaaatacacaagtta

SEQ ID NO: 192845 - DNA, 264 bp, Glycine max
cggctcgacctcgagccgattcggactcgagggagtatcaaaaccaaagggccaaggagggacgattctgtgagaaactcaagatcaagaataggccaaagtttgtaggagtgagacaaagggcttcagggaaatgggcagcagagatcaaacacacatcaacgaagattaagctttggcttggaacttatcaaactgctgaagaagctgctcgagcttatgatgaagctgcatgcctccaccgaggttcaaacactcgcacca

SEQ ID NO: 192846 - DNA, 264 bp, Glycine max
atccttacccccaattattaatggtgcacattcagccatcactctggagacacagaatgtatttattgaatgtactgcaactgatctgacaaaagcgaaagttgttttaaatacaatggtaacagccttctcagaatattgtgaaaacaaatttgtcattgaaccagttgaagttatttcttctgatggcaagtcaaacatataccctgatttatctgtctacaatatggaagtttctctatcttacattactggattgattgg

SEQ ID NO: 192847 - DNA, 262 bp, Glycine max
ctcaatcaaaccctcgattgctctctcgggtatattggaaattaagggagtggatattaagcacaagagtgagatcaagagcgatcaacatggtatcttggtgtcggcaaacagcattggtgtttaccacgaccacttctacatttaccatcttgaccttgacattgatggtgttgccaactcttttgagaagacaagtttgaagactgtaagagtgacagatggaagttcgaagaggaaaagctattggacaactgaggtt

SEQ ID NO: 192848 - DNA, 262 bp, Glycine max
gaattcgtaaaccctaatttcggaaagatcggcgatgactgcctccaaggatcgcgagaacttcgtctacatcgccaaactcgccgagcaggccgagcgttacgacgagattgtggaatcaatgaagaacgttgcgaatctcgacgttgaactgacggtggaggagcggaatttgctttctgttgggtacaagaatgtgattggtgctcgcagacgtacctggaggatcctgtcttccattgagcagaaggaagaaacaaaa

SEQ ID NO: 192849 - DNA, 170 bp, Glycine max
cgagaatggggatcgaagccggggagcggaggtcgcggcgtcggcgcagaacgaagccatagaccggcgagagcgtctccggcgattggctctggagaccatagacctggcgaaggatccctatttcatgcgcaaccacctcggaagctacgaatgcaaactctgtctca

SEQ ID NO: 192850 - DNA, 268 bp, Glycine max
  unsure (1)..(268): unsure at all n locations
gtacaatgatcctgtggatggttccatctcatcanatcagggaatccgatatttgtttgaggatggatcacgattgattttccgcctatctggaactggatcagaaggtgcaacaattcgactatacattgagcantatgagaaggatccatcaaagattgggagactttcaaatgaagcccttgctcctcttgtggaagttgcattgaaactttcgaagatggaagaattcactggtcgatccgctccaacagtcattacatgaaca

SEQ ID NO: 192851 - DNA, 268 bp, Glycine max
agggtctcctcagatctcagcattgtggaccttgatgtcccatttggctttgtttttgctgtgggagccactatgaattgctatgctaatctaaccgttttagctgttgttacttggcaagtcttgtttgtctccataccaatgatttattttgcaatcagcctgcagagatattactttgcctctgcaaaagaactgatgcggctgaatggcaccacaaaatcctttgttgctaaccatcttgctgaatctgttgctggagctgtga

SEQ ID NO: 192852 - DNA, 254 bp, Glycine max
gcgaagtcgtaggagggtttcaaaagatggagaacatgcagagcttctggcaattgggcgatgaactccgtggacactcaaaagcatcggaggatcacaaatggttaatggttgcttcgaaattggcggaacagacaagattgaagggggagcgtgtgaacaaccttgatctttcaaagggccccattgaaacaaggtcaagggataaatttgggttccaggaagagaacaaatttgattctcttaacttaagc

SEQ ID NO: 192853 - DNA, 269 bp, Glycine max
ggctcgactcgaccgaatcggctcgaggagaactcccatgcagcaacaacactagcaaaatctcacactttcaaaagcttcaaaacacccaaagatcaaattcctctttgacatgcttgcttttggtgatttttgggattgtgcttctcatcgtgatcatagttcttgctgcttagtcagaggttatctcaattacattatggagcagatgcatatatactgggcagcagatagcatctcccttgctgatggtgtcacttgattggtgt

SEQ ID NO: 192854 - DNA, 258 bp, Glycine max
caaaccctctctactctttcttcttctcttcgctagggttttagcttcttcctcttcacttcgttcttctggcctctacaatgagcaacgacaaggacaccttcaacgtcgctgatctcacttccgctctcaacgaggaccatagagcagaccttgtcaatgctctcaagagcaagatacatagtttggctggacagcattctgatattctagagtcctgtcgcccaatgtcaggaagcgtgtggaggttcttagaga

SEQ ID NO: 192855 - DNA, 260 bp, Glycine max
ggcgttctatatattattgaattgacaatgaggcctgctcttgctttgcttcctcttctatttgctttcttgttagctgccactacggaatcaagaaaagatccatgggaatattggaaaatgatcatgaaagatcaggaaatgccagacggacttcaaggtcttgtttcatttcaatctgacaataaccctaagactcaagagcagcttggtaaaggttccaaaaaccattgtgaagagtctctagttacaaatacaca

SEQ ID NO: 192856 - DNA, 251 bp, Glycine max
ttctcattccccatctcctcaccttattcagccactgctaatttctagggttccgaaatggacgctggcggaaagatcaagaagggcgccggaggaagaaagggcggcggccctaagaagaagccggtttcaaggtccgtcaaggccggtctccaattccccgtcggaagaattggccgttatttgaagaaaggaaggtacgcccagcgtgtcggtaccggtgctcccgtttacttggccgcagttctcga

SEQ ID NO: 192857 - DNA, 262 bp, Glycine max
agcgatccgagaaaaactctgtaaacatgttggtttaccaggacctccttacaggtgatgagcctctctctgactccttccgttacaaggaaattgcgaatggaatgctgtgggaagttgaggggaagtgggttgttaaaggagcagttgatgtagacattggtgcaaacccatctgctgagggtggaggagaagatgagggagttgatgatgcagctgtaaaggttgttgacattgttcacacattcagacttcaggagca

SEQ ID NO: 192858 - DNA, 268 bp, Glycine max
acctcgagcgattcggctcgaggaacgcactaaggcaacttgcactgcatacgggcaaacaggaagtggaaaaacttacacaatgaagccactgccacttaaagcatcaagggacatccttagattgatgcatcatacttacaggaaccagggatttcaattgtttgtgagtttctttgaaatatatggtggcaagctctttgatcttcttaatgatcgaaaaaaactttgcatgagggaggatggtaagcagcaagtttgcattgtg

SEQ ID NO: 192859 - DNA, 259 bp, Glycine max
ctcgagcgaatcggctcacggctcgagtgcttaagtgatgctggattattccttgcattctgttgatgtttctggtcgtcgcagcttaaggaatttgttcggaggtgtggttaccttgcagggagtgcaaagaagtcttccaaggagttgtactagtcgcctcaatccaattttgtgctattttcctcagcacttaattgctggtgtcaggacaccactgtttcttctcaatgcagcttatgatacttggcagattcaa

SEQ ID NO: 192860 - DNA, 193 bp, Glycine max
caaccctacgattgtttatcatcatttgggagaaatttattcagctctcatcttcggcagctttctcttctgtgttttcttgtacatcaagggtcatttggcaccgtcttctacagattctggctcatctggaaacttaatcattgatttttactgggggatggaactttatccacgcattggaaaacatttt

SEQ ID NO: 192861 - DNA, 245 bp, Glycine max
  unsure (1)..(245): unsure at all n locations
gcgtacagaggttaaaacatatgtgccgtatgtaatcagggcaataacttcagctgtcaacgagttgattggtttaggggctcgcacactcatagttcctgggaatttaccattgggatgtagtataaattatttaacaatctatgaaaccatggataagaaccaatatgatcaatatgggtgtttgaagtggttaaatgagttcgctgaatattacaaccanaagctccanagtgaattagata

SEQ ID NO: 192862 - DNA, 261 bp, Glycine max
gggaatagtgctgcaatggcttcaagtcaggaggaggtgacccttttgggagctactggaagcccatttgtgtgcagggttcatattgccctcaagttgaagggagttcaatacaaatatgtcgaagaaaatttgaggaacaagagtgaactgcttctcaaatccaacccagttcacaagaaggttccagtgtttattcacaatgagaagcccatagcagagtctcttgtgattgttgaatacattgatgagacatggaag

SEQ ID NO: 192863 - DNA, 265 bp, Glycine max
tggaaatgtccgctgtcatttacaaggactgggttttcactgatcaagcattacctaatgatcttgtaaagagaggagttgctgttaaggacccatctgctccccatggagttcgtcttttgattgaggactatccttatgcttctgatgggctagagatatgggatgccatcaagtcctgggtgcaagaatatgtctcattctactacaagtcagatgaggaactccaaaaagaccctgaactccaagcttggtggaaagaact

SEQ ID NO: 192864 - DNA, 258 bp, Glycine max
gacttcctcggttacttcctcttttcgcatcagcaatttgaattctgtttttgttggtgagacaaataaattcagagtttcaactgtccctggcgctcatgtcggtttcattagaacgactgtagaatgtaaggcatcacgaattgggaagctaccaattcctgtgccatccaatgtcacagtcaaattggaaggacaggatatacaagtgaaaggtcctttgggagaacttgcattaagttatcctcgagaagtgtt

SEQ ID NO: 192865 - DNA, 258 bp, Glycine max
atggcacttcgttgcttggtgatgtccctttctgttctcttcactcttggtcttgcgagagaaagccatgccagagacgaagatttttggcatgctgtttggccaaacactcccattccaagtttcttgcgagatacttctaaagcctggtcctgcaagtgttgaaatcgatgatcaccctatgcaaattgaagaaacacagtacccgaaaaccttcttctataaagaagaccttcatccaggcaaaacaatgaaagt

SEQ ID NO: 192866 - DNA, 250 bp, Glycine max
cggctcgagggaggggactgttttcactcctgcacttgaaggaattaagcttgtaaaatcagagcaaggagaaattttgacccagcctttcttggatgcttgcaagcatatactgcctgttatagacaagtttggagctgctatggcccttgtctaatctgacattggtggtaacatatcgagattggaatctaagtattcctccaatccaaccaaattcaactacctgtacagtttggtacaagtagag

SEQ ID NO: 192867 - DNA, 252 bp, Glycine max
cgagcgaatcggctcgagatctatggctacccttattgctaccagcaaccactctccccaagaagatgctgaagctctcagaaaggcttttgaaggatggggaactgatgagaacactgtcatagtaattttgggtcatagaactgtgtatcagaggcagcaaatcagaagagtttatgaggaaatttaccaggaggatcttgtgaagcgcctagagtctgagatcaaaggagactttgagaaagccgtgta

SEQ ID NO: 192868 - DNA, 255 bp, Glycine max
gagatcccctttttctcctaagaaaagccatggctaagggtcccggtctctactctgacatcggcaagaaagccagggatctgctgttcaaggactaccacagtgaccagaagttcaccatcaccacctactcacccactggagttgctataacagcatcaggaaccaggaaaagtgaactgtttgtggctgatgtcaacacccagttgaagaacaaaaacatcactactgatatcaaagttgatacagattcta

SEQ ID NO: 192869 - DNA, 255 bp, Glycine max
  unsure (1)..(255): unsure at all n locations
atggganggagtntcagtccatgctgganggactcgacgaagaagggngcgtggaagaaccagggcaccactctgagaagaaacgacgactaagcgtggatcaggtgaaggctttggagaagaacttcgaagtagagaacaaactcgaacctgancgaaagttgaagctggcacaagaattggnttgcaaccaagacaagttgcggtttggttncaaaaccgtcgtgccagatggaagacnaagcaattggaaag

SEQ ID NO: 192870 - DNA, 260 bp, Glycine max
cacttcatagtaagcactatagaaaaaacgacattcattcatctatggctacccttattgctcccagcaaccactctccccaagaagacgctgaggctctcagaaaggcttttgaaggatgggggactgatgagaaaactgtcatagtaatattgggtcatagaactgtttatcagaggcagcaaatcagaagagtctatgaggaaattttccaggaggatcttgtgaaacgcctagagtctgagatcaaaggagacttt

SEQ ID NO: 192871 - DNA, 254 bp, Glycine max
cggctcgagtccatgtcgtttttgtcgttgcgactaagagttgctgcttcttccgccactcagcacttcgctccctctgtgcttcaccaaccatggccgaaatcgaagctaccgttccagatccctctcaaatcgacgtcaaacttttcaaccgctggagcttcgacgacgttgaggttactgatatgtctctggctgattacattggagtgtccccgtcaaagcatgctacatatgttcctcacactgctggt

SEQ ID NO: 192872 - DNA, 254 bp, Glycine max
gaattttaatacttaggaagtttagttttctctcttggcttctccggttggagtttccggcgaccttgtcggagattttgttgtttatttttcacaccacttgtgaaacttctcaagaaaaagaaaaaggatgtttcttgttgattggttctatggaattttggcgacccttggcctgtggcaaaaggaggcgaagattttgttcctagggttagataatttccggaagaccactttgcttcacatgctcaaag

SEQ ID NO: 192873 - DNA, 254 bp, Glycine max
agatcatagtgatcattttttaatttctcagatttatccgacgtcgctgcagatccaccaaccgttctggctgccttcagcggtgatgaaacggcaccgtttttcggcttccttggcgccgcagctgccctcgtctactcctgtatgggagctgcctatggcacagcgaagagtggcgtgggcgtggcttccatgggtgtaatgagacctgagctggtgatgaagtcgattgttcctgttgtcatggctggagt

SEQ ID NO: 192874 - DNA, 257 bp, Glycine max
ctcaggatagctggagcccgcgggcgagtcctatcgggtacagccaatgattagaggcatcgggggcgcaacgccctcgacctattctcaaactcttaaataggtaggacggtgcggctgctctgttgagccgcgccatggaatcgagagctccaagtgggccatttttggtaagcagaactggcgatgcgggatgaaccggaagctgggttacggtgcccaactgcgcgctaacctagaccccacaaagggtgttg

SEQ ID NO: 192875 - DNA, 258 bp, Glycine max
gggaagaacaaacattcaattcatggcggctgcaaagcttcaagctttatggaatcacccagctgggcctaaaaccattcacttctgggcacctacctttaagtggggcatcagcattgccaacattgctgatttctcaaaaccacctgagaaactttcctatcctcagcaaatagcggtcacagctactggaattatctggtctcgttacagcactgtaatcaccccaaaattggaacctgtttagtgtaaacattg

SEQ ID NO: 192876 - DNA, 151 bp, Glycine max
gggaagaacaaacattcaattcatggcggctgcaaagcttcaagctttatggaatcacccagctgggcctaaaaccattcacttctgggcacctacctttaagtggggcatcagcattgccaacattgctgatcttctcaaaaccacctga

SEQ ID NO: 192877 - DNA, 257 bp, Glycine max
ctgggttttcactgatcaagcattatctaatgatcttgtaaagagaggagttgctgttaaggacccatctgctccccatggagttcgtcttttgattgaggactatccttatgcttctgatgggctagagatatgggatgccatcaagtcctgggtgcaagaatatgtctcattctactacaagtcagatgaggaactccaaaaagaccctgaactccaagcttggtggaaagaacttgtagaggtgggtcatggtg

SEQ ID NO: 192878 - DNA, 266 bp, Glycine max
ctcgagccggcactataccagaatgtctcagggaagaggcagtgcatctttgcctattgtggtcactgtggtttcactactgtgccttttggaacgtgctaacgcagcaacttactccgttggaggacctgggggatggaccttcaacactaatgcttggcccaatggaaaaagattcagagctggtgatatcctaatcttcaactatgactcaacgacccacaatgtggttgctgtggacagaagtggatacaacagctgcaaga

SEQ ID NO: 192879 - DNA, 261 bp, Glycine max
cggggttacgctttgcgagtgagaattgataaacaaatcgttagggttttttggttgtgcgagtgagagtgagagagaacaatggaagacataacagagggagtgaacaacatcaacatctctgattcgtataagaaaaatcgcattcaggtctctaacaccaagaagcccctcttcttctacgttaatctggccaagagatatatgcaacagcatgatgaggtcgagctctcagctctaggaatggctattgccacagta

SEQ ID NO: 192880 - DNA, 260 bp, Glycine max
gtttctgtcggtgctcctttgtgccacttttcatgtctccttctctattatcgacggtttagttgccaacggcatactttgagttgggtccaaagccctccgccctaaaaggaacagtggtggtgggcgggagccactcgatccccgaatgggagatctccggctttgtggagtacataaaatccggccaaaagcaaggggacatgttgctcgtcgtcccagagggtgcctacgcggtgcgcctagggaacgaggcctcc

SEQ ID NO: 192881 - DNA, 259 bp, Glycine max
ctatctagaagtggaaagctgaacagaattatatacgattcgcgcgaccctgacttgagcaagatagttatggatgatctccctggagggcctgaggcttttgaacttgcatccaagttttgctatggaattgcaattgatttaacatcaggcaacatctctggccttagatgcgctgccgagtaccttgaaatgacagaggacctagaagagggcaatctcatattcaagacagaagcctttcttagctatgtggttt

SEQ ID NO: 192882 - DNA, 257 bp, Glycine max
gttgctcgcaactcatcaaatcaggttcggaggatgggacaacacgtatttgggattgcaaaagtggaaagtgtacgcaagtcattgatccatcaagagatttgaaattaaagggatctgcttcatgggttggttgtgttgctttagatgcaagtgcgagctggttggcttgcagtagtggacgtaatatatcactttggaaccttcctgcgtcagaatgcgtatcaaagattccaactcgtagccgtgtacaagac

SEQ ID NO: 192883 - DNA, 264 bp, Glycine max
cgaaaacgcaccgttttgttcctgctctcgttcctaagaaaactgaacaagtgaagcagggtttgattcaaagctcggtgcataaacagcaatggcagagaaaccccaaccggttcgggttctatactgcggggtgtgcagcttgccccccgaatactgcgaattcggatccgatttcgagaaatgcaaaccctggttgatccaaaacgtccctgacctataccctgatcttctcaaagaggcaaatgagaaggaagctgataa

SEQ ID NO: 192884 - DNA, 261 bp, Glycine max
aatcatcgttatgccatatccccacgcaagcttcaatataataccaagttatctgacttttttgagattctggcaacatctgaggatagagatggaaagactttcgtttccacagcacgtggtaggaaatatcccgtgactgtcaacctatggcaaccagagaaaaatgcttttgaatgggctacatctttgaaagcccctcacacagaggatgcaattcgggttactcagtccacagcaaactttttcataagtgaagct

SEQ ID NO: 192885 - DNA, 259 bp, Glycine max
cctagcctcattattatcatagtagatattcattccccttatctttctctcttctctctccccgcccaaaccctaactccctaccctattccgctttctctcatccatcatgaaaggaggaaagtccaagaccgaatctaagagagccgatgccaaacttgctgtgaataagaagggcgccgccaccaagactaggaaacccgccggaaaggggaaggcagcgaaagatcctaacaagccaaagaggcctccaagtgct

SEQ ID NO: 192886 - DNA, 260 bp, Glycine max
gtgaaactgcgaatggctcattaaatcagttatagtttctttgatggtatctactactcggataaccgtagtaatctctagagctaatacgtgcaacaaaccccgacttctggaagggatgcatttattagataaaaggtcaacacaggctctgcctgttgctttgatgattcatgataactcgtcggatcgcacggcctttgtgccggcgacgcatcattcaaatttctgccctatcaactttcgatggtaggatagtg

SEQ ID NO: 192887 - DNA, 257 bp, Glycine max
cactcgagccgattcggctcgagctgccatccatcactcacaaaaaccccttacaaagtagtactacttggtttcaatcaaaacaaaaactcacactttggtggccacagcaacaataacaatggcagcctcactacaagctgcagctaccttcatgcaacccaccaaggtgggcatggccactcgcaacctcaaatctacacaatgcatttctcaggcttttggcttggaacccgctgcagctaaactcatttgct

SEQ ID NO: 192888 - DNA, 249 bp, Glycine max
  unsure (1)..(249): unsure at all n locations
ctcgagcgggtcgatgtcagattcgacgagggtttgcctccgatcatgaccgcgctggaggttctggatcactcgtcgaggcttgtgttggaggtggcgcagantttgggtgaaggcgttgtccgaaccattgctatggatgccaccgaaggtgtcgttagaggctggcgcgttctcaacactggctcccctattaccgttccagttggtagggctacgcttggccgtatcataaatgtcattggagag

SEQ ID NO: 192889 - DNA, 261 bp, Glycine max
  unsure (1)..(261): unsure at all n locations
ttttgatggccagcaacaccttttgagtgacttgggctgtttctcgcagccccgtcctggcgccatttcagtgagtcgatctggtcggtctaagacactaaccccatcaaatctggatgaactattctctgccgagatttcttcatctccccggtattctgacccagcagtggcttctgtattttccccaagacacaaatcanctattatgaatcagtttcaacagcttcaaagttcgttatcacccataaacacaagtgt

SEQ ID NO: 192890 - DNA, 267 bp, Glycine max
attcccctgttttggctcccctgtttaaccaagaagcttccaatggcaccccatgcatcttcttttgctctagttcttctcatttttctctttgttgaaatgcacttccatggtgccactgctgactatggcggttggcagggtggtcatgctactttctatggtggtggtgatgcttctggaacaatgggaggtgcatgtggctatgggaatttgtacagtcaggcgtatggaaccaacactgcagctctaagcactgctttgttc

SEQ ID NO: 192891 - DNA, 264 bp, Glycine max
tttacactcttttcttcttctcgttgttgcttcggtgttgaatcatggatcagaaagtcgatttcagtgctccgcattccatgggaaccactatcatcggcgttacttacaacggcggtgtcgttctcggagccgactctcgaaccagcactggagtgtatgttgccaaccgagcatcggacaaaatcacacagctcactgataatgttcacgtgtgtcgctctggatcggctgctgattctcagattgtctctgactatgtgc

SEQ ID NO: 192892 - DNA, 256 bp, Glycine max
ctcgagccgattcggctcgaggaaagaatcccaggcgaggagaaacatggaggggaaggagcaggatgtgtcgttgggagcgaacaagttccccgagagacagccgattgggacggcggcgcagagccaagacgacggcaaggactaccaggagccggcgccggcgccgctggttgacccgacggagtttacgtcatggtcgttttacagagcagggatagcagagtttgtggccactttctgtttctctacatca

SEQ ID NO: 192893 - DNA, 262 bp, Glycine max
atcggtgttcacttgatccttcataagtcgtcatcatcatcatcatcatcaccgttgattgaagaagatgccgatcagaaacatcgccatcggaaggcctgaagaggctattcaccccgacacgttgaaggcggggttggctgagttcatctccaccttgatcttcgtgttcgccggttcaggttccggcatcgcctacaacaagctcaccgacaacggcgccgccactcccgccggcctcatctccgcttccatcgcccat

SEQ ID NO: 192894 - DNA, 261 bp, Glycine max
acaatctgatccagtagagttcatgtcatggctacttaatacgctacatgcagatcttaagacttcaaagaagaatacaagcataatatatgagtgttttcagggtgaacttgaggttgtgaaagagattcctaacaaagtgatctctgataagaaagaaaacaatgctgagaaactttcagatggggtgaatgagcgatatgcatttgtcaaagaaacttcaaaaatgccatttctaatgttagggttggacttgccacc

SEQ ID NO: 192895 - DNA, 255 bp, Glycine max
gaccctcattgaccttacagttatagaaatctggtcaatgcagatggtattatagagaaaacattcttgtggggtaggtactctatggaaatgtccgctgtcatttacaaggactgggttttcactgatcaagcattacctaatgatcttgtaaatagaggagttgctgttaaggacccatctgctccccatggagttcgtcttttgattgaggactatccttatgcttctgatgggctagagatatgggatgcc

SEQ ID NO: 192896 - DNA, 253 bp, Glycine max
gcttgtctcaaagattaagccatgcatgtgtaagtatgaactaattcagactgtgaaactgcgaatggctcattaaatcagttatagtttgtttgatggtatctactactcggataaccgtagtaattctagagctaatacgtgcaacaaaccccgacttctggaagggatgcatttattagataaaaggtcaacacaggctctgcctgttgctttgatgattcatgataactcgtcggatcgcacggccttt

SEQ ID NO: 192897 - DNA, 254 bp, Glycine max
cccaaacgaggtggaaaggctccggctcttgccgctaagaagaagcctgagaaggtttcgaatccgttgttcgagaagcgtccaaagcagttcggaatcggaggggcgttgcctccgaagagagacttgactcggttcgtgaagtggccaaagaatgttcaaattcagaggaagaagaggattctgaagcagaggttgaaggttcctccagctttgaaccagttcaccaaaactcttgacaaaaacctagcaac

SEQ ID NO: 192898 - DNA, 269 bp, Glycine max
tattggagcaggaatcagtggccttggtgcctgcaaataccttctagagtttggatttaacccaattgtctttgaagttgatgatggtgttggaggactatggagacataccatggactccaccaagctccaaaacaataaacaaatgttccagtttatggattttccatggccttcttctgtgaaagaagataatccaagtcacaagcaagtgctagattatgttaactcctatgctgaacatttttccctcattccttacattagat

SEQ ID NO: 192899 - DNA, 262 bp, Glycine max
tctgtttccttcttcaccgcatcaatggagtcggacggcgttctcctcggcatgtgcaaccctctcctcgacatctctgccgtcgtcgacgacgctttcttgcaaaaatacggtatcaagttgaacgatgcgattctcgctgaggataagcacaaacctatgtatgaagaattggctaacaatcctaatgtggagtacattgctggaggtgctactcagaattcaatcagggttgctcagtggatgcttcaagcaccaggtg

SEQ ID NO: 192900 - DNA, 256 bp, Glycine max
  unsure (1)..(256): unsure at all n locations
cgattttgtagtaagtgaggtgccaatatggtgaagatagctcttggtactttggatgactcttttagcgctgcctctcttaaggcttatttcgcagagttccacgcaacacacgacagagngttcgctggtgttngatcagccatcgcttacaacgagcttacaaaagatgcagccttggatccaacggggctggtggcagtagctgtggcacatgcatttgcactgtttgtaggtgtctccgtcgccgccaaca

SEQ ID NO: 192901 - DNA, 260 bp, Glycine max
ggtttctctgtctgcttcttcactttctctcgtttcaatcgaaaccaaaacaaaaacatgggcagaaaattcttcgtcggtggcaactggaaatgcaatgggaccactgaggaggtaaagaagattgttactactttgaatgaggctaaagtccctggagaagatgtcgtagaagttgttgtgagccctccttttgtgttccttcctgttgtaaaaagtttgctgcgccctgatttccatgtttcggcacaaaactgttg

SEQ ID NO: 192902 - DNA, 192 bp, Glycine max
ggctacctccatggtgaagcttatgcttttctctgctctcatactcttgtccttgcaagcagttgtgtctgtaacaccactgcattttcaacatccactagaccccttaacggaacaagagataagtgctgtccaaaccatagtccaaagcaagtacccaagctcaagtaacaggttgagcttccacgagat

SEQ ID NO: 192903 - DNA, 253 bp, Glycine max
gttcatacttcatcctattattactttccctctttgcattccaaatggccactgttgaggttgcacagcaaacaccaacaactgtgacagagaatgaaacaacgactgaggtaaccaagattgaggaaactaccccagaacagccagccaccgaggttactgccccagaaacagtcaacgaagaagcaaaagaggaagcagcagttgagactaatgaggcaacagaagttacagaggaagggaaggctgagaa

SEQ ID NO: 192904 - DNA, 267 bp, Glycine max
tgtgttactaagtatgatgattttgaactcaagtcaagcgttaccaagaacaatgattttgaaccgagaccaagtgctaccaaatatgatgattttgaactcaggtcaagcgttaccgagaatgatgattttgaaccgagaccaaatattagcaagtatgatgactttgaactcaggtcaagcgttaccgagaatgatgattttgaatcgagaccaagtgttaccaaatatgatgatttagaactcaaatcaagcattaccaaaaac

SEQ ID NO: 192905 - DNA, 263 bp, Glycine max
aaaaccagaagcgaaatcgcaatcgcaatccagcgaatatgaaggtcgtcgctgcatacttgctcgcagtgttgggagggaatccttccccttctgccgatgacatcaaacacatcctcggcgcagttggagctgaggctgagaatgagttgattgagttgctcttgactgaagtcaagggaaaagacttcaatgagctaattgctagtggaagtgaaaagatgtctgcagtgtctggtggcggtgcagcggttgccgttgct

SEQ ID NO: 192906 - DNA, 237 bp, Glycine max
gctcaaagcaagcctacgctctgtatacattagcatgggataacaccacaggattctgatcctattgtgttggccttcgggatcggagtaatgattaacagggacagtcgggggcattcgtatttcatagtcagaggtgaaattcttggatttatgaaagacgaacaactgcgaaagatttgccaaggatgttttcattaatcaaaaaacaaaaaagggtgggccgccctttttgtg

SEQ ID NO: 192907 - DNA, 268 bp, Glycine max
cgtgggggagctgagcgcggcggacctgaaggggaagaaggtcttcgtcagggccgacctcaacgtcccgctcgacgacaaccagaacatcaccgacgacaccagaattcgcgccgccattcccaccatcaaacacctaatccaaaacggcgccaaagttattctctccagccacttggggaggccgaagggtgtcactcccaaatacagcttggcacctcttgtgccccgggctttctgagctcattggtatccaggttgtcaaggt

SEQ ID NO: 192908 - DNA, 253 bp, Glycine max
cctcgagcgaatcggctcgagggaaaatacaaagctgattataattaccaacccttctttggtagatacaaaaacttcaaaatacaaggttgtaccactgaagcttcaacctcatgccagccaccatctccctcaccaccaggctatggcagcctaagccctcagcaactttctgcaatgcaatgggtccaaaacaactacttggtctatgactattgccatgatcctggaagagaccatacacttactccag

SEQ ID NO: 192909 - DNA, 251 bp, Glycine max
cattcatacgtggtgttgttactgctgctcttttctcttttcttttctctttagttctctcttcccctttcttttttgttttcttcttcttctgagcttgtttaagcttttcttccattaacatattatcagcatgtgtggtattcttgctgttcttggttgttctgatgactctcgagccaaaagggtccgcgtgcttgagctctctcgcagattgaagcaccgtggccctgactggagtgggctccatc

SEQ ID NO: 192910 - DNA, 263 bp, Glycine max
gtcctggcataatcaagcctggggaatgtaaaattggaatcatgcctggttatattcataagcctggtcgcataggaattgtctctcgttctggtaccttgacatatgaagcggttttccaaacgactgctgttggccttggacaatccacttgtgtgggtataggaggagatccctttaatggaacaaactttgttgactgccttcagaagttcctaacagatcctcaaacagaaggtatcattcttataggagagattgga

SEQ ID NO: 192911 - DNA, 251 bp, Glycine max
cacaaatagagttgttggtacatatggatatatggctccagagtatgcaatgaaaggtgttgtgtccatcaaaacagatgtgttcagctttggtgtgttgctactagagatacttagtagcaaaaagaataatagtcgctatcattcggatcacccactcaacctcataggatacgcgtggcagctctggaatgcaggcagagctctggagcttatagactcaacgttaaatggattgtgttctcagaatg

SEQ ID NO: 192912 - DNA, 249 bp, Glycine max
gaaaatcctcacccattttcttcgtagccaaacactctgaaattctcagttatgtcgtggcaatcgtatgtcgatgatcacctactgtgtgaaatcgaaggtaaccacctcactcacgccgctatcatcggccaagacggaagcgtttgggctcagagcaccaacttccctcagttcaaacctgaggaaataactgccatcaataatgactttaatgagcctggatcacttgctccaactggattgtat

SEQ ID NO: 192913 - DNA, 249 bp, Glycine max
gcggagagatgccattgaactacagcaaatcaaagtcaaacctgacaccccttcttcttgttcattggatggtggtaagaaaccagaaaatacagattggtggtctgatcctgactcaaaagttcacattggagttggttgcgatttttgcgggatgtttccaataattggagatagatatagatgcattgactgtaaggagaagatgggctttgatctttgtggtgattgctacgcaagccgctccaa

SEQ ID NO: 192914 - DNA, 249 bp, Glycine max
cgacggggtattgtaagtggcagactggccttgctgccacgatccactgagattcagcccttgtcgctttgattcgtctgcaaaggattctacccgccgctcgatgggaattccgcctcgagccgaatcggtcgaggcgaaaacccccaactccaacctctgttcatcgtctaccgcgctttcttttcaaccagaactatgataaagctttttaaagtaaaggaaaagcagagagaacttgcagaaaat

SEQ ID NO: 192915 - DNA, 246 bp, Glycine max
cgcgatactgacgtgcaaatcgttcgtctgacttggctacaggggcgaaagtctcatcgaaccgtctagtagctggttccctccgaagtttccctcaggatagctggaccccgcgggcgagttctatcgggtaaagccaatgattagaggcatcgggggcgcaacgccctcgacctattctcaaactttaaataggtacgacggtgcggctgctctgttgagccgcgcatggaatcgagagctcca

SEQ ID NO: 192916 - DNA, 247 bp, Glycine max
gctcttttctcttttcttttctctttagttctctcttcccctttctttttctttttcttcttcttctgagcttgtttaagcttttcttccattaacatattatcataatgtgtggtattcttgctgttcttggttgttctgatgactctcgagccaaaagggtccgcgtgcttgagctctctcgcagattgaagcaccgtggccctgactggagtgggctacacaacatggtgacttttttttggca

SEQ ID NO: 192917 - DNA, 258 bp, Glycine max
ctcgagccgctgaaactgcgacgattttgggacaagaggatctcacaggaggtcatcggagatgcactcggtgaggaatttaagggctatgtcttcaaaattaccggaggttgtgacaaacaaggatttccaatgaagcagggagtgctgactcctggtcgtgttagacttttgcttcacaggggaactccttgcttccgtggatatggaaggcgtaatggagagcgtaggagaaagtctgttcgtgggtgcattgtc

SEQ ID NO: 192918 - DNA, 251 bp, Glycine max
aaaaaaccaagggtgcatgcatatgacatgtactcctccttgtaaatgtgagttttgctggctatgccttggtgcatgggcagaccatggtgaaaggactggtggattttatgcttgcaatcgttatgaagcagctaaacaagatggagtgtatgatgaaactgaaagaagaagagaaatggcaaagaattcattggagagatacacacattattatgagcggtgggccagcaaccaatcttcaaggcaaa

SEQ ID NO: 192919 - DNA, 248 bp, Glycine max
atgaagtcctccatccgcccggacatcgtcaacttcgtacactccaacatctccaagaacagccgacaaccctatgcagtcagccgccgcgctggccaccagacttccgccgagtcctggggaaccggtcgtgccgtctcccgtatcccccgtgttcccggcggcggaacccatcgcgccggccagggagccttcggaaacatgtgtcgtggaggacgcatgtttgccccgaccaagatctggcgccg

SEQ ID NO: 192920 - DNA, 249 bp, Glycine max
ggcccgtggcccagcccaacaggatcaagtttacccctcttctcaaaaatcctagaagatcttcactttactatgtgaatttggtggctattagagttggccggagaattgtggatattccaccggaggctctagcgttcaaccctaacaccggcgcaggcaccgtttttgattcgggtacggtattcacccggctggttgaaccggcttacaccgccgtccggaacgagttccggcgacgagttgccg

SEQ ID NO: 192921 - DNA, 250 bp, Glycine max
ctcagaaatcaaaagcctacttcaagagatatcgagtcaagttcaagagaagaagagagggaaaaaccgattaccgtgccaggattcggttgattaatcaggacaagaacaaatataacactccgaaataccgatttgttgttcgctttagcaacaaggacattgttgcacaaataatatctgctagcattgctggcgatattgttcttgctgcagcatatgcacatgagctgccacgatatggtcttga

SEQ ID NO: 192922 - DNA, 245 bp, Glycine max
gaattaacatatatatagcaagcatggcagtcacactctacgaccttagctcttcctctgggttgaacaaacttgatgagtaccttctcccacgcagttacatcaccgggtaccaagctacaaaggatgatcttactgtttatgcagctttgccaactgctccatcagatgaatatggaaatgtttccaggtggtacaagcacattgatgctttgttgagaatctctggtgttactggcgaggga

SEQ ID NO: 192923 - DNA, 277 bp, Glycine max
cgaattacttatcttgagaaacattattcccattgctatattttatggctagcatgaaggttatctgggtggttgtgatcatgtgcatggccgtggtgggtgcatcgatgatggcgcaagccatgacatgcaatgatgtgacggtgaacatggcacagtgcctatcctacctgatgcagggaggaacaccttcaacactttgctgcagcggagtcaagaacattcttggctctgctgtcaccaccgttgacaaacaaactgtgtgcaactgtctcaa

SEQ ID NO: 192924 - DNA, 197 bp, Glycine max
gtcgacctcactcagtcactcacgcactcgcaagcgaaaagaaagaatgccaggcgaggagaaagatggaggggaaggagcaggatgtgtcgttgggagcgaacaagttccccgagagacagccgattgggacggcggcgcagaaccaagacgacgggaagggctaccaggagccggcgccggcgccgctggttgac

SEQ ID NO: 192925 - DNA, 222 bp, Glycine max
tgctccagtagccggcactaaacaacatggcggacaaggcagtcaccatccgaaccaggaagtttatgacatacaggcttctctccagaaagcagttcgtcgttgatgtccttcatccagggagggctaatgtttccatggctgaactgaagaagaacctggagagaatgtatgacgtgaaaggcacaaacactgtatttgtcttcaagttccgaactcatt

SEQ ID NO: 192926 - DNA, 230 bp, Glycine max
gaagaccatgactgttcctctaactggtctctctacaaacacatcgacctctccaaggtaactgctttgaatgaggcaaatccaggaagtgttaagtcagttttcaaagcttgggaagagcgtctggattcttctggggttcgataggcaagcaatgagggtgatcctgagttaactgtcttcatcccatttacttcaagatgtcaagattaagagcatatccatagttg

SEQ ID NO: 192927 - DNA, 285 bp, Glycine max
tcggaattcgcctcgcgcggctcgagcggctcgaggacagttgacgttggaagagcacattttgagactgaaacaacaaggtttactattgtggatgcacctggtcacacaagctatgtaccgaacatgattagtggtgcatctcaagctgatattggagtgttggttatttctgttcggaagggagagtctgcaactggatacgagagacgtggacaaactcgtgaacatgtccagcttgcaaaaacgctgggtgtgtctaagattcttgttgtcgtcaataaa

SEQ ID NO: 192928 - DNA, 290 bp, Glycine max
cgtggatatatatctgagctaaggtgaagtggcagaatggtgaacataactcttggtactttcgatgactctgttggtgttgcctctcttaaggcttatttggcagagttccatgcaactctgattatacgtgttcgctggtgttggttcagccatcgcttacaacgagcttacaaaagatgcagtcttggatccaaaggggatggtggcagtagctgtggcccatgcatttgcactgtttgtaggtgtctccgtcgcagccaacatctcgggtggccatttgaacccag

SEQ ID NO: 192929 - DNA, 211 bp, Glycine max
gagagaacaatggaagacataacagagggagtgaataacatcaacatctctgattcgtataagaaaaatcgcattcaggagtctaacaccaagaagcccctcttcttctatagaaacccggccaacagacatatgcaacagcatgatgaggtcgagctctcagctctaggaatggctattgccacagtagtaactgttgctgaaattttga

SEQ ID NO: 192930 - DNA, 142 bp, Glycine max
cggctcgagtggtagctctgcaactgggagcaaaattatgacagctgcagctcagctgatcaagcctgtttcactagagcttggtgggaaaagcccaatcattgtttttgcggatgttgaccttgacaaggctgctgaatgg

SEQ ID NO: 192931 - DNA, 262 bp, Glycine max
cggaagggccccaagccgccgaagaaggggcagccggagaacgcggtttatgatttcgaggacaagattaacttcgcggtgttcccttcgctgcagggtgggccccacaaccaccagatcggtgctctcgccgtggcgctgaagcaggccgcgtcgcccgggtttaaggcctacgcgaacaggttaaggcgaacgccgttgcgcttggaaaatacttgatggggaaagggtacagccttgtcactggcggaacggagaacca

SEQ ID NO: 192932 - DNA, 264 bp, Glycine max
gtggcgatcggatccagctacagcatagagatcaaggaaggaaggaaggaagatgttgggtgttataaggcacaagagtattcgccctgccttctccgcaatcagacacttgtcttctgcagctaaagagattactgtcagggaggctctgaactccgcactcgatgaggaaatgtcagctgctcctaaagtgttcttgatgggtgaagaggttggggaatatcagggtgcatacaagatatccaaggggctgctcgacaagta

SEQ ID NO: 192933 - DNA, 265 bp, Glycine max
agatgatccacgttcttttcctctttgctcttgtctcgttcacttcccatgcttctgtcaatgatttctgtgtagcagacctaaaaggtccagatagcccttcaggctatcagtgcaagccacctaacacagtcacagtggatgactttgtgttctctggctttgtcgctggaaacaccacaaacactttcaatgctgcattaacctccgcatttgttactgattttccaggtgtgaatggtcttggtgtatctgtggcacggtt

SEQ ID NO: 192934 - DNA, 213 bp, Glycine max
aaaagatgcaaactcgtgaagagttggttgaagcttccgctatcctcatatggattgcttcagcccttcatgctgctgttaactttggacagtatccatatggaggtttaatcctaaacaggccaactattagcaggagattcatgcctgaaaaggggtctcctgaatatgatgcgttggctaagaaccctgagaaggagtttttgaagacta

SEQ ID NO: 192935 - DNA, 264 bp, Glycine max
  unsure (1)..(264): unsure at all n locations
gntcagtctagcgctgacgggcatgacatgatgggattggtccaattgcttcctacagaatctgaaaggtcctgatggaaagagttcgtcaggagcttaaagattgagctcaagcagggttttaagtcaagaattgaagatgttagggaggaatattaaggaagcggagagctgggaaattaccaggtgacacaacatcggttttnaaaggcctggtggcagcaacatgctaagtggccctacccaactgaagatgacaaggca

SEQ ID NO: 192936 - DNA, 249 bp, Glycine max
  unsure (1)..(249): unsure at all n locations
gcaaatcagaacaagagaagagaatggcaggagcagaggggctaaacagagncagtacgtgtacttgcgaactgtcggagcaggcggacggtacgaatagatggtggagttcatgcagaaggtggtggtggggtggacgccggcgtcggagctcacggtggaggagcgcaacctcctctcgctggcctacaagaacgtgatcgggtctctgcgtgccgcgtggcgcatcgtgtcctccatcgaacagaa

SEQ ID NO: 192937 - DNA, 267 bp, Glycine max
cgaggcccatcgcattgaggcaagtagaaaattgacccgcccaagtggagattcaagtcgggtaccgaacgtgcgactataaagggaatgaacgtggacaccccacgctttcttcacggcaacagaagaataatcaaatttctcagatctatccgacgtcgtcgcagatccaccaaccgttatggctgccttcagcggtgatgaaacggctccgtttttcggcttccttggagccgcagctgccctcgtcttctcctgtatgggagc

SEQ ID NO: 192938 - DNA, 265 bp, Glycine max
gtcctctcgaagctttcatcgttcaacatattctcaccatctcagtcatgggcctgctatcttgttttaggtctaccgtcctgagaaaatgttccaaaggaagctctggcatgtcaagattcctgtatacgaacaattttcaacgaaacttgatttcgtctggtggcaatgaatcgtattatgggtattttaaccggagatcatacacttcactttatatgggaactggaactgtgggtgggattacaagtgctagaatcagggt

SEQ ID NO: 192939 - DNA, 265 bp, Glycine max
cgaggcccatcgcattgaggcaagtagaaaattgacccgcccaagtggagattcaagtcgggtaccgaacgtgcgactataaagggaatgaacgtggacaccccacgctttcttcacggcaacagaagaataatcaaatttctcagatctatccgacgtcgtcgcagatccaccaaccgttatggccgccttcagcggtgatgaaacggctccgtttttcggcttccttggagccgcagctgccctcgtcttctcctgtatggga

SEQ ID NO: 192940 - DNA, 260 bp, Glycine max
gtcctctcgaagctttcatcgttcaacatattctcaccatctcagtcatgggcctgctatcttgttttaggtctaccgtcctgagaaaatgttccaaaggaagctctggcatgtcaagattcctgtatatcaacaattttcaacgaaacttgatttcgtctggtggcaatgaatcgtattatgggtattttaacaggagatcatacacttcactttatatgggaactggaactgtgggtgggattacaagtgctagaatc

SEQ ID NO: 192941 - DNA, 246 bp, Glycine max
ggcttggactgcctggatacggcggcactgacgaagtgctcatcaggaagaggggtttctctgagactgaaactggtcatgaagatgagtctgccaccactgtggatttgatgcttaatctttcttctaaggaggccgcaaccactgctgctgctgctgcagatccaactgataagcacaagactttgcctaaggagaagacccttctgccagcagatcctgctaagcctccagccaagacgcagg

SEQ ID NO: 192942 - DNA, 250 bp, Glycine max
aaaagattttcgggtaccatagttggagtggaagatatttctcctcattgggtaaattcaaaatggcgatcactcaaggttcaatgggatgaacctgcagctgttcccagacctgatagggtctcaccatgggagatagaaccctttgttgcttctgcttctacaccctcagttcaatctactatggtaaagactaaaaggccccggccacccagcgaaactccagatgttgacacaacatctgttgctt

SEQ ID NO: 192943 - DNA, 272 bp, Glycine max
ccggcccaagcagtctccgtcctttaccacagggagtatccgagttcctcatgggctccggcttcgacaatgtactcgaccagctcgacgccgccgcggggggcgccggagcactgccccccacggcagcgtcgaaagcggcgatcgagtcgatgccggtggttaagatcctcgcgagccacacctacgcggaatcgcactgcgcggtcaccatggagaatttcgagatcaactgcgacgcacgtgagatgccgtgcggtcacgtgtaccat

SEQ ID NO: 192944 - DNA, 271 bp, Glycine max
tgttacggtgcaacctagcagcctccaaatccaatggcttcagagaagaaactttcgaacccaatgagggagataaaagtgcagaagctcgtcctcaatatctctgttggcgagagtggagatcgtctcaccagagccgccaaggtgttggaacaacttagtggccaaaccccagtgttttccaaagcaaggtacactgttcgttcctttgggattagaagaaatgagaagattgcatgctatgtcactgtcagaggtgacaaggcaatgc

SEQ ID NO: 192945 - DNA, 263 bp, Glycine max
taggcactgtccaccatgagtttaccttcactgttcaggaaggaatagatgccattgaagatgttatctaccatattgagacatatgatgtgactacaattagagcaagcacacctatgtttctcatgtctcggaagattaaatcacttggtgtcaaatgggttatctcaggagaaggatctgatgagatctttggagggaatatgtacttccacaaggcacgcatcaaggaggagttctacagagatgcatgccgcaagatc

SEQ ID NO: 192946 - DNA, 269 bp, Glycine max
agattatcctaagtctttgggaatagtgctgcaatggcttcaagtcaggaggaggtgacccttttgggagctactggaagcccatttgtgtgcagggttcatattgccctcaagttgaagggagttcaatacaaatatgtcgaagaaaatttgaggaacaagagtgaactgcttctcaaatccaacccagttcacaagaaggttccagtgtttattcacaatgagaagcccatagcagagtctcttgtgattgttgaatacattgatga

SEQ ID NO: 192947 - DNA, 265 bp, Glycine max
gaaaattcgaagtggcggccatgactatgaaggggtgtcttatgtggcctcacagccatttttcatccttgacatgttcaatctccgatccattgagatcgacatggacaccgaaaccgcgtgggtccaagccggtgcaacgcttggcgaagtttactatagaattgctgagaagagtaaaactcatggtttccctgcaggggtgtgtcccactgttggggtgggaggtcacattagtggtggtggatatggcaatctcatgaga

SEQ ID NO: 192948 - DNA, 270 bp, Glycine max
ctctctctttgtcgcttggatcactgatctcatctcaattttcagatatgtcgacatctgataagccagaagtggtggaaaggggtagcaaggatgaaaaacacaaggaagatgatcaagaggaggggaagggtggattcattgagaaggtgaaggatttcattcatgacattggtgagaagattgaggaagctattgggtttgggaagccaactgctgacgttactgcgattcacattccatcgattaatcttcacaaggcagatcttg

SEQ ID NO: 192949 - DNA, 267 bp, Glycine max
cgagctccttagtgctgctccttgcagctctaattctatcccctcaagttcttgcaaactatgagaatcccccagtgtacaagcctcccactgagaaaccaccaggttataagcccccagttgaaaaacctccagtgtacaagccaccagttgaaaaaccaccagtgtacaagccaccagttgagaagccaccagtttacaagcccccagttgagaagccaccagtttacaagcccccagttgagaaaccaccagtatacaagccac

SEQ ID NO: 192950 - DNA, 269 bp, Glycine max
ggggcttaagcgaagagacacagaggagtggatgaggcatcgccaactccctgaagatttgagaagtcgtgttagacgatttgttcaatataaatggcttgctactcgtggagttgatgaggaaaccattctacgtgcgttacctgctgatcttcgccgtgatatacagcggcatttgtgcttagaccttgttagaagagttcccttcttctcacagatggatgatcagcttctggatgcaatatgtgagcggctggtatcgtctctga

SEQ ID NO: 192951 - DNA, 271 bp, Glycine max
cgaggaccagaattggatctctcaaaaagaaggcacttaatgcatcctccaaattcaaacacactcttagaaagaagagtagcaggaggaaaagcgatggccgtgttagctccgtttcaattgaggacgttcgcgatttcgaggagctccaggctgtcgacgcctttcgccaatccttgatcatggacgaattgctccccgaagcctttgatgattaccatatgatgttaagatttttgaaagcgaggacgtttgatattgaaaaggcaaa

SEQ ID NO: 192952 - DNA, 273 bp, Glycine max
gccgaggttgatgtcgttggagttgggacgtccgagggcaaatattggtcatggggatcagaaagagtttgttccacaaaagttgccatcggtgcatcttggtgttgaagaaacgggaacagtgaattatgagattgctaatttaatccggtggaggaaaacttttggaaatgttgtgcttatcatgcattgcaatgggccagtggaacgaactgctcttgaatggaggttgctttatgggaggatattcagatctgtagttattttgtccga

SEQ ID NO: 192953 - DNA, 267 bp, Glycine max
gcgggccgttcagaccagaactgaaaattcccgcggcctctggcaaccgttcaccgctcttctcggtgacgatcccagtgttgacgttaagaaaaacgttgtcgttaccatctcttcggacaaaggtctttgtggtggaatcaattccacgtctgtcaagataagcagggttttgaacaaattgaattctgggcctgataaagagacaaaatatgtcatattgggagagaaggctaaggctcaattgttgcgtgactcaaagaaaca

SEQ ID NO: 192954 - DNA, 268 bp, Glycine max
gccaccacctccgcattcctcctccttcacctcctcctgctgctccacctcgccatcgccgctcacggcatcggcatcaactacggcacgctcggcgacaaccttccaccgcccgcggcggtatcgaacttcctgaagacgaagacgaccatcgaccgcgtgaagatctacgacgtgaacccggacatcctgcgggccttcgccggcagcggcatctccgtgacggtgaccgcccccaacggcgacatcgccgccttaaccaaaatcg

SEQ ID NO: 192955 - DNA, 266 bp, Glycine max
gcttctctcctctgtctttttctctctcttgctatccttttggctagtggcactgctgcaagtgcaactccaagaagcgcagtgccaagccaccatgtttcaacattcaacagaagcctttttccttccacttttctctttggatatggttcttctgcttaccaggcagaaggagcagcaagtgtagatgggagaggaccaagcatatgggacacctacactagacagcatactgaaaagatttgggatcatagcaccggtgacat

SEQ ID NO: 192956 - DNA, 266 bp, Glycine max
ggccttcctagaacgaaaaaaaaaagaagagcaattttccctcaccaaagaagaagaagcgaacaatggccgatcaacttaccgatgaacagatctccgagttcaaggaagccttcagcttgttcgacaaggacggcgatggtagcatcacaaccaaggagcttggaactgttatgcgttcattggggcaaaacccaactgaggcagagctccaggacatgatcaatgaagtggatgctgatgggaatggtaccatgacttccctg

SEQ ID NO: 192957 - DNA, 258 bp, Glycine max
actcaatgttgattgtgatcactacataaacaacagcaaagcacttcgtgaagccatgtgcttcatgatggatcctacatcagggaaaaaaatatgctatgtacaatttcctcaaagatttgatgggattgatcgtcatgatagatactcaaatagaaatgttgtattctttgatataaacatgaaaggtttagatggcatccaaggaccaatatatgtgggaactgggtgtgtctttaggcggcaggcgctctatgg

SEQ ID NO: 192958 - DNA, 267 bp, Glycine max
ccgaccccatcttcaaccctgccctctccgcttccttcgccgccgtcccctgctcctccgccgtctgcgaccagctcgacgactccggctgccaccagggccgctgccgctaccaggtctcctacggcgacggctcctacaccagaggcacgctcgctctcgaaacaatcacgctgggaaaaacagtgattcggaacaccgccatcggctgcgggaacttgaaccacggcatgttcgtcggcgcggctgggcttttgggactcggag

SEQ ID NO: 192959 - DNA, 265 bp, Glycine max
atggcgaacaatttagatcagactctaaaacagttaaccaacaagctttcttttatgctagtgaacgcgaagtccatcacaacgacatatttatattcggcatagataacaccgtactctctaatatcccatactatgaaaaacatggatatggggtggaggaatttaatgaaaccttatatgatgaatgggttaacaagggcgacgcaccggcattgccagagactcttaaaaattacaacaagctgttgtctcttggcttcaa

SEQ ID NO: 192960 - DNA, 266 bp, Glycine max
gagggtttaacctttctggctgtgttaatatgcgtttcagcactgtcactgagtccttctgttgcgggggaagggcaaaataatggccttgttatgaacttctacaaggaatcatgccctcaggctgaagacatcatcacagaacaagtcaagcttctctacaagcgccacaagaacactgctttctcctggctcaggaacatcttccatgactgtgctgttcagagttgtgatgcttcactgttgctggactccacaagaaggag

SEQ ID NO: 192961 - DNA, 266 bp, Glycine max
gtcgagccggcattaaagggtcaacggtgtgtacattgcaggctaattgtaggggatggttatgttacaataacaaaaggggaaagtatcagaagattctttgagaatgcggaagaggcagaagaagaagaggatgatggtttgatggattcagatggaaatgagattgatggagaatgctcccgtcctcaaaagcatgcaaagagtcctgaacttgctcttagttatcttctagatgctgctactgttatatttaaagaacaggt

SEQ ID NO: 192962 - DNA, 270 bp, Glycine max
cgaggtttcactgaagcaggtaccagcttatgtgatagctcaggtcgttggagccacacttgctagtggaactcttagacttatattcaatggcaagaatgaccattttgcaggaacactcccttccggttctgatttgcagtcttttgtggtcgaattcataatcactttttatctcatgtttgtcatttctggtgttgccaccgataacagagcgattggtgagctggcagggcttgcagttgggtctacggtgctgctaaatgtgat

SEQ ID NO: 192963 - DNA, 221 bp, Glycine max
ctcgagccgctcatccttggcataatcatgggtattgaaacggatgattttgctggatgctgctcgcaagtgctcttgccaaggaagtagtctatgaaggaacatggagttatagcgcacattttccatcccaatgtgcttactacaagtagttccattttttgaatggttctagcttcaaacacaaactttggttccccaacctgtaaatctacggattg

SEQ ID NO: 192964 - DNA, 266 bp, Glycine max
agactgcataccttaggtcttccgaattcgaagttaatttgcaagatggctaaggaaaaggctcagatcaacattgtggtggttggtcatgtggaccctgaggaggcaaccaccattaacgagctgaagaagcctgttgtggagaaagaagctccagggcatgccatatgagggcatgcacgtacggcctcggaggggaaccagaaaattatgttaacaaaataatctggaaccctaatgtatcagtgtcatcatcagtgtgtagt

SEQ ID NO: 192965 - DNA, 267 bp, Glycine max
ctaaggagttatacaaacaactgcttgctacaataaaaactaatgcttaaagccaaacccatacttgaagaaactataatgagactatatcgtgatttttctccaaactgcatgaaagtggcaaacttaggttgctctgtaggaccaaatgcacttctggtgatatcaaatattattgacattgtcaataccgcttgcactagcttgaatcgtgaaccaccaaaattccaattttatctcaatgatttatttggaaacggattcaat

SEQ ID NO: 192966 - DNA, 263 bp, Glycine max
ccgacttctggaagggatgcatttattagataaaaggtcaacacaggctctgcctgttcgtttgatgattcatgataactcgtcggatcgcacggcctttgtgccggcgacgcatcattcaaatttctgccctatcaactttcgatggtaggatagtggcctaccatggtggtgacgggtgacggagaattagggttcgattccggagagggagccttagatacggctaccacatccaaggaaggcagcaggcgcgcaaatta

SEQ ID NO: 192967 - DNA, 260 bp, Glycine max
ctaatccacccatccaaaacttgcttcgtccatcgcttgatgcgaatcatgatccattctggcttcttctctcaacaaaagcatgacttggagagtgcgctagaagccaagtatgtgctaaccgatgcatcagtactattgcttaagaaccatccgatgagtgtgacacctttcttgcatgccatgcttgatccagttttgacaaatccatggaatcaattttctacttggttcggacatggtgaccctacaccatttga

SEQ ID NO: 192968 - DNA, 256 bp, Glycine max
cttctctgtctaaggggtgccctgagatcacattgaacaatggtgaaggctgtggccgttcttggcagcagtgagggtgtcactggaactattcacttcgttcaggagcgaagtggtccaaccaccgtaactggatctcttgctggtcttaagcctggtctccatggtttccatgtccatgccttgggggacactaccaatggttgcctctcaactggatcacatttcaatcctaataacaaggagcatggtgccc

SEQ ID NO: 192969 - DNA, 259 bp, Glycine max
gaaaagaggaagatgtttccttgggagctaacaaattctcagagaggcaaccgattggaagtgcggctcagagacaagacgatggaaacgactacacagagccacccccggcatcacttttcgagccctccgaactcacttcttggtccttctaccgagccggaatagccgagtttgtagccacttttctctttctctacataaccatcttaaccgtcatgggtgtcaataggtccagctccacgtgtgctactgttgg

SEQ ID NO: 192970 - DNA, 260 bp, Glycine max
gaaggctgtttcactggctattgctcgtgatggtgcaagtggtggggctgtccgaacagtcataataaactcagagggagtgaccaggaatttctaccctgaccgaccaacttccattatggcacgaggaaatggagccccacaactccttgctagacattctgggtgccccagagccgatgagctcgtgatgtgaagaagttgccgtgtttcagaaatgtttcctgatagattatatcttgtcttctctcttttatgaa

SEQ ID NO: 192971 - DNA, 261 bp, Glycine max
atgcctcacaccgccggcaggtagtcggtgaagcggttcaggaaggcgcaatgccccattgttgagatgctgaccaactctctacatgatgcacggtagaaacacatggcaagaaactcttggctgttaggatcatcaaacatgctatggagattattcatttgttgactgaccagaaccccattcaggttattgttgaagctgtcgtcaacagtggtccacgtgaagatgcaacaagaattggttcagctggagttgtta

SEQ ID NO: 192972 - DNA, 262 bp, Glycine max
ctcattcaaagaccttcaacccctgaaccattgtgccaagtaatgcttcgcgttggtgatttagagcgctcaattaagttttatgaaaaggctttgggtttgagggtggtaaagaagactgatagacctgaatacaagtatactatagctatgcttgggtatgcagaggaacatgagacaactgtgttggagctgacatataactatggtgtcactgaatacaccaagggaaatgcttatgcacaggttgctattggtactg

SEQ ID NO: 192973 - DNA, 265 bp, Glycine max
ggtactgcccttggctgaggcctgatgggaagacccaagtgaccgttgagtattacaatgacaatggtgccagggttcctattcgtgtacacaccgtgctaatctccacccaacacgacgagcactgtcaccaatgacgaaattgctgctgacctcaaagagcatgtgatcaagcctgtgatcccagagaagtaccttgatgagaagaccattttccacttgaacccttcaggccgttttgtcattggtggccctcatggcgatg

SEQ ID NO: 192974 - DNA, 162 bp, Glycine max
gcgagattggagatcgtctcaccagagccggcaaggcgttggaacaacttagtggccaaaccccagtgttttccaaagcaaggtacactgttcgttcctttgggattagaagtgatgagaagattgcatgctatgtcactgtcagaggtgacaaggcaatgc

SEQ ID NO: 192975 - DNA, 261 bp, Glycine max
gttttctgcgtcatctccgattccccgacaatggccacccaaatgagcaagaagagaaagttcgtagctgatggagtgttcttcgctgaactgaacgaggttctgacaagggagttagccgaggacggatactccggcgtggaagttagggttacgccgatgcgcaccgaaatcatcatcacagccaccagaacccaagccgttctcggtgagaagggaaggagaatcagggaacttacctcggtggttcagaagaggttc

SEQ ID NO: 192976 - DNA, 259 bp, Glycine max
gttctatatattattgaattgacaatgaggcctgctcttgctttgcttcctcttctatttgcattcttgttagctgccactacagaatcaagaaaagatacaggggaatattggaaaatgatcatgaaagatcaggaaatgccagaaggacttcaaggtcttgtttcatttcaatctgaaagataaccctaagactcaagagcagcttggtaaaggttccaagcaccattgtgaagagtctctagttacaaatacacaa

SEQ ID NO: 192977 - DNA, 260 bp, Glycine max
cgagagtccagtagccgaaagcatcactagcttacgctctgacccgagtagcatggggcacgtggaatcccgtgtgaatcagcaaggaccaccttgcaaggctaaatactcctgggtgaccgatagtgaagtagtaccgtgagggaagggtgaaaagaacccccatcggggagtgaaatagaacatgaaaccgtaagctcccaagcagtgggaggaggctcgggactctgaccgcgtgcctgttgaagaatgagccggcg

SEQ ID NO: 192978 - DNA, 258 bp, Glycine max
actcgagccgattcggctcgagcgttgcttggtgatgtccctttctgatctcttcactctcggtcttgcgagagaaagccatgcacgagccgaagatttttggcatgctgtttggccaaacactcccattccaagttcattgcgagatcttctaaagcctggccctgcaagtgttgaaatcgatgatcaccctatgcaaattgaagaaacacagtacccgaaaaccttcttctataaagaagaccttcatccaggcaa

SEQ ID NO: 192979 - DNA, 260 bp, Glycine max
tacccgaagcagccatggggatcgatctcaaggccggatgtaagagcaaaaagaccaaaagaacagcacccaagtccaatgatatctatctcaagctcttggtcaagcttcatcgcttccttgttcggagaactggcagcaacttcagtgctgttatacttaagagattgttcatgagcaaggttaccaaatccccattgtctttgtcaaggttgattgagtatacgaaggggaaggacgatcagattgcagtggtggtg

SEQ ID NO: 192980 - DNA, 262 bp, Glycine max; identical to SEQ ID NO: 154825

SEQ ID NO: 192981 - DNA, 282 bp, Glycine max
cgtgaggagaatatgaagttgtttgttttctttgttgctgcagtagttttggtagcatggccatgccatggcgcaggctaccaaaggttccctctccgaatgaaaactggctatggtgagcgttcttcggaggtaaaatgcgcaagttttaggcttgctgtggaagcacacaacatccgagcctttactaccattcctgaagagtgcgttgaaccaacaaaggactacattaatggcgaacaatttagatcagactctaaaacagttaaccaacaagctttc

SEQ ID NO: 192982 - DNA, 289 bp, Glycine max
ataccctctatcatttcttccaagaaaagccttcgaggtcccaaaagagtcataatttgcctcaaagccatgtcttgctggtctgcagaaaatgccacaaaggcttatctcaacacattgaaaatgggtccccacgccaaagaacccgcggttgcagagttcatatcagcactagccgctggcaacactgcacaactaatggttgtggcatgtgctggtgcagcagactcaaccacactagcattggtcactgctgcacaccaaactggtggccatgttgtttgcattg

SEQ ID NO: 192983 - DNA, 283 bp, Glycine max
  unsure (1)..(283): unsure at all n locations
atcgagccgcgctggtgttggatcagccatcgcttacaacgagcttacaaaagatgcagcactggatccaacggggctggtggcagtagctgtggaacatgcatttgcactgtttgtcgccgtctccgccgnggccaacatctcaggtggccatttgaacccagctgtcacttttggattggccattggaggcaacatcactctcatcactggtttcttatactggattgcccaattgttgggttctatagtcgcatgcctcctcctcaatttgatcaccgct

SEQ ID NO: 192984 - DNA, 286 bp, Glycine max
aaggcagtcaaatccagtgcacacacagcaactcccagagcgctgctatgctatgacagtgagacatcctctgatggttgttggcactgctgatagaaatcttattgtttacaacttgcaaaaccctcaggttgaattcaagagaattgtttcacccttgaagtatcaaacaaggtgccttgctgcattccctgaccaacaaggtttcttggttggatcaatagaaggaagagttggggtgcatcatttggacgatagtcagcatggtaaaaacttcacttttaaa

SEQ ID NO: 192985 - DNA, 282 bp, Glycine max
ggtgatgtccctttctgttctcttcactcttggtcttgcgagagaaagccatgccagagacgaagatttttggcatgctgtttggccaaacactcccattccaagttcattgcgagatcttctaaagcctggccctgcaagtgttgaaatcgatgatcaccctatgcaaattgaagaaacacagtacccgaaaaccttcttctataaagaagaccttcatccaggcaaaacaatgaaagtacaattcagcaagcctccctttcaacaaccatggggtgttgg

SEQ ID NO: 192986 - DNA, 282 bp, Glycine max
cttctattcactctgttacggtgcaacctagcagcctccaaatccaatggcttcagagaagaaactttcgaacccaatgagggagataaaagtgcagaagctcgtcctcaatatctctgttggcgagagtggagatcgtctcaccagagccgccaaggtgttggaacaacttagtggccaaaccccagtgttttccaaagcaaggtacactgttcgttcctttgggattagaagaaatgagaagattgcatgctatgtcactgtcagaggtgacaaggcaat

SEQ ID NO: 192987 - DNA, 283 bp, Glycine max
gtcgcctacaacaatatatatgcctttcatgctgctcagaagacacccgagagaaatgttgaaaatatgaaaggagtccaatgcaagcgagttgcaagaagtattaattctgttggtctttatgttccagggggaactgctgtattaccctcaacagctctgatgctttcagttcctgcacagattgctggatgtaaaactattgtccttgcaactcctccagctcaggatggtactatatgcaaggaggtagtgtattgtgcaaagaagggtggggtgactc

SEQ ID NO: 192988 - DNA, 289 bp, Glycine max
  unsure (1)..(289): unsure at all n locations
gngttatgatatggaagaanaaagctgcaagancttatgatatggccgcactcaagtattggggaccctcctccccatataaatttccctttggaaaattatcaaaacgaacttgaggaaatgaagaacatgacgagacaagaatatgtagctcatttacgaaggaaaagcagcggattctcaagaggggcctccatgtacagaggagtaacaaggcaccaccaacacggaaggtggcaagctcgaattggaagagtggctggaaacaaagatctatatcttggaacct

SEQ ID NO: 192989 - DNA, 283 bp, Glycine max
ggcttcttctcgggaggagaatgtttacatggcgaaattggcggagcaggccgagcgttacgaggagatggttgagttcatggagaaggtagcaaagactgtggaggttgaggagttgacggtggaggagagaaatcttctctctgtggcttacaagaacgtgattggtgcgaggagggcttcgtggaggatcatatcctccattgagcagaaggaggagagcaggggcaatgaggaacatgtggccattataaaggagtacaggggcaaaattgaggctgaa

SEQ ID NO: 192990 - DNA, 286 bp, Glycine max
gcgaatggctcattaaatcagttatagtttgtttgatggtatctactcggataaccgtagtaattctagagctaatacgtgcaacaaaccccgacttctggaagggatgcatttattagccccccccgtcaacacaggctctgcctgctgctttgatgattcatgataactcgtcggatcgcacggcctttgtgccggcgacgcatcattcaaatttctgccctatcaactttcgatggtaggatagtggcctaccatggtggtgacgggtgacggagaattaggg

SEQ ID NO: 192991 - DNA, 281 bp, Glycine max
ctctcttatccatggcatcaacgtttctcaccctaccaactcccttcctacacaaaaccaatgccatcagtttctctaacaagagaccctcatttttgcagaggagctctctgaagattcatgcaattaccaaaaaatgggaacccacaaaggttgtgcctcaggctgatagagttcttattcgtttggaggagctttcagataaaacagttggtggagttttgctgcctaaatcagctgttaaatttgagcgctatcttgtgggagaaatcctaactgtt

SEQ ID NO: 192992 - DNA, 279 bp, Glycine max
ctcgtttcaatcgaaaccaaaacaaaaacatgggcagaaaattcttcgtcggtggcaactggaaatgcaatgggaccactgaggaggtaaagaagattgttactactttgaatgaggctaaagtccctggagaagatgtcgtagaagttgttgtgagccctccttttgtgttccttcctgttgtaaaaagtttgctgcgccctgatttccatgtttcggcacaaaactgttgggttcgcaaaggtggtgcttataccggtgaggttagtgctgaaatgc

SEQ ID NO: 192993 - DNA, 285 bp, Glycine max
ctttagtacagcggaagaacgaagcctcctcgttcttcttcttctgcgctttctctctccctctctagaaccgtaaccgtcgtttctttctttctctctcctcaaccagaactaaagagtcaccttcttatttttctgaatctcgcggcgttgttctttctgctgctgcggctgtggttccggcggcgatgggacagcaatcgttgatctacagcttcgtcgctcgaggcaccgttatcctcgcggagtacaccgagttcaccggaaacttcaccggcgtggcgg

SEQ ID NO: 192994 - DNA, 291 bp, Glycine max
ctctgcttggtcttcacgagaatgtaccattagctgttgctcatccccaattcctcccgttcaaatggccacccaagtccaaactcccctccgtcgtcggaattcgatgctcctcctcccctttcaacgacaaaaccctcatttccatcacacctaacacttcccacctcaatcccaaccctctcgcttgtcgctttcacgcttcccagtttggagaacaggagagcaacaaatacgtggaagcctatgctgtaggacgaaatattcgtatgtctgctaataaagctcgga

SEQ ID NO: 192995 - DNA, 275 bp, Glycine max
ggagaatatgaagttgtttgttttctttgttgctgcagtagttttggtagcatggccatgccatggcgcaggctaccaaaggttccctctccgaatgaaaactggctatggtgagcgttcttcggaggtaaaatgcgcaagttttaggcttgctgtggaagcacacaacatccgagcctataaaaccattcctgaagagtgcgttgaaccaacaaaggactacattaatggcgaacaatttagatcagactctaaaacagttaaccaacaagctt

SEQ ID NO: 192996 - DNA, 278 bp, Glycine max
gctagtttatcgtgaggagaatatgaagttgtttgtactctttgttgctgcagtagttttggtagcatggccatgccatggcgcaggctaccaaaggttccctctccgaatgaaaactggctatggtgagcgttcttcggaggtaaaatgcgcaagttttaggcttgctgtggaagcacacaacatccgagctctttaaaaccattcctgaagagtgcgttgaaccaacaaaggactacattaatggcgaacaatttagatcagactctaaaacagtt

SEQ ID NO: 192997 - DNA, 276 bp, Glycine max
acagggtctatactactgtggtgctggcgctgacaaggcttttggccgtgacattgttgacgcacattacaaagcctgtctttatgctctcatcaacatcagtggaattaatggagaagtgatgcccggtcagtgggaattccaagttggaccttcagttggaatctcagctggtgacgaggtgtgggcagctcgttacatcttggagaggatcactgagattgctggtgtggtggtttcctttgatcccaagccaattcagggtgattggaatgg

SEQ ID NO: 192998 - DNA, 277 bp, Glycine max
tgaaggtctcccccttagcattttcaatcctttttttgtccttcaccatagaactcttcattggcattgcttcagcagcacaagaaccagtgcttgacacctcaggccagatgctgagaacaggtgtcaagtactacattctaccagtcttcagaggcagaggtggaggcctaacagtttcaagcagtggcaacaacacatgccccctctttgtggtgcaagagaagcttgaagtctcaaagggcaccccagttaccttcacaccctacaatgccga

SEQ ID NO: 192999 - DNA, 275 bp, Glycine max
cctcgagacgattcggctcgagattcattcttaatctttgtgcaaactaatgttcatcgagacttttaaggatgagtgtcctactgtgaagtacaccgagactgagattcagtccgtgtacaactacgaaaccaccgaacttgttcacgagaacaggaatggcacctatcagtggattgtcaaacccaaatctgtcaaatacgaatttaaaaccaacatccatgttcctaaattaggggtaatgcttgtgggttggggtggacacaacggctcaa

SEQ ID NO: 193000 - DNA, 282 bp, Glycine max
cttgaactgagatacgattttcttttcagcgtttaggcgaattttccgagagttgcggctgggaatggacggtgacggcgaggagttgactgcgcaggagaccgctttgtatgaccgtcaaattagggtttggggagctgatgctcaaagaagattaagcaaatctcatgtcttagtctatggactgcaaggaactgtagctgagttttgcaagaatattgttctggctggagtaggtagtctgactttagtagatgaccgggttgccactgaggaagtgct

SEQ ID NO: 193001 - DNA, 284 bp, Glycine max
aggctcgaggtcgctgcaaaacccagggcgcgagcccgggcggagcggtcgtcggtgcagatctaggtggtagtagcaaatattcaaatgagaactttgaaggccgaagaggggaaaggttccatgtgaacggcacttgcacatgggttagtcgatcctaagggacgggggaagcccgtctgatagcgctctgtgcgcgtactccgaaagggaatcgggctaaaattcctgaaccgggacgtggcggctgacggcaacgttagggagtccggagacgtcggcgg

SEQ ID NO: 193002 - DNA, 281 bp, Glycine max
ggaacttgaccctgacggcgtgaattccgaccctactcgtggcgccgaattgctatagcggtgacgaatatgaaggttttcgttaagactctcaaaggcactcacttcgaaatcgaagtgacgccgcaagacacggtttctgaagtgaaaaaaaatatagaaactgttcagggtgcagatgtctatcctgctgcacagcaaatgctaattcatcaagggaaagttcttagggatgctactaccttggaggagaataaagtagccgaaaatactttcattgt

SEQ ID NO: 193003 - DNA, 283 bp, Glycine max
cttcactcttggtcttgcgagagaaagccatgccagagacgaagatttttggcatgctgtttggccaaacactcccattccaagttcatagtgagatcttctaaagcctggccctgcaagtgttgaaatcgatgatcaccctatgcaaattgaagaaacacagtacccgaaaaccttcttctataaagaagaccttcatccaggcaaaacaatgaaagtacaattcagcaagcctccctttcaacaaccatggggtgttggtacatggttaaaggaaattaaa

SEQ ID NO: 193004 - DNA, 115 bp, Glycine max
aacaaattttaaaaggacttgcctatatctcaccagttcagctagatacctcccgggaccagatgatatgctagttttggacattgcatattcaatctataaacaatttgaagac

SEQ ID NO: 193005 - DNA, 276 bp, Glycine max
gggcgtctgtgtatgaatgtgtttgtgagaaaatggaagctgcgatgggactgatgcggaggattcctccgaaacacacagaaacagctctgtcagcgcttctgagccttatgcctgacaactcctccgatctcctctctcaagtcgatcagcccctccaggttctgtgcgatgtggaatgcggcaaggagttcattttgtgcgaatacaatagagatgccgactcttacagatcaccatggtccaataaataccatccaccattagaagatgggt

SEQ ID NO: 193006 - DNA, 281 bp, Glycine max
gcaaggtcctcgtcaacattgagcaacagagtcctgatattgctcaaggtgtgcacggccacctcacaaagaggcctgaggagattggtgctggtgaccaaggtcatatgttcggctatgccactgacgagactcccgagctcatgcccttgagccatgtcctctgccacgaagctcggtgccaagctcaccgaggttcggaagaacgggacatgcccttggctgagacctgatggcaagacccaagtcactgttgagtactacaatgacaagggtgccat

SEQ ID NO: 193007 - DNA, 286 bp, Glycine max
ggggcgaaagctacaatctagaacagttctgaagtctcgacacatttcagtagataacattgtttggtttgccatcagtgaacctctacagagaatggttgtttgagcatgttacatacaattgaaagggcatctagccgagtcggtgcataacctaatcatcattttcaacagtaccatctttgaggtgaaaatgtttttctctcttctggaactctgtcaaacctttcccacttcccgtcacaccaacctttccctgaggatcatcaggagatttaaaaatact

SEQ ID NO: 193008 - DNA, 283 bp, Glycine max
ctcgtgcctctagggttatcatatctccatttccatttcctctctctcagtttccaagaatcttaagctatgggaaagtcttacccaaccgtgagcgctgattaccagaaggccgttgagaaggcgaagaagaagctcagaggcttcatcgctgagaagagatgcgctcctctaatgctccgtttggaatggcactctgctggaacttacgacgtgagctcgaagaccggtggtcccttcggaaccataaagcacccctccgaactcgctcacggcgctaaca

SEQ ID NO: 193009 - DNA, 283 bp, Glycine max
gagggtcgccacgtttagcaacaaccaaaccctctctactctttcttcttctcttcgctagggttttagcttcttcctcttcacttcgttcttctggcctctacaatgagcaacgacaaggacaccttcaacgtcgctgatctcacttccgctctcaacgaggacaatagagcagaccttgtcaatgctctcaagagcaagatacagagtttggctggacagcattctgatattctagagtctctgtcgcccaatgtcaggaagcgtgtggaggttcttagag

SEQ ID NO: 193010 - DNA, 282 bp, Glycine max
ctttcacctcttgttttccccaatccttttcgcctttgtctgcgaacggcgtcgttcgatcaggcacctcccggcgatgtcaaatccggtgacaaaatcttcaggaccaagtgcgctcagtgccacaccgtcgaaataggtgccggtcacaagcaaggacccaatctgaatggtttgtttggaaggcaatctggcacaactcccggatattcctactcttcagctaacaagaacatggctgtgacttgggaagaaaagacactatacgattacttgcttaac

SEQ ID NO: 193011 - DNA, 267 bp, Glycine max
ggatcgagatcctctatatatagttctctggattttaaggtctcatccatttaagcacaaatgggtagcacagagttacttcaaggatttgattatttgccttaccgcaccacttggatcaactcaagctcaattgcagattggtttctatgccaaaagttgtccaaaggctgagcaaataattctgaagtacgttgttgagcatatccacaacgctccatcactagcagctgctctcataagattgcacttccatgattgttttgt

SEQ ID NO: 193012 - DNA, 277 bp, Glycine max
agatattgcacgtgcaaggtgggcaatgcgggaaccaaatcggttccaagttctgggaagtgatatgcgacgaacacggcatcgaccccaccggaaagtacaccggcgacgaggcctccgatctccaactggagaggatcaacgtctactacaatgagcgcctccggcggaaggtacgttccccgggccgtcctcatggatctggagcccggcaccatggacagcatcagatccggcccatacggcaagatcttcaggcccgacaacttcgtctttg

SEQ ID NO: 193013 - DNA, 272 bp, Glycine max
ctcgagccgcaaaaacatcgaaagagagaggcatggccgagcaaaccttcatcatgatcaagccagatggcgttcaaagaggccttattggcgagattattagcagatttgagaggaagggtttttacttgaaagggttgaaactcgttactgtggaccgtccttttgctgagaagcactatgctgatttgtctgcaaagcctttctttagtggtttggtggattacattgtctctggccctgttgttgccatgatctgggagggtaagaat

SEQ ID NO: 193014 - DNA, 273 bp, Glycine max
gtttcctatgccattggtgtccctgagcccttgtcagtgtttgtggacacttatggaactgggaagattcctgacaaggagattcttcaaattgtgaaggagaatttcgacttcagacctggaatgatcaccattaacttggaccttaagaggggtggccataggttcctcaagacagctgcttatggacactttggaagggatgaccctgacttcacctgggaagttgtgaagccactcaagtctgagaagcctcaagcttaagattgttgt

SEQ ID NO: 193015 - DNA, 280 bp, Glycine max
  unsure (1)..(280): unsure at all n locations
gagaacagcnacnacatgnatggnnggnnagttccgatcgatntngganggnctcnncgaggaagggtgtgncgaagaancggggnntcanatctgagaagacngcgtcgactaagtgtggnacaagtganngctttggagaagaactttgaggttgaaancaagcttgaacctgagaggnaggtcaagcttgcccaagancttgggttgcagcctagcacaagtagccgtttggttccanaaccgccgagccncatggaaaaccagacantggagagag

SEQ ID NO: 193016 - DNA, 280 bp, Glycine max
cccagccctctctctttcttggcatggccaatctactgggctgtccaaggttgcatccttactggagtttgggtcattgcccatgagtgtggccaccatgcattcagtgactaccagttgcttgatgatattgttggccttgtcctccactccggtctcctagtcccatacttttcatggaaatacagccatcgccgtcaccactccaacactggttctcttgagcgggatgaagtatttgtgccaaagcagaagtcctgtatcaagtggtactctaaat

SEQ ID NO: 193017 - DNA, 283 bp, Glycine max
aaaaaacaaggttttagccatggcatcgaagcggatcttgaaggaactcaaggatctccaaaaggatcctcctacctcatgcagcgccggtcctgttgctgaagacatgtttcactggcaagcaacaattatgggtcctccagacagtccttatgctggaggtgttttcctagtcactattcatttccctccagattatccctttaagccacccaaggttgcattcaggacgaaggtatttcacccaaatataaatagcaatggaagcatttgccttgacata

SEQ ID NO: 193018 - DNA, 282 bp, Glycine max
acgcgcaacgccctcgacctattctcaaactttaaataggtaggacggtgcggctgctctgttgagccgcgccacggaatcgagagctccaagtgggccatttttggtaagcagaactggcgatgcgggatgaaccggaagctgggttacggtgcccaactgcgcgctaacctagaccccacaaagggtgttggtcgattaagacagcaggacggtggtcatggaagtcgaaatccgctaaggagtgtgtaacaactcacctgccgaatcaactagccccga

SEQ ID NO: 193019 - DNA, 278 bp, Glycine max
ataccctcccctcacactctccaaaccctagcggcactacacacgttatctctctctctctctctctctctccctctctccttccccaagatgtcgagcgccgatcccgagcaccgagaagacccccacgcacccgccgtcggcgacgacgaggacaccggagcacacgtcgctcccatcgtcaagctcgaggaggttgctgtcaccaccggcgaggaggacgaagatgcaatcctagatctcaaatcgaagctttaccggttcgacaaggatgggaa

SEQ ID NO: 193020 - DNA, 273 bp, Glycine max
attcaaattctcagtgaaaccaattcagctgagtccaaatcccaaatccgaatcaaaatccgaagtgagatttgcgatggagacgcttcagcgaatgtttgcaggtgcaggtggagcgctagggcagcctcccccagattccccaactctcgattcctccgagcaggtctacatctcctcactgggtctcctcaagatgcttaagcacggaagggctggggttcccaccgaccccccgcgccccatgcttggagacatcctggaccccccccc

SEQ ID NO: 193021 - DNA, 270 bp, Glycine max
cctttctcccacaaactccgattcttcttgtaaacagcggtgccaggtgttaatctagaagttgatataggatgggggcaatgatgtcgaggttctggttcatgttattccctgcaaaagagtataagattgttgttgttggattggataacgctggaaaaaccactaccctttataaattgcatctgggtgaggttgtaacaaccaatcctactgttggtagcaacgtcgaagagctcgtctacaagaatatacgatttgaggtctggg

SEQ ID NO: 193022 - DNA, 274 bp, Glycine max
ctcaccctcctcttcacacattttctgtgcgctctaacaaacattctcgttcacactttcagattgtgtgaagatgggggcgggtggccgaactgatgttcctcctgccaacaggaagtcagaggttgaccctttgaagcgggtgccatttgaaaaacctccatttagtctcagccaaatcaagaaggtcattccacctcactgtttccagcgttctgttttccgctcattctcctatgttgtttacgacctcaccatagccttctgcctctat

SEQ ID NO: 193023 - DNA, 259 bp, Glycine max
gcatacctgatgtaatacacaagtactggccaacccatgccactctctcaactcattgcttcacttccaattcacccttctaaggcttgcttcattttccgcttgatgcaaattttgactcattccggtttcttctctcaacacaataatgccaccgaaaattatgagcaagaagaagtgagttatgtgctaactgatgcatctaaactactccttaaggaccatcactttagtatgatttccttgccacaagtcatac

SEQ ID NO: 193024 - DNA, 265 bp, Glycine max
tcaaagatgtttcctttcgggcaaaagggtcaaaagataaaggggactatggtggttatgcagaagaatgtgttggatatcaacagcatcaccagtgttggagggatcgttgaccaaggcttaggcttcataggcagtgcagtcgatgcacttacttttgcagccaccaaaatctccatccagttgattagtgctaccaaggctgatggtgggaaaggaaaaattggaaagagtacaaatttaagaggaaagataacattaccaa

SEQ ID NO: 193025 - DNA, 258 bp, Glycine max
gcgtctgcttggggcaaatactactactttaattactggaaaaaaaccacctcaaccaacacaaacatcaaccttaaaatgattatccctggtcctagaggctaccctttcattgggagtatgagtctcatgacatccctcgcacaccaccgtattgctgcggcgggggaagcatgcaacgccaccaggctcatggctttttccatgggtgacacacgcgccatagtaacgtgcaaccccgatgtcgctaaagagatt

SEQ ID NO: 193026 - DNA, 257 bp, Glycine max
ttaacctttctggctgtgttaatatgcgtttcagcactgtcactgagtccttctgttgcgggggaagggcaaaataatggccttgttatgaacttctacaaggaatcatgccctcaggctgaagacatcatcacagaacaagtcaagcttctctacaagcgccacaagaacactgctttctcctggctcaggaacatcttccatgactgtgctgttcagagttgtgatgcttcactgttgctggactccacaagaag

SEQ ID NO: 193027 - DNA, 257 bp, Glycine max
caaaattaaattgttttcattatcacttgaacatgtacaacaaaactacatactccttttttatgtatcagtatctttggggaaaccaattcaacgatgctataagctagtttatcgtgaggagaatatgaagttgtttgttttctttgttgctgcagtagttttggtagcatggccatgccatggcgcaggctaccaaaggttccctctccgaatgaaaactggctatggtgagcgttcttcggaggtaaaatgcg

SEQ ID NO: 193028 - DNA, 272 bp, Glycine max
  unsure (1)..(272): unsure at all n locations
gctcgcaattcggctccagaaggcagtcaaatccagttctaanncaagccatcnnagagagctgctatagaataacagtgacacatcctctgatcgttgattgcactgccgatacatgctctattatttactaattgcaaaaccctcaggttgaattcaagagaattgtttcaaccttgaagtatcaaacaaagtgccttgatgtattccctgaccaacaaggtatcttggttggatcaatagaaggaagagttggggtgcatcatttggac

SEQ ID NO: 193029 - DNA, 251 bp, Glycine max
gcaagtttcctatgccattggtgtccctgagcccttgtcagtgtttgtggacacttatggaactgggaagattcctgacaaggagattctgcaaattgtgaaggagaatttcgacttcagacctggaatgatcaccattaacttggaccttaagaggggtggtcataggttcctcaagacagctgcttatggacactttggaagggatgatgcagacttcacctgggaagttgtgaagccactcaagtcag

SEQ ID NO: 193030 - DNA, 252 bp, Glycine max
gtcccttttccccttttgtgctcgtagttgaccgtcgaataaaatctaatcccccaaataaataaagaagcgaaaccaaaccaaaccatcgagtgcgttgcacccccaccgtaagcacagctatgtcgttgcgcaggcgaaccttgctctcggtcattgttctcggcgatagcggggttggaaagacctcgttgatgaatcaatacgtgcacaagaagtttagtcagcaatataaggctaccattggggctg

SEQ ID NO: 193031 - DNA, 255 bp, Glycine max
cgggccgcctcgagaacccggcctccctcgaaaccgacatagccctcctcaagccctcccacgtcttcaacgccgccggctccacgggccgccccaacgtcgactggtgcgagtcccacaaagtcgagaccatccgaaccaacgtcgtcggaaccctcactctcgccgacgtctgccgcgaccacggcctcattctcatcaactacgccaccggttgcattttcgagtacgactccgatcaccccctcggatccg

SEQ ID NO: 193032 - DNA, 255 bp, Glycine max
gaggtgccgtgtcaaaatggtgaagataactcttggtactttcgatgactcttttggtgttgcctctcttaaggcttatttggcagagttccatgcaactctgattttcgtgttcgctggtgttggttcagccatcgcttacaacgagcttacaaaagatgcagccttggatccaacggggctggtggcagtagctgtggcccatgcatttgcactgtttgtaggtgtctccgtcgcagccaacatctcgggtgg

SEQ ID NO: 193033 - DNA, 252 bp, Glycine max
cggctcgagcggctcgagaaagacagtcatggcgtcgtttcttcaatggtttctggatccgaagaagaactggttcgccgctcagcacatgaaatccctctccagacggcttcgcaaatacgggctccgatatgacgatttgtacgatccttactacgatctagatgtgaaggaggcgctgaatcggcttccgaaagatgtggtggacgctcgctcagcgcgtcttaaacgcgccatcgatctttccatgaa

SEQ ID NO: 193034 - DNA, 238 bp, Glycine max
gggatttcgtcatcatgagtctcttcggtcttggaaactgtaaccaaattacatttcgtccaaaaaagagtgctccatctggaagtaagggtgctcaacttcaaaaacacatcgatgccccgttgggtagtgggaacttgagggaggctgttaaactgcctcccggtgaagatattaatgaatggctagctgtaaacaccgtggacttctttaatcaagtgaatatcctgtttggtac

SEQ ID NO: 193035 - DNA, 254 bp, Glycine max
gcggtaccgttgctctccaagaggatcgtgaagaagcgcgtcaagaagtttatacgctcccagagtgatcgcaagatctccgtcaagccaagctggcgcagacccaagggtattgattctcgtgtcaggagaaagttcaaaggatgcactttgatgcccaacattggttatggctcagacaagaaaacccgccattatctaccaaatggtttcaagaaatttgtctcgcacaatgtgaaagacctggaacttct

SEQ ID NO: 193036 - DNA, 251 bp, Glycine max
cgctcacataaaccctaccctcaatttccattcgcaatttttgttgctgctgagcacggaatcggagatgaaagtgaagatcttgcaatggcatgctattgcttcttggacttgggatgcacaggacgaaacgtgtgggatttgtaggatggcctttgatggatgttgtcctgactgtaaacttcctggagacgactgcccgctgatttggggtgtatgcaatcatgcgtttcatacgcatgtatcctgaa

SEQ ID NO: 193037 - DNA, 246 bp, Glycine max
cacagcctccaattcgtgccactctcttcaaaatggccgttaccttctcaaatctccacacagaatcaggtcttcagtccctcgacgacttcctctctgggaaggtctacgtttctggggatcagttcacaaaggacgacatccaagtgtatggtgctgttttggagaagccacgtgactcttttcccaatgctgccaagtagtacgaggtgttctcatcacagcttgctgcgagcatccccggca

SEQ ID NO: 193038 - DNA, 254 bp, Glycine max
acacggtggctttgctgaaaccatgatcgttgagcaaaagtttgtggtgaagattccagagggtttggcgccagagcaagtggcaccattactgtgtgcgggtgtgacagtgtacagtccactggtacactttgggctgaaagagagtgggctaagaggtggaatattggggcttggaggagtgggacacatgggggtgaagatagccaaggctactgggtcatcatgtgaactgtgataagctcttctgacaa

SEQ ID NO: 193039 - DNA, 260 bp, Glycine max
cctcgagccgattcggctcgagaaaaggacattcattcatctatgactacccttattgctcacagcaaccactctccccaagacagatgctgaagctctcagaaaggcttttgaaggatggggaactgatgagaacactgtcatagtaattttgggtcatagaactgtgtatcagaggcagcaaatcagaagagtttatgaggaaatttaccaggaggatcttgtgaagcgcctagagtctgagatcaaaggagactttg

SEQ ID NO: 193040 - DNA, 245 bp, Glycine max
gcttcttctagatttaaggaagatgggtaaggaaaaggttcacatcagtattgtggtcattggtcatgtcgactctggtaaatccactaccactggtcacctgatttacaagcttggaggcattgacaagcgtgttattgagaggtttgagaaggaagctgctgagatgaacaagaggtctttcaagtatgcctgggtgctggacaaacttaaggctgagcgtgaaagagggctcacattgatat

SEQ ID NO: 193041 - DNA, 245 bp, Glycine max
atcgaggcgttcgagccggctgagttaaaggcttggactgcctggaaacggaggcactgaagacgtgctcaacaggaagaggggtttctctgagactgaaactggtcatgaagatgagtctgccaccactgtggatttgatgcttaatctttcttctaaggaggccgcaaccactgctgctgctgctgcagatccaactgataagcacaagactttgcctaaggagaagacccttctgccagcag

SEQ ID NO: 193042 - DNA, 242 bp, Glycine max
gcttcttctagatttaaggaagatgggtaaggaaaaggttcacatcagtattgtggtcattggccatgtcgactctgggaaatccactaccactggtcacctgatttacaagcttggaggcattgacaagcgtgttattgagaggtttgagaaggaagctgctgagatgaacaagaggtctttcaagtatgcctgggtgctggacaaacttaaggctgagcgtgaaagaggaatcaccattg

SEQ ID NO: 193043 - DNA, 248 bp, Glycine max
ctcgagccgaatcggctcgaggcagccatggtgaagtactccagactacccgacaatcccaacaagtcctgcaaggccagaacgcgctgaccttagagtgcatttcaagaacactagggagactgcctttgccatcaggaagttgcccctggttaaagctaaaagatacctggaggatgctttggcccacaaacaggccatccctttccgacgcttctgtggtggtgttgggaggacagcccaggcta

SEQ ID NO: 193044 - DNA, 254 bp, Glycine max
cggctcgagagaatatgaagttgtttgttttctttgttgctgcagtagttttggtagcatggccatgccatggcgcaggctaccaaaggttccctctccgaatgaaaactggctatggtgagcgttcttcggaggtaaaatgcgcaagttttaggcttgctgtggaagcacacaacatccgagcctttaaaaccattcctgaagagtgcgttgaaccaacaaaggactacattaatggcgaacaatttagatca

SEQ ID NO: 193045 - DNA, 251 bp, Glycine max
ctcgagccgcttgtgatcatggacgtctcttattcatgcaatgaacaacaagcacccgagatccgttttctttgatttggaaactacagtgcccaaaaagggtggagagcgtttctgggttctggagtttggtgcaattgtggtcacaccccacaaactcaccgagattgagacctacaccacgctgataagacccaaagacgcatctgtggtgtcagtgaaatccagcagaagtgatggaatgctcgtaa

SEQ ID NO: 193046 - DNA, 247 bp, Glycine max
cttcgtgcccttgctcgttctggaatgaaaattggccgcatagaagttgtgacccccattccttccgatagcacacgtagaaagagtggtagaaggggtagaaggctttaaggttctcgtggtattttaatttccatgtcaaacagaattgtggcattttgaaattttgcttaagttaatataagaacttctattgtatttcttgaggttttgaacagaatttagttggtacatttaggcattattg

SEQ ID NO: 193047 - DNA, 213 bp, Glycine max
tcagaagacttttagtgaattcttagaaccacttgcacatactcacttcaccaccgagggtgaggttgagttcagaagtattctgtacgttccgggaatgggacctcttaacaatgaagaagtagtgaaccctaaaacaaagaacatacgcttgtatgttaagcgtgtattcatttcagatgattttgatggggagctgtttccacacaacat

SEQ ID NO: 193048 - DNA, 248 bp, Glycine max
ccaagatctaaaagatactctttggtttcttttcaattggctgtatgtgatgtctccatatattatatgcctcctactgcaggttaaatgttacatacatcaactgctatcaggacttgagcactgtcatagtcgaaacgtacttcaccgtgatattaaaggatcaaaccttcttattgacaatgaaggaatacttaaaattgctgacttcggacttgcatctttctttgatccaaatcgccggcaac

SEQ ID NO: 193049 - DNA, 253 bp, Glycine max
gtttatcgtgaggagaatatgaagttgtttgttttctttgttgctgcagtagttttggtagcatggccatgccatggcgcaggctaccaaaggttccctctccgaatgaaaactggctatggtgagcgttcttcggaggtaaaatgcgcaagttttaggcttgctgtggaagcacacaacatccgagcctttaaaaccattcctgaagagtgcgttgaaccaacaaaggactacattaatggcgaacaattta

SEQ ID NO: 193050 - DNA, 236 bp, Glycine max
ggctcgagcttttatatcctctatatatagtcctctggcaattaaggacccatccaaataagcacaaatgcgtagccagagttacttcaaggctttgattatttgccttatagcactaattggatcaactcaagctcaattgcagcttggtttctatgccaaaagttgtccaaaggctgagcaaataattctgaagtacgttgttgagcatatccacaacgctccatcactagcag

SEQ ID NO: 193051 - DNA, 248 bp, Glycine max
cttcgttgcttggtgatgtccctttctgttctcttcactcttggtacttgcgagagaaagccatgccagagacgaagatttttggcatgctgtttggccaaacactcccattccaagttcattgcgagatcttctaaagcctggccctgcaagtgttgaaatcgatgatcaccctatgcaaattgaagaaacacagtacccgaaaaccttcttctataaagaagaccttcatccaggcgaaacaatga

SEQ ID NO: 193052 - DNA, 244 bp, Glycine max
gtggtgttgttactgctgctcttttctcttttcttttctctttagttctctcttcccctttctttttctttttcttcttcttctgagcttgtttaagcttttcttccattaacatattatcataatgtgtggtattcttgctgttcttggttgttctgatgactctcgagccaaaagggtccgcgtgcttgagctctctcgcagattgaagcaccgtggccctgactggagtgggctccatcaa

SEQ ID NO: 193053 - DNA, 245 bp, Glycine max
gtgataaccagttttctctttgattcatcaatggcaactgcgaggaccgtgaaggatgtttcgcctcacgatttcgtgaaggcttatgcttcccacctcaagcgttccggcaagatggagcttcctgagtggaccgatattgtaaaaacagcaaaatttaaggagttggctccatatgatcctgactggtactacattagggctgcctcaatggcaagaaagatctatttgagaggtggtcttgg

SEQ ID NO: 193054 - DNA, 243 bp, Glycine max
gcccaatccttggtgggtctagcatctatccctaccctcgcagggttagaacaggaagagaaaggaccaggacagatcccaacagtgagaaaccgggcgaggtttatgttccaagacatgaaaattttggtcacttgaagtcatcggatttccttacatacggaatcaaatccttatctcacgatgtgatacctttgttcaaatctgcaatttttcaattaagggtcacatcgagtgagtttg

SEQ ID NO: 193055 - DNA, 240 bp, Glycine max
catggaaggggcctgctaaggagtgggaggaagtgctgctaagcttgggagttcctggcagtgaacctggaagtgatggagaagaaattgctccacaggcaaaggaaaatgtggcaacaccataataataagaacaaagatgtgagggaagcctctcctagtctgagtctcgtgaagttctcccagccccttgcttgttattaatattatgttttatatccttcttccaggttcactgcc

SEQ ID NO: 193056 - DNA, 241 bp, Glycine max
ctttctttcactgtcacagagccacatccatgggcttcccagccaacggcgcctctgcggcccagcccctaaacttcctcatctacggccgcacgggctggattggcggcctcctcggctccctctgccgggcccagggcatctccttccattacggctcgggccgcctcgagaaccgggcctccctcgaaaccgacatagccctcctcaagccctcccacgtcttcaacgccgccgggtc

SEQ ID NO: 193057 - DNA, 242 bp, Glycine max
cttgtctgaagttatttcagcaatttttgctgaagttatgcaaggacagcctgaattcactgaccatttgactcataaactaaagcaccaccctggtcagattgaagctgctgctattatggaacacattttggaaggaagctcttacgtgaaagctgctaagaagttgcatgagattgatcctttacaaaagcctaaacaggaccgttatgctcttaggacttcaccacaatggcttggtc

SEQ ID NO: 193058 - DNA, 273 bp, Glycine max
ggaataccaagattaccaccacaaagcaatgggcggtatactttctgcgcttcttggcggcgacgcggcggcggcggcgtcttcgccggagagttctacttctagagtctcctccttccactcgtcgccgcgctggcagcttacttcaacgagatcagagataccgataagctcgttgtgatagatttctcggcgtcgtggtgcggtccttgcaaattcatagagccagcgattcacgccatggccgacaagttcaacgacgttgacttcgtc

SEQ ID NO: 193059 - DNA, 265 bp, Glycine max
acgtggtgttgttactgctgatctcagctcgtgtctcttctcttgagttctctcttcccctatcgtttgcttgatcgtctccatctgagcgtgtatagaggtaactcccatgatcatatgagcacaatgtgtggtattctgctgggcttggttgttctgatgactgtcgagccaagaggggccgcgtgcttgagctctctcgcagatcgcagcagcgtggacctgattggagtcggctccatctccatggtgactgcgttctggc

SEQ ID NO: 193060 - DNA, 267 bp, Glycine max
tttgtattgtacttcattgaacgtttcatggaggaggcaccggaaagactgaaaatgaaagatttagatatgtttggaaggcgatggttcaaacctcaagaggcgtccaatttgagagtgaaagtccggattctcttactgccctgcaactgattgtgttgagaccaccgaggattctgtgacttaacatggcagaattgcaattgtcatttccttgaacgaacaatctgttgatattcgtatggttggtgccagtttttttttttc

SEQ ID NO: 193061 - DNA, 270 bp, Glycine max
atggcgagcgctcccactccacgcgaagagttcgtgtacatggcgaactgcgcggagcaggccgagcgctacgaggagatggtggagttcatggagaaggtctccgcctccgccgagagtcaggagctgaccgtggaggacgtaacctcctctccgtcgcctacaagaacgtgatcgccgctcgccgcgcctccgggcgcatcatctcctcaatcgagcagaaggaggagagccgcggcaacgaggaccacgtcggcgtcatccgcgact

SEQ ID NO: 193062 - DNA, 271 bp, Glycine max
  unsure (1)..(271): unsure at all n locations
gggagctaaggttacatggtcagagaacantgtcactgtttctggaccaccacgagatttttctggtcgaaaagtcttgcgaggcattgatgtcaatatgaacaagatgccagatgttgccatgacacttgctgttgttgactatttgctaatggtcccactgctataagagatgtggcaagttggagagttaaagagactgagaggatgatagcaatctgcacagaactcagaaagctaggagcaacagttgaagaaggtcctgattact

SEQ ID NO: 193063 - DNA, 271 bp, Glycine max
atttagccaaggatcctctggtatttgattggatgattggtatcaggaggaagattcatgagaatccagaactgggttatgaggaatttgagaccagtaagctgataagaactgaattggataaactgggcatctcatataatacccagttgcagtcactggtgttgttggcttcatagggactggactccctccttttgttgcattaagagctgacatggatgctcttactctgcaggaaatggtggagtgggagcacaagagtaaagta

SEQ ID NO: 193064 - DNA, 270 bp, Glycine max
ctcgaccgaatcggctcaggccgtgtcgcagcaaaaccaacgcacatattaacttgacttgctctaagtcatggctacgatcttgcacgcaaccaaagcaatcaagaatgctttcacgactctgattgcggacgagtacatggcgtccaagtggaattggcccctaatttcgagatgggtgtctctaatagaactcctgaattccttaaaatgaatcccataggaaaggttcctgtcttggaaacgcccgatggtccagtctttgagagc

SEQ ID NO: 193065 - DNA, 268 bp, Glycine max
tgcctctcgtgaaggctgtggtgtacgaggtaatgcggatcgaacctgcggtgccgtaccagtacgcacgcgcgagggagaaccttgtcgtttcgagccatcacgcgtcgtttgaggtgaagaagggggagatgctgtcgggtaccagccgtttgcgacgccggatccgaggatcttcgaggatgctgaggtgtttgttccgcggaggtttgttggggacggggagacgctgctgaagcacgtgctgtggtcgaatgggagggagacg

SEQ ID NO: 193066 - DNA, 271 bp, Glycine max
taccccagagtatgatgagatggtgaagaatcctcaaaaggcttatctgagaacaatcacacccaagtttgagacccttattgatctttcagtgatagagatattgtcaaggagctgttctgatgagatataccttggaagagggagactccaaattggactactgataagaaggcactagaagctttcaaaaggtttggaagcaaactgactggaattgaaggaaaaatcaatgcaaggaatagtgatccaagtctgagaaaccggactg

SEQ ID NO: 193067 - DNA, 272 bp, Glycine max
catagctccatcactgcagcattagggtttatcatctgcttcaatggggaagggaacagggagcttcggtaagaggaggaacaagacccacactctctgtgtgaggtgtggccgccgcagcttccacctccagaagagcgctgcgccgcttgtgctttccccgctgcacgcacgcggaaatataactggagcgtcaaggcaattcgcagaaagaccaccggaactggcaggatgagatacttgcgtaacgtgcctcgccgtttcaagagtgg

SEQ ID NO: 193068 - DNA, 263 bp, Glycine max
agctgacacagcaaatgtaggataccccgaacatgatgcgtgctccagatccaaggcacgggcgttacctcacggcatcagccatcttccgtggctagatgagcaccaaggaggtggacgagcacatgataaacgtgagaacaagaactcttcatattttgtcgagtggattcccaacaatgtcaagtcgagcgtgtgtaccaatgcaagaacatcttcctcctaaacatggccgtgaactgctcactcaccctcctgaacat

SEQ ID NO: 193069 - DNA, 193 bp, Glycine max
ccttggagctgatcaatatctcgttagctctgatagccactgccatgcacgaatctgctaattccttgactagctcattgacactgtgcctgttggtcaccctcttgagacttatctctccttgctcaaacttgatggcacgttgatcttgatgggggtcatacacaaccctcttcaatttgttagccccatg

SEQ ID NO: 193070 - DNA, 264 bp, Glycine max
cggctcgagctgcaccactccctggtcagcttcccaagtactcaggtgcatttgatgctgttacacagacaatagcagctgaaggagcaaggggtttatacaaaggtatgggtgctccgcttgctacggtagcagcttcaatgctgtcctgtttacagtgaggggacaaatggaaacattagtgaggtccaatcctggttcccccctcacagtggatcagcagtttgtttgtggagctggagccggagttgctgtttccattct

SEQ ID NO: 193071 - DNA, 266 bp, Glycine max
ctgaccgtaccccaaaccgacacaggtgaacaagtagagtatactagggcgcttgagagaaccatgtcgaaggaactcggcaaaatgaccccgtaacttcgggagaaggggtgctctcctatcttttgattaggaagcggcacataccagggggtagcgactgtttattaaaaacacaggactctgctaagtggtaacacgatgtatagagtctgacacctgcccggtgctggaaggtcggaaggagaagtgttataagctttgaa

SEQ ID NO: 193072 - DNA, 266 bp, Glycine max
gccagtagtcatatgcttgtctcaaggattaagcgatgcatgtgtaagtatgaactaattcagactgtgaaactgcgagtggctcattaaatcagttatagtttgtttgatggtatctactcggataaccgtagtattctagagctaatacgtgcaacaaaccccgacttctggaatggatgcatttattagataaaaggtcagcacaggctctgcctgctgctttgatgattcatgataactcgtcggatcgcacgggctttgtg

SEQ ID NO: 193073 - DNA, 263 bp, Glycine max
attctctcttcctttttgggttctcctcaatccattccaagcttcaatctattctctcttctgccctctgcacctcccctcacacccttcctcattcgcaggaggtgaagatgtcgaccccggcaaggaagagatgatgagggattttaaaagattgcaacaagatcctcctgctggcatcagtggggctccccaagacaataatattatgctttggaatgctgttatctttggaccagatgacaccccttgggatggaggta

SEQ ID NO: 193074 - DNA, 202 bp, Glycine max
agcgagttttctggccgaaaagtcttgcgaggcatcgatgccaatatgaacatcatgccagatgttgccatgacacttgctgttgttgactatttgctaatggtcccactgctataagagatgtcgcaagttggagagctaaagagactgagaggatgatagcaatctgcacagaactcagaaagctaggagcaacagttga

SEQ ID NO: 193075 - DNA, 177 bp, Glycine max
  unsure (1)..(177): unsure at all n locations
gcattatgctcacaatgtcagaatttcanagacgttccatgaggaaactgggaatcacatttgcttccctttaccccggttgcattgccacaacaggcctgttcagagagcacattcccttgttcagaactctgttccctccattccagaagtacataaccanaggctatgtctcag

SEQ ID NO: 193076 - DNA, 265 bp, Glycine max
catctttgctcttgtctcgttcacttcccatgcttctgtcaatgatttctgtgtagcagacctaaaaggtccagatagcccttcaggctatcagtgcaagccacctaacacagtcacagtggatgactttgtgtctctggctttgtagctggaaacaccacaaacactttcaatgctgcattaacctccgcatttgttactgattttccaggtgtgaatggtcttggtgtatctgtggcacggttagacatagccaaaggtggat

SEQ ID NO: 193077 - DNA, 261 bp, Glycine max
ggtggctgcgccgttattgacggtggttttgccactgaacttgaaaggcatggggcggacctcaatgacgaactctggagtgccaaatgccttattagctccccacatcttgtccgaacggttcacctagttacctcgatgcaggagcaaacataatattaacagcatcttatcaggccactattcaaggttttgaggccacagggttctctagagaagaaggtgaaactatgcttagaagaagtgtggagattgcacgtg

SEQ ID NO: 193078 - DNA, 263 bp, Glycine max
ctcattctccatacctcaacgaagaggttaaagtcacggcaacactttgctgtccgccttgaccgagcagagcttcgtcttggccctcgattttgccctaaagtactctcagtcacaacagacaccgtcgtgtcgtcgtcgtcatcaatggcaccgaagcagaccaaggctgagaagaagatcgcttacgatgcgaagctgtgcgacctaatggaggagtacggccagatcctcgttgtgaactccgataacgtgggatcgaa

SEQ ID NO: 193079 - DNA, 259 bp, Glycine max
cggctcgagaaaacccttgaaggtgctactgaagttatatgttcacgcactccatcgcagctacaatatttaaaacagatctatcattctatgtttggtgtttatcttgagcatgatattcaaacaaacacagccccggcgatcatcaaaagctcttgcttgcatatataagcacacctcgtcatgagggccccgaggttaatagagaaattgctcagaacgatgcaaagggtctttacaaagcaggggagaagaaact

SEQ ID NO: 193080 - DNA, 206 bp, Glycine max
aacagtgtgatgaaaatgaaggtccttgttttcttcgttgctacaattttcgtagcatggcaatgccatgcgtacgatatgttccctctccgaatgaacactggctatggtgcccgtactccggaggtgaatgcgcaagttggaggcttgctctggaagcacacaacatctttggctttgagaccattcctgaagagtgcgttgaa

SEQ ID NO: 193081 - DNA, 256 bp, Glycine max
ctaagtctaagtgcagtaccgttgggattcaaggaatcgcttgggccttcggtggcatgatctttgccctcgtttactgcaccgctggcatctcagggggacacataaacccggcggtgacatttgggcgtttttggcgaggaagttgtcgttgcccagggcgatgttctacattgtaatgcaatgcttgggtgctatttgtggcgctggcgtggtgaggggtttcgaggggaaaacaaaatacggtacgttgaat

SEQ ID NO: 193082 - DNA, 262 bp, Glycine max
ctcgagccgtttgacacgcacagcttcaatcaccgaccacaccacccatcaacgacatgcatcctctttcccttctcaagactgcccaaggccaccctatgttcgtggaactgaaaaatggggagacatatacgggcatttggttaattgcgacacatggatgaacatccatctgcgagaagtcatttgtacatctaaagacggagatagattttggaggatgcctgaatgctacatacgaggcaatacaatcaagtacctt

SEQ ID NO: 193083 - DNA, 260 bp, Glycine max
atgatctacctttgtggggatatgttggtgagttacatcctgataagaacagtgataatggcaagcatgtcatttacacacacaaaaacattattgttaaatacaacaatgatcagattattcatgttaatctcactcaggatatcccaaagcctttggaagtaggaaaacatttggacatgacatattctgtcaaatgggattctaccaatgtcactttcgggcgtcgctttgatgtctacctggaccatcctttcttt

SEQ ID NO: 193084 - DNA, 257 bp, Glycine max
gtaattctagagctaatacgtgcaacaaaccccgacttctggaagggatgcatttattagataaaaggtcaacacaggctctgcctgttgctttgatgattcatgataactcgtcggatcgcacggcctttgtgccggcgacgcatcattcaaatttctgccctatcaactttcgatggtaggatagtggcctaccatggtggtgacgggtgacggagaattagggttcgattccggagagggagcctgagaaacgg

SEQ ID NO: 193085 - DNA, 261 bp, Glycine max
cgcatcttggatatctggctaaaagattgaatattgtgttaatctttctagtagtcaaggggaacaatgaatgcactagcagccaccaacaggaactttaagttggcctctaggcttctgggattcgattcaaagcttgagaaaagtttgctgattccattcagggaaatcaaggttgaatgtaccatacctaaagatgatggcacgttgcaatcttatgttgggttcagggttcaacatgataatgccagaggccccatg

SEQ ID NO: 193086 - DNA, 263 bp, Glycine max
gctcctctcactcctactggatttcgatgggatagacaatggatggtggtgaattcccaacggaggatgtacactcaaagagttgaaccaaggcttgctttggttgacgttgaattgccatctgaggcatttcttgaaaactgggaacctacacaagactcctacatggtggtgaatgcacctgggatgcaacctctcaaaatatgtttgagccaacaagggaaggaggtagcaaatgctgtctcagtatgggaatggactgg

SEQ ID NO: 193087 - DNA, 267 bp, Glycine max
agaaagtcgtgacaggcgaccagcttttgttctctgccgagcaccggtggttactgagattattaacagccaccaactagagattgtaacattagctaatctatcctctttgacagtaatcactgaaagagatgctgttccatctggatatgctgatgctgttgtaaatgaaaacctttctgtttatttagagcttcaaggaactaattctgcagaagcagaggggaagatcaagaagatagatgagctgaaaaagcaaatagaaag

SEQ ID NO: 193088 - DNA, 264 bp, Glycine max
ggcaaagttaataaaattctttgagttgaacacaggggccaagattccttctgttgggttaggcacttggcaagctgagcctggtgttgtagccaaagctgtcaccacagccattctggttggatacaggcatattgattgtgctcaagcgtataacaatcaagcagagattggttctgctcttaagaagctttttgatgatggtgtggtgaagcgtgaggacttatggatcacctccaaactctggtgttcagatcatgcttc

SEQ ID NO: 193089 - DNA, 263 bp, Glycine max
cttttgtcttcgttccattatctagttctcaattctcttcacactttgcctctgaaagaaatgggtagtcttgaagcggaaagaacaacagtaggattggcagcaagagacccttcagggattctctccccatacacctacaatctaagaaacacaggccctgatgatgtttacattaaagttcactactgtggaatttgccattctgatctccaccagattaaaaatgatcttggcatgtccaactatcccatggtcccagg

SEQ ID NO: 193090 - DNA, 258 bp, Glycine max
cttctaatgccatcatccaatgcacctcttcttcttcgtttgactatgacgtgtttgtgagcttccgcggtgaagacacacgcaacagcttcaccgcttttctttttggagctctgaaaaaacaaggcatcgaggccttcaaagatgataaagacatcaggaaaggcgaatccatagcaccagagctaatacgagccattgaagggtctcatgttttcgttgttgtcttttcaaaggactatgcttcctcaacttggt

SEQ ID NO: 193091 - DNA, 261 bp, Glycine max
gctccctgagagagctcgtcgcggcggttgcagaagaagattgcaagatgaagttcaacatcgcgaatcccaccactggatgccagaagaagctcgagatcgacgacgatctgaaactgcgagcattttgggacaagaggatctcacaggaggtcatcggagatgcactcggtgaggaatttaagggctatgtcttcaaaattaccggaggttgtgacaaacaaggatttccaatgaagcagggagtgctgactcctggtt

SEQ ID NO: 193092 - DNA, 260 bp, Glycine max
agctcgccttgcttcgccacaacagcaactgcagcaatggctcccaaacgaggtggaaaggctccggctcttgccgctaagaagaagcctgagaaggtttcgaatccgttgttcgagaagcgtccaaagcagttcggaatcggaggggcgttgcctccgaagagagacttgactcggttcgtgaagtggccaaagaatgttcaaattcagaggaagaagaggattctgaagcagaggttgaaggttcctccagctttgaa

SEQ ID NO: 193093 - DNA, 254 bp, Glycine max
gcttgatgatgtcactttccatcaatgtgtaaatttgacaaggttcaactcagagaagacagttagttttgtaccacctgatggtgaatttgaactaatgaagtatcgtataactgagggagttaatcttccgttcaaagtattgccaaccatcaaggaacttggtcgatcacggatagaagtgaacgttaaggtaaagagtgtttttcgtgcaaaaatgtttgcacttggggttgtagtcaagattcctgttc

SEQ ID NO: 193094 - DNA, 257 bp, Glycine max
atttaactcgaccttgtatgatgaatgggttaacaagggcaatgcaccggcactgcccgagactcttaagaattacaacaagctggtgtctcttggcttcaagattatattcttgtcaggaagaacactggacaaacaggccgtaacagaagcaaacttaaagaaggctggctaccacacatgggaaaaattaattctcaaggatccacaagatccttccactccaaatgcagtttcatacaaaacagcagcgagag

SEQ ID NO: 193095 - DNA, 258 bp, Glycine max
gctagctatatgcttaacacatgcaagtcgaacgttgttttcggggagctgggcagaagaaaaagaggctcctagcgtgaaggttgcttgtctcgcccaggaggtgggaacagttgaaaacaaagtggcgaacgggtgcgtaatgcgtgggaatctgccgaacagttcgggccaaatcctgaagaaagctaaaaagcgctgtttgatgagcctgcgtagtattaggtagttggtcaggtaaaggctgaccaagccaat

SEQ ID NO: 193096 - DNA, 256 bp, Glycine max
  unsure (1)..(256): unsure at all n locations
gaacaattcaaaggtagtgttgattgattctttgcagtcatgggagttccacgtcagatacgctatcacatcgcaatactcctattgncggtcacttcactgcgtcatagaccatgccatcggtggctatgactcctgtttttgaagaactggcttcaagctatccggaagttctgtttctcactgttgatgttgatgaagtcaaggaggtagccaccagaatggatgtaaaggcaatgccaacattgttgctgct

SEQ ID NO: 193097 - DNA, 268 bp, Glycine max
gacaatgaggcctgctcttgctttgcttcctcttctatttgctttcttgttagctgccactacagaatcaagaaaagatacaggggaatattggaaaatgatcatgaaagatcaggaaatgccagaaggacttcaaggtcttgtttcatttcaatctgaaaataaccctaagactcaagagcagcttggtaaaggttccaaaaaccattgtgaagagtctctagttacaaatacacaagttaatagtgacttcgaacccataccaagt

SEQ ID NO: 193098 - DNA, 267 bp, Glycine max
ctcagcctcaacaacacaaggattcttcggaggtttcgggttcagctgcggagaaagaaggtggacgcttaacgatttcgatatcggaaagcctcttggaaggggaaaattcggtcacgtctatttggccagagagaagactagtaatcatattgttgctttgaaagtactcttcaagagtcaattgcaacaatcccaagttgtgcatcaacttcgacgtgaagttgaaatacagagtcatctccgacatccccacattttgcgcct

SEQ ID NO: 193099 - DNA, 260 bp, Glycine max
tggaggggaaggagcaggatgtgtcgttgggagcgaacaagttccccgagagacagccgattgggacggcggcgcagagccaagacgacggcaaggactaccaggagccggcgccggcgccgctggttgacccgacggagtttacgtcatggtcgttttacagagcagggatagcagagtttgtggccacttttctgtttctctacatcaccgtcttaaccgttatgggagtcgccggggctaagtctaagtgtagtacc

SEQ ID NO: 193100 - DNA, 257 bp, Glycine max
gtgagacaaaataaaaatcaaagagcataatgtcagggatcattcacaagattggggagacccttcatgtgggagggcacaagaaggaggaggagcataagggtgagcaccatgctggagaatacaaaggggagcaccatggtgaacacagtagtgagtacaaaggagagcatcatggtgaacacaaagctggagagtaccatggtgagcacaagccagagcacaaagaggggttcctagacaaagtcaaggacaag

SEQ ID NO: 193101 - DNA, 256 bp, Glycine max
ctttggtattccaatggccactgttgaggttgtgtcagcaaaggtttccctcccagaggacacaaaagaggcatgcattgaaggctgatgagaagaagaacacagaagaagttgttgagactccaacaccaacaccagaaaatgtcgtcactgagcaaacaaaggaggaaagtactgaggccccacaacctgcagcttcagaagacaagccctcggttgaagttgtgtctggaactgtcacagaagagccaacagt

SEQ ID NO: 193102 - DNA, 265 bp, Glycine max
ctcgagccgcaagtacccaagctcaagtaacaggttgagcttccactacattggactcacacgaacctgaaaaggatgccatcctcaaatgggaatccatcaaaccaactgttataactgtccctcgcaaagccttggccattgttataatcaacagccaaacccacgagatcttaattgatctaaaggcaaggcgcattgtctccgacaatattcactccgggaatggcttccctaccctttccgttgatgaacaagtcgttgc

SEQ ID NO: 193103 - DNA, 243 bp, Glycine max
ctccaatagcgtatatttaagttgttgcagttaaaaagctcgtacttggaccttgggttgggtcgatcggtccgcctccggtgtgccaccggtcggctcgtcccttctgccggcgatgcgctcctgtccttaactggccgggtcgtgcctccggtgctgttactttgaagaaattagagtgctcaaagcaagcctacgctctgtatacaaaacagagaaaccacaaaaagacaaagaaacaaa

SEQ ID NO: 193104 - DNA, 255 bp, Glycine max
ggtggaggcccgcagcgatactgacgtgcaaatcgttcgtctgacttgggtataggggcgaaagactaatcgaaccgtctagtagctggttccctccgaagtttccctcaggatagctggagcccgcgggcgagttctatcgggtaaagccaatgattagaggcatcgggggcgcaacgccctcgacctattctcaaactttaaataggtaggacggtgcggctgctctgttgagccgcgccatggaatcgagag

SEQ ID NO: 193105 - DNA, 256 bp, Glycine max
cgcaaatctcttagttcctacgattcgttccatttcttccaaaatggccaaagacccagttcgcgttctcgtcactggagctgcagggcaaattgggtatgctcttgtccctatgattgctaggggagtgatgttgggtcctgaccagcccgtgatcctccacatgcttgacattcctccggcagcagagtcattgaatggggttaaaatggaattggtggatgctgcattccctcttcttaaaggtgttgttgcc

SEQ ID NO: 193106 - DNA, 256 bp, Glycine max
gtcacactctacgaccttagctcttcctctgggttgaagaaacttgatgagtaccttctcccacgcagttacatcaccgggtaccaagctacaaaggatgatcttactgtttatgcagctttgccaactgctccatcagatgaatatggaaatgtttccaggtggtacaagcacattgatgctttgttgagaatctctggtgttactggcgagggatctggtgttattgttgagggatctctagttgcagagcctg

SEQ ID NO: 193107 - DNA, 254 bp, Glycine max
agtgggccctggatatcatgggtcgccggcgaccatggattgctagtctttataagactgacaaactagaaccccttggtgaagcaagagagattttgaaatttgcacgagctcaggttcaaaaacgggctcctaatctccaacatcctttggtttgcattgatgttattgaagcaggagtagttgctggtccccgtgcaggactctggaaggaagttgaagcatctgaaggacttataaagtcagatactagc

SEQ ID NO: 193108 - DNA, 255 bp, Glycine max
gctcgtgcctctagggttatcatatctccatttccatttcctctctctcagtttccaagaatcttaagctatgggaaagtcttacccaaccgtgagcgctgattaccagaaggccgttgagaaggcgaagaagaagctcagaggcttcatcgctgagaagagatgcgctcctctaatgctccgtttggcatggcactctgctggaacttacgacgtgagctcgaagaccggtggtcccttcggaaccataaagca

SEQ ID NO: 193109 - DNA, 261 bp, Glycine max
aacgtccccaacactgtgttcctgttcttcttcttcgatggcggcaacctcaacatcactggcttctcaactctacattggcctgcgccgcccatgcctcaagcttgattctttcaattctcaatctttctctgtcttcgaccccaatcttcgcctatccctctctcctcccagaccctcacgcgccatcgtctccatggcaggcaccggcaagttctttgttggcggcaactggaagtgtaacggaacaaaagactccat

SEQ ID NO: 193110 - DNA, 263 bp, Glycine max
caattttctagggttttattcattttccgatggcttctgcagatgttgagtaccgttgctttgtcggtgggctcgcttgggccactgacgaccatgccctcgagagagccttctctcagtacggcgaaatcgttgaaacgaaggtctgtttgttgcaggcatcacatctgatctcacacgattcggattcggaattttctcgatcacgttctgatctgtgatctctgatctgtttgcgttacttgatcttatgatacttgtgt

SEQ ID NO: 193111 - DNA, 266 bp, Glycine max
ctctgcacccctccctccttgtttgtatcatatcaggcagctcagaaggcaaagatagatccatgtccaccaccgcaactacaacctctgaagaagttagcagcaatgagtggaaagtcatacacatgagcgagcaagaggaggatctcattcgcaggatgtacaagctagtcggggacaagtggaatttgatagctggtcgcattcccggtcgtaaagcagaagaaatagagagattctggattatgagacacggcgatgctttt

SEQ ID NO: 193112 - DNA, 258 bp, Glycine max
ctcgcagtctttgcaggctactctctcgctctctctcttcttccaattcttctggagctgcttctctgcttcactcactaggaagaaaccctggagggtggagaaacattaacagatttagcacggctgcagcagttgaggaactaatcactccacaagtttcaatacgttacacacagaacctgatatatgggcaatttgtggatgctgcatcagggaaaacatttccaacatatgatccgcgctcaggagaagtga

SEQ ID NO: 193113 - DNA, 257 bp, Glycine max
aaatcacacacacacacacagagttgcaagagaaagagagcgagattccgatggcgactctggattccgacgtgcctatggttcccgccggcgagccctcgagcagcgccggtccttcttccaagaagcccaagcgcttcgagatcaagaagtggaacgccgtcgctctctgggcttgggacatcgttgtcgataactgtgctatctgccggaaccacatcatggatctctgcatcgagtgccaagccaaccaggct

SEQ ID NO: 193114 - DNA, 257 bp, Glycine max
atggagagcaaagaggaagatgtaagggttggagcaactaagttctcagaaaggcaaccaattggtacagcagctcagggtgacaaggactacaaagaaccacccccagcacctttgtttgagcctggtgagctaaagtcatggtccttctacagagctggaattgctgagtttgtggccactttcttgttcctctacattaccatcttaactgtcatgggtgtcaacaggtcaccctccaagtgtgcctctgttgg

SEQ ID NO: 193115 - DNA, 263 bp, Glycine max
cctcatactgctggacctcgcattcatcgtcttccttctcttatattccttttcttctaggtcttcgccgcacgccgaaacaatggccggaaaacgagtcggtcctgctatcggaatcgatctcggaaccacctactcttgtgtcggtgtgtggcaacatgaccgatttgaaatcatcgccaacgaccaagggaacagaacgacgccgtcttacgtcggcttcactgataccgagcgtctcatcggtgatgcggctaagaacc

SEQ ID NO: 193116 - DNA, 251 bp, Glycine max
gctcaatcaaaccctcgattgctctctcgggtatattggaaattaagggagtggatattaagcacaagagtgagatcaagagcgatcaacatggtatcttggtgtcggcaaacagcattggtgtttaccacgaccacttctacatttaccatcttgaccttgacattgatggtgttgccaactcttttgagaagacaagtttgaagactgtaagagtgacagatggaagttcgaagaggaaaagctattgg

SEQ ID NO: 193117 - DNA, 255 bp, Glycine max
catagattagagcctggtggtgctgaatacaattatgcttcagcatcaaagggagccaaagttttagcttctaacaaagaagccagaggtgcctctgacattctaagcagaaacaaagacaaatatcttcgaaatccgtgttcttcagaagagaaatttgttgtcatagaactttcagaagaaaccttggtaaaaacaatagagatagctaattttgagcaccactcttccaatttcaaagagtttgaattatat

SEQ ID NO: 193118 - DNA, 251 bp, Glycine max
ctccgttaagaggtttccaaaggatccaaaagatgcaacaagcaagaacctagtatgtggaaagaatgtgctgattgacatgagcatacatacagcatatgttaagaccattcgtgctgcacaacattacatttatatagagaatcaatatttcattggctcttcatacaattggagtcaacataaagacctaggtgctaataacttaatcccaatggaaattgctctaaagattgctgaaaagataaaag

SEQ ID NO: 193119 - DNA, 254 bp, Glycine max
taattcctcgtgtgactatagtagatggagaggaaatcacataccaaaaagtcacaagcgccgtcagaaggggcgcacaccaccttgcggcactgcagacctctgatggccattggcctgctcaaattgcaggtcctctcttcttgcttcctcctttggttttttgtatgtatattacaggaaatcttgaatcagtatttccagaagaacatcgcacggacattcttcgttacacatattatcaccagaatgaa

SEQ ID NO: 193120 - DNA, 259 bp, Glycine max
ccgactggctgcacaccgtgttgctcaacactacaacatgcaaacaatggttcaagataatggcttagatggccagggaagtaaaattctggttaggaagttacctgaaagcaagtaccctgtagttcgattatccgaaatacctgctaagcagttggaaaatgataaatctgagcagaaaaaaattgttattagacctaggcctaataaaaacagtttgaatgatgctaacggagttgggaggaaaggaaacccttta

SEQ ID NO: 193121 - DNA, 262 bp, Glycine max
gccgatccgctttacataggttgtgtggagcagtgtaagaaaactggatgtgtaggggatagatgctttcaacattgtaaattctcatcagatggaaaaccaattgatggtccatggtatatgcatgaacccctctatctgaggtggaaacaatgggactgttgcactgactgtagatattactgtatgctatctagagaggaagaaagaacaaaacttggtgacaagcctgtcaagtatcatggaaaatggccattccatc

SEQ ID NO: 193122 - DNA, 259 bp, Glycine max
tgccaggccttgatggtgtggtgaagcaatgtcgtggcaagaaccttttcttcagcactgatgttgagaaacatgtctatgaggcagacatagtgtttgtctctgtcaacaccccgacaaaaactcgcggtcttggagccggtaaggccgcggatttaacgtactgggagagtgcagcacgcatgattgctgatgtatccaagagtgacaagattgtggtggagaaatccactgtccctgtgaaaactgctgaggccat

SEQ ID NO: 193123 - DNA, 259 bp, Glycine max
cccgcctagccattgatttggaaaagtccaactccaaggatgagtaagcttcagagtgatgctctaagagaagctatctcaggaatcatggctgattccaaggaaaagaacaggaaatttgtggagaccattgaactccaaattgggttgaaaaattatgatccccagaaggacaagcgtttcagtggctctgttaagttgcctcatattcctcgccccaagatgaagatttgtatgcttggagatgcccagcacgttg

SEQ ID NO: 193124 - DNA, 255 bp, Glycine max
ctgagggcatcagagatagcgaagaagttgaatctgcaacctcacccagaaggtgggttttacgtggagacattccgagaccattccgtccagctttcgacctctcagctcccccccgaatacaaagtggatcgccctgtatcgacctccatctattttctcgttccttctgggagtgtgtctcgcctccatcgcataccctgcgccgaaacctggcatcattacatcggcgaccctctcaccgtagtggaattg

SEQ ID NO: 193125 - DNA, 257 bp, Glycine max
cctgcctcttcctcacccctttctccatctaacgagtaaggaaaaatggcgcgtaagaagatcagagagtatgactcaaagaggttgttgaaggagcactttaagagactttctggcaaggagttgccgatcaagtctgcacaaattactgcatcaactgatttcactgagctacaagagaaggaaccctggctttcatcttctaaattggttgtgaaacctgacatgttatttggaaagcgtggcaaaagtggttt

SEQ ID NO: 193126 - DNA, 253 bp, Glycine max
ttctgaaaccactaccgtttcgtcgtcaccatgccgcaaggggattacatcgagcgtcacagaagagactatggctaccgtcttgatcacttcgagcggaagcgcaagaaagaggcgcgtcaagttcacaaacgttcttcaattgcccagaaggctctgggtattaagggcaaaatgattgccaagaaaaattatgctgaaaaggcacagatgaagaagactttggctatgcatgaagaatcaacgtctaggc

SEQ ID NO: 193127 - DNA, 253 bp, Glycine max
gtaagtatgaactaattcagactgtgaaactgcgaatggctcattaaatcagttatagtttgtttgatggtatctactactcggataaccgtagtaattctagagctaatacgtgcaacaaaccccgacttctggaagggatgcatttattagataaaaggtcaacacaggctctgcctgttgctttgatgattcatgataactcgtcggatcgcacggcctttgtgccggcgacgcatcattcaaatttctg

SEQ ID NO: 193128 - DNA, 251 bp, Glycine max
ctggtctgtcaggattgtatacagtagttatgaaagctgcaggtgctagcagaagggtatttcaacttttggatcgtacctcatccatgcctaagtcgggagataaatgtccactgggtgatcacgatggggaagtagaactagatgatgtgtggtttgcctatccatcacgccctagtcatccagtgctcaagggcattacattgaaactgcatccaggaacaaaggttgctcttgttggtccaagtggt

SEQ ID NO: 193129 - DNA, 252 bp, Glycine max
gaaaatgaaggtccttgttttcttcgttgctacaattttggtagcatggcaatgccatgcgtacgatatgttccctctccgaatgaacactggctatggtgcccgtactccggaggtgaaatgcgcaagttggaggcttgctgtggaagcacacaacatctttggctttgagaccattcctgaagagtgcgttgaagcaacaaaggaatacatccatggcgaacaatatagatcagactccaaaacagttaa

SEQ ID NO: 193130 - DNA, 253 bp, Glycine max
gctgagtctacactctcggtcaaggactctgaattggctgcattgaagaacaatttagatgaactagaagaattgagagacatgaaagaggacattgatagaaagaatgagcaaacagctgccatactgaagatgcaagcagttcaactagctgaaatggaattgctttataaggaagagcaggttctcagaaagcgatattttaataccatagaagatatgacaggcaagataagagtttattgtcggttaa

SEQ ID NO: 193131 - DNA, 251 bp, Glycine max
ccttgattcagagcagagcgaccttgaagagctatggctgtcggaaagaataagaggatttccaagggaaagaagggtggcaagaagaaagccgctgatccctttgccaagaaggactggtacgatatcaaggccccttccgtctttcaggtcaagaatgttggcaaaaccctcgtctctcgtacccagggaaccaagattgcttctgaaggactcaaacatagagtgtttgaggtctcattggctgatct

SEQ ID NO: 193132 - DNA, 253 bp, Glycine max
gctggatggaacacaagaaggtgcttatcaatgggttactatcaactatctattgggaaacttgggaaaggattattcaaagactgttggggttgttgatcttggaggtggatctgttcaaatggcttatgccatctcagagacagatgctgccatggctccaaaagtagtagatggtggggatccatatctcaaggagatgttcctgaggggaaggaaatactatctctatgttcacagttacttgcactat

SEQ ID NO: 193133 - DNA, 243 bp, Glycine max
aaccactactactcactcactgcagatctcaattgcatcgctgtccatggctaccatcgttagcatcaaggcccgccagatcttcgacagtcgtggcaatccaactgtcgaggtggatttgacttgctccgatggtacttttgccagagctgctgttccaagtggtgcatccactgggatttatgaggcccttgaattgagagatggaggatctgactaccttggaaagggtgtatcaaaggc

SEQ ID NO: 193134 - DNA, 257 bp, Glycine max
caagtgcgagaagaccaacaagtgtgagagatttggggtggatgctatgaagaaggtgatggttagtgatggtgcaacaaggttttacacaatggatggaaaacccatattccatttcttgaacacttcaactttcactgagtacacagtggtggattcagcatgcatcgtcaagattcacattgatggtagtaatggcgatctcaaccgcaatatcaaaagactcaccttactcagttgtggcgtatcttcgggtg

SEQ ID NO: 193135 - DNA, 262 bp, Glycine max
aatgtccgggatcatccacaagattgaggagaccctccatgtgggagggcacaagaaagaggagcacaaaggagaacaccatggtgagcacaaaggtgaacacaaaggagaacaccatggtgagcacaaaggtgaacacaacggagaacaacaccatggggagcacaaggagggacttgtggataagatcaaggacaagatccatggtgatggccatgacaagggtgagaaaaagaagaagaaggacaagaagaagaaggag

SEQ ID NO: 193136 - DNA, 257 bp, Glycine max
gtggctgcaatggcttcaagtcaggaagaggtgacccttttgggagttgtgggaagcccatttctacacagggttcagattgctctcaagttgaagggagttgaatacaaatatttggaagacgatttgaacaacaagagtgatttgctcctcaagtataacccagtttacaaaatgattccagtgcttgttcacaatgagaagcccatttcagagtcccttgtgattgttgagtacattgatgacacatggaaaaa

SEQ ID NO: 193137 - DNA, 255 bp, Glycine max
tgagaagacaagtttgaagactgtaagagtgacagatggaagttcgaagaggaaaagctattggacaactgaggttgaaactgccaagactgaaaatgatgcaaagataatacttgggttgagccctggtgagctttcagtggtgaatcctaacaagaaaacctctgttggaaatgatgtgggataccgtttgattccagcaatcccagctcatcctcttctcacagatgacgattatccacaaatacgtggcgc

SEQ ID NO: 193138 - DNA, 247 bp, Glycine max
gtccctttctgttctcttcactcttggtcttgcgagagaaagccatgccagagacgaagatttttggcatgctgtttggccaaacactcccattccaagttcattgcgagatcctctaaagcctggccctgcaagtgttgaaatcgatgatcaccctatgcaaattgaagacacacagtacccgataaccttcttctataaagaagaccttcatccaggcaaaacaatgaaagtacaattcagcaag

SEQ ID NO: 193139 - DNA, 252 bp, Glycine max
caagaatacaagcaacgggagcagacattgtgaagattgcaacaactgccttggacatcactgatgtggcacgcatgtttcaaataatggtgcattctcaagttccatttattggacttgttatgggtgatagggggttgatttctcgtatactttctgcaaaatttggtggatatctcacttttggtacccttgagtcaggagttgtttcagctcctggtcaacctactcttaaggatctattgtatctat

SEQ ID NO: 193140 - DNA, 250 bp, Glycine max
gcggacttgtacgccgtgacgccgtcgtttttggtggtggaggttaagaaggacaacggtgacaccttggagtataaccagttctgtagcaaggagcttcgtccagctcttaaagatatcgtgtggaggacttctcctgcagagaatcctacactcgcttgaagaacaaccaagactcccatgctaattgtcgttcctttgtagttgtttttgttaattcttgtttcaggactgagatattttagttatt

SEQ ID NO: 193141 - DNA, 266 bp, Glycine max
tgagagctgactctagctataggataataagattacaagagagatgaattgtatttgattggatccacgaaattcgagatgactccagttaatttggcaggccagtttggtgacacgacatacactaaggtgtttgttggaggcttggcctgggagactcaaaaggagacaatgaagaagtattttgagcaatttggtgagatctttgaggccgttgtcatcactgacaaagctactggaagatctaaaggctacggatttgttac

SEQ ID NO: 193142 - DNA, 269 bp, Glycine max
gcaggctctggttttgcggttagggtagctctttctactcaaaacaaaacaaaacatcaatttctgtttcagttcgcggagatcaatatttgtcgctgaggtcgatcgtcgataaaaggcaatgtttttgtgggattggttttatgggattctagcgtcgcttggcctgtggcagaaggaggccaagatcttattcttgggcctcgataacgctggcaaaaccaccttgcttcacatgctcaaagatgagagattagtccagcatcagc

SEQ ID NO: 193143 - DNA, 265 bp, Glycine max
caaaaaataaaaatcaaagagcataatgtcagggatcattcacaagattggggagacccttcatgtgggagggcacaagaaggaggaggagcataagggtgagcaccatgctggagaatacaaaggggagcaccatggtgaacacagtagtgagtacaaaggagagcatcatggtgaacacaaagctggacagtaccatggtgagcacaagccagagcacaaagaggggttcctagacaaagtcaaggacaagatccatggtgag

SEQ ID NO: 193144 - DNA, 266 bp, Glycine max
aaacagaacaacaatggcgacacttaaggttcctcagcctcttccccccgttgcagatgattgtgagcagctccgaaaagccttctcaggttggggaactaacgaggagctgattgtatcgatcttggctcataggaatgctgctcagaggaagcttatcagagaaacttatgcccagacctatggagaagatctcctcaaggccttggacaaagaactcacgagtgattttgagaggctggttcatctttggacacttgattctg

SEQ ID NO: 193145 - DNA, 264 bp, Glycine max
gtgggagataaagttgcctatgcacttcaacaaggtctgaaagttatagcatgcattggggaaactcttgaacagcgtgaagctggtacaacaacggctgttgttgctgagcaaacaaaagcaattgcagctaaaatatcaaattgggacaatgtcgttttggcctatgagccagtttgggccattggaacaggaaaggttgcaactcctgctcaggctcaagaggttcatgctgatttaaggaaatgggttcatgacaatgtg

SEQ ID NO: 193146 - DNA, 262 bp, Glycine max
cttcttctagatttaaggaagatgggtaaggaaaaggttcacatcagtattgtggttattggccatgttgactctgggaagtccactaccactggccacctgatctacaagcttggaggcattgacaagcgtgttattgagagatttgagaaggaagctgctgagatgaacaagaggtctttcaagtatgcctgggtgcttgataagcttaaggctgagcgtgaaagaggaatcacaattgatattgccttgtggaagtttg

SEQ ID NO: 193147 - DNA, 264 bp, Glycine max
ctcgagccggtttccagctatcaggcaagggagatggcttaaccctgtcctttgccacaccgctggaaactgaatgaactctttgctactggggttgtgcttggaggttacttggcactgatgactgttatactcttctgggcaatcaaagagacgacattcttccccgacaaatttggagttagaccaattcatgacaatccagatgaaatgactgctgctttgtatctacaagtcagtatagttagccaggctttgatattt

SEQ ID NO: 193148 - DNA, 262 bp, Glycine max
tgctgattctcagattgtctctgattatgtgcgttacttcctccatcaacacacaatacaacttggacaacctgcaacagttaaagttgctgcaaaccttgtccgacttctctcatataacaataagaatttcttagagaccgggttaattgttggtggatgggataaatatgaaggtggacaaatttatggagttcctctgggtggaacaatagtacaacaaccttttgctatcggaggatctggctccagttacttgtat

SEQ ID NO: 193149 - DNA, 262 bp, Glycine max
agcctttacgtcctctcttcaatgctggctcagtttactacaagtcctctttgcctgctgaagctgtgtacgacaatgagaaaagctgtgatacggaattgaatgctccacttgaggttgttgatcctgagattgctgatataattgagcttgaaaaagctagacaatggaagggactggaactgataccctccgagaatttcacttctgtctctgtaatgcaagctattggctctatcattactaacactcggaatgaagg

SEQ ID NO: 193150 - DNA, 271 bp, Glycine max
ccgaggcgaagagaagagaaaaattaagatggaggggaaggagcaggatgtgtcgctgggagcgaacaagttcccggagagacagccgattgggacggcggcgcagagccaagacgacggcaaggactaccaggagccggcgccggcgccactggttgacccgacggagtttacgtcatggtccttttacagagcagggatagcagagtttgtggccacttttctgtttctatacatcactgtcttaaccgtcatgggagtcgccggggct

SEQ ID NO: 193151 - DNA, 268 bp, Glycine max
cggctcgagctggcagcggcactctcggtggctataatctttctgtggtgagttgtcaagatgtacacatcaaggaagaaaatccacaaggataaggatgctgagccaactgaatttgaggaatcagtcggacaggcattgtttgatctggaaaataccaacaatgagctgaaaagtgatctgaaagatttatacataaactcagctgtccaaattgatgtttctgggaaccgcaaggctgtggttatccatgtcccctacagattaa

SEQ ID NO: 193152 - DNA, 267 bp, Glycine max
atggctcagactaccagaagttccctctgccaaatgaaaactgggtttggtgggcaatacagcaatgaggtggcatgtgccagttggaggcttggcgtggaagcaaacaacgtagtcaagtggcaaactgttcctgcagcttgcggagagtacatagctgactacgttctaggagaccaatatagatcagattccaaaacagttaaccaacaagcttatttctatgctaaatccctcaaactcaccaacaaagatgtctttgtcttg

SEQ ID NO: 193153 - DNA, 265 bp, Glycine max
caatggcttcaagtcaggaggaggtgacccttttgggagctactggaagcccatttgtgtgcagggttcatattgccctcaagttgaagggagttcaatacaaatatgtcgaagaaaatttgaggaacaagagtgaactgcttctcaaatccaacccagttcacaagaaggttccagtgtttattcacaatgagaagcccatagcagagtctcttgtgattgttgaatacattgatgagacatggaagaacaaccccatcttgcc

SEQ ID NO: 193154 - DNA, 264 bp, Glycine max
gctacccctttctgctcttcttctacctttcaagttttaaaagtataaagatggcagagacattcctatttacctcagagtcggtgaacgagggacaccctgacaagctctgcgaccaaatctccgatgctgtcctcgacgcttgcctcgagcaggacccagacagcaaagttgcctgcgaaacatgcaccaaaaccaacttggtcatggtcttcggagaaatcacgaccaaggccaacgttgactacgagaagatagtgcgtg

SEQ ID NO: 193155 - DNA, 261 bp, Glycine max
gcaggaactaaatatggctgacttgttggaatggtcaaagcaagataagaaacgaatgcttcatgtcgtctaccgtgttggtgaccttgatcgcaccatcaaattttacacagaatgtttaggaatgaagcttttgaggcaaagagatatcccagaggagaaatatgctaatgcttttcttggatttggccctgaagaatcccattttgttgttgaattaacatataattatggggttactcgtatgacattggcgatggc

SEQ ID NO: 193156 - DNA, 248 bp, Glycine max
ttacaaagccgagcaagagaagctccaacaacaaattaccatcagcaaggagtgttctttcttctgttcagattgatcaagatctcaaggtgaaaatctccaaggtgtgtgctgagttgaatgtggatggattaagaggagacatagtaacaaatagagctgcaaaagctcttgctgctctgaaggaaagagacaaagtaagtgcagaggatattgctactgtcatccctaactgcttgagacaccgt

SEQ ID NO: 193157 - DNA, 262 bp, Glycine max
atcggcggcgagttagaaggcaggatcgtcgtcgagctcttccacgacgttgttcccaaaaccgccgagaatttccgcgccctctgcaccggcgaaaagggcatcggccccaacaccggcgtccccctccactacaagggcatgtgtttccaccgcgtgatcacagggttcatgatccagggcggcgacatctccgctggggatggcaccggtggggaatcaatctatggcgccaagttcgaggacgagaacttggagatga

SEQ ID NO: 193158 - DNA, 265 bp, Glycine max
aaaatggcaatctccatacccagtagacaacttttcatagatggagagtggaaagtccctcttctcaacaatcggtttccgatcatcaaccccgctactgaagacatcatagggcatattccagccgctactaaggaagatgttgaccttgcggtggatgctgctaaaagagccttttcccataacaaaggcaaacattggtcttcagctcctggctctgttcgtgctcgctatcttcgagccatcgcttcaaagataacagaga

SEQ ID NO: 193159 - DNA, 264 bp, Glycine max
cgaaaatgaaggtccttgttttcttcgttgctacaattttcgtagcatggcaatgccatgcgtacgatatgttccctctccgaatgaacactggctatggtgcccgtactccggaggtgaaatgcgcacgttggaggcttgctgtggaagcacacaacatctttggctttgagaccattcctgaagagtgcgttgaagcaacaaaggaatacatccatggcgaacaatatagatcagactccaaaacagttaaccaacaagctt

SEQ ID NO: 193160 - DNA, 269 bp, Glycine max
agactgaactgaataacattaacacagcgatgtcgttgaaaacattagcaacctctcctctttcggggatcactcttttggtccttctcatcgctctccttctcagattttacatcaaattcgaaactgctgagagattgttcagtgctgaagagctatcattgttcaatggaactgatgaagggttgccaatccttctaggaattcttggatccgtgtttgatgtaaccaagggaaaatctcattatggttctagagggggatacaat

SEQ ID NO: 193161 - DNA, 266 bp, Glycine max
caattctctgtgtagaagccatgtctaagggtcctggtctctactctgacattggcaagaaagccagagatctcctgttcaaggactaccacagtgaccagaagtttaccatcactacctactcacccactggagttgctataacatcctcggggaccaagaaaggtgacctttttgtggcggatgttaacacccagttgaagaacaagaacatcaccactgatatcaaagtggacaccggttccaatcttttcacaactatcact

SEQ ID NO: 193162 - DNA, 264 bp, Glycine max
gttctatatattattgaattgacaatgaggcctgctcttgctttgcttcctcttctatttgctctcttgttagctgccactacagaatcaagaaaagatacaggggaatattggaaaatgatcatgaaagatcaggaaatgccagaaggacttcaaggtcttgtttcatttcaatctgaaaataaccctaagactcaagagcagcttggtaaaggttccaaaaaccattgtgaagagtctctagttacaaatacacaagttaat

SEQ ID NO: 193163 - DNA, 261 bp, Glycine max
ggaactcattaggaagggagacaaggttggatcttctgaagctgcattgcttgccaagctaggcataaggcccttctcatatgggcttgtggttctctctgtttatgataatggttcagtgttcagccctgaggttcttgatcttactgaggatgacctcattgggaagtttgctgctggtgtctcaatggttacttcactttcattggctatttcatatccaacacttgctgcagcaccacacatgtttgtcaatgccta

SEQ ID NO: 193164 - DNA, 260 bp, Glycine max
gtgccctccatgcatgactgacaaacatcagaaaatgaatggtgaggatgaggagtaactcccaaagagttactcttggtgttgcaatgttcgttgttttagcaatggtattgcgtcggaagcctgatgctcttatatctgtattgcccacattgagggagagtacaaagtatcaagggctagataagcttccagtcattgtatggatgatagctcaggctgctgtaggagatctctcagtaggtttgtatgcttgggca

SEQ ID NO: 193165 - DNA, 260 bp, Glycine max
ggagttgggtataacatcagacgaggcactaagtttagaggatcttccaaaacatgctgtggttcttggaggaggttatattgcagttgagtttgcatctatatggcgtggcatgggttccacagttgatctagttttcagaaaggaacttccactgagaggttttgatgatgaaatgagagctgcagtggcaagaaatcttgaaggcaggggaattaatttgcatccaaggaccaatttgacacagttgatcaaaacag

SEQ ID NO: 193166 - DNA, 259 bp, Glycine max
ctcgagcgctcgagccgcattgctatatattatggctagcatgaaggttacatggacggttgtgaccatgtgcatggccgtggtgggtgcaccgatgatggcgcaagccatgacatgcaatgatgtgacggtgaacatggcacagtgcctatcctacctgcatgcagggaggaacaccttcaacactttgctgcagcggagtcaagaacattcttggctctgctgtcaccaccgttgacaaacaaactgtgtgcaactg

SEQ ID NO: 193167 - DNA, 261 bp, Glycine max
caaaatcaaactttgtcacagttattggtgtgctacctccgttagttatataagacccttttataaactccttttaaggcttttcaatctccaatcacttcttcttgtgttgtcataacttcaacaacttctttcttctcgatctcacgatggctcatttggccctgtctcagatggctgtaactgttcctgttggcaacgatttgtctctcagaagatctgcagttaaggcccctaacttgaacttttgggataaatcat

SEQ ID NO: 193168 - DNA, 269 bp, Glycine max
ggagcagcctcaggaggagaaggatgtctcacaggaagttcgagcacccaaggcacggttcactgggatttcttcccaggaagcgtgctgctcgtcacaggggaaaagtgaaggcattccccaaggatgacccatccaaggcacccaagctcactgcattcttgggttacaaggccggtatgactcacattgttagagaggtcgagaagccaggatcaaagcttcacaagaaggaaacttgtgagcctgttacaattattgagacccct

SEQ ID NO: 193169 - DNA, 266 bp, Glycine max
gcagcattgaccctgagtggaagatgataaaaagagatgaaggacgaattgagaagtggattctgaggagagcctttgatgatgaagagcatccttatctgccaaagcacattttatacaggcagaaagaacaattcagtgatggagttggctatagttggattgatggccttaaggcccatgctgcaaaacatgtgactgaaaaaatgatgcttaatgctggtaacatttacccccacaacaccccaaaaaccaaggaagcatat

SEQ ID NO: 193170 - DNA, 262 bp, Glycine max
cccataatcatgaagaaaggaaacttgggacttggtctcaaactctcagttcctgtgtctgatcaatctaattttgccaggttcctgactgaaagtgggacttttaaggatggggatctgcttgtcaacagggatggagttcgaattgtctctcagaatgatgtcgaagctccacctccaatcaagcctacagacaaccagttaactttggcagacatagatgtaatcaaagttgttggaaagggaaatggaggggtagttc

SEQ ID NO: 193171 - DNA, 262 bp, Glycine max
gtctgatcatagcagcttcttctgggtttgtgaattgctttgatgttgaaaagaaggaaaagattggaatatttgagctcaataaaggtgacctttctttgaaggtcaccaactggggtgcttcaattttgtccctggtgattcctgataagaatggaaagttgagtgatgttgttcttggatatgattctgttaaggattacactaatgatacaacatattttggagcaactgttggccgggttgctaacagaattggagg

SEQ ID NO: 193172 - DNA, 261 bp, Glycine max
gcaagcctggcactgggccatgagacctatgtggttcagaggccagagttgagcctccagatagagaagctgcagaggctcctctccttcaagaagcaaggtgctcatctcattgaggcctctttcaatgatcacaagagccttgttgatgctgtgaagcaggttgatgttgtcatcagtgccatctctggtgttcacatcaggagccacagcatcactctgcaactcaaacttgttgaggccatcaaagaagctgggaac

SEQ ID NO: 193173 - DNA, 273 bp, Glycine max
ctgtctatccaagattaaactaattccattgcatacaatgcatcccccttttccacatgctcaaattctcaggggacattcttgatggggtgaagtacaactcttcccccgctagtcttctgatatttcatgatcttttcagcgtgctctctttcttcctcactagattccttgaagaacttggcaaatcccttgagagccacgttgtccctgtcaaagtatgcaaacaaggagcggtacacgtatgaagcattgtattccacatttatctgc

SEQ ID NO: 193174 - DNA, 262 bp, Glycine max
cttgcatgcccctttgagtttcagttttcaattttgaacccccttttttgtaatccataaccatagctggtagcatccttggttgagtcgagggatttgattatggataagtatgaggctgtcaaggatttgggagctgggaattttggggtggctaggctcatgaggaacaaggagaccaaggagcttgttgccatgaaatacatcgagcgtggccaaaagattgatgagaatgtggcaagagagattatcaaccacagat

SEQ ID NO: 193175 - DNA, 260 bp, Glycine max
gttctaccttggggagagagatggtggtgacttctggacttctgatgctggtccactagaggccttcaagaggtttggaaagaagcttcaagagattgaacataagcttatacagaagaacaaggatgagacgttgagaaaccgcactgggccagctaaaatgccttacactctgctctatccttctagtgaggagggattgactttcagaggaattcccaacagtatctctatctaagggctctctcattgaggttgct

SEQ ID NO: 193176 - DNA, 262 bp, Glycine max
gcgacgtctgcgtaccaagtggagggtatggcccacaaagacggtcgcggcccaagcatttgggacctcttcatcaaaaaacccgggattgttgcaaataatggcacgggagaagtttctgttgatcagtaccatcgctacaaagaagatatagatctcatggccagcttgaattttgatgcctaccggttctcaatctcgtggtccagaatttttccaaatggaactggccaagtaaattggaaaggtgtagcatactaca

SEQ ID NO: 193177 - DNA, 258 bp, Glycine max
gcaacatgaaggggaggttcatgtttctgtcggtgctcctttgtgccacctttcatgtctccttctccattactgacggcttagtagcaaacggcaacttcgagctgggtccgaagccctccgccctgaaaggaactgtggtgattggtggcagccactcgatcccagaatgggagatctctggcttcgtggagtacataaagtccggccagaagcagggcgacatgctgctcgtggtccccgagggggcctacgcgg

SEQ ID NO: 193178 - DNA, 262 bp, Glycine max
tctttacttcccaaaacttgctctacaatgagtttccttcgttcttttgcaagaaacaaggatatatcaaaagtaggacgcagaggtatccattgcatgcagaaactatgtgcagaaaaaatatctcctgattcactagagaaggcccaaaatcgtgtgatagatgctgcactcacacttgttcgagaaaatacaaggcttaagaaagaactcgtgcatagtttgggaggtgctgtggcaacttcaactcttcttggagttc

SEQ ID NO: 193179 - DNA, 263 bp, Glycine max
ctgggtttcaggaaaaaagaaaaaggaaaacaatgggttccgataatcaccagaacttggagttcttgaaggagatcggtttgggctcttccaacattggctcttacattaatggccagtggaaagccactggttcttctgtcacttctgttaatccttctaacaatcagagtatagctcaagtgaccgaagcaactttgcaagattttgaggaggggttgcgagcttgcagtgaagcagctaagacatggatgactataccg

SEQ ID NO: 193180 - DNA, 265 bp, Glycine max
cctcgagccgaatcggctcgagtctgctctctgcgatctgtttcctgttgtagctagctactcgaaaatgctggcacgacctcgccgcgagtcgcttcaacgagatccgtcagattttccgtcagccttctagggctttctcaaccgctctgaactaccaccttgacacaccggacaacaaccctaaacttccatgggaattcaccgaggccaatcaagcaaaggttaaggagattttgtctcactatccatccaactataagca

SEQ ID NO: 193181 - DNA, 259 bp, Glycine max
ggagaagggaagaaaaggagagtactggtaacattggaggggaacaacaatacagagccagaggaagagacaaattaagatgttgggaattttcaaggacaagttggtcaatccaccagaagagctaaacagccctgcttctttgaattcatcaaaaaggtctaaacttccaaatgaaatccttcaggaattccagtcctacaatccctccaatgctttctccgttagctttggaaatgatgctttgctagcttattcc

SEQ ID NO: 193182 - DNA, 260 bp, Glycine max
tggcaattaaggtctcatccaaataagcacaaatgggtagccagagttacttcaaggctttgattatttgccttatagcactaattggatcaactcaagctcaattgcagcttggtttctatgccaaaagttgtccaaaggctgagcaaataattctgaagtacgttgttgagcatatccacaacgctccatcactagcagctgctctcataagattgcacttccatgattgttttgtcaatggttgtgatggatcagtg

SEQ ID NO: 193183 - DNA, 261 bp, Glycine max
gctttctttcttcaccatgtcacttgctgggaaaatcaccactgaaatcggggttcatgcaaccgctacaaagtggttcaacctcttcgcaacacaactccatcatgttcaaaacctaactgatagagtgcatggaaccaagctgcatcaaggtgaagactggcatcacaacgagacagtcaagcactggacttataccatagatggtaaggttacaacatgtctggagagtattgaatccattgatgaacagagcaaaac

SEQ ID NO: 193184 - DNA, 259 bp, Glycine max
ctccttctctcatcactcatctatggctacctttccctcccctccttcaccatcttcttcttcttcaattccgtctccaagatctagaatgttttactatgctggaagtgaagaccactatgaggagcctcacttcctccaagcttgttttctttgcagaaaaccactaggccaaaatcgtgacatcttcatgtacagagggaacacaccattttgtagcaaagagtgcagacaggagcaaatagagattgatgaggca

SEQ ID NO: 193185 - DNA, 259 bp, Glycine max
caacaaagcaagcaaaacaaaagacgcatgatggagaggatgaagagggtgcttctgccgcttctggccttcactgttcttctcatgttgccagaagcttctgctacaaagtttactgttggaaacaaccagttttggaaccccaatattaactacactgagtgggctaaaggcaaacatttctaccttggtgactggctctattccgtgtacgataggaaccaagcgagcgtgttggaagtgaacaagacagattatg

SEQ ID NO: 193186 - DNA, 262 bp, Glycine max
atggcactttctcctattcgttcttcttctttctcttcatcagctattgttgcattggctgtgttactgcttcttacagggacctcttcagctaacctctcaaagaacttctattccaagacatgtcccaacgttttcaacactgtaaaatctgtagttaaatctgctgttgtcagagaacctcgcattggggcatctatggttcgtctcttcttccatgactgctttgttcaaggctgtgatgggtcaatactacttgatg

SEQ ID NO: 193187 - DNA, 280 bp, Glycine max
ctgcatgtgtaagtatgaactaattcagactgtgaaactgcgaatggctcattaaatcagttatagtttgtttgatggtatctactactcggataaccgtagtaattctagagctaatacgtgcaacaaaccccgacttctggaagggatgcatttattagataaaaggtcaacacaggctctgcctgttgctttgatgattcatgataactcgtcggatcgcacggcctttgtgccggcgacgcatcattcaaatttctgccctatcaactttcgatgg

SEQ ID NO: 193188 - DNA, 281 bp, Glycine max
cattctctcgcatctcaatacccttttgatttgtgaaaggacatcaaacatgctatgatcaggtccaacaccctacaatcatggacaaggttgctggccagctccatctccgttctggtgtttctggtattaggagttatgaaggagcctactgccaccccacaatgtaccagagaccctcttttgggaattactcgaatgctgcattgcagtatcctgtgatgccctcatgcaaagctactatggatttgtctgctgctgcaacaactgcctcccccgtc

SEQ ID NO: 193189 - DNA, 277 bp, Glycine max
cggtagctagacaacaacgagagagagagagagagagatggaggatctcgaggaggaagagaacggagcggaggaggtgttggggtcaagcttgaccatggagaaagtggcgggtgcgaagaagttcattgagaatcattatagggctcagatgaagaacatccaagagaggaaggagaggcgctgggttttagaaagaaaattggcatcatcagatgtgccaaatgaggagcggatcaacctcatcaaagatttagagaggaaggagactgaatat

SEQ ID NO: 193190 - DNA, 275 bp, Glycine max
agccagtggcgcgaactaccgtgcgttggattatgactgaacgcctctaagtcagaatccgggctagaagcgacgcgtgcgcccgccgtccgtttgccgaccagcagtagtgcggcctcggcccccaaaggcacgtgccgttggtgaccctcgtgaggcggattagccctacgagacgccttgaagcgcaattcccatcgagcggcgggtagaatcctttgcagacaacaataaaccaagaggacgtcataatttgacaacgcagaagaagcagg

SEQ ID NO: 193191 - DNA, 272 bp, Glycine max
acggagctggagaaggttctggaagggttgcccagaacgaagggtgggttcgtttgtgagagttgtggtgatgtgaggtttgtgccgtgtgggaactgcagtgggagtaggaaggtgtttgatgaggatgaaggggtgttgaagaggtgtttggagtgcaatgagaatggcttgattcggtgtcctaattgttgttcttgaagttcgcaaacaaaataataaaaagaagaaaaatttgaaaccttggtgtgtgtagttgtttttttgttgtc

SEQ ID NO: 193192 - DNA, 272 bp, Glycine max
cgagagtgctttgaaaatgggaaagtttagttcaagttacagtacttctgattttgttcactttggagttctacttccctttcttctgttatcacagttgttctttcaacttgcatggtgtggctccatagtaaagttccttcctggattagagggaccccttccttttgttcttgaaaccgggtatgtgggagtgggtgaatcagaggatgtgcaggcattctactacttcattgagtcagagaacaatccaaaggaggatcctctcatgc

SEQ ID NO: 193193 - DNA, 269 bp, Glycine max
catccatttatgatttggagaagcacaaatctcgtagagtgttatacaaaggttacatttctgagctgtttgtgccataccaagacccaacagatgatttttactataagactttctttgatgctggagagtttgggtttggtctctccacggtctcattggtgcccaaccgtgattgcccatcgaatgctcagttcctagatacatatgttcacgctgctgatggtactccgttactcatcaagaacgcaatctgtgtctttgaacaa

SEQ ID NO: 193194 - DNA, 274 bp, Glycine max
aacacccacttgaatgagctcttagccatggcaataattcagaagagaaatgagaatgaagagtgaagaagagagagaacacccacttgagaggaggcaggctgaagcatctcgaataagagagaagtatcctgacagaattccagtaattgttgaaagggctgagaagagtgatgttcctgaaattgacaagaaaaagtatcttgtacccgctgatttgactgttggtcagtttgtgtatgtggtgcggaagagaatcaagctgagtcctgag

SEQ ID NO: 193195 - DNA, 232 bp, Glycine max
cgggatcatccacaagattgaggagaccctccatgtgggagggcacaagaaagaggagcacaaggagaacaccatggtgagcacaaaggtgaacacaaaggagaacaccatggtgagacaaaggtgaacaaaaggagacaacacatggggagacaaggagggcttgtggataagatcaaggacagatccatggtgatgcatgcaagggtagagaagagagaggacagagaga

SEQ ID NO: 193196 - DNA, 279 bp, Glycine max
ccgagatcaaccccgacgaaggcaaggggtttttctcggcttcttcagatttctgaaatggcgcctgtttcagctttagccaagtacaagctcgtcttcctgggtgaccaatccgtgggcaaaaccagcatcatcactcgcttcatgtatgataaattcgataacacctatcaggctacaattggtattgattttctatcaaaaactatgtatcttgaagatcgaactgttcgactgcagttgtgggatacagctgggcaggaaagatttagaagtctt

SEQ ID NO: 193197 - DNA, 275 bp, Glycine max
cagatactagttaccaaacagactggtcctcagggaaaaatagttagcaaggtttacttgtgtgaaaagctgtcactagtaaatgagatgtagtttgctataacactggatcgtacgagtgctggtccaattataattgcttgtagtaagggaggaaccagcattgaagacctagcagagaaatttccggacatgattataaaggtacctgttgatgtttttgaaggaattactgatgaagatgctgcaaaggttgttgatggtttggctctcaa

SEQ ID NO: 193198 - DNA, 276 bp, Glycine max
ctctatgtctcagtctctctgatttgcggctgaggattccgaacgagtgaccttcttcgtgtctcgcaaagtttaagtaatcgtgggtaatgacaaggttgacatcaacattggcgtcatgggacatgtcgactctgggaagtcaagtaccactggtcacttgatctacaagcttggaggtattgacaagcgtgtgattgagaggttcgagaatgaggctgccgagatgaacaagaggtcattcaggtgatgcctgggtgctctacaagctcaaag

SEQ ID NO: 193199 - DNA, 276 bp, Glycine max
acttcctctttcttagatctcttctttctctacgccgcacgccgaaaccatggccggaaaaggagagggtcctgctatcggaatcgatctcggaaccacctactcttgcgtcggtgtgtggcaacatgaccgcgttgaaatcatcgccaacgaccaagggaacagaaccacgccgtcttacgtcggattcactgacaccgagcgtctcatcggtgatgcggccaagaatcaagtcgccatgaaccccatcaacaccgtcttcgatgccaagaggtt

SEQ ID NO: 193200 - DNA, 275 bp, Glycine max
cgtcctaggagtgtaaaacagagacgcaaaatgaagacgatcttgtcgtctgagaccatgaatattcccgacggcgtgagcatcaaggttcacgctaaggttatcgaggttgagggccctcgtggaaaactcgtgcgagacttccaccatctgaacttggacttccaacttattaccgacgatggcggtaaaaggaagctcaagattgattcttggtttggttctcgtaaaacctccgccgccatccgcaccgccctcagccacgttgagaattt

SEQ ID NO: 193201 - DNA, 231 bp, Glycine max
cactcttcaaaagggagaagaaaaggaaagaaaactctcaaaaaactattgtagcaatggcagaacaaaaccaaaaccaaacaactgaagctggaaggcaccaagaggttggtcacaagagccttctccagagtgatgctctttaccagtatattctggagacaagtgtctacccaagagaacctgaatccatgaaagaactgagagagttgacagcagaacacccatgga

SEQ ID NO: 193202 - DNA, 271 bp, Glycine max
  unsure (1)..(271): unsure at all n locations
ctcgagcgcggctcgacggnctcgaggcaaaacctagtactcatttcttccctcaaatttcaaaatgcgtgagatccttcacatccagggtggccaatgcggcaaccagatcggcgccaagttctgggaggtggtttgcgcggagacgggatcgaccctaccggacagtacggtggggactcggagttgcagctcgagaggatcaatgtctactacaacgaggccagttgcggtcggttcgtgccgcgcgcggttctcatggacctcgaac

SEQ ID NO: 193203 - DNA, 270 bp, Glycine max
gagcgggaagggtggattcattgagaaggtgaaggatttcattcatgacattggtgagaagattgaggaagctattgggtttgggaagcaactgctgacgttactgcgattcacattccatcgattaatcttcacaaggcagatcttgttgttgatgtgctcatcaagaacccgaatccggtgccaatccctctgattgacatagattacttggttgacagtgatgaaaggaagctagtttctggattgatacaagatgcgggtacatcg

SEQ ID NO: 193204 - DNA, 275 bp, Glycine max
ctcacatcccttcgtcaacacctctccgactcttctcgttctctccatggcttcgtcctccttcaatgtggcgaggagcaaacgcgttacgacaccgatcacttggagctcttcaggcaagagagttacttcgcttacttgtttggagtcatagagcctggattctatgcagctattgacgttgcaactgggaattctatcctatttgctcctaggttaccttctgagtatgctgtttggttgggggagattaagccatctcctactttaaggaa

SEQ ID NO: 193205 - DNA, 277 bp, Glycine max
ggcataacctaaacctatctttcttctctctctgtgggtgcgcttcaacggcaaccagaagcagccatggccactgcaaggactgtgaaggatgtttcacctcatgagttcgttaaggcgtactcctctcacctcaagcgatccggcaagatggagctgccagagtggactgatattgtgaaaactgcaagatttaaggagttggctccttatgatcctgactggtactatgtcagagctgcttccatggcaagaaagatctacttgagaggaggac

SEQ ID NO: 193206 - DNA, 274 bp, Glycine max
cccatgaccacggcgtactcatttcccccactccgaaaatgtcgctccagggcagcgcacgtaaacggcaccgtggcggcggcgtcgacggcgagcctgaggctgcggctgaaccctaacaaggagcacaagcccgatggctacgaggacatgcaattggatttcagccctaacattttcagctcgctggagaggtacctccctccgagcatgctcaacgtgacgcgtgacgagaaggccaagttcatgcgcgagattctcctcaagtatctgc

SEQ ID NO: 193207 - DNA, 278 bp, Glycine max
gctcagtcatctcttttaccattctcttctctcttgctcttgcaggagagagccatgtccatgcatcgctacctgaggaagattattgggaagctgtttggccaaacactcccattcccactgcactgcgagagcttctaaagcctctccctgcaggtgttgaaatcgatgaactccctaagcaaattgatgatacacagtacccaaaaacattcttctataaagaagaccttcatccaggcaaaacaatgaaagtacaattcaccaagcgtccctat

SEQ ID NO: 193208 - DNA, 277 bp, Glycine max
actcgagcctcgagccgtctcacagtcacacaacagcaatggaagcaatcacagacggagtgaacaacatcaacatctctgattcttacaagaagaatcgcattcaggtctccaacaccaaaaagcctctcttcttctacgtcaatctcgccaagaggtatatgcaacagcataatgaggttgagctctcagcactaggaatggctattgctacagtggttactgttgctgaaatcttgaaaaacaatgagcttgctattgaaaagaaaatcacgac

SEQ ID NO: 193209 - DNA, 270 bp, Glycine max
cctcgagcgattcggctcaccaagacacaatgtatgtcacctcgaaccgtcaattttaccgagaatgcgacctttacggaaccgtggacttcatattcggcaacgcgcggtggtgttccaaaactgcaccctctgggcccgacagcccatggcccaacagaagaacaccatcacggcccaaaaccgaaaggacccgaatcagaacacgggcatttcgatccacaattgtaggatcatggccacgccggatcttgaagcatccaagggtag

SEQ ID NO: 193210 - DNA, 268 bp, Glycine max
atcccctttcaagaaaattcagattcaaagggatgacactacatttgacgcatatgtggttggaaaagaggatgctcctggaattgttgtgattcaggagtggtggggtgtggattacgaaattaagaaccatgccgtgaagatttctcagcttggtagtgggtttaaagctcttattccagatttatacagaggaaaggttggtctggatgttgctgaagctcagcatttgatggatggtcttgattggcaaggtgctgtgaaggat

SEQ ID NO: 193211 - DNA, 271 bp, Glycine max
actcgagcgattcggctcaggtaagagtgagcaacttccacacaccatagtgaaatggcttccaaggctgcacttctcttgtgtttcaatgttctcttcttcaccgtggttagctccacatatgtgccatgcaacccaccccccaaaactccaaaacacccacctgtcccaaagccaccttccccaaagcaagcaagttgccccaaagacactattaagtttggtgtgtgtgctgatgtgttaggtttgatcaacgtgcaacttgggaagc

SEQ ID NO: 193212 - DNA, 263 bp, Glycine max
ggcaagatcagatgtttacatcaacctcgcagctttgcagaagcttgacacaatgctcatagaaatattggatagtttcaaggatactgaattttggtacgcggacaagggagcatatcggggaattcaactcggtcacgtggaggctcatttcgaaggattgttcagaggaaagatgaaaagtggtggctgccagttccttgtgttcaccctgaggcctctctgataagtcaaggaagcacttgaatgagcaaagagactgt

SEQ ID NO: 193213 - DNA, 280 bp, Glycine max
atctcgagcgattcggctcagggcgacagtcactctccgaacacaacacttccgcagcgaaaaatgtctctggacgcgaacgaggatttccagcacattctgcgtgtgctgaacaccaacgtggatgggaagcagaagataatgttcgctatgacctccatcaagggtattggaaggagattcgccaacatcgcttgcaagaaggccgatgttgacatgaacaaaagggctggtgagttgagtgctgcagagttggatagtgtgatgactgtggtggcga

SEQ ID NO: 193214 - DNA, 277 bp, Glycine max
ctttcgcttctgaatcttcaacaatggtgctcgaggcgacgatgatctgtatcgacaattctgaatggatgcgtaacggagattactctccttctcgatttcaagctcaagcagacgctgtcaatctcatatgcggtgctaaaacgcagtctaatccggaaaatacagtgggagttctcacaatggctgggaaaggcgttcgtgttttggttacccctaccagtgatctgggcaagatcttagcctgcatgcatggactagatataggtggtgagat

SEQ ID NO: 193215 - DNA, 278 bp, Glycine max
cacatagctagttgtttaaagtgagagaacaagaaagaagaaaatggcaaactttccagttgttgacatggggaaacttaacaccgaagagagagcagcagccatggagattataaaagatgcctgtgagaactggggtttctttgagttggtgaaccatgggatatccattgagttgatggacactgtggagaggctcacaaaagagcactacaagaagactatggagcaaaggttcaaagaaatggtggccagcaaatggcttgagtcagttcaat

SEQ ID NO: 193216 - DNA, 270 bp, Glycine max
tagactttgatagtttgattagctctaataaggttaaggaccagagagagaaagagaaataagaagaaaaacacaagatgggttattggaagtctaaggttcttcccaagatcaagaaggttttcgagaagaatagcaccaagaaagctgctgctgctgaggccaccaagtcctttgatgagtcaaaggaggaatacaacaaagcctttgaagaaaagaagactgaacttcaaaccaaagttgttgaaatatatgaggcttcatcaactg

SEQ ID NO: 193217 - DNA, 271 bp, Glycine max
caaaaatggtaaccattaaagcatcttacacagtccttccaaatgaaccaactccggagggccttttatggctatctgatattgatcaagtggcacgtctacgccacacacccaccatctacattttccatgcaaaacacaaccatgatacattaattgagaggatgagaaactctcttagcaagattttggttcactactatccaatagccggtcgattgagaaggatagaaggtagtggtcgattggaattggattgcaatgcaaaagg

SEQ ID NO: 193218 - DNA, 270 bp, Glycine max
cctcgagcgattcggctcagagtttccggtctccgaaaacgaacgacgcagatgtctcgaagcaaatccagcagatggtgcggttcatccgccaggaagctgaggaaaaggccaacgagatctctgtctccgccgaagaggaattcaatatcgagaagctgcagttggtcgaagccgacaagaagaagatcaggcaagaatacgaacgcaaagagcgccaagtcgaaattcgcaagaagattgggtactcgatgcagctgaatgcttctc

SEQ ID NO: 193219 - DNA, 270 bp, Glycine max
ctcgagcgtttcttacatatggtgagagaagggcttcttggatggtcaatttcttcaacttcagcagctacaggatgagaacaacccggactttgtagttgaagtggtctctctcttctttgaagattctgagagacttctcaatgaccttacctttgctctaaatcagaaaagtattgacttcaaaaaagttgatgctcatgttcaccagctaaagggtagcagctcaagcataggtgctcagagggtaaagaattgttgcatttcttt

SEQ ID NO: 193220 - DNA, 277 bp, Glycine max
gcatcatggcctcaagagcagtgttattgttggctatgtgtgtgcttccggcgatggttgtggccattcgcccagcaaagaaccctttttgcgtgaagggtcgtgtctactgtgacccttgccgtgctggttttgagacctcagctaccacctacattgctggtgctgagattatgttgcaatgcaagagcagggttagcaacgaggttgtgtacacgaagaaggggtacaccgactcaaccggagcatacacaatgtacgtggatgaggatcacgc

SEQ ID NO: 193221 - DNA, 274 bp, Glycine max
tagctatagtaagctacacttatttgaggttggagaaatatggctaaagatgttgatgttcaagagcaaggaggagagtactctgcaaaagactaccatgaccctcctccagcacccttgttcgacccagaggagctcacacagtggtccttttatagagccctaatcgctgagttcatagcaacccttctcttcctttatgtcaccgtgctcaccattattggctacaaaaggcagactgatgccacgctaggtggcaccgagtgtgatgggg

SEQ ID NO: 193222 - DNA, 272 bp, Glycine max
aaatgtcattaagattatagaggagttcccactaagtagcaagctagatactcaagcctatggtgatcataccggtataatagcagaagaacatgtggagcctaacttaggtgggctcactgttgagcaggctatccaaaacaagaagttgttcatcttagatcaccatgactatctcattccttatttgaggaaaataaatgcaaataccacaaagacttatgctacaagaaccatatttttcttgaaagatgatggaactttgacaccat

SEQ ID NO: 193223 - DNA, 270 bp, Glycine max
atcccgggtaatttgatcacggattaaaggagaagcttccacccacggattccaggctgagaccagaccagcgacatctagagaatggggaatacgagaaggctaatatggagaaacaaaggttggaaaagaggcaaagaatgtcaaggaaaatgcaagaaaatggatggcagcctaggtggttccacagagaaaatgaaaatggaacgttccgatatattggcgggtattgggaagccagagcccaaggaagatggattggatgcccaa

SEQ ID NO: 193224 - DNA, 270 bp, Glycine max
tggcttcttttcatatccaatattcattccttgtgcttgtgcttgctatggtgatcacattgatgaaccctaccaatgcaaccctctctccccatttctatgataaagtttgccctcaggcattgccagttataaagtcagtggttcaacgagcaattatccgtgagcgacgcatcggagcatctcttctgcgcttgcatttccatgattgtttcgtaaatgggtgtgatggatcaatattgctagatgacacccgaaacttcactggcg

SEQ ID NO: 193225 - DNA, 270 bp, Glycine max
taaaaaccgaagaaggaagctggcttttaaagtggttgttcaactggctcttgaccttgcaagagggttgagctatctccacacaaagaagattgtccacagagatgttaaaacagaaaatatgcttctggacaagacacgaaccttgaaaatagctgaacttggagtagctcgtattgaggcctccaatcctcatgacatgacaggtgaaactggaacccttggttacatggctcctgaggttctaaatggtaatccatacaatagaaa

SEQ ID NO: 193226 - DNA, 271 bp, Glycine max
ctttccagttcatacttcatcctattattactttccctctacgcattccaaatggccactgttgaggttgcacagcaaacaccaacaactgtgacagagaatgaaacaacgactgaggtaaccaagattgaggaaactaccccagaacagccagccaccgaggttactgccccagaaacagtcaacgaagaagcaaaagaggaagcagcagttgagactaatgaggcaacagaagttacagaggaagggaaggctgagaaaacagaagaag

SEQ ID NO: 193227 - DNA, 269 bp, Glycine max
aaaaaagagagaagaaaaatgcgaaagttcgatccatggcccgttttcttcaagcgcgagtggaaacgcaactcgcccttcctcgttggattcgcagtcaccggagctctaatcaccaaactttcccttggccttaccgaggaagaggctaagaattccaaattcgttaaggcgcacaaaaggtgacttctgaatcgtgacatctgcctggctttgcattttatgttaggtttgtcaagattactttggcttgacttgattttatggat

SEQ ID NO: 193228 - DNA, 267 bp, Glycine max
atcctttctctgctctttgccttctctgacacatttggtgccttgtagagcgtgttttggcaggaaggtggtatggcgaaggacgttgaggttgctgagcgtggctccttctctgggaaggactaccaggaccctccaccagcaccactcattgatgctgaggagctcacaaagtggtccttttacagggctctcattgctgaattcattgccactttgctcttcctctacattactgtgctcacagtcatagggtacaagcaccag

SEQ ID NO: 193229 - DNA, 266 bp, Glycine max
gtcgctgctccgtaccagtttcactgcataaatttgagagaaaactctgcaaacatgttggtttatcaggacctccttacaggtgatgagcttctctcggactccttccgttacaatgaaattgagaatggaatgctgtgggaagttgaggggaagtgggttgttaagggagcagttgatgttgacattggtgcaaacccttctgctgagggtggagaagatgagggagtcgatgacgcagctgttaaggttgttgacatgttgat

SEQ ID NO: 193230 - DNA, 273 bp, Glycine max
agttgttgtgtaatgatactcattgtcaccaccaacacgctttcactttactgaacaacgacttcatcttcactcttccttcaaatttccaacaagaaagtttgttcaactgtccctttattggcgttagtatgctacctactggagcaaaagagacccaattacgtgagaacaacagccagaaggtccatcctcaaccaatggaagaggccatgaatcagaatccagaagcaatggaaaccctaatatctaaagtttttacaaatatctctt

SEQ ID NO: 193231 - DNA, 271 bp, Glycine max
tagggttttagcgcagcttcttctagatttaaggaagatgggtaaggaaaaggttcacatcagtattgtggtcattggccatgtcgactctgggaaatccactaccactggtcacctgatttacaagcttggaggcattgacaagcgtgttattgagaggtttgagaaggaagctgctgagatgaacaagaggtctttcaagtatgcctgggtgctggacaaacttaaggctgagcgtgaaagaggaatcaccattgatattgctttgtgg

SEQ ID NO: 193232 - DNA, 273 bp, Glycine max
tacccattgatctgcgcctcctcttccatggctccaccgccgccggtggaacacaacggcgactccgccgctaccgcctccgcctccgcctccgcggagtctcagagatcaattcccacgccctttctcaccaaaacctatcaactcgtcgacgaccaatccatcgacgacgttatttcctggaacgacgacgggtcaacgtttatcgtctggaaccctaccgttttcgccagagacttgcttcctaaatttttcaaacacaataatttctct

SEQ ID NO: 193233 - DNA, 269 bp, Glycine max
ggccctgctttgattggcaaggacccaactgagcagactgctattgacaacttaatggttcaacagcttgatggaactgttaacgaatggggttggtgcaagcaaaagctaggagcaaatgccatattggcagtgtctcttgcagtctgcaaagctggtgctagcgtcctgaaaattcctctttacaagcatattgctaatatcgcgggtaacaaaaagttggttttgcctgttcctgctttcaatgtcattaatggtggatcacatgc

SEQ ID NO: 193234 - DNA, 240 bp, Glycine max
atccctaacgcgtgcatagcagagtcagagacagagacgcagccatggggcggagacctgcgaggtgttataggcaaattaagaacaagccataccccaagtcacgtttctgccgtggtgttcctgatcccaagatcaggatttatgatgttggtatgaagaagaagggtgttgatgagtttcctttctgtgtccatctggttagttgggagaaggaaaatgttcaagtgaggcctggaa

SEQ ID NO: 193235 - DNA, 182 bp, Glycine max
gcttggtgatgtccctttctgttctcttcactcttggtcttgcgagagaaagccatgccagagacgaagatttttggcatgctgtttggccaaacactcccattccaagttcattgcgagatcttctaaagcctggccctgcaagtgttgaaatcgatgatcaccctatgcaaattgaagaa

SEQ ID NO: 193236 - DNA, 115 bp, Glycine max
ggtgttaccggcagataacaaacaagccataccccaaatcacgcttttgccgtggtgttcctgatcctaagatcagaatttatgatgttggtatgaagaagaaaggtgttgatga

SEQ ID NO: 193237 - DNA, 171 bp, Glycine max
cggctcgagcctgccagtagtcatatgcttgtctcaaagattaagccatgcatgtgtaagtatgaactaattcagactgtgaaactgcgaatggctcattaaatcagttatagtttgtttgatggtatctactactcggataaccgtagtaattctagagctaatacgtgc

SEQ ID NO: 193238 - DNA, 172 bp, Glycine max
cgcgaaactgtgctcgaacgatgggcttaccagtcttgatcgttacaaagggcgatgctacggccttgaacctgttgctggggaagaaaatcaatatattgcttatgtagcttatccctcagacctttttgaagaaggttctgttactaacatgtttacttccattgtcggt

SEQ ID NO: 193239 - DNA, 180 bp, Glycine max
gttttctgcgtcatctccgattccccgacaatggccacccaaatgagcaagaagagaaagttcgtagctgatggagtgttcttcgctgaactgaacgaggttctgacaagggagttagccgaggacggatactccggcgtggaagttagggttacgccgatgcgcaccgaaatcatcatc

SEQ ID NO: 193240 - DNA, 175 bp, Glycine max
gagaatatgaagttgtttgttttctttgttgctgcagtagttttggtagcatggccatgccatggcgcaggctaccaaaggttccctctccgaatgaaaactggctatggtgagcgttcttcggaggtaaaatgcgcaagttttaggcttgctgtggaagcacacaacatccgag

SEQ ID NO: 193241 - DNA, 176 bp, Glycine max
gttgccttggattatgagcaagaacttgagactgcaaagagcagttcttcagttgagaaaaactacgagcttcctgatgggcaagttatcaccattggagctgagagattccgttgccctgaagttcttttccaaggattcagaacctatagtgttggccttcgggatcggagtaa

SEQ ID NO: 193242 - DNA, 177 bp, Glycine max
gtgcctaaccattaaaacacacactctctttcacaaattccataagaacgaccaaagacaagacaagaaaaaagagcgatttttccctcaccaaagaagaaccaaaacaatggcggatcaactcaccgatgaacagatctccgagttcaaggaagccttcagcttgttcgataagga

SEQ ID NO: 193243 - DNA, 162 bp, Glycine max
tcgtgggagcggacaagttcccggagagacagccgattgcgacggcggcgcagagccaagacgacggctccgactaccaggagccggcgccggcgccactggttgacccgacggactttacgtcatggtccttttacagagcccggatagcagagtttgtgg

SEQ ID NO: 193244 - DNA, 172 bp, Glycine max
ggcaaagttaataagattctttgagttgaacacaggggccaagattccttctgttgggttaggcacttggcaagctgagcctggtgttgtagccaaagctgtcaccacagccattctggttggctacaggcatattgattgtgctctcgcgtataacaatcaagcagagatt

SEQ ID NO: 193245 - DNA, 171 bp, Glycine max
ctcgagccgctcgagccggttcttttcctctttgctcttgtctcgttcacttcccatgcttctgtcaatgatgcctgtgtagcagacctaaaaggtccagatagcccttcaggctatcagtgcaagccacctaacacagtcacagtggatgactttgtgttctctggcttt

SEQ ID NO: 193246 - DNA, 172 bp, Glycine max
cttgtgccgtttgtgttgttttcgggacgaagaagaagatggtgtcaggttctggaatctgcgccaagcgggtggtggtggacgcgcgccaccacatgctgggtcgtctagcctccatcgtggcgaaggagcttctgaacggccagaaagtggtggtcgttcgctgtgaaga

SEQ ID NO: 193247 - DNA, 170 bp, Glycine max
atccctgttaaacaaaccatggcttccgaaacaaaccagttctagaatgtgtgtgtaattggagctggaccctcggggctattggcatcgagggagctgagaaaagaaggtcacaaggtggttgtgttggagcagaaccatgatattggaggtcaatggctatatgaccc

SEQ ID NO: 193248 - DNA, 171 bp, Glycine max
ctcaactctgcttcttttcaatcagttacattttctttggtattccaatggccactgttgaggttgtgtcagcaaaggtttccctcccagaggacacaaaagaggcatcattgaaggctgatgagaagaagaacacagaagaagttgttgagactccaacaccaacaccag

SEQ ID NO: 193249 - DNA, 290 bp, Glycine max
gccaggagctgccggttgagaagggttccatttactcgctcacgttttgtgcggctcgcacctgcgcgcagtttgagtccatcaacgtctcggttctgcctgcgtcgcagacgatagacctgcagacactctacaacgtccagggatggaacccttacgcggtttctttcaatgcggatcaggacacttttaggttgctatttaagaatcccggcatggaggatgaccccacttgtggccccatcattgacaacattgctatcaagaagcttttcactcctcttaaaccc

SEQ ID NO: 193250 - DNA, 280 bp, Glycine max
cagcgcggaggggcaagctagggagtaagagatggatttggaccagtggatctccaaggtgaaggatggccagcaccttctcgaagaggagcttcaacttctttgcgaatatgttaaagagatccttattgaggagtcaaatgtgcagcctgtcaacagtccagtgacggtttgtggtgatattcatggtcagtttcatgatctaatgaaacttttccagactgggggtcatgtgccggagacaaattacatttttatgggagactttgttgatcggggt

SEQ ID NO: 193251 - DNA, 277 bp, Glycine max
gacgcaacacactttcactgagaaaggatctctatctaccaaggagcagaataaaacccttctctctggtaagtgaataagagaatggcttcagatcggaaacttcacactttcgaggaggtggcaaagcacgaccagaccaaggattgctggctcatcatttctggcaaggtgtatgatgtcacccctttcatggaggatcatcccggaggtgatgaggttttgttatctgcaacagggaaagatgcaaccaatgattttgaagatgttggacaca

SEQ ID NO: 193252 - DNA, 283 bp, Glycine max
ggcacttcgttgcttggtgatgtccctttctgttctcttcactcttggtcttgcgagagaaagccatgccagagacgaagatttttggcatgctgtttggccaaacactcccattccaagttcattgcgagatcttctaaagcctggccctgcaagtgttgaaatcgatgatcaccctatgcaaattgaagaaacacagtacccgaaaaccttcttctataaagaagaccttcatccaggcaatgctctgaaagtacaattcagcaagcctccctttcaacaa

SEQ ID NO: 193253 - DNA, 286 bp, Glycine max
agaaaatgggtactaacagatctttaatggccacgatcctcatcgtgttcttcacggtgttggcagtgtcatcggcgttggacatgtcgataatctcgtatgacagaagccacgcggacaagtcagggtggaagagtgacgaggaggtaatgagtatatacgaggagtggcttgtgaagcatgggaaggtgtataacgccgtcgaagagaaggagaagaggtttcagatcttcaaagacaacctcaactttatcgaagaacacaatgctgtgaaccggacatacaa

SEQ ID NO: 193254 - DNA, 291 bp, Glycine max
aatggccaccacctcggagagggatatggagaacaagatgcatcaagaagaactgaagcatcttgggtttgtgaagattgcggcaattaaagcctttgtgtgtgtgtcgaatctctacgacttcgcaaagcaaaactcgggacctttgagatctgctgttggaaccgtggaagacactgtaaccaccgttctgggtcccgtctaccaccaattcaaggctgtccccaaccacctcctcctttttgccgacaacaaggtggatgaagctgctcacaaattcgatgagcatgc

SEQ ID NO: 193255 - DNA, 279 bp, Glycine max
gcacaccccaattctctgccctcaactgcatcgatctctccaaccccgacatcaaccaatccgtcaacttactcaaagaggcatgtttggattccggttttttctacgttgtcaatcatggaataagccatgaattcatggacgaggtttttgctcagagcaagaagttcttctctcttcctcacaacgagaagacctggactctcaggaatgaacaacacaggggatacacccctgttcttgatgagttgcttgatcctgaaaaccaagtacatggag

SEQ ID NO: 193256 - DNA, 277 bp, Glycine max
ccagtagtaatatgcttgtctcaaagattaagccatgcatgtgtaactatgaactaattcagactgtgaaactgcgaatggctcattaaatcagttatagtttgtttgatggtatctactactcggattatcgtagtaattctagagctaatacgtgcaacaaaccccgacttctggaagggatgcatttattagagaaaaggtcaacacaggctctgcctcttgctttgatgattcatgataactcgtcggatcgcacggcctttgtgccggcgac

SEQ ID NO: 193257 - DNA, 282 bp, Glycine max
agaatccctccttaagcagacttctcgtgttgctcttgaggagatcaaaatcaagtttatcgatacctcctcatagtttgggcatggtcgcttccagaccacacaggagaagcagaagttctttggacgcctcaaagcataattatgttaattggatggaaatgctggaattctatttggttgccatcacttataaactttgtagtgtttctgttttgatattatggattctcgggtagtgagttttttttctccttaagttggccaaacttttgtttcagg

SEQ ID NO: 193258 - DNA, 281 bp, Glycine max
ctcactctcttcgcagcggcactctcggtggctttcatcttttcgggttgtcaagatgtacacatcgaggaagaaaattcacaaggataaggatgctgagccaactgaatttgaggaatcagttggacaggcattgtttgatctagaaaataccaacaatgagctgaaaagtgatctgaaagatttatacataaactcagctgtccaaattgatgtttctggcaaccgaaaggctgtggttatccatgtcccctacagactaaggaaaggattccggaaga

SEQ ID NO: 193259 - DNA, 280 bp, Glycine max
cctcgagccgaatcggctcgagaaaccctagccgctcttctcttcaaccttcactttggaaatcatcataatggcgttctgtcataaggttggaaatgtcttgaggcagggtgctgctcgcagcacacatgcccctgttgcgtccatgcttaattacatccgctgcatgtcttcaagcaagcttttcattggaggcctttcatatggagttgatgaccagtctcttaaggatgcattttctggctttggagatgtggttgatgcaaaagttataactgat

SEQ ID NO: 193260 - DNA, 279 bp, Glycine max
actcgagccaattcggctcgagcgtgctcgagcaaaaagcttgcaccacccataggtattgctgttgatcatcgtagcaagaaccgttctttggaaagtctgcaagctaatgtgcagaggctgaaaacatacaaggccaaattggttgtgttcccaagacgggcacacaaggttaaggctggtgattctactcccgaggagcttgcaaatgcaacacaagtccagggtgctttcttgcctattgtgagggagaagccaactgttgaacttgtaaaggtt

SEQ ID NO: 193261 - DNA, 272 bp, Glycine max
gagtttcacagcagcaatggtgtacgtcaaggctcagaaatcaaaagcctacttcaagagatatcaagtcaagttcaagagaagaagagagggaaaaaccgattaccgtgccaggattcggttgattaatcaggacaagaacaaatataacactccgaaataccgatttgttgttcgctttagcaacaaggacattgttgcacaaataatatctgctagcattgctggcgatattgttcttgctgcagcatatgcacatgagctgccacaat

SEQ ID NO: 193262 - DNA, 284 bp, Glycine max
cgcagttccctacctctcctttcaagatgcagattctcgtcaagaccctcaccggaaagaccatcacccttgaggtggaaagctctgacaccatcgacaacgtcaaggccaagatccaggacaaggaaggaattcccccggatcagcaacgtctcatcttcgccggaaagcagctcgaggacggccgtaccctcgccgactacaacatccagaaggagtcaacccttcaccttgtccttcgtctccgtggtggcatgcagatcttcgtcaagactctcactggc

SEQ ID NO: 193263 - DNA, 285 bp, Glycine max
actaccaggaagcaattgaggacattaccaaaagaatggtctgctggaatggccaaatttatttgcaaggaggtagaaacaattgatgactatgatgaatattgtcactatgtggcgggacttgttgggctgggtttatcaaagcttttccatgcgtctggttcagaagatctggctccagatgacctttccaattcaatgggcttgtttctacagaaaacaaacattattcgagattatctggaagacatcaatgagatccccaagtcacgcatgttttggcca

SEQ ID NO: 193264 - DNA, 280 bp, Glycine max
agtgaacggccgtccgctcgattataaatgtctctagtgactgcatagatcagagccaaagcaaatgtgtatcatggagatgaactctgccaagagaagtcaaagttgttgctaaaggatgtacggctacctaatgggcttttgccattgaaggacattgaggaatgtgggtatgagagggatagtgggtttgtgtggctgaagcagaagaagagcacattccacaagtttgagaagattgggaagctggtttcctatgctcctgagatcactgcctatg

SEQ ID NO: 193265 - DNA, 270 bp, Glycine max
ctcgagccgttctgggtcagtgagaaaatggctgattgggcaacggttttgatcggggtaactctgttcgtgctgctccaaccggggctgcttttctcctttcctgggaacgggaagcagcttgagttcggtagcatgaagaccaacggcaaagccattttcatccacacgctcatcttcttcgcgctctactccgtcctcatcctcgccgttaaaatccatatctacaccggctgatccggttcccgggatctgaggtatcatttcgtt

SEQ ID NO: 193266 - DNA, 278 bp, Glycine max
ggctccggctcttgccgctaagaagaagcctgagaaggtcacgaatccgttgttcgagaagcgtccgaagcagttcggaatcggaggggcgttgcctccgaagagagacttgactaggttcgtgaagtggccaaagaatgttcaaattcagaggaagaagaggattctgaagcagaggttgaaggttcccccagctttgaaccagtttaccaaaactcttgacaaaaacctagcaacaagtctgttcaagttgcttctgaagtacaggcccgaggaca

SEQ ID NO: 193267 - DNA, 247 bp, Glycine max
  unsure (1)..(247): unsure at all n locations
gcgacgatttgctttgggctatgaccactttacgactcgaacnngtatattgatccgctcaaggtttanctcgccgcttacagagagattgagggtgattcaaagggttcggccaagggtggagatgcatctgctaagagagatgtttatcagagtcctaatggccaggttgagaatgttgctcatcaaggttctttctcacaaggtgttaattatacgaattcttagccccaggctcaacatatga

SEQ ID NO: 193268 - DNA, 270 bp, Glycine max
ctcgagccgctcgagccgcttttcacgtcattatcctaaaaacttgcagattttcacatcccaaacaacatcaagggaaggttcatgtttctgtcggtgctcctttgtgccacttttcatgtctccttctctattatcgacggtttagttgccaacggaactttgagttgggtccaaagccctccgccctaaaaggaacagtggtggtgggcgggaccactcgatcccagaatgggagatctccggctttgtggagtacataaaatccgg

SEQ ID NO: 193269 - DNA, 275 bp, Glycine max
ggaactttttgttatggccagggaacatgctccatcaattatcttcatggatgaaattgacagtattggatctgctcggatggaatctggaagtggcaacggtgatagtgaggtacagcgtactatgctggaacttctcaaccagttggatggatttgaagcttcaaataagatcaaggttttgatggccaccaatcggattgatatcctggatcaagccctccttagaccaggacggatagaccggaaaattgaatttccaaaccctaatgaag

SEQ ID NO: 193270 - DNA, 278 bp, Glycine max
agagcatcacttcgattctcaggcggatgcgggagcgtccaagacgtatcctcagcaggctggtaccattcgcaagaatggctacatcgtcatcaaatccaggccttgcaaggttgtagaggtctctacgtcaaagacaggcaagcatggacatgcaaagtgtcactttgttgcaattgatatttttaatgggaaaaagcttgaagatattgttccatcatcccacaactgtgatgttccacatgtgaatcgcactgactatcagcttattgatatct

SEQ ID NO: 193271 - DNA, 281 bp, Glycine max
gacaatgaggcctgctcttgctttgcttcctcttctatttgctttcttgttagctgccactacagaatcaagaaaagatacaggggaatattggaaaatgatcatgaaagatcaggaaatgccagaaggacttcaaggtcttgtttcatttcaatctgaaaataaccctaagactcaagagcagcttggtaaaggttccaaaaaccattgtgaagagtctctagttacaaatacacaagttaatagtgacttcgaacccataccaagtgttaccaaatatg

SEQ ID NO: 193272 - DNA, 282 bp, Glycine max
ttagctacctagattattcacttcaattcctcacaagctacaccgtgtcttgctccaatggcagctttgtatctcccaataagcatgttggcactcattgttgttgtttctcttggtttgtggagtggtgttcaaggtgcaccacaagtgccatgctacttcatttttggtgattctttggttgataatgggaacaacaaccagctccagtctttggctagggctgattacttgccttatgggattgacttccctggtggaccttctggaaggttttccaat

SEQ ID NO: 193273 - DNA, 253 bp, Glycine max
gggactaatgatggtgatgacgatggcattcaccgatggagatttcaacggcagcaccatcagcgtgttggggaggaacatgatcatgagttaacctgttagggaaatggctattgttggcggcactggggcttttcgttttgcacgtggctacgctcaagccagattttactctgttgatttcaccaaaggatccgctatcgtggaatacgacgtattcgtgaaccattattgagatttactccttccgttt

SEQ ID NO: 193274 - DNA, 253 bp, Glycine max
gtccctccttcctctgccttataattcttgtgacccttttggctggtagcattgaaagtgcaccagcaaacgtgaagccaagccattatgctgcacccttcaataggagtgtttttccttctggttttctatttggaataggctctgcagcttaccagatagaaggagcagcagctatagatggcagaggaccaagtatatgggacacctatactaaacagcaaccagggaagatttgggatcatagtgatgg

SEQ ID NO: 193275 - DNA, 254 bp, Glycine max
caactccaacctctgttcatcgtctaccgcgctttcttttcaaccagaactatgattaagctttttaaagtaaaggaaaagcagagagaacttgcagaaaatgcaagtggcggaccacctgttaagaagcaaagtgctggagagttgcgtcttcacaaagatataagtgagctgaatctaccaaaatcatgtaccatgcaattccccaatggcaaagatgatctgatgaactttgaagtttcaattcgacctga

SEQ ID NO: 193276 - DNA, 254 bp, Glycine max
ctcaatcttcattgtcctgttctttcccttggtgacaaaccaagactaacacacacagaacatagcttgtgttggtgaggtgagaagataaagaaagaatggcatttgcaggaacaacacagaagtgtatggcctgtgacaaaaccgtttatctggttgataagttgaccgcggataaccgagttttccacaaagcttgcttcagatgccatcactgcaaaggaaccctcaagctgagcaactacaactctttt

SEQ ID NO: 193277 - DNA, 252 bp, Glycine max
ttacactccaaaaccgcacatcttcactcccctgaagaccctcctactgccttgccagactccaaaaaacccgattcagggaatggtggtgatgatgttgatcaagagtgtcaggttcaagcattcaaagagtatggtctgattgagcttagaagggccacaaatgagttcagcacagattacattgtttctgagagtggtgagaaagctcccaatgtggtctacagagggaagcttgagaacaatcggtta

SEQ ID NO: 193278 - DNA, 254 bp, Glycine max
caagccttatgtgaagaaaatggccaagagccaagactatttcttcaaggagttctctagagccattaccttgctctcagagaacaaccctctcactggcacaaagggtgaggtcagaaagcagtgcaatgttgccaacaagcaccatgatcaggacccttgaattttcctccccttgtctatgatcgaggaagaaaatctgtaatatattatgcaaaaaataattaaggtcttttcctttaaatgggctggtt

SEQ ID NO: 193279 - DNA, 256 bp, Glycine max
gtgccccctgtgttaaattcgttctctgaccaagatagcaaagttcgttattatgcttgcgaacactttataacatagcaaaggttgtgagaggggattttattattttcttcaaccagatctttgatgccttatgcaagctttctgctgactcagatgccaatgtacaaagtgctgctcacctcttagataggcttgtgaaggatattgtgactgaacgtgatcagttcaggtactaggtaaagagatctctgaa

SEQ ID NO: 193280 - DNA, 254 bp, Glycine max
gctatccagtggctagacagcaaccagctcgcagaagcagatgaatttgaggacaaaatgaaggaattggaaagcatctgcaatcctatcattgccaagatgtaccaaggtggtgctggtcctgacatgggtggtgctggtgctggggcagccgaggatgattatgctgctccttctggtggaagtggtgctggccccaagattgaggaagtggactaaatgtgtagttgctttcatccatttatctgtttaaa

SEQ ID NO: 193281 - DNA, 254 bp, Glycine max
aaggaccacccttttagtttgaggcctttgttgctagtcacacttgatccaagtgtgattaagtcatggtgtcaattctctacttggctcacaagtgaagaccgtacaccgtttcaaacggagaatggggtgacatattttgattatgctaagcgtgaccccaaattcggtcacttttacaatgatgcaatggctaaggacactcgattcgcttctagtgtggtgattgaaaactacaaggaagtgttcgaggg

SEQ ID NO: 193282 - DNA, 260 bp, Glycine max
gctcgcttgccaaatggtcgtccatttccccctctatttaacttcaaacaggaattatctggagcatcttccgagcttgttaataagttgatacctgaccatgtgaagcggcaaatggggatacagtttatgcatctgggaggatcgtgacgataaagcttaggggacatagtgtatactagctgataagttaaaaaaaagtggcaccattattttttgtcttaataccatgttctgtgacctggcgaatgtagtttcaa

SEQ ID NO: 193283 - DNA, 255 bp, Glycine max
caaattctcagtgaaaccaattcagttcagtccaaatcccaaatccgaagtgagatttgcgatggagaggcttcagcgaatgttcgcaggtgcaggtggagctctagggcaccctcccccagattccccaactctcgattcctccgagcaggtctacatctcctcactcgctctcctcaagatgctgaagcacggaagggctggggttcccatggaagtgatgggtttgatgcttggagaattcgtggacgagta

SEQ ID NO: 193284 - DNA, 251 bp, Glycine max
ggaatttcgatgctcagtcatctcttttaccattctcttctctcttgctcttgcaggagagagccatgtccatgcatcgctacctgaggaagattattgggaagctgtttggccaaacactcccattcccactgcactgcgagagcttctaaagcctctccctgcaggtgttgaaatcgatgaactccctaagcaaattgatgatacacagtacccaaaaacattcttctataaagaagaccttcatccag

SEQ ID NO: 193285 - DNA, 255 bp, Glycine max
agcaaatccagcagatggtgcagttcatccgccaggaagctgaggaaaaggccaacgagatctctgtctccgccgaagaggaattcaatatcgagaagctgcagttggtcgaagccgacaagaagaagatcaggcaagaatacgaacgcaaagagcgccaagttgaacattcgcaagaagattgagtactcgatgcagctaaatgcttctcggattaaagttcttcaagctcaagatgacgtgatcagttccatg

SEQ ID NO: 193286 - DNA, 253 bp, Glycine max
ggtgtttccatctcacagtgactagtctgtgctttgtagtggttgtggttggagtgcttccactctccttagatgcacaactagatccctcgttttacagagacacgtgtcccaaggttcactccattgttcgcgaagtggtgaggaacgtttccaagaaagatccccgcatgcttgccagtctcattagacttcactttcatgactgttttgttcaaggatgtgacgcatcagttttgttgaacaacactgc

SEQ ID NO: 193287 - DNA, 255 bp, Glycine max
aaagatgtttcctttctggcaaaagggtcaaaagataaaggggactatggtggttatgcagaagaatgtgttggatatcaactgctatcccagtgttggagggatcgttgaccaaggcttaggcttcataggcagtgcagtcgatgcacttacttttgcagccaccaaaatctccatccagttgattagtgctaccaaggctgatggtgggaaaggaaaaattggaaagagtacaaatttaagaggaaagataac

SEQ ID NO: 193288 - DNA, 250 bp, Glycine max
ccagttgtgtagatatatatgtgacaattgcaactggatcatcagggaagtcatcacggctttcttttcaacttgattcaatgtattgctgacctgggatctgggaagtgggttttcagagacctcaatgtatatatttttagtttctcccaaaaaaaaaaaaaaaaaaaaaaaaaaaaaaaaaaaaaaaaaaaaaaaaaaataaaaaaaaaaaaaaagggggggccccccaatataatgctcccccccc

SEQ ID NO: 193289 - DNA, 253 bp, Glycine max
tcgagcggctcgagctcgagccgaatcggctcgagctccatttgacacagtcctagtggtgtactactagcttatagccacacgcgcatccatcactaatgtcactgtggagctccttcaattccccgcactggtgacacctcctggctctaccaaatcctatttccttggcggcgcaggggtgagagggttgaatattcaagaagaatttgtgaagttcacgggaataggtgtttatttggaagacaaggcc

SEQ ID NO: 193290 - DNA, 259 bp, Glycine max
ctgagtttccacactgcataccttaggtcttccgaattcgaagttaatttgcaagatggctaaggaaaaggctcagatcaacattgtggtggttggtcatgtggaccctgaggaggcaaccaccattaacgagctgaagaagcctgttgtggagaaagaagctccagggcatgccatatgagggcatgcacgtacggcctcggaggggaaccagaaaattatgttaacaaaataatctggaaccctaatgtatcagtgt

SEQ ID NO: 193291 - DNA, 253 bp, Glycine max
  unsure (1)..(253): unsure at all n locations
ggcaccagctggcccaatgtatcaggctgggaccttgagtgggaaccctttggccatgactgcaggaatacagaccctgcagcgtattaaggagccaggaacttatgagtacttggacaaaatcaccggtgagcttgttcagggcattattgaagctgggaagagggcaggccatgcaatatgtggtggtcatatangggggatgtttgggtttttcttcacagaaggaccagtgtataattttgcagatgcc

SEQ ID NO: 193292 - DNA, 247 bp, Glycine max
aaagatgtttcctttcgggcaaaagggtcaaaagataaaggggactatggtggttatgcagaagaatgtgttggatatcaacagcatcaccagtgttggagggatcgttgaccaaggcttaggcttcataggcagtgcagtcgatgcacttacttttgcagccaccaaaatctccatccagttgattagtgctaccaaggctgatggtgggaaaggaaaaattggaaagagtacaaatttaagagga

SEQ ID NO: 193293 - DNA, 252 bp, Glycine max
ttggtctttcctctttcgttctctctctttcactcgcgtcttcgagtttcacagcgaagtcgtaggagggtttcaaaagatggagaacatgcagagcttctggcaattgggcgatgaactccgtggacactcaaaagcatcggaggatcacaaatggttaatggttgcttcgaaattggcggaacagacaagattgaagggggagcgtgtgaacaaccttgatctttcaaagggccccattgaaacaaggtc

SEQ ID NO: 193294 - DNA, 251 bp, Glycine max
gcttcctcttctatttgctttcttgaagttagctgccactacggaatcaagaaaagatccaggggaatattggaaaatgatcatgaaagatcaggaaatgccagaaggacttcaaggtcttgtttcatttcaatctgaaaataaccctaagactcaagagcagcttggtaaaggttccaaaaaccattgtgaagagtctctagttacaaatacacaagttaacagtgacttcgaacccataccaagtgtta

SEQ ID NO: 193295 - DNA, 255 bp, Glycine max
ctcgagccgaatcggctcgaggctcgccattgggtcgaccggatactagactacaatgtgcctggaggaaagttgaaccggggcctgtcagtcattgacagctacagattgttgaaagaaggacaggcattaaatgatgacgaaattttccttgctagtgctcttggttggtgtattgaatggcttcaggcatattttcttgttcttgatgacattatggataactctcacacacgccgcggccagccatgctgg

SEQ ID NO: 193296 - DNA, 251 bp, Glycine max
ctcgagccgggatacctaggcacccagagacgaggaagggcgtagtaagcgacgaaatgcttcggggagttgaaaataagcgtagatccggggattcccgatataggtcaacctttcgaactgctgctgaatccacgggcaggcaagagacaacctggtgaactgaaacatcttagtagccagaggaaaagaaagcaaaagcgattcccgtagtagcggcgagcgaaatgggagcagcctaaaccgtgaaa

SEQ ID NO: 193297 - DNA, 254 bp, Glycine max
agttaacgtacctagttgttggtctttatatttagttattgacatcaacaaagtcatggaggaagttaatgtggttcaaaccaagaatggaactgtttcagtagcttctgcgtttgctggccataaggaagctatacagcaaagggaccacaaatttttaagaattgctgttgaagaagcgtataaaggggtagactgtgaagatgggggtccctttggtgctattatagtttgtaatgatgaaattgttgcta

SEQ ID NO: 193298 - DNA, 257 bp, Glycine max
aaactttccagttgttgacatggggaaacttaacaccgaagagagagcagcagccatggagattataaaagatgcctgtgagaactggggtttctttgagttggtgaaccatgggatatccattgagttgatggacactgtggagaggctcacaaaagagcactacaagaagactatggagcaaaggttcaaagaaatggtggccagcaaagggcttgagtcagttcaatcagaaatcaatgacttggactgggaaa

SEQ ID NO: 193299 - DNA, 261 bp, Glycine max
actcgcttgccgaatggtctgcgtctctcgtaatcatgcctaggcaaatccacgtgattaaggatttccttctcactgccagaaggaaggatgcgaggtcagtgaagatcaagaggagcagagatgtggttaagttcaaggtcagatgctccaagtacctctacacactttgtgtgtttgacccagagaaagctgataaattgaagcaatctcttcctccaggtttgagtgttcaagacctgtaaaggtactgggcgagag

SEQ ID NO: 193300 - DNA, 250 bp, Glycine max
acagagtcaaagcattttgtgttgataaattcggtgaagttgtggaatggactcacccactatccaccattccatgcattggcagagatagcagttcccactgctgctcactggtcagagaagtacaaccatgtgatcaaggccatgactcaaaagggttatagtttcgtcgggtatctacctttgattcccattgaagagatagccaaggcattcaagcagggagaggcgaacttaaaaggagataatg

SEQ ID NO: 193301 - DNA, 251 bp, Glycine max
  unsure (1)..(251): unsure at all n locations
cctcgagccgaatcggctcgagaccggatttcatcgtcaccgacaacttccacccttggagtctcnatgctgctgctaaactacggcattccgaggatcatgttccacggcgcaagttctctcgctcgctccgctgcgcactccgttgaacagtacgcaccccacttggaagctaaattcgacaccgacaagttcgtgttacctgggttacccgataacttggagatgacgcgcttgcagttgccggattg

SEQ ID NO: 193302 - DNA, 251 bp, Glycine max
ctcccctcacttgtgcctagccttatgtcatagtattatcattcattctcatctttctctcttctctctccacccaaaccctaactcccgaccctgttcccctctcgtatccgtcatgaaaggaggaaagtccaagaccgaatctaagagagccgatcccaaacttgctgtgaataagaagggagccgccaccaaggctaggaaacccgccggcaaggggaaggcagcgaaagaccctaacaagccaaaga

SEQ ID NO: 193303 - DNA, 252 bp, Glycine max
atcccaggcgaggagaaagatggaggggaaggagcaggatgtgtcgttgggagcgaacaagttccccgagagacagccgattgggacggcggcgcagagccaagacgacggcaaggactaccaggagccggcgccggcgccgctggttgacccgacggagtttacgtcatggtcgttttacagagcagggatagcagagtttgtggccacttttctgtttctctacatcaccgtcttaaccgttatgggagt

SEQ ID NO: 193304 - DNA, 274 bp, Glycine max
agacttcggctcgaagcaactggtgtccctattccccttttgtgctcgtagttgaccgtcgaataaaatctaatcccccaaataaataaagaagcgaaaccaaaccaaaccatcgagtgcgttgcactcccaccgtaagcacagctatgtcgttgcgcaggcgaaccttgctcaaggtcattgttctcggcgatagcggggttggaaagacctcgttgatgaatcaatacgtgcacaagaagtttagtcagcaatataaggctaccattggggc

SEQ ID NO: 193305 - DNA, 248 bp, Glycine max
ctcattctctagtcctgttatttctcagcgcgtaaagcatggctctgttggtggagaaaaccacgagtggtcgctagtacaaggtcaaggacctttcccaggccgacttcggccgcctcgagatcgagctggccgaggttgagatgcccggcctcatggcctgtcggaccgagttcggcccctcccagcccttcaagggggcccgcatcaccggctccctccacatgaccatccagaccgccgttctc

SEQ ID NO: 193306 - DNA, 248 bp, Glycine max
gggtagctgagatcggagaaccctctctttcttctccttcttcagttgaaaataaaaaatggcagatggtgaggatattcaaccactcgtctgcgataatgggacaggaatggtgaaagctggatttgctggggatgatgctccgagggctgtgtttcccagcattgttggtcgtccccgtcacacgggagtgatggttggcatgggccaaaaagatgcatatgttggggatgaagctcagtccaaga

SEQ ID NO: 193307 - DNA, 251 bp, Glycine max
gttcggtagagagagagagagagaggaaagggaaagtgaaacgacatgatggtgggacagttgacggcgacgaagccgagccggagcgatgaggttttggatgctgaggagcaactgagaatcgctaatgagatcagagcccaattcgatgccttggaacccaagcgacccatcaagcccaacagaagcgaacccgacgccgttttgcaataccccgtcgcagccgcttctgtgaacaatatacctgagct

SEQ ID NO: 193308 - DNA, 250 bp, Glycine max
cttttgtctgcattacacctgagcctcagatctcatctcttatccacaaaaccatggctgaaaaggtgaccatcatgaaactcaaggttgatcttgagtgtgagaaatgctacaagaaggttaagaaacttctcggcaagtaccctcaaattcgggaccagaagttcgatgagaaggaaaacattgtgttcatcacagtggtgtgttgcagcccagagaagataagagacaagctttgctacaaaggtgg

SEQ ID NO: 193309 - DNA, 250 bp, Glycine max
ctccagtgatcctaacgccgataggatcaatcgtctcaaaggtgaaatgtctcaggtacggaatgtcatgatagaaaatattgacaaagttttagatagaggtgatcggttggaattgctggtcgataaaactgctaatatgcaaggaaacacatttcgcttcaggaaacaagctcgtcgcttcagaagcactgtttggtggagaaatgtcaagcttacgattgcacttatagtcgtcctactagtgata

SEQ ID NO: 193310 - DNA, 252 bp, Glycine max
ctttgaacccagaccaagtgttaccaaatatgatgattttgaactcaggtcaagcgttaccgagaatgatgattttgaaccgagaccaaatattagtaagtatgatgactttgaactcaggtcaagcgttaccgagaatgatgattttgaatcaagaccaagtgttaccaaatatgatgatttagaactcaaatcaagcattaccaaaagcgatgattttgaaccgagaccaaatattagcaagtatgatga

SEQ ID NO: 193311 - DNA, 255 bp, Glycine max
caaatatggataaagcaattcaaagacagagagtcctgcttgatcatcttcaacccatttcttcaagttcaaatttttcttctcaaacccatcaatctacggatctctcagcttcattatgttttgccaagaattcttcgcacggtcaaataggtggatcagatgacgacgtggtgattgtagctgcatatcgtactgccatctgcaaagcaaagcgtgggggctttaaggatacccttccagatgacctgcttg

SEQ ID NO: 193312 - DNA, 252 bp, Glycine max
ttttgcccttgttgcaaagcaaccaacctttcatcagctacgatcagttgagcagctggggtacattactgtgctcatgcagaggaatgattgtggcatacgtggactacagtttattatccaatccacagtaaagtctcctggtaacattgagcaaagggtcgaggcatttctccaaatgtttgagaccaaactccacgagatgacaattgatgaattcaagagtaatgtaaatgctttgatagatgtgaa

SEQ ID NO: 193313 - DNA, 259 bp, Glycine max
ttcggcgtctagatcatagatatgccgctggcaatcaccggtggagattacgacggcagcaccatcaacgtgtaggggaagtacatgatcatggatcgacctaagatggaattctcaactgatggtgaagccaaaattgagagacctgtaatgatacacagagccatcctaggatctgttgaacgcatgtttgccatacttttagagcactacaagggtaaatggcctttctggctcagtcctcgtcaagcgattgtat

SEQ ID NO: 193314 - DNA, 246 bp, Glycine max
cacaacttccgaactggaagtgattgtgatgttattgcacacctgtacgaggctcatggagaagactttgtggacatgctggatggtatcttctcatttgttctactggacacccgtgacaacagttttatagtggctcgggatgctattggggtcacttccttgtacattggatgggggttagatggctctgtttggatttcatcagaaatgaaaggcctgaatgatgattgtgaacactttgag

SEQ ID NO: 193315 - DNA, 246 bp, Glycine max
gtttaaagtgagagaaaaagaaagaagaaaatggcaaactttccagttgttgacatggggaaacttaacaccgaagagagagcagcagccatggagattataaaagatgcctgtgagaactggggtttctttgagttggtgaaccatgggatatccattgagttgatggacactgtggagaggctcacaaaagagcactacaagaagactatggagcaaaggttcaaagaaatggtggccagcaaa

SEQ ID NO: 193316 - DNA, 246 bp, Glycine max
ctcgagccggttcatttctacacatccctagctctgtcgttccgtcgttgacgatggcgtttcgggtgcgaagcctgacctccgctctctctttcttctctctctcttgtccatcgcttccgccaatgtcttcttcgaagagcgtttcgatgacgggtgggaaaatcgatgggttaaatcagattggaaaaaagatgagaacgtggctggggagtggaaccacacctctggtcaatggaatggaga

SEQ ID NO: 193317 - DNA, 250 bp, Glycine max
tagcagtggagctcataaaaaagggtcatgcttatgttgatcatcagacacctgatgagataaaggagcatagggagaagaaattgaacagtccttggagagacaggccaatttcagagtcattgaagctctttgaggatatgaaaaatggcagtatagaagaaggaaaagccacacttagaatgaagcaagacatgcagagtgataactacaatatgtatgaccttattgcatatagaattaagtttac

SEQ ID NO: 193318 - DNA, 249 bp, Glycine max
gtttaagcatatcaataagcggaggaaaagaaactaacaaggattcccttagtaacggcgagcgaaccgggaaaagcccaccatgaaaatcggtcgccctcggcgtccgaattgtagtctggagaagcgtcctcagtggcggaccgggcccaagtcccctggaagggggcgccagagagggtgagagccccgtcgtgcccggaccctgtcgcaccacgaggcgctgtcggcgagtcgggttgtttggga

SEQ ID NO: 193319 - DNA, 253 bp, Glycine max
gcggttgcaattgcatagagaagtgcagagagagcgcagggaacgactcagtcaaacagtcggtaactctttcttttcttttctttctttctccgatcgcatcgctcgcaaccacaatcatgccttcccgaagaagaactctcttgaaggtcatcattctcggtgacagcggggtggggaagacgtctttgatgaaccagtatgtgaataagaagtttagtaatcagtacaaggcaaccattggagcggattt

SEQ ID NO: 193320 - DNA, 254 bp, Glycine max
cggcaacctctcttccggcgccgccgctatctcggccgcgcaccaatcttcaatttgattacttgggtcaacgatttctgtcattctcaatcatggcaactagacttcagtttgaaaataattgtgaagttggagtcttctctaaacttaccaatgcctactgtttggttgccattggtggttctgaaagcttctacagtgtatttgaagccgagttagcaggtgttatccctgtggtcaagacatccattggc

SEQ ID NO: 193321 - DNA, 256 bp, Glycine max
ctttctttcttcaccatgtcacttgctgggaaaatcaccactgaaatcggggttcatgcaaccgctacaaagtggttcaacctcttcgcaacacaactccatcatgttcaaaacctaactgatagagtgcatggaaccaagctgcatcaaggtgaagactggcatcacaacgagacagtcaagcactggacttataccatagatggtaaggttacaacatgtctggagagcattgaatccattgatgaacagagca

SEQ ID NO: 193322 - DNA, 270 bp, Glycine max
atctaatcatactttctctccttctttccacggtgcttgcaactgcaagttcttcttcttcttcttcctccctctatcttgggaagggcttctcccatcgcaaattgtctcccagttatcacattcacaaaaccattgacgaatcctatgcagttatcttcgatgctggtagcacgggaagccgtgtacatgtctatcgttttaaccaacaattagatctccttcgcattggccaagaccttgagttgtttgtcaagactatgccaggtt

SEQ ID NO: 193323 - DNA, 258 bp, Glycine max
gcatccttcgcttcaatctctctctctctctttgcgctttctgcaaaccgaacatttcatctccaaagggatcaacaggtcgaaggagaaatggggctgacattcacgaagcttttcagccggcttttcgcgaagaaggaaatgcgaattctgatggttggtcttgatgctgctggtaagaccactatcctctacaagctcaagctcggagagatcgttactacaattcctaccattgggttcaatgttgagactgtg

SEQ ID NO: 193324 - DNA, 262 bp, Glycine max
agaagcttggatagggatatagtggagagtagacttacttttgcaggttttgtggtatttaattgtcccataagatcagattcagccactgttttatctgaattgaaagaatcctcacatgacttagtgatgattaccggtgaccaagctttgacagcttgccatgttgctagccaagttcatattatatcaaaaccaacattaatccttggcccgacacgaaatggtgagggatataattgggtgtcccctgatgagactg

SEQ ID NO: 193325 - DNA, 265 bp, Glycine max
gatctgcctatggataaaattaagaaatgcatgggtgatcctgaagcagatgtggagaatgaagtgctaaagaatgagcaacaagtccagatcggtagaggatctcgcggtgatctcaccatcttgccaacgttggttataaacaatgtccagtatagaggaaaattggagagaactgctgtactcaaggctgtatgttctggatttaaggagactactgaaccttcagtttgtttaagtggagatgttgagactaatgagtgtc

SEQ ID NO: 193326 - DNA, 268 bp, Glycine max
gcaaaatggatccgtctgcggcattgctgtttaaccacctcaaaggtgcagacccgttcttcctgctagcgggtcctaatgtgattgaatcagaggagcacattctgcggatggctaagaacatcaagactattgcatctgaagttggaataccgttggttttcaagtcaagctttgacaaagctaaccgaacatcatcaaaatcatttcgtggcccggggatggttgagggattgaagatactcgagaaggttaaaatagcttatga

SEQ ID NO: 193327 - DNA, 266 bp, Glycine max
cgaagaaccacaccgctcacaaccagtcctacaaggcccacaagaatggcatcaaaaagccaaagaggcaccgccacacttccaccaaagggatggatccaaagtttctgaggaaccaaaggtacgcgaggaagcataacaagaagagcggtgaaacagccacggaagaagagtaaagtgtcactctcaaatggggctattaggatttgatttgctattcaagtcccatcatgttttgtgtcaaatctatatttagtagtatagtc

SEQ ID NO: 193328 - DNA, 134 bp, Glycine max
cgacggatccggatctgcgacgaacggggtgctggctccgccgcgcaaggtggcattgataaccggaattaccggacaagacggttcgtacctgacggaattcctcctggacaaggggtacgaggtgcacggcc

SEQ ID NO: 193329 - DNA, 263 bp, Glycine max
gcagacgccggtgcctccaaaacctaccctcagcaagccggtaccattcgcaagaacggctacatcgtcatcaaaggacgcccctgccaggttgtggaagtttcgacttccaaaactggtaagctcggtcacgccaagtgccactttgttggaattgatattttcactgccaagaaactctgaggatattgtgccctcttctcacaactgtgatgttcctcatgtgaatcgtactgattaccagctcattgataagtctgagg

SEQ ID NO: 193330 - DNA, 265 bp, Glycine max
cggagagatggcggacacttggcatcgatattcgggacggagaaggacagggtgaactgtccgttctacttcaagatcggcgcgtgcaggcacggcgaccggtgctcccggcttcacaccaagccgacaattagcccaacattggttctgtcgaacatgtaccagaggcccgacatgaacatgagcattatcaccaaccccgatcagccacaaccccaatcccttgaccccgacaaggtgcaggatcacttcgacgacttctacg

SEQ ID NO: 193331 - DNA, 267 bp, Glycine max
ctcgagccgctcgagccgattcggctcgagggctcccaagggtttaacctttctggctgtgttaatatgacgtttcagcactgtcactgagtccttctagttgcgggggaagggcaaaataatggccttgttatgaacttctacaaggaatcatgccctcaggctgaagacatcatcacagaacaagtcaagcttctctacaagcgccacaagaacactgctttctcctggctcaggaacatcttccatgactgtgctgttcagagt

SEQ ID NO: 193332 - DNA, 271 bp, Glycine max
gaaaaagtggcacacagaagtggttcccggtttgaccttcagaacttgacatgaaacatgaccatgcccccattgtgatgtatccatgtgacaaacaaccatagcatccaccctatccccattttcaccagcaagtgggaccctataaatcttgttctcactttcttggctgtggcagtaaaaaacagtataagggtaaggcatggtatggcaagccaccatcttggaagctgggatttctatgatgttttctaacatagtgtagttttgg

SEQ ID NO: 193333 - DNA, 255 bp, Glycine max
gagagagcgaaggggcaaacacaattttcttgatcttctttcttattttttgtagagagagagagagagaaaatgtaggggatcttcagcagttcagtggtgtcgccgccggaggagctggtggccgctggtagcagaacgtcgacgtcgaaaacgacggcagtggaagctgctgaaccgtctcgaggatagcatggcgtcggctgtgtcgctgcaagtgggggaacacgtgcagttggcgtacacacaccacaa

SEQ ID NO: 193334 - DNA, 262 bp, Glycine max
aggcactccatcgtataatgataggggaagaagcagagcctatgagaaacagagcacacaattgctacttccatttagctgataccaacagggaccccgatttgaagtatatcggtcacaaacttttcattgtagaattgctctgcagagacgggccaggtgagcatggggacccccgccgacactgcttcgagcgtggaattccataccacagtgtgtgacaaaggctcccacagcttgatggtccagaattagcacttgg

SEQ ID NO: 193335 - DNA, 261 bp, Glycine max
cctcgagccgaatcggctcgagaaaccctagccgctcttctcttcactcttcactttggaaacaatcataatggcgttctgacataaggttggaaatgtcttgaggcagggtgctgctcgcagcacacatgcccctgttgcgtccatgcttaattacatccgctgcatgtcttcaagcaagcttttcattggaggcctttcatatggagttgatgaccagtctcttaaggatgcattttctggctttggagatgtggttga

SEQ ID NO: 193336 - DNA, 264 bp, Glycine max
gcaagcttcgccgtttgaaacagtgcctcaaccatggcagaacaaacagagaaggcttttctgaagcaaccaaaagtgtttctatgctctaagaaaggtgggaagggaaagaggcctgggaaaggtgggaatcgcttttggaagtcaattgggcttggattcaagactcccagagatgccattgaaggaacatatattgacaagaagtgccccttcactggcaatgtttccattcggggtcgtatcctagccggtacttgtcac

SEQ ID NO: 193337 - DNA, 264 bp, Glycine max
gagagaaaccctagcaaaaatgccggctggtcacggtttgagatcccgcaccagagattccttctctcgtcccttcaggaagaagggtaccatcgccctcaccacatacctcagaacctaccacgtcggcgattatgtcgacgtcaaggttaacggcgccgtccacaagggaatgcctcacaagttctaccatggccgcaccggtcgcgtctggcatgtcaccaaacgtgctgttggggtcgaagtcaacaagcaggtcggcaa

SEQ ID NO: 193338 - DNA, 244 bp, Glycine max
tattatgcgtttcagcactgtcactgagtccttctgttgcggtggaagggcaaaataatggccttgttatgaacttctacaaggaatcatgccctcaggctgaagacatcatcacagtacaagtcatgcttctctacaagcgccacaagaacactgctttctcctggctcaagaacatcttccatgactgtgctgttccgagttgtgatgcttcacggttgctggactccacaagaaggagctt

SEQ ID NO: 193339 - DNA, 270 bp, Glycine max
ctcgagccgtgcaactgcaagttcttcttcttcttcttcctccctctatcttgggaagggcctctcccatcgcaaattctctcccagttatcacattcacaaaaccattgacgaatcctatgcagttatcttcgatgctggtagcacgggaagccgtgtacatgtctatcgttttaaccaacaattagatctccttcgcattggccaagaccttgagttgtttgtcaagactatgccaggtttaagtgcttacgctgagaatccacaaga

SEQ ID NO: 193340 - DNA, 263 bp, Glycine max
tgtccctccttcctctgccttataattcttgtgacccttttcgctggtagcattgaaagtgcaccagcaaacgtgaagccaagccattatgctgcacccttcaataggagtgtttttccttctggttttctatttggaataggctctgcagcttaccagatagaaggagcagcagctatagatggcagaggaccaagtatatgggacacctatactaaacagcaaccagggaagatttgggatcatagtgatggaagtctagc

SEQ ID NO: 193341 - DNA, 255 bp, Glycine max
agatctgtcttccgaagcaggaaatacatatggctgacttgttggaatggtcaaagcaagataagaaacgaatgcttcatgtcgtctaccgtgttggtgaccttgatcgcaccatcaaattttacacagaatgtttaggaatgaagcttttgaggcaaagagatatcccagaggagaaatatgctaatgcttttcttggatttggccctgaagaatcccattttgttgttgaattaacatataattatggggtta

SEQ ID NO: 193342 - DNA, 256 bp, Glycine max
cgggttgtcctccttgagcttgtaactggaaggaaacccgttgatcaaactcagcctttgggagatgagagtttggttgagtgggctcgtccacttctccttcgtgcaattgagacacgtgattttagtgatctaatagatccaagactcaaaaaacactttgtggagaatgacatgctcagaatggttgacgtggccgccgcttgtgttcgccactcagctcctagacggcctcgtatggttcaggtggtaagat

SEQ ID NO: 193343 - DNA, 262 bp, Glycine max
gtgggccaaaggcaattattttgccttggaagagccttgctgaagagaagcagcatattagtactagatgaagcaacagcctcagtggattctgcaactgatggggtgatacagaacatcataagccaagagttcaaagataggactgttgtcacaatagctcatagaatccacacagttattgatagcgatttggttttggttctcagtgatggaagagttgctgagtatgatgaaccatcaaagttacttgagagagaag

SEQ ID NO: 193344 - DNA, 262 bp, Glycine max
ggggtgatgagttggcagcagaactgtcaaatgctcttcaacactgtctcttgggtggtaaaagtggagaaggtgctggaattgacctctcatcgcttattgttgtcgaaggaaaaatttgttgggatctttacatagatgggcttgttgttagttcagatggaaatttgttggatgctctaggcgctgccattaaggctgctttgagcaatacaggtattccaagagtcgaagttgctgctggaacgtcaaatgatgagca

SEQ ID NO: 193345 - DNA, 263 bp, Glycine max
taattagtgacgcgcatgaatggattaacgagattcccactgtccctgtctactatccagcgaaaccacagccaagggaacgggcttggcggaatcagcggggaaagaagatcctgttgagcttgactctagtccgactttgtgaaatgacttgagatagacaggataagtgggagctggaaacagcgaaagtgaaataccactacttttaacgttattttacttattccgtgaatcggaagcggggcatgctccctcttttt

SEQ ID NO: 193346 - DNA, 111 bp, Glycine max
ctggatggctgtgaaaggcgaaacaatagtgtttcctggtggaggaacccacttccataatggtgctgatacatacattgcttcaattgctaatatgcttaattttccaca

SEQ ID NO: 193347 - DNA, 257 bp, Glycine max
gggaacaacaacaaatggcatgaaccttatctccttccaacttggtgcatttatccctggatacccaatccagcctgtaattgtacgctatcctcatgtgcactttgaccaatcctggggtcatgtttctttgggaaagcttatgttcagaatgttcactcaatttcacaacttttttgaggtagaatatcttcctgtcatttatcccctggatgataaggaaactgctgtatcttttcgggagaggactagccggg

SEQ ID NO: 193348 - DNA, 258 bp, Glycine max
aaaatgatgaagccatcgatgctcagatctctccactccgccgccacccgcggcgcctctcatctcttccgccgtgggtacgcctccgagccggtgccggagcgcaaggtagccgttctcggcgccgccggcgggatcgggcagcctctctcccttctcatgaagctcaatcccctcgtttcgagcctctccctttacgatatcgccggaactcccggcgtcgccgccgatatcagccacataaacaccagatctgag

SEQ ID NO: 193349 - DNA, 258 bp, Glycine max
gggtgttcctgctcttcccctgacatacgtggctcacgttctggcacttgttgccagcatcttggtcgtgctctgggtcctcaattttaggggtggcttggcttgggattctgataacaaggccctcatcttcaatcttcatccagttcttattgtcattggcttactagtccttgggggtgaagctattataagctacaaagcattacccctgaagaaggaagtgaagaaattgatacaccttgttttccatgccat

SEQ ID NO: 193350 - DNA, 260 bp, Glycine max
acgacattcattcatctatggctacccttattgctcccagcaaccactctccccaagaagacgctgaggctctcagaaaggcttttgaaggatgggggactgatgagaaaactgtcatagtaatattgggtcatagaactgtttatcagaggcagcaaatcagaagagtctatgaggaaattttccaggaggatcttgtgaaacgcctagagtctgagatcaaaggagactttgagaaagccgtgtaccgatggatacta

SEQ ID NO: 193351 - DNA, 261 bp, Glycine max
gaatatcaacaaggtaaagtagattccttactagacatggcgttgaaggacacattctacatatctcatggatcaccaactttgtccatagatgaatccattcaggccaggaagttccttcagtcatggaagaaggacgtgtttcctcaaagaccctcttcaattcttgtcatctctggtcattgggaaaccgcagttcccacggtcaacgtcgttgactccatcaacgacaccatctacgatttctatggcttccccaaa

SEQ ID NO: 193352 - DNA, 260 bp, Glycine max
ggaagaaggagagggcgctcgccggcggggcgagggttccgagactgcgacgacgagggaggcggcgttgcaagagcgggatttggccgcgaaggaggtggacaggctgaggaaagtcgtgaggaggcagaagaaggatttgagagcgaggatgctcgaggtttccagagaggaggctgagaggaagagaatgctcgatgaacgagccaattacaggcataagcaagtgatgttggaggcctatgatcgacaatgtgatg

SEQ ID NO: 193353 - DNA, 261 bp, Glycine max
gcaatatgtcttcctcaacgagtcagtcctgcgacgttgagcttaattcttgattattgtcattttcatcaagtaccaggtcgctcaaacaaggaacgaaagtcttatgatgagaacttcattaggatggacacaaagcggctatgtgagttgacatctgctgcagacagccttcagttaaagccattggttgatcttacaagtcgtgcacttgctcggataattgaaggaaaatctccagaggagatacgcgagatattt

SEQ ID NO: 193354 - DNA, 266 bp, Glycine max
ctttctctctgttttctggtaattcatcaattgattcaaaatgcagcgtctcaaactgcaactagtgctattcctctcaatctcaacttctcacgctgttttctccttcacagatgggttgttgccaaatgggaacttcgagcagggcccaaagccatcacaattgaaagggtccgtagtgactggccacgatgccattccgaattggacgatttcggggttcgttgaatacataaaatcaggacaaaaacagggtgacatgttac

SEQ ID NO: 193355 - DNA, 267 bp, Glycine max
aatttcaaagtttatacaaggcactgttgctgatggtgcaccagtagtacctatttcagcacagttgaagtataatattgatgttgtgtgcgaatatattgtgaagaagatcccaatccctgaaaggaactttgtttctccacctaacatgattgttcattcggtcatttgatgtcaataaacctggttatgaggttgatgaaattaaaggaggtgtagctggtggaagcattctgaggggtgttttgaaggtcaatcaattcattg

SEQ ID NO: 193356 - DNA, 267 bp, Glycine max
atttgcgctaacaacaactaacgtgcaagttccaaggcggagaaaacaataatggccaccaacgaggagagggatatggagaacaagaagagtgaggaagaactgaagcatctcgggtttgtgaagattgcggcaatgaaagccttagtgtgtgtgtcgaatctctacggcttcgcaaagcaaaactcgggacttttgagatctgctgttggaaccgtggaagacactgtaaccaccgttctgggtcccgtctaccacaaattcaac

SEQ ID NO: 193357 - DNA, 257 bp, Glycine max
agagcttgtgaaagcaaggcttgccgaactggatccagacaactccggtgaccacgtactgctctcaaatgtttatgccgttgcagggaaatggaaggatgcctccagcataagaagaacgatgactgaacatagcatgaaaaaaactcctggttggagcatgattgaacttgacaaggtcatttatggttttgttgctggtgaaaagcctaatgaggttacggaggaggctcatgaaaaactgagggaaataatgt

SEQ ID NO: 193358 - DNA, 256 bp, Glycine max
ggaccgctttccgatcctctttctcctcgccaccctcatcaccctcgcctccggtgcccgccacgatattctccggttaccctccgaagcatccacttttttcaaagcacccggtggcgatcaaaacgatgagggcacgaggtgggctgttttaattgccggttccaatggctactggatttacaggcaccagtctgatgtttgccatgcgtatcaactactgaggaaaggtggtctcaaagaagaatatattgtt

SEQ ID NO: 193359 - DNA, 260 bp, Glycine max
  unsure (1)..(260): unsure at all n locations
ggaagaattggccgtttggtggccagggnggctctgcagagagacgatgttgaactcgttgccgttaacgatacctttacattaccaccgattacatgacatacatgtttnaatacgacagtgttcacgggcactggaagcatcacgatgtcaccgttaaggatgagaagacccttctcttcggtgacaagccagtcactgtttttggacacaggaaccctgaagagatcccatggaagtcgactggagctgacatcatt

SEQ ID NO: 193360 - DNA, 261 bp, Glycine max
ctttctttctggcttcagtttttgcagtgaaaatggcggtgacttcgacatcaaccctctttatggctttgctatttgctgcttcagcttttgctgctcttcagcctagagtacctgaagcttaccttcaaaatggaaactttgaggagcagccaaaccccaaaaacctccagaaaacaaagctcatggggaaatattctttgcccaaatgggaagtcaatggtctggttgagtatgtctctgggggtccccaacctggag

SEQ ID NO: 193361 - DNA, 260 bp, Glycine max
tgctgctcttttctcttttcttttctctttagttctctcttcccctttctttttctttttcttcttcttctgagcttgtttaagcttttcttccattaacatattatcataatgtgtggtattcttgctgttcttggttgttctgatgactctcgatccaaaagggtccgcgtgcttgagctctctcgcagattgaagcaccgtggccctgactggagtgggctccatcaacatggtgactgctttttggcacatcaacg

SEQ ID NO: 193362 - DNA, 264 bp, Glycine max
ccaatcttcaccttcgcccacaacaaatcccattcctgcatctcctccttcagcatcgctgcaaactttactttccatttttgtccttcctccccgagaaaaaaatggcgaacgcagcatctggtatggccgtccatgatgactgcaagctaaagtttttggagctcaaggcgaagaggacgtaccggtttatcgtttttaagattgaggagaagcagaagcaagttattgtggagaagctgggtgagcctgcaaatggttatg

SEQ ID NO: 193363 - DNA, 265 bp, Glycine max
ctcgagccgttgatccatctcttgtttcttgctttctttcttcaccatgtcacttgctgggacaatcaccactgaaatcggggttcatgcaaccgctacaaagtggttcaacctcttcgcaacacaactccatcatgttcaaaacctaactgatagagtgcatggaatcaagctgcatcaaggtgaagactggcatcacaacgagacagtcaagcactggacttataccatagatggtaaggttacaacatgtctggagagtatt

SEQ ID NO: 193364 - DNA, 268 bp, Glycine max
gggatgtttggtgctgagatgtcctgatcactcttgtggtgctgctgttggtcaagatatgattaaccttttagcatctgatgaagataaagagaagtatgaccgttaccttctcagatcttatattgaagacaacaagaagaccaagtggtgtcctgctccaggttgtgaatatgcagttacttttgatgctggcagtggaaattatgatgtatcttgcctctgttcatatagcttttgctggaattgcacagaggaggctcaccgt

SEQ ID NO: 193365 - DNA, 243 bp, Glycine max
tttctttgttgctgcagtagttttggtagcatggccatgccatggcgcaggctaccaaaggttccctctccgaatgaaaactggctatggtgagcgttcttcggaggtaaaatgcgcaagttttaggcttgctgtggaagcacacaacatccgagcctttaaaaccattcctgaagagtgcgttgaaccaacaaaggactacattaatggcgaacaatttagatcagactctaaaacagttaa

SEQ ID NO: 193366 - DNA, 239 bp, Glycine max
aaaacttgctatagcagtaagctataactcatttgaggctctgtgagaattgagaaatggctaaagatgttgaggttcaagagcaaggaggagagtactctgccaaagactaccatgaccctcctccagcacctttgttcgacccagaggagctcacacagtggtccttctatagagccctcatcgctgagttcatagcaacccttctcttcctttatgtcactgtgctcaccattatt

SEQ ID NO: 193367 - DNA, 238 bp, Glycine max
attcagtgaagatcaacctcaatggcatctcttggcgtgcgaccagttcttccccctccattaacttccatctccgacccacctcctcttttcgatggcaccaccaggttgtacatcagttattcttgcccctatgcacaacgtgtgtggatcgctaggaactacaaggggctacaagataagatcaatttggtccctattaaccttcaagacaggccagcttggtataaggagaaag

SEQ ID NO: 193368 - DNA, 239 bp, Glycine max
tgaaggtaccacgacttaagtcactgactgcaaatttgcatcgcatgggtgtatctaacactgtagtgtgtaactatgatggaaaggagcttccaaaggttttaggtgtaaatgctgttgatagagtattattggatgccccttgcagtggaactggggttatttccaaagatgagtctgttaaaacctctaaaagtctggaagatatacagaaatgtgcgcatctacagaaggagctc

SEQ ID NO: 193369 - DNA, 239 bp, Glycine max
ggggactaaagaagcatttgaaaaggctcaatgctcctaagcattggatgcttgacaaactgggtggtgcatttgcgcctaaaccctcatctggaccacacaaatcgagggactgcctccccctcattcttattctgcgaaaccggctgaagtatgctctgacataccgtgaagtcattgctattctgatgcagcgccatgttcttgttgatggcaaagtcaggactgacaagacttac

SEQ ID NO: 193370 - DNA, 238 bp, Glycine max
ggaggaagctcggaaacgtgaagatgctgaaaggaaaaagaaggaagaggaggagcgcctgcgcaaattggaggagatagctgaaaagcagaggcagagagagagggagcttgaagagaaagagaaacaaaggagagaagcattgttgggtagagctgctgctgaaccagctcctcctgcccgtccattggaatcgggatctgctgctcctgcggcagctgccgccgccgccgctgct

SEQ ID NO: 193371 - DNA, 239 bp, Glycine max
ggggaaatttcaatggcgtcaagggtttctctgaaggcgaagggtaagagttcaaagggatcgaaggccgcggaagatcgatctgcgagcgagtgcctgaaggagtggacgacatgggcaatgcgaaaagcgaaggtcatcactcactatggtttcatccctttggtcatcatcatcggtatgaactctgaccccaagcccccactttcccagcttctcagccccgtctgatctacctc

SEQ ID NO: 193372 - DNA, 215 bp, Glycine max
  unsure (1)..(215): unsure at all n locations
tggaagttctttggtaatttaaacggatgctggattatgancagtctgtggtgaagaaanttttgggactggttctgaccatattcgtgagaaagatggaatctgggcagttttggcctggctatctatacttgcatataaaaataaagataaacttgaagacaagcttgtcactgttgaagacatagttcgccagcattgggctacttatgggc

SEQ ID NO: 193373 - DNA, 235 bp, Glycine max
acgcagcatcgctatactcttcattccatggctttgcccaatcagcaaaccgtggattaccctagtttcaaactcgttatcgtcggtgatggtggcacaggaaagccaacctttgtgaaaaggcatctcaccggagaattcgagaagaaatatgagccaaccatcggtgtggaggttcacccattggattttttcacaaactgtggaaagattcgattctactgctgggatactg

SEQ ID NO: 193374 - DNA, 236 bp, Glycine max
ggagaatatgaagttgtttgtcttctttgttgctgcagtagttttggtagcatggccatgccatggcgcaggctaccaaaggttccctctccgaatgacaactggctatggtgagcgttcttcggaggtaaaatgcgcaagttttaggcttgctgtggaagcacacaacatccgagcctttaaaaccattcctgaagagtgcgttgaaccaacaaaggactacattaatggcgaac

SEQ ID NO: 193375 - DNA, 233 bp, Glycine max
ggcacgggatgcaattggggtcacttccttgtacattggttggggtttagatggctctgtctggatttcctctgaattgaaggggttgaatgatgattgcgaacattttgagtcttttccacctggtcacttgtattctagcaaagagagagcgttccgcagatggtacaatcctccatggttctctgaggctattccatctgccccttatgatcctcttgctttgaggcatg

SEQ ID NO: 193376 - DNA, 235 bp, Glycine max
gttttgttcttccttgcgctcctcctcgttcgttcgttctccctcgcgtagatcggcaatggcggagaccgagacgtttgctttccaggctgagatcaaccggctcctcagtctcatcatcaacaccttctactccaacaaggaaacaatccttcgtgaactcatcagcaacgcctctgatgctttggacaagattagatttgagagtttgacggacaagagcaagctcgatgct

SEQ ID NO: 193377 - DNA, 237 bp, Glycine max
ccgcgacgttgtgagaagtccactgaaccttatcatttagaggaagtagctgtcaagaggctttcaagaaagtctagccaaggtttagaggagttcaagaatgaaatggtgctcatagccaaactgcaacatagaaatctggttagactattggggtgttgcattcaaggggaagaaaagatactggtatatgagtacttgccaaacaaaagcttggactgctttttatttgatccg

SEQ ID NO: 193378 - DNA, 167 bp, Glycine max
ggaagttctcaaatgctaaatctatttcttcatctcaattttttggagatcagaacaaagctgcagatgtggattctcaagctactttgtctaagttttcgggttcaagtgccatctccagcgctgatctttttggtgactcaagagacaacaacatcgatcttact

SEQ ID NO: 193379 - DNA, 237 bp, Glycine max
gggtaaaagctcgtttgattctgatttccagtacgaatacgaaccgtgaaagcgtggcctatcgatcctttagtccttcggaatttgaagctagaggtgtcagaaaagttaccacagggataactggcttgtggcagccaagcgttcatagcgacgttgctttttgatccttcgatgtcggctcttcctatcattgtgaagcagaattcaccaagtgttggattgttcacccaccaa

SEQ ID NO: 193380 - DNA, 232 bp, Glycine max
gacctaacccattgaattatacctatatttactattctgatattcaatttggataaagatgaaattcgaacaatgattttttcattttctttttaatacttttttggtttagactccctaagaatctgtcgatatttccaattaaatcttcttgttcctgtgaaggtcctataaaaaaaagggctatgccctttctttactcagaagggccttattccaagttccacacaac

SEQ ID NO: 193381 - DNA, 229 bp, Glycine max
gtgttgtgcaagtactaccttctctagctagattgctagagctagaatttcaacctacctatgtgtactgataagatctgcttccctacttaaagagagcatcatcctgtgatcagtgagcttcgtattctctctctctatatatatatggtaaaaagtggttatctcgtgcctaaaaaaaaaaaaaaaaaaaaaaaaaaaaaaagggggggcccccgattattgaccc

SEQ ID NO: 193382 - DNA, 235 bp, Glycine max
gttcttactaactcactcactcacaactcagtgaaagagaatccgaggcgaagagaagagaaaaattaagatggaggggaaggagcaggatgtgtcgctgggagcgaacaagttcccggagagacagccgattgggacggcggcgcagagccaagacgacggcaaggactaccaggagccggcgccggcgccactggttgacccgacggagtttacgtcatggtccttttacaga

SEQ ID NO: 193383 - DNA, 233 bp, Glycine max
caggttcctattgatgcagtgttccagaaggatgagatgattgacatcattggtgtgaccaagggtaaaggttatgagggtgttgtcactcgttggggtgttacccgccttccccgtaagactcacagaggtttgaggaaggttgcttgtattggtgcctggcatcctgcaagagtttcattcactgttgccagggctggtcagaatggataccaccaccgaactgagttgaa

SEQ ID NO: 193384 - DNA, 236 bp, Glycine max
tttcctccttggagtaattggtgagtgaggcagacttacagcgcactgttgtggatataaaggacttaaatacacttcgcccactcttgcttctgctcttagcaaccttataccggctttcaccttcatactagcactcattttcagaatggaaaaggtagctttgagaagcccaagcactatggccaaaatcttgggttcgttagtatccatatcaggtgcactcatagttgttc

SEQ ID NO: 193385 - DNA, 238 bp, Glycine max
atgaagagccctaccattttcattctctttctactttctgccttctacacctcactcctaccttcagccaccgctcaagtcgtggttgacatggaaggtaatgatcttcaaaatggtgggaaatattatgtgttgccagtaatagagtcatcatatggtggaataagagtagccgcaactggaaaagaaagatgccctctcactgttgtacaatctgccgatccgtatgataagggga

SEQ ID NO: 193386 - DNA, 233 bp, Glycine max
cggctcgagaggtcataacaggtgctcgagtttctaatgatgaaatcttaggatttgccaaattctttaatgatgagctcaccctcgataacattagcaggcctcgcttggtaaatatgtgtaaatatatgggcatcagcccatatggaactgatgcatatttgcgttacatgctccgcaaaagattacaggagatcaagaatgatgataaactgattcaagttgagggtgtc

SEQ ID NO: 193387 - DNA, 230 bp, Glycine max
ggcgacagtcactctccgacaacaacacttccgcggcgaaaaatgtctctggtggcgaacgaggatttccagcacattctgcgtgtgctgaacaccaacgtggatgggaagcagaagataatgttcgctatgacctccatcaagggtattggaaggagattcgccaacatcgcttgcaagaaggccgatgttgacatgaacaaaagggctgctgagttgagtgctgcaga

SEQ ID NO: 193388 - DNA, 230 bp, Glycine max
atgagttctggcttggactgcctggaaatggaggcacagaagaagtgatcatcatgaagaggggtttctctgagactgacactggtcatgaagatgagtctgccaccactgtggatttgatgcttaatctttcttctaaggaggccgcaaccactgctgctgctgctgcagatccaactgataagcacaagactttgcctaaggagaagacccttctgccagcagatcct

SEQ ID NO: 193389 - DNA, 229 bp, Glycine max
agagcatccccaatacgccaagaatgacttttttattacaggagaatcatatgctggacactatattcctgcctttgcaactcgtatccatcgaggaaacaaagctaaagaaggaattcatataaacctgaagggattggccattggtaatggacttactaaccctgcaattcagtataaagcttaccctgattatgcactggaaatgggcataattaagaaggctaca

SEQ ID NO: 193390 - DNA, 233 bp, Glycine max
ctgaaattctcagttatgtcgtggcaagcgtatgtggatgatcacctactgtgtgaaatcgaaggtaaccacctcactcacgccgctatcatcggccaagacggaagcgtttgggctcagagcaccaacttccctcagttcaaacctgaggaaataactgccatcaataatgactttaatgagcctggatcacttgctccaactggattgtatatcggtggcaccaaatacat

SEQ ID NO: 193391 - DNA, 232 bp, Glycine max
gaacaagcctcaggtaagccaaaaccatggttaagcataacaatgttatcccaaacggacacttccgtaagcactggcagaactatgtgaagacttggttcaatcagccagcacggaagacaatgagacgattggctcgtcagaagaaagctgtgaagatattccccagacctacggctggacctctcaggcccattgtacatggtcaaactttgaaatacaacatgaaagt

SEQ ID NO: 193392 - DNA, 226 bp, Glycine max
tcgccgttacagctcaagagccaccagcaggtaagatatggttaagcataacaacgttatccccaatgggcacttcaggaaacactggcaaaactatgtgaagacttggtttaatcaaccagcacggaagaccagaaggcgtttagctcggcagaagaaggctgtcaagattttcccaaggcctactgctggacctctcaggccaattgttcatggccagactctg

SEQ ID NO: 193393 - DNA, 233 bp, Glycine max
cttcccttcacatacataaaagcctcgttccatagcaaatatagccccaacaaaacaaacacaactttgcccccttgtaaaacttcttattgtgatgtctaaaagcgaagacttgaagcttttgggaggctggttcagcccatttgccctgagggtgcagattgcccttaacctcaagggtctagaatatgaggttgttgaagagaccttgaatcccaaaagtgacctgcttc

SEQ ID NO: 193394 - DNA, 228 bp, Glycine max
cagcgttttccctctgcattaatttgtatctgcagtctgcaacaacttcttcttcagttcttcacaccaatcatgtcccgctttgcaacctccctcgcctccaaagctagaattgctaggagcagcactcaacagattggaagtagggtcagttggaacaggaattatgctgccaaagacattaagtttggtgtggaggcccgggctttgatgcttaagggtgttgaa

SEQ ID NO: 193395 - DNA, 229 bp, Glycine max
atctttttctgctctttgaagaaagaagggtctctgcttgattttggagatggctctgctctcagaactcatcaaccttaacctctccgataccaccgagaagccgatcgcagagtacatatggatcggtggatcaggaatggacctgaggagcaaagcaaggactctcccaggaccagttagcgacccttcagagcttcccaagtggaactatgatggttccagcaca

SEQ ID NO: 193396 - DNA, 227 bp, Glycine max
aataagtccctccttcctctgccttataattcttgtgacccttttcgctggtagcattgaaagtgcaccagcaaacgtgaagccaagccattatgctgcacccttcaataggagtgtttttccttctggttttctatttggaataggctctgcagcttaccagatagaaggagcagcagctatagatggcagaggaccaagtatatgggacacctatactaaacagc

SEQ ID NO: 193397 - DNA, 226 bp, Glycine max
atggaggttagatacactgatgttgactaccttgtcttttctgatgctgctgctttaatggctgtgggcgattccccttataagagaaccacttatcgctattctcctttgcttgcctttcttctcattccaaattcgttcatccatcgctcctggggaaagtttcttttctcggcttcagatctacttgtgggatatttcatctattatattttaaagctacgga

SEQ ID NO: 193398 - DNA, 232 bp, Glycine max
gcacactattttcactgcagcagcaacaatggcggagaccgagatcgagaagataacgacaatagacccagagacggagtttctggcgtcgaagataaggaacgggaacgagtgggagaccttcaaggagaacgtgaggccgctcaagagaggccgcaacgtcaacctcttgaaccacgccctcaactcccacaccgataacgaaaccaagaaatccctcatggaacaacga

SEQ ID NO: 193399 - DNA, 229 bp, Glycine max
gttgattgagaggcaatcatttattcaacttcgcatttctctcgcatccactgaaccaagattcctattccaaaatgaccgctcctacttcttccagcctgtggctggctccaaaccccagcaaaagatggggcgaactcttcttccttctctacacccccttctggctcaccctttgtctcggcattgttattcccttcaatctttacgagaaattcacagagctgga

SEQ ID NO: 193400 - DNA, 226 bp, Glycine max
catctaaccccaaacaaaaccctagcacacttttatcgcttagtggcagcagcagtggcggcaagcaactccatccgcaatgggaatcgatttgaaggcaggaggtaagtccaagaagaccaagcgaaccgcccccaaatccgatgatatctacctcaagcttctcgtcaagctgtaccgttttcttgttcggaggactgggagtaacttcaatgctgttgtcctc

SEQ ID NO: 193401 - DNA, 225 bp, Glycine max
tgggaaatctaccaccccagataatgaggcttataagcttgcaccatgtgcctcagcagcacaagatgagaatgctagtgtttctcagagttgctgtgctcaggtgaagaaaattgggcagaacccaagctgcctctgtgcagttctgctctccaacacagccaaaatggctggtgtcaaccctcaagttgctgtcaccatccccaagcgttgcaacctggctaa

SEQ ID NO: 193402 - DNA, 228 bp, Glycine max
gttcctggctatagtagcactgctatctcacccttcaccttagattgggtgaacactcctggctatgatgggtttaaaggatgtggaaagagaccttcctcagtgagacccattgagcatgaaaggaagaaaggagtgccttggactgaagaggaacataaattgtttctattgggtctgaagaagtatgggaaaggcgattggagaaatatttctcgcaatttcgtg

SEQ ID NO: 193403 - DNA, 227 bp, Glycine max
gtcctcaatacacttgaaatggatgaggagtatgaaggaaatgttgaggctactggagaggattattccgtggaacctgctgagagcaggaggccattccgtgctctccttgatgttggtcttattaggactacaaccggtaaccgtgtgtttggtgcccttaagggagctctggatggggggttggatattcctcacagtgataagaggtttgctgggtttgataa

SEQ ID NO: 193404 - DNA, 226 bp, Glycine max
ctctcccttagtcaaagggattcatcgttcttcttcccaggttatttagaaaagcaaaatggtgaagatttgctgcattggtgctggatatgtggggggtcctactatggcagtcattgcacttaagtgcccatccattgaagtcgctgttgttgatatctctaaatcccgcattgcagcctggaacagcgaccagcttcctatctatgaacctggccttgatggt

SEQ ID NO: 193405 - DNA, 226 bp, Glycine max
gcgattctattttttacacatttctatgaagcaatcggttcgtccataccattggtagagcttgtaaaaccacgactgatccataaaggaatgaatggaaaaagtagcatgtcgtatcgatgaattattctaaaaatatttcattctcttataggatccggccagaatttttgtttgtgaattcttggctcggaacaaaaaaatcttttgggtttaattaataaag

SEQ ID NO: 193406 - DNA, 227 bp, Glycine max
ggaagaacaaccccatcttgccttctgatccttaccaaagagccttggctcgtttctggtccacattcattgatgataaggtttttggtgctgcatggaaatccgttttcacagctgatgagaaagagcgtgagaagaatgttgaggaagcaattgaggctctgcagtttcttgagaatgagataaaggacaagaagttctttggaggagaggagattgggttggta

SEQ ID NO: 193407 - DNA, 227 bp, Glycine max
tgaaagtgcttgttttgtttgttgctacagttttggtagcatatgaatgccatggctcagactaccagaagttccctctccaaatgaaaactgggtttggtgggcaatacagcaatgaggtggcatgtgccagttggaggcttggcgtggaagcaaacaacgtagtcaagtggcaaactgttcctgcagcttgcggagagtacatagctgactacgttctaggagac

SEQ ID NO: 193408 - DNA, 231 bp, Glycine max
gaaagacactcggagaccttgcaagacttcatcaatggctgtcaaagtttatattgtgtactactccatgtatgggcatgttgagaaactagcagaagaaataaagaaaggggcttcctctgtggaaggtgttgaggccaaattatggcaggtacctgagacgctgcaggatgaggtgctcggtaagatgagtgcaccacccaagagcgatgtaccagtcattaccccgaa

SEQ ID NO: 193409 - DNA, 278 bp, Glycine max
atcaaaatcaccaaggaccacatcaagggtcttgttgtcgactttttctcggcaggaacagactccacagcggtggcaacagagtgggcattggcagaactcatcaacaatcctaaggtgttggaaaaggctcgtgaggaggtctacagtgttgtgggaaaggacagacttgtggacgaagttgacactcaaaaccttccttacattagagcaatcgtgaaggagacattccgcatgcacccgccactcccagtggtcaaaagaaagtgcacagaaga

SEQ ID NO: 193410 - DNA, 241 bp, Glycine max
tttcactttcgtttctcagttttattcgaatccctctctcaatctcctttccaaatggccagcgttgaggttgcacagcaaacaccaacaacagttccagaaaatgaaacaaccgaggtaagcaagacccaggaaacaaccccagtcactgaggctcctgcaacagaacaaccagcagctgaggttcctgcaacagaacaaccagccgctgaggctcctgccccagaatcaaccaccgaag

SEQ ID NO: 193411 - DNA, 266 bp, Glycine max
ggagatgtctctgctctcagatctcatcaaccttaacctctccgataccaccgagaaggtgatcgcagagtacatatggatcggtggatcacgaatggacctgaggagcaaagcaaggactctcccaggaccagttagcgacccttcagagcttcccaagtggaactatgatggttccagcacaggtcaagctcctggtgaagacagtgaagtgactttatacccacaagccattttcagggatccattcagaaggggtaacaata

SEQ ID NO: 193412 - DNA, 263 bp, Glycine max
ggagttttggggtgttgaggtgaaaagtggagaatctctcaaggttgatccgggagatgacaagattatccacctttcaaatgcatgcctgggggatgtcactaaggataaagaaggtctaccagtagccctgtatgtcaagtttggtaaccaaaagcttgtacttggaacgctttcttctgaagcttttcctcagatatcttatgatttggtatttgagaaggaatttgagctatcccataactggaaacatggaagtgtct

SEQ ID NO: 193413 - DNA, 264 bp, Glycine max
caagaatggcacttcgttgcttggtgatgtccctttctgttctcttcactcttggtcttgcgagagaaagccatgccagagacgaagatttttggcatgctgtttggccaaacactcccattccaagttcattgcgagatcttctaaagcctggccctgcaagtgttgaaatcgatgatcaccctatgcaaattgaagaaacacagtacccgaaaaccttcttctataaagaagaccttcatccaggcaaaacaatgaaagtac

SEQ ID NO: 193414 - DNA, 267 bp, Glycine max
ctcgagccgctcgagccgtgcgcttctctcactcactcactcttattcttcctcttcgtgacgttttctacctcgaactcgaacgaagatgcgtgagattcttcacatccagggagggcaatgcgggaaccagatcggagccaagttctgggaggtggtgtgcgcggagacgggatcgattcaacggggaggtaccaaggggacaacgagttgcaactcgagcgagtcaacgtctactacaatgaagcgagttgcggaaggttcgtg

SEQ ID NO: 193415 - DNA, 266 bp, Glycine max
actaagaatccatggcgacaccaacgacgacgaagagaaaaccggtgttcgtgaaggtggatcagctaaaacctggcaccaacggccacacgctgacggtgaaggtggtcagctccaagccggtgaagacggtgaccactcgcggcggtcgatcgtcggtgctcgcggcgcgcccgtcgcgcatcgccgagtgcctcgtcggagacgaaaccggaaccataatcttcacagcacgcaacgaacaggtggaccatatgaatgctggc

SEQ ID NO: 193416 - DNA, 264 bp, Glycine max
ggaaggggcagagttttggagtttgaaagagaaaatattgattgcagttgagttctaatgagtaacgaatacgattacctgttcaagcttctcctaatcggagactcttccgttggaaaatcctgcttgcttctcagattcgctgatgactcctatgtcgacagctacataagtaccattggagttgatttcaaaatcagaacggtggagctggaagggaaaaccgtcaagctgcagatttgggatacagctggacaggagcga

SEQ ID NO: 193417 - DNA, 264 bp, Glycine max
ctctcatctatcgttataatttactttgatacgaagctctctcgatctaattttccgactaacactaacaatgacggatgcagctgaagacgctacacgacgccgtaatgcggtggccgagtaccgcaagaaacttcttcaacacaaggaattggcctccagagtacgatccgtcagagaaaatttgcgtgcctcgaagaaagagttcaacaaaactgaagatgatttgaagtctcttcaaagcgttggacagatcattggcga

SEQ ID NO: 193418 - DNA, 270 bp, Glycine max
actcgagccgaatcggctcgaggcactctcttctgcagctttcgcacgacagcttcattcaacatggctgagcaaaccgagaaggcttttttgaaacaaccaaaagtgtttctcagctcgaagaaaactgggaagggaaagagacccggaaagggtgggaaccgcttttggaaatccattgggcttggatttaagactcccagggaagccatcgaaggaacctacattgacaagaagtgccccttcactggcaatgtttccatccgtggc

SEQ ID NO: 193419 - DNA, 265 bp, Glycine max
attgcggcgacgtgagcggttcgctgcccgcgacgttgtgagaagtccactgaaccttatcatttagaagaaggagaacatggggtttgaggaaactgagttaaggcttggactgcctggaaacggaggcactgaagaagtgctcatcaggaagaggggtttctctgagactgaaactggtcatgaagatgagtctgccaccactgtggatttgatgcttaatctttcttctaaggaggccgcaaccactgctgctgctgctgca

SEQ ID NO: 193420 - DNA, 260 bp, Glycine max
agagttagtaagtctgggtggatgactgatgaggaatttgctagagaggtgattgccggtgtaaacccaaatgtgatccgtcgtcttcaagaattcccgacaaagaccgatacagatcccacactctatggtgaccccaccagtaccataacaacagaacaattggagattaacatgggaggggtcacagtagaagaggcattagtgctcagagattattcatattagattaccaagatgcattcatcccatatttgacg

SEQ ID NO: 193421 - DNA, 265 bp, Glycine max
tttgaatcaagggtgagggccttccatggcttccgcttgtgcttcctctgcaattacagctgttgccatctctacgccgagttccgggcagaagaatggatcaggaggttgttttcttagtggaaggaaattgagggtgaaaaaggagagagcagcaattggaggacgatcgatgggcactacagtgtgcgcagttgctgagcctgacagacctctatggttcccaggcagcacccctcctccatggcttgatggcactctacct

SEQ ID NO: 193422 - DNA, 264 bp, Glycine max
agagcatttcatattggctagaaatccacctgggggcagcagcttgctccctatatggtattcttctccacctttccgaatccatcatcaagctaagcgtcgaatggaacttgagtgggataatgaatatggtagtggtagctcaaagatcatgaagcttaccatcacttatcagcctgatgggagatacctaattgagacagaacaaaatggatctcctgttttagaagtgaaatcaacatatgtaaaagataactattttag

SEQ ID NO: 193423 - DNA, 265 bp, Glycine max
cggctcgagtatgggtcctgctgatagtccttatgctggaggtgtattcctagtcactattcactttcctccggattatcctttcaaacctcccaaggttgcctttaggactaaggtgtttcatccgaacatcaacagcaatggtagcatttgtcttgatatccttaaggagcagtggagccctgcactcaccatctctaaggtactgctttctatctgctcattgctgactgatccaaatcctgatgatccacttgttccggaa

SEQ ID NO: 193424 - DNA, 262 bp, Glycine max
ccgctcgacgtggaacctctctctctctctctctctctctgcggaaaccggaatatctcagttctctgatcagatccatccgacgtcgtctccgtgataatggctccgttcagcggcgatgagacggcaccgtttttcggcttccttggagccgcagctgccctcgtcttctcctgtatgggagctgcctatggcacagcgaagagtggcgttggcgtggcttcgatgggtgtgatgagaccagagctggtgatgaagtcta

SEQ ID NO: 193425 - DNA, 262 bp, Glycine max
ttgagggcatcagagatagcgaagaagttgaatctgcaacctcacccagaaggtgggttttacgtggagacattccgagaccattccgtccagctttcgacctctcagctcccccccgaatacaaagtggatcgccctgtatcgacctccatctattttctcgttccttctgggagtgtgtctcgcctccatcgcataccctgcgccgaaacctggcatcattacatcggcgaccctctcaccgtagtggaattgaatgaga

SEQ ID NO: 193426 - DNA, 261 bp, Glycine max
gggttcctctttgtggacttgtctgattttgttatcacttgcttctgcttccttcgccgccaacccaagaacaccaattgatgtgccatttggcagaaactatgtgcctacttgggcctttgatcacatcaaatacctcaatggtggttctgagattcagcttcatcttgataagtacactggtactggcttccaatccaaaggatcctacctgtttggtcacttcagcatgtacataaaattggttcctggtgattcagc

SEQ ID NO: 193427 - DNA, 260 bp, Glycine max
ctttgagaaagttactaattcctacatagaggcacaaatgttgggaattttcaaggagaagttggttaaagcacccaaagagctgaacagtccagcttcgttgaattcatgcactaagcctaagctaagtcacgaaatccttcaggatttcatgtcctgcaattcctccaatgctttctcaatgtgctttgggaatgaagctttgctagcctattccccttcaaacaagccctccattcatcaaaggttgtttagtggtt

SEQ ID NO: 193428 - DNA, 263 bp, Glycine max
ggagaatatgaagttgtttgtactctttgttgctgcagtagttttggtagcatggccatgccatggcgcaggctaccaaaggttccctctccgaatgaaaactggctatggtgagcgttcttcggaggtaaaatgcgcaagttttaggcttgctgtggaagcacacaacatccgagcccctaaaaccattcctgaagagtgcgttgaaccaacaaaggactacattaatggcgaacaatttagatcagactctaaaacagtta

SEQ ID NO: 193429 - DNA, 249 bp, Glycine max
caaagccctaaaatggaggggactgtcttcactcctgcactgcaagaaattgagcatgtaaagtctgatcaaggagaaattctgagcaagcctttcttggatgcgtgcaaacacatattgcctgtaatagataagtttggagctgctatggcccttgttaaatctgacataggtggtaacatatcgagattggaaactatgtattcttccaatccaaccagatttaactacctgtacagtttggtacag

SEQ ID NO: 193430 - DNA, 257 bp, Glycine max
tgtcaatgtacaaactggagacgaggtggctgttaagctggaacctgtgaagaccaggcatccacagcttcactatgattcaaaactgtatatgcttcttcaaggagcaacggggattccccacctcaagtggtttggagttgagggagactacaatgtcatggttatcgaccttcttggaccaagtctggaagatttattcaattattgtaatcggaagttcacattgaagacagtgttaatgcttgcggatcaat

SEQ ID NO: 193431 - DNA, 261 bp, Glycine max
gcaagcacggccatctccctcgtcttcgccgcgctcttcctcttctcctccgtccactctttctacctccctggtgtcgctcctcgcgatttccaaattggtgaccccctctttgtcaaagtgaacaagttatcatctaccaagactcaacttccatatgactactacttcttgaagtattgcaaacccaaaacgatattgaacaatgcagaaaatttgggagaggttcttagaggtgatcgtattgagaattcagtatat

SEQ ID NO: 193432 - DNA, 259 bp, Glycine max
ctcgagccgttttcattgtgcattattcaatggccaccacagcagctctatccggaaccatcgtgagcacctccttcatgaggaagcaacctatgacgaccaagagcctaaagacattccccaacgctctttttggtctgaaaggtggacgaggtggtcgtgtaacttgcatggcctcgtacaaggtgaagctcataaccccagaaggagaagtggagtttgaatgcccagatgatgttttcattgttgacaaggctga

SEQ ID NO: 193433 - DNA, 258 bp, Glycine max
agagcttgtatacgtcgccgcttcagcgtagcaacatgatcattcccgagaagaaccgtaaagagatctgcaaatacctcttccaagagggagtttgctttgcgaagaaggacttcaatctggcgaacacccggagattgatgtgccgaatctgcaggtgataaagctgatgcagagcttcaaatccagagagtacgtgagggaaacattttcgtggatgcactattactggttcctcaccaacgatggaattgagtt

SEQ ID NO: 193434 - DNA, 259 bp, Glycine max
tgcttcccaagtctctcgaagcatctttctttctcttcctgcagaagctatccgtgttacttgttcccaagtctccaacaagcaaagtacatggttgatttggaaatccaggtccccagcgcattcgacccgtttgccgaggcgagagaatcagatgcccccggggcaaaggagtatgtgcacatacgaattcagcagaggaatggaaagaagagtctgacaacagtgcaagggctgaagaaggagttcagctacgaga

SEQ ID NO: 193435 - DNA, 259 bp, Glycine max
agataaatatggttgagaacactcctgacgatcctcgtcagagaaaaccagacattacaaaagcaaaggaattgctgagatgggaaccaaaggtcaagttgtatgatggccttcctctcatggacgaggatttccgtcagaggcttggagttcccaagagcaactaagctccttttactccttcatttcttatcatataatcataatgaatattttgatagtaacggggatgtggatgaacctgttaagtgttaagaga

SEQ ID NO: 193436 - DNA, 263 bp, Glycine max
taaccgtagtaattctagagctaatacgtgcaacaaaccccgacttctggaagggatccatttattaggataaaagggcccacccagggctctgcctgttgctttgatgattcatgataactcgtcggatcgcacggcctttttgccggcgaagcatcatccaaatttctgccctatcaactttcgatggtaggatagtggcctaccatggtggtgacgggtgacggagaattacggtcccattccggagagggaccctgaga

SEQ ID NO: 193437 - DNA, 262 bp, Glycine max
gcttcctcttcgatcatcgcttcagaatgccgccgaagttcgacccctcccagatcgtcgacgtcttcgtacgcgtcaccggcggtgaggtcggcgcggcgagttccctcgccccgaagatcggtcccctcggtctctcccccaagaagatcggagaagatatcgccaaggaaaccgccaaggactggaagggcctccgcgtcaccgtcaagctcaccgtgcagaaccgtcaggccaaggtcacggtggtcccatccgccgc

SEQ ID NO: 193438 - DNA, 257 bp, Glycine max
cctcgagccggatcggctcgagggggtcgttactaacttgtgtgggctttaaatcaggtgcgccgccgtggcggaagtgagactgacttcggacggagcaacgtcggcggcgacgcatcggaggaaaccttcgtggagggagagagagaacaaccggaggagagagaggagaaggagagccattgcagccaagatatactccggccttagggcgcaagggaactacaatttgcccaaacactgcgacaacaatgagg

SEQ ID NO: 193439 - DNA, 258 bp, Glycine max
ccaaacttcagtttcaaagatgcctcgtggaacgcttgaagttgttctgatcagcgccaaaggaatcgatgacaatgattttctctccagcattgatccttatgtgattctcacatacagggcacaggagaaaaagagcactgtgcaagaagatgctggatccaagccacaatggaatgagagctttcttttcactgtctctgacagtgcatctgaacttaatctaaagataatggataaagacaactttagtcaaga

SEQ ID NO: 193440 - DNA, 250 bp, Glycine max
aagatataaaagctgttgcacatgatgttcccataccaggatataaaactaagactacaatcaacttgagactttggtctacaaaagctgcatcagaagaatttgatttatctgcttttaatgctggaaggcacactgaagcatctgaggctctagcaaatgctgaaaagatatgctatatactctaccctggggatgaaccaatagagggcaagatccttcgcctcaagcaacaatatactttatgttc

SEQ ID NO: 193441 - DNA, 255 bp, Glycine max
gtgacgagcatcatggcctcaagagcagtgttattgttggctatgtgtgtgcttccggcgatggttgtggccattcgcccagcaaagaaccctttttgcgtgaagggtcgtgtctactgtgacccttgccgtgctggttttgagacctcagctaccacctacattgctggtgctgagattatgttgcaatgcaagagcagggttagcaacgaggttgtgtacacgaagaaggggtacaccgactcaaccggagca

SEQ ID NO: 193442 - DNA, 256 bp, Glycine max
tggagctgtcttccagtgcatttgtggtaatattgttggcagtcgcagctacagcagtactctcaaatgggttggatctatctttcttgcccagcgatttcctctttggcattgcttcttcctcttaccagtatgaaggagcttacaagagtgacggcaaaggactgagcaactgggataactacactcacggaccaggtagaagtgtaataatggatggaagcaatggggatatcgcgattgatcattatcatcg

SEQ ID NO: 193443 - DNA, 223 bp, Glycine max
gaaggagcagggtgtgtcgttgggatcgaacaagttccccgagagacagccgattgggacggcggcgcagagccaagacgacagcaaggactaccaggagccggcgccggcgggctggttgacccgacggagtttacgtcatggtcgttttacagagcagggatagcagagtttgtggccagttttctgtttctctacatcaccgtcttaaccgttatgggag

SEQ ID NO: 193444 - DNA, 255 bp, Glycine max
ggggtgttaaatagaaaagaggagtttgagaatggcaacgatcagcgcggttcaggtggagttcctggagtttccagcggtggttacttcaccagcctccggcaagacctatttcctcggcggcgcaggggagagaggattgacgattgaggggaagttcataaagttcacaggcataggagtatacttggaggataaggcggtgccatcactcgccgctaagtggaagggtaaaacttcagaggagttagttca

SEQ ID NO: 193445 - DNA, 254 bp, Glycine max
cgacggtattatagagaaaacattcttgtggggtaggtactctttggaaatgtctgctgttatttacaaggattgggttttcaccgatcaagcattgcctaatgatcttgtcaagagaggagttgctgttaaggatccatctgctccccatggagttcgacttttgatcgaggactatccttatgcttctgatgggctagagatatgggatgctatcaagtcttgggtggaagaatatgtctcattctactaca

SEQ ID NO: 193446 - DNA, 256 bp, Glycine max
atcccatctaaaatggttctgagttgagggtgactacaatgtcatggttatagatctccttgggccaagtcttgaagacttgtttaactattgcaatacagaattatccctgaaaacagttctgatgctggcagatcagctagtaagtatgactttcatctcaagagaactacactttaaacagacaattgatgttcacatctataatatggctcgccaagatgatcagagttgaatacatgcactcccggggttt

SEQ ID NO: 193447 - DNA, 254 bp, Glycine max
aagacatttgatcttagctactatagtcatgtgattaagagaaggggtctatttgagtcagatgctgcattgttgacaaactcagttacaaaggctcaaatcattgaattgcttgaagggtcagttgaaaatttctttgctgagtttgcaacctccatggagaaaatgggaagaattaatgtaaagacagggacagaaggagagatcaggaagcattgtgcatttgtaaatagctaagaatcttgtcttgttca

SEQ ID NO: 193448 - DNA, 256 bp, Glycine max
tctctctcttctcttacacacacaagcactactacattttctttggtctctcattttctctatagctagatgggttctggtgctttacaacttcttctgatcttgggtcttctggctagctcatgcttagcacaagccccaggtgctgcacccacacaaccacccactacaaccccatcaccaccaccaccaagatcagcacctgcaccagcacccaccccgccagcaacaccaccaccagcaacaccaccagcaa

SEQ ID NO: 193449 - DNA, 258 bp, Glycine max
gggcaagtggcttcatcacccccatttttctgtggatctccacctagcagggcttcaaaccctgtgatccaagatgagcaatttggtagtaatggtaatgagaattttggtgcattttccttggcacccccttcaccatcttcctcagcaagaggctgtgttaggatgaagtttggtcacaccccagctgcagtgaggattgaaggttttaattgccttagcagggataggcgcaactgcagcatttctgctgttgct

SEQ ID NO: 193450 - DNA, 253 bp, Glycine max
aaatgatcccacaacaagaacccgatttcaatctcaatcacctcaaattatattacggaaagctgtttccgtttgctgatttagttagatgggtgtcgtatggcaacgatggaaagcaccctggttgtgatcaatcctacattgggcgaagagagttttccttcactctggagaatgatatatatctgcgtttccaatctttccacaatgcacttgagctcgaaaactccatcaaagaaaagacccctgttaa

SEQ ID NO: 193451 - DNA, 254 bp, Glycine max
ctctctctctctcaaccataatagtcatgggtttgaaggaggattttgagcagtatgctgagaaagcaaagactttgccaccgactcaatcaaacgaagacttgcttatcctttatggattgtacaaacaggccaccgttggacctgtcaacaccagccgtcctggaatgttcaacatgagggacagagctaaatgggatgcatggaaggctgttgaagggaaatccaaggacgaagcaatgggtgattacatc

SEQ ID NO: 193452 - DNA, 254 bp, Glycine max
ttcccctagaaacttcgatctgaagatgggtggcattgcatttggacgctttgatgattctttcagtttaacctcaatcaaggcctatattgctgagttccattcaaccttgctctttgtttttgccggtgttggttcagccatagcctatggtaagttgacatcagatgcagcacttgatcctgctgggttactggcagttgctatttgccacggttttgcactctttgttgcagtttctgtcggtgccaaca

SEQ ID NO: 193453 - DNA, 262 bp, Glycine max
aaacttcgtcgtgttactgttagctaacactttctgcaataatggcacgtactagcatccagacaagctcttcatcacgggcaaaaaaaatttgatgtgacttcatcgttggcttctcaaaggacgatgcatcaatcacatggatcatgaatgagctgacaaagatcgttgattgggttcatgaaacaggtccaagtgtgctccctgttttctatgatgtcactccttcggaggttcgacaacagagtggacagtttggaga

SEQ ID NO: 193454 - DNA, 259 bp, Glycine max
cagatcctccatggcctccaccaaggaacgtgaaaacttcgtctacgtcgccaagctcgccgaacaagccgaacgctatgaagaaatggtggaagcaatgaagaatgtggcgaactaaacgtggaattgacggtagaggagcggaaccttctgtcggttgggtacaagaacgtggtgggtgctcgtagggcttcgtggaggattctttcctcgattgaacagaaagaagaagctatagggaacgatgtgagcgtgaaga

SEQ ID NO: 193455 - DNA, 240 bp, Glycine max
cacccagagacgaggaagggcgtagtaagcgacgaaatgcttcggggagttgaaaataagcgtagatccggggattcccgatataggtcaacctttcgaactgctgctgaatccacgggcaggcaagagacaacctggtgaactgaaacatcttagtagccagaggaaaagaaagcaaaagcgattcccgtagtagcggcgagcgaaatgggagcagcctaaaccgtgaaaacggggttg

SEQ ID NO: 193456 - DNA, 258 bp, Glycine max
gctcgagctctgcttctggctctggctctgccctttttggttttctctcgttaccgaaaccagaagaaccatttgtggtggacatggatctggaccagtggatctccaaggtcaaagatggccagcatcttcttgaagacgagcttcaacttctctgcgaattcctaaaagagatccttattgaggagtccaatgtgcagcctgtcaatagtccagtgactgtttgtggtgatattcatggtcaattccatgatctaa

SEQ ID NO: 193457 - DNA, 249 bp, Glycine max
acttcctcaagctgttggagctgcttattcccttaaaatggatgggaaaagtgcatgtgcagtcactttttgtggggatggtgccaccagtgagggagattttcatgctgctatgaattttgcagcagtaatggaggcccctgttgtttttatctgtcgtaataatggatgggcaatcagtacacctgtggaagaccaatttcgaagtgatggtattgtagttaagggtaaagcttatggcatctggag

SEQ ID NO: 193458 - DNA, 254 bp, Glycine max
ctctctctccaatggccaaagacctcgaaacggagattcaaagtgggttgcctcacaaggactaccacgacccaccccccgccccattctacgaccccgccgagctccgaaagtggtccttcttccgagccctcatcgccgagttcgtcgccaccctcctcttcctctacgtcaccatcctcaccgtcatcggctacaaccaccagacagccaccgccgccgagccctgcagcggcgtcggcgtcctcggcatc

SEQ ID NO: 193459 - DNA, 254 bp, Glycine max
ctcgagcccagaagggcgaatgggcaaacacaacttttttgtcgttttgtagagcgagagacaaaaaaaatgttggggatcttcagcagttccgtggtgtcgccgccggaggagctggtggctgccggcagcagaacgccgtcgccgaagacgacggcgcgggaagctgctgaaccggttcgtggagaacaaggcgtcggcggtgtcgctgcaggtgggagaacacgtgcattggtcttacacgcaccacaacg

SEQ ID NO: 193460 - DNA, 262 bp, Glycine max
atcctctttctccttctaacgagtgaggaaaaatggcgcgtaagaagatcagagagtatgactcacagaggttgttgaaggagcactgtaagagactcgctggcaaggacgtgccgagcaagactgcacaaactaccgcactaactgattccactgagctacaagagaaggaaccctggctttcatcttctaaattggttgttacacctgacatgttatttggaaagcgtggcaaaagtggtttggttgccttgaatttgga

SEQ ID NO: 193461 - DNA, 263 bp, Glycine max
gcttctctcactcactcactcttcttcttcctcttcgtgtggttttctttctcgaactcgaacgaagatgcgtgagactcttcacatccagggagggcaatgcgggaaccagatcggagccaagttctgggaggtggtgtgcgcggagcacgggatcgattcaacggggaggtaccaaggggacaacgagttgcaactcgagcgagtcaacgtctactacaatgaagcgagttgcggaaggttcgtgcctaaggcggtgctca

SEQ ID NO: 193462 - DNA, 256 bp, Glycine max
gatggaggggaaggagcaggatgtgtcgttgggagcgaacaagttccccgagagacagccgattgggacggcggcgcagagccaagacgacggcaaggactaccaggagccggcgccggcgccgctggttgacccgacggagtttacgtcatggtcgttttacagagcagggatagcagagtttgtggccacttttctgtttctctacatcaccgtcttaaccgttatgggagtcgccgggcgtaagtctaagtgt

SEQ ID NO: 193463 - DNA, 251 bp, Glycine max
gaacaatttagatcagactctaaaacagttaaccaacaagctttcttttatgctagtgaacgcgaagtccatcacaacgacatatctatattcggcatagataacaccgtactctctaatatcccatactatgaaaaacatggatatggggtggaggaatttaatgaaaccttatatgatgaatgggttaacaagggcgacgcaccggcattgccagagactcttaaaaattacaacaagctgttgtctct

SEQ ID NO: 193464 - DNA, 249 bp, Glycine max
gctacaagatggtacagaactccagaactatgtggctccttcttttcaaagggaggactattgatctctcctggaagttgattttatctgtccttcagtacacaccagcaattgatgtatggagcattggatgcatttttgcagaggtgttgacaggaaaaccactgtgtcctggtaaaagtgtcgtgcatcaattagatttgattactgatcttctcgggcacaccatcacctgacactattgcagga

SEQ ID NO: 193465 - DNA, 251 bp, Glycine max
acaaacacctcgtccgtcacaatgcagctagctgtggcggccaacgctgtcgtttcaccgtcgccgttccgacctcatccccttctccggtcatccttctccggcgtctccgttaagctcactccccaatccataacgttttcacgcttgaagcccctcaccgtcttcgccgccaccaagaaggccgtcgctgtcctcaaggggacctccgccgtcgaaggcgtcgccactctcatccaagaagacgatgg

SEQ ID NO: 193466 - DNA, 252 bp, Glycine max
cggctcgaggggtttggaagaagctgatccgagaagatggtgcagcgtctcacctaccgcaaacgccacagctatgctaccaaatccaaccagcacagagtcgtcaagactcccggtggcaagcttgtttatcagaccacgaagaagagggccagcggacccaagtgccctgtcactggaaagaggattcaagggattccacatttaaggccagccgagtataatagatcaaggttacacagaaaccgaaga

SEQ ID NO: 193467 - DNA, 256 bp, Glycine max
caaaaagaaagaatcccaggcgaggagaaagatggaggggaaggagcaggatgtgtcgttgggagcgaacaagttccccgagagacagccgattgggacggcggcgcagagccaagacgacggcaaggactaccaggctccggcgccggcgccgctgagttgacccgacggagtttacgtcatggtcgttttacagagcaagggatagcagagtttgtggccacttttctgtttctctacatcaccgtcttaaccg

SEQ ID NO: 193468 - DNA, 262 bp, Glycine max
ggcagattcaaaatcaggattgaggaaaccagtgttcaccaaggttgatcagctttgcccggggaccagtgggcacactttaactgtgaaggtggtcaatgctaagatggtgatgcagagaggtcgctctgatggtcctcaatctcgtcaaatgcgaattgctgagtgcttggttggtgatgagactggaatgatcatattcaccgccagaactgatcaagtggatacgatgacagagggagctactgtgatcctgcgtaac

SEQ ID NO: 193469 - DNA, 248 bp, Glycine max
tgcctatatcgtgagtcaggctgcaaagagtgttgtggcaaatggccttgccagaaggtgcattgtccaagtttcctatgccattggtgtccctgagcccttgtcagtgtttgtggacacttatggtactgggaagattcctgacaaggcgattcttcaaattgtgaaggagaatttcgacttcagacctggaatgatcaccattaacttggaccttaagaggggtggccataggttcctcaagacag

SEQ ID NO: 193470 - DNA, 247 bp, Glycine max
ggcacccagagacgaggaagggcgtagtaagcgacgagatgcttcggggagttgaaaataagcgtagatccggggattcccgatataggtcaacctttcggactgctgctgaatccacgggcaggcaagagacaacctggtgaactgaaacatcttagtagccagaggaaaagaaagcaaaagcgattcccgtagtagcggcgagcgaaatgggagccgcctaaaccgtgaaaacggggttgtggga

SEQ ID NO: 193471 - DNA, 246 bp, Glycine max
catttatgcatatggctttgagaagccatcagctattcagcaaaggggaatagttccattctgcaagggacttgacgttatacaacaggcccagtctggaactgggaaaacagcaactttctgctctggaattctgcagcaacttgactatagtgtgactgaatgccaagccttggttttagcaccaactagggagcttgctcagcaaattgaaaaggttatgcgggcactcggagattatcttgg

SEQ ID NO: 193472 - DNA, 247 bp, Glycine max
ggcgacggcaacataccctccaccgccaccttattacaggctttacaaagattacttgcaagaccctaattctgctcccgaccctccaccacctattgaaggcacttatctttgttttggagccaattacactactagtgatgttctacctaccttggaagaacaaggggtgcgccactctattctaagggccctaatgttgatttcaagaaagagctgaggtcactcaacggagagttgcaactac

SEQ ID NO: 193473 - DNA, 236 bp, Glycine max
ggctcgagaggctttctacatatacatatatcctccaaaacaacgattactatcagctgtagcaaagaatcaaacttcatagaagtcaaaatatgaagaaatcaatatgtctagatacccccttttctatggataaaagatctaattgataaaggaagcatcgtaaggatccattaacgcggttttgaaccgatacaataaaaactgcttacttatctcatgatagaaaagtcagg

SEQ ID NO: 193474 - DNA, 251 bp, Glycine max
ggttcatcatctcaaaaaggcttttgtgattctcgatttgatttggatcgcacagaacgaaggcatgggtcaagctttttcggaagctcttcgacaccttcttcggcaacaccgagatgcgggttgtgatgcttggcttagatgctgctggcaaaacaactatactgtacaagctccacattggagaagttttatctactgttcctacaataggttttaatgtggagaaggttcagtataagaatgttgtt

SEQ ID NO: 193475 - DNA, 260 bp, Glycine max
caaagaaatactttgtgcgacctaacaccgctgttgtacagccctgggactcttgtatcatcagagtcaccctccaagcccaacgggaataccctccagacaggcaatgtaaagacaagtttctcttacagagtacaacagtgaatccaaatactgatgttgatgatctcccgccagatacttttaataaggagagtggtaattcagtagaggagttgaaattgagagttgcatatctctctcctacctcacctgaagga

SEQ ID NO: 193476 - DNA, 249 bp, Glycine max
tgaaaatgaaagtgcttgttttgtttgttgctacagttttggtagcatatgaatgccatggctcagactaccagaagttccctctccaaatgaaaactgggtttggtgggcaatacagcaatgaggtggcatgtgcccgttggaggcttggcgtggaagcaaacaacgtagtcaagtcgcaaactggtcctgcagcttacggagagtacatagctgactacggtctaggagaccaatatagatcagatt

SEQ ID NO: 193477 - DNA, 235 bp, Glycine max
accatattgaaacatatgatgtgactacaattagagcaagcacacctatgtttctcatgtctcggaagattaaatcacttggtgtcaaatgggttatctcaggagaaggatctgatgagatctttggagggtatttgcacttccacaaggcacccaacaaggaggagttccacagagaaacatgccgcaagatcaacgcacttcaccaatatgattgcttgcgagccaataaatc

SEQ ID NO: 193478 - DNA, 246 bp, Glycine max
tggggtggttctgttggatacatgggccagcatgtttgggatgagggttaggattgcattagctgaaaagggtgttgagtatgaatacaaggaagaaaatctcaggaacaagagtcctttgcttttgcaaatgaacccaattcaccagaaaattccagttctgatccataatggcaaaccaatttgtgaatctgcaattatagtgcagtacattgatgaggtctggaatgataaagctccaatctt

SEQ ID NO: 193479 - DNA, 247 bp, Glycine max
agctagtttatcgtgaggagaatatgaagttgtttgtcttctctgttgctgcagtagtcttggtaccatggccatgccatggcgcacgctaccaaaggttccctctccgaatgaaaactggctatggtgagcgttcttcggaggtaaaatgcgcaagtcttaggcttgctgtggaagcacacaacatccgagcctttaaaaccattcctgaagagtgcgttgaaccaacaaaggactacattaatgg

SEQ ID NO: 193480 - DNA, 248 bp, Glycine max
ggcaccggctacatcggcaaacatatagtggaagcaagcgcaaaggctggaaatcccacttttgctttggtgagggaatccacactctctgacccctccaaggcacaactcatccacaattttgaggctttgggcgttaatttggtccgcggggatctgtacgatcatgagaagttggtgaaagctatcaagcaagtagatgtcgtcatatccacgctgggtcacctgcagcttgccgatcagctcaa

SEQ ID NO: 193481 - DNA, 248 bp, Glycine max
cgatttcgctcccacccttgagctccgccagcttatccccgccgtggattattcacaaggaatagcatcctatcccctgttggtgttacaggtaacacatttcaaatgtggaggggtttccctgggagttggtatgcaacatcatgtagcagatggagcctctggtctgcacttcatcaatacatggtcagatgtggctcgtggcttggatgtttccattccaccattcattgatcgtacaatacttc

SEQ ID NO: 193482 - DNA, 249 bp, Glycine max
tgacaatgaggcctgctcttgctttgcttcctcttctatttgctttcttgttagctgccactacggaatcaagaaaagatccaggggaatattggaaaatgatcatgaaagatcaggaaatgccagaaggacttcaaggtcttgtttcatttcaatctgaaaataaccctaagactcaagagcagcttggtaaaggttccaaaaaccattgtgaagagtctctagttacaaatacacaagttaacagtg

SEQ ID NO: 193483 - DNA, 260 bp, Glycine max
gaaacactgtactggttgatgcgctctcacgacgcattcccttggtcagtgacagacctacaattatttttggagccgatgtgactcatccacatcctggagaggattcaagcccatcaattgcagcagttgtggcttcgcaagactatcctgaaattacaaagtatgctggtttagtttgtgcccaagttcataggcaggaactcattcaggatcttttcaaacaatggcaagatccagtcagaggaacagtgactggt

SEQ ID NO: 193484 - DNA, 266 bp, Glycine max
gtttgtccaacgtggcaccgtggataacaactgtgggagcgggaactatcgaccgcgatttccctgcttacataaccctcggaacagggaaaacataaccggagcttctctttatagcggtaaacccttgtcggattcgccgcttcctcttgtttacgctgggaacgcgagtaactcttctgtagggtatctatgtttgcaagattctctgattcctgagaaagtttcagggaaaattgttatatgtgagagaggtgggaatccga

SEQ ID NO: 193485 - DNA, 254 bp, Glycine max
gcttgctactgagtttccacactgcataccttaggtcttccgaattcgaagttaatttgcaagatggctaaggaaaaggctcagatcaacattgtggtggttggtcatgtggaccctgaggaggcaaccaccattaacgagctgaagaagcctgttgtggagaaagaagctccagggcatgccatatgagggcatgcacgtacggcctcggaggggaaccagaaaattatgttaacaaaataatctggaaccct

SEQ ID NO: 193486 - DNA, 250 bp, Glycine max
attcctccctggagtaacttgtggcttgttgcttctataatcctaactatgcttcttcacatgctaatcttatatgttcacccactgtcagtcttttctctgtaacaccattatcttggactgactggacagttgttctctatctttcattacctgttatagtcattgatgaggtgttgaagttcttctccagaaatcccattggtttgagattcagattatggttcaggaggtcggatttactaccgaa

SEQ ID NO: 193487 - DNA, 252 bp, Glycine max
gctttttctctttccttattctatttcaaacttccaccagtgatggcaggtttggctccagaaggaacacaatttgatggtcgccaatatgtgctaagatgagtgaattgctttccactgatgggcaagaattcttcacctcatatgacgaagtctatgacagctttgatgccatgggattgcaagagaatcttctgcgaggcatatatgcttatggttttgagaggccttctgcaatccagcaaaggggaa

SEQ ID NO: 193488 - DNA, 249 bp, Glycine max
aaaaatccgaaataaataattctctttttaaaaaaaaaaagaaccgggtgtgggtgttgttggtgttggcggaggcagatcggagatctgtgatagatatagatggagggagttggggcccggcttgggcggtcctcgacccgctacggaccggccacggtgttcactggaccggtccggaagtggaagaagaaatggatccacgtgtccccttcttctgcttcctctaattccaacgccaataatcat

SEQ ID NO: 193489 - DNA, 248 bp, Glycine max
acaaccaccaccatctagggtttttctttttctcatggctagtttgtcaactaggattttcttcatcatgccccttgtgtgcctggctctggtccaatggcacaaggggaaatgacatgtggccaggttgtgagcaacctgaccccatgcatctcctatgtggtgtatggtggaaccaatgttcctgaacagtgctgcaatgggataagaactctctatggcatggctcagaccaaaccagaccgcca

SEQ ID NO: 193490 - DNA, 251 bp, Glycine max
ggcggcgtaaccctccaacaacaacacttcctcgtcagaaaatgtctctggtggcgaacgaggatttccagcacattctgcgtgtgctgacaccaacgtggatgggaagcagaagataatgttcgcaatgacctccatcaagggtattggaaggagattcgccaacatcgcttgcaagaaggctgatgttgacatgaacaaaagggctggtgagttgactgctgctgagttggacagtgtgatgactgtgg

SEQ ID NO: 193491 - DNA, 253 bp, Glycine max
tacattttactttagtttgtgaaattctatccaaagattttgagaatgtctagctgtgggtgtggcagcagctgcaactgtggcagcaactgagttgcaacaagtactcttttgactacgttgagaagatcacaaatgagactctagttttgggtgttcggccggtgaaggccaattcgagggtgctgaaatgggtgttgcagctgagaacggtggctgcaactgtggatcaaactgcacttgcgacccatgc

SEQ ID NO: 193492 - DNA, 254 bp, Glycine max
ggggtcacttccttgtacattggatggggattagatggctctgtttggacttcatcagaaatgaaaggcctgaatgatgattgtcaacacttgagtgttttccacctggtcacttgtactctagcaaagaaagagggtttcgcagatggtacaatcctccttggttctctgaggctactccatccaccccttatgatcctctcgttttaagacacacctttgagcaggcagtcataaaaagattgatgactgat

SEQ ID NO: 193493 - DNA, 265 bp, Glycine max
ggcactctcttctcgtctcttttccaaatccaaattgatctatggcagtcaaatacttctacaaaaggagcatgctcattccagttcgtcactttgcaaagagtctgcccctcctgcccttaagggagacgagatgctgaagaacatttttgtggaggtgaagaacaaatttgagaccgccataggaatattaaagaaggagaaaatcaccattgacccagaagatccagctgctgtttctcattatgcaaaggtcatgaaaaca

SEQ ID NO: 193494 - DNA, 259 bp, Glycine max
gattttgtagtaagtgaggtgccaatatggtgaagatagctcttggtactttggatgactcttttagcgctgcctctcttaaggcttatttcgagagttccacgcaactctgattttcgtgttcgctggtgttggatcagccatcgcttacaacgagcttacaaaagatgcagccttggatccaacggggctggtggcagtagctgtggcacatgcatttgcactgtttgtaggtgtctccgtcgccgccaacatctca

SEQ ID NO: 193495 - DNA, 257 bp, Glycine max
gggcttggcggaatcagcggggaaagaagacagggacagtgggaatctcgttaatccattcatgcgcgtcactaattagatgacgaggcatttgctaccttaagagagtcatagttactcccgccgtttacccgcgcttggttgaatttcttcactttgacattcagagcactgggcagaaatcacattgcgtcaacatccgcagggaccatcgcaatgctttgttttaattaaacagtcggattccccttgtccgt

SEQ ID NO: 193496 - DNA, 254 bp, Glycine max
atttattcaaacctaaagaaacacagtaacacaccatcacaaactcatgtaaccctgccaataaaccatcacccctaaactccagcaccagcgcttgctcacttcaatacacaactcccagaatttctcatgtcaccacgtggcaagcacgctgatgtggagccaagtgttgtgcttacacgtaggtgtaccctccataatacaaccaaagacttaagcatcatataataatattaataaagtaaactaaagaa

SEQ ID NO: 193497 - DNA, 254 bp, Glycine max
cgtggcacccgcaccggccctagtggcgatgctgccatcccctggcatgggccacctaatcccaatgatcgagttcgcaaagcgagtggtgtctaccataacctggcggtgagcttcgtgatccccactgacggcccaccttcaaaagcccaaaaggcagttctggaggcccttccggactcaatttcccacaccttcctccctccggtcaatctctccgacttcccgccggacaccaaaatcgaaaccctgat

SEQ ID NO: 193498 - DNA, 252 bp, Glycine max
gcgaacagaagacacgaactaagaatccatggcgacaccaacgacgacgaagagaaaaccggtgttcgtgaaggtggatcagctaaaacctacaccaacggccacacgctgacggtgacggtggtcagctccaagccggtgaagacggtgaccactcgcggcggtcgatcgtcgatgctcgcggcgcgcccgtcgcgcatcgccgagtgcctcgtcggagacgaaaccggaaccataatcttcacagcacgc

SEQ ID NO: 193499 - DNA, 249 bp, Glycine max
cacttttcaagaatcgtaagctatgggaaagtcttacccaactgtgagtgctgattaccagaaggccgttgagaaggcgaagaagaagctcagaggcttcatcgctgagaagagatgcgctcctctaatgctccgtttggcatggcactctgctggaacctttgacaagggcacgaagaccggtggacccttcggaaccatcaagcaccctgccgaactggctcacagcgctaacaacggtcttgacat

SEQ ID NO: 193500 - DNA, 248 bp, Glycine max
gggcttggcggaatcagcggggaaagaagacagggacagtgggaatctcgttaatccattcatgcgcgtcactaattagatgacgaggctttggctaccttaagtgagtcatagttactcccgccgtttacccgcgcttggttgaatttcttcactttgacattcagagcactgggcagaaatcacattgcgtcaacatccgcagggaccatcgcaatgctttgttttaattaaacagtcggattccc

SEQ ID NO: 193501 - DNA, 256 bp, Glycine max
gtttgtcttctttgttgctgcagtagttttggtagcatggccatgccatggcgcaggctaccaaaggttccctctccgaatgaaaactggctaggtgagcgttcttcgacggtaaaatgcgcaagttttaggcttgctgtggaaccacacaacatccgagcctttaaaaccattcctgaagagtgcgttgaaccaacaaaggactacattaatggcgaacaatttagatcagactctaaaacagttaaccaacaag

SEQ ID NO: 193502 - DNA, 258 bp, Glycine max
cgcatggcttagacttaaaggctatggcaatctgaggccagaagttgaagagggaatttgccaagtcttggctcatatgtggttagaatcagagttattcctggcactggggatgaaggtgcatcatcatcatcatcctcatcatcctcatcgccttcgtcttcttcatcatcaaagaagggtaaacgttccgactttgagaagaaactaggtaagtacttcaaacaccagattgagtcagatagctcagcagcttat

SEQ ID NO: 193503 - DNA, 263 bp, Glycine max
gcagcatatagaattgtcttccatgatctaagccaggttttatgggatggtttatatgttggggatccagcatcttcaagaattgagccatgtctcaggaacttgagcggaagttaatgttcatttcagacactgttcatgaaagaattcgcacacgtattattactgaaataatgagagcttcctttgatggattcttgcttgtattgcttgctggaggtccctcacgtgcttttacccggaaggactctcagatcatagag

SEQ ID NO: 193504 - DNA, 243 bp, Glycine max
gaagacatacatacctccagaaggctttcttacaacactgaaagggttggattataaacttcaagtagggattggacacttttatcatatatctacgagggatgtttagcaaattttgaaattggagaggaaggagaagaagcatccaagctttaccctgaagtgaattacacacgcatggacgagtacctaaaaatttatgtgtacaaggaactcattcagtaggagttcagtgatttcaac

SEQ ID NO: 193505 - DNA, 252 bp, Glycine max
ctcgagcgagcaagcacacctatgtttctcatgtctcggaagattaaatcacttggtgtcaaatgggttatctcaggagaaggatctgagagatctttggagggtatttgtacttccacaaggcacccaacaaggaggagttccacagagaaacatgccgcaagatcaaagcacttcaccaatatgattgcttgcgagccaataaatcaacatttgcttggggtctagaagcccgtgtaccatttttggaca

SEQ ID NO: 193506 - DNA, 250 bp, Glycine max
ctctctctctctctctctaactctcttctaaaacttaccaacacaacaaaatcgagtttccaataaagagttttgttgaaatggaaaacgtccggcggtgtgtaaggaagatgatcagatggatttgcctcccggatttcgattccacccgacggatgacgcgctcataagccattacctctacaagaaggtcattgacaccaagttctgcgccagggcaattggagaagtggacctcaacaagtccgag

SEQ ID NO: 193507 - DNA, 249 bp, Glycine max
gcttggactgcctggcaacggaggcactgaagaagtgctcatcaggaagaggggtttctctgagactgaaactggtcatgaagatgagctgccaccactgtggatttgatgcttaatctttcttctaaggaggccgcaaccactgctgctgctgctgcagatccaactgataagcacaagactttgcctaaggagaagacccgtctgccagcagatcctgctaagcctccagccaagacgcaggtggtg

SEQ ID NO: 193508 - DNA, 253 bp, Glycine max
cggctcgaggccctggtcaaaccatctcttccattaaatttgccagctttggaactcctttgggtacttgtgggaactatgagcaaggagttgccattccccagcatcttatgccatattagagaagagatgtataggaaaaccaagatgcacagtcactgtatcaaacagcaacttcgggcaagacccgtgtccaaaggtgttgaagcggttatcagttgaagctgtttgtgctccaactgctgcaaattgg

SEQ ID NO: 193509 - DNA, 254 bp, Glycine max
tgatattgtgaaaactgcaagatttaaggagttggctccttatgatcctgactggtactatgtcagagctgcttccatggcaagaaagatcacttgagaggaggacttggtgttggtgcctttcagaggatttatggtgggagcaagaggaatggtagccgccctcctcatttctgcaagagcagtggtgctgttgctcgtcacattcttcaacagttgcagaacatgagcatcattgaactggacaccaaggg

SEQ ID NO: 193510 - DNA, 252 bp, Glycine max
gcaatgggttggatcggtgagactgttgattccatcaaatctcttcagatccgccaggtcctcacccaggctgtgagcctaggcatgattttacgtctgcactgataatatggaaggcattgatgtgcgttactggcagtgaatctcccgttgttgttgttctttctggaagcatggaacccggattcaagcggggagacatcttgttcttgcacatgagtaaagatcctattcgggcaggggagattgttg

SEQ ID NO: 193511 - DNA, 248 bp, Glycine max
ggcataacctaaacttacccttcttctctctgtgtgtgtgcgcatcaaacgcaaccagaagcagccatggccactgcaagaactgtgaggacgtttctcctcatgagttcgtcaaagcttactcttctcacctcaagcgatctggcaagatggagctgccagagtggactgatattgtgaaaactgcaagatttaaggagttggctccttatgatcctgactggtactatgtcagagctgcttccatg

SEQ ID NO: 193512 - DNA, 262 bp, Glycine max
ctcccaagcagtgggaggaggctcgggactctgaccgcgtgcctgttgaagaatgagccggcgactcataggcagtggcttggttaagggaatccaccggagccgtagcgaaagcgagtcttcacagggcaattgtcactcttactcaaccatctaatgaatcagagaatcagaatcggaaacaccaacaatcatctactgaatcttcctcggcagagtttcggcaacttaagtccagcatacatgaccagcttaaccatgc

SEQ ID NO: 193513 - DNA, 252 bp, Glycine max
gtccgtgctccaactcatattatttccaccatttctgatgacagaggagaggagccatgctatgctggtgtacccatgtcttccattatgaaaaaggttatggtgttggtgatgttatctctcttttgtggtttaaacgaagccttccccgttactgtactcaatttattgagatatgcatcatgctatgtgccgaccatggtccttgtgtctctggtgctcacaatactattgtgacagcaagggctggga

SEQ ID NO: 193514 - DNA, 248 bp, Glycine max
gcggcaacagggagagaagatgaagttcaatccacgtgtgtcgagcagccgccgcaagagccgaaaggtcatttcacggcgccatcggcgtgcggcgggtgcttatgagcgcccctctgtcggcggactgcggtctaagtacaacgtgaggtcgatcccagtacggaaggaggacgaggtgcaggtgatgcgaggtccatacaagggtcgcgaggggaaggtgactcaggtctaccgtcgaaagtggg

SEQ ID NO: 193515 - DNA, 245 bp, Glycine max
cacagcttcagttcgtttttgttgagctgtgaacttatggctgacggggtggtcctgttggatacatgggccagcatgtttgggtgagggttaggattgcattagctgaaaagggtgttgagtatgaatacaaggaagaaaatctcaggaacaagagtcctttgcttttgcaaatgaacccaattcacaagaaaattccagttctgatccataatggcaaaccaatttgtgaatctgcaattata

SEQ ID NO: 193516 - DNA, 252 bp, Glycine max
gcgacacgaggcagagaagtcggtgcagaaagagaaggagaagaagaagatgttggccctggctcccattgctaaacctcttgctgggagaagctttgcaagcgaaccctaaaacttgttcgtagagctgccgaacacaaatgcttgaaaagaggagtgaaggaggtcgttaaaagtataaggagaggtcataaaggattgtgtgtgattgctgggaacatatcaccgattgatgtcatcactcatgttcct

SEQ ID NO: 193517 - DNA, 250 bp, Glycine max
ctcaaccaaaaatctcccttctaaccttattcttcttctcgtccttcaccatcattgcgcatgcaattgttcctcaaaacgaaacctcaaatttgagaactcaggtgaacttggaccctacatcgttgagtacggtgcagattacagaatgataagcatcttcaactctccattccaagttggtttctacaacaccaccccaaatgccttcactctagctttgcgtgtagggctccaacgctcggagcag

SEQ ID NO: 193518 - DNA, 241 bp, Glycine max
tcgagcaagacatatgggaaacattttgtatctgcagctgttgatctcagacctagctgcggtgtaaatcgccagttgatttacagctctcagtacgaacaccaccgggtgaagtaaaattgacagtgttgaaggaaatagctaaggaacatcaaattgattgggatactacagaaagtgagacagaacttctcaagcctccagaagagctaatagtagggccacgtgcttttgtcagcgc

SEQ ID NO: 193519 - DNA, 250 bp, Glycine max
ggcaaccagaagcagccatggccactgctcggactgtgaaggatgtttcacctcatgagttcgttaaggcgtactcctctcacctcaacgatccggcaagatggagctgccagagtggactgatattgtgaaaactgcaagatttaaggagttggctccttatgatcctgactggtactatgtcagagctgcttccatggcaagaaagatctacttgagaggaggacttggtgttggtgcctttcagagg

SEQ ID NO: 193520 - DNA, 276 bp, Glycine max
cggctcgaggggaagtttatattcgaggtaaaaagagagttggtttagtaagcgatgatgacatatctggtcttcggattggattggttttccaaagtgctgcactctttgattctttgactgttcgtgaaaatgttggttttctcttgtatgaacactcaagcatgtctgaggatcagatatcagagcttgtcacggaaaccttggctgcagttggattgaagggagttgaggatcggttgccttctgagttatcaggtgggatgaaaaagcgag

SEQ ID NO: 193521 - DNA, 261 bp, Glycine max
tcttactcaagatgatcaggattctgtcagattgttcgctcttgagggctgtgctgctcttgcgaagctgtttgagccacaagattgtgttcgcacatatactcccggtcattgttaacttctcccaggataagtcttggcgcgtgcgttacatggttgcaaatcaattgtatgagctttgtgaagctgtaggccctgaacctaccagaacggcattggtacctgcttatgtgcggttgcttcgagataatgaggctgaag

SEQ ID NO: 193522 - DNA, 272 bp, Glycine max
ggcgggcaaaggtgttagttcggtggctaaggcggtagcagaatatcagtatccttggcgtgagaagttggggaaatataaggatgagcttgccaagggtgtgtggggatactgggagctgggggcatggaagccgctgagtatcagtgctcggcatcgtgctagaattcgcaaggaagtcctccttgctggggaagattggccctacgatcctgaaaggaaggagatgaagaccaggaggaaaggacacaaatgtgataggatttctgccg

SEQ ID NO: 193523 - DNA, 163 bp, Glycine max
cacagagacaaaatgtaagacaggtgccaacagttcatcacgaaagaaaggactagctgagccgagatcactaactaaaacgaatttaatactaatcgaaaataataatagaatagaaatagaactgtcttttcatatagatatcccttcaacacaacatagg

SEQ ID NO: 193524 - DNA, 275 bp, Glycine max
gaaaacaatgggttccgataatcaccagaacttggagttcttgaaggagatcggtttgggctcttccaacattggctcttacattaatggccagtggaaagccactggttcttctgtcacttctgttaatccttctaacaatcagagtatagctcaagtgaccgaagcaactttgcaagattttgaggaggggttgcgagcttgcagtgaagcagctaagacatggatgactataccggcaccgaagagacgtgagattgtgagacagattggtg

SEQ ID NO: 193525 - DNA, 273 bp, Glycine max
tgctttcatgccaactggttggggaatgctgcagattgctcaagcattaaaacctgtagtacgccgggctgggttttggggatcagtgaaaactcttgctcgaggttatgagattgtcatgggtttgctattgttcactcctgttgcttttctggcttggtttccatttgtttcagaatttcaaacccgtatgctgttcaaccaagcattcagcagaggtttgcaaatttctcgtattcttggtggccaaaggaaggaacgctcttctcgcaa

SEQ ID NO: 193526 - DNA, 273 bp, Glycine max
tttccaccaggcacgcagattctctccttccttctctctatccaaattttgattctttcgatcaaacccgcaacacccacctcaccaaaaccctacgcaacccatccatgacgcttggcttaggaggatccagtgtcgtggttcctaggaacttcagattgctggaggagcttgaacgtggagaaaaaggaattggagatggcacagttagctatggaatggatgatggtgatgacatttacatgcgctcttggactggcaccattattggcc

SEQ ID NO: 193527 - DNA, 277 bp, Glycine max
tggccctgcaagtcttgaaatcgatgatcaccctatgcaaattgaagaaacacagtacccgaaaaccttcttctataaagaagaccttcatccaggcaaaacaatgaaagtacaattcagcaagcctccctttcaacaaccatggggtgttggtacatggttaaaggaaattaaagacactactaaagaaggatatagttttgaagagctatgcatcaagaaagaagccattgagggagaagagaagttttgtgcaaaatccttgggaacagtaatt

SEQ ID NO: 193528 - DNA, 281 bp, Glycine max
catgaggttgccatatcagtgaaaccactgaaagtgcaaaactggattcttcctgaaatgcctgggcttataactgattttttgatttctcttgatgatcggtttctgtactttgtaaactggcttcatggggatatcagacagtataacattgagaaccttaaaaatcctaaactgaccggacaagtatgggttggtggacttatccagaaaggaagccctgtagtagctataactgatgatggtgaaacttggcaagctgaagtgcctgagattcaggg

SEQ ID NO: 193529 - DNA, 272 bp, Glycine max
gcagccacagctggatagcttttaccaagactttgaaataacgtggggtggtgagcgtgccaaaatctatgagaatggaaaccttctcacactctcccttgacagagcctctggctctggctttcgttccaaaaaagagtacttgttcggaaaaattgacatgcagctcaagcttgtgcctggtaactctgctggaacagtaactgcctattatttatcttctctggggcctactcatcacgaaatagactttgagtttttgggtaacttga

SEQ ID NO: 193530 - DNA, 271 bp, Glycine max
atttccagtgtcaaacatggcgtctcagatgagcaagaagagaaagtttgttgcggacggagtgttcttcgccgaactgaacgaggttctgacacgtgaattggcggaggacggttactccggcgtggaagttagggttacgccgatgcgcaccgagatcatcatcagagccaccagaacccaggctgttctaggtgagaagggaaggagaattagggaacttacctcagtggtgcagaagaggttcaaattccccgaaaacagtgtcgag

SEQ ID NO: 193531 - DNA, 269 bp, Glycine max
cggctcgagcgattcgttccatttcttccaaaatggccaaagacccagttcgcgttctcgtcactggagctgcagggcaaattgggtatgctcttgtccctatgattgctacgggagtgatgttgggtcctgaccagcccgtgatcctccacatgcttgacattcctccggcagcagagtcattgaatggggttaaaatggaattggtggatgctgcattccctcttcttaaaggtgttgttgccacaactgatgtggttgaggcatgc

SEQ ID NO: 193532 - DNA, 271 bp, Glycine max
aaagaagatggagaaagcgatcagcagacagaagattttgcttcatcatctcaacccttcatcgtctacccacgtcaacgaatcatcctccctctatgcttcagcatgtgtggcgggggacagcgctgcttatcaaaggacatcgacattcagggatgatgttgtgatcgtggctgcttatcggactgctcattgcaaaggtaaacgtggtggtttcaaagatactcttcctgatgatctactggctcctgtattccaaggctgtaattga

SEQ ID NO: 193533 - DNA, 273 bp, Glycine max
ctcgagccgcattattcccattgctatatattatggctagcatgaaggttacatgggtggctgtgatcatgtgcatggccgtggtgggtgcaccgatgatggcgcaagccatgacatgcaatgatgtgacggtgaacatggcacagtgcctatcctacctgatgcagggaggaacaccttcaacactttgctgcagcggagtcaagaacattcttggctctgctgtcaccaccgttgacaaacaaactgtgtgcaactgtctcaaggcggatg

SEQ ID NO: 193534 - DNA, 273 bp, Glycine max
cggctcgagcggctcgagtgaaaacccaaagtgcttctctcctctgtctttttctctctcttgctatcctttcggctagtggcactgctgcaagtgcaactccaagaagcgcagtgccaagccaccatgtttcaacattcaacagaagcctttttccttccacttttctctttggaattggttcttctgcttaccaggcagaaggagcagcaagtgtagatgggagaggaccaagcatatgggacacctacactagacagcatactgaaaaga

SEQ ID NO: 193535 - DNA, 270 bp, Glycine max
caagcttatacgattttcttcggaaaaacaattatcgctcatttcccattgatcttgtccgtgagattggcagacaactattggaatgtatagcattcatgcatgacttgcgcatgattcatactgacctgaagcctgaaaacatactactagtttcaccagagtatgtcaaagttcctgactacaagagttcatctagatcaccaagttcctatttcaagagagttcccaaatcaagtgctataaaggttattgattttggcagcacca

SEQ ID NO: 193536 - DNA, 270 bp, Glycine max
ccctatacaaccaaaccctaacacacacccatttgattcagtttccatggctagcctcaaggttgcatttttggctgcagtgctctgcatggttgtggtgagtgcacccatggcacatgcagctatcacgtgcgggcaggtgacgaatagcctgatcaattgcatcggttacctccagaacggaggaacgccgccgtcgggatgctgcaacggagtgaagagcctcaatgccgtcgccaagaccaccgccgaccgccagacggcgtgcaa

SEQ ID NO: 193537 - DNA, 265 bp, Glycine max
  unsure (1)..(265): unsure at all n locations
gtgaaattcccattcgaccagccaatgaagatctacaacagtttgtggaacgctgatgactgggcaacgaggggtggtttggagaaaacggattggtcgaaagcacccttcatagcagcgtacaaggggtttcacatcgacgggtgcgaggcttcggtgaacgccaagttctgcgacacgcanggcaagaggtggtgggaccagcctgagttccgtgaccttgacgccgcccagtggcgtaggctcagatgggtgcgccagaaat

SEQ ID NO: 193538 - DNA, 270 bp, Glycine max
ggcagatttaactggatcaaacaaccatttacattcaaatggatcaagcactgtcagtagccgtagcacaggacacactaaacagagccaatcagattcaacaaatagaaatgggagcagaactaaggacagtgaatcccgtaatgaaactgaatgggttgaacaagatgaacctggtgtatatattacactcacctcccttccaggaggtataatagatcttaagagagttcgcttcagtcggaagcggttcagtgagaagcaagcaga

SEQ ID NO: 193539 - DNA, 269 bp, Glycine max
ataatatggcatttaaaggctatttcgttttgggcctcatagctcttgttgtcgttggcacttccaaagttacatgcgaaatagaagcagataaagtttcacctattattgacttttccctcaatcggaacagtttccctgaaggcttcatctttggggcggcatcatcctcctaccagttcgaaggtgcagcaaaggaaggtggtagaggaccaagtgtatgggataccttcacccataaatatccagataagatcaaggatggaagt

SEQ ID NO: 193540 - DNA, 267 bp, Glycine max
caagctccaaaattcctcctaagtgcagtaaccgaaacccaatgacccacctagccatggtttggcatcaaacatggctccctgaaccctagcgtttctccctcttcgccaacaacgctgatccgatcccgatctgtttctgattccgatccgatccaatccaatggctggggcagcctctgctctgttcctccttgacatcaaaggccgcgtcctcatctggcgcgactaccgcggtgacgtcaccgccgtcgaagctgaacgctt

SEQ ID NO: 193541 - DNA, 270 bp, Glycine max
gcaagacacctgcgataggaatcgatttgggcacgacatactcatgcgttgcagtgtgtcagcgtgatcgagtggagatcatcgcgaacgaccaaggaaacagaacaacaccctcttatgttgctttcaataacacccaaaggatgattggtgatgctgccaagaaccaggctgctaccaatccaaccaacactgtctttgacgcaaagcgcctaattggtaggagatttagtgatcaagaggttcaaagtgatatggagctatggccat

SEQ ID NO: 193542 - DNA, 292 bp, Glycine max
cggcacgcggatcgagaaatcctcacccattttcttcgtagccaaacactctgaaattctcagttatgtcgtggcaagcgtatgtggatgatcacctactgtgtgaaatcgaaggtaaccacctcactcacgccgctatcatcggccaagacggaagcgtttgggctcagagcaccaacttccctcagttcaaacctgaggaaataactgccatcaataatgactttaatgagcctggatcacttgctccaactggattgtatatcggtggcaccaaatacatggtcatcca

SEQ ID NO: 193543 - DNA, 267 bp, Glycine max
ctcgagccggcaaaatttgtatatttgatgggtgctgatgatgtaaacttagacaagatcccagatgatgcttttgttgtttatcaaggtcaccatggtgacaagagtgtttatcgagcaaattttattttgccagcagcagcattcagtgagaaggaaggaacctatgaaaataccgacggatgcacgcaacaaacattgcctgcagttccaacagttggtgactccagagatgattggaagataattcgagctctatctgaggtg

SEQ ID NO: 193544 - DNA, 265 bp, Glycine max
agagaatcataagaaagcaagaaagaaaatgggagtggagaagcagttgttgaggcctggcaccggtcccaagccaattcccggtcagaacgtcaccgttcactgcactggtttcgggaagaacggtgacctttctcagaaattctggagcaccaaggatcctggccaggaccctttcactttcaaaatcggccaaggttctgttatcaaaggatgggatgaaggtgtgcttggcatgcaaattggtgaagttgctcgtctccgg

SEQ ID NO: 193545 - DNA, 263 bp, Glycine max
gcgagaaagggggaccaccctctaagcctaagtattcctcaatgaccgatagcgtacaagtaccgtgagggaaaggtgaaaagaaccctatttagggagtgcaatagagaacctgagatccgatgcgaacaatcagtcgaaggagcttagagcctttacttgatatttagtaaagcgcactcactctaacggcgtaccttttgcatgatgggtcagcgagaaaatgggaacagcggcttaagccattaggtgtaggcgccttt

SEQ ID NO: 193546 - DNA, 265 bp, Glycine max
cggctcgagcatcgctgtccatggctaccatcgttagcatcaaggctcgccagatcttcgacagtcgtggcaatccaactgtcgaggtggatttgacttgcttcgatggtacttttgccagagctgctgttccaagtggtgcatccaccgggatttatgaggcccttgaattgagagatggaggatctgactaccttggaaatggtgtatcaaggctgttgacaatgtgaacaccgtcattggccctgctttgattggcaaggac

SEQ ID NO: 193547 - DNA, 266 bp, Glycine max
aagatagaaatggagaactttccagttgttcacatgggaaacactgaatacatgagtagagatccagtaaccatggagataatcaaagatgcctgtgagaactggggtttctctgagttggtgaaccatgggatatccatagagttgatgatggacaccgtggagaggatgacacaagagcactacaaaaagtgtatggagcaaaggttccgagacatggtagcaagcaaaggcttggagtctgctcaatctgaaatcaatgattt

SEQ ID NO: 193548 - DNA, 261 bp, Glycine max
ggaacctgcacttctggtgacacgttttgagtatgctaatctttttcacactgttacagactagtacagtgcttatgtttcttctagagtcactggtctgcctaatcgaccacatttgatctttgttgacggccacagcaaggctcctcttgaagagacatgggaagctttattctcaagcctcagatatgctaaaaacttcagtggttcagtttgttttcgtcatgctattctctcacctttgggatatgagacagcatt

SEQ ID NO: 193549 - DNA, 264 bp, Glycine max
caaaaccctagagaggacgagagagcgtgcaactttcggcaaccacagaccatgacattcaaccgcaggaatggaggtcgcaacaaacacggccgcggccatgtcaaattcatccgatgctccaactgcggaaaatgctgccccaaggacaaggccatcaagaggtttttggttaggaacattgttgaacaggctgcagtcagagatgtgcaggaagcttgtgtctatgaacaatatacacttccaaaactctatgtgaagatg

SEQ ID NO: 193550 - DNA, 269 bp, Glycine max
gcttggtgatgtccctttctgttctcttcactcttggtcttgcgagagaaagccatgccagagacgaagatttttggcatgctgtttggccaaacactcccattccaagttcattgcgagatcttctaaagactggcactgcaagtgttgaaatcgatgatcaccctatgcaaattgaagaaacacagtacccgaaaaccttcttctataaagaagaccttcatccaggcaaaacaatgaaagtacaattcagcaagcctccctttcaa

SEQ ID NO: 193551 - DNA, 260 bp, Glycine max
agttaacgtacctagttgttggtctttatatttagttattgacatcaacaaagtcatggaggaagttaatgtggttcaaaccaagaatggaactgtttcagtagcttctgcgtttgctggccataaggaagctatacagcaaagggaccacaaatttttaagaattgctgttgaagaagcgtataaaggggtagactgtgaagatgggggtccctttggtgctattatagtttgtaatgatgaaattgttgctagatgtc

SEQ ID NO: 193552 - DNA, 268 bp, Glycine max
  unsure (1)..(268): unsure at all n locations
cggctcgacctcgagccgaatcggctcgacgggctagagctcaccttagcttcagatagcatccatcatgcagactnccaactcgcaagcactcgcattccgtctacagaggggtccgaatgcgggcctgggggaagtgggtatccgaaatccgcgagcccagaaagaagaaccggatctggctcggcacctttgccaccgccgagatggccgcgcgtgcacacgacgtcgcggcgctcgccatcaaacgcaactccgccattctcaa

SEQ ID NO: 193553 - DNA, 260 bp, Glycine max
aagggtcgagtatcacagcagcaatggtgaacgtcaaggctcagaaatcgacagcctacttcaagagatatcaagtcaagttcaagagaagaagagagggaaaaaccgataaccgtgccaggattcggtagattaatcaggacaagaacaaatataacactccgaaataccgatttgttgttcgctttagcaacaaggacattgttgcacaaataatatctgctagcattgctggcgatattgttcttgctgcagcatat

SEQ ID NO: 193554 - DNA, 259 bp, Glycine max
gccatggttgtggccattcgcccagcaaagaaccctttttgcgtgaagggtcgcgtctactgtgacccttgccgtgctggttttgagacctcagcaaccacctacattgccggtgctgagattatgttgcaatgcaagagcagggttagcaacgaggttgtgtacaccaagaaggggtacactgactcaactggagcatacacaatgtacgtggacgaggatcacgcagatcaaatatgcagtgccaagcttgtaagca

SEQ ID NO: 193555 - DNA, 258 bp, Glycine max
ctcgagccgcgtaaccatgtctcagactgttgtcctcaaagttggtatgtcatgttaaggatgtgttggagcagtgaagagagttctaggaaaattggatggtgtggaatcatatgacattgatttgaaggaacaaaaggtggtagtgaaaggaaatgtccagccagacacagttctgcagaccgtttccaaaactgggaagaagactaccttctgggaaggtgaagcagcaacatctgaaactagcacagcaactgc

SEQ ID NO: 193556 - DNA, 260 bp, Glycine max
ggctacctccatggtgaagcttatgcttttctctgctctcatactcttgtccttgcaagcagttgtgtctgtaacaccactgcattttcaacatccactagaccctttaaccaaacaagagataagtcttgtccaaaccatagtccaaaacaagtacccaagctcaagtaacaggttgagcttccactacattggactcgacgaacctgaaaaggatgccatcctcaaatgggaatccatcaaaccaactgttataactg

SEQ ID NO: 193557 - DNA, 260 bp, Glycine max
gggaatccgactgtttaattaaaacaaagcattgcgatggtccctgcggatgttgacgcaatgtgatttctgcccagtgctctgaatgtcaaagtgaagaaattcaaccaagcgcgggtaaacggcgggagtaactatgactctcttaaggtagccaaatgcctcgtcatctaattagtgacgcgcatgaatggattaacgagattcccactgtccctgtctactatccagcgaaaccacagccaagggaacgggcttgg

SEQ ID NO: 193558 - DNA, 262 bp, Glycine max
aagagatctttttctgctcttagccgatagacgggtctttgctcgacttttgcgatgtctatgctctccagatctcatgaaccttaacctctccgataccaccgagaaggtgatcgcagagtacatatggatcggtggatcaggaatggacctgaggaggcaagcaaggaatctcccaggaccagttagcgacccttcagagcttcccaagtggaactatgatggttccagcacaggtcaagctcctggtgaagacagtgaa

SEQ ID NO: 193559 - DNA, 261 bp, Glycine max
caaggctgttgttattcatgtcccttacagattaaggaaaggtttccgtaagattcatgttaggcttgtcagggagcttgagaagaagtttagtggcaaggatgtaatcttggttgccacccggaggattttgaggccaccgaagaagggttctgctgctcagcgtcctcgcagccgcactcttactgctgttcatgaagcaatgctggaggatgttgtattgcctgctgagattgttgggaagcgtgtgaggtaccaaat

SEQ ID NO: 193560 - DNA, 267 bp, Glycine max
  unsure (1)..(267): unsure at all n locations
ctcccttatccatttccacaccacaccatagccacaancaancgctctctcttcagnctccattctacgctctcccaaccgccagtctctgacccgaagagcgaaccataatggaagagtaaattaccggaaaccgaataaccgtttctccgtgaaagcctccgccaaagagattgcctttgaccagcattcccgctctgctatgcaggccggcattgacaagctcgccgacgctgttgggctcactcttgggcccagagggaggaa

SEQ ID NO: 193561 - DNA, 268 bp, Glycine max
gaaatttcttagacaaaaaacaaggatcagaaccgttgaatcaagttgaggaagatggcactagtctctggaggaagatcaacactgaaccctaacgcccctctttacattcctgccgcgtttcgccaagtggaggatttctctccggaatggtggcagctggtgacgacgctgacatggtaccatgactactggctaagccagcagcacgatgagggagccttctacggcgaggacgacgggtttgatggcaatgatgtcgttgatt

SEQ ID NO: 193562 - DNA, 229 bp, Glycine max
gcccagaatccgagatcaaccctgacccctaaggccaggggtttttctcggcttcttcagattcctgaaatggcgtctgtttcagctttagccaagtacaagctcgtcttcttgggtgaccaatccgtgggcaaaaccagcatcatcactcgcttcatgtacgataaattcgataacacctatcaggctacaattggtattgattttctatcaaaaactatgtatctcg

SEQ ID NO: 193563 - DNA, 252 bp, Glycine max
gatcggaccatgagggcggagacctgcgaggtgttataggcaaattaagaacaagccataccccaagtcacgtttctgccgtggtgttcctgatcccaagatcaggatttatgatgttggtatgaagaagaagggtgttgatgagtttcctttctgtgtccatctggttagttgggagaaggaaaatgtttcaagtgaggccctggaagctgctcgcattgcttgcaacaagtacatggcaaattttcttga

SEQ ID NO: 193564 - DNA, 254 bp, Glycine max
cggctcgagctttgattccctgagatttctgcaatctacaaaaattcactatgggagtcacaacctttacacaggaatactcctcctctgttgccccatcacgcatgttcaaggccttgattgtagactccagaaatttgcttccaaagctcttacctcagtttgtaaaagatgtgaatgtgatccaaggtgatggtgaagctggaagcattgaacaagttaacttcaatgaagctagccccttcaaatatctg

SEQ ID NO: 193565 - DNA, 288 bp, Glycine max
gcggcttgccgctagcgttctcaagtgtggtagaggcaaagtttggcttgaccctaatgaggtcaatgaaatctccatggctaattctcgacaaaacataaggaaattggttaaggatggtttcattatcaggaagccaactaagattcattcccgttcccgtgctcgcagaatgaaggaggccaagaggaagggacgtcactctggttatggtaagcgtaagggtacaagagaggctaggctccccaccaaaatcctttggatgaggaggatgcgtgtcctcagacg

SEQ ID NO: 193566 - DNA, 230 bp, Glycine max
tgcggattccgaacgagtgaccttcttcgtttctcgcaaagtttaagtaatcatgggtcaggaaaaggttcacatcaacattgtcgtcattggacatgtcgactctgggaagtcaactaccactggtcacttgatctacaagcttggaggtattgaccagcgtgtgattgacaggttcgagaaggaggctgccgcgatgaacaagaggtcattcaagtatgcctgggtgc

SEQ ID NO: 193567 - DNA, 279 bp, Glycine max
gcagccacaccgaggtcgatgaagttgagttcttaaacaactgcagggatgctggggtggttcacattctaggaaacacagttgtcagggcaaggagggattcaagattccacaagaaaatagctgttgattatatatatgcatttctcaggaagatatgcagggaaaatagtgtgatcttcaatgttcctcatgagagtctattaaatgttggtcaggttttctatgtatagcctctactcctcttctcttggtaattcttgcgtgaacattgagttt

SEQ ID NO: 193568 - DNA, 269 bp, Glycine max
gtttatcttgagcatgatattcaaacaaacaccagccccggcgatcatcaaaagctcttgcttgcatatataagcacacctcgtcatgagggccccgaggttaatagagaaattgctcagaaggatgcaaagggtctttacaaagcaggggagaagaaactgggaactgatgaaaagacttttatccacatattcagtgaacggagtgcggcgcatttggctgccgtcagttcttattaccatgacatgtatggtcattcactgaagaa

SEQ ID NO: 193569 - DNA, 246 bp, Glycine max
attgaggctctgcagtttcttgagaatgagataaaggacaagaagttctttggaggagaggagattgggttggtagatattgctgctgtctacatagcattttgggtccctatggttcaagaaattgcagggttggagttattcacaagtgagaaatttcctaagctccacaattggagccaagaatttttgaaccatccaattgtcaaagaagtctgccccctagagatcctgtttcctcctttt

SEQ ID NO: 193570 - DNA, 289 bp, Glycine max
aaagaatcccagcgcgaggagaaagatggagcgggaaggagcacgatgtgtcgtatgggagcgaacaagttccccgagagacagccgattgggaccgcggcgcagagcgaagacgacggcaaggactaccaggagccggcgccggcgccgctggtctgacccgacggagtttacgtcatggtcgttttacagagcagggatagcagagtttgtggccacttttctgtatctctacatcaccgtcttaaccgttatgggagtcgccggggctaagtctaagtgtagtacc

SEQ ID NO: 193571 - DNA, 197 bp, Glycine max
ggctcgagtatgggtcctccagacagtccttatgctacaggtgttaccctagtcactattcatttccctccagattatccctttaagccacccaaggttgcattcaggacgaaggtatttcacccaaatataaatagcaatggaagcatttgccttgacatattgaaggagcagtggagccctgcgctaactatttc

SEQ ID NO: 193572 - DNA, 250 bp, Glycine max
aagagttgctgcttcttccgccactcagcacttcgctccctctgtgcttcaccaaccatggccgaaatcgaagctaccgttccagatccctctcaaatcgacgtcaaacttttcaaccgctggagcttcgacgacgttgaggttactgatatgtctctggctgattacattggagtgtccccgtcaaagcatgctacatatgttcctcacactgctggtaggtactcagtgaagaggttcaggaaggcgc

SEQ ID NO: 193573 - DNA, 268 bp, Glycine max
cacatagctagttgtttaaagtgagagaaaaagaaagaagaaaatggcaaactttccagttgttgacatggggaaacttaacaccgaagagagagcagcagccatggagattataaaagatgcctgtgagaactggggtttctttgagttggtgaaccatgggatatccattgagttgatggacactgtggagaggctcacaaaagagcactacaagaagactatggagcaaaggttcaaagaaatggtggccagcaaaagggcttca

SEQ ID NO: 193574 - DNA, 232 bp, Glycine max
cagagagagaccactctcctctggagcaaatccaccggcctccctcttcacaacgccattgtttggatggatgctcgcacttcttccatttgcaggagattggaaaaggagttatctggcggtagaaaccattttgtggagagttgtggcttgcctattagcacatacttcagagagggaacgtcttctgctgctcaaaattttagagcttaagactcggataatcactttg

SEQ ID NO: 193575 - DNA, 216 bp, Glycine max
gcctaccctactattatcccttacccttcctgcctctcactgctttcctggctctttcagcaagatgttgaacaagttgtggacataagtggcaaccccattttcccaggtggcacatattacattatgccatcaacttggggcgctgccggtggtggattgaaactaggccggacaggaaactcaaactgcccagttactgttttgcaagattac

SEQ ID NO: 193576 - DNA, 197 bp, Glycine max
caggcaagtatatcatttctgctattcttggatcatttggagttgcatgggtttgtgattattatgtttcagacaaaaagctatttggaggttctacccctggaactattacaaacaatgagtgggcagaagagactgacaaaaaattgcaggcatggcctcgtactgccggtccaccagtggtcatgaatcccata

SEQ ID NO: 193577 - DNA, 275 bp, Glycine max
gaacattttgagtcttttccacctggtcacttgtattctagcaaagagagagcgttccgcagatggtacaatcctccatggttctctgaggctattccttctgccccttatgatcctcttgctttgaggcatgcctttgagaaggctgtggtaaaaaggttgatgactgatgtgcccttttttatgctgttaaccattttacactcaggatcaatgttcattggaactctgataaactctttgtccaaaaatggtactctggcttctagacccca

SEQ ID NO: 193578 - DNA, 279 bp, Glycine max
agcgccctagatttgctcttctttgcttcggaacacagagacaaacaaataacaatggcgttcgcttctttcctcggcagagttctcttcgcttccgtcttcatactctctgcttaccaagaatttaacgaatttggagttgatgggggacctgcagcaaaagcactcagacctaagtttgatgcctttacacatcgagtgcattctcaagttggctttcaacttcctgagattgatctgaaatttttaattgctggggctattgctctgaagggcctt

SEQ ID NO: 193579 - DNA, 272 bp, Glycine max
acaggcctggatctgttggatttgtttctaaatctggtgggatgtccaatgaactatacaacactattgcccgcgtaactgatgggatttatgaaggcattgctattggaggagatgttttccctggttccacactttctgaccatcttttacggtttaacaacatgccacaggttaaaatgatggtagtacttggggaacttggtgggcgtgatgagtattccttagtggaggcttaaaacaaggaaagtatccaaccggttgtgcctggg

SEQ ID NO: 193580 - DNA, 270 bp, Glycine max
gcttgtctcaaagattcagccatgcatgtgtaagtatgaactaattcagactgtgaaactgcgaatggctcattaaatcagttatagtttgtttgatggtatctactactcggataaccgtagtaattctagagctaatacgtgcaacaaaccccgacttctggaagggatgcatttattagataaaaggtcaacacaggctctgcctgttgctttgatgattcatgataactcgtcggatcgcacggcctttgtgccggcgacgcatca

SEQ ID NO: 193581 - DNA, 293 bp, Glycine max
cagttactcgacttcttcactgtctcaccaagaatacaaaatccaatggcgccgtctttcgcaatcaacggtggtatccccggccccagactgcatcctccttccgtcaccggctgcttctctgccgtctacagctaggtccaaaacatccgcatcgaccacgaactccctctcccctccgatctcaaaaaccctttcatcatcgtcgacggtccccaaagctccgccgccggcaaccctgaggagatcgcgaactgttcccgaaactgatcgggcaaccgtcggcggctttg

SEQ ID NO: 193582 - DNA, 197 bp, Glycine max
gggagtctgggtcaccatttaaacctgctgcagctttcaaaggtgcatatgaaaatttgggcattgatgctagtggtggaaagtcagtaacgatgcgaaagatatggcaccttgttcagatgctgatgggtgaggaatcagccgtgcaacgtgtttcataaaggatgtcattgattatcggtgcaagacgccacctt

SEQ ID NO: 193583 - DNA, 142 bp, Glycine max
ctgggtgaggcctatcagtggactcccaatggtggttgaccttgaactcatgaagatcgttcagtatcacgacggtggcattataccagtaccaactgccgacaacactgaataccgcttttcacatcagaacccaccattc

SEQ ID NO: 193584 - DNA, 277 bp, Glycine max
  unsure (1)..(277): unsure at all n locations
tttccctnngtganaaannaaanactaanacananagaacatagnttgnnttggtgaggtgagaagataaagaaagaatggcatttgcatnannaacacagaagngtatggcctgtgacaaaaccgtttatctngttgatnagttgaccgcggataaccgagttttccacaaagcttgnntcancntgncatcnctggaaaggaancctcaagctcagnaactagaactctttgagggagttctttattgtaagnaacatttgncnantgggnaaaa

SEQ ID NO: 193585 - DNA, 221 bp, Glycine max
ccaaccttggtgctacagaggagcaactagactttcctgttctttatgcttctgctaaagaaggatgggcgtctactacatttaccaaggatcctcctgctgatgccagacatatgtcacagttgcttgatgccgttgtaagacatgttccaccaccaaatgcaaacattgatgcacctttccaaatgctggtttcaatgatggaaaaagatttctatctg

SEQ ID NO: 193586 - DNA, 275 bp, Glycine max
gttctcttcactcttggtcttgcgagagaaagccatgccagagacgaagatttttggcatgctgtttggccaaacactcccattccaagttcattgcgagatcttctaaagcctggccctgcaagtgttgaaatcgatgatcaccctatgcaacattgaagaaacacagtacccgaaaaccttcttctataaagaagaccttcatccaggcaaaacaatgaaagtacaattcagcaagcctccctttcaacaaccatggggtgttggtacatggt

SEQ ID NO: 193587 - DNA, 274 bp, Glycine max
accaaaccctaacacacacccatttgattcagtttccatggctagcctcaaggttgcatttttggctgcagtgctctgcatggttgtggtgagtgcacccatggcacatgcagctatcacgtgcgggcaggtgacgaatagcctgatcaattgcatcggttacctccagaacggaggaacgccgccgtcgggatgctgcaacggagtgaagagcctcaatgccgccgccaagaccaccgccgaccgccagacggcgtgcaactgcctcaagtcg

SEQ ID NO: 193588 - DNA, 213 bp, Glycine max
gcgtgacttatattggtaaaggtggctctggtaattttgtgacaatgatccacaatggcatcgaatctggtgacatgcagctgattgcagaggcctatgatgtgctgaagtcagttggaaagttgtcaaatgaggaactacaaagtgtcttctcagaatggaacaagggagaacttctcgagtttcctgattgacatcactgcagatatattt

SEQ ID NO: 193589 - DNA, 270 bp, Glycine max
cccatttccatcaggtcagtgcctatgtacttttttcagaaaggttggtggtgactggtgattgttgaagagaataatggcaacttcaactatggatattcttcatttccaccacactcctttttattgtgaggagaatgtatacttgctttgcaaaaagttgtgcaatgatggaatagcaaatgctgatggatctgatctttttgttgctttcatttccaacgaaaagaaccagttccacttgggaatcaaaggctagcaaagagctgt

SEQ ID NO: 193590 - DNA, 258 bp, Glycine max
gcgttcttcggaggtaaaatgcgcaagttttaggcttgctgtggaagcacacaacatccgagcctttaaaaccattcctgaagagtgcgttgaaccaacaaaggactacattaatggcgaacaatttagatcagactctaaaacagttaaccaacaagctttcttttatgctagtgaacgcgaagtccatcacaacgacatatttatattcggcatagataacaccgtactctctaatatcccatactatgaaaaaca

SEQ ID NO: 193591 - DNA, 270 bp, Glycine max
ctggtttgcaaagcagtatcttcgacctggaagatctgtagaatttggggtaaatttaggatcaaatgcacccaaaaatccaaatgggccataatctattgtaagacccaaaatgctcatgttatccgtgttcagcacaccatgagtgaaaccaaccccctgtcatctggcaatcatggaagcagtacgctcagcaaatctccagcatccaccagccatgctcctttgagttgaagtcccacctcttcagttttgaacccggtttccccc

SEQ ID NO: 193592 - DNA, 276 bp, Glycine max
cttacaccgtttcggatttcatgacaaagaagcaagatttgcatgtctgtcaaaaccaccaccaccgttgatgaagctttggaggctcttgtaaacaacagaatcagtggtcttccggtgatcgatgaggactggaatctggttggagttgtttctgattatgacttattggctattgattcgatatcaggaggtcctcaaagtgatgcaaacttgttccccgacgtcgatagtacttggaaaacgttcaatgagttacaaaagctgcttagtaag

SEQ ID NO: 193593 - DNA, 274 bp, Glycine max
  unsure (1)..(274): unsure at all n locations
ggagcatccaaagaaggtttttggttgggctgctcgggactcatctgggattctctccccattcaacttctccagaagagaaacgggggagaaagatttggtattcaaagtgcaatactgtggaatatgccactcagatctacatatgttaaagaacgagtggggcaacacaacctatcctctggttcctgggcacgagattgctggtgtggtaacagaagttggaagcaaggtgcanaagttcaaagttggagaccgcgtaggtgtggggtgc

SEQ ID NO: 193594 - DNA, 267 bp, Glycine max
cggctcgagggactaccacagtgaccagaagttcaccatcaccacctactcaccgactggagtggctattacagcatcaggaaccaggaaaagtgaactgtttctggctgatgtcaacacccagttgaagaacaaaaacatcactactgatatcaaagttgatacagattctaatctcttcacaactatcactgtcaatgaacctgctcctggtctgaaggctatttttagcttcaaagttcctgaccaaaggtctggaaaggtgga

SEQ ID NO: 193595 - DNA, 244 bp, Glycine max
gtacaccagtggtattgcgtgttggtgtgaatcaagaaccgctctgctatggctgctctgcaatacttggaatcgctgcgtaattcgcaccctgagctctccgattggtacaattcgctggcggatctgtaccagaagaagctctggcaccagctcactctcaagctcgagcagtttgtggctctcgccgtcttccaggctggtgatgctttaatacaattatatcacaatttcatcacagact

SEQ ID NO: 193596 - DNA, 270 bp, Glycine max
gtcctacgatacgattctcttccgcctcccttcccttcaactccacggcgcagatccgaggagtttgggaaaccctaattcattcctctttgcttcttctatctctattcctctaacaccagtgatggcaggtttggctccagaaggatcgcagtttgatgctcggcaatatgattctaagatgaatgaattgctttccgccgatggacaagaatttttcacttcatatgacgaagctatgatagttttggagcaaggggcctccaaaaa

SEQ ID NO: 193597 - DNA, 223 bp, Glycine max
aagagatctttttctgctctttgaagaaagaagggtctttgcttgattttggagatgtctctgctctcagatctcatcaaccttaacctctccgataccaccgagaaggtgatcgcagagtacatatggatcggtggatcaggaatggacctgaggagcaaagcaaggactctcccaggaccagttagcgacccttcagagcttcccaagtggaactatgatg

SEQ ID NO: 193598 - DNA, 272 bp, Glycine max
tgggacttttctacatgatctcacatgtcaaggggtatggttttggaggttggaccaatgcacatgccaccttctatggagggggtgatgcttctgggacaatgggtggggcttgtggttatggaaatctgtatagccaaggttatggaactgatacaacagcactgagcactgcactgttcaacaatggcttaagctgtggtgcatgctttcaaattaaatgtgcgaatgacccacaatggtgccttcctggctccatcaaagtcactgcc

SEQ ID NO: 193599 - DNA, 194 bp, Glycine max
ttgtctcaaagattaagccatgcatgtgtaagtatgaactaattcagactgtgaaactgcgaatggctcattaaatcagttatagtttgtttgatggtatctactcggataaccgtagtaattctagagctaatacgtgcaacaaaccccgacttctggaagggatgcatttattagataaaaggtcaacacag

SEQ ID NO: 193600 - DNA, 274 bp, Glycine max
tttcctggctctttcagaagatgttgaacaagttgtggacataagtggcaaccccattttcccaggtggcacatattacattatgccatcaacttggggcgctgccggtggtggattgaaactaggccggacaggaaactcaaactgcccagttactgttttgcaagattactcagaaatcttccgtggcacacagtcaaatccagcatacctgggataagccctggaatcatctttacaggtactccacttgaaatcgagttcgcagagaaac

SEQ ID NO: 193601 - DNA, 274 bp, Glycine max
caacaacgtcgtccaagaccatgaccatggccatggccacgatcctgctcctgttcacggtcttcgcggtttcatcggccctagacatgtcgataatctcgtacgacaacgcccacgccgccacgtcgcgcagcgcaggcgagctgatgtccatgtacgagcagtggctagtaaagcacggcaaggtgtacaaccgctcggagagaaggagaagaggttccagatcttcaaggacaacctgcgattcatcgacgaccacaactcccaagaggac

SEQ ID NO: 193602 - DNA, 272 bp, Glycine max
ggagcatatgcaaagagtatatttgtggatgagcttggggcacaagaaagctctttactgaactgtacaccaaaggaagactttggaggaggacacccagaccccaatttgacatatgcaaaagagttggttgctcgtatgggattgggcaaatccgaaccacaagatgatcccccagagtttggtgctgcttctgatggtgatgcagatcgcaacatgatacttggtaaaaggttttttgtcactccttcagattccgtggccattatcgt

SEQ ID NO: 193603 - DNA, 268 bp, Glycine max
gcagaatcttggagacaaagcagtgatgtgtcatgggctaaatttcagaactgcagtattttactgccataaagtccgtgaaacaacagctttcatggttccattggtggctggtgatggaaccaaaactcaggcacttgctgtttgccactcagatacttctggaatgaatcatcacatgcttcatgaaccatgggagttgatcctggaactaaccctgtttgccatttccttggaagcaaggccattttatgggtacccaatttat

SEQ ID NO: 193604 - DNA, 271 bp, Glycine max
gttctgccaagtaaagttgatccattggtcaatctgatgaaagttgagaaagttcccgattctacatatgacatgattggtggtttagaccagcaaattaaagaaataaaagaggtcattgagctaccaatcaaacatcctgagctgtttgaaagtcttggaattgcacaaccaaagggtgtcctgctctatgggccacctggtacaggtaaaacattgttggctagggcagtggctcatcatactgactgtacattcatcagggtgtctg

SEQ ID NO: 193605 - DNA, 269 bp, Glycine max
ttccgaagcaggaactaaatatggctgacttgttggaatggtcaaagcaagctaagaaacgaatgcttcatgtcgtctaccgtgttggtgaccttgatcgcaccatcaaattttacacagaatgtttaggaatgaagcttttgaggcaaagagatatcccagaggagaaatatgctaatgcttttcttggattggccctgaagaatcccattttgttgttgaattaacatataattatggggttacctcgtatgacattggcgatggct

SEQ ID NO: 193606 - DNA, 261 bp, Glycine max
acacaacaaacaacaacctcttcctcctcacattcgggcccaagggcccaggcccagaaacagagcaagaggcccagggactgcagcaagcacccggtgtaccacggcgtgcggaagcggaactggggcaaatgggtgtccgaaatccgggagccacgcaagaagtcccgaatctggctcggaacttctccactcccgaaatggcggcgcgacccacgacgtggcggccctcaccatcaagggccagtcagcaatcctcaa

SEQ ID NO: 193607 - DNA, 260 bp, Glycine max
ctaccctactattatccctttccttcctgcctctctttgctttcctggctctttcagaagatgttgaacaagttgtggacataagtggcaaccccattttcccaggtggcacatattacattatgccatcaacttggggcgctgccggtggtggattgaaactaggccggacaggaaactcaaactgcccagttactgttttgcaagattactcagaaatcttccgtggcacaccagtcaaattcagcatacctgggata

SEQ ID NO: 193608 - DNA, 275 bp, Glycine max
cctcttctcaacaatcggtttccgatcatcaaccccgctactgaagacatcatagggcatattccagccgctactaaggaagatgttgaccttgcggtggatgctgctaaaagagccttttcccataacaaaggcaaagattggtcttcagctcctggctctgttcgtgctcgctatcttcgagccatcgcttcaagataacagagaaaaaggatgaactaggaaagcttgaagcaattgattgtggaaaaccactcagatgaagcactggcaga

SEQ ID NO: 193609 - DNA, 272 bp, Glycine max
tccctcgagccgaatcggctcgagcttgcgcaagagggatcttcgacctaatgttgttggggactgtactgtggcccatgatactaactgctcagaagaatgtcatggacaaatttacgcgtattgaaggtgattacaaggcaattgtacagaaccgcaatccattaatccctcctatatttggcacagatgaattggctggtgttgtgagtggaatccagctatgacgaagttaactggatggaagcgagaggaggtgatggataacatgc

SEQ ID NO: 193610 - DNA, 270 bp, Glycine max
cgctcgagccgctcgagccgctcgagccgttttttttgacttaaaacagcacactgcatattactcaaagcactctcaaagcacactgcatcctaacagcacacgtacgtagaaaggtgaagttccaggtcttgcacaacatacacaacacaccataatttattttatatacaatcttatggtgcccaagatgcaatgcatggactaattaaacaacaacgttagtctgataggcagtgtccatagataaattgggtacccataaaatgg

SEQ ID NO: 193611 - DNA, 270 bp, Glycine max
ctactactcactcactgcagatctcaattgcatcgctgtccatggctaccatcgttagcatcaaggcccgccagatcttcgacagtcgtggcaatccaactgtcgaggtggatttgacttgctccgatggtacttttgccagagctgctgttccaagtggtgcatccactgggatttatgaggcccttgaattgagagatggaggatctgactaccttggaaagggtgtatcaaacgctgttgacaatgtgaacaccgtcattggccctg

SEQ ID NO: 193612 - DNA, 267 bp, Glycine max
gtccaagcagcctccaattcgtgccactctcttcaaaatggccgttaccttctcaaatctccacacagaatcaggtcccaagtccctcgacgacttcctctctgggaaggtctacgtttctggggatcagttcacaaaggacgacatcaaagtgtatggtgctgttttggagaagccaggtgactcttttccaatgctgccaagtggtacgaggttgtctcatctcagcttgctgcaagcttccccggcaatgctcaaggggtgaga

SEQ ID NO: 193613 - DNA, 266 bp, Glycine max
gagagacctagtacctaatggacctggcagcgttaagatggtggcagtggattcggatgatctctggtttgcgtataacttgatagctcccggagactctgtcatggccgttactgtcaggaaggttctaagagaagctgctaatggcggacgggaagcagaacgcgtcaagctcaaattggaaattaaatcgaagagctttctgattatgacaaagaaggttctattttgcgtgttcgtggaaagaacattttggagaatgaata

SEQ ID NO: 193614 - DNA, 268 bp, Glycine max
ctcgagccgtgaagttcaatccacgtgtgtcgagcagccgccgcaagagccgaaaggccaacttcacggcgccatcgagcgtgcggcgggtgcttatgagcgcccctctgtcggcggactgcggtctaagtacaacgtgaggtcgatcccagtacggaaggaggacgaggtgcaggtgatgcgaggaacaacaagggtcgcgaggggaaggtgactcaggtctaccgtcgaaagtgggtgattcacattgagcgcataacccgcgaga

SEQ ID NO: 193615 - DNA, 258 bp, Glycine max
ggacctaacacactaaagcttatatatgacagaggcctcatagggtctatccatgactggtgtgaagcatattcaacatacccccggacttatgatttactccatgcatggactgtgttttctgacattgaaacgagagggtgcagtccagaggatctactgattgagatagaccgtttgctaggcctacaggtttcatcatcataagagataaacagcatgtgactgattttgtcaagaagtacctaacagcaatgc

SEQ ID NO: 193616 - DNA, 257 bp, Glycine max
caaccctataacaggaaatgtgatgtgtacagttttggcatctgcttatgggaaatatattgttgtgacatgccatatcctgacctaagtttctcagaaattacttcagctgtcgttcgccagaatttaagaccagaagtaccaagatgttgcccgagttccctagcaaatgtactgaagacggctgggatgccagtcccgataagcggccggagatggttgaggtagtttccatgttgaaggccatgacccctcca

SEQ ID NO: 193617 - DNA, 265 bp, Glycine max
cttttatatcctctatatatagttctctggcaattaaggtctcatccaaataagcacaaatgggtagccagagttacttcaaggctttgattatttgccttatagcactaattggatcaactcaagctcaattgcagcttggtttctatgccaaaagttgtccaaaggctgagcaaataattctgaagacgttgttgagcatatccacaacgctccatcactagcagctgctctcataagattgcacttccatgattgtcttgtc

SEQ ID NO: 193618 - DNA, 265 bp, Glycine max
ctttgccaagaaagactggtacgatatcaaggccccttccctcttccaggtcaagaatattggcaaaaccctcgtctctcgtacccagggaaccaagattgcatccgaaggactcaaacatcgggtttttgagctctcattggctgatctccaaggggatgaagaccactccttcaagaagattcgttgagagctgaggacgttcaagggaagaatgttctgacaaacttctggggaatggatttcacaactgacaagttgaggt

SEQ ID NO: 193619 - DNA, 262 bp, Glycine max
acacgcagcagtggaagcaacggctgctttactgaacaacgctgtgaagccagtgattgtgggtgggccaaaactaagggtagcaaaggcagcaaaggcctttctggagtttgcagaagcaagtggatatccaatagcagttatgccgtccgggaagggactagtaccagagcatcatccacattgcattgggacatactggggtgctgtcagctctagcttttgtggggaaattgtggcgtctgctgatgcatatgttttt

SEQ ID NO: 193620 - DNA, 261 bp, Glycine max
gatctcaggaaaaaacattgaaattggcataattggagctgataaaaagttcagggtattgacaccagctgaaattgacgactatttggctgaagtagaataatctgcaatgaagaactcttgtgttcctgaagttgtttgtttcacagttgggtttaattggtagcttaattattgacattgtgatggcaatagtgaatttgcgagctactcgttgtgatgaccagcaagccttcagataaacccttttccaaagtcatc

SEQ ID NO: 193621 - DNA, 256 bp, Glycine max
ctcgagccctgagagatgtgggaaatttgggttgtgtgaagataaccaatgtgtggcttgtccattggaaaatggactacttggttggagcaacaattgcactgccaaggctgtgacatcatgcaaggctagtgatttccactactacaaaattgcaggagttgagcattacatgagcaaatacactacaggggatagagtgagtgagagtacttgtggaaacaaatgcaccaaggattgcaagtgtgtgggttat

SEQ ID NO: 193622 - DNA, 257 bp, Glycine max
gcagcctccaattcgtgccactctcttcaaaatggccgttaccttctcaaatctccacacagaatcaggtcccaagtccctcgacgacttcctctctgggaaggtctacgtttctggggatcagttcacaaaggacgacatcaaagtgtatggtgctgttttggagaagccaggtgactcattcccaatgctgccaagtggtacgaggttgtctcatctcagcttgctgcaagcttccccggcaatgctcaaggggt

SEQ ID NO: 193623 - DNA, 271 bp, Glycine max
aaggataccttgaattgtcagcaaagacaaaaacctactttgccactgctgtgaacttatgggatgctgatttctatgtcaaagttgatgatgatgttcatgtaaatatagcaacactgggagaaactctagttagacatcgatcaaaaccacggatatacattggatgcatgaaatctgggcctgtcctatcccaaaaaggggtaaggtaccatgaacctgagtactggaaatttggagaggctggaaacaggtacttccgtcatgccac

SEQ ID NO: 193624 - DNA, 266 bp, Glycine max
tcttgattccgacgtgcctatggttcccgccggccagccctcgagcagcgccggtccaccttccaagaagcccaagcgcttcgagatcaagaagtggaacgccgtcgctctctgggcttgggacatcgttgtcgataactgtgctatctgccggaaccacatcatggatctctgcatcgagtgccaagcaaccaggctagcgccactagcgaggaatgcactgtggcttggggagtttgtaaccatgcttttcacttccattgcat

SEQ ID NO: 193625 - DNA, 256 bp, Glycine max
  unsure (1)..(256): unsure at all n locations
gcatagctgagtcatagcacactactngttctatacatcgacgtgttgaccattattggctacaagagacagagtgacaccagaatccccggtaacaccgaatgtgacggcgttggcattttgggcatcgcttgggccttcggtggcatgatcttcatccttgtttactgcactgccggatctctgggggacacatcaaccctgcggtgacattcgggttgttccttggacgcaaggtgtctttggtgagggcgtt

SEQ ID NO: 193626 - DNA, 265 bp, Glycine max
gctcgagctcgagccggaattcttcttctctcagccatctctctctctctctgcgtccatggagttttacgggtgttgaggtgaaaagtggagaatctctcaaggttgatccgggagatgacaagattatccacctttcaaatgcatgcctgggggatgtcactaaggataaagaaggtctaccagtagccctgtatgtcaagtttggtaaccaaaagcttgtacttggaacgctttcttctgaagcttttcctcagatatctta

SEQ ID NO: 193627 - DNA, 257 bp, Glycine max
gtgcaaacccactctgaacatccattctctatatcagccgtatctgctacctcatcatgtgctgcacaacagctgattccaccctcaatgccagattctaaggtgaaagaatcccttgattattctcactctgaacaaaaattgcagtcttctgtgaatgttgataataagcctaataatgatggttacaactggaggaagtatgggcaaaaacatgtgaaaggtagtgacttctcaagaagttattataagtgcac

SEQ ID NO: 193628 - DNA, 254 bp, Glycine max
gtttcacagccaagtcgtaaaagggtttcaagggatggaaaacatgcagagcttctggcaattgggtgatgaactccgtgggcactcaaaagcatcggaggatcacaagtggttaatggttgcctcgaaactggccgaacagacaagattgaagggggagcgtgtgaacaaccttgatcttcaaagggacccattgaaacaaggtcaagggataaatttgggttccaggcagagaacaaatttgattctcttaa

SEQ ID NO: 193629 - DNA, 267 bp, Glycine max
tgcatgtgtaagtatgaactaattcagactgtgaacctgcgaatggctcattaaatcagttatagtttgtttgatggtatctactactcggataaccgtagtaattctagagctaatacgtgcaacaaaccccgacttctggaagggatgcatttattagataaaaggtcaacacaggctctgcctgttgctttgatgattcatgataactcgtcggatcgcacggcctttgtgccggcgacgcatcattcaaatttctgccctatc

SEQ ID NO: 193630 - DNA, 269 bp, Glycine max
  unsure (1)..(269): unsure at all n locations
ctctttcnctcataaaaacactccgagtanaaagancctgctactgnntctcctcntggcattcgagtncaaanaancgaagaaaaataaanatgtcagacgcgttctgcagcgactgcangaggcagacggnggtggngttcgaccactccgccggcgacacggtgtgcncggagtgcggcctcgncctcaatcccactccatcgacgagacctccgagtggcgcaccttcgccaacgagtccggcnanaacgnccccaaccgtgtcg

SEQ ID NO: 193631 - DNA, 265 bp, Glycine max
cagagatataagatcgtggtcatctggcaaggaaactgacatccggctactcctttcaacgctacatcatattttatggcctgagagtggctggtatgctgttcctcttccgaacttaatagaaagttcacaagtgaagaaggcctatcagaaagcaagattatgcctccaccctgacaaactacacaaagaggagcaacattcctacaaaagtatatagcggagaaggctttctccattcttcaggatgcatggactgcattca

SEQ ID NO: 193632 - DNA, 263 bp, Glycine max
caacaataggggtctttgcgctattgctcaggctgagtctcttcgatacaagctccttggtggactcgctgtgcgcagggcctgctatggtgttttgaggtttgttatggagagtggtgctaagggatgcgaggtcattgtgagtggaaaattgagagcccagagagccaaatctatgaagtttaaggatgggtacatgatttcttctgggcaacctgtcaaagattacattgactctgcagtgagacatgtgctcctgagac

SEQ ID NO: 193633 - DNA, 236 bp, Glycine max
gggttactgtctgttcaagctaccatctctctctctctttcttagtgcctccttgccagaagttaaaatggcgcaagaaactttcctattcacatctgaatcagtgaacgaggggcacctgacaagctctgtcgacagatctccgatgctgtgctcgatgcatgcttggagcaggacgctgacagaaggttgcctgtgaaactgcaccaagacaacatggtgatggtttcggagag

SEQ ID NO: 193634 - DNA, 259 bp, Glycine max
cccttccttccatcccaaccacaaggctgctgagaagacataaaaaatggtgaagatttgctgcattggagctggctatgttggtggcccaaccatggctgtaattgccttgaagtgtcctgagatcgaggtggtcgtggtggacattgctgcaccgcgaatcaacgcgtggaacagcgaccactcccgatatatgagcctggccttgatgatgtggtgaagcagtgcagggggaagaatctcttcttcagcactgatg

SEQ ID NO: 193635 - DNA, 253 bp, Glycine max
gtttatcgtgaggagaatatgaagttgtttgtcttctttgttgctgcagtagttttggtagcatggccatgccatggcgcaggctaccaaaggttccctctccgaatgaaaactggctatggtgagcgttcttcggaggtaaaatgcgcaagttttaggcttgctgtggaagcacacacatccgagcctttaaaaccattcctgaagagtgcgttgaaccaacaaaggactacattaatggcgaacaatttag

SEQ ID NO: 193636 - DNA, 265 bp, Glycine max
ggagaatatgaagttgtttgtattctttgttgctgcagtagttttggtagcatggccatgccatggcgcaggctaccaaaggttccctctccgaatgaaaactggctatggtgagcgttcttcggaggtaaaatgcgcaagttttaggcttgctgtggaagcacacaacatccgagcctttaaaaccttcctgaagagtgcgttgaaccaacaaaggactacattaatggcgaacaatttagatcagactctaaaacagttaacc

SEQ ID NO: 193637 - DNA, 266 bp, Glycine max
ggtggatacctaggcacccagagacgaggaagggcgtagtaagcgacgaaatgcttcggggagttgaaaataagcgtagatccggggattcccgatataggtcaacctttcgaactgctgctgaatccacgggcaggcaagagacaacctggtgaactgaaacatcttagtagccagaggaaaagaagcaaaagcgattcccgtagtagcggcgagcgaaatgggagcagcctaaaccgtgaaaacggggttgtgggagagctata

SEQ ID NO: 193638 - DNA, 263 bp, Glycine max
aacacttttgtcttcgttccattatctagttctcaattctcttcaccctttgcctctgaaagacatgggtagtcttgaagcggaaagaacaacagtaggattggcagcaagagacccttcagggattctctccccatacacctacaatctaagaaacacaggccctgatgatgtttacattaaagttcactactgtggaatttgccattctgatctccaccagattaaaaatgatcttggcatgtccaactatcccatggtcc

SEQ ID NO: 193639 - DNA, 238 bp, Glycine max
ggaatcaccattgatattgctttgtggaagtttgaaacaacaaagtattattgcacagttattgatgcgcctggacatagggatttcattaagaatatgattactgggacatcccaagctgactgtgctgttcttatcattgattcgaccactggtggttttgaagctggtatttccaaggatggccagactcgtgacaatgctctgcttcaattcacccttggtgtgacacagatga

SEQ ID NO: 193640 - DNA, 257 bp, Glycine max
cctcgagcggctcgagcggctcgagtgtttcctttcgggcaaaagggtcaaaagataaaggggactatggtggttatgcagcagactgtgttggatatcaacagcatcaccagtgttggagggatcgttgaccaaggcttaggcttcataggcagtgcagtcgatgcacttacttttgcagcaccaaaatctccatccagttgattagtgctaccaaggctgatggtgggaaaggaaaaattggcaagagtacaaat

SEQ ID NO: 193641 - DNA, 255 bp, Glycine max
ggggtagtcggtttggccctgaacctacgtgcctatgacttcgtttctcaagaaatccgcgcacgatagatcctgaatttgagactttctacaccaaaaatattctcttaaacgaaggtattcgtgcgtggatggcggctcaagatcagcctcatgaaaaccttatattccctgaggaggttctaccacgtggaaacgctctttaatggaactttagctttaactggtcgtgaccaggaaactaccggtttcgct

SEQ ID NO: 193642 - DNA, 245 bp, Glycine max
gaactagtctcctactctcatccgcaacaaaataatggcatctcacatcgttggatacccccgtatgggtcccaagagatatctcaagttcgctctcgagtctttctgggatggcaagagcagcgccgaggatttgcagaaggtgtcttctgatctcagggcatccatctggaagcagtagctgatgctgggatcaagtacatccccagcaacactttctctcactatgaccaggttctcgacgc

SEQ ID NO: 193643 - DNA, 277 bp, Glycine max
gattgctggtttaaatccaaatgtcattaagattatagaggagttcccactaagtagcaagctagatactcaagcctatggtgatcatacctgtataatagcaaaagaacatttggagcctaacttaggtgggctcactgttgagcaggctatccaaaacaagaagttgttcatcttagatcaccatgactatctcactccttatttgaggaaaataaatgcaaataccacaaagacttatgctacaagaaccatatttttcttgaaagatgatgga

SEQ ID NO: 193644 - DNA, 277 bp, Glycine max
gaaaaagaagatggataaagcttcaagaaatggaaacttgaaagatatcaagcttagctttgttggtcattctattgggaatctcattatcaggacagccttgacagagagcgtcatggagccatatctaagatacttacatacatatgtctccatatcgggtccacacttgggttatatgtatagttcaaactctctattcaattcagggttgtggatattgaagaagctcaagggcacacaatgcattcaccaacttaccttcacagatgaccct

SEQ ID NO: 193645 - DNA, 273 bp, Glycine max
gcacttgttgtactctttgcatttctcttcctcagttgtgcctatgcacaagacacaacaacccttgtgcctgcaatcataacttttggtgactcagccgtggatgtagggaataatgactatcttcccacccttttcaaggctgattaccctccttatgggagggactttgctaaccaccaacctactgggaggttttgcaatggcaaattagctactgattttactgctgacactttgggttttaagacctatgctccagcatatcttagc

SEQ ID NO: 193646 - DNA, 273 bp, Glycine max
ctcgagccgcaaagcaggaactgcagcttttcttatagagcttgagaaaaaaagatccattaaggtgttagggaagagcactttcattggattggctataactttctttgctggagtttgcttctctctattctctccagcattcaatttggcaacaaatgaccaatggcacactttgaagaaaggggttcaccacttgagtgtttacactgccttcttttacttttcagtctcatgctttgttattgccatcattcttaacatcaccttcct

SEQ ID NO: 193647 - DNA, 270 bp, Glycine max
gcttaagggagggttttatgttgaacccgaagctaagctcttgttcatcatcaggatccgtggtatcaacgccatggatcccaaaacaaggaagattctgcagcttctgcgtttgagacagatttttaatggcgtctttcttaaagtgaacaaagctacagtgaatatgctccatagggtagagccttatgttacctatgggtaccctaatttgaagagtgttagagaattgatctacaagaggggctatggaaaagttaacaagcagag

SEQ ID NO: 193648 - DNA, 266 bp, Glycine max
  unsure (1)..(266): unsure at all n locations
cttcccctatggctcgtcactccttgctcttagccctcctcctattcgccgccgtgggccaccgncgcgatggcgtggcgggtccgacgccgacgacatcctgatccgtcaggtggtgccagatgttggcgaacgaagaggaggacaacctgctgaacgccgagcaccacttcgcgagcttcaaggccaagttcgccaagacctacgccaccaaggaggagcacgatcatcgcttcggcgtcttcaagtccaacctccgcagagcc

SEQ ID NO: 193649 - DNA, 278 bp, Glycine max
gccgccattgatttttcctcttccatttctcttactttctcagcctttttcgattacccatttggttatttcgccctaatggctcttgctccatccaaagtttccaccttttctggtttttctcccaaacccagtgttgggggtgctcagaaaaacccaacttgctctgtttctctgagctttttgaatgagaaacttggaagcagaaaccttagggtttgtgcctcaacggtgcctctcactggggtgatttttgaaccgtttgaggaggttaagaa

SEQ ID NO: 193650 - DNA, 274 bp, Glycine max
gaacccttccacggtggtgactgcgcgatgggtgcctacaagtatgtttcagagctatggcgcaagaagcagtctgatgtcatgcgcttcttgcagcgggtgaggtgctgggagtataggcagcaaccttccattgttcgcttgacaaggtcgacccgccctgacaaggctcgtcgcttgggcttcaaggctaagcagggctatgtgctataccgtgttcgtgttaggaggggtggccgaaagaggccagttcccaaaggtattgtttatggga

SEQ ID NO: 193651 - DNA, 272 bp, Glycine max
tttgctttctaggtttttttttttttttcttgctctttctctgtgtcgatggcgggaaaaggaggaaaggggtttttggccgaaaaaaccagggaagcgaaaaaggacaaagacaaggttaagaaaaggcctgtctctggttaatcccgtgctgggatccattttcctgggggtcgaatccataggcatttaaaccaaagggtgcaaccaaatggacttttgggggcgactgctgctgtgaacttggccccaattctggaatatctgactgc

SEQ ID NO: 193652 - DNA, 269 bp, Glycine max
gccccccaaaaatgaagagcaccatcttctttgctctctttctcttttgtgccttcaccacctcatacctaccttcagccatcgctgatttcgtgctcgataatgaaggtaaccctcttgaaaatggtggcacatattatatcttgtcagacataacagcatttggtggaataagagcagccccaacgggaaatgaaagatgccctctcactgtggtgcaatctcgcaatgagctcgacaaagggattggaacaatcatctcgtcccca

SEQ ID NO: 193653 - DNA, 273 bp, Glycine max
cttggtgttgcctccatgatgattgcctctaaatacgaggaaatttgtgcgcctcaggtggaggaattttgttacataactgataacacatacttcaaagaagaggttttgcagatggaatctgctgtcttgaattttctcaagtttgaaatgacagccccaacagtaaaatgtttcttgagaagatttgtacgtgcagctcaaggagtcgatgaggtcccttccctacaactagagtgcttgacaaactatattgccgaattgtctctcatg

SEQ ID NO: 193654 - DNA, 270 bp, Glycine max
caccgcacgaatatcttgttgtttggagcgatccgagaaaaactctgtaaacatgttggtttaccaggacctccttacaggtgatgagcttctctctgactccttccgttacaaggaaattgagaatggaatgctgtgggaagttgaggggaagtgggttgttaaaggagcagttgatgtagacattggtgcaaacccttctgctgagggtggaggagaagatgagggagttgatgatgcagctgttaaggttgttgacattgttgacac

SEQ ID NO: 193655 - DNA, 266 bp, Glycine max
catatccttatcctgtttctttcaatggaagtcatttctgcttctagcttgaatcccaacgctccgatgttcgtgccactcgcctatcggacggtggaggatttctccgaccagtggtgggcacctcgttcactcctccccctggttccgcgactactggctccgcgagtgcttccaagatccccagttccaaaacgacgacgctttcgacttcgactttgacctagatctccaagatgaagatgaaagggaacgaaaggaaggga

SEQ ID NO: 193656 - DNA, 270 bp, Glycine max
ggaagaagcagcaatggcgccgaagataacacgtaaggttagcagaaaccctgaattgataaggggaatcggaaagtaaccgaggtcgcagatgtaccacaagaggggcatttgggcgctcaaggccaaaaacggtggcgttttacctcgccacgaccctaaacccaagcctgaagctcctgctgaaaaaccacccaaattttaccctgctgatgatatcaagaagccccttgtcaacaagcacaaaccgaaaccagctaagctcagggc

SEQ ID NO: 193657 - DNA, 271 bp, Glycine max
gcaggagcagaggggctaaacagagaacagtacgtgtaccttgcgaagctgtcggagcaggcggacggtacgaagagatggtggagttcatgcagaaggtggtggtggggtggacgccggcgtcggagctcacggtggaggagcgcaacctcctctcggtggcctacaagaacgtgatcgggtctctgcgtgccgcgtggcgcatcgtgtcctccatcgaacagaaggaggaagggcgcaagaacgacgaccacgtgtccctcgtgaagca

SEQ ID NO: 193658 - DNA, 270 bp, Glycine max
attggattcagttttgcagaggtgttgacaggaaaaccactgtttcctggtaaaagtgtcgtgcatcaattagatttgattactgatcttctcgggacaccatcacctgaaatcattgcaggagttcgtaatgacaaggcaaggaagtacttgatggaaatgcggaagaaatctcctgttccatttgaacagtaatgtcagaatgcagatccattggcacttcgcctattacatatgcttgtagcatttgatccaaaggatcgaccaact

SEQ ID NO: 193659 - DNA, 145 bp, Glycine max
cttcccaaaacttgctctacaatgagtttccttcgttcttttgcaagaaacaaggatatatcaaaagtaggacgcagaggtatccattgcatgcagaaactatgtgcagaaaaaatatctcctgattcactagagaaggcccaaa

SEQ ID NO: 193660 - DNA, 266 bp, Glycine max
acggggctaccgctgagtttaagcatatcaatcagcggaggaaaagaaactaacaaggattcccttagtaaccgcgagcgaaccgggaaaagcccaccatgaaaatcggtcgccctcggcgtccgaattgtagtctggagaagcgtcctcagtggcggaccgggcccaagtcccctggaagggggcgccagagagggtgagagccccgtcgtgcccggaccctgtcgcaccacgaggcgctgtcggcgagtcgggttgtttgggaa

SEQ ID NO: 193661 - DNA, 268 bp, Glycine max
atggctcccaagggtttaacctttctggctgtgttaatatgcgtttcagcactgtcactgagtccttctgttgcgggggaagggcaaaataatggccttgttatgaacttctacaaggaatcatgccctcaggctgaagacatcatcacagaacaagtcaagcttctctacaagcgccacaagaacactgctttctcctggctcaggaacatcttccatgactgtgctgttcagagttgtgatgcttcactgttgctggactccacaa

SEQ ID NO: 193662 - DNA, 268 bp, Glycine max
gcctgctcttgctttgcttcctcttctatttgctttcttgttagctgccactacggaatcaagaaaagatccaggggaatattggaaaatgatcatgaaagatcaggaaatgccagaaggacttcaaggtcttgtttcatttcaatctgaaaataaccctaagactcaagagcagcttggtaaaggttccaaaaaccattgtgaagagtctctagttacaaatacacaagttaacagtgacttcgaacccataccaagtgttaccaaa

SEQ ID NO: 193663 - DNA, 270 bp, Glycine max
ggaattcacaaaagacgttaccatgtcggacgatgagagagaggagaaggaattggatctcacttctccggaagttgtcactaagtacaagagcgccgctgagattgttaacaaggccttgcagttagttatttcggaatgtaaaccaaagacaaagattgttgacctttgcgagaaaggggattcgtatattagagagcaaactggtaacatgtacaagaatgtgaagaggaagattgagagaggtgttgccttcccgacatgtgtgtc

SEQ ID NO: 193664 - DNA, 265 bp, Glycine max
gatttgatcaagggtggatttcccagcggaaaatacctctttgctggagtggttgatggaaggaacatctgggccaatgaccttgctgcttctctcactaccttgcagggtcttgagggcattgtgggcaaagataagcttgttgtgtccacctcctcctcccttcttcacactgctgttgatctagttaacgagaccaagttggatgatgagatcaagtcatggctagcttttgctgcccaaaaaattgttgaagttaacgcat

SEQ ID NO: 193665 - DNA, 267 bp, Glycine max
actcgagccgaatcggctcgagggctggattcccaagaaaagaaggactggagaggaaggatacgatgactaagaacgtctccatttacaagtcccaggcttctgcccttgaaaagcatgctgctgccaactgcaaggttcttgctgttgctaacccagcaaacaccaatgcattgatcttgaaggaatttgctccatccattcccgagaagaacatttcttgtttgactagattggatcacaacagggcattgggccaaatctctg

SEQ ID NO: 193666 - DNA, 253 bp, Glycine max
tacgtggtgttgttactgctagtcttttctcttttcttttctctttagttctctcttcccctttctttttctttttcttcttcttctgagcttgtttaagcttttcttccattaacatattatcacaatgtgtggtattcttgctgttcttggttgttctgatgactctcgagccaaaagggtccgcgtgctttagctctctcgcagattgaagcaccgtggccctgactggagtgggctccatcaacatggt

SEQ ID NO: 193667 - DNA, 268 bp, Glycine max
ctcgagccgatcctctgtcctctcgaagctttcatcgttcaacatattctcaccatctcagtcctgggcctgctatcttgttttaggtctaccgtcctgagaaaatgttccaaaggaagctctggcatgtcaagattcctgtatacgaacaattttcaacgaaacttgatttcgtctggtggcaatgaatcgtattatgggtattttaacaggagatcatacacttcactttatatgggaactggaactgtgggtgggattacaagtg

SEQ ID NO: 193668 - DNA, 272 bp, Glycine max
ggtgcagctaccaacgatggtgaagggtcgtcaaggagagcgcgtcagactctacgtgaggggtacaatccttggatacaaaaggtccaagtccaaccagtacccaaacacatccctgatccaaattgagggagtgaacaccaaagaagaagtaggatggtatgctggcaagaaaatggcctatatctacaaggctaaggtgaaaaaggatggaagccattaccgctgcatatggggcaaggttacgaggcctcacggcaacagtggtgttg

SEQ ID NO: 193669 - DNA, 269 bp, Glycine max
gcaacttccaacaccatagtgaaatggcttccaaggctgcacttctcttgtgtttcaatgttctcttcttcaccgtggttagctccacatatgtgccatgcaacccaccccccaaaactccaaaacacccacctgtcccaaagccaccttccccaaagcaagcaagttgccccaaagtcactattaagtttggtgtgtgtgctgatgtgttaggtttgatcaacgtgcaacttcgggaagccaccaaagaccccatgctgcaacctcat

SEQ ID NO: 193670 - DNA, 268 bp, Glycine max
caagtggtacaagatgcaccaccctatccagggatagaacatgttgaaggagatatgctccccagtgctccaaagggtgatgccattttactaaagcttgtatgtcacaattggttagacgaagactgtgtaaagtttttaaggaattgccacaaagctttgccacaacatgggaaggtgattgttatagactatataattccagaagttccggattcaagcaaaatttctatgcaaacttgtgttgctgatagtctcatgtttttag

SEQ ID NO: 193671 - DNA, 265 bp, Glycine max
aaagcggtaaggatggggaacacggagaagctgatgaaccagatcatggaattgaaattcacttcgaaatcgctgcagcgtcaatcgcgtaagtgcgagaaggaggagaaatcggagaagctgaaggtgaagaaggcgatcgagaaaggcaacatggacggcgctcgaatctacgcggagaacgcgatccgtaagcgcacggagcagatgaactacctccgcctggcctcgcgcctcgacgccgtggtcgcccgcctcgacacgc

SEQ ID NO: 193672 - DNA, 259 bp, Glycine max
agcggctaccctaatcctctcctcttcctctctactaatttcagctatggccgacgaagctgtggttgttccagatcccacccagatcgatgtcaagctctttaaccgctggagcttcgacgatattgagattactgacatttctctggctgattatatcggagtggcgacatccaagcacgccacgtatgtgcctcacaccgccggcaggtactcggtgaagcggttcaggaaggcgcaatgccccattgttgagagg

SEQ ID NO: 193673 - DNA, 264 bp, Glycine max
  unsure (1)..(264): unsure at all n locations
ggcccgcatcaccggctccctccacatgaccatccagctcgncgttctcattgagaccctcaccgcccttggcgccgaggtccgctggtgctcctgcaacatcttctccacccaggaccacgcccccgccgctattgcccgcgacagtgccgccgtcttcgcctggaagggtgagaccctccaggagtactggtggtgcaccgagcgcgccctcgactggggccccggtggtggacacgacctcatcgtcgacgacggtggtga

SEQ ID NO: 193674 - DNA, 271 bp, Glycine max
gttctctggcaattaaggtctcatccaaataagcacaaatgggtagccagagttacttcaaggctttgattatttgccttatagcactaattggatcaactcaagctcaattgcagcttggtttctatgccaaaagttgtccaaaggctgagcaaataattctgaagtacgttgttgagcatatccacaacgctccatcactagcagctgctctcataagattgcacttccatgattgttttgtcaatggttgtgatggatcagtgcttgt

SEQ ID NO: 193675 - DNA, 267 bp, Glycine max
cgtttccctcaatttggcactgtctttcttcactcgattgtcccccaccaaattctcatcctcatcatcatcctcttctcctcagcctgttgtatggtctattgggtcgaaccctaagccagtccagaacacaaattgggggtgttgggtccaagtttacagcaatggggctgtttatgagggtgaatttcaaaaagggaagtgttgggggactggggtttatcactatcacatgcatgggaggtatgatggaggatgggttgatgg

SEQ ID NO: 193676 - DNA, 267 bp, Glycine max
gcacttcgttgcttggtgatgtccctttctgttctcttcactcttggtcttgcgagagaaagccatgccagagacgaagatttttggcatgctgtttggccaaacactcccattccaagttcattgcgagatcttctaaagcctggccctgcaagtgttgaaatcgatgatcaccctatgcaaattgaagaaacacagtacccgaaaaccttcttctataaagaagaccttcatccaggcaaaacaatgaaagtacaattcagcaag

SEQ ID NO: 193677 - DNA, 263 bp, Glycine max
cgaatatcttgttgtttggagcgatccgagaaaaactctgtaaacatgttggtttaccaggacctccttacaggtgatgagcttctctctgactccttccgttacaaggaaattgagaatggaatgctgtgggaagttgaggggaagtgggttgttaaaggagcagttgatgtagacattggtgcaaacccttctgctgagggtggaggagaagatgagggagttgatgatgcagctgttaaggttgttgacattgttgacac

SEQ ID NO: 193678 - DNA, 268 bp, Glycine max
gcactttgtaggatcatctcctagcattgatcgattgagctggcagacgaagctatcagaactgctttccttgaaattcaaagtcgcatgatcgatactactggaaaaataaaacaggtgcaaacccagatgcgttccaaagaagcagaaaaaaagcgtgcttttctgaccatggaggagctgaagcaagttcctgatgatacgaatgtttacaaatccattggaagaatgtttgtattggagaccaaggcaacattaatgaatgaac

SEQ ID NO: 193679 - DNA, 268 bp, Glycine max
ggtgttgttactgctgctcttttctcttttcttttctctttagttctctcttcccctttctttttctttttcttcttcttctgagcttgtttaagcttttcttccattaacatattatcacaatgtgtggtattcttgctgttcttggttgttctgatgactctcgagccaaaagggtccgcgtgcttgagctctctcgcagattgaagcaccgtggccctgactggagtgggctccatcaacatggtgactgctttttggcacatca

SEQ ID NO: 193680 - DNA, 259 bp, Glycine max
cggctcgagaaaacatgctgccaatgaggcctggccaatattacgcgcacaaatcatataatgtggacaatgtggacagatttcaagtaccaatatgcacaaacctggtttcggcaattggacaagtttattcactatgttaatcaagatggccgtgttcatgccttatactcgactccatcaatatatactgatgcaaaacatgctgccaatgaggcctggccaataaagaccgatgacttctttccgtatgcagatc

SEQ ID NO: 193681 - DNA, 258 bp, Glycine max
ggtggagctaatggtagcttaagatttgaagttgagctgaaacatggagccaatgctggacttttaaatgcattgaaacttcttcagccgatcaaagacaaatattctggtgtgacatatgcagacttatttcagttggctagtgctacggctgtggaggaagctggaggccccaaaatccctatgaaatatggaagagtggatgtatctggacctgaacaatgccctgaagaagggagacttcctgatgctgggccc

SEQ ID NO: 193682 - DNA, 259 bp, Glycine max
attcatacgtggtgttgttactgctgctcttttctcttttcttttctctttagttctctcttcccctttctttttctttttcttcttcttctgagcttgtttaagcttttcttccattaacatattatcacaatgtgtggtattcttgctgttcttggttgttctgatgactctcgagccaaaagggtccgcgtgcttgagctctctcgcagattgaagcaccgtggccctgactggagtgggctccatcaacatggtg

SEQ ID NO: 193683 - DNA, 277 bp, Glycine max
agcccctctccgatcaaatggccaccgtaatcgacggcaaagcgttgcgcaaaccatccgatctgaaatcgccgacgaggtgcgccagtctctcaaaaatacggcaaggttccgggattagcggtggtgatagtagggaacagaaaagattcacagagctatgttggaatgaagagaaaggcatgcgctgaattgggaatcaaatccttcgatgtggaccttcccgaacaagtctcccaagctgaactaatcaaacaagttcaccagttgaatgcta

SEQ ID NO: 193684 - DNA, 269 bp, Glycine max
gtatatagcaagcatggcagtcacactctacgaccttagctctgcctctgggttgaagaagcttgatgagtaccttctcccacgcagctacatcaccgggtaccaagctacaaaggatgatcttactgtttatgcagctttgccaactgctccatcagatgaatatggaaatgtttccaggtggtacaagcacattgatgctttgttgagaatctctggtgtttctggcgagggatctggtgttattgttgagggatccctggttgcgg

SEQ ID NO: 193685 - DNA, 268 bp, Glycine max
ttcagaatgagatcttctcctaggcttagccctgtctttttgggaaatggcccttttccaggactgccacctactcatttggagggtttggctgaccgtgctcggagtagatggatagagaacaatgggagccaagttgatagcaagaaacaatttcagctcaacttggataagattaaaactggtgaagatacaaggactacattaatgataaggaatatcccgaacaaatacacctctaaaatgttattagctgccattgatgaaa

SEQ ID NO: 193686 - DNA, 267 bp, Glycine max
cctcgagccgaatcggctcgagtgcccatagcaatcaacactgacacgcctaagtctcaacactatgaattaccaaccgcattcttcaagctcgtcctcggaaacaatctcaaatacagctgttgttatttctcttctgcctcaatgacgctggatgatgctgaagaagcaatgttgaaactgtactgcgagagatcaaacctgaaacatggtcatacagtgcttgatgtgggatgcggttggggatcgttggctctatacattgcc

SEQ ID NO: 193687 - DNA, 264 bp, Glycine max
actcgagccgattcggctcgagcttccacacatgggagcagttaaacctcaaggatccacaacttatcactccaaatgcaacttcatacaaatcagcaatgagagagaatctgttgaggcagggatacagaattgttggaatcattggagaccaatggagcgatctgcttggagaccacagaggcgaaagcaggacctttaagcttcctaatcccatgtactacattgagtagtaccttcacctctctcaacaatctagctaga

SEQ ID NO: 193688 - DNA, 262 bp, Glycine max
ggtggatacctaggcacccagagacgaggaagggcgtagtaagcgacgaaatgcttcggggagttgaaaataagcgtagatccggggattcccgatataggtcaacctttcgaactgctgctgaatccacgggcaggcaagagacaacctggtgaactgaaacatcttagtagccagaggaaaagaaagcaaaagcgattcccgtagtagcggcgagcgaaatgggagcagcctaaaccgtgaaaacggggttgtgggagag

SEQ ID NO: 193689 - DNA, 238 bp, Glycine max
aaaaatttgcatattggcaagcaaagcgggggtaaacaaaaacaatggcgacatcgctctccgtttcgccatctctctctctcaacactctcttcttcgtcaaagcgcttcctctatctcgtccctcccttctctctctccctctccccaaatccctcctctctctctccacgcgccgccgcacctccgccgtccgcgccgaatcccaaaacggcgccgatgccgtccacacaacata

SEQ ID NO: 193690 - DNA, 265 bp, Glycine max
gccgtcgtcgctgtttgtgtgtgtatcaggtgcagctaccaacgatggtgaagggtcgtcaaggagagcgcgtcagactctacgtgaggggtacaatccttggatacaaaaggtccaagtccaaccagtacccaaacacatccctgatccaaattgagggagtgaacaccaaagaagaagtaggatggtatgctggcaagaaaatggcctatatctacaaggctaaggtgaaaaaggatggaagccattaccgctgcatatgggg

SEQ ID NO: 193691 - DNA, 275 bp, Glycine max
  unsure (1)..(275): unsure at all n locations
gcttgacattatttccaatgctagctgcacaaccaactgccttgccccgctncgccaaggttatcaatgacaggtttggcattgttgagggtttgatgaccactgttcattccatcactgctacccagaagactgttgatgggccatcagccaaagactggagaggtggaagagctgcttcatttaacatcattcctagcagcactggagctgccaaggctgttggaaaagtcctccctgctttgaatggaaaattgactggtatggcattccgt

SEQ ID NO: 193692 - DNA, 270 bp, Glycine max
cctcgagcgattcggctcgagcgaagtttctcatcagccttatcgagtttagggtttcggactcttaccctacctttgacgtatcgaaaccttaaatttgggattaggtctgagcaatctggttggtagaacctttggtcttagagagtcaagttttatgtctggattagacgatcaaattcctactgccttcgatccttttgctgatgcaaatgctgatgactcgggtgctgggtcaaaggagtatgtgcatattcgcgttcagcagcg

SEQ ID NO: 193693 - DNA, 153 bp, Glycine max
atgacacccgaaacttcactggcgagaagacagcattgccaaatcttaattcagtcagaggattttcggtggttgatgaaatcaaagaagcggtggacaaagcctgcaaacgccctgtggtctcatgtgcagagatctagaccattgcagctc

SEQ ID NO: 193694 - DNA, 265 bp, Glycine max
cttcacgactaggagatggcaaagtcgaagaaccacaccgctcacaaccagtcctacaaggcccataagaatggcatcaaaaagccaaagaggcatcgccacacttccaccaaagggatggatccaaagtttctgaggaaccagaggtacgcgaggaagcataacaagaagagcggtgaaacagccaccgaagaagagtaaagtgccactctcaaatgggcctattaggatttgatttgttatttaagccccatatgttttgtgt

SEQ ID NO: 193695 - DNA, 260 bp, Glycine max
gtcctgttatttctcagcgcgtaaagcatggctttgttggtggagaaaaccacgagtggtcgcgagtacaaggtcaaggacctttcccaggccgacttcggccgcctcgagatcgagctggccgaggttgagatgcccggcctcatggcctgtcggaccgagttcggcccctcccagcccttcaagggggcccgcatcaccggctccctccacatgaccatccagaccgccgttctcattgagaccctcaccgcccttgg

SEQ ID NO: 193696 - DNA, 260 bp, Glycine max
acactaatggctgtcaccttctcagatcttcacaccgaagagggcatcaaatccctcgatcaattcctttctgggaaaacctatatctctggggatcaattgacaaaggatgatatcaaagtgtatgcagctgttgtggaaaagccaggagactcttttcctaatgctgctaagtggtacgatgccgtctcttctcaacttgctccaagcttccctgggcacgctcaaggggtaagattcagtggcgctgctgctccagc

SEQ ID NO: 193697 - DNA, 268 bp, Glycine max
aattctgctcgagtttccaccaggcacgcagatactctccttccttctctctatccaaattttgattctttcgattcaacccgcaacacccacctcaccaaaaccctacgcaacccatccatgacgcttggcttaggaggatccagtgtcgatgtctctaggaacttcagattgctggaggagcttgaacgtggagaaaaaggaattggagatggcacagttagctatggaatggatgatggtgatgacatttacatgcgctcttgga

SEQ ID NO: 193698 - DNA, 259 bp, Glycine max
ggagcagcctcaggaggagaaggatgtctcacaggaagttcgagcacccaaggcacggttcactgggatttcttcccaggaagcgtgctgctcgtcacaggggaaaagtgaaggcattccccaaggatgacccatccaaggcacccaagctcactgcattcttgggttacaaggccggtatgactcacattgttagagaggtcgagaagccaggatcaaagcttcacaagaaggaaacttgtgagcctgttacaattat

SEQ ID NO: 193699 - DNA, 260 bp, Glycine max
gagacgaaacccttgaatcagatatcgctgtgggatggtataattccttcaaaagatcatgctaagtcttggattcatacatccaataagtaccgcttcattgatcagggaagcaatttgcgcggtaaagaatttaatttgacaatgcactggcatgttatgcccaagactggcaaaatgttcgctgacaaaatagttatgccaggatataaattgccagaggaatacagatgaagcttgcatttgttaatgtattgaag

SEQ ID NO: 193700 - DNA, 272 bp, Glycine max
cggacttctgctcgatatggcacttcgttgcttggtgatgtccctttctgttctcttcactcttggtcttgcgagacaaagccatgccagtgacgaagatttttggcatgctgtttggccaaacactcccattccaagttcattgcgagatcttctaaagcctggccctgcaagtgttgaaatcgatgatcaccctatgcaaattgaagaaacacagtacccgaaaaccttcttctatatagaagaccttcatccaggcaaaacaatgaaag

SEQ ID NO: 193701 - DNA, 226 bp, Glycine max
  unsure (1)..(226): unsure at all n locations
agccatcattcatgggagcagtgattctcccagatctcggcaccgagattttgattccggtctgcgncancattggaatagggttcgccctcttccagtgggtcctcgtctccaaggttaagctctccgctgccagagacgcttcccctaacgccgccggcaaaaatggctacaacgattacctcatcgaagaagaggaaggcctctacgatcacaacgttgtcct

SEQ ID NO: 193702 - DNA, 261 bp, Glycine max
cggctcgaggccccgatgagtaggagggcgcggcggtcgctgcataacccagggcgcgagccggagccggacggtcgtcggtgcagatcttggtggtagtagcaaatattcaaatgagaactttgaaggccgaagaggggaaaggttccatgtgaacggcacttgcacatgggttagtcgatcctaagggacgggggaagcccgtctgatagcgctctgtgcgcgtactccgaaagggaatcgggttaaaattcctgaacc

SEQ ID NO: 193703 - DNA, 269 bp, Glycine max
gcaggaacatacacttttgatttaaaagaagaagttcgaaaacatgtctattctgacttagaaggagaaatgcattggagtaccgatgtgtaccatgcatcagggtttagatatagtaatgtccatatcttaccaaaaacaagtcatttatggattttatcaggaaaatcatacaggtccggttcagtctctttttcaatccgaaaagatcaagatcaaatgaacattcattatctttctactggagaaagagatttttgtaacctttt

SEQ ID NO: 193704 - DNA, 265 bp, Glycine max
gctctttgaagaaagaagggtctttgcttgattttggagatgtctctgctctcagatctcatcaaccttaacctctccgataccaccgagaaggtgatcgcagagtacatatggatcggtggatcaggaatggacctgaggagcaaagcaaggactctcccaggaccagttagcgacccttcagagcttcccaagtggaactatgatggttccagcacaggtcaagctcctggtgaagacagtgaagtgattttatacccacaag

SEQ ID NO: 193705 - DNA, 262 bp, Glycine max
cttggtttcactgtctatccttcaccccaagtctcgacctctgttgctgagccttacaacagtgtcctctccactcattctcttcttgagcacactgatgtggctgtcctgctcgacaatgaagccatttatgacatctgcaggcgttcactggacattgagatgccaacctacaccaaccttaatcgtttagtttctcaggtgatatcatcactgactgcttccctgaggtttgatggagccttgaatgttgatgtcaatg

SEQ ID NO: 193706 - DNA, 150 bp, Glycine max
ctcgagccgcacttatcgcctttctccttctaacgagtgaggaaacatggcgcgtaagaagatcagagagtatgactcaaagaggttgttgaaggagcactttaagagactctctggcaaggagttgccgatcaagtcttcacaaattac

SEQ ID NO: 193707 - DNA, 256 bp, Glycine max
ggaaactgagttaaggcttggactgcctggaaacggaggcactgaagaagtgctcatcaggaagaggggtttctctgacactgaaactggtcatgaagatgagtctgccaccactgtggatttgatgcttaatctttcttctaaggaggccgcaaccactgctgctgctgctgcagatccaactgataagcacaagactttgcctaaggagaagacccttctgccagcagatcctgctaagcctccagccaagacg

SEQ ID NO: 193708 - DNA, 271 bp, Glycine max
cttgaggttgaagattttaaagatgtcaaatcaggctactcaatcacctttaatttcaatgccaatccctatttcgaggatacaaaacttgtaaagacttatacctttcttgaggaaggaacaactaaggttactgctacacccataaaatggaaagagggcaaaggcatacccaatggagttaatcatgaaaaaaaagggaacaagcgtgctcctactgatgtcagcttctttagttggtttagtgacactgagcagaaagatgatattg

SEQ ID NO: 193709 - DNA, 264 bp, Glycine max
tcttcttgtatgatggagaagatccagcacagtgaggtggaagtgaagggactgaagcttcacgtggcagagattggaagtggctccaaaacagtggtattcttgcatggattcccagagatctggtacacatggaggcaccaaatgatttctgtggcaaacgctggttatagggctcttgcctttgatttcagaggctatggactttctcagcaaccagcagagcctgaaaaggaaaccatgtttgatctggttcatgaaatt

SEQ ID NO: 193710 - DNA, 257 bp, Glycine max
agcctgtgacattggaacttggagggaaatcacctttcatagtgtgtgaggatgctgatgttgaccaggctgtagaacttgcgcactttgctttgttctttaatcaggggcaatgttgctgtgctgggtctcgtacctttgtacatgagcatatctatgatgagttcttggagaaagcaaaggctcgtgctttgaaacgtgttgttggggatcccttcaaaaagggtgtcgaacaaggacctcagattgatgtggaa

SEQ ID NO: 193711 - DNA, 252 bp, Glycine max
gctggttcctatgctgatgagctcgttaagaccgcgaaaacagtggcttcaccagggaggggcattttggccatggatgagtccaatgctacctgtgggaagcgtttggcttcaattgggctagagaacactgaagctaaccgccaggcgtaccgtaccctccttgtgacagttcctcgacttggtcagtacatctctggtgccattctctttgaggaaactctctaccaatccacaactgatggcaggaag

SEQ ID NO: 193712 - DNA, 257 bp, Glycine max
tcgagctttccacggtgcttgcaactgcaagttcttcttcttcttcttcctccctctatcacgggaagggcttctcccatcgcaaattgtctcccagttatcacattcacaaaaccattgacgaatccatgcagttatcttcgatgctggtagcacgggaagccgtgtacatgtctatcgttttaaccaacaattagatctccttcgcattggccaagaccttgagttgtttgtcaagactatgccaggtttaagtg

SEQ ID NO: 193713 - DNA, 260 bp, Glycine max
ctcgagccgtgtgttttcaacgccgtctccgatctccgacaatggcgacccaaatgagcaagaagagaaagttcgtagctgatggagtgttcttcgctgaactgaacgaggttctgacaagagagttggccgggacggttactccggcgtggaagttagggttacgccgatgcgcaccgaaatcataattagagccaccagaacccaagctgttctcggtgagaagggaaggagaataagggaacttacctctgtggttc

SEQ ID NO: 193714 - DNA, 265 bp, Glycine max
tggagaacaccaatcaggatctgaaaagtgacttgaaagatctctacataaaccaagctattcaaatggatgtggctggtaatcgcaaggctgtagtcatctatgtgcctttcagattgaggaaggcattccgcagattcatcttcgacttgtcagagagttggagaagaagtttagtgggaaggatgttgtcttgattgccacaaggaggatcgtgcgaccgccaaagaaaggctctgctgttcagcgaccccgaacccgcact

SEQ ID NO: 193715 - DNA, 256 bp, Glycine max
ctcgagccgcaatattcattccttgtgcttgtgcttgctatggtgatcacattgatgaaccctaccaatgcaaccctctatccccatttctatgataaagtttgccctcaggcattgccagttataaatcagtggttcaacgagcaattatccgtgagcgacgcatcggagcatctcttctgcgcttgcatttccatgattgttccgtaaatgggtgtgatggatcaatattgctagatgacacccgaaacttcac

SEQ ID NO: 193716 - DNA, 259 bp, Glycine max
aaacacactcttagaaagaagagtagcaggaggaaaagcgatggccgtgttagctccgtttcaattgaggacgttcgcgatttcgaggagctccaggctgtcgacgcctttcgccaatccttgatcatggcgaattgctccccgaagcctttgatgattaccatatgatgttaagatttttgaaagcgaggaagtttgatattgaaaaggcaaagcatatgtggactgacatgctacaatggaggtaggagtttggtgc

SEQ ID NO: 193717 - DNA, 257 bp, Glycine max
gtttcacagcagcaatggtgtacgtcaaggctcagaaatcaaaagcctacttcaagagatatcaagtcaagttcaagagaagaagagagggaaaaaccgattaccgtgccaggattcggttgattaatcagacaagaacaaatataacactccgaaataccgatttgttgttcgctttagcaacaaggacattgttgcacaaataatatctgctagcattgctggcgatattgttcttgctgcagcatatgcacatg

SEQ ID NO: 193718 - DNA, 254 bp, Glycine max
cgggtggtgacttgtgctcatgtcctacagggatatggtctgactgaaacctgtgcgggaacctttgtctcattaccaaatgaaatagaaatgcttggaacagtgggccctcctgtaccaaatgtggattttgcctggaatctgttcctgaaatgggatacgatgccctagcaagtacaccaagaggagaaatttgtgtaaagggaaaaaccttgtttgcagggtactacaaacgtgaagacctcactacagag

SEQ ID NO: 193719 - DNA, 259 bp, Glycine max
gtttaaccctagggttacctcaagccgtcgcaagagccgcaaggtcacttcaccgctccgtcgagcgtgcgccgcgtcctgatgagcgcgcctctctccaccgatctccggtcaaagtacaacgtgcggtccattccggttcgcaaggacgacgaggttcaggtcgtgaggggaacctacaagggccgcgagggcaaagtggtccaggtctatcgccgcaagtgggtcatccacatcgagcgcatcacccgcgagaagg

SEQ ID NO: 193720 - DNA, 260 bp, Glycine max
cggctcgaggctcagtcatctcctttaccagtctcgtctctcttgctcttgcaggagagagccatgtccatgcatcgctaactgacgaagattattgggaagctgtttggccaaacactcccattcccactggacgcgagaccctacaaagcctctccctgcaggtgttgaaatcgatgaactccctaagcaaattgatgatacacagtacccaaaaacattcttctataaagaagaccttcatccaggcaaaacaatga

SEQ ID NO: 193721 - DNA, 255 bp, Glycine max
caggatgccagatatgggatctgtaacggcaaaacaagaagatgctgctgctgcagcagcgcaacctgaagaagaggaggaggttgatgaaactggtgtcgagccccatgacattgatttggtgatgcacaggcaggagtgtcaagaagcaaggctgtcaaggctctcaagactcacaacggggacattgttggagccatcatggaactcactacttaattggggtttatgttctatttgtttgttttttgggaa

SEQ ID NO: 193722 - DNA, 254 bp, Glycine max
ggcgttttgtttctttctggaagcttcgttcgggcatcaatggcgtccttcgatgaagctcctcccggaaactccaagaacggcgagaagatcttcaaaaccaagtgcgctcagtgccacaccgtcgacaaaggtgccggccacaaacaaggacccaatctgaatagtttgtttggaagacaatctggtacaactcctggatattcctattctactgctaacaaaaacatggccgtgatttgggaggaaaagac

SEQ ID NO: 193723 - DNA, 246 bp, Glycine max
gggttactgtctgttcaagctaccatctctctctctctttcttagtgcctccttgccagaagttaaaatggcccaagaaactttcctattcacatctgaatcagtgaacgatgggcaccctgacaagtctgtgaccagatctccgatgctgtgctcgatgcatgcttggagcaggactctgacagcaaggttgcctgtgaaacctgcaccaagagcaacatggtgatggttttcggagagatcaca

SEQ ID NO: 193724 - DNA, 258 bp, Glycine max
tttgaaaagatgcttagtgcaagtcatgctggtcgaattggtcgcatggctttaccaaaagcatgtcgtgaagcatatttccctccaatctctcaaccagagggccttcctttacgaatccaagatgtaaaggaaaagaatggatgtatcaatttagattttggccaaataataacagcaggatgtatgttttagaaggtgtaaccccctgcattcagtctatgcaattgcaagctggagatactgtaccatttagcc

SEQ ID NO: 193725 - DNA, 255 bp, Glycine max
gaaagtgagaacacactttattatatgaaaaccgagagcatccaaatacaatagtgcagaagttcaggcaataattacgcatagacatgcataaagtctatgttattcagaagtacaacatagataagaaaccacaaactctttttaattagatagagatactgttgggaattcctttgaaagtcaacccttcctcacttgaacgatgtcgcaaagtgtatggcagctgaactggcccagtccggtttctcagac

SEQ ID NO: 193726 - DNA, 257 bp, Glycine max
actcgagccgaatcggctcgagctttaactaaggcaatggcaaatgcagcataccctgcatatatgttggagactagaaaaaccgctccaggtcttcgtttagtggataagtgggcggtattaattggtggaggtcggaaccataggatgggtttgtttgatatggtgatgataaaagataatcatatatcagcagctggaggtgttgctgatgctcttaaagctgttgacctgtatctggagcaaaacaatcttca

SEQ ID NO: 193727 - DNA, 257 bp, Glycine max
gttaatccctcttttgttgttggtcctctgcttgcaccacaaccaactagcacactgctcttgatactaagcattgtcaaaggcatgaagggagaatatccaaatacaacagtggggtttgtacacataaacgatgtggtagctgctcacttgctggctatggaggaccccaaggcatctggaaggcttatttgttcaagcacagtagctcactggtcgcaaatcattgaaatgcttcgtgccaaatacccttccta

SEQ ID NO: 193728 - DNA, 259 bp, Glycine max
  unsure (1)..(259): unsure at all n locations
ggtttgcaaagctgcttccagagccgcgaggtcccttctctccgcttccagagcctcccatggacgtgcggttggggctgctacggctgtttcattgagctgcaaagtgcctcttttctacggaaagaacggttctggaagtggttccgcttcatcatcatcatcatcatggatttcaggagcacttgctcttcctgccgcagcttacatgttccaagatcaggaggtgcgcgcactngagctggagcgcactttcatt

SEQ ID NO: 193729 - DNA, 202 bp, Glycine max
ttcataatgggtaggttcacatttggaggatgataccaggtcccctgttgctcctgctaccctttacaaagctctagttatcagatgccgacaacgtcatcccaaaggctttctaagccttcaggagtgttgaaaacctttaggggaacggtggccctggaaccatcaagaagatcactttcgttgaggatggagaaagcaa

SEQ ID NO: 193730 - DNA, 197 bp, Glycine max
gcccacgtcctgaaacctgacatgggtccaaaaacatatattgcatatgggattaaagaagagcttggtagaggagactctgtaacaaagcttcattgtgatatgtcagatgcggtgaatattttgacccatacagctgaggtgatattaactgatgagcagcactttactatatcaaagttgaaagaagcacacag

SEQ ID NO: 193731 - DNA, 195 bp, Glycine max
tatgggcatagctttgagcagcaattgtgatcttatcagctatggcggagaaacacaaccttaagaatccagctgtgaagcggattctccaagagctcaaggagatgcaatcaaacccatccgatgactacctgagcctccctcttgaggaaaatatatttgaatggcaatttgctataagggggcctcgtgata

SEQ ID NO: 193732 - DNA, 191 bp, Glycine max
ctcgagctcgagccgcactcacaacactttcacaaacactttcagaaaaacaattcgtgtcttttccataccatggccagatcacaacagcgataccgaggcgtccgacaaaggcattggggctcttgggtctccgaaattcgacaccccatattgaaaactaggatatggctagggacttttgaaactgc

SEQ ID NO: 193733 - DNA, 184 bp, Glycine max
ttggagtatcccatgtgtccgcagataaccacatgtggatctattctctacttcccatgtattctacagtacttattgatgggtgaagaggatcacaaaggtgatagctggaaaaggtgtcctttgtgctttgtgatgatatctgccaaggatttatataccttgcacatcacaaatgtaaaac

SEQ ID NO: 193734 - DNA, 187 bp, Glycine max
cttccgcctcccttcccttcaactccacggcccagatccgaggagtctgggaaaccctaattcattcctctttgcttcttctatctctattcctctaacaccagtgatggcaggtttggctccagaacgatcgcagtttgatgctcggcaatatgattctaagatgaatgaattgctttccgccgat

SEQ ID NO: 193735 - DNA, 195 bp, Glycine max
cgactatgtacaggttggcaaggaaatgggtgtgaagatgtattcaccatggtcactcttcaaactatggacaccatattctatgaagtgcagaggcaaggtagaatttccttctacctcacccaaatgggggaagaagcagttaacattgcatctgctgctgcactttctcctgatgacatcatattgcctcag

SEQ ID NO: 193736 - DNA, 199 bp, Glycine max
ttcataatgggtattttcacatttgaggatgaaaccacctcccctgtggctcctgctaccctttacaaagctctagttacagatgccgacaacgtcatcccaaaggctgtcgaagccttcaggagtgttgaaaaccttgaggggaacggtggccctggaaccatcaagaagatcactttcgttgaggatggagaaagca

SEQ ID NO: 193737 - DNA, 191 bp, Glycine max
cgcgttcgatagaatgactgcaagaggttgttgaaggagcactttaagagactttctggcaaggagttgccgatcaagtctgcacaaattactgcatcaactgatttcactgagctacaagagaagaaaccctggctttcatcttctaaattggttgtgaaacctgacatgttatttggaaagcgtggcaa

SEQ ID NO: 193738 - DNA, 209 bp, Glycine max
ttcggctcgagatttgaagtaacactgaaaagaaaggaaagtgaagttgagagtttaagaagaacaagaaatgggggttggttcccaggatgccatcaagcagttccaggcattcattgaccaagttgaggagcctttgcgaacaacgtttcagtggttaaggaactaaaaggataaaatagcactgcctataagatcatggaatgttc

SEQ ID NO: 193739 - DNA, 196 bp, Glycine max
ggttgaaagtagcaaagatggttcctttcgggcaaaagggtcaaaagataaaggggactatggtggttatgcagaagaatgtcttggatatcaacagcatcaccagtgttggagggatcgttgaccaaggcttaggcttcataggcagtgcagtcgatgcacttacttttgcagccaccaaaatctccatccagtt

SEQ ID NO: 193740 - DNA, 196 bp, Glycine max
ccctttgagagttagaatggctgctgctattgaaatccccacaatagtgtttccaaactcctctgcccaacagaggatgccagtggttggaatgggatctgcccctgacttcacatgcaagatagacacaaaggaggctatcattgaggccgtgaaacagggttacagacacttcgacactgctgctgcttatggc

SEQ ID NO: 193741 - DNA, 192 bp, Glycine max
accactactactcactcactgcagatctcaattgcatcgctgtccatggctaccatcgttagcatcaaggcccgccagatcttcgacagtcgtggcaatccaactgtcgaggtggatttgacttgctccgatggtacttttgccagagctgctgttccaagtggtgcatccactgggatttatgaggccctt

SEQ ID NO: 193742 - DNA, 198 bp, Glycine max
ctcgagccgtgaaatttctgatctacggtcgcagcggttggattggtggtctactgggtaagctctgcgaagagcgcgggatccaatatgagtacggcaccggcagattggagaaccgctcgtcgttggaggcggacatagcggctgtgaagcccagccacgtgttcaacgccgcgggtgtcacgggtagacccaatg

SEQ ID NO: 193743 - DNA, 194 bp, Glycine max
gtggatacctaggcacccagagacgaggaagggcgtagtaagcgacgaaatgctccggggagttgaaaataagcgtagatccggggattcccgatataggtcaacctttcgaactgctgctgaatccacgggcaggcaagagacaacctggtgaactgaaacatcttagtagccagaggaaaagaaagcaaaag

SEQ ID NO: 193744 - DNA, 191 bp, Glycine max
ctcgaggtttatcgtgaggagaatatgaagttgtttgtactctttgttgctgcagtagttttcgtagcatggccatgccatggcgcaggctaccaaaggttccctctccgaatgaaaactggctatggtgagcgttcttcggaggtaaaatgcgcaagttttaggcttgctgtggaagcacacaacatacg

SEQ ID NO: 193745 - DNA, 215 bp, Glycine max
gctcggaattcgacctgatgatggatattacttagctggtaaatctttcagctcctatcaagtgtctcccatctatccagacgaagcaccacaggttaagtgtaacagaaaggtctatcatccacatattgacttggaaggaaatgtttgtctcaacatcttacgagaagattggaaacctgtccttaatataaacactgtcatctatggcttgt

SEQ ID NO: 193746 - DNA, 190 bp, Glycine max
  unsure (1)..(190): unsure at all n locations
tgatcccctggatgtcttgattattatgcaggagccggttcttccaggttgctttcttcgggccaaagcaattggtnctcatgcccatgattgatcagggggagaaagatgataaaattattgctgtctgtgctgatgatcctgagtatagacattacaatgatatcaaagagcttcctccacatcgttt

SEQ ID NO: 193747 - DNA, 197 bp, Glycine max
ctcgagccggccagtagtcatatgcttgtctcaaagattaagccatgcatgtgtaagtatgaactaattcagactgtgaaactgcgaatggctcattaaatcagttatagtttgtttgatggtatctactactcggataaccgtagtaattctagagctaatacgtgcaacaaaccccgacttctggaagggatgca

SEQ ID NO: 193748 - DNA, 195 bp, Glycine max
ggtgcctacaagtatgtttcggagctatggcgcaagaagcagtctgatgttatgagattcttgcagcgggtgatgtgctgggagtatcgccagcaaccttctattgtccgtttgacaaggtctactcgcccagataaggctcgtcgcttgggcttcaaggctaagcagggttacgtgatttaccgtgttcgcgta

SEQ ID NO: 193749 - DNA, 199 bp, Glycine max
ttcataatgggtattttcacatttgaggatgaaaccacctcccctgtggctcctgctaccctttacaaagctctagttacagatgccgacaacgtcatcccaaaggctgtcgaagccttcaggagtgttgaaaaccttgaggggaacggtggccctggaaccatcaagaagatcactttcgttgaggatggcgaaagca

SEQ ID NO: 193750 - DNA, 191 bp, Glycine max
cggagatgatccagcataggccttacacacaaaaagtggatgtatatagctttgggattgttctatgggaactcatcactggtatgcttccatttcagaacatgacagcagtacaggccgcatttgcagttgtcaacagaaatgttcgcccaatcatacctaacgattgcctagcggttctccgtgacatc

SEQ ID NO: 193751 - DNA, 187 bp, Glycine max
tctggaagggcattgtgccagggttacatcgtcaatgtttgtatggaggcttaagaattgggttatatgaacctgttaagactttctatgtggggaaagaccatgttggagatgttccattgtcaaagaaaattcttgctgcatttacaactggtgcttttgcaattgcagtggcaaatccaaccga

SEQ ID NO: 193752 - DNA, 204 bp, Glycine max
agaattcggcacgagcaaagtgctttactcctctgtcaatatctccatcttactatgcttaaagctagtagaaatttcgtaattcatagtctctcaacgccgcatgttgttgaaggtcataatcctcggagacagcggggttggtaaaacatcactgatgaatcagtatgtgaatcgtaaatttagtaatcagtataaggcaac

SEQ ID NO: 193753 - DNA, 200 bp, Glycine max
ctcgagccgccggaaccatggtgagcacctccttcatgaggaagcaacctatgacgaccaacagcctaaagacattccccaacgctctttttggtctgaaaggtggacgaggtggtcgtgtaacttgcatggcctcgtacaaggtgaagctcataaccccagaaggagaagtggagtttgaatgcccagatgatgttttc

SEQ ID NO: 193754 - DNA, 183 bp, Glycine max
gcacttcgttgcttggtgatgtcctttctgttctcttcactcttggtcttgcgagagaaagctatgccagagacgaagatttttggcatgctgtttggccaaacactcccattccaagttcattgcgagatcttctaaagcctggccctgcaagtgttgaaatcgatgatcaccctatgcaaa

SEQ ID NO: 193755 - DNA, 282 bp, Glycine max
taagaacgcgtccagcagccgagccggccgaattcgcaccctctccgatctgaaccgtctctccgccgattccgacagcgcatccgatggccctcaggagtattacaccggcgtggacaagagtggaatgcttgtccaggatccttcaaagggaaatgatgtggatgaaattttcaatcaagctaggcaacttggggctgttgaaaggcctcttgatcagcttcaggagcctccaaggtcaactagctttactggaactggcaggttactctcaggggaaac

SEQ ID NO: 193756 - DNA, 281 bp, Glycine max
agctcctgagagagctcgtcgcggcggttgcagaagaagattgcaagatgaacttcaacatcgcgaatcccaccactggatgccagaagaagctcgagatcgacgacgatctgaaactgcgagcattttgggacaagaggatctcacaggaggtcatcggagatgcactcggtgaggaatttaagggctatgtcttcaaaattaccggaggttgtgacaaacaaggatttccaatgaagcagggagtgctgactcctggtcgtgttagacttttgcttcac

SEQ ID NO: 193757 - DNA, 283 bp, Glycine max
cgtttacctcaatttggcactgactttctgcactcgattgttcaccaccaaattctcatcatcatcatcatcctacttctcctcagcctgttgtatggtctactgggtcgaaccctaagcaagtagagaacacaaattgggggtgttgggtccaagtttacagcaatggggatgtttatgagggtgaatttcaaaaagggaagtgttgggggagtggggtttatcactatcacatgcatgggcggtatgaggcgagatgggttgatggaaagtatgatgggta

SEQ ID NO: 193758 - DNA, 283 bp, Glycine max
cttgctgactacttcaacatcccgggagttttctacgttggaagcattcctagctatcctaaagggggcaataatgcctatctccaaacttctgtcatgggggctaatttgcatgaattcgtggagattgtgttccaaaattcggaggactctgtgcagtcatggcacatcgacggctattccttctttgttgtagggtttggtagcgggcagtggacagcagacagtagagtacactacaatctgagagacacagttgctagatgcaccactcaggtatatc

SEQ ID NO: 193759 - DNA, 281 bp, Glycine max
atgaagcctaccctactattatccctttccttcctgcctatctttactttcctggctctttcagaagatgttgaacaagttgtggacataagtggcaaccccattttcccaggtggcacatattacattatgccatcaacttgtcgcgctgccggtggtggattgaaactaggccggacaggaaactcaaactgcccagttactgttttgcaagattactcagaaatcttccgtggcacaccagtcaaattcagcatacctgggataagccctggaatcat

SEQ ID NO: 193760 - DNA, 285 bp, Glycine max
gccagagatggcattgtttcgctaggaggtccccatatccctcttaagactggaagaagggatggtagaaggagcagagctgatgtggttgagcagttcctcccagaccacaatgagtccatctctgcagttcttgacaagtttggtgccatgggaattgacacccctggcgtcgttgcactgcttggagcacacagtgttggtcgaacccattgtgtgaagttggtgcaccgtttgtacccagagattgatccagctctgaaccctgaccacgtccctcacatt

SEQ ID NO: 193761 - DNA, 283 bp, Glycine max
gggactggtggacgccataggcaacactcctttgattccgatcaacagcctctccgccgccactggttgccaaattctcggcaagtgcgagttcttaaaccccggaggcagcgtcaaagaccgcgttgctgttcaaattattcaagaggctctagaatctggccagctacgtccaggtggaatagtcactgaagggagtgctggaagcatgccattagcattgccactgttgctcctgcctacgggtgcaggacccatgtggttataccagatgatgctgcca

SEQ ID NO: 193762 - DNA, 281 bp, Glycine max
gctcgatgggaattgcgcttcaaggcgtctcgtagggctagtccgcctcacgagggtcaccaacggcacgtgcctttgggctgccgaggcccctactgctggtcggcaaacggacggcgggcgcacgcgtcgcttgtagcccggattctgacttagaggcgttcagtcataatccaacgcacggtagcttagcgccactggcttttcaaccaagcgcgatgaccaattgtgcgaatcaacggttcctctcgtactaggttgaattactattgcgacactgt

SEQ ID NO: 193763 - DNA, 281 bp, Glycine max
attccgtcttatgctgtagacctgaacatgtcagcacttctgtggatgccgagtccttctttggcccgacatctcgccttgtctagaagcactttgcaactttatatttcatgttcatatttgatagttctgaacacgagcttgctatgcttgacttgatacaagtgtttgttgaaacattggacaaatgcttcagaaatgtatgtgagcttgatatcgtgttcaactatagtaagatgcataccatactagatgagatcattctcggaggccaggtgttg

SEQ ID NO: 193764 - DNA, 238 bp, Glycine max
ctcgagccgctcgagccgcttgctttctttcttcaccatgtcacttgctgggaaaatcaccactgaaatcgcggttcatgcaaccgctacaaagtggttcaacctcttcgcaacacaactccatcatgttcaaaacctaactgatagagtgcatggaaccaagctgcatcaaggtgaagactggcatcacaacgagacagtcaagcactggacttataccatagatggtaaggttaca

SEQ ID NO: 193765 - DNA, 283 bp, Glycine max
tgatattgtgaaaactgcaagatttaaggagttggctccttatgatcctgactggtactatgtcagagctgcttccatggcaagacagatctacttgagaggaggacttagtgttggtgcctttcagaggatttatggtgggagcaagaggaatggtagccgccctcctcatttctgcaagagcagtggtgctgttgctcgtcacattcttcaacagttgcagaacatgagcatcattgaactggacaccaagggtggcaggaaaatcacttccagtggccgg

SEQ ID NO: 193766 - DNA, 285 bp, Glycine max
ctctccctgcaggtggtgaaatcgatgaactccctaagcaaattgatgatacacagtacccaaaaacattcttctataaagaagaccttcatgcaggcaaaacagtgaaagtacaattcaccaagcgtccctatggcacaaccttatggtgtatatacatggttaacggatattaaagacacctctaaagaaggatatagttttgaagagatatgcatcaagaaagaagcgtttgagggagaagagaagttttgtgcgaaatccttgggaacagtaattggtttt

SEQ ID NO: 193767 - DNA, 279 bp, Glycine max
ggacaccgtgacaacagttttatagtggctcgggatgctattggggtcacttccttgtacattggatgggggttagatggctctgtttggatttcatgagaacatgaaaggcctgaatgatgattgtgaatactttgagtgttttccacctggtcacttgtactctagcaaagaaagagggttccgcagatggtacaatcctccttggttctctgaggctattccatctgccccttatgatcctcttgttttaagacacgcctttagagaggcagtcat

SEQ ID NO: 193768 - DNA, 279 bp, Glycine max
  unsure (1)..(279): unsure at all n locations
ggcgtccgccttgggcacttcttcaattgcngttctgccttcgcgctacttctcttcttcttcttccaagccttccattcacactctctctctaacttcagggcagaactatgggcggaagttttatggaggaattggaatccatggcataaagggaagggctcagctctcggttaccaatgttgccactgaagttaactctgtagaacaggctcagagtattgttctaaagaaagcccagaggccagtatacccattttctgccatagttggacaaga

SEQ ID NO: 193769 - DNA, 271 bp, Glycine max
tttgactcgcagacatttagctatgttgatggagtatgcagcatggggagagtctttgagaggatatgcagtgctggcaggttcagtgaagatgaggatagatatttctttcagcagctgatctccggtgtccatttctgtcataccatgcacatatgccacagagatttgaagctagaaaatacgcttctagatggaatcctggtcctcggttgaagatttgtgacttcggttattccaagtcatctttgctgcattcgcgaccgaaatc

SEQ ID NO: 193770 - DNA, 235 bp, Glycine max
aactcccttcagcatggctgaacaaaccgagaaagcttttctcgaagcagacaaaagtgtttctcagcacgaagaacactgggaagggagagagacctggaaaaggtgggaaccgcttttggaagtccattgggcttggatttaagactcccagggaagccatcgaaggaacctatattgacaagaagtgccccttcactggcaatgtttccatccgtggccgtatcttggctgg

SEQ ID NO: 193771 - DNA, 270 bp, Glycine max
cttccttgcaaagtgatccttaatcttaaatatatagatccaacttacatgattcgggcaattccaagcaatgcatcagaccatgtctactgtaaacttcttgctcagagtgcagtccatggtgcaatggcagggtatactggatttacagttggactggtcaatggcagacaccttatattccattcattagaatcaatgagaggcagaacaaggttgtgattactgacagaatgtgggcaagactcctttcttcaaccaaccagccta

SEQ ID NO: 193772 - DNA, 271 bp, Glycine max
ggaagagtgagcgtgaaagatgccttcggcgaggctttcagggtcaccaaggctcgacgttgctatggacatgggcaatccatttctcaatctcactgttgatggtttctttaagatcggagctgtcgcagccacgcgatcagctgctgaagatacttatcatattatccgaaacgggaatatctcaagtcatgatttcgagaaaacgttgaagaagatgtgtaaagaaggtgtatattggggaactttagctggtgtttatcttggaatg

SEQ ID NO: 193773 - DNA, 272 bp, Glycine max
ccaacattgggatcatggatgcggcttacttcgtcggcagatctgagattctttcttggatcaactcaactctgcaactcaatctctccaaagtcgaagaggcttgttccggcgccgttcattgtcagcttctcgatgccgctcatccagggatcgtgcctatgcacaaggtcaatttcgacgccaagagcgagtacgagatgattcagaactacaaggtccttcaagatgtcttcaacaaactcaaaatcaccaagcacatcgaggtcagc

SEQ ID NO: 193774 - DNA, 269 bp, Glycine max
gacccatttggtttagaaccaaatgttgcattgacagaacagggccttgtctctgtgtctgaaggttgcacctagctccaatcagttctatatttttgtcgtcaaatgtcgaatgcagccctacatacaattgcgcggaacaggactaatttgactcgttttcggctttgtattattgagcctcggactcctgactatctaacccatgaacccctggattctggttttggggctattgtagagcaatgcacggatcttcaacgcctatc

SEQ ID NO: 193775 - DNA, 272 bp, Glycine max
cttcaatgtcaaaatttgatgcttccaatgaacgtatgagaaacctttatcaccgtagaaatgaagcaaacaccaacaatgttgataaaaaactgtatgagcttgatttaggtcgcatattgcgtggggaagacagccgaactacacttatgataaaaaatattcccaacaagtatacttcaaagatgcttcttgctgcactagacgagcaatgtaagggaacttatgattttctgtatttaccgattgatttcaagaataaatgtaatgtt

SEQ ID NO: 193776 - DNA, 274 bp, Glycine max
tgcttgttttgtttgttgctacagttttggtagcatatgaatgccatggctcagactaccagaagttccctctccaaatgaaaactgggtttggtgggcaatacagcaatgaggtggcatgtgccagttggaggcttggcgtggaagcaaacaacgtagtcaagtggcaaactgttcctgcagcttgcggagagtacatagctgactacgttctaggagaccaatatagatcagattccaaaacagttaaccaacaagcttatttctatgctaa

SEQ ID NO: 193777 - DNA, 272 bp, Glycine max
atcttgctttgcttcctcttctatgtgctttcttgttagctgccactacggaatcaagaaaagatccaggggaatattggaaaatgatcatgaaagatcaggaaatgccagaatgacttcaaggtcttgtttcatttcaatctgaaaataaccctaagactcaagagcagcttggtaaaggttccaaaaaccattgtgaagagtctctagttacaaatacacaagttaacagtgacttcgaacccataccaagtgttaccaaatatgatgat

SEQ ID NO: 193778 - DNA, 288 bp, Glycine max
cgctgtcatttacaaggactgggttttcactgatcaagcattacctaatgatcttgtaaagagaggagttgctgttaaggacccatctgctccccatggagttcgtcttttgattgaggactatccttatgcttctgatgggctagagatatgggatgccatcaagtcctgggtgcaagaatatgtctcattctactacaagtcagatgaggaactccaaaaagaccctgaactccaagcttggtggaaagaacttgtagaggtgggtcatggtgatttgaaagataa

SEQ ID NO: 193779 - DNA, 271 bp, Glycine max
cgaacctgggtgatctatccatgaccaggatgaagcttgggtgaaactaagtggaggtccgaaccgactgatgttgaagaatcagcggatgagttgtggttaggggtgaaatgccactcgaacccagagctagctggttctccccgaaatgcgttgaggcgcagagttgactagacatctaggggtaaagcactgtttcggtgcgggccgcgagagcggtaccaaatcgaagcaaactctggatactagatatgacctcaaaataacaagg

SEQ ID NO: 193780 - DNA, 265 bp, Glycine max
caagtcgttgccatagagctgccactgaaatacggtccattcatttagtcagtgaacaagagagggcggaacctgcgctgatgtggtgtgttccacattcacaatggggtggtttggagaaaccaaggacagaaggacagtgagactggaatgcttcatgagaggaaagcagccccaatatctgggtgaggcctatcagtggactgcacaatggtggttgaccttgaactcatgaagatcgttcagtatcacgactggtgcatta

SEQ ID NO: 193781 - DNA, 281 bp, Glycine max
actcgagccgattcggctcgaggcgattcagagagaaagagaaataccgagaacgaaaaggactcccaattgctctggggcacttggcgatgctcctcttcttcattgcttcttcctcttcctctcacctcgttcgtgcttccgatgacgccgacgacgcgatcttctacgagtcattcgacgaggattttgacggacggtggattgtgtccgacaaggaggattacaacggtgtctggaagcatgctaagagtgatgggcatgatgattatggacttctt

SEQ ID NO: 193782 - DNA, 282 bp, Glycine max
gattttcatcagttgagttgagagaaggaaagggaaaatgggtaaggatctgagcgaggaacaagtgtcttccatgaaggaagccttctctctattcgacactgacggagacggtcggatcgctccgtcggagctggggatcctgatgaggtctctgggaggtaacccgacgcaggcccaactcaaagccatcgtggctgaagagaacctcacggcccccttcgacttcccccgattcctcgatctaatggccaaacacattaaacccgaacccttcgatcg

SEQ ID NO: 193783 - DNA, 280 bp, Glycine max
caccgtcagagattgccgaagatattgcacaggacaaggtgtttacgcaaggactcgacaagaagggtcgacctatagttgttacctttgctgcaaaacattttcaaagcaaaaatggtgccgatggtttcaaacggtatgtggtgtttgttcttgagaagctttgttcaaggatgccaccggggcaagaaaagtttcttgccattgcagacattaaaggatgggcatacgtaaacagtgaccttcgtggataccttaattctctatccattttgcagga

SEQ ID NO: 193784 - DNA, 292 bp, Glycine max
gccgctcgatgggaattgcgcttcaaggcgtctcgtagggctaatccgcctcacgagggtcaccaacggcacgtgcctttggggggccgaggcccctactgctggtcggcaaacggacggcgggcgcacgcgtcgcttctagcccggattctgacttagaggcgttcagtcataatccaacgcacggtagcttacgcgccactggcttttcaaccaagcgcgatgaccaattgtgcgaatcaacggttcctctcgtactaggttgaattactattgcgacactgtcatcagt

SEQ ID NO: 193785 - DNA, 278 bp, Glycine max
atcactcttcaccttcctctgcgcaatttgtgcgcactccgtcgccgtcacctccgcggcatatccttccatccccggcacggaaaccggagagtgctccctccgcggcgtcggcgtcggcgacggtgttctggtccctccgcggcgagaagtgtacgaggaggggcgaatcttcgacatcacccacaggtatgtccccgagatgccggtgtgggactcgacggatggactctggcagcacttcctgtggctcgaaaagagcatgaagaatggctcgc

SEQ ID NO: 193786 - DNA, 255 bp, Glycine max
gagtgctcaaagcaagcctacgctctgtatacattagcatgggataacaccacaggattctgatcctattgtgttggccttcgggatcggagtaatgattaacagggacagcaccggaggcacgacccggccagttaaggacaggagcgcatcgccggcagaagggacgagccgaccggtgcacaccggaggcggaccgatcgacccaacccaaggtccaactacgagccgcacagcttcaatcaccgaccacac

SEQ ID NO: 193787 - DNA, 225 bp, Glycine max
ggaagcagtggcaagattgtgaattctaatgaggggcagagcaagcccaagcgccagatgaaaaccccttttcagcttgaaaccctcgagaaggctatgctgtggataattacccttcggagacgatgagggtggagctgtctgagaaattggggttgtcagatcgacagcttcagatgtggttctgccacaggaggttgaaggacaagaaggacttgccgtcta

SEQ ID NO: 193788 - DNA, 284 bp, Glycine max
ggacaggatctctttgagaaggaacaaaataatctgcttgctgatttgatggatattccaaagaaggcatgcgatcgtcggatcaatgaatttgtgaaacgtgcaagatctgctataattcatgcatatataattagccatcttaagaaggagatgcctgctataatgggcaaagccaaggctcgacaaagacttcttgataatcttgaggaagaatttgcaaaggttcaaagggagtttcatctaccagccggtgattttcccaatgttgaacacttcagaga

SEQ ID NO: 193789 - DNA, 301 bp, Glycine max
ctcggaattcttctctagcttgtataacctctatatatagttctctggcaattaaggtctcatccaaatatgcacatatgggtagccagagttacttcaaggtgttgattatttgccttatagcactaattggatcaacttcagtgcaattgcagcttggtttctatgccaaaagttgtccaaatgctgagcaaataattctgaagtacgttgtttagcatatccacaacgctccatcactagcagctgctctcataagattgcacttccatgattgtattggcaatggttgtgatgtatc

SEQ ID NO: 193790 - DNA, 284 bp, Glycine max
attgggatcatggatgcggcttacttcgtcggcagatctgagattctttcttggatcaactcaactctgcaactcaatctctccaaagtcgaagaggcttgttccggcgccgttcattgtcagcttctcgatgccgctcatccagggatcgtgcctatgcacaaggtcaatttcgacgccaagagcgagtacgagatgattcagaactacaaggtccttcaagatgtcttcaacaaactcaaaatcaccaagcacatcgaggtcagcaagctggtgaaaggaag

SEQ ID NO: 193791 - DNA, 276 bp, Glycine max
gcttgttggtaaaattagtactgaaattagggttcatgcaactgcagcaaagtggttcaacctctttgcaacgcagctccatcatgttcaaaaccttactgatagagtgcatgaaaccaagctgcatcatggtgatgactggcatcacaacgagtcgatcaaacactggaacttgtacaatagatggtaagattacaacatgtctggagagtgctgaatccgttgatgaaccgaacaaaacaatcacctacaagctcttcggaggagatatttgtc

SEQ ID NO: 193792 - DNA, 277 bp, Glycine max
gttttgtttgttgctacagttttggtagcatatgaatgccatggctcagactaccagaagttccctctccaaatgaaaactgggtttggtgggcaatacagcaatgaggtggcatgtgccagttggaggcttggcgcggaagcaaacaacgtagtcaagtggcaaactgttcctgcagcttgcggagagtacatagctgactacgttctaggagaccaatatagatcagattccaaaacagttaaccaacaagcttatttctatgctaaatccctca

SEQ ID NO: 193793 - DNA, 262 bp, Glycine max
cacccattcatacgtggtgttgttactgctgctcttttctcttttcttttctctttagttctctcttcccctttctttttctttttcttcttcttctgagcttgtttaagcttttcttccattaacatattatcatcatgtgtggtattcttgctgttcttggttgttctgatgactctcgagccaaaagggtccgcgtgcttgagctctctcgcagattgaagcaccgtggccctgactggagtgggtccatcaacatggt

SEQ ID NO: 193794 - DNA, 278 bp, Glycine max
cggctcgagcaaacactttcaatgctgcattaacctccgcatttgttactgattttccaggtgtgaatggtcttggtgtatctgtggcacggttagacatagccaaaggtggatcaatcccaatgcacacacaccctgctgccactgaacttctaataatggtggaaggtcaaatcactgctggttttatgaccccaactgcactttataccaagacactgaaacctggagatattatggtttttccacaaggacagttgcattttcaggttaattct

SEQ ID NO: 193795 - DNA, 274 bp, Glycine max
ccgcctcttccgtaggcagcagcaatggcctcaaatcccaaaactttgacctttgaggaggtagctaagcacaacaacaaaaaggattgctggattattatcaatggaaaggtgtatgatatcacaccatttttggatgagcatccaggaggtgatgaagttttgctgacgtcaacagggaaggatgccaccattgattttgaagatgtgggccacagtgattctgctatagaaatgatggaaaaatacttcattgggaaggttgacacttcca

SEQ ID NO: 193796 - DNA, 260 bp, Glycine max
caagggtttaacccttctggctgtgtgaatatgcgtttcaggactgtcactggagtccttctgtttcgggggaagtgcaaaataatggcgctgttatgaacttctacaaggaatcattccctcaggctgaagacatcatcacagaacaagtcaaggcttctctacaagcggcacaagaacactgctttctcctggctcaggaacatcttccatgactgtgctgttcagagttgtgatgcttcactgttgctggactccac

SEQ ID NO: 193797 - DNA, 264 bp, Glycine max
gttttagcgcagatcgtctagatttaaggaagatgggtaaggaaaaggttcacatcagtattgtggttattggccatgttgactctgggaagtccactaccactggccactcgctctacaagcttggaggcattgacaagcgtgttattgatagatttgagaaggaagctgctgagatgaacaagaggtctttcaagtatgcctgggtgcttgataagcttaaggctgagcgtgaaagaggaatcacaattgatattgccttgt

SEQ ID NO: 193798 - DNA, 277 bp, Glycine max
cctagaccccacaaagggtgttggtcgattaagacagcaggacggtggtcatggaagtcgaaatccgctaaggagtgtgtaacaactcacctgccgaatcaactagccccgaaaatggatggcgctaaagcgcgcgacctatacccggccgtcggggcaaggaccaagccccgatgagtaggagggcgcggcggtcgctgcaaaacccagggcgcgagccggcgcggagcggtcgtcggtgcagatcttggtggtagtagcaaatattcaaatgaga

SEQ ID NO: 193799 - DNA, 270 bp, Glycine max
gagaaattgagtttccgagataaccagttttctctttgattcatcaatggcaactgcgaggaccgtgaaggatgtttcgcctcacgatttcgtgaaggcttatgcttcccacctcaagcgttccggcaagatggagcttcctgagtggaccgatattgtaaaaacagcaaaatttaaggagttggctccatatgatcctgactggtactacattagggctgcctcaatggcaagaaagatctatttgagaggtggccttggtgttggtgc

SEQ ID NO: 193800 - DNA, 153 bp, Glycine max
ggagaatatgaagttgtttgtcttctttgttgctgcagtagttttggtagcatggccatgccatggcgcaggctaccaaaggttccctctccgaatgaaaactggctatggtgagcgttcttcggaggtaaaatgcgcaagttttaggcttgt

SEQ ID NO: 193801 - DNA, 271 bp, Glycine max
gcaaatctcaatcgaatctcagaaaaatgagagaaatcatcagcattcacataggtcaggccgggatccaggtcggaaactcctgctgggaactctactgcctcgaacatggcatccagcccgacggcatgatgccttctgactccaccttcggtgtagcccacgacgccttcaacaccttcttcagcgaaaccggatctggcaagcacgtcccccgtgctgtcttcgtcgacctcgaacccaccgtcatcgacgatgtccgctgcggcac

SEQ ID NO: 193802 - DNA, 273 bp, Glycine max
cggctcgaggctacaccaaagtcagttcttgagctcatggatgtgaaggatctcacattagctcatgtcaaaagccatttgcagatgtatcgaactgttaagaccactgacaagcctgctgcttcttcaggcctttcagatggatcaggagaagatgacatgtctccaatgggaagcagtggtggaatgcgtcaattttcagaccaaagaagcctttctgatcgaccactgcaacaagatatcgactactcttcaggcaacaacactctatgg

SEQ ID NO: 193803 - DNA, 267 bp, Glycine max
ctctcttcttcactcttcattctcatttctcttctgaattattgacatggctaagagctcattcaagatggaacacccacttgagaggaggcaggctgaagcatctcgaataagagagaagtatcctgacagaattccagtaattgttgaaagggctgagaagagtgatgttcctgaaattgacaagaaaaagtatcttgtacccgctgatttgactgttggtcagtttgtgtatgtggtgcggaagagaatcaagctgagtcctga

SEQ ID NO: 193804 - DNA, 105 bp, Glycine max
agctagctagctatctaggatggtgagtgttgaagagatccgtcaggcacaacgtgcagaatgccctgccactgtcatggctattggcaccgccactcctcacaa

SEQ ID NO: 193805 - DNA, 280 bp, Glycine max
actgcgcctttgcatttcagcagcacaccacaatggccaccaatgcattcactggcacatctctctccatgcgatctgtcattcctcaaacacaggcatttgcctcaatttctggcccgacatctgcttcaatttccagctttgggagaaagaatgtttcttttagcttgcagccacgcttaattcgccttaaaatttcctgtgctgccgctaaaccagagacagtagagaaggtgtgcaaaatagtaaagaagcagctggctatgcctgaaactgatgt

SEQ ID NO: 193806 - DNA, 282 bp, Glycine max
gtgaggttgtaacaaccaatcctactgttggtagcaacgtcgaagagctcgtctacaagaatatacgatttgaggtctgggatcttggtggacaagaaagactgaggacatcatgggcaacatattaccgaggaactcatgctgttattgcggtgatagacagcagtgatagagccaggatctctatcataaaggatgaactttttaggttgctggggcatgaagatttacaacattctgtcattcttgtctttgctaataaacaagatatcaaggatgcta

SEQ ID NO: 193807 - DNA, 263 bp, Glycine max
cccactttcttctccttttagggtttcctttttgtttctcctttccagatctgcatcttccattttttaggattaatcggtgagattcgtgaatctgagaaatgtcggattcttctcgggaggagaatgtttacatggcgaaattggcggacaggccgagcgttacgaggagatggttgagttcatggagaaggtagcatagactgtggaggttgaggagttgacggtggaggagagaaatcttctctctgtggcttacaaga

SEQ ID NO: 193808 - DNA, 268 bp, Glycine max
gatagccctagaaatgtttcgtgaatctttgtttgctctctttctactttctgccttctcctcctcactcctacctttaaccactgctcaagattacgttctcgacacggacggtcacgcggttgaaaatcacggtacatactatttgttgccagcgaaatcaggaagcggcggtggtggaatagaggtagccgcaactggcaaagaaagttgcgctctcactgtagtgcaatctctgaacgaggactccatggggctaccattgaag

SEQ ID NO: 193809 - DNA, 272 bp, Glycine max
ctcaggtaagccaaaaccatggttaagcataacaatgttatcccaaacggacacttccgtaagcactggcagaactatgtgaagacttggttcaatcagccagcacggaagacaaggagacgattggctcgtcagaagtaagctgtgaagatattccccagacctacggctggacctctcaggcccattgtacatggtcaaactttgaaatacaacatgaaagtgagaggtggaaggggattttctcttgaagaactcaaggcagcagggat

SEQ ID NO: 193810 - DNA, 281 bp, Glycine max
agaatatgaagttgtttgttttctttgttgctgcagtagttttggtagcatggccatgccatggcgcaggctaccaaaggttccctctccgaatgaaaactggctatggtgagcgttcttcggaggtaaaatgcgcaagttttaggcttgctgtggaagcacacaacatccgagcctttaaaaccattcctgaagagtgcgttgaaccaacaaaggactacattaatggcgaacaatttagatcagactctaaaacagttaaccaacaagctttcttttat

SEQ ID NO: 193811 - DNA, 264 bp, Glycine max
ctcgagccgcaaattttcttccccaaatcgtagatctacggtttaactggagtagtgtggtaagatgggatgtggatttagagtgcttcatttagttaggccgtttctatcgtttcttcctgaagttcaaactgctgacaggaaagtgccatttagagagaaggtcatatacactgtgatctctcttttcattttcctggtttgtagtcagctccctctatatgggatacactcaacaacaggtgctgatccattctattggat

SEQ ID NO: 193812 - DNA, 262 bp, Glycine max
aagaccacttgcgttacttgatgggaggccgatcaaacattcagaatgaggttctctgtcgtttcacctttccagaaagacctggtgctttgatgaaatttttggaccccttcagtccacgttggaatatcagtttattccattaccgaggggagggtgaaactggagcaaatgtgctagttggaatacaggtacccaaaagtgagatggatgagttccacgatcgtgccaacaaacttggctatgattataaagtggtgaa

SEQ ID NO: 193813 - DNA, 256 bp, Glycine max
attcttctcaaggtggcagctcaagtccctgacagtggtccttgcgtgacttatattggtaaaggtggctctggtaattttgtgaaaatgatccacaatggcatcgaatatggtgacatgcagctgattgcagaggcctatgatgtgctgaagtcagttggaaagttgtcaaatgaggaactacaaagtgtcttctcagaatggaacaagggagaacttctgagtttcctgattgaaatcactgcagatatatttg

SEQ ID NO: 193814 - DNA, 261 bp, Glycine max
aacagcacaaagcgggttactgtctgttcaagctaccatctctctctctctttcttagtgcctccttgccagaagttaaaatggcccaagaaactttcctattcacatctgaatcagtgaacgaggggcaccctgacaagctctgtgaccagatctccgatgctgtgctcgatgcatgcttggagcaggaccctgacagcaaggttgcctgtgaaacctgcaccaagaccaacatggtgatggttttcggagagatcacaa

SEQ ID NO: 193815 - DNA, 239 bp, Glycine max
ctccggcgacgatctcagattccggccactcctctcgccggcgagcccttactcttccctcctccgtcgagccctctccgattcgaatcgttcccagcctcgcaccaccatgaatcccgaatacgattatctgttcaagcttttgctgattggagattctggtgtaggcaagtcatgtcttctcctgaggtttgctgcatgatcataccttgacagctatatcagtaccattggagtgg

SEQ ID NO: 193816 - DNA, 263 bp, Glycine max
aaaccctaacccgacgccaccattcatccgatccaatgagttcgagaggagccagcgcgctgctatctcgagccagcaggattcgctcgaagcttcaaacggcgctggaagccaccgttttggaggtggacgacgtgtcgtaccagcacgcgggccacgccgccgtgaagggaagttccgacaaagaaacccacttccacgtgaagatcgtatcgcccaagttcgagggccagagcctcgtcaaacgacaccgtctcgtctac

SEQ ID NO: 193817 - DNA, 266 bp, Glycine max
gtttatcgtgaggagaatatgaagttgtttgtcttctttgttgctgcagtagttttggtagcatggccatgccatggcgcaggctaccaaaggttccctctccgaatgaaaactggctatggtgagcgttcttcggaggtaaaatgcgcatgttttaggcttgctgtggaagcacacaacatccgagctattaaaaccactcctgaagagtgcgttgaaccaacaaaggactacattaatggcgaacaatttagatcagactctaa

SEQ ID NO: 193818 - DNA, 268 bp, Glycine max
gagaatcttattgtcaaggagttttgatggttcattgaaggtttgggatctgcgcaaaacaaaagaaccattaaaagtatttgaggatctgccaaatcactatgcacaaacaaatattgccttcagtcctgatgagcgactctttttgactggaacatctgtcgaaagggagagcatgacaggaggtttattgtgcttctttgatagagtaaatcttgagcttgtttcaaaagttggcatatcacccacttgtagtgttgttcagtgt

SEQ ID NO: 193819 - DNA, 263 bp, Glycine max
ctcatcttaagcattgtggcagacctgagtgagcattttttgagtggaaaatatgagctccagtggctcctcaatgagttctggtagtggatcttctagaaggacatttgagtttggaaggacccatgtggtcagacctaaagggaaacaccaggcaactatagtttggctacatggccttggtgataatggctcaagctggtcccaactcttggaaactcttcctcttccaaatattaaatggatttgcccaactgctccta

SEQ ID NO: 193820 - DNA, 261 bp, Glycine max
gcttggtgatgtccctttctgttctcttcactcttggtcttgcgagagaaagccatgccatcgacgaagatttttggcatgctgtttggccaaacactcccattccaagttcattgcgagatcttctaaagcctggccctgcaagtgttgaaatcgatgatcaccctatgcaaattgaagaaacacagtacccgaaaaccttcttctataaagaagaccttcatccaggcaaaacaatgaaagtacaattcagcaagcctc

SEQ ID NO: 193821 - DNA, 258 bp, Glycine max
atgggttcttcttcttctatgtggacggtgtgtgtgattttggcatcactggcctctgcagcactctgtgccaacccacgcaggccagtggatgtacaatttggccgaaactacgtgcccacatgggcctttgatcacatcaaatatttcaatggtggttctgacattcagcttcatcttgacaagtacactggtactggcttccagtccaaagggtcttacttgtttggtcacttcagcatgtacataaagatggtt

SEQ ID NO: 193822 - DNA, 264 bp, Glycine max
ctcagagtagtgaacaacaacagcaacaacaacaacaacgttgcagtgtgttgtattgtttcttagtgcacttttttttggcatcaaagaggttaaatccatggattctgattatggtattcccagggaactctcagatcttcaaaagattcggtcgttgtaccagccagagcttcctccttgtctccagggaaccactgtgagggttgaatttggtgatgcaaccaccactgctgaccccactgatgcactcaccattagcag

SEQ ID NO: 193823 - DNA, 266 bp, Glycine max
gaacttgattacttgaacattccctatgacagatgaggtggttcttctggatttctggccaagtccatttgggatgagggtcaggattgcacttgctgaaaagggtatcgaatatgagtacaaagaagaggacttgaggaacaagagtcctcttctcttacaaatgaacccggttcacaagaagattccggttctcatccacaatggcaaacccatttccgaatccctcattgctgttcagtacattgaggaggtttggaatgaca

SEQ ID NO: 193824 - DNA, 268 bp, Glycine max
ttggctccaccagaagttctaattgatttagctgcacagcaacaacatgaggccgagcttcttgcagctgctagtcagccccttcctgacgatgatgatgaatcttttgagtaaaattatgccttttgagtcgtgctactgcttatgctacagtatgtattttggggggtgtaatgttgacagttttggatgccggatttgagtgtcagaaatttaatcattttgctttaatcttaaaaaaatctcccaatagtttgacatatccttg

SEQ ID NO: 193825 - DNA, 272 bp, Glycine max
cagagactccataacccgaaaatgcctttcaagaggtacgttgagattggaagggttgctcagatcaactatggcaaagagtatgggaggctcgtggttattgtcgatgtcattgaccagaatagggctcttgttgatgctcctgacatggtgaggtcccaagtgaacttcaagaggctatcactcactgacatcaagatcgatattaagaggatccccaagaagaaggatctcattcaagccatggaggctgctgatgttaagaacagatg

SEQ ID NO: 193826 - DNA, 259 bp, Glycine max
acccccacgaccgcatcatggggctggatctcccctccggcggtcacctcactcaggggtactacacctccggcggcaagaagctctccgccacctccatttacttcgagaacctcccttacaaagtaaactccaccaccggctacatccactacgaccgcttggaggaaaaagccctagacttcaggcccaaattgataatctgcggtggcagcgcataccctgcggattgggactagaaacgcttcagggaaattgc

SEQ ID NO: 193827 - DNA, 261 bp, Glycine max
ggcgacgtgagccgttcgctgcccgcgacgttgtgagaagtccactgaaccttatcatttagtggaaggagagagaaagagaggacagaggcgaaggagagataaagcgaaagaggaagaggagaggaggaagaaggagaatctgaagaagaagaagaagaaggagaaggaggagagactgaagaagggagcggtgacgaattcttgggggaagtatggtgttattagagaaactgatatgtggaccaaacgaccagagtt

SEQ ID NO: 193828 - DNA, 261 bp, Glycine max
  unsure (1)..(261): unsure at all n locations
ggttgctttagtctccgcaattttctgcttgcttcttcacttttttttttcctcngtctcctcctcaancttcattgtcctgttctttcccttggngacaaaccaagactaacacacacagaacatagcttgtgttggtgaggtgagaagataaagaaagaatggcatttgcaggaacaacacagaagtgtatggcctgtgacaaaaccgtttatctggttgataagttgaccgcggataaccgagttttccacaaagctt

SEQ ID NO: 193829 - DNA, 259 bp, Glycine max
ctggattgacgctaaaagtaggcatgactatatcaacttttgtgatgtagtgtcgtttgataccacctatgttagaaacaaatataagatgcctcttgcattttttgttggagttaactcgcactaccaatttacattacttggatgtgccctgatatcagacgaaagtgctgccactttttcttggctattttggacgtggctgaaaggagttggtggtcaagttccaaaagtgatcagtacgctggtcagagaatca

SEQ ID NO: 193830 - DNA, 263 bp, Glycine max
caaaaaaacatcaaaattaagagaagcaagcatgggggaatccaatgtcatgaccaagactgaggatggtgcttgtctgtctgcaatgctgcttagtactaatctagtgtaccctgcagtactgaatgctgctattgagctcaacttgtttgagatcattgctaaggcaacaccagctggttcttttatgtcatcccatgaaattgcttctaagctcccaacacaacaccctgacctgcctaataggcttgaccgcatgctgc

SEQ ID NO: 193831 - DNA, 282 bp, Glycine max
tcgaaattcgctcgaggcactgcaacaatggtgccgcaacccattttgcatctaacccttttgtcattaataatctctctgaccactctttccttggtcgatgccgccgatcccacatttggcttcacccctcttggattatctagtagctcaaacttgcaaatccaaaagccttacgacgttgcagtcaacgagcgctacagtctttcaaatggagtgcacagattttgggtatactccacggacaagcctcatatgcaaggcagcaatacgaagccacga

SEQ ID NO: 193832 - DNA, 259 bp, Glycine max
ccaacctctattttacacgagtctctcatactatgatactatagctacacttcccactgtgtctcagggtctgtgacacacacagactcacttcaagttcccagcttttgccatttttcccactgtttattgagaagaactgcagaacatggcacagattttggctccctctacgcaatggcagatgagaatctcaaaatcctctcccaatgcaactcccattacatcaaacatgtggagttctttattgtggaaacaa

SEQ ID NO: 193833 - DNA, 267 bp, Glycine max
ctgaacctcctccagctaatgatccagcaaaaccacctgcaaaggcacaagtggtgggttggccaccagttaggtcatttagaaagaacatagttcaaaggaacagcaatgaagaagaggcagagaagagcacgaagaatgctttcgtgaaggtgagcatggatggtgcaccgtatctacgaaaggtggacataaagttgtacaagagctaccaggagctgtcagatgcgctggctaagatgttcagttccttcacgattgaaaagt

SEQ ID NO: 193834 - DNA, 269 bp, Glycine max
gtcctcacctgatcctctttccactgccatttccatccgtcaggcgtgcattgagtatggtttcttttaccttgtgaaccatggcgtggagaatgacttggtcaaagcctttgatgagagtaagaggttcttctcacttccaccaggagagaaaatgaagttggcccgcaaggaatttagaggttatactcctcaggatcctactttaggcctccatggtgattcaaaagagagctattatattggtcctatggcggattcagcaagtg

SEQ ID NO: 193835 - DNA, 251 bp, Glycine max
tgaaaatgaaggtccttgttttcttcgttgctacaattttggtagcatggcaatgccatgcgtacgatatgttccctctccgaatgaacactggctatggtgcccgtactccggaggtgaaatgcgcaagttggacgcttgctgtggaagcacacaacatctacggctttgagacctctcctgaagagtgcgttgaagcaacaaaggaatacatccatggcgaacaatatagatcagactccaaaacagtt

SEQ ID NO: 193836 - DNA, 259 bp, Glycine max
ctctccaccctcccataattctaaaccccaaaaaaacctcttttggccataggctagccctcactatggcaccaccatttcccttcctaatgacccttctacttgctccctttctattctcctccattgcttcctcttactcattcaaagatatccaatcatggtgcaaccaaaccccttaccctcagccatgtgagtactacttgaccaaccatgccttcaacaaacccatcaaaagcaaatccgatttcctcaaagt

SEQ ID NO: 193837 - DNA, 257 bp, Glycine max
tggggggtcttcaggttctcaagggtggtaacaagtgggtcactgttcagcctctgtcagatgctatccttgttctattggctgaccaaactgagattataaccaatggaaagtacaggagctgtgagcatagggcaatcactaatcctgatagagcaaggctctctgtggcaacatttcatgaccctgctaagacagtcaagatttcccctgcttctgaactgataaacgactcatcactagctaactaccgtgat

SEQ ID NO: 193838 - DNA, 257 bp, Glycine max
tattctcaccatctcagtcatgggcctgctatcttgttttaggtctaccgtcctgagaaaatgttccaaaggaagctctggcatgtcaagattcctgtatacgaacaattttcaacgaaacttgatttcgtctggtggcaatgaatcgtattatgggtattttaacaggagatcatacacttcactttatatgggaactggaactgtgggtgggtttacaagtgctagaatcacggtgccaaatgtaggatgtgaag

SEQ ID NO: 193839 - DNA, 260 bp, Glycine max
cgaacatggaccgcgaaccatccactcaacccatttcaaaacttgagtttgaatttgagagaaggaaattgaccaaagatgatgtaagagagttgatttatcgagagattttggagtatcatccccaaatgctccaggaatatcttcgtggtggagatcaaactagcttcatgtatccaagtggggtcgatcggttcaagcgacagtttgcacatcttgaggagcattatggccaaggtgaacgaagcactccaccattg

SEQ ID NO: 193840 - DNA, 267 bp, Glycine max
caccattgttgttcctttcaagatcacttgcacagaacaaaacaagggtgaagtctataaactttctcctgcttctgtctctactagcctttgttccctcctgtcactgcaaaaagaaaataggaggttacctctaccctcaattttacgacggttcatgccccagagctcaagagattgtccaatccatcgttgccaaggctgtggcaaaagaaccccgcatggctgcttcgttgctcagactacatttccatgattgttttgtca

SEQ ID NO: 193841 - DNA, 256 bp, Glycine max
taaggggtgccctgagatcacattgaacaatggtgaaggctgtggccgttcttggcagcagtgagggtgtcactggaactattcacttcgttcaggagggaagtggtccaaccaccgtaactggatctcttgctggtcttaagcctggtctccatggtttccatgtccatgccttgggggacactaccaatggttgcctctcaactggatcacatttcaatcctaataacaaggagcatggtgcccctgaggatga

SEQ ID NO: 193842 - DNA, 256 bp, Glycine max
cgaagagaagagaaaaattaagatggaggggaaggagcaggatgtgtcgctgggagcgaacaagttcccggagagacagccgattgggacggcggcgcagagccaagacgacggcaaggactaccaggagccggcgccggcgccactggttgacccgacggagtttacgtcatggtccttttacagagcagggatagcagagtttgtggccacttttctgtttctatacatcactgtcttaaccgtcatgggagtc

SEQ ID NO: 193843 - DNA, 268 bp, Glycine max
gcataccttaggtcttccgaattcgaagttaatttgcaagatggctaaggaaaaggctcagatcaacattgtggtggttggtcatgtggaccctgaggaggcaaccaccattaacgagctgaagaagcctgttgtggagaaagaagctccagggcatgccatatgagggcatgcacgtacggcctcggaggggaaccagaaaattatgttaacaaaataatctggaaccctaatgtatcagtgtcatcatcagtgtgtagtttaagct

SEQ ID NO: 193844 - DNA, 279 bp, Glycine max
gcatgcagccactgcttgagttcctcaggcttcacagttataagggaaagaccatgatgttgaatgacaaagttcaaagcctggattctctccaacatgttttgagaaaagcagaagagtatctgatttcagttgctcctgaaacaccctactcggaattcgagaacagattccgggagattggtctggagagggggtggggtgacactgccgagcgtgtcctcgagatgatccagcttctcctggaccttcttgaggcacctgacccttgcaccctcg

SEQ ID NO: 193845 - DNA, 279 bp, Glycine max
  unsure (1)..(279): unsure at all n locations
cctcgagccgaatcggctcgagcatttccttcacttccatttcatgacgaaaaaacnctacttgattcttcgaaaaggaaggaacttgggacttgtttctctcagagatggcgttgcctaaggttgatttcgaggttggagctgatggggttgctgtcatcactatgtgcaacccacccgtcaatgctttggccattccaattatcatggggttgaagaacagatttgatgaggcagctaggaggaatgatgtgaaagctatagttttgactggcaaag

SEQ ID NO: 193846 - DNA, 271 bp, Glycine max
caactccactcttagctgccattggtttttcttcttccatttctcttcctttctaagcttttttcgattacccatttggagattctgtcctaatggctcttgctccttccaaagtttcctccttttccgggttttctcccaaacccagtgttggggatgctctgaaaaacccaacttgctctgtttctctgagctttgcgaatgtgaaacttggaagcagaaaccttagggtttgtgcctcaactgtgcctctctcaggggtgattttcga

SEQ ID NO: 193847 - DNA, 273 bp, Glycine max
tgattattgtgttgggctaagcagacaattgaatggatcaattataccatcagaacgtccagatcatatgatgtttgaggtatggaacccactaggaatagttggtgtaatcactgctttcaactttccatgcgctgttctaggatggaatgcttgcattgctttagtctgtggtaactgtgttgtgtggaagggtgctccaacaactcctttgataactattgctgtgacaaagctagtagctgaagttcttgagaggaacaaattacctgg

SEQ ID NO: 193848 - DNA, 273 bp, Glycine max
actaattattgtgcttattattattgttgagaaagaaaagaatggcaaagttaataaaattctttgagttgaacacaggggccaagattccttctgttgggttaggcacttggcaagctgagcctggtgttgtagccaaagctgtcaccacagccattctggttggatacaggcatattgattgtgctcaagcgtataacaatcaagcagagattggttctgctcttaagaagctttttgatgatggtgtggtgaagcgtgaggacttatgga

SEQ ID NO: 193849 - DNA, 269 bp, Glycine max
attctcacctttagtcttgttcttagagatggcttgtgaaaccaagtcatggttggttatgtttcttgttttcttggttgctaattgcatgcaacattgtgtccacggggtgtctcaagtgccttgcctttttatctttggggactctatgtctgatagtggaaacaacaatgaacttccaaccacttcaaaatctaatttcagaccatatgggatcgactttccattaggaccaactgggagatataccaatggccgaacagaaattg

SEQ ID NO: 193850 - DNA, 274 bp, Glycine max
ctaggaggtccccatatccctcttaagactggaagaagggatggtagaaggagcagagctgatgtggttgagcagttcctcccagaccacaatgagtccatttctgcagttcttgacaagtttggtgccatgggaattgacacccctggcgtcgttgcactgcttggagcacacagtgttggtcgaacccattgtgtgaagttggtgcaccgtttgtacccagagattgatccagctctgaaccctgaccacgtccctcacattctgaagaagt

SEQ ID NO: 193851 - DNA, 204 bp, Glycine max
cgagcagccactagtcctcaagtaccacaacggccagctcctgaagggccgcatcaccgtcaatctcatctggtacggcaccttcaccccgatccaacggtccataatcgtggacttcataaactcgttaagcagcgcgccaaacgcgcttctcccctcgaccgccacgtggtggaaaaccacggaggagtacaaggtgggagg

SEQ ID NO: 193852 - DNA, 276 bp, Glycine max
gggagtctgggtcaccatttaaacctgctgcagctttcaaaggtgcatatgaaaatttgggcattgatgctagtggtggaaagtcagtaacgatgcgaaagatatggcaccttgttcagatgctgatgggtgaggaatcagccgtgcaacgtgtttcaaaaaggatgtcattgattattggtgcaagacgccaccttgaatggggacatgagaaatacatcatggataccatacaaagtcatcctgcacaagctgctcttggtggtggtgttggga

SEQ ID NO: 193853 - DNA, 274 bp, Glycine max
ctggatttcgttacatcaatgacttggttttaggaatcttggagcttcttaaatatcatgctcgtgttttgtatattgatatagatgtgcaccatggtgatggtgtagaagaagccttctacttcactgacagggtgatgactgtcagttttcacaagtacggagatttgttcttcccatgtactggcgatgctaaggagaaagagaaggaaagttttatgccataaatgtcccattgaaggatggaatagatgacagtagcttcactcgactt

SEQ ID NO: 193854 - DNA, 272 bp, Glycine max
aagagaacgggttttgaagaagaagcagttcaattgatcaactcagatttcagggacctaagtctagctgctaatagactcgcccatcatgccatcaaacttggtggcattggctttggagcctcttttttcggattgtttgctgccattgctgctatttatctgttgattttggatcgtacaaactggaaaacaaatattctcacagcactactcattccatacattttcttcagcttgccttcattaattctcgacgtcttcaggggaga

SEQ ID NO: 193855 - DNA, 272 bp, Glycine max
tcggtgttcacttgatccttcataagtcgtcatcatcatcatcatcatcaccgttgattgaagaagatgccgatcagaaacatcgccatcggaaggcctgaagaggctactcaccccgacacgttgaaggcggggttggctgagttcatctccaccttgatcttcgtgttcgccggttcaggttccggcatcgcctacaacaagctcaccgacaacggcgccgccactcccgccggcctcatctccgcttccatcgcccatgctttcgccct

SEQ ID NO: 193856 - DNA, 272 bp, Glycine max
cataactccacttcaccacccttggtgcaaaacacttgattcccctgcgtttcaaccttgcaaccaaacccttccttcttcccattcaaaattttccttttattgtctccgagacaaacccacgcgttctcaccgccgctactcaaattccgcaagtccacgtaggatgcctcccccgaattcaccccaaccttaaaaataaccgacaacgaatcacaaaccgccacgtcagcaaaacaatctaccttctcagaaacctcccaaacaacgtt

SEQ ID NO: 193857 - DNA, 268 bp, Glycine max
gctaagtatcattcaagtgggaaaagctcttccatgactgctatagccttcctgtttatccttctaatcacttatacaggcacaacagatgcacaatccggggtatgttatggaagacttggcaacaacttaccaacccctcaagaagttgtggccctctacaatcaagccaacattcgcaggatgcgaatctacggtccaagcccagaagtcctcgaagcactaagaggttccaacattgagcttttgctagacattccaaatgaca

SEQ ID NO: 193858 - DNA, 262 bp, Glycine max
cttggatttcttctgggacttttcttaatggtcactcatgtcaaggggtatggttttggaggttggaccaatgcacatgccaccttctatggaggtggtgatgcttctgggacaatgggtggggcttgtggttatggaaatctgtatagccaaggttatggaactgatacaacagcactgagcactgctctgttcaacaatggcttgagctgtggtgcatgctatcaaattaaatgtgtgaatgatccacagtggtgccttc

SEQ ID NO: 193859 - DNA, 267 bp, Glycine max
aagcccctttgatagaacagtgatacatacatttgccttttctttcttactcatcacgttcgtttcgtggatccttactcatcacaagtgtgagaaaaattatgagttccaaaggtgttggtgaggattgcctgggatgggcagcaagagatgcatccggagttctatcaccttacaaattcagtcgcaggactcttgggaatgaagatgttcatattaaaattacgcactgtggtgtttgcttcgctgatgtagtttggacaagga

SEQ ID NO: 193860 - DNA, 268 bp, Glycine max
ggatatctttggctaaaagattgaatattgtgttattccttctagtagtcaaggggaacaatgaatgcactagcagccaccaacaggaacttttagttggcctctaggcttctgggattggattcaaagcttgagaaaagtttactgattccattcagggaaatcaaggttgaatgtaccatacctaaagatgatggcaccttgcaatcttatgtagggttcagggttcaacatgataatgccagaggccccatgaaaggaggaatca

SEQ ID NO: 193861 - DNA, 283 bp, Glycine max
  unsure (1)..(283): unsure at all n locations
tcggctcgangcagtttccggtgcatctcatcgtcttccaaaatgaacgacgcagatgtctcgaagcaaatccagcagatggtgcgtttcatccgccaggaagctgaggagaaagccaacgagatctctgtatctgccgaagaggaattcaatatcgagaagctgcagttggttgaagccgaaaagaagaagatcaggcaagaatacgaacgcaaagagcgccaagtcgaaattcgcaagaagattgagtactcaatgcagctgaatgcttctcggattaaag

SEQ ID NO: 193862 - DNA, 273 bp, Glycine max
aaagcgggttactgtctgttcaagctaccatctctctctctctttcttagtgcctccttgccagaagttaaaatggcccaagaaactttcctattcacatctgaatcagtgaacgaggggcaccctgacaagctctgtgaccagatctccgatgctgtgctcgatgcatgcttggagcaggaccctgacagcaaggttgcctgtgaaacctgcaccaagaccaacatggtgatggttttcggagagatcacaaccaaggccaacgtggactat

SEQ ID NO: 193863 - DNA, 270 bp, Glycine max
gtgagcaacttccaacaccatagtgaaatggcttccaaggctgcacttctcttgtgtttcaatgttctcttcttcaccgtggttagctccacatatgtgccatgcaacccaccccccaaaactccaaaacacccacctgtcccaaagccaccttccccaaagcaagcaagttgccccaaagacactattaagtttggtgtgtgtgctgatgtgttaggtttgatcaacgtgcaacttgggaagccaccaaagaccccatgctgcaacctc

SEQ ID NO: 193864 - DNA, 270 bp, Glycine max
ctctgttattcaaggatccgtcgaagatttcggcgtatcgagatagaaggttccccgggacgcaagacgagtttgagcacgcgcttctgacctcaaccaccgtttacgtggggaacatgtcgttttacacgacggaggagcaagtttacgagctcttctcgcgtgctggggaaatcaaaaagatcatcatgggcttggacaagaacacaaaaacgccttgcggcttctgtttcgttttatattattctcgtgaagatactgaggatgttt

SEQ ID NO: 193865 - DNA, 261 bp, Glycine max
gcatgcagtcatatcaaggttgatgactgatgtgccttttggtgttctactctctggaggtttggactcttctttggttgcatccatcacttctcgttacttggccaacacaaaggctgccccgcagtggggatcaaagttacattcattctgtgtaggccttgatggctcaccagatttgaaggctgcaaaagaggttgctgactatctaggcactgtccaccatgagtttacctccactgttcaggatggaatagatgc

SEQ ID NO: 193866 - DNA, 265 bp, Glycine max
tttcattgcaacgagggatccgctgaagatgggttcttctttgtggactttgtgtctaattttggcttcactagcctcttctgcattctgtgcctttccacggaggccagtggacgttccattcggcagaaactacgttcccacttgggcttttgatcacatcagatacttcaatggaggttcttagattcaacttcatcttgacaagtacactggtactggcttccagtccaaagggtcatacttgtttggtcacttcagcatg

SEQ ID NO: 193867 - DNA, 265 bp, Glycine max
ctcggctatcattgtttggcttaagaacacaaacaggagaactgttgatgttattgcatccagactgtatttttactattcgtatagctatgagcttacaggagatcttgctgaaattcggggcaacctccttgcattgcaccgatttgcgactctccgccatgatgagctggcacaggaaacacttcttaatttgttacttcgaaactaccttcactacaacctatatcatcaggctgagaagttgaggtccaaggctcctcga

SEQ ID NO: 193868 - DNA, 269 bp, Glycine max
tctctcagcttttcatcttccgatcttaatatacattgactaaaagaaaaataaagggatcaaatttaagttccttgatctaataagatccttgcttttaattgtactactcatgaagagacttggcagttcggatacactgggtgctctcatgacgatttgtccaccaacagacgaacatagtccgaggaacaaccacgtgtatgggaaggagttccagtccatgatggaaggactcgacgaagaagggtgcgtggaagaagcagggc

SEQ ID NO: 193869 - DNA, 195 bp, Glycine max
cagtgtacaagctacaccactgagaaaccaccagtttacaagcccccagttgagaagcctcctgtttacaaacctccagttgaaaaccccccagtttataagcctccagtagacaagccaccagtgtacaagcccccagttgagaaacccccagtgtacaagcccccagttgagaaaccaccagtgtacaagccc

SEQ ID NO: 193870 - DNA, 265 bp, Glycine max
ggatccctttcgatccgacgacttcgttcgttccttctccttccaagttctaaccatttcccactgtcttcgattttagggcattaaatctgccatggcagcagcacccgctagagctcgtgccgattacgattacctcatcaagcttcttctcctcggcgacacggtgtggggaagagttgtctacttttgaggttttctgatggctcattcacaaccagttttatcaccaccattggtatcgattttaagataagaaccattg

SEQ ID NO: 193871 - DNA, 263 bp, Glycine max
cttcttcttccgttttcctgaatcggtgtgaacaatggcgacgtacgctgcgatgaaacccaccaagccagggttggaggagtcccaggaacagatccataagataaggatcaccctttcttccaagcacgtcaaaaacctcgagaaggtttgtgcggacttggttcgtggtgcaaaggacaagcgcctcagggttaagggacctgttaggatgcccactaaggttcttcacatcactaccaggaagtccccctgtggtgaag

SEQ ID NO: 193872 - DNA, 169 bp, Glycine max
cgaaggcagatttcaagatgaagttcaacattgcgaatcccaccaccggttgtcagaagaagctggagatcgatgatgacctgaagctgcgagcattttgggacaagaggatctcacaagaggttgttggtgatgctctgggtgaggaattcaaaggttatgtcttaaa

SEQ ID NO: 193873 - DNA, 265 bp, Glycine max
actcgagccgctcgagccgagccgattcggctcgaggatcaattaatctccaatggccgatcagctcaccgaaccacagatctctgagttcaaggaagcctttagactcttcgacaaggacggcgatggttgtattaccaccaaggaacttgggactgtgatgcggtcgcttgggcagaacccaactgaggctgagctgcaggacatgataaatgaggttgatgctgatgggaatggtaccattgatttcccagaattcctcaat

SEQ ID NO: 193874 - DNA, 259 bp, Glycine max
aagagaactcctatcttgttccctctcttctttcttctttgtgccttcacctcatatctaccttcagccaccgctgatgatgatcatgtgtacgacactgacggcgataagcttcaatacggtgtcaattatttcgtgttgccagtgataagaggaaatggcggtggaatacaagtagcaaaagcaggaaacgaaacttgccctctgactgtggtgcaatctggcaacgagctctctgaggggttaccgataaagattg

SEQ ID NO: 193875 - DNA, 256 bp, Glycine max
aagtgagccagaaaatgatgaagccatcgatgctcagatctcttcactctgccgccacccgcggcgcctcccacctctcccgccgtggctacgcctccgagccggtgccggagcgcaaggtggccgttctaggtgccgccggcgggatcgggcaacccctctcccttctcatgaagctcaaccccctcgtttccagcctctccctctaccatatcgcccgaactcccggtgtcgccgccgatgtcagccacacaac

SEQ ID NO: 193876 - DNA, 261 bp, Glycine max
cacaactaatttttgatttgccttgtttatttatcttcttcctcccttgtttgtttgcatctttgtttctttggcttgacaagaagaagatgatgatgatggacaagggggtgttggatgatgtgataagaaggcttctggaagggaaaggagggaaacaggtgcagctctctgagtccgagatccgtcaactctgcgtcaacgccagacaaatcttcctctctcagccaattcttctcgaccttcgtgctcccatccgcg

SEQ ID NO: 193877 - DNA, 261 bp, Glycine max
gccgtagcaaaagctcgtggaattgctagcaatggcgaggatcaaggtttacgagctgaggcagaagacgaaggctgatctgctgaatcaactgaaggacctgaaggcggacttgccttgcttcgtgttgctaaggtcaccggtggtgcccctaacaagctttccaagataaaggtggtgaggttgaacattgcccaggttttgacggtgatttctcagaagcagaaggctgcgttgagggatgcctacaagaataagaag

SEQ ID NO: 193878 - DNA, 170 bp, Glycine max
agggttaagcggtgagatttgcgaatctgagaaatggcggattcttctcgggaggagaacgtttacatggcgaaattggcggagcaggccgagcgttacgaggagatggttgagttcatggagaaggttgcaaagaccgtggaggttgaggagttgacggtggaggagag

SEQ ID NO: 193879 - DNA, 267 bp, Glycine max
ctcttgtggaaatctcacgtgagggtacaagtaattagattggtttgtagtctccttttggtgacactgcagagctcagaggtagctgagagcagaaaagccaaaactgctagaacttcctttgagtacaaagctataaattgcagggctcatagtgcttcattgattgattttggtggtgttggagatggaaatacatcaaatacaaaggcttttcagtctgcaatcagtcatctgagtcagtatgcttttaaaggaggggctcag

SEQ ID NO: 193880 - DNA, 260 bp, Glycine max
ctcgagccgggaaaatttggatattaataggtatgtgctgaaaaatggtactactagtgagaacatcataaaacacttgaacaaggaacaagatgctgatcaaagcaacttccgtgattcagccacctctgcagagttggaagttcaggagaagatgcccttgcttgagtggtttgccaatgagtacaaaaaatttggatgctccttggaatttgtgaccaacaaatctcaagaggggtcacaattctgcagagggtttg

SEQ ID NO: 193881 - DNA, 271 bp, Glycine max
gctcgagaccgtaaccactgctccttacggatcatggaagtcccccatcaccagcgacgatgtctccggcgccaccaaggacctcggaggcaccaccatcgatggtcgtggccgcctcatttggctcgaattccgtccaacagaatcaccccggggagttcttgttcttgagccgtctcaacaatggaggtgaagctgtggatattactcctaacgagtttggagtgagaacattggctcaggaatatggaggtggtgctttcactgtttc

SEQ ID NO: 193882 - DNA, 263 bp, Glycine max
gctctttgaagaaagaagggtctttgcttgattttggagatgtctctgctctcagatctcatcaaccttaacctctccgataccaccgagaaggtgatcgcagagtacatatggatcggtggatcaggaatggacctgaggagcaaagcaaggactctcccaggaccagttagcgacccttcagagcttcccaagtggaactatgatggttccagcacaggtcaagctcctggtgaagacagtgaagtgattttatacccaca

SEQ ID NO: 193883 - DNA, 215 bp, Glycine max
gaaagagaacaatggcaaagttaataaaattgctttgagttcaacacaggggccaagattccttctgttgcgttaggcacttggccagctgagcctggtgttgtacccaaagctgtcaccacagccattctggctggataccgtgctattgatcgtgctcaagcgtatcacaatcaagcagagattggttctgctcttaagaagctttttgatga

SEQ ID NO: 193884 - DNA, 260 bp, Glycine max
ggaggctgaagatagcagatggaggaaatgatccatacatattcagcacaaacaatttcgctgggaggcagacatgggagtttgatcctgaagcaggcagtccagacgaacgggcccaggttgaagcagctcgtcagcatttctaccacaaccgcttcaaggtcaagccctgcgctgacctcctttggcgttttcaggttctcagagaaaataacttcaaacaaacaattcctcgtgtgactatagaagatggagaggaa

SEQ ID NO: 193885 - DNA, 259 bp, Glycine max
ggaatcttgagaaatggcaggggacagcaagagcaagattctgttcatcggagggactggttacatcggaaaattcatcgtggaagccagcgccaaagctggccacccaactttccttttggtgagggagtccactctctccaaccccgcaaaatcacccctcatcgacaatttcaaaggcctcggtgtcaatcttgttttaggagatctatacgatcaccaaagtttggtgagtgctataaagcaggtcgatgtggta

SEQ ID NO: 193886 - DNA, 265 bp, Glycine max
cctcgagccgaatcggctcgaggctgttcctcaggagtttcaccccaacgacgccagttaaacttacgagcaactgcaggtttaaggcaattggaaggggatgcttctgataggatattgcaggcggtcagtgacatgctcaagaacagaagcacactgaacgttggggccgatgcagtttcagtgttgagtggaaaccaagaaggagcttatcaatgggtaacaattaactatctactgggaaacttgggaaagcattattcag

SEQ ID NO: 193887 - DNA, 264 bp, Glycine max
gtgaactctacatagatgatggcagcagctttaattttctgcaagggggctatatccatagacgatttattttctcgaatgggaaacttacttctatagacctggcacctgcttccagtagcaaggggcgttatccatcagatgctttcattgagaggattatcctgctgggacatgctcctagctcaaaaaatgcactcattgagccatcaaatcaaaaggttgatattgaacttggccccctttgggttctaagggctcgtg

SEQ ID NO: 193888 - DNA, 264 bp, Glycine max
cctcgagccgattcggctgagaaaaactttctcaaagattctgtaaccaacatcgacatcactgttaactatggcaacactcgctcccgggattttgttgaagctcctcaacggattgaacaccggcgtgaaacccacgaacgagcaccgcagctcgctcctgcaagtgaccgacatcgtccccgccgatctcgacgaaaaaaacctaatcccaaaacaagggtttttcataaaggtctccgattcctctcactctatctacgc

SEQ ID NO: 193889 - DNA, 267 bp, Glycine max
aatctcggagttaccatagttaaagaaatacgcaagcaaggtgttacaagaacttccttcagcggcaaatggaactggtcataaccatacatcaggagcttctatcagtggcagtgcaccggctgctaaggcacaggttgttggttggcctcctataagatcatttaggaaaaactcattggccaccacttcaaagaataatgatgaagtagatggaaaaccgggtgcagcagcactctttgtgaaggtcagcatggatggtgctcc

SEQ ID NO: 193890 - DNA, 252 bp, Glycine max
gtttggctccttggcctgctcgattgactactccacctcctcgtctggcagaaattcactattctactgaaatgtttgataaggacatggaagtttggaaacaacgagttcataattactggagcaagctagccagtaagattaagcctgacacaattcgcaacgtgatggatatgaaggcgaatttgggttcatttgcagcagctttgaaggacaaagatgtttgggttatgaatgtggtgccagaaaatg

SEQ ID NO: 193891 - DNA, 250 bp, Glycine max
actctctctgctcttcttctacctttcaagtttttaaagtattaagatggcagagacattcctatttacctcagagtcagtgaacgagggacaccctgacaagctctgcgaccaaatctccgatgctgtcctcgacgcttgccttgaacaggacccagacagcaaggttgcctgcgaaacatgcaccaagaccaacttggtcatggtcttcggagagatcaccaccaaggccaacgttgactacgagaag

SEQ ID NO: 193892 - DNA, 249 bp, Glycine max
tatcagagaactttgcagctctcttaggtttttaaaaaacaccacgcaaacagcaagatggccacttccgacagtaacatgctactaaattatgttccagtttatgtgatgctcccactcggagttgtcaatgttgacaatgtttttgaagacccagatggccttaaagaacagctcttgcagcttcgagctgcgggtgttgacggggttatggttgatgtgtggtgggggatcatagaactgaagggg

SEQ ID NO: 193893 - DNA, 250 bp, Glycine max
ccgagataaccagttttctctttgattcatcaatggcaactgcgaggaccgtgaaggatgtttcgcctcacgatttcgtgaaggcttatgcttcccacctcaagcgttccggcaagatggagcttcctgagtggaccgatattgtaaaaacagcaaaatttaaggagttggctccatatgatcctgactggtactacattagggctgcctcaatggcaagaaagatctatttgagaggtggtcttggtgt

SEQ ID NO: 193894 - DNA, 249 bp, Glycine max
  unsure (1)..(249): unsure at all n locations
tcccttttcacgtcattatcctaaaaacttgcagattttcacatcccacacaacatgaaagattaggtncatgnttctgtcggtgctcctttgtgccacttttcatgtctccttctctattatcgacggtttagttgccaacggcaactttgagttgggtccaaagccctccgccctaaaaggaacagtggtggtgggcgggagcactcgatcccagaatgggagatctccggctttgtggagtacata

SEQ ID NO: 193895 - DNA, 251 bp, Glycine max
tttttctatctctttctctctctctctgtctgccatggttctctccaaaaccacctccgaatccgacgtctctgtccactcaaccttcgctatacgatatgtcagaacttcgcttcccaggtttaagatgccggaggagtcgataccaaaggaggcagcgtatcaaataataaacgatgagttgatgttggatgggaacccaaggttgaacttggcatcatttgtgacaacctggatggagccagagtgtg

SEQ ID NO: 193896 - DNA, 261 bp, Glycine max
gctcctgagagagctcgtcgcggcggttgcagaagaagattgcaagatgaagttcaacatcgcgaatcccaccactggatgccagaagaagctcgagatcgacgacgatctgaaactgcgagcattttgggacaagaggatctcacaggaggtcatcggagatgcactcggtgaggaatttaagggctatgtcttcaaaattaccggaggttgtgacaaacaaggatttccaatgaagcagggagtgctgactcctggtcg

SEQ ID NO: 193897 - DNA, 267 bp, Glycine max
ccgctcgagcagatactgtcttctggcaagaacaaattggtcattactggagactgatgaatattggggagacagaaatacgcaatgtgatggatatgaatgcctattgtggtggatttgctgttgcgctcaataagtttcctgtttggatattgaatgtagttcctgcaagcatgaagaacaccttatctggaatttatgcccggggattgattggaatttatcatgattggtgtgaaccattttcaagttaccctcggacatatg

SEQ ID NO: 193898 - DNA, 255 bp, Glycine max
gattcagcaagtgcgttttggaagcagagaccgaaatacttcgagatggcccgtacaaagcaaactgctcgtaagtcaactggaggaaaagctcccaggaagcagcttgcaaccaaggctgcacgtaagtctgcaccaacaactggtggtgtgaagaagcctcatcgttatcgccctggaactgtcgctcttcgtgagattaggaaataccagaagagcactgagctcctaatcacgaagcttcctttccagagg

SEQ ID NO: 193899 - DNA, 249 bp, Glycine max
gcagcacccatttggatcctctcttctcttctttgatctccgttaccctttttgttttctcaacagagagagagagagagaatctttcgaagttcgtttgcgtgtgttgtgtggtcagtcaccgatggcagcaccacctgcgagggcacgtgccgattacgattacctcatcaagcttcttcttattggcgatagcggtgtgggaaagagttgtctgcttttgcgattttctgatggttccttcacaac

SEQ ID NO: 193900 - DNA, 247 bp, Glycine max
gtcacaatggatcgttatgagaatgattggagtgttgtgaaacgagggtgggatgctcaagttcttggtgaagccccttataagtttacaaatgctcttgaagctgtcaagaagctgagggcagaaccaaaggccaatgaccaatatttgcctccttttgttattgttgacgagagtgggaaacctgttggtccgatagttgatggtgatgctgttgttacattcaacttccgagctgatcgtatga

SEQ ID NO: 193901 - DNA, 246 bp, Glycine max
ctaaaggactatgttaccggttttcccaaagaatccgacatgaatattgtcgaaagtaccataacattgaagcttccacaaggttccaatgatgtcttgctcaaaaatttgtacttgtcttgtgatccgtatatgaggaatctcatgaacaagcccgaaggccctcccaatagtcgtgcttacactcctggctctccattaataggatatggtgtgtctaaagtcctggaatctgggcacccagat

SEQ ID NO: 193902 - DNA, 247 bp, Glycine max
gcgtcatctccgattccccgacaatggccacccaaatgagcaagaagagaaagttcgtagctgatggagtgttcttcgctgaactgaacgaggttctgacaagggagttagccgaggacggatactccggcgtggaagttagggttattccgatgcgcaccgaaatcatcatcagagccaccagaacccaagccgttctcggtgagaagggaaggagaatcagggaacttacctcggtggttcagaa

SEQ ID NO: 193903 - DNA, 248 bp, Glycine max
agaagagtgcgttgaaccaacaaaggactacattaatggcgaacaatttagatcagactctaaaacagttaaccaacaagctttcttttatgctagtgaacgcgaagtccatcacaacgacatatttatattcggcatagataacaccgtactctctaatatcccatactatgaaaaacatggatatggggtggaggaatttaatgaaaccttatatgatgaatgggttaacaagggcgacgcaccgg

SEQ ID NO: 193904 - DNA, 251 bp, Glycine max
attgacagtaggcattgctgcagtgaaccagaaagtcaagtctgtggatcagaggcttcaggtttcggataagacaatggcagcaataattgcagctgagaggaagataaataacactggatcagctgtcaaaacaagcagatatgtgactgctggaacagatggtttaacggtgcttttagcaaggtggcaaaggctggacatgttgcaagtactaaaactagagaaaaatttcatttggctgtttcaaa

SEQ ID NO: 193905 - DNA, 255 bp, Glycine max
cggctcgaggtactaattcaatgtaccctccaattcatcagtgtcacaacggccacacactgcgttccacgtgtaaaacaagggtgcacaaccgatgtcccacttgtagacaagagcttggagatattaggtgtctggcactggagaaggtggctgaatcacttgagttaccttgcaagtactactctcttggatgtccagaaatctttccatactacagcaagctcaagcatgagacagtatgtaattttagac

SEQ ID NO: 193906 - DNA, 258 bp, Glycine max
ctatactctctctttctgaaacaatttgcccaattgtttgagatgttcaatatgagatttgtatctcaagattgggtggtttcatgtgcactaatacttctggtgtcatgcacaacatactcatcagcttctttggggaaacctgagaacaacataaaaacatctgtttttaaatcacccaagattgagctcggtccagggttagtttcaaacaaattttattttgatgttgactttccaagaggccatattgcactc

SEQ ID NO: 193907 - DNA, 258 bp, Glycine max; identical to SEQ ID NO: 137987

SEQ ID NO: 193908 - DNA, 252 bp, Glycine max
gcaccaccgaacaacttcccctgtaaatcgcgtttcgtttgtgcaaggttttaaaagatggctgatgctgaggacattcaacctcttgttgttgataatggaactggaatggtcaaggctggttttgcaggtgatgatgctcctaggtccgtgttccccagcattattgggagaccacgccacactggtgtaatggttgggatgggtcagaaggatgcttacgtgggtgatgaagcccaatcaaaaaggggt

SEQ ID NO: 193909 - DNA, 245 bp, Glycine max
gttaaggcttggactgcctggaaacggaggcactgaagaagtgctcatcaggaagagcgggttctctgagactgaaactggtcatgaagatgagtctgccaccactgtggatttgatgcttaatctttcttctaaggaggccgcaaccactgctgctgctgctgcagatccaactgataagcacaagactttgcctaaggagaagacccttctgccagcagatcctgctaagcctccagccaaga

SEQ ID NO: 193910 - DNA, 230 bp, Glycine max
aagcaatacatcagaatggtactgttcatcaagactctcatctcaaagaacgtaaccatagcaaagctagcttaaactacacactgatgatgacactgatacattagggttccagattattttgttaacataattttctggttcccctccgaggccgtacgtgcatgccctcatatggcatgccctggagcttctttctccacaacaggcttcttatcttctgtctagct

SEQ ID NO: 193911 - DNA, 256 bp, Glycine max
  unsure (1)..(256): unsure at all n locations
caaatcctcaaactcttgtctttccctctcatacccatctcgcttcatgaacccctccttcatctaccaagtcttcaaccctgatcttaccatctcttcctctcaaaaatcccacccttcccatttgaaacacaccatctcttcccacaatgatctcagtgttacattggatatcccttcttccaatttcacgttcncacttgttcggggaagtcctttttgagnctctctgcgactcaaccaacccctctttcca

SEQ ID NO: 193912 - DNA, 242 bp, Glycine max
gtaggtttcctactcccttctcatcgttggcaagatgagtgccatgaaattttgccgtgaatgcaataacattctgtaccctaaggaagacagagaccagaaagttcttctcttcgcttgccgcaactgcgaccatcaggaggttgctgataacttctgtgtgtataggaatgagatacatcactctgttggagagcgcactcaggtgttgcaggatgtcgctgcagatccaacgcttcctc

SEQ ID NO: 193913 - DNA, 244 bp, Glycine max
ctcctcttccttgtgatttttgtttgcatcacagggagaaactgagacacagaagatgagagagataattagtattcatattggacaagctggaattcaggtggggaattcatgctgggagttgtattgccttgagcatggaattaaccctgatggcaccatgcctagtgatacctcagttggtgtagcacatgatgctttcaacaccttcttcagcgagacgggatccggcaagcatgtgcca

SEQ ID NO: 193914 - DNA, 239 bp, Glycine max
ctcgagccgcttgttcttgttctatctgtgacgagcatcatggcctcgagagcagtgctactgttggctatgtgtgtgcttccggccatggttgtggccattcgcccagcaaagaaccctttttgcgtgaagggtcgcgtctactgtgacccttgccgtgctggttttgagacctcagcaaccacctacattgccggtgctgagattatgttgcaatgcaagagcagggttagcaacga

SEQ ID NO: 193915 - DNA, 253 bp, Glycine max
gcggaattgattgattccgttctcgatgttgtgcgcaaggaggctgagaactgcgattgcttgcaaggttttcaagtgtgccattccctggggggaggaactggatcaggaatgggaaccttgttgatttctaagatcagggaagagtacccagatagaatgatgcttactttctctgttttcccatctccaaaggtttcagacactgttgtggaaccctacaatgctactctctctgttcaccagcttgttg

SEQ ID NO: 193916 - DNA, 275 bp, Glycine max
gatcgggattcggctcgataatggcttcaatgaataaccacaaagaaattgagctctttgagggccaatctcttctgtacatgcagctatatgggcacctaagacctatgtgtcttaagtgggctgttcaactaggtattccagacataatacagaataatgccaaacccatttctctttctgacttggtctctactcttcaaattccaccagctaacgctgcttttgtgcagcggttcatgcgcttcttggcacacaatggaatctttgagatc

SEQ ID NO: 193917 - DNA, 140 bp, Glycine max
ggagaatatgaagttgtttgtcttctttggttgctgcagtagttttggtagcatggccatgccatggcgcaggctaccaaaggttccctctccgaatgaaaactggctatggtgagcgttcttcggaggtaaaatgcgca

SEQ ID NO: 193918 - DNA, 245 bp, Glycine max
ctgagttaaggcttggactgcctggaaacggaggcactgaagaagtgctcatcaggaagaggggtttctctgagactgaaactggtcatgaagatgagtctgccaccactgtggatttgatgcttaatctttcttctaaggaggccgcaaccactgctgctgctgctgcagatccaactgataagcacaagactttgcctaaggagaagacccttctgccagcagatcctgctaagcctccagcc

SEQ ID NO: 193919 - DNA, 243 bp, Glycine max
taattatattttaggcagcaaattatggaatcccatgatgaggagcatgctgccaaactacttagagccataacccacatatggaatcacatatttagcttcataaactccatgtcccttaaatgtgtggttgacttaggcataccagatatcatacacaactatggccaacccatgccactctcaaacctcattgcttcactaccaatccacccatccaaaacttgcttcgtccattgcttg

SEQ ID NO: 193920 - DNA, 241 bp, Glycine max
actggctgtaattggttctggtttggctgtttttatgtcagtaactatagttgtcttgctgtttatgatcagagagaggcaggaaaaagtagccaaagatgctgggattgttgaagatggcaccaatgacaacccaactataattgcagggacgatttttgttgataatctaaaacaagcagtagatcttgatgtcgtcgttaaagcaactctgaaagacagcaacaagctcagcagtgga

SEQ ID NO: 193921 - DNA, 240 bp, Glycine max
gttaggttctgcacgctctgcttccagcgagtgttctttcttcgtttcaacaccttaatttgcacacgctgcttcttcagcttgagaaatggcacaagaaacctttctattcacatctgaatctgtaaacgagggtcaccccgacaagctgtgcgaccagatctctgatgcagtgctcgatgcgtgccttgaacaggaccctgacagcaaggttgcctgtgagacatgcaccaagaccaa

SEQ ID NO: 193922 - DNA, 247 bp, Glycine max
atccatgataagtgcaccgggttaactgtgctagggaagtactatttcagaattgatcctgtaggagagggtgccagatggcgtcgatcatttggtcaggagatatactcacccttgcttttagccttcacagagagtgaaggtcactggggagattctcatgtcacaaccttctcaggaatagattcctcatacaacttaccagataacgttgccatagtaactctccaggatctgggtgatggaa

SEQ ID NO: 193923 - DNA, 250 bp, Glycine max
aatggccaaagacccagttcgcgttctcgtcactggagccgcaggcaaattggatatgctcttgtccctatgattgctaggggagtgatgctgggtcctgaccagcccgtgatcctccacatgcttgacattcctccagcagcagagtcgttgaatggggttaaaatggaattggtggatgctgcattccctcttcttaaaggtgttgttgctacaaccgatgtggttgacgcatgcactggggtcaata

SEQ ID NO: 193924 - DNA, 241 bp, Glycine max
ggctcccaagggtttaacctttctggctgtgttaatatgcgtttcagcactgtcactgagtccttctgttgcgggggaagggcaaaataatggccttgttatgaacttctacaaggaatcatgccctcaggctgaagacatcatcacagaacaagtcaagcttctctacaagcgccacaagaacactgctttctcctggctcaggaacatcttccatgactgtgctgttcagagttgtgat

SEQ ID NO: 193925 - DNA, 240 bp, Glycine max
  unsure (1)..(240): unsure at all n locations
acttcctactccaaccacttnctttttncccgcagtcatgggcaangtcaagatcggaatcaacggatttggaagaattggccgtttggtggccagggtggctctgcagagagacgatgttgaactcgttgccgttaacgatcctttcattaccaccgattacatgacatacatgtttnaatacnacagtgttcacgggcactggaagcatcacgatgtcaccgttaaggatgagaagac

SEQ ID NO: 193926 - DNA, 234 bp, Glycine max
cgagcatcatggcctcaagagcagtgttattgttggctatgtgtgtgcttccggcgatggttgtggccattcgcccagcaaagaaccctttttgcgtgaagggtcgtgtctactgtgacccttgccgtgctggttttgagacctcagctaccacctacattgctggtgctgagattatgttgcaatgcaagagcagggttagcaacgaggttgtgtacacgaagaaggggtaca

SEQ ID NO: 193927 - DNA, 240 bp, Glycine max
ggactcaggtgccgggacaaaagagtatgttcatgttcgtgtacaacagcgcaacggaaggaaaagcctaacaactgttcaaggattaaagaaagagtatagctatagcaagatactcaaggacctgaagaaagaattctgctgtaatggtactgttgtccaagaccctgagttgggccaggtcatacaacttcagggagatcaaagaaagaatgtttctactttccttgtgcaggctgg

SEQ ID NO: 193928 - DNA, 240 bp, Glycine max
tctcgagccgaatcggctcgagtcatacgtggtgttgttactgctactcttttctcttttcacttctctttagttctctcatcccctttctttttctttttcttcttcttctgagcttgtttaagcttttcttccattaacatattatcacaatgtgtggtattcttgctgttcttggttgttctgatgactctcgagccaaaagggtccgcgtgcttgagctctctcgcagattgaagc

SEQ ID NO: 193929 - DNA, 242 bp, Glycine max
ccaattcagagttcgacgtgattatcatcggagctggcgtcatgggcagctccaccgcctaccacgccaccaaacgcggccttaaaacccttctcctggaacagttcgacttcctccaccactgtggctcctcccacggcgaatcccgcaccatccgcctcacctatccccaccactactactaccctttagtcatggactcttaccgcctctggcaagaggcgcaggcccaagtcggctac

SEQ ID NO: 193930 - DNA, 250 bp, Glycine max
tgcggcgctggcggactcctcctgcctgctccccaacaaaattcaaaaccaattccctctatcacccaaggccatccacagcgtgacgaaggaaccacaagtggacagcccagtccccatctcctcgttctcggatgaggacgaggagatcgtacaagccgtagtgtcgggctccatcccatcctactcactcgagtcgcggctcggcgacacacgccgggccacggccatcaggcatgaggtggtgcag

SEQ ID NO: 193931 - DNA, 250 bp, Glycine max
gatcaaattcctactgccttcgatccttttgctgatgcaaatgctgatgactcgggtgctgggtcaaaggagtatgtgcatattcgcgttcagcagcgaaatggtaggaaaagcctgacaaccgttcagggattgaaaaaagaattcagctataacaagatacttaaagacgttaagaaagagttctgttgcaatggaacagttgttcaggacccagaactaggacaggttattcaacttcaaggtgatc

SEQ ID NO: 193932 - DNA, 253 bp, Glycine max
tgaaaatgaaggtccttgttttcttcgttgctacaattttcgtagcatggcaatgccatgcgtacgatatgttccctctccgaatgaacactggctatggtgcccgtactccggaggtgaaatgcgcaagttggaggcttgctgtggaagcacacaacatctctggctttgagaccattcctgaagagtgcgttgaagcaacaaaggaatacatccatggcgaacaatatagatcagactccaaaacagttaa

SEQ ID NO: 193933 - DNA, 277 bp, Glycine max
gggagatggaagttgaagggtcatcgaagaagatgatagcgactcaggaggagatggtggaggccagggttcctctggcctacagggaccagtgcgcccacttgctcatccctctcaacaagtgcaggcaggccgagttctatctcccatggaagtgccaggaccagcgtcactcctacgaaaagtgccagtacgagctcgttatggagagaatgctccagatgcaaaagatccgcgagcaccaacaaaaccccaacgccaaacaaccccttatcgc

SEQ ID NO: 193934 - DNA, 275 bp, Glycine max
ctctcactatatcctcttcttccacccttcttgatggcaaggctccaagacagtcaccagctgcttcccctcaatgtgtgagcctcccccctccccctttgcactctcagaaccgttcatggaagaccactgcttattgtcgcaaggttgctcgaaaagttatggcaatggccacaggagaggcaccagctgatgctaccccaactgaggtgccagagattgtcaagactcttcaagaaacttgggacaaagttgatgataagtatgcagtgagt

SEQ ID NO: 193935 - DNA, 272 bp, Glycine max
cttttgaagtacagagacgaagaattgaagaatgtaagaggggatggaactggagagcgcaaggaatgggataggatctatgattatgatgtctacactgacttgggcaccccggatagcggtgataaatatgcacgccccgttcttggtggttcagccttaccttaccctcgcagagtcagaaccggaagaggaaaaactagaaaagatcccaacagtgagaagccgagcgattttgtttaccttccaagagatgaagcatttggtcactt

SEQ ID NO: 193936 - DNA, 284 bp, Glycine max
aaggtcaccaactggggtgcttcaattttgtccctggtgattcctgataagaatggaaagttgagtgatgttgttcttggatatgattctgttaaggattacactaatgatacaacataagttggagcaactgttggccgggttgctaacagaattggaggagctcagtttactctaaatggaatccattacaaattagttgctaatgaaggaaacaatacacttcatggtggagccagaggatttagtgatgttctttggaaagtgaaaaggtatcaaaaaga

SEQ ID NO: 193937 - DNA, 288 bp, Glycine max
  unsure (1)..(288): unsure at all n locations
gttctcctccaataattcctcctaatgcaactcagaatttgatgtggagctgttgtcttggactagtgtgaaagacatatgtaaggatggaggtttattttagaagatacttaccaatggggagaaatgggagaacccaaaggatcctgatgaagttttagtcaagtatgaagcatgccttgaagatggaactcttgtggcaaaatctgatggagtggagttcacagtcanatgatggtatttttgtcctgctttgtcaaaggctgttaaaaccatgaagaagggaga

SEQ ID NO: 193938 - DNA, 291 bp, Glycine max
tcgctcgagggactatgcccgaacacgtttagcaaatgatgcaaaggctgcaaagaagggtggtacagaggcagttcaatggcttgattgatgtttacaggaaaaccattaagtctgatggcattgctggcctttatcgtggtttcaacatctcatgtgttggaatcatagtgtaccgtggtctttactttggaatgtatgattctctgaaaccagtggtcttggttggtggattgcaggatagcttctttgcgagttttctcttgggatgggggatcacaataggtgccg

SEQ ID NO: 193939 - DNA, 294 bp, Glycine max
cagcgccgcttaaggaccacaaagttcagatcccaagcttccatggcttgaggtcttcctcaccctctgctctcccccgcaatgccctctccctggcttcatccactcgctctctctccctcatacgtgctgtttccacgcctgcgcagtcaccaaactgccactgtcaagcgcagcaaagtcgaaatattcaaagaacaaagcaatttcataagatatcctcttaacgaggacattttgacggatgctcctaatataagtgaagccgccactcaattgatcaagtttcatggt

SEQ ID NO: 193940 - DNA, 277 bp, Glycine max
ctcgagccgctccgtccttccttcttcgatccagatctctctccttctccctcaaatggctacccttctgcaatgttccatgcccctcgtctctctttccaatcgagctctggtacccggtaccaggatctccaacccatcttcagtttccctttcaattaagggaagaagtttcccatccgttacattgcagcccagagggcgtcggtttcagcttagatgtgcggcaaaaccagagacagtgaagaaggtgtgtgacatagtcaagaagcaattg

SEQ ID NO: 193941 - DNA, 271 bp, Glycine max
ctcgagccgctcctcactcaaacttcccctctctacgccgttcctcccaaatggatgcaccactggagtcttggggtgttgaggttaaggttggtcagaccgtgacagttgacccaatggatcctgtggattcatacatacacatatctcaggttgcgctcggagaggcgaaacaggagaaacctaatgagtctgtggttttgtatttgaaagttggtgaacagaagattgtcttgggaaccctttctagggatggcattcctcatctatc

SEQ ID NO: 193942 - DNA, 117 bp, Glycine max
atccgcaagaacggctacatcgtcatcaaatgccgcccctgcaaggttgtagaagtttcgacttccaaaactggaaagcaaggtcaagctaagtgtcactttgttggaattgatatt

SEQ ID NO: 193943 - DNA, 164 bp, Glycine max
gagaatatgaagttgtttgttttatttgttgctgcagtagttttggtagcatggccatgccatggtgcaggctatcaaaggttccctctacgaatgaaaactggttatggtgagcgttcttcggaggtaaaatgcgcaagttttaggcttgctgtggaagtaca

SEQ ID NO: 193944 - DNA, 273 bp, Glycine max
attgcctattccgcaatatggcggaaaatgcttcgattgagctgaacaagtttgtgttcttttgtttgttggtgctaatacaagtggcagtttcagaaatcatttttgaagagcgttttgatgatggatggcgaggtaggtgggtgaagtcagactggaaaagcagtgaaggcaaagcaggttcattcaagcacacagctggaaaatgggccagtgatccagatgataaaggtattcaaacatccagtgatgccaaacactttgccatctctg

SEQ ID NO: 193945 - DNA, 277 bp, Glycine max
caaaattattagatggatcttccaagtttgtgctcacttatgaagacaaggaaggagattggatgcttgttggggatgttccctgggggtaagtaattggtccacaaacatcaatttttttttagcatcaaatatgcgatgttaaaactgatactgcagtacaaaaatgtgttgccaattaattgtcaaatagtacatgtaatgttttcatcaggcaataaagagattggtaaaaatatttggtgctatactctaaaagctacatgtcaaatattgg

SEQ ID NO: 193946 - DNA, 283 bp, Glycine max
cgaatggctcgattttcattggatgagatatcagacactggtgcctttgtgagatctgcttcaacattcagaaattggatttcgagggacccgaattcgctgtttccaccggaatcagggaggtatcatctctatgtatcatatgcttgtccttgggcttccaggtgccttgcttacttgaatatcaaaggacttgacaaagccatcagtttctcggctgtcaaacccatctttgagagaactagagaatcagatgaatataagggatggatttttcctgaat

SEQ ID NO: 193947 - DNA, 279 bp, Glycine max
gggatccccctgtgggttgcaccgccgaccgaccctgatcttctgtgaagggttcgagtgagagcatacctgtcgggacccgaaagatggtgaactatgcctgagcggggcgaagctagaggaaactctggtggaggcccgcagcgatactgacgtggcaatcgttcgtctgacttgggtataggggcgaaagactaatcgaaccgtctagtagctggttccctccgaagtttccctcaggatagctggagcccgcgggcgagttctatcgggtaaagc

SEQ ID NO: 193948 - DNA, 281 bp, Glycine max
ctcgagccgcttgtttcttgctttctttcttcaccatgtcacttgctgggaaaatcaccactgaaatcggggttcatgcaaccgctacaaagtggttcaacctcttcgcaacacaactccatcatgttcaaaacctaactgatagagtgcatggaaccaagctgcatcaaggtgaagactggcatcacaacgagacagtcaagcactggacttataccatagatggtaaggttacaacatgtctggagagtattgaatccattgatgaacagagcaaaaca

SEQ ID NO: 193949 - DNA, 281 bp, Glycine max
aactcccttcaccatggctgaacaaaccgagaaagcttttctgaagcaaccaaaagtgtttctcagcacaaagaagactgggaagggaaagagacctggaaaaggtgggaaccgcttttggaagtccattgggcttggatttaagactcccagggaagccatcgaaggaacctatattgacaagaagtgccccttcactggcaatgtttccatccgtggccgtatcttggctggaacatgtcacagtgctaagatgaacaggactattattgttagaagga

SEQ ID NO: 193950 - DNA, 279 bp, Glycine max
tttcacactgccgctgcaacaatggcttcagagaagaaactttcgaacccaatgagggagataaaagtgcagaagctcgttctcaatatctctgttggcgagagtggagatcgtctctccagagccgccaaggtgttggaacaacttagtggccaaaccccagtgttttccaaagcaaggtacactgttcgttcctttgggattagaagaaatgagaagattgcatgctatgtcactgtcagaggtgacaaggcaatgcaacttttggagagtggtttg

SEQ ID NO: 193951 - DNA, 172 bp, Glycine max
gagaatatgaagttgtttgttttctttgttgctgcagtagttttggtagcatggccatgccatggccaaggctaccaaaggttccctctccgaatgaaaactggctatggtgagcgttcttcggaggtaaaatgcgcaagttttaggcttgctgtggaagcacacaacatac

SEQ ID NO: 193952 - DNA, 288 bp, Glycine max
cgacacactcccatacacacacgttgtctcgcacacattccttcattccgcagcagcaaacatctttaccttaaacgacaacaatggccgatgccgaggatattcaacccctcgtttgcgataatggaaccggaatggtcaaggctggttttgccggagatgatgcgccgagggcggtgttccccagcattgtggggcgtccacgtcacacgggagtgatggttgggatggggcagaaggatgcgtatgttggggacgaggctcaatccaagaggggtattttgactc

SEQ ID NO: 193953 - DNA, 268 bp, Glycine max
gatagccctagaaatgtttcgtgaatctttgtttgctctctttctactttctgccttctcctcctcactcctacctttaaccactgctcaagattacgttctcgacacggacggtcacgcggttgaaaatcacggtacatactatttgttgccagcgaaatctggaagcggcggtggtggaatagaggtagccgcaactggcaaagaaagttgcgctctcactgtagtgcaatctctgaacgaggactccatggggctaccattgaag

SEQ ID NO: 193954 - DNA, 275 bp, Glycine max
cgacaagatgagcatcccaattccccatcggcagttattcatagacggagactggaaagtccccgtcctcaagaatcggattcccatcatcaacccttccacccaacacatcatacaggatatcccagcagctactaaggaagacgttgatctcgctgtcgctgccgccaaagttgccctctcccgcaacaagggcgccgattgggcctccgcttccggctccgttcgggctcgctacctccgcgccatcgctgccaagatcaccgagaaaaagc

SEQ ID NO: 193955 - DNA, 280 bp, Glycine max
  unsure (1)..(280): unsure at all n locations
gagaagaccacctcttcaagatcgtcataatcggaccctctgcggtgggcaaatccaaccttctctcccgctacgcccggaacgagttcaacatgcactccaaggccaccataggtgtcgagttccagactcagggctggcaatcgactccaaggaagtcaaggctcagatttgggacaccgccggccaagagcgattccgcgccgtcacctccgcctactaccgcggcgctgtcggcgcnctcattgtctacgacatctcccggcgcacccacttcgat

SEQ ID NO: 193956 - DNA, 278 bp, Glycine max
gccgtgctttccctttatgctagtggccgtacaactggtattgttctggactctggagatggtgtcagtcacacggtgcctatctatgaaggttatgccctcccacatgcaatcctgcgtttagaccttgcagggcgtgatctcactgatgccctgatgaaaatcttgactgagcgtggttactctttcaccacatctgcggagcgggaaattgtgagggacatgaaggagaaactggcctacattgctcttgattatgagcaggagttggaaactgc

SEQ ID NO: 193957 - DNA, 273 bp, Glycine max
  unsure (1)..(273): unsure at all n locations
atctcggaattcggtccgagtgcgtatatgtatgtgtgtatactctctcaagtacgcacatatatacacatccattcgtacataaatagttatttctattgttcctgcgatgttaattcacataattgctagctgcgtctggtantggatcggatgagtagataacgagtctcctaggatcaggtagcggtccttcagagcttcgcaagttgaaatatgatggttccagcacaggtcaagctccttgtgagagacagtgaagtaattttatag

SEQ ID NO: 193958 - DNA, 267 bp, Glycine max
aatgaaggtccttgttttcttcgttgctacaattttcgtagcatggcaatgccatgcgtacgatatgttccctctccgaatgaacactggctatggtgcccgtactccggaggtgaaatgcgcaagttacgaggcttgctgtggaagcacacaacatactttggctttgagaccattcctgaagagtgcgttgaagcaacaaaggaatacatccatggcgaacaatatagatcagactccaaaacagttaaccaacaagcttacttt

SEQ ID NO: 193959 - DNA, 270 bp, Glycine max
gcaggggtggagagtgctggtgaatgtgggaaatctaccaccccagataatgaggcttataagcttgcaccatgtgcctcagcagcacaagatgagaatgctagtgtttctcagagttgctgtgctcaggtgaagaaaattgggcagaacccaagctgcctctgtgcagttctgctctccaacacagccaaaatggctggtgtcaaccctcaagttgctgtcaccatccccaagcgttgcaacctggctaatcgccctgttggttacaag

SEQ ID NO: 193960 - DNA, 266 bp, Glycine max
agatctaacaaccacttatcccctttctccttctaacgagtgaggaaaaatggcgcgtaagaagatcagagagtatgactcaaagaggttgttgaaggagcactttaagagactctctggcaaggagttgccgatcaagtctgcacaaattaccgcaccaactcatttcactgagctacaagagaaggaaccctggctttcatcttctaaattggttgttaaacctgacatgttatttggacagcgtggcaaaagtggtttggttg

SEQ ID NO: 193961 - DNA, 276 bp, Glycine max
aagctattatataaggttgtacacagttttcgaattcattcattcatattccatacacattatacttcgccccaaaaataatagtgaaaggaaaccgaatagaaaacgcagcaacgcaaggtagagagggaaggaaagctcatacggcgagagagatatcacccaactcaagctgagcagcaatatcctcaagctgctttctcacactcatgtcaatcaatttggagccggaatacctgacagtgaaacccgcgaccaaactagggtcaagtagcg

SEQ ID NO: 193962 - DNA, 281 bp, Glycine max
actcgagccgaatcggctcgagggcgagtaaacccgtaaggcgcaaggccgctgattggtgggacccccctgtgggttgcaccgaccgaccgaccctgatcttctgtgaagggttcgagtgagagcatacctgtcgggacccgaaagatggtgaactatgcctgagcggggcgaagcatgaggaaactctggtggaggcccgcagcgatactgacgtgcaaatcgttcgtctgacttgggtataggggcgaaagactaatcgaaccgtctagtagctggtt

SEQ ID NO: 193963 - DNA, 286 bp, Glycine max
  unsure (1)..(286): unsure at all n locations
aagctattatataaggttgtacacagttttcgaattcattcattcatattccatacacattatacttcgccccaaaaataatagtgaaaggaaaccgaatagaaaacgcagcaacgcaaggtagagagggaaggaaagctcatacggcgagagagatatcacccaactcaagctcaagcagcaatatcctcaagctgctttctcacactcatgtcaatcaatttggagccggaatacctgacagtgaaacccgcgaccanactagggtcaagtagcgtcttaatcc

SEQ ID NO: 193964 - DNA, 284 bp, Glycine max
  unsure (1)..(284): unsure at all n locations
cgggcgctcgcggccacccagttttgaatatatttttattccttctttgtttcttcactttcttccatacacataaccatgtcttctcagactgtagtcctcaaagttggtatgtcatgtcaagggtgtgctggagcagtgaacagggttttgggaaaaatggaaggtgttgagtcatttgacattgatctgaaggagcagaaggtgacagtgaaaggaaatgtggagccagatgaagttctgcaagccgtttccanatctgggaagaagactgcattctgggt

SEQ ID NO: 193965 - DNA, 282 bp, Glycine max
  unsure (1)..(282): unsure at all n locations
gtggagtacttttgatagcaaagatgtttgggatcttcgacaaggggcaaaagataaaggggacagtggtgttgatgccaaagaatgtgttggacttcaacgccataacctccatcggtaaaggtggtgttattgacacagccaccggcatcttaggccaaggcgtcacttagttggtggagtaattgatactgccacttccttcttaggccgtaatatctccatgcaattgatcagtgctactcagactgatggcagtggaaatgggnaagttggaaaaga

SEQ ID NO: 193966 - DNA, 294 bp, Glycine max
aattcggcacgagcgcggacgatcggcagggaacaagttccgcatgtcactgggtctgccggtggcggcgacggtgaactgcgccgacaacaccggcgcgaagaatctctacatcatatcagtgaaggggatcaagggaaggctgaaccggttgccgtcagcttgcatgggtgacatggttatggccaccgtcacgaagggaaagcctgatctccgtaaaaaggtgctccccgccgtcatcgtccgtcagcgcaagccgtggcgccgaaaggacggtgtttacatgtacttcga

SEQ ID NO: 193967 - DNA, 278 bp, Glycine max
aaagtagcaaagatgtttcctttcgggcaaaagggtcaaaagataaaggggactatggtggttatgcagaagaacgtgttggatatcaacagcatcaccagtgttggagggatcgttgactaaggcttaggcttcataggcagtgcagtcgatgcacttacttttgcagccaccaaaatctccatccatttgattagtgctaccaaggctgatggtgggaaagcgaaaattagaaagagtacaaatttaagaggaaagatacattaccaaccttggga

SEQ ID NO: 193968 - DNA, 273 bp, Glycine max
gttttagcgcacttcttctagatttaaggaagatgggtaaggaaaaggttcacatcagtattgtggttattggccatgttgactctgggaagtccactaccactggccacctgatctacaagcttggaggcattgacaagcgtgttattgagagatttgagaaggaagctgctgagatgaacaagaggtctttcaagtatgcctgggtgcttgataagcttaaggctgagcgtgaaagaggaatcacaattgatattgccttgtggaagtttg

SEQ ID NO: 193969 - DNA, 285 bp, Glycine max
ctcgagtaagtccctccttcctctgccttataattcttgtgacccttttagctggtagcattgaaagtgcaccagcaaacgtgaagccaagccattatgctgcacccttcaataggagtgtttttccttctggttttctatttggaataggctctgcagcttaccagatagaaggagcagcagctatagatggcagaggaccaagtatatgggacacctatactaaacagcaaccagggaagatttgggatcatagtgatggaagtctagcaattgatttttatc

SEQ ID NO: 193970 - DNA, 276 bp, Glycine max
gatgggcaagttatcaccattggagctgagagattccgttgccctgaagttcttttccagccttctatgattggaatggaagctgctggaattcacgagaccacctacaactccatcatgaagtgtgatgtggatattaggaaggatctgtatggtaacattgttcttagtggtggctcactatgtccctggtattgctgaccgtatgagcaaagaaatcactgcacttgctcctagcagcatgaagattaaggttgtggctccaccagagagaaa

SEQ ID NO: 193971 - DNA, 282 bp, Glycine max
agccagcaatggccaagtccaagaacaatgccaagaagttgtcctacatctcagttccatctcagatcatcaactccatctcatcttcatctcttcaatctctgcttgaatctcccaagaagtgtgcaaggcactccaaattcttcacctttgtcaagtgcatgaggccaagactcttcttccttttcaccctctttttccttgctttctttgccatgctcaagtttggcctcaatcttgacaccccttttcctccattcccatgtgcaccctcaataggcc

SEQ ID NO: 193972 - DNA, 283 bp, Glycine max
tggtcttcaatcaccaaaaatggtaaccactgtcgcttcttacaacgtcactccatatcaaccaactcccaatgatcctttatggctatcagatagcgaccaacttggggccctaggccatgtagccaccatctacatttacaaagcaaaacccaacagcgacaccattgagaggttgagaaactctcttagaaagcttttagtgtactactacccagtagctggcaggttgagcttgacaaaaagtggtcgaatggaagtgaattgcaacgcaaagggagtg

SEQ ID NO: 193973 - DNA, 277 bp, Glycine max
ctcccttccttccatcccaaccacaaggatgctgagaagacataaaaaatggtgaagatttgctgcattggagctggctatgttggtggcccaaccatggctgtaattgccttgaagtgtcctgagatcgaggtggtcgtggtggacattgctgcaccgcgaatcaacgcgtggaacagcgaccacctcccgatatatgagcctggccttgatgatgtggtgaagcagtgcagggggaagaatctcttcttcagcactgatgtagagaagcatgttg

SEQ ID NO: 193974 - DNA, 277 bp, Glycine max
aaaagctcgtagttggaccttgggttgggtcgatcggtccgcctccggtgtgcaccggtcggctcgtcccttctgccggcgatgcgctcctgtccttaactggcctggatttcttcgacgtgagcctcgtggacggttacaacgtggcgatgctggtggctccccagggtggctccggcgataactgcacgagcacggggtgtgctggggacctgaacggcgcgtgtccttcggagcttagggttacgagcgaggatgggaaacagagcgtggcgtg

SEQ ID NO: 193975 - DNA, 283 bp, Glycine max
  unsure (1)..(283): unsure at all n locations
ttcatgactgctgtcaagcaaaactacggaganaaaggncttgtnccagtntgaananttttncaaaccacaatggcttttncanttgcttgcaaaatatggcacanctcatcttgttttcaacgatgatattcaggggactgcatctgttgttcttgctggggttgtggcagccttgaagctcattggaggtactctggctggaccacanatgcttgttctcnnngngctgganccnccangaactggaatancaganctaatagctcttgagatgtcaaac

SEQ ID NO: 193976 - DNA, 277 bp, Glycine max
aaaaaagacaacccagagagcgcgtcttaataaacgctcttctctgaaaacccccatttcttttcttctttcttcttctctttcgcttcttcgatcttcgatcttcgtcgctgaaaatgagagagtgcatttcaatccacatcggccaggccgagattcaggttggaaacgcctgctgggagctttactgcctcgaacacggcattcagcctgatgggcagatgccaagtgacaagaccgttggtggaggtgatgatgctttcaacaccttcttcag

SEQ ID NO: 193977 - DNA, 296 bp, Glycine max
  unsure (1)..(296): unsure at all n locations
ctcggaattaggatcgagcaggaaaaaaaaaaggccagtgnaccatcaagcagtggaaatgagtgtggattcagaaaaataaaccatatacaggtgcagtgtggaagggcaccaagacaccctctacgaacaatcaatgcgacagttataccgagaatgagaaatctacggcaccatagacttcatatttggcaacggtgccgcagtgttgcaaaattgcaaaatatacaccaaggtcccacttcccatacagaaggttaccatcacggcacagggaagaaaaagcccacaccaga

SEQ ID NO: 193978 - DNA, 278 bp, Glycine max
tcaagcctcaggtaagccaaaaccatggttaagcataacaatgttatcccaaacggacacttccgtaagcactggcagaactatgtgaagacttggttcaatcagccagcacggaagacaaggagacgattggctcgtcagaagaaagctgtgaagatattccccagacctacggctggacctctcaggcccattgtacatggtcaaactttgaaatacaacatgaaagtgagaggtggaaggggattttctcttgaagaactcaaggcagcagggat

SEQ ID NO: 193979 - DNA, 277 bp, Glycine max
gctaatcaaggtattagatatcgatctttcctggagattgcataaagtatctgatggtcaaagaagaaggatgcagatttgtatgggtctcctcaaaccattcaaggttcttcttctcgatgagataacagttgaccttgatgttctagcaagagctgaccttctgagatttctaagaaaggaatgtgacgagaggggtgccactattatctatgcaacacatatatttgacggcctcgacgattggccaacaaatattgtttatgtagcccatggg

SEQ ID NO: 193980 - DNA, 277 bp, Glycine max
  unsure (1)..(277): unsure at all n locations
ctctagtcctgttatttctcagcgcgtaaagcatggctttgttggtggagaaaaccacgagtggtcgcgagtacaaggtcaaggacctttcccaggccgacttcggccgcctcgagatcgagctggccgaggttgagatgcccggcctcatggcctgtcggaccgagttcggcccctcccagcccttcaagggggcccgcatcaccggctccctccacatgaccatccagcctgncggtctcattgagaccctcaccgcccttggcgccgaggtccg

SEQ ID NO: 193981 - DNA, 272 bp, Glycine max
gtttccttcttcaccgcatcaatggagttggacggcgttctcctcggcatgtgcaaccctctcctcgacatctctgccgtcgtcgacgacgctttcttgcaaaaatacggtatcaagttgaacgatgcgattctcgctgaggataagcacaaacctatgtatgaagaattggctaacaatcctaatgtggagtacattgctggaggtgctactcagaattcaatcagggttgctcagtggatgcttcaagcaccaggtgccacaagttacat

SEQ ID NO: 193982 - DNA, 275 bp, Glycine max
aggccactctcctctgagaaagcctccagcctctcctccaaagtcccctgcggttcgttcggttattcttctaaccgttgtctgaagtttacaactcaaaacttcaccgaacgcatttcattcaccaattcgtccaagtctcgtatcaatcaatcagcctatccgtcttgcggttggagagatcggaggggagagcagccatggcgcatcgagtagaccacgagtatgactatctgttcaagatcgttttgatcggagactcaggtgtaggcaaa

SEQ ID NO: 193983 - DNA, 190 bp, Glycine max
  unsure (1)..(190): unsure at all n locations
gatacttcaattctgattgcaaccacgacactactccacattccatcatggtatgtatcagncttgagganatcaaaaacgagaacgtcgatctggacaaaattccagtagaggaagtgttagngtcgctgcaatgttcaagagcaggtttaacatcagacgaaggagccagccggcttcaagtttttgg

SEQ ID NO: 193984 - DNA, 264 bp, Glycine max
gagcgcaagtagcgttctcggcccgccgggggatcgggcagcctctctcccttctcatgaagctcaatcccctcgataagagcctctccctttacgatatcgccggaactcccggcgtcgccgccgatatcagccacataaacaccagatctgaggtagtggggtaccaaggtgatgaagagcttggaaaagctttggagggtgccgatgttgttataattcctgctggtgtgcccagaaagcctggaatgactcgtgatgatc

SEQ ID NO: 193985 - DNA, 279 bp, Glycine max
aagaggtacaagaaccgggagctgcaaacaatgcgccttcttgaccacccaaatgttgtcgctttgaagcactgtttcttttcaaccactgaaaaggatgaactatacctcaatttggtacttgaatatgttcctgaaacagttaatcgtgtgatcaaacattacaacaagttaaaccaaaggatgccgctgatatatgtgaaactctatacataccagatctctagggcgttatcttatattcatcgttgtattggagtctgccatcgggatatcaag

SEQ ID NO: 193986 - DNA, 275 bp, Glycine max
ctcccagaaatggttacgttcaggtttcaccagtaccaggtggtcgggagggctctcccaacggaagcagatcagcatccgaagatctaccgaatgaagctctgggccaccaacgaggttcgcgccaagtctaagttctggtattttttgaggaagctgaagaaggtgaagaagagcaatggtcaagttcttgctatcaacgagatttttgagaagaacccaaccaagattaagaactacgggatatggttgcggtatcagagtaggactggtta

SEQ ID NO: 193987 - DNA, 274 bp, Glycine max
aggaagttgaggggaagtgggttgttaaaggagcagttgatgtagacattggtgcaaacccttctgctaagggtggaggagaagatgagggagttgatgatgcagctgttaaggttgttgacattgttgacacattcagacttcaggagcaacccgcattcgataagaagcagtttgttaccttcatgaagaggtttatcaagaatttgactcccaagctcgatgcagagcaacaggagttgtttaagaagcacatcgagggagcaactaaata

SEQ ID NO: 193988 - DNA, 274 bp, Glycine max
cagaattatctaaccctaggaagaccactttgcttcacatgctcaaagacgagagacttgttcagcatctacctagtcaatatcccacttcggaggagttgagtattgggaagataaagtttaaggctttcgacttgggtggtcaccagattgctcgtagggtctggaaggactattacgctcaggtggatgctgtagtgtacctggttgaagcatttgacaaggaaaggttttcagcatcaacctactcaatatccaactccttctttgattc

SEQ ID NO: 193989 - DNA, 275 bp, Glycine max
gttcttttcatctttgctcttgtctcgttcacttcccatgcttctgtcaatgatttctgtgtagcagacctaaaaggtccagatagcccttcaggctatcagtgcaagccacctaacacagtcacagtggatgactttgtgttctctggctttgtagctggaaacaccacaaacactttcaatgctgcattaacctccgcatttgttactgattttacaggtgtgaatggtcttggtgtatctgtggcacggttagacatagccaaaggtggatc

SEQ ID NO: 193990 - DNA, 276 bp, Glycine max
ctcgagccgcgactatgtttctgtctctgagactgaactgaataacattaacacagcgatgtcgttgaaaacattagcaacctctcctctttcggggatcactcttttggtccttctcatcgctctccttctcagattttacatcaaattcgaaactgctgagagattgttcagtgctgaagagctatcattgttcaatggaactgatgaagggttgccaatccttctaggaattcttggatccgtgtttgatgtaaccaagggaaaatctcatta

SEQ ID NO: 193991 - DNA, 273 bp, Glycine max
tgccaatgaggcctgctcttgctttgcttcctcttctatttgctttctcgttagctgccactacggaatcaagaaaagatccaagggaatattggaaaatgatcatgaaagatcaggaaatgccagaaggacttcaaggtcttgtttcatttcaatctgaaaataaccctaagactcaagagcagcttggtaaaggttccaaaaaccattgtgaagagtctctagttacaaatacacaagttaacagtgacttcgaacccataccaagtgtta

SEQ ID NO: 193992 - DNA, 273 bp, Glycine max
cctaaatctatctatctaatagagataagatagggcaaaaacaaaaccctagccaaagaaaaaccttgttgagcagcaacagcagcagcagcagagagagaggaatatggaaggagtaccgcacccaatacccagaacagtcgaagaggttttcaccgattttaagggcagacgcgccggtttgatcaaggctctcactaccgatgttgaaaagttttaccagcagtgcgatcctgagaaggagaatttgtgtctatatgggtttccaaatga

SEQ ID NO: 193993 - DNA, 271 bp, Glycine max
atgggttcttcttcttctatgtggacggtgtgtgtgattttggcatcactggcctctgcagcactctgtgccaacccacgcaggccagtggatgtacaatttggccgaaactacgtgcccacatgggcctttgatcacatcaaatatttcaatggtggttctgacattcagcttcatcttgacaagtacactggtactggcttccagtccaaagggtcttacttgtttggtcacttcagcatgtacataaagatggttcctggagattctg

SEQ ID NO: 193994 - DNA, 276 bp, Glycine max
aaagcctagtgttacctgtggcaccgtcgaagctcgcagcattgtcgaacccaaacgcaacattttcaggaagaaaaagatggacatgcaatttagtgaagcagaatgtctcaagattgatgcaacaaacaggaaagtttactgtcgatctaatataagtaataatttgaacgagaaagaagagtttgtggtggactatgactacctaatcatagccgtgggagcaaatgtcaacacatttaatactcctggagtgatggagaattgtcatttctt

SEQ ID NO: 193995 - DNA, 271 bp, Glycine max
gtcctctgagactttccttcagtccttcaccttctttctctctaggcgcaaaacctcgtactgtttgtggcggctaaggatgtcagggaaaggggcgaaggggttgatcacaggcaaaacctccgccgccaacaacaaagacaaggacaagaagaaacccatctcgcgttcttcacgtgccggccttcagttcccagttggccgtatccaccggcttttgaagtcaaggacaaccgccaacggtagagttggggccacagctgctgtctac

SEQ ID NO: 193996 - DNA, 273 bp, Glycine max
gcgattcccgatcgaaaccctaactcgcgatggcgatcttgctgcaccgaaattcttcaatcgctggagctgtgagctgaactgatcaagaacccgcagcctcagccctacgtgaaccctaatctggaccccgttttgctggtgcccggtgtcggaggctccatgctgcacgccgttgacgaatccgaaggaagccgagaacgcgtctgggttcgcttcctcaacgccgagtacacgctcaacaccaagctttggtcgcgttacgatccttcc

SEQ ID NO: 193997 - DNA, 265 bp, Glycine max
tccgaattagggttttccagcccgcagagcaactcaacacaacgaaccaacccaacaatgtcgcagccgcagcctcagtcgcagccgcaacacgggcaagcggcgctggagcaggtgcagtgcttcggtcgcaagaagacggcggtggccgtgacctactgcaagcacgggcgcggcctcatcaagatcaagggtgccccatcgggttcgtcgagccggagatcctcggctttaaggccttcgagcccatctcctgttgggaaag

SEQ ID NO: 193998 - DNA, 256 bp, Glycine max
ggccgatgccgaggatattcaacccctcgtttgcgataatggaaccggaatggtcaaggctggttttgccggagatgatgcgccgagggcggtgttccccagcattgtggggcgtccacgtcacacgggagtgatggttgggatggggcagaaggatgcgtatgttggggacgaggctcaatccaagaggggtattttgactctcaaatacccaattgagcatggaattgtgagtaattgggacgacatggagaag

SEQ ID NO: 193999 - DNA, 270 bp, Glycine max
tctagctctaccacttaataataatatctttagacgttgattcatatatatctagctttctagctccatcatgaagactggaaacagatttgtggggatagctcatgccaagcagaaacttcagagaacactttcacaaagaatcaaaatggcttcagctgttgctgatgttccaaaaggccacttggcagtgtacgttggagagaaccataagagcgttgtgatcccaatatcttacctaagccaccctttattcagagactcgttgga

SEQ ID NO: 194000 - DNA, 267 bp, Glycine max
atttattgtcactacctccccgtgtcaggattgggtaatttgcgcgcctgctgccttccttggatgtggtagccgtttctcaggctccctctccggaatcgaaccctaattctccgtcacccgtcaccaccatggtaggccactatcctaccatcgaaagttgatagggcagaaatttgaatgatgcgtcgaggatttgggattgggaaggcgagggattgcgctgcgtctcttcctcttctctttcgattcatccctcattcataa

SEQ ID NO: 194001 - DNA, 274 bp, Glycine max
gtttgattagctctaataaggttaaggaccagagagagaaagagaaataagaagaaaaacacaagatgggttattggaagtctaaggttcttcccaagatcaagaaggttttcgagaagaatagcaccaagaaagctgctgctgctgaggccaccaagtcctttgatgagtcaaaggaggaatacaacaaagcctttgaagaaaagaagactgaacttcaaaccaaagttgttgaaatatatgaggcttcatcaactgaaatcaagagtttggt

SEQ ID NO: 194002 - DNA, 284 bp, Glycine max
tgcgaattcggctctagggaacgcgcaaacttcaggaggataaggtggaagaatcagaagtagagctttttgaggtttatgatgtggtcctatacatgggcataattgatatattgctgagactccaagaacatgcagtctagagaaatttgtttgaatagggattctcgtaattttttatccatatgaaattcatattttagatcaagatctttcaatgttgtattgctattaattttatctttgtctgtatatcttccttgagtagaccccttcagatcata

SEQ ID NO: 194003 - DNA, 268 bp, Glycine max
cgacacactcccatacacacacgttgtctcgcacacattccttcattccgcagcagcaaacatctttaccttaaacgacaacaatggccgatgccgaggatattcaacccctcgtttgcgataatggaaccggaatggtcaaggctggttttgccggagatgatgcgccgagggcggtgttccccagcattgtggggcgtccacgtcacacgggagtgatggttaggatggggcagaaggatgcgtatgttggggacgaggctcaatc

SEQ ID NO: 194004 - DNA, 268 bp, Glycine max; identical to SEQ ID NO: 153128

SEQ ID NO: 194005 - DNA, 268 bp, Glycine max
ctcgagccgctcgagccgctcaaagattaagccatgcatgtgtaagtatgaactaattcagactgtgaaaacgcgaatggctcattaaatcagttatagtttgtttgatggtatctactactcggataaccgtagtaattctagagctaatacgtgcaacaaaccccgacttctggaagggatgcatttattagataaaaggtcaacacaggctctgcctgttgctttgatgattcatgataactcgtcggatcgcacggcctttgtg

SEQ ID NO: 194006 - DNA, 271 bp, Glycine max
agcgttctatatattattgaattgacaatgaggcctgctcttgctttgcttcctcttctatttgctttcttgttagctgccactacggaatcaagaaaagatccaggggaatattggaaaatgatcatgaaagatcaggaaatgccagaaggacttcaaggtcttgtttcatttcaatctgaaaataaccctaagactcaagagcagcttggtaaaggttccaaaaaccattgtgaagagtctctagttacaaatacacaagttaacagtg

SEQ ID NO: 194007 - DNA, 276 bp, Glycine max
aattcggctcgaaggacacttggattgtgagtgccagtgatgatcagaccattcgcatttggaactggcagtcacgtacctgtatatctgtattaactgggcacaatcactatgttatgtgtaattcattccatccaaaagatgataatgttaagtcatcttccctggatcaaactgttcgtgtttgggatattggttctctcaaaaggaaggccgggcctgctgcagatgacatcctacgattgagtcaaatgaacacagatctttttggaggtg

SEQ ID NO: 194008 - DNA, 268 bp, Glycine max
catcagcacaacacaacaattcactaagctaaaatcacttcatcatggcttcctcgtgtgcttcctctgccattgcagctgttgccatctccacaccaagttcccacatgaatggatcactcttgggaagcacaaaagcttcttttcttagtgggatgaaactgaaggtgaacaactttacagcaccagttggagcacgatccagcactacagtttgcgcagatcctgagcctgataggcctctgtggttcccaggcagcacccctcc

SEQ ID NO: 194009 - DNA, 266 bp, Glycine max
gggaacgctactacttctgagatgcgtgttggatcaacggctaattgttgttacctgcagctggaagctcctcaacagaataatgtaaccgagtcatcatcagatatgtcagatcggatgatcaagatccagatcgcaaatcaccctctttatccagatttactctctgcatatatagaatgccaaaaggttggagcaccgccggaactggcatgccttcttgaagaaataggccgagaaagccaccgcatgaatgctcgccgtga

SEQ ID NO: 194010 - DNA, 261 bp, Glycine max
cgggtggtgacttgtgctcatgtcctacagggatatggtctgactgaaacctgtgcgggaacctttgtctcattaccaaatgaaatagaaatgcttggaacagtgggccctcctgtaccaaatgtggatgtttgcctggaatctgttcctgaaatgggatacgatgccctagcaagtacaccaagaggagaaatttgtgtaaagggaaaaaccttgtttgcagggtactacaaacgtgaagactccctaaagaggttctga

SEQ ID NO: 194011 - DNA, 269 bp, Glycine max
cgcagctttaagctcagggaaacgttttatttcacactctgcgattcgcgatggccgacgatgactatgaggatatcgacatggggtacgaggatgagccaccagagcccgagattgaggaaggtgcagaggaagatttggagaacaaaaacgatgagttaactggagagcctattgacactgaggataaggaagaggaacaaccagtggagcggcctcgaaagacatcaaaatatatgactaagtatgagcgtgctaggattttaggt

SEQ ID NO: 194012 - DNA, 267 bp, Glycine max
actcgagccgaatcggctcgagcttagcttttgtttgtcccatcaaacttttgaagatggccacgagaagtgttgctgctaataccttcttttgagagtactagcttggcttctctggatcaaaagttggccatggccaagcgctgctctcatgagggtgcgatggcaggagccaaggcagctgttgctgctactattgccactgccattccaactctggctagtgtaaggatgctaccttgggcaagagcaaatctcaatcacact

SEQ ID NO: 194013 - DNA, 264 bp, Glycine max
ggtcctttgagatgttggcctggtggcttgtgtctctcacgatccattggtgatatggatgttggtgaatttattgtccctgtaccacacgtaaagcaagtcaagctttccactgctggaggcaggcttattctcagcagtgatggtgtctgggatgctctaagtgcagaaatggcccttgattgctgtcgtggcatgtcacctgaggctgcagcaacccatattgtgaaagtacgctcatcttttgcacaattttttaatgct

SEQ ID NO: 194014 - DNA, 264 bp, Glycine max
aagcatattcctgagtcaaatagttctgtccatatagaatttgtgaagtgagagtccaacctttcattttcaattttcaaagatgcctcgtggaacacttgaagttgttctgatcagcgccaaaggaatcgatgacaatgattttctctccagcatagatccttatgtgattctcacatacagggcacaggagaaaaagagcactgtgcaagaagatgctggatccaagccacaatggaatgagagctttcttttcactgtctc

SEQ ID NO: 194015 - DNA, 262 bp, Glycine max
gtgctttgtttcactctttgctcttgatttcttcccttgtattggcttctcaaatccatgtttcctctgggaaactagtccctggactatcatggaattactatttgttgacatgtcccaagcttgagaggattataaggaagcatcttgaggatgtcttcgagaaggacagtggagtagctcctggcatacttcgactcttcttccatgactgctttcctaatggatgcgatgcgtctatattgttgaatggagacggtga

SEQ ID NO: 194016 - DNA, 266 bp, Glycine max
  unsure (1)..(266): unsure at all n locations
aggaaggcaagtttatntagggggttatgatatggaaganaangctgcaagagcttatgatatggccgcactcaagtattggggaaatcctcccatatanatttcccttnggaaaattatcaaaacgaantngaggaaatgaagaacatgacgagacaagaatatgtagctcatttacgaaggaaaagcagcggattctcaagaggggcctccatgtacagaggagtaacaaggtctcacaggctagcatttacacagcaccacca

SEQ ID NO: 194017 - DNA, 269 bp, Glycine max
ctcacccattttaatcgtagccaaacactctgaaattctcagttatgtcgtggcaagcgtatgtggatgatcacctactgtgtgaaatcgaaggtaaccacctcactcacgccgctatcatcggccaagacggaagcgtttgggctcagagcaccaacttccctcagttcaaacctgaggaaataactgccatcaataatgactttaatgagcctggatcacttgctccaactggattgtatatcggtggcaccaaatacatggtcatc

SEQ ID NO: 194018 - DNA, 262 bp, Glycine max
cttgtctcaaagattaagccatgcatgtgtaagtatgaactaattcagactgtgaaactgcgaatggctcattaaatcagttatagtttgtttgatggtatcttctactcggataaccgtagtaattctagagctaatacgtgcaacaaaccccgacttctggaagggatgcatttattagataaaaggtcaacacaggctctgcctgttgctttgatgattcatgataactcgtcggatcgcacggcctttgtgccggcga

SEQ ID NO: 194019 - DNA, 260 bp, Glycine max
ctatgctcacattgaggccggtttgtctgcactgcagattccccctgagtataagtatgcaaaggagcttttcaaggtgtgtgatgctgatagggatggaaggatcgattaccgcgactttaggcgttacatggatgacaaggagttggagctttaccgcatatttcaggctattgatgtggagcacaatggctgcattctccctgaagagctttgggatgctcttgtcaaggctgggattgaaattgacgaggaagagc

SEQ ID NO: 194020 - DNA, 264 bp, Glycine max
  unsure (1)..(264): unsure at all n locations
cttccaactcctacaacgcttttctctgcactcatgggcaaggtcnagatcggaatcaacggatttggaagaattggccgtttggttgccagantcgctctgcaaagagacgatgttgaactcgttgccgttnacgaccctttcattaccaccgattacatgacatacatgtttaaatacgacagtgttcacggacactggaagcatcacgatgtcaccgttnaggacgagaagacccttctcttcggtgacaaggcagtcact

SEQ ID NO: 194021 - DNA, 255 bp, Glycine max
gcaagtgtcttcaatgaaggaagctttctctttattcgacacagacggtgacggtcggatcgcgccgtcggagctggggatcctgatgaggtctctgggagggaacccgactcaggcccaactcaaagccatcgtggccgaagagaacctcacggctcccttcgacttcccccgattcctcgatcttatggccaaacacatgaaacccgaacccttcgatcgccaactccgcgacgccttcaaggtcctcgacaa

SEQ ID NO: 194022 - DNA, 264 bp, Glycine max
ttcggctcgagctcactgcagatctcaattgcatcgctgtccatggctaccatcgttagcatcaaggcccgccagatcttcgacagtcgtggcaatccaactgtcgaggtggatttgacttgctccgatggtacttttgccagagctgctgttccaagtggtgcatccactgggatttatgaggcccttgaattgagagatggaggatctgactaccttggaaagggcgtatcaaaggctgttgacaatgtgaacaccgtcatt

SEQ ID NO: 194023 - DNA, 260 bp, Glycine max
aaatgctcctttcatgttgaacttggattgtgatcactatgtcaataacagcaaggctgcccgagaggccatgtgcttcttgatggacccacaaactgggaagaaggtctgctatgtccagtttcctcaaagatttgatggtattgatacacatgatcgttatgccaacaggaacacagttttctttgatattaacatgaagggtctagatggtattcaaggtcctgtatatgtggggactggatgtgttttcaggaggc

SEQ ID NO: 194024 - DNA, 261 bp, Glycine max
ttggccgtatcataaatgtcattggagagcctattgatgccaagggagaaatcaatactgagcattatttgcccattcatagagaagctcctgcttttgttgagcaagaaactgcacagcagattcttgttactggaatcaaggttgttgacctgcttgcaccatatcaaagaggaggaaagattgggttgtttggtggtgctggtgtaggaaaaactgtgcttattatggaacttattaacaatgttgcaaaagctcatg

SEQ ID NO: 194025 - DNA, 267 bp, Glycine max
tcgaatcatgtgtgtttcataatcatatgaagctctgccggtttcacaattaacccgacaagtacataatgtactttttgatgtgatcttgacttgcgggacagagctgccctcgagaaaatattttcaaccgtaaagtttgatgccgtcatacattttgctgggcttaaagcagtgggtgaaagcgtgaagaaaccactgctctactttgacaacaatttgatagggacaatcgttctatttgaagtcatggctgcccacggatgc

SEQ ID NO: 194026 - DNA, 250 bp, Glycine max
ctttcttcctactactcccattcccacatttcgacaacatcgacgaggacttcgacatgccgacggcggaggcaatgggcgaggacttcgacttcgccggcgccaccggggcgacctcgacggcagcagcagcaaccccatcttgaaggtcggcgaggagaaggagattggaaaagagggtttgaagaagaaactacttaaagaaggtgaaggatgggacactcctgaagttggtgacgaattcaagttc

SEQ ID NO: 194027 - DNA, 257 bp, Glycine max
gcggcattaaaaatgcagatcttcgtgaaaaacctaacggggaagaccataaccctcgaggtcgaaagcagcgacaccattgacaatgtcaaggctatgattcaagacaaggaaggcatccctccggatcagcagcgtttgcttttcgccggaacgcaacttgaagatggaaggaccttggccgattacaacatccagaaggaatcaacccttcaccttgtcctcaggcttcgtggtggcatcatcgagccttccct

SEQ ID NO: 194028 - DNA, 256 bp, Glycine max
gtttctgggtcgcttctcctttcagccccttagggaaaatccgttatttgggccctcttcatccaccttaacaaagatgggagcacttcggtgggatgatgttgtgaatcatcatcaagcatggagactcgtcacttgcatttggttgcatgctggagttgttcatttagctgccaacatgttgagtctggtcttcattggcattcgccttgaacaacaatttgggtttgtgaggataggaatcatttacttgttg

SEQ ID NO: 194029 - DNA, 255 bp, Glycine max
tctcaatcgaacaacacagcacaatccttaaactctctctctctctctctctctcttccatgccgttgatggcgtcacaagcaagcctcctccttcagaagcagctcaaagatctttgcaagaaccccgtcgatggcttttccgccggtttggtcgacgaaaccaacatttttgaatggagtgtgactataattggacctcccgatactctttatgaggggggatttttcaatgccattatgagctttccaccca

SEQ ID NO: 194030 - DNA, 266 bp, Glycine max
gaacgagtgaccttcttcgtttctcgcaaagtttaagtaatcatgggtaaggaaaaggttcacatcaacattgtcgtcattggacatgtcgactctgggaagtcaactaccactggtcacttgatctacaagcttggaggtattgacaagcgtgtgattgagaggttcgagaaggaggctgccgagatgaacaagaggtcattcaagtatgcctgggtgctcgacaagctcaaagctgagcgtgaaagaggaattaccattgatat

SEQ ID NO: 194031 - DNA, 260 bp, Glycine max
cgaaaatgagcggacggaggcggaagaagaagggagcgagctttgtgatcgattgcgcgaagcggtgggaggataagattatggacattgcttctctggagaagttccttcaggagaggattaacgttggcggcaaggccggtgcactcggcgattccattactgtcactagggacaagagcaagatcaccgtcacctccgacagcaacttctctaaacggtatctgaactatttgaccaagaagtacttgagaaagcac

SEQ ID NO: 194032 - DNA, 263 bp, Glycine max
gcttcaatcaccgaccacaccacccatcaacgacatgcttcctcttgcccttctcaagactgcccaaggccaccctatgttggtggaactggaaaatggggagacatataacgggcatttggttaattgcgacacatggatgaacatccatctgcgagaagtcatttgtacatctaaagacggagatagattttggaggatgcctgaatgctacatacgaggcaatacaatcaagtaccttcgagtacctgatgaggttattg

SEQ ID NO: 194033 - DNA, 255 bp, Glycine max
ctcccctgcaatcaacggcaccccccacaaagatgacaggagagacagtgaacccaaaagcttaccctttggccgatgcgcaactcgcaataacactcttggatcttgtgcaacaagctgccaactacaagcaactaaacacgggtgctaatgaagcgactaagacactgaacagaggcatttctgagttcgttgtgatggccgcagacactgagcctcttgagattcttctccatcttcctctccttgctgagg

SEQ ID NO: 194034 - DNA, 254 bp, Glycine max
ctcccctgcaatcaacggcaccccccacaaaaatgacaggagagacagtgaacccaaaagcttaccctttggccgatgcgcaactcgcaataacaatcttggatcttgtgcaacaagctgccaactacaagcaactaaaaaagggtgctaatgaagcgactaagacactgaacataggcatttctgagttcgttgtgatggccgcagacactgagcctcttgagattcttctccatcttcctctccttgctgag

SEQ ID NO: 194035 - DNA, 254 bp, Glycine max
cgggatcatctgatcccgattcaggtaaaggaaagatgcaagatggagaaggacataactcatggctttcacttggtaaagggaagatcaggtcatgccatggaagactatcttgttgctcaatttaagcaagttgacaacaaagagttgggtttatttcgcaatactgtgatgggccactctggtcacagtgtacctgattacttgaagtctcatttgtttgataatatcttgaaagagcctaacttctggac

SEQ ID NO: 194036 - DNA, 260 bp, Glycine max
cctcgagccgaatcggctcgaggccaaaccaaaattgaaagctctgacattgggataaagtgcgtgcgacctcagaccgtgctactgtgtgggaccagatcaaatcaagctcctttcagttaaatgaggacatgatggaatcgttgtttggatgcaaagccacgaattttacccccaaagaacctcccagaaagaaatcagttcttccttctgttgatcaggagaacagggtgttagacccgaagaagtcacagaacata

SEQ ID NO: 194037 - DNA, 261 bp, Glycine max
gaatcaggagggtggttggagaggaccacggttgaggacatggacatagcagttcgagctcacttgaatggatggaagttcatcttccttaatgatgtcaaagttctatgtgagttaccagagtcttatgaagcttataagaaacaacaacatcgttggcactctggcccaatgcagcttttcaggctatgtcttcctgctatactaacttccaagatatcagtatggaagaaggctaatttaatatttttgttcttcctg

SEQ ID NO: 194038 - DNA, 258 bp, Glycine max
ggggtttgatcgtttttttgagagggagcttgaaattcttggtagcatcagacaccgttatctagtgaatttacgaggatattgcaattcacctacgtcaaagttgttaatatatgattacctaccaggtggtagtcttgacgaagcacttcatgaaagagctgatcaactagactgggattcgcgcttgaatataatcatgggagctgcaaaagggcttgcctacttgcaccatgattgttcccccaggatcataca

SEQ ID NO: 194039 - DNA, 279 bp, Glycine max
gcgcgtaattctgctcgatattggcttcctacggatagaaagagtggtacttcttttcaccactggaccggaaatacccgactggttccaggccgaaccgggcggcgggaaccggttactggaaggcaaccggggcggataagcccattggccaccccaaaccggttgggataaaaaaaagctttggtgttttacgcagggaaagctccgaaaggggacaagagcaattggatcatgcacgagtatcgtctcgccgatgtagatcgctccgttcgcaaa

SEQ ID NO: 194040 - DNA, 263 bp, Glycine max
ctgggttacaagagcatactgccacaaggttcttcgtctctcagctgctactcaggatttaccaaagtctgtaatttgcaatgttcatggtgtgaatcccaaattcttgaaaattggagaaaagattgctgcagagagggagctagggcagaaagcctttacaaaaggggcgtatttcttgggaaagatggtgtgggcaaagggatacaaggagtgccccatttgtatcccgggaagttttcgaaagcaagacggagtataat

SEQ ID NO: 194041 - DNA, 253 bp, Glycine max
tagagagaagatggggaagaagacgaagaaacccggcaaaggcaaagagaaaaccgagagaaaaaccgcgagagccgaagagaagaaagctcgcagggaaaccaagaagctctctcccgaagacgacatcgacgccattttgttgagcattcaaaaagaggaagctaagaagaaggaggttcacgtcgacgacaacgttcccgcgccttctcctcgctccaactgctccctcaccgtcaatccattgaaggag

SEQ ID NO: 194042 - DNA, 257 bp, Glycine max
gagagtccaacctttcattttcaattttcaaagatgcctcgtggaacacttgaagttgttctgatcagcgccaaaggaatcgatgacaatgattttctctccagcatagatccttatgtgattctcacatacagggcacaggagaaaaagagcactgtgcaagaagatgctggatccaagccacaatggaatgagagctttcttttcactgtctctgacagtgcttctgaacttaatctgaagataatggataaaga

SEQ ID NO: 194043 - DNA, 259 bp, Glycine max
aaagaaagaaggattaagcatatattcatcagaaagattaagcataatcatcagaaaaatggcatgcaatggattctgcctcagactcattgctttagttcttgtgattagcatatcaagtgttaattgcatagaaactgatgcagttgaacccattattgatattgcttcgctgaatcgagatagtttcccaccagacttcatctttggggctgggtcgtcatcataccagtttgaaggtgcagcaaatgagggtggt

SEQ ID NO: 194044 - DNA, 253 bp, Glycine max
gagaagtgttcacgtctttgagaaatgggtgcttcggcatcggtcacagaaaaatccatccatgaattcatggtcaaggatgctaagggcagagacgtgaacctcagcacctacaaagggaaggttcttcttgtagttaacgtcgcttcaaaatgtggatttacaaattccaatcacacccagttaactgagctttacagcaaatataaagacagaggtcttgagatactggcatttccatgcaaccagtttc

SEQ ID NO: 194045 - DNA, 220 bp, Glycine max
acagcactctccctaatccttctgtgtatgcaaaatgagaccatgcaaatgcaaatgcaatgttctctctgctctcattcttcttgtcacattcctttttattgcttcttccgtccactgtgaagacccatctcggtacctcacttggacggtcacctatggtgacatctatcctctcggtgtcaagcagcaagggatcgtaattaatgtggagtttcca

SEQ ID NO: 194046 - DNA, 259 bp, Glycine max
cacaactccctgccaacatgggtatctccagagattctatgcacaagaggcgtgccactggtggcaagaagaaggcatggaggaagaagagaaagtatgagcttggtcgccagcctgctaacactaagctgtcaagcaacaagacagtcaggaggatccgggttagaggtggaaatgtgaagtggagggcactgagattggatactggaaattactcctggggaagtgaagctgtaactcgcaagactcgtatactaga

SEQ ID NO: 194047 - DNA, 259 bp, Glycine max
cggctcgagagacaccagaggtctcaagatggatggatcaagtcatccctacaatagccccttgtgcatgcagcagaaccatggcaactagggtttcaagatgcagcaacacctataatgcaaggaataatagacttacatcacgatatctttttcttcgtcattcagattggagtttttgtatcatgggtcttgcttcgtgctttatggcatttcaggtctaaaatgaatccaatccctcaaagaattgttcatggaa

SEQ ID NO: 194048 - DNA, 253 bp, Glycine max
attcccattcctattcctcctttccctctcctctccgctcctccaattccccccaaactttctccctccgccgcttcgccgccgcctctctcgcttgccctccaccgccgccgccgcccctcgacgccatggcccagaaaatcggaaagtccacgcgccgccccggtgcctcctccaaggcccgcgtctatgccgatgtcaacgtcgttcgccccaaggaatattgggactacgagtccctcaacgtccagtg

SEQ ID NO: 194049 - DNA, 250 bp, Glycine max
gccacctccaacttctctattgttctctccgtctccctagccttctttttggtgctacttaccaaggcacactcgaccgataccgtttctttcaccttcaacaagttcaacccagtccaaccaaacattatgctccaaaaagatgctagtatttcatcctctggggtgttacaactcaccaaagttggcagcaacggcgtgcccacctcgggatctctcggtcgtgccctttacgctgccccaatccaga

SEQ ID NO: 194050 - DNA, 253 bp, Glycine max
ggctcgagcggctcgagctcgagccgattcggctcgagtgattatgttgataagaagatatatgctcttggaacgaagaactggaatctcaaaaggagaagaaaaagaagctgctaagaaggagttcatagaagcccttaaattgttggaggaacagctgggagacaagacttattttggaggagacaatctaggttttgtggatatagcgcttgttccattctacacttggttcaaagcctatgagactttt

SEQ ID NO: 194051 - DNA, 258 bp, Glycine max
gatggcatgaatctctcagcccctcaaaccttccgctcgaaggaaatttccaagagcaatgttgttgacgatatggtcaacagcaacgccatcctctatgagcctggtgaacatccggaccatgtggttgtcattaagtatgtaccttacgttggggacagcaagagggccatggatgagtactcttctgagatattcatggcgcggaaagaacacaattgtgttgcacaacacttgtgaggattcactgttagctgc

SEQ ID NO: 194052 - DNA, 265 bp, Glycine max
gaagatggaggacgcatcagcatcaaagttcattccacaccaaatcggcggggtccaaaacgacgcgcttcgattcggtctccatggagtcaagagcgacatcgttggttctcaccctcttcaatcttcactccaatctacaaggagaatggatgaagcgatgacgaggcaatgcccagttaacctgtacggaactgcttttcccatgaaggaggagcttgacaggcaaatcctgtccaggttccagcggcctcctggaccaatt

SEQ ID NO: 194053 - DNA, 265 bp, Glycine max
gttttcatattatgtcttcaaagcaaagaacacacaatgttctgaaatccataatcccacatcacatggtaaaacataagaacacatcagatataccacatcacatacacaactcagattatatatgcccaacacataggcaggcacgtaagacttgacacgtgagactccaaccgctcagaaaccatgaatcttgatatgctccttcttcacgataccagcctggaccaggaaggtagaaacattcttcctctgatcaccttga

SEQ ID NO: 194054 - DNA, 248 bp, Glycine max
tatctctctctccactcccatatcgaaacaaagtcgttgtgagttccgccgaaagaccgtacgttgcagcagctatggatttggcatccaatctcggtggcaagattgacaaagccgaagttctctctgccgttcagaagtatgagaagtatcatgtttgccatggaggtcaagaggaagagacaaaagctaattataccgatatggttactaaatactatgatcttgttaccagcgtttatgagtgt

SEQ ID NO: 194055 - DNA, 266 bp, Glycine max
ctcgaccaagaaaaaatggcagagggtctcgttctccgcggaaccatgcgcgcccacaccgacgtcgtgacggcgattgccactcccatcgacaactccgacatgatcgtgacggcgtcgcgcgacaaatccatcattctctggcacctcaccaaggaggacaagacctacggtgtcccccgccgccgcctcaccggacattctcacttcgtccaggacgtcgtcctctcatccgacggtcagttcgccctctccggctcctggga

SEQ ID NO: 194056 - DNA, 263 bp, Glycine max
tcttttcatatccaatattcattccttgtgcttgtgcttgctatggtgatcacattgatgaaccctaccaatgcaaccctctctccccatttctatgatagagtttgccctcaggcattgccagttataaagtcagtggttcaacgagcaattatccgtgagcgacgcatcggagcatctcttctgcgcttgcatttccatgattgtttcgtaaatgggtgtgatggatcaatattgctagatgacacccgaaacttcactgg

SEQ ID NO: 194057 - DNA, 264 bp, Glycine max
gacgaagagcaccatttcgagtccaaggccgacgccggagcctccaaaacctaccctcagcaagccggtaccatccgcaagaacggctacatcgtcatcaaaggccgcccctgcacggttgtggacatttcgacttccaaaactggaaagcacggtcacgctaagtgtcactttgttggaattgatattttcactgccaagacacttgaggatattgtgccctcttctcacaactgtgcatgttcctcatgtcaatcgtactga

SEQ ID NO: 194058 - DNA, 252 bp, Glycine max
tggacatggtggtggacagagatgtcagacacctggatgcaccacaggtgctgagagccgaactgcttattgccaggcccatggtggagggaagaggtgccaacacttgggatgtactaaaagtgctgaggggaagacggattattgcattgctcatggcggtggtaggcgatgtgggtatccaggtgggtgcaacacagctgcacggggtaagtcaggactttgcattagacatggagggggtaacaggtg

SEQ ID NO: 194059 - DNA, 264 bp, Glycine max
cgacaagctcgtgaactcaaagccggtcttccccccctcaagcacaagtttgtcttctggtacacgcgccgaacacctggagttcgaaatcaaacatcatacgaggacaacataaagaaaattgttgaatttagtacggttgacggattttgggtctgctactgccatcttgctcgtcccgcttctttacctagtccaacagatttgcaccttttcacggacggcatccgtcctctatgggcggactctgctaactgcaatggt

SEQ ID NO: 194060 - DNA, 265 bp, Glycine max
  unsure (1)..(265): unsure at all n locations
aangatgcaggcncggcaganttnccggaatttntggcacaccgatctcnngngntccatncaggccgatactccttatngttgccncgcgnngtggtgtgcnccntgtgtgncttnccntctncgcaaacgagcnctcnatgatgatatgtcaaggtacacatgtngtgctggctacatgccttgcngtggtaggtgtggaganagtaaatgtcctgaattttgcctttgcactgaggttttcctctgctttggaaattcagtc

SEQ ID NO: 194061 - DNA, 259 bp, Glycine max
gcaacttcctctgttttgctcccctgtttaagccttatcataagcttagaatggcacacaaggaattttccattgccctagtgactctcattgttctctttgctcgcacgaacctccaaggtgccacggctgactatggtggtggttggcagagtgctcatgccactttctatggtgggggtgatgcttctggcacaatgggtggagcatgtgggtatggaaatttgtatagccagggatatggaactgacactgtggc

SEQ ID NO: 194062 - DNA, 257 bp, Glycine max
taagatgactcctatcttgttcgctctcttctatcttctttgggccgtcacctcatatctagcttcaaccaccgctgatgatgatcatgtgtacgacactgacggcgataagcttcaatacagtgtcaattatttcgtgttgccagtgataagatgaaatggcggtggaatacaagtagcaaaagcaggaaacgaaacttgccctctgactgtggtgcatctggcaacgagctctctgaagggttacgataaagatt

SEQ ID NO: 194063 - DNA, 259 bp, Glycine max
cggagagcttgttattctctatcaacaaggaaaatgtcaggtgaagaggttgttgttgcagctgagccagctgctgccatcccaggcgagcctatggatatcatgactgccttgcaacttgtgctcagaaaatctctggcttatggtggtcttgcacgaggccttcacgaaggggcaaaagtgattgagccgcatgctgcacaactctgtgttctatcagaagactgtgaccagcctgactatgttaaactggttaagg

SEQ ID NO: 194064 - DNA, 260 bp, Glycine max
gctctttgctctgctctgcttagggttccaacttcaaacccaacagcacttatcgttctcatgcaacaagggagaatgaggcctatgttctgtggaatgttgaatatgatgcccggcagtcagagctggagcggctttttagacgatatgggaaggttgatagggtggatatgaagtctggatttacttttatctatatggaagacgagagagctgccgaggctgcaattcgtgctcttgatcgagtagaatttggtcgg

SEQ ID NO: 194065 - DNA, 259 bp, Glycine max
gctatatattatggctagcatgaaggttacatgggtgattgtgctcatgtgcatggccgtggtgggtgcaccgatgatggcgcaagcatgcacatgcaatgatgtgacggtgaacatggcacagtgcctatcctacctgatgcagggaggaacaccttcaacactttgctgcagcggagtcaagaacattcttggctctgctgtcaccaccgttgacaaacaaactgtgtgcaactgtctcacggcggatgctgctagg

SEQ ID NO: 194066 - DNA, 258 bp, Glycine max
ctgtgcggcaattcacttgggtatttgaggatgccaagaatacaactgttgagaatgtgttgatcttggctggagatcatctatatcgaagggactacatggaccttgtgcagagtcacgtggatagaaatgctgatattacagtttcatgtgctgccgtgggtgacagccgtgcatcagattatggattggttaccgtagatgacagaggccgcatcattcaattttcagaaaaacctaagggtgatgatctgaaag

SEQ ID NO: 194067 - DNA, 261 bp, Glycine max
acaaccttaaacctttctttcttgtaaactttattgattgattctgagaatagaactaagagggtatagacatggctagcgcaattgcagcttctgttttggttctgcttctggctttccccactgtatttggagctgaccatgaagttggtgacactagtggatgggccctcggagttaattacaacacctgggcctctgggaaaactttcacagttggtgacactttggtgttcaagtatgactccactcatcaagttg

SEQ ID NO: 194068 - DNA, 258 bp, Glycine max
ctcaaagattaagccatgcatgtgtaagtatggactaattcagactgtgaaactgcgaatggctcattaaatcaggtatagtttgtgtgatggtatctactactcggataaccgtagtaattctagagctgatacgtgcaacagaccccgacttctggaatggatgcatttattagataacaggtcaacacaggctctcctgttgctttaatgattcatgataactcgtcggatcgcacggcctttgtaccggcgacg

SEQ ID NO: 194069 - DNA, 262 bp, Glycine max
gctgcactataccagaatgtctcagggaagaggcagtgcatctttgcctattgtggtcactgtggtttcactactgtgccttttggaacgtgctaacgcagcaacttactccgttggaggacctgggggatggaccttcaacactaatgcttggcccaatggaaaaaggttcagagctggtgatatcctaatcttcaactatgactcaacgacccacaatgtggttgctgtggacagaagtggatacaacagctgcacgaca

SEQ ID NO: 194070 - DNA, 261 bp, Glycine max
tgaaaatgaaggtccttgttttcttcgttgctacaattttggtagcatggcaatgccatgcgtacgatatgttccctctccgaatgaacactggctatggtgcccgtactccggaggtgagatgcgcaagttggcggcttgctgtggaagcacacaacatctttggctttgagaccattcctgaagagtgcgttgaagcaacaaaggaatacatccatggcgaacaatatagatcagactccaaaacagttaaccaacaag

SEQ ID NO: 194071 - DNA, 275 bp, Glycine max
ttcggctcgaggtacccgcctagccattgatttggaaaagtccaagcttcaaagatgagtaagcttcagagtgatgctcttagagaagctatctcaggaatcatgactgattccaaggaaaagaacaggaaatttgtggagaccattgaactccaaattgggctgaaaaactatgatccccagaaggacaagcgttttagtggctctgttaagttgcctcacattcctcgccccaagatgaagatttgtatgcttggagatgcccaacacgttga

SEQ ID NO: 194072 - DNA, 259 bp, Glycine max
gcaacttccttgtctgacagatcctgtgttccggagaaaggcacggaaaggcgagatgtcggggcaaacgcagcgtctgaacgtggtccccacgtgacgatgctgggagtggtgaaggcccgattggtcggcgccacgcgcggccacgcgctcctgaagacgaagagcgacgcgctcacggtgcagttccgccagatcctgaagaagatcgtctccacaaaagaatccatgggcgacatcatgagaacgtcgtcgttcg

SEQ ID NO: 194073 - DNA, 258 bp, Glycine max
tgggaattagggttattcgcgtggcgaagatgattgaggtggttttgaacgatcgattggggaagaaggtgcgcgtgaagtgcaacagcgatgataccatcggcgacctgcagaagcttgtggcggctcagactggcacaagagccgacaagatccgcatccagaagtggtacaccatctacaaggatcacatcactctcaaggattacgagatccatgacggcatgggtctcgaactctactacaactaaacacaac

SEQ ID NO: 194074 - DNA, 260 bp, Glycine max
ttttccctctctttctctggaaaattcccccgattttctcgagaaagtgaaacgtaattatgagctttcaggacatcgaggctgggcggcccttcagttcgaggcgcgggtcgatgaacgggcagcaagacccgacgcaagcggtggctgccggaatattccagatcaacaccgccgtctccaccttccagagactcgtcaacaccctcggaacccccaaagacacccccgacctccgcgaaaaactccacaagacaaga

SEQ ID NO: 194075 - DNA, 260 bp, Glycine max
ctacaatggctactataccagttaatcccaagcctttcttgaacaatttgactgggaagcctgtaattgtgaaactgaagtggggaatggagtacagggctatctcgtttccgttgattcctatatgaacttgcagctggccaacaccgaggagtacattgagggacaatttactggaaatttgggagcgattttaatcagatgtcacaatgttctctaccgtcgaggagtaccggaggatgaggacatcgaagatgctg

SEQ ID NO: 194076 - DNA, 247 bp, Glycine max
aagtaatagagcataatataagagagtgaaaactcatggaggttggcctcaacaagacggagaacatggggtttgaggaaactgagctaaggcttggactgcctggaaacgtaggaggcactggcactgaagaagtgctcatcaggaagagaggtttctctgagactgaaactgaaactgaggaggatgagtctgctaccactgtggatttgatgcttaatctttcttctaaggaagctgctgctgc

SEQ ID NO: 194077 - DNA, 258 bp, Glycine max
cttctctgcagcttttgcctacaactcccttcaccatggctgaacaaaccgagaaagcttttctgaagcaaccaaaagtgtttctcagcacaaagaagactgggaagggaaatagacctagaaaaggtgggaaccgcttttggaagtccattgggcttggatttaagactcccagggaagccatcgaaggaacctatattgacaagaagtgccccttcactggcaatgtttccatccgtggccgtatcttggctggaa

SEQ ID NO: 194078 - DNA, 257 bp, Glycine max
gttgctccagtagccggcactaaacaacatggcggacaaggcagtcaccatccgaaccaggaagtttatgacaaacaggcttctctccagaaagcagttcgtcgttgatgtccttcatccagggagggctaatgtttccaaggctgaactgaaggagaagctgggaagactgtatgacgtgaaagacaccaacactgtatttgtcttcaagttccgaactcattttggtggtggcaagtccactgggtttggtttga

SEQ ID NO: 194079 - DNA, 258 bp, Glycine max
cacatgccccaatgttgaaaacattgtcagagaagcagtcagaaataagtttcatcaaacatttgttccggttcctgctagcattcgtctcttctaccatgattgcttcgtgcagggttgtgatgcctcagttttggttgcatccacaaaaaacgacaaagcagagacggatcacccatataatgtttcactagctggagatggatttgacacagtgattatagcaagagacgcagttgatgcagttccattgtgcag

SEQ ID NO: 194080 - DNA, 261 bp, Glycine max
gctagctggggacttgttctgaattcattcgcggagttggagaagccttattttgagtttctgagacaggacttgggagccgatcgtgtgtgggcggttggaccgttgctccctgaggacgcgaaagaggagcgaggagggtcgagttcggtgtccgtgaacgacgtcgtttcttggttggatgaaaaggaagatttaaccgtggtgtatgtctgtttcgggagcatggctattctgtccaaggatcacacggaggcgatt

SEQ ID NO: 194081 - DNA, 263 bp, Glycine max
gaagtttcctgtgcatcgtctccgaaaatgaacgacgcagatgtctcaaagcaaatccagcagatggtgcagttcatccgccaggaagctgaggataaggccaacgagatctctgtctccgccgaagaggaattcaatatcgagaagctgcagttggtcgaagccgacaagaagaagatcaggcaagaatacgaacgcaaagagcgccaagttgaaattcgcaagaagattgagtactcgatgcagctaaatgcttctcggat

SEQ ID NO: 194082 - DNA, 258 bp, Glycine max
gttagcatagagggtcaaagtctggaagacaagataagcttgcttgcaaagtgtgcttctaccactctttcttcgaagcttattggtggagagaagaattttttgcacccatggttgtggatgctgtaatttcaattggacatgacgacaggttgaacatgattggcataaagaaggttcctggtggtaccatgcgggactcatttctagtaaatggtgttgccttcaaaaagacattttcatatgctgggtttgagc

SEQ ID NO: 194083 - DNA, 259 bp, Glycine max
gttcaaatggcttatgcagtctcagagacagatgctgcgaaggctccacgagcaccggacggagtggaatcatacataacggagatgttccttaggggaaagaaatattacctctatgtacacagttacttgcgatacggtatgctagcagctcgtgcagaggctttaaaggttcgtgattctgaaaatccttgtattttggctggctttgatgggtattacgtatatggcggagtgcagtataaggccaaagctcccc

SEQ ID NO: 194084 - DNA, 255 bp, Glycine max
gcggaatcagcggggaaagaagaccctgttgagcttgactctagtccgactttgtgaaatgacttgagaggtgtaggataagtgggagctggaaacagcgaaagtgaaataccactacttttaacgttattttacttattccgtgaatcggaagcggggcactgcccctctttttggacccaaggtcggcttcggccggtcgatccgggcggaagacattgtcaggtggggagtttggctggggcggcacatctg

SEQ ID NO: 194085 - DNA, 261 bp, Glycine max
aagaaattagcgtgaaaaatgttgggtgtgttcagcagctccatagtgtcgccgccggaggagctcgttgccgccggcaaccgtacaccgtcgcgaagatgacggcggcggcgctgcggaagtggttcgaggagaagaacccctccgcagtgtcggtggaggtcggagagcatgtccagctcgcttatacccaccagaacgagtcgccgtttcagcccagatcctttgctgtgacggctgaggtattctgcttgtttgagg

SEQ ID NO: 194086 - DNA, 271 bp, Glycine max
atgattgttaccatgatacagtccaccagtttgcaccaacctatcacgaatatgttctgtataatcacagcgaaggtgaggagggaactaagaagtacaggtcacgaacttttgttccaattggcccagagatggattctgtgagaagaaataaacatatgtttggaaacaagttagatgacatacagctctcaagtttgtcttattctaccagtagcactccttcaaattctggttccatgcctgatgcttcaaattctgatgcaactaa

SEQ ID NO: 194087 - DNA, 266 bp, Glycine max
aagcagtgggaggaggctcgggactctgaccgcgtgcctgttgaagaatgagccggcgactcataggcagtggcttggttaagggaaaccaccggagccgtagcgaaagcgagtcttcacagggcaattgtcactgcttatggacccgaacctgggtgatctatccatgaccaggatgaagcttgggtgaaactaagtggaggtccgaaccgactgatgttgaagaatcagcggatgagttgtggttaggggtgaaatgccactcg

SEQ ID NO: 194088 - DNA, 264 bp, Glycine max
caaaaccctagcggcgcctgctttcttcgttcgtcttttgcatcagccatcaggatggagtctcaggtgaagcatgctcttgttgtcaaagttatgggtcgtactggatccagaggacaggtgactcaggttagagtgaagtttttggatgatcagaaccgtcacatcatgaggaatgttaaaggaccagtgagagaaggagacattctcaccctactcgagtctgaaagggaagcaagaaggttgcgctagagggtatttttt

SEQ ID NO: 194089 - DNA, 262 bp, Glycine max
agggttttagcgcagttcttctagatttaaggaagatgggtaaggaaaaggttcacatcagtattgtggtcattggccatgtcgactctgggaaatccactaccactggtcacctgatttacaagcttggaggcattgacaagcgtgttattgagaggtttgagaaggaagctgctgagatgaacaagaggtctttcaagtatgcctgggtgctggacaaacttaaggctgagcgtgaaagaggaatcaccattgatattgc

SEQ ID NO: 194090 - DNA, 264 bp, Glycine max
  unsure (1)..(264): unsure at all n locations
ctcctacnacgcttttctctgcactcatgggcaaggtcaagatcggaatcaacggattnggaagaattggccgtttggttgccagagtcgctctgcaaagagacgntgttgaactcgttgccgttaacgaccctntcattaccaccgattacatgacatacatgtttaaatacgacagtgttcacggacactggaagcatcacgatgtcaccgttaaggncgagaagacccttctcttcggtgacaaggcagtcactgtttttg

SEQ ID NO: 194091 - DNA, 264 bp, Glycine max
ggcttcaacatgcaccaagtgtcccattccaggaacggccacctgatgcagagctgctagagagagatggagatcaagatgatagagatgaaagatgggatcccgattctgacagggaggttggcgatgacagcaatcctgttcgcagaagggtgaaaagtgaatgcgttgatgctgaggataaagatacagataggtatcataaacatctagattgtggaagagattatcttacgccttgcaaggagatttcatgctccaagg

SEQ ID NO: 194092 - DNA, 264 bp, Glycine max
ctctgacacatttggggccttgttgagtgtgtttttgcaagagggtatggcgaaggacgttgaggttgctgagcgtggctccttctctgggaaggactaccaggaccctccaccagcaccactcattgatgctgaggagctcacaaagtggtccttttacagggctcttattgctgagttcattgccactttgctcttcctctacattactgtgctcacagttatagggtacaagcaccagacggatcatgctgatgcgtgtgg

SEQ ID NO: 194093 - DNA, 262 bp, Glycine max
ctctgcgctcctgagcagctggtaactcattacaagattggaaggctcaaattaggcgatgttgatgattttctactgaaggtaggtacagttaggggcaagctcaagaagggtggaatagttgacattaatgcggctgcaagaatcgttcttcatgattggaatgaaggtaaaattatatattataccatgcccccaaatagggatcaaggggaaccttcagaggccaatatagtttctgatttttcaaaagagtttaaca

SEQ ID NO: 194094 - DNA, 260 bp, Glycine max
cgcaccgcaaacagtgagccatggccgtcggaaagaacaagcgcatctccaaggggaagaagggtggcaagaagaaggcagctgatccctttcccaagaaggattggtatgacattaaggctccttctggttttcaagtgaaaaatgttggcaaaaccctcgtctctcgtactcagggtaccaagattgcttctgaacgactcaagcatagagtgtttgaggtctccttggctgatcttcaacgggatgaggatcatgca

SEQ ID NO: 194095 - DNA, 262 bp, Glycine max
gtttggaagaagctgatccgagaagatggtgcagcgtctcacctaccgcaaacgccacagctatgctaccaaatccaaccagcacagagtcgtcaagactcccggtggcaagcttgtttatcagaccacgaagaagagggccagcggacccaagtgccctgtcactggaaagaggattcaagggattccacatttaaggccagcagagtataatagatcaaggttacacagaaaccgaagactgtgaaccgtgcatatggtg

SEQ ID NO: 194096 - DNA, 264 bp, Glycine max
ggccgtttcaacaactttggctgtaatggtgggttgccatcacaagcctttgagtacatcaaatacaatggaggacttgagacagaggaagcatacccctacactggaaaagatggtgtatgcaaattctcagctgaaaatgttgccgttcaagtcattgactcggtcaatatcaccttgggtgctgagaatgaattaaaacatgcagttgcatttgttcggccggttagtgtggcctttcaggtggtgaatgggttccatttc

SEQ ID NO: 194097 - DNA, 261 bp, Glycine max
gtccgcaccaccctcggccctcgcggcatggacaagctcatccacgacgacaagggaaccgtcaccatctccaacgacggagccaccatcatgaagctcctcgacatcgtccaccccgctgcaaaaatcctcgccgacatcgccaagtctcaggactccgaggttggcgatggaaccaccactgtggtgttgcttgcagctgagtttttaagggacgctcagccattcattgaagacggtgttcactctcaaaacttgata

SEQ ID NO: 194098 - DNA, 265 bp, Glycine max
caaaatcgaattatcatagaaacaagtgaattgaatttcattgagagagtcagagtgaagtgttgcgcgaatctgaggtgcgcattgcattgtggttgatttgtaagaatggcgccagtgtcggctctcgcaaagtacaagctggtgttcttgggtgatcagtccgttgggaaaaccagcatcatcactcgcttcatgtacgacaaattcgacaacacttatcaggctacaatcggtatcgattttctgtcaaaaactatgtatc

SEQ ID NO: 194099 - DNA, 262 bp, Glycine max
ctcgtggtgttttactgtatggaccccctggcactggcaaaacaatgcttgccaaagctgttgctaatcataccactgccgccttcatcagggttgtaggatctgagtttgtgcaaaagtatcttggtgagggtccacgaatggttcgtgatgtatttcgtctcgctaaagagaatgcgcctgctattatatttattgatgaggttgatgcaatagccactgctagatttgatgcccaaactggagctgatagagaagtaca

SEQ ID NO: 194100 - DNA, 263 bp, Glycine max
  unsure (1)..(263): unsure at all n locations
ccccctggagcgtctggacgccgatgacatcgaggccctccgcgagcgccgcctccagcagatgaagaagatggcggagaagcgctcccgctggatctccctcggccactccgaatattccgagattccctccgagaaagacttcttccccgtcgtcaaggccagcgaacgcgncgtctgccacttctaccgcgaaaactggccttgcaaggttatggacaaacacttaaatattttggcaaagcagcatatcgagactcgct

SEQ ID NO: 194101 - DNA, 259 bp, Glycine max
gaaagaggaattgcgaacgacgaggagcttccgatcccgatttacaacaacctagaacctgtctatggcggaagttccgcactcgaagaagcggaagttcgtttcgacattttgaagtccaaattcatcgatatcttcggccatcatcctcaaatctttgctcgctcacccgggagagtgaacttgattggggagcatattgattatgaaggttattcggtgctgcctatggcaattcggcaagatacgatcgtggcga

SEQ ID NO: 194102 - DNA, 262 bp, Glycine max
ggggtttgcacctctcacctcacgcgggtctcagcagtacgtgtccctcactgtccccgaactcacccagcaaatgtgggacgccaagaacatgatgtgtgccgccgatcctcgccacggccgatacctgacagcatcagccatgtttaggggaaagatgagcaccaaggaagtggatgagcaaatgatcaacgtgcaaaacaagaactcatcctacttcgttgagtggattcccaacaacgttaagtcaagtgtgtgtgac

SEQ ID NO: 194103 - DNA, 265 bp, Glycine max
cggctcgagctctaatggaaggtgaaggaaaagcattcagagtccttggttttaatcaaaatcagagggctgcatttgtgcaaattttgatgaggtttggggttggtgattttgattggaaggagtttacttcccgcatgaaacagaagacttacgaagaaatcagagactatggaacccttttcttgtctcatattgctgaagatataactgattccgccacattcgcagatggcgttccaaaagaaggactccgaatccaaga

SEQ ID NO: 194104 - DNA, 262 bp, Glycine max
tctcgagccgatgaaaatgaaggtccttgtgttcttcgttgctacaattttcgtagcatggcactgccatgcgtacgatatgttccctctccgaatgaacactggctatggtgcccgtactccggaggtgaaatgcgcaagttggaggcttgctgcggaagcacacaacatctttggctttgagaccattcctgaagagtgcgttgaagcaacaaaggaatacatccatggcgaacaatatagatcagactccaaaacagtt

SEQ ID NO: 194105 - DNA, 261 bp, Glycine max
ctcaatctcactgtgttatgagttgtgtgtgagcaccaaccaacaatggtgtcgctgactccgttatggttctttattaccttgtggatcgctggtgcagacgcagcggcggagcccaaacggtgcgttttgacaccggggggttgagcagagacacctttcccaaaggattcttattcggaacggccacgtctgcgtaccaagtggagggtatggcccacaaagacggtcgcggcccaagcatttgggacgtcttcatca

SEQ ID NO: 194106 - DNA, 257 bp, Glycine max
ccaagattgacaggcgatccggcaaagagcttgagaaggagcccaagtttttgaagaacggtgatgctggttttggtaagatgattccaaccagacccatggttgttgaaactttctccgagtatcctccacttggtaggtttgctgttagggacatgcgtcaaactgttgctgtgggagtcatcaagaacgttgagaagaaggatcctaccggagccaaggtcaccaaggctgcccagaagaagaagtgaatcgtg

SEQ ID NO: 194107 - DNA, 265 bp, Glycine max
ttctcgtgaatgctgtgagttggtcacaggtgccaagattccttctcttgggttagggacttggcaagctgaacctggtgttttagctgaatctctcaccacagccattcaggttggatacaggcatattgactgtgctagtgcgtataagaatcaagcagagattggttctgctcgtaagaagctttgtgatgatggtgtgttgaagcgtgaggacttatggatcacttccaaactctggtgttcagatcatgcaccagaagat

SEQ ID NO: 194108 - DNA, 263 bp, Glycine max
gcctgctcttgctttgcttcctcttctatttgcgttcttgttagctgccactacagaatcaagaaaagatacaggggaatattggaaaatgatcatgagagatcaggaaatgccagaaggacttcaaggtcttgtttcatttcaatctgaaaataaccctaagactcaagagcagcttggtaaaggttccaaaaaccattgtgaagagtctctagttacaaatacacaagttaatagtgacttcgaacccataccaagtgttg

SEQ ID NO: 194109 - DNA, 264 bp, Glycine max
caggcgtgagtgccactcttccatctttcccttgtcccagattccctccactcattgcaatttcttcgatccgctttctaaattccacacccctccgttccactgcttcgccgcgacaagttacaagaatggcttcgaagaatgctcaacaagacacgcgcttagccagaatcgcctctgcgatccgagtcatccccgactttcctaagccaggaattttgtttcaggacataaccacgctgcttcttgatacaaaggctttca

SEQ ID NO: 194110 - DNA, 260 bp, Glycine max
cttgaaaatcctactgtggttaccaaggaagatgtgcggccctttgatatagaagggacatggagagctatggaagagtgttacaagttgggaatagcaaagtccattggcatatgcgattatggtatcaaaaaaactcactaaactcttggaaatagccaccattcctcctgcagtcaatcaggtggaaatgaacccatcttggcagcaagggaaactcagggagttctgcaagcagaaaggaattcatgttagtgctt

SEQ ID NO: 194111 - DNA, 259 bp, Glycine max
ctcgagccgaatcggctctaggttttttttactatggcaacgacaccttctaatggagcaacaaagcaacctcccatgccatctcccttgcggttttccaagttctttcagtccaatatgagaattctggttactggaggagctggatttattggctctcacctagttgacaaattgatggaaaatgaaaaaaatgaggtcattgttgctgacaacttcttcactggatctaaagacaaccttaaaaaatggattggcc

SEQ ID NO: 194112 - DNA, 282 bp, Glycine max
tctctgaattcgtctcgagaccatggctagcctcattgctcccatcaccttttcgcctggtttagatgcagaagctcgtagagaagctttccaagtatgggggactgaggagaagaccgttatagcaatattgggtcacagagatgttcatcagaggcaacaaatcagaaagatgtatgaggaaatttaccaagaggacctcatcaaacgcctagagtctgagctctctggtgactttgagagagctgtgtaccgttggatgctggaacctgcagatcgtga

SEQ ID NO: 194113 - DNA, 257 bp, Glycine max
ccaaaaccctacgcccatccaatgccaattcaccctcaatcatggggtctgaaggttccactgtcgtcgttcctaggaacttcagattattggaagagcttgagagaggttagaagggaattggagatggaactgttagctatggaatggatgatgctgatgatatctacatgcagtcctggactgggactattattggcccccctggtactgttcatgaagggcgtatataccagctgaaattattttgtggcaag

SEQ ID NO: 194114 - DNA, 260 bp, Glycine max
cttggacaagggcaagttattaaaggatgggatcaaggtattataacgatgaagaaaggtgaaaattcccttttcaccatcccggctgagctagcttatggtgaaactggttctcctccaacaattccccctaatgcaactcttcaatttgatgtggagctgttgtcttggactagtgtgaaagacatatgtaaggatggaggtttatttaagaagatacttaccaagggggagaaatgggagaacccaaaggatcctga

SEQ ID NO: 194115 - DNA, 256 bp, Glycine max
catatcaaaatgttatttatcagaacaaatttttattcaagaataaagtagttcttgatgttggtgctgggactgggattttatcactatttggtgccaaagcaggggcagaacacgtctatgcggttgagtgctcccatatggctgacatggcgaaggagattgttgaagctaacggttactctaatgttgtaacagttttgaaggggaagattgaagaaattgaacttccagttgctaaagttgatataattat

SEQ ID NO: 194116 - DNA, 256 bp, Glycine max
gttataatcagtggcggcgagaatttgagcagcgtggaggtgtagtcgatattgtacgggcatccggctgtgaacgaggcggcggtggtggcgaggccgcacgagtattggggattgtacgccgtgcgcgtttgtgagcttgaaaaaagggataaaatagaaagagaaacccactgagaaggacataattgagtattgtagtgacaacatgccgcattatatggttcccaaaacggttgtgttcaaagacgagctt

SEQ ID NO: 194117 - DNA, 257 bp, Glycine max
tgaaggggatgctctccatggtcaatgcgggacccatcaccaacggctcccagtgcttcatcactaccacccgcatccctcactttgacggaaagcacgtcgtgttcggtaaggttctgaaagggattggcatcgttcgtgccgcggatcatgttgttcccggggaaaacgaccgtcccactcaggatgttgtgatagttaattgtggggatattgctgaatgggaagattatggagttgttaacttctttaaggat

SEQ ID NO: 194118 - DNA, 263 bp, Glycine max
tgggaagctggatgggtggttcttccagatggttctactttcccatcaagatctcagggtcaaaagccagctggtggtaattctacaattgtcacttcatcatcttcccttgcggcttcacaacagactccatctgcttctctcaggggagttgcttctggctataggagccctttagagtataatgcatgtcaaacaaaaggtgtttttatgcctactccgtctccttatgatctatcctcaagttcccggtctcaaacatc

SEQ ID NO: 194119 - DNA, 259 bp, Glycine max
cggctcttgaggaaactgagttaaggctttgactgcctggaaacggaggcacttaagaagtgctcatcaggaagatgggtttctctgagactgaaactggtcatgaagatgagtctgccaccactgtggatttgatgcttaatctttcttctaaggaggccgcaaccactgctgctgctgctgcagatccaactgataagcacaagactttgcctaatgagaagacccttctgccagcagatcctgctaagcctccagc

SEQ ID NO: 194120 - DNA, 256 bp, Glycine max
gggttactgtctgttcaagctaccatctctctctctctttcttagtgcctccttgccagaagtgaaaatggcccaagaaactttcctattcacatctgaatcagtgaacgaggggcaccctgacaagctctgtgaccagatctccgatgctgtgctcgatgcatgcttggagcaggaccctgacagcaaggttgcctgtgaaacctgcaccaagaccaacatggtgatggttttcggagagatcacaaccaaggcc

SEQ ID NO: 194121 - DNA, 259 bp, Glycine max
gaaaagcaagatggtgaagatttgctgcattggtgctggatatgtggggggtcctactatggcagtcattgcacttaagtgcccatccattgaagtcgctgttgttgatatcgctaaatcccgcattgcagcctggaacagcgaccagcttcctatctatgaacctggccttgatggtgttgtgaagcaatgccgtggcaagaacctcttcttcagcactgatgttgaaaagcatgtctttgaggctgacatagtgttt

SEQ ID NO: 194122 - DNA, 258 bp, Glycine max
cgcagtatctaaagtatgtctccaacagtcacacacaaatgtcctcttctctgaaacgctgcacatcctacaccaaatacgagatcagaaagcgaaaccctgaaccaaaatcatgtgccctattggtaatcgacgtgcaaaaccacttctcatccatggccaccccaatcctccataacctcaacaccaccatctccctctgccgccgcgctgccatccccgtcatcttcactcgccactgccacaagtcaccctccg

SEQ ID NO: 194123 - DNA, 263 bp, Glycine max
attcttatttatttcagattaatacgtgataacctaaacaatatatctatatatagaatatagatagatatatatataatagaacgtaaaaaaaaaaaagaataataaatataaaaaggagcatgtcgattatatagaaagtaaagggcaacaatcattgttgtttaccatgggtaaggacaccatcgctgacataataacctatataagaaatgctgacatgaataaaaaaggaatggttcaaataccatttactaacataa

SEQ ID NO: 194124 - DNA, 273 bp, Glycine max
ccttgcttcatcgtattccacccacctcggaggcctaagccaaagcagatcctgcggacattgtaagtaaatcttatgaagatggagatgataactaatgttaccgagtatgaggcaattgcaaaggaaaaattgccaaagatggtttatgactactatgcatcaggggcagaggatcagtggactttgaaggagaaccgaaatgcattctcaaggattctgttccggccgcgtattcttgttgatgtgagcaagatagacttgactgcaact

SEQ ID NO: 194125 - DNA, 265 bp, Glycine max
ccaccctaacccgacgccaccattcatccgatccaatgagttcgagaggagccagcgcgctgctatctcgagccagcaggattcgctcgaagcttcaaacggcgctggaagccaccgttttggaggtggacgacgtgtcgtaccagcacgcgggccacgccgccgtgaagggaagttccgacaaagaaacccacttccacgtgaagatcgtatcgcccaagttcgagggccagagcctcgtcaaacgacaccgtctcgtctacga

SEQ ID NO: 194126 - DNA, 268 bp, Glycine max
gaaaactcttaaagataggtggcatttgctacaataagaaactagccaagactctcagaacaatatcagagtctggtccaaaagccttttatgaaggattgattggtcttaatttagttaaagatgtccagaatgctggagggatattgagcatgaaagacctcaaaagttacactgttaaacagaaggaacccatatctaatgatgttcttggtctaaagctccttggcatgcctcccccttcaggtgggcatccaatgatgctact

SEQ ID NO: 194127 - DNA, 267 bp, Glycine max
acgtggtgttgttactgctgctcttttctcttttcttttctctttagttctctcttcccctttctttttctttttcttcttcttctgagcttgtttaagcttttcttccattaacatattatcacaatgtgtggtattcttgctgttcttggttgttctgatgactctcgagccaaaagggtccgcgtgcttgagctctctcgcagattgaagcaccgtggccctgactggagtgggctccatcaacatggtgactgctttttggca

SEQ ID NO: 194128 - DNA, 271 bp, Glycine max
gcttaccaaggcgatgatcagtagctggtccgagaggatgatcagccacactgggactgagacacggcccagactcctacgggaggcagcagtggggaattttccgcaatgggcgaaagcctgacggagcaatgccgcgtgaaggtagaaggcctacgggtcatgaacttcttttcccggagaagaagcaatgacggtatccggggaataagcatcggctaactctgtgccagcagccgcggtaagacagaggatgcaagcgttatccgga

SEQ ID NO: 194129 - DNA, 270 bp, Glycine max
cggaggtgaaagttatgtcacactccaaatatacttcagattgaaaacttagaggagttgccattgaccatatgccacttaaataaaagatcaattggaaccaatgctgtgactgtgggttatacaatgaagccttcttgtgtcgaagattttgcaaagaggggtgcatttcctttgtgtcctactcaaaatgggttgatgttgttcctctcacatccaagcttccattatcatctcagttaaaggatgttgacatagttcttcacaaag

SEQ ID NO: 194130 - DNA, 272 bp, Glycine max
cagatgttaaggttggagcacagaaattctcagagaggcaagcattggggacaggagctcagggtgacaaggactacaaggaggcaccaccagcacccttgtttgagccaggggagttaaagtcatggtctttttacagagctgggattgctgagtttgtggccacattcttgttcctctacatcactgtcttgactgtcatgggtgtcaacagggcacccaacaagtgctcctctgttggcattcaaggaattgcatgggctttcggtggc

SEQ ID NO: 194131 - DNA, 276 bp, Glycine max
cgagcctcctattaaacccaagcataaaaagctgttctattaaagacacatccagtacccacataaacaggaccttgaatgccatccaaacctctcaagtttatatcaaagaaaacagtattgcgattggcatatcgatcattcctatcaataccatcaaacctctgtggaaactggacatagcaaacatttttcccaaggttgggatccatcataaagcacatagcttccctcaaggctttactgttgtttatgtagtgatcacaatcaagattc

SEQ ID NO: 194132 - DNA, 278 bp, Glycine max
gtaaggtacctctgtattggggaataactgctgatggctacgtagcatttgctgatgatgcagaattgcttaatggtgcttgtggcaagtcacttgcttctttccctcaaggatgtttctactctacagctgttggaggattgatgtgctatgagaatcctaaaaataagattactgcagttcctggtaatgaggaggaaatctggggagccactttcaaggtgacaaaatgtaacctaggattcccatcttgtgatgtcacggttcataaattctca

SEQ ID NO: 194133 - DNA, 276 bp, Glycine max
ggaaaatcaccactgaatcggggttcatgcaaccgctacaaagtggttcaacctcttcgcaacacaactccatcatgttcaaaacctaactgatagagtgcatggaaccaagctgcatcaaggtgaagactggcatcacaacgagacagtcaagcactggacttataccatagatggtaaggttacaacatgtctggagagtattgaatccattgatgaacagagcaaaacaatcacctacaagctcttcagtggtgacattgcgcataattataa

SEQ ID NO: 194134 - DNA, 273 bp, Glycine max
gcaaattaagaacaaaccataccccaagtcacggttttgccgtggtgttcctgatcccaagatcaggatttacgatgttggtatgaagaagaagggtgttgatgagtttcctttctgtgtccatctggttagttgggagaaggaaaacgtttctagtgaggccctggaagctgatcgtattgcttgcaacaagtacatggccaaattgctggaaaggatgctttccacttgagagtcagggtgcacccattccatgttcttaggatcaacaag

SEQ ID NO: 194135 - DNA, 270 bp, Glycine max
gctctcctatcttttgattaggaaagcggcacataccagggggtagcgactgtttattaaaaacacaggactctgctaagtggtaacacgatgtatagagtctgacacctgcccggctgctggaaggtcggaaggagaagtgttataagctttgaatggaagccccggtaaacggcggcagtaactctaactgtcctaaggtagcgaaattccttgtcgcataagtagcgacctgcacgaatggtgtaacgactgccccgctgtctccga

SEQ ID NO: 194136 - DNA, 270 bp, Glycine max
cagagcgtgaaggcaccggccgccggccatgacattcaagcgcaggaacggaggtcgcaacaaacacggccgtggccatgtcaaattcatccgatgctccaactgcggcaaatgctgccccaaggacaaggccatcaagaggtttcttgtgaggtacattgttgaacaggctgcagtcagagatgtgcaggaagcctgtgtctatgaacaatacacgcttccgaaactatatgtgaagatgcagtactgtgtttcctgtgctatccattc

SEQ ID NO: 194137 - DNA, 270 bp, Glycine max
ctcaaaacaccatagtgagaaatgacttccaagggtgcaattctcttgtgtctcaatgttctcttcttcactgtggttagttccacatatgttccatgcaatccaccccccaaaactcccaaacacccacctgtcccaaagccaccttccccaaagcaagtttcttgccccaaggacactgttaagtttggtgtgtgtgctgatgtgttaggtttgattaacgtgcaactagggaagccaccaaaaaccccatgctgcagcctcattcag

SEQ ID NO: 194138 - DNA, 270 bp, Glycine max
gcaacttccttgtctgacagatcctgtgttccggagaaaggaaaggaaaggaaagatgtcggggcaaacgcagcgtctgaacgtggtccccaccgtgacgatgctgggagtggtgaaggcccgattggtcggcgccacgcgcggccacgcgctcctgaagaagaagagcgacgcgctcacggtgcagttccgccagatcctgaagaagatcgtctccacaaaagaatccatgggcgacatcatgaaaacgtcgtcgttcgcgcttaccga

SEQ ID NO: 194139 - DNA, 270 bp, Glycine max
attttgaaaggcctcttgttgatctgcaaaagaagatcattgatgtacagaagatggcgaacgaaactggactggacttcagtgatcagattctctcattggagaccaagtaccaccaggctttaaaggatctgtatacgcatctgactcctattcagcgggtcaacatcgcacggcaccctaacaggccaactttccttgatcatgtgtttaacataactgagaagtttgttgaactccatggtgatcgggcaggttacgatgatcctg

SEQ ID NO: 194140 - DNA, 270 bp, Glycine max
ccgctcgaggcaagcccactcaaccaccacactcctcctcgttcacgctacccctttctgctcttcttctacctttcaagttttaaaagtataaagatggcagagacattcctatttacctcagagtcggtgaacgagggacaccctgacaagctctgcgaccaaatctccgatgctgtcctcgacgcttgcctcgagcaggaccagacagcaaagttgcctgcgaaacatgcaccaaaaccaacttggtcatggtcttcggagaaatca

SEQ ID NO: 194141 - DNA, 274 bp, Glycine max
ggcccttcctcggagaagattgcacttcccaacaagaactctttgagaggttatgaagtcattgatgccatcaagtctaaggtggaggcactatgccctggagtggtgtcatgtgctgatatcgttaccattgctgctcgtgactctgttgcaattcttggagggccaaattggaaggttaaacttggtagaagggattccacgactggctttttcaaccttgcaaacagtggtgtgcttccaggaccgaattcttccctcagcagccttatcc

SEQ ID NO: 194142 - DNA, 260 bp, Glycine max
ggtaggcctcagctctccaatatgtggtcaatgctgcctttttggctgccctttatagtgattatcttgatgctgctgatacacctggatggtattgtggatctaatttcttgtcaactgatgtgctccgtaattttgccaagacccagattgattacatccttggaaataacccaaggagaatgagttatgttgtaggtttggtaatcattacacaaaacatgttcaccatagaggagcatctataccgaagaacaaga

SEQ ID NO: 194143 - DNA, 265 bp, Glycine max
gaatctacctgtttcccggatgcttagtggacataaggggtatgtttcctcttgtcagtatgttccagatgaagatactcatttaattactggttctggtgatcagacatgtgttttatgggatattactactggccttaaaacatctgtctttggaggagagtttcagtctggacatactgcagatgtacttagtatctcattaatggatccaactcgagaatgtttgtatctggttcttgtgatgcaactgctcgattgtggg

SEQ ID NO: 194144 - DNA, 268 bp, Glycine max
aggagctcaaatatggataaagcaattcaaagacagagagtcctgcttgatcatcttcaacccatttcttcaagttcaaatttttcttctcaaacccatcaatctacggatctctcagcttcattatgttttgccaagaattcttcgcacggtcaaataggtggatcagatgacgacgtggtgattgtagctgcatatcgtactgccatctgcaaagcaaagcgtgggggctttaaggatacccttccagatgacctgcttgccacag

SEQ ID NO: 194145 - DNA, 270 bp, Glycine max
ttcctttctctgctctttgtcttctctgacacatttggggccttgttgagtgcgtttttgcaagagggtatggcgaaggacgttgaggttgctgagcgtggctccttctctgggaaggactaccaggaccctccaccagcaccactcattgatgctgaggagctcacaaagtggtccttttacagggctcttattgctgagtcattgccactttgctcttcctctacattactgtgctcacagttatagggtacaagcaccagacggatc

SEQ ID NO: 194146 - DNA, 273 bp, Glycine max
cttcacttcactaatacatcatggcagacgagacccagaacaagtatgagagctctgaggttgaggtccaggatcgtggtgtttttgactttctcggtaagaaaaaggatgaagaagacaagcctcatcctcaggaggaggtcatcgccaccgagtttcaaaaagtcactgtctcagaccaaggagagaacaagcacagcctcttagaaaagcttcaccgatctgacagcagctctagctcttcaagtgaggaggcaggagaagatggagaga

SEQ ID NO: 194147 - DNA, 269 bp, Glycine max
tcggaacctatgaagtgccagaaggagtggacattctaggaagatacgatgcagagtttgcaaaaatcctcacaaaagacgctttgaaattcgttgctgagctgcaacgtgagttcaggagcgatatcaagcatgcattagagagcagaagagaggcaaagaagaagtacaatgaagggactcttccggggtttgatcctgccacagtcacattagagaccaggagtggctgtgtgcacctgttccaccagctgctgctgataggaaag

SEQ ID NO: 194148 - DNA, 269 bp, Glycine max
  unsure (1)..(269): unsure at all n locations
gcgtgtccttccacattggtagcggcggaccancacgcgagcctacgacggagccatatccgccgctaaaaacgtattcgaaatggcttctgggctcggcttgcccagaatgcgcgttctggacatcggaggcggcttcacctctgggccgccgtttgaagccgcggcattgaaaataaacgctgcgattcaggccagcttcgggaacgaggaagggctcgtggttattggcgaaccgggtcgttacttcgctgaaacggctttcacgt

SEQ ID NO: 194149 - DNA, 269 bp, Glycine max
catggctcctcggtctagcagcaaggacgcccaagaccttttccgcgctctttggtctgcttatgctgcaacccccactaatctcaagatcattgatctctatgtcatctatgccgtattcaccgctttcatccaggttgtttacatggctttggttggatcatttccatttaactccttcctatcaggagtactttcttgtgtaggaactgctgttcttgctgtttgtctcaggatccaagtgaataaagagaataaggaattcaagg

SEQ ID NO: 194150 - DNA, 273 bp, Glycine max
  unsure (1)..(273): unsure at all n locations
gcantttcgcacgctgtctcaccctcttgttctctgtccaccacgnacaagggataannccatncttggaggcaacactttgagatttcacaaaggacccaattccttctctagttcaaggncctagaggtcggatctctatggctgttgcagttaatgtatctcggtttgaaggcatacctatggctccntcctgatccaattctcggagtttccgaggcgtttaaggcagacaatagtgatgtcaagcncaatctggagttggggcanaca

SEQ ID NO: 194151 - DNA, 272 bp, Glycine max
gcttgtcttgtttgttgctacagttttggtagcatatgaatgccatggctcagactaccagaagttccctctccaaatgaaaactgggtttggtgggcaatacagcaatgaggtggcatgtgccagttggaggcttggcgtggaagccaacaacgtagtcaagtggcaaactgttcctgcagcttgcggagagtacatagctgactacgttctaggagaccaatatagatcagattccaaaacagttagccaacaagcttatttctatgcta

SEQ ID NO: 194152 - DNA, 271 bp, Glycine max
ggcagcgccactgcacagcaacgcgaacccaagtgcccactccaattcaaattcaatcaattcagaaccctaactagggttccatccattggttatggcggaggatattccttcttcttctcctccaatagcagcatcagatactgctcctttgggttcgagtgtgatctccttagtgaatcgtcttcaggacatattcgcccgcgtcggctcccaatccaccatcgacctcccccaagtcgccgtcgtcggaagccagagcagcggcaag

SEQ ID NO: 194153 - DNA, 269 bp, Glycine max
cgaagtcgtaggagggtttcaaaagatggagaacatgcagagcttctggcaattgggcgatgaactccgtggacactcaaaagcatcggaggatcacaaatggttaatggttgcttcgaaattggcggaacagacaagattgaagggggagcgtgtgaacaaccttgatctttcaaagggccccattgaaacaaggtcaagggataaatttgggttccaggaagagaacaaatttgattctcttaacttaagcatgttgaacctggact

SEQ ID NO: 194154 - DNA, 271 bp, Glycine max
gcagggtctactgagtggctacaaatgaaccacctttggggtgcaaattggtgcattattggaggacctttaagaggaccattctcagtgaaattgagctcctccactgggagaagcctctctgcaagagatgttattccaactaattgggttccaaaggccacttacacctctcgcctaaatttctacccctaatcacatccttggtgcaattggtacaagtactagtacacccagggctttttcccaaagggggtaactaatatttaat

SEQ ID NO: 194155 - DNA, 263 bp, Glycine max
ggataaaccagtggccaaggaatatatggcgttttctatggttttcattgttagcaacattatgctgcttttcagttcagcatttgccaaaactgctagtcctccctctctgagcccaactccagcaccagccccggcacccgactacgtgaacctcaccgagttgctcagtgttgctggtccatttcacaccttccttggataccgtgagtccaccaaagtgattgacactttccagaaccaagctcacaacactgaagaag

SEQ ID NO: 194156 - DNA, 265 bp, Glycine max
ggcggcatcgcgtcatcgacggggtctggcgacggagctggagcgccatggcgccgacctcaatgatcctctttggcgcgccaagtgcctcacttccttccctcacctcattcgccaagtgcaccttgattacctggaaaatggtgcagacattataatcacagcatcttaccaagccaccattcaagggtttaaagccaaaggctattctgatgaagagagtgaagccttgctcagaagcagtgttgaaattgcacgggaggca

SEQ ID NO: 194157 - DNA, 265 bp, Glycine max
catcgatttcatagatctattaagattatctggaatggcagcaatttacagtctttacatcatcaataaatctggtggattaatctattataaggattatgggtctgctggacgaatggataccaatgatagcttgcgggtggcgagtttatggcactcaatgcacgctatctctcagcagttatcacctgtttcaggttgtttaggaattgaacttctccaagcagatacatttgatcttcattgctttcaatcactgactggg

SEQ ID NO: 194158 - DNA, 262 bp, Glycine max
gtccctcctgtctctgccttataattcttgtgacccttttgggtggtagcattgaaagtgcaccagcaaacgtgaagccaagccattatgctgcacccttcaataggagtgtttttccttctggttttctatttggaataggctctgcagcttaccagatagaaggagcagcagctatagatggcagaggaccaagtatatgggacacctatactaaacagcaaccagggaagatttgggatcatagtgatggaagtctagc

SEQ ID NO: 194159 - DNA, 265 bp, Glycine max
ggaatattcgacaggtagagtttcttcaatggctcctaaagttgataagaagaatgatccaaaggcccaggccttgaagactgctaaggcagttaagtcaggtgctacctttaagaagaaggtaaagaagatccgaacttctgtcactttccacaggccgaagaccttgaagaaggacaggaaccccaagtaccctcgcattagcgccccgccgaggaacaagcttgatcattatcagatcctgaaataccccctcaccactgag

SEQ ID NO: 194160 - DNA, 262 bp, Glycine max
gtttaactgcacggtggctgacatagagaaagtcagatcagatttttcaatgtcaataaccgtggataacacaaagttatgtggatttggagggtggtttgatgtacattttcggggaagaagtgaggatccagctgaacaagagattgagttaaccacagctcccagtgtaaattatggtacacactggggccaaaggttttcctcttgcatcctcccatgcatctgagtgaaggtgatgatttaagggtttcttttctaa

SEQ ID NO: 194161 - DNA, 265 bp, Glycine max
ctcgagccgttcatattcttcttcttcttcttgttcttgttctatctgtgacgagcatcatggcctcgagagcagtgctattgttggctatgtgtgtgcttccggccatggttgtggccattcgcccagcaaagaaccctttttgcgtgacgggtcgcgtctactgtgacccttgccgtgctggttttgagacctcagcaaccacctacattgccggtgctgagattatgttgcaatgcaagagcagggttagcaacgaggttgt

SEQ ID NO: 194162 - DNA, 270 bp, Glycine max
tggacccgattgttcctttgattttccaacgaacaacagcaacgtgctttgcatatggtcaacctgggagtgggaagacatataccatgcaaccattgcctctcaaagcatcccacgatattttaagattaatgcaccacacataccggaacctcggtttccaactgtttgttagtttcttcgaaccatatggggggaaacttttgatctcctcaatgaacgaaaaaaaactttgcatgagggaggatgggaaacagcaggtttgcattg

SEQ ID NO: 194163 - DNA, 267 bp, Glycine max
ctgatttcttgcttctatatattacttgcttcttttcttgatcatgtcccttgctggtaaaatcagctctgaaattggtgttcaggcaaccgctgcaaagtggttcaacctcttcacaacacaacttcatcacgttcaaaatcttactgatagaattcatggaaccgagctgcatcatggtgaagactggcatcacaatgagtcggtcaagcactggacttataccatagatggcaaggttacaacttgcaaggagagtattgaatc

SEQ ID NO: 194164 - DNA, 269 bp, Glycine max
gccgtgcagtacgtgagacacgaccgtggcacccccatgattctagacaacaattactacagaaatatattggacaacaagggcttgttgatagtggatcaccaactagccaatgacaagaggaccaagccttatgtgaagaaaatggccaagagccaggactatttcttcaaggagttttctagagccattactttgctctctgagaacaaccctctcactggcacaaagggtgagatcagaaagcagtgcaatgctgccaacaagca

SEQ ID NO: 194165 - DNA, 272 bp, Glycine max
ctggtctcttgtcttcctcctcatctctacactactccacatatcacgcccagcctctcaagcccaagcccaagcccaagcccaagcccgttcataaaatcctcctgcagcagcacccagtacccagccctctgcgtctcatccctctccgtctacgcctccagcatccaacaggaccctcaccaactggttcagacagcactcccctctccctgaaccgcacccaagccaccaaaaccttcgtggctaactgcaacaaattcagaggcctg

SEQ ID NO: 194166 - DNA, 268 bp, Glycine max
catctgcgatgtcggacgaggtagttctgttggatacatgggctagcatgtatggtatgagggctaggattgcattggctgaaaagggtgttaggtatgaatacaaggaagagaatctcatgaacaggagtcctttgcttttgcagatgaacccaattcacaagaagattcctgttttgatccataatggcaaacccatttgtgaatctgcaataatagtgcagtacattgatgaggtctggaatgacaagtctccactcatgccctc

SEQ ID NO: 194167 - DNA, 267 bp, Glycine max
  unsure (1)..(267): unsure at all n locations
gatcctactanaaccaaacaactactcgttgattgaaagacacagtgtgtgttgtgttgtgttgtgtcggtggcatttttgttggttcgagtgagcgagggaagatgtactctagagattcatggggtggtccgttggagataaacgcgacggactcggcaacggaggacgagcggagccggaacctgcaggacgtggacagggcggcgctgtcgcgtcccttggacgagacgcagcagagctggctcctaggccccggcgagcaga

SEQ ID NO: 194168 - DNA, 266 bp, Glycine max
gcaggtgcagaagatggctcggagctccacaagaatgaaatgggtctctatcttcacacttctattcctctcccactcgcccctcacaatctccgcagaagatgggctagtggcgaatggagattttgaggctaccccaagaaacgggttcccaaacgaggcgattgtggagggccccagcgaggtcccaaactggaagtcaaacggcaacgttgagcttgtggaatcggggcaaaaacagggtgggatgatcctcatcgtaccgc

SEQ ID NO: 194169 - DNA, 263 bp, Glycine max
cgatcgtatatgttttactcatcatccaagctctgttatatgctcttcaaagtacaatttggagtctactggagaatcattgcagtatttatcaatttatgataatcgctgcctacgatacttcaaagggcataaacagagagttgtttctctctgcatgtctccaatcaatgatagcttcatgtctggttctctagaccacagtgttaggatatgggatcttcgggtaaatgcttgccagttgagctcaaggtttaaaaatg

SEQ ID NO: 194170 - DNA, 258 bp, Glycine max
tcgagtttttcattgggaaacacaacccatgaaatgggcaatgcgactaagagttgttctacatcttgcacaagctctagaatactgcacaagcaaagggcgtgctctctatcatgacctcaatgcatatagagttctttttgatgaggatggtaatcctaggctttcaagttttggtcttatgaaaaatagcagggatgggaaaagttatagcacaaatttggcatttacccctccagagtatcttagaactgggag

SEQ ID NO: 194171 - DNA, 264 bp, Glycine max
tctcgagccgctcgagccgattcgcctacgttgtcaccgacaaggggtccggtcggagggtgacgaaccgcgacttattggagtattatcttgaggactattcggggtggttggaggagcgcgtggcgagtgatagctactgggggaagattgtttcgtgtgttagggattctaaagcatgtgggaggatggggataacattaatgggatgcccgagactcctgatatgttctacatcagacatctcacccctattcagtctgg

SEQ ID NO: 194172 - DNA, 270 bp, Glycine max
agttgacttgcttactcgttagagtaggggtcgcgagacagcagagcgtaccgccctgccatagtcgcgagtctgtttatagtcgcgactgttgtcatagtcaacaaggttgaaacttccaggaaaaaacttcgaattgggagggcgatcctcccggtgaactgaccgtaccccaaaccgacacaggtgaacaagtagagtatactagggcgcttgagagaaccatgtcgaaggaactcggcaaaatgaccccgtaacttcgggagaagg

SEQ ID NO: 194173 - DNA, 138 bp, Glycine max
ggcgggcgcaacgccctcgacctattctcaaactttaaataggtaggacggtgcggctgctctgttgagccgcgccactggaatcgagagctccaagtgggccatttttggtaagcagaactggcgatgcgggatgaa

SEQ ID NO: 194174 - DNA, 265 bp, Glycine max
ctctgaattcggttcgacgctgctaatcctaatccataatggtcattccattatggtaagattagtcctacaaaagtaattaagttggccaattcagcacctttgatcaatggtaagctccgttatgctgttaacagtgtctcctatgttaaccctgacacccctctcaagcttgctgattacttcaacattcccggaatcttcagtgtgaatttactccaaaactctccctcaaatggtccaggatacataggcacctcagtgt

SEQ ID NO: 194175 - DNA, 286 bp, Glycine max
ctctagggttatcatatctccatttccatttcctctctctcagtttccaagaatcttaagctatgggaaagtcttacccaaccgtgagcgctgattaccagaaggccgttgagaaggcgaagaagaagctcagaggcttcatcgctgagaagagatgcgctcctctaatgctccgtttggcatggcactctgctggaacttacgacgtgagctcgaagaccggtggtcccttcggaaccataaagcacccctccgaactcgctcacggcgctaacaacggtcttga

SEQ ID NO: 194176 - DNA, 274 bp, Glycine max
cgtctttcttcaccatgtcacttgctgggaaaatcaccactgaaattggggttcatgcaaccgctgcaaagtggttcaacctctttgcaacacaacttcatcatgttcaaaaccttactgatagagtacatggaaccaagctgcatcaaggtgaagactggcatcacaacgagacagtcaaacactggacttataccatagatggtaacgcgacaacatgtctggagagtattgaatccattgatgaacagaacaaaacaatcacctacaagct

SEQ ID NO: 194177 - DNA, 285 bp, Glycine max
cgtcaaagcaacctcaaatgatcatcatgaaacagaacatgcacatgctcactctcacgtggatcacatagatccttctgtgatggtgtttttcaccatcgaagatttgaaggttgggaaaacaatgcctattcattttcccaagagggaccctgcaacatcccctaagttgtggccaagagaagaagcagattcacttcctttctcactgaacaaactcccaaaccttctcaaaagcttctctgtatctcaaaactctcccaaagccaaggccatggaagatac

SEQ ID NO: 194178 - DNA, 282 bp, Glycine max
agacactcgtcgcgatggaacgtgtagctgaatccgagcgaactctgtacccatacgtgactggatcctctgtagttcgctatcaaatacaaagatgggattctaatggccgctgacatgggaggttcgtatggatctaccctgcggtacaagagtgttgagcgtatcaagcctattggaaagcattctcttcttggtgctagcggggagataagtgactttcaggagattctgcgttggcttgatgagcttatcctatatgacaacatgtgggatgatggg

SEQ ID NO: 194179 - DNA, 231 bp, Glycine max
ggaagtgcacttctcaaggcaactgattttggcctgtcggtcttcattgaagaaggaaagttatatcgggatatagttggcagtgcttactatgttgctcctgaagttctgcggcgcagatgtgggaaggaaatagatatatggagtgcaggagtcatattgtatatcttactgagtggagtccctccattttgggccgagactgagaagggaatatttgacgccatattg

SEQ ID NO: 194180 - DNA, 229 bp, Glycine max
gttggggccatagtcacttcctggtccaccagaggcccttaccttagcaagatggatctgcaaaagctacagtctccacacctgcacagagccttttagcgttgagtccacatctggttctgcaatcttgaagcaactttggcaccatccagatgcaatattgtgctgttctgtaaaaacaaatgcatctccagtgttcacctttgcaaaccaggctggatttgacatg

SEQ ID NO: 194181 - DNA, 137 bp, Glycine max
taggaagagaggacaagcctgagccaccaccagagggtcgcttgcccgatgccactaagggttctgaccatttgagagacgtgtttggcatagctatggggcttactgaccaagatatcgttgctctatctgggggt

SEQ ID NO: 194182 - DNA, 131 bp, Glycine max
ccgacttctggaagggatgcatttattagataaaaggtcaacacaggctctgcctgctgctttgatgattcatgataactcgtcggatcgcacggcctttgtgccggcgacgcatcattcaaatttctgcc

SEQ ID NO: 194183 - DNA, 282 bp, Glycine max
agagacgaggaagggcgtagtaagcgacgaaatgcttcggggagttgaaaataagcgtagatctggggattcccgatataggtcaacctttcgaactgctgctgaatccacgggcaggcaagagacaacctggtgcactgcaacatcttagtagccagaggaaaagaaagcaaaagcgattcccgtagtagcggcgagcgaaatgggagcagcctaaaccgtgaaaacggggttgtgggagagctatacaagcgtcgtgctgctaggcgaacagcagagaat

SEQ ID NO: 194184 - DNA, 286 bp, Glycine max
gcgatccgggaaaaactctgtaaacatgttggtttaccaggacctccttacaggtgatgagcgtctctctgactccttccgttacaaggaaattgggaatggaatgctgtgggaagttgaggggaagtgggttgttaaaggagcagttgatgtagacattggtgcaaacccttctgctgagggtggatgagaagatgagggagttgatgatgcagctgttcaggttgttgacattgctgacacattcagacttcaggagcaacccgcattcgataagtagcagttt

SEQ ID NO: 194185 - DNA, 136 bp, Glycine max
cctcgagccgattcggctcgagagaatatgaagttgtttgtcttctacgttgctgcagtagtattggtagcatggccatgccatggcgcaggctaccaaaggttccctctccgaatgaaaactggctatggtgagc

SEQ ID NO: 194186 - DNA, 282 bp, Glycine max
cggagagttgctcttccttctcactctcattgggaggaaaatcttcaaccccaaatggaagccttatattcctgacttcaaacaagcctttgagcacttctgcatccatgctgatgggcgtgctgtgattgatgagctgcagaagaatcttcagctttcggctgaacatgttgaggcatctagaatgacccttcacaggtttgggaacacttcctcttcttcgctgtggtatgagctcaactacattgagtccaagggaaggatgaagaagggtgatagggt

SEQ ID NO: 194187 - DNA, 283 bp, Glycine max
tattgatctaaaggcaaggcgcattgtctccgacaatattcactccgggaatggcttccctaccctttccgttgatgaacaagtcgttgccatagagctgccactgaaatacggtccattcattgagtcagtgaacaagagagggctgaacctctctgaggtggtgtgttccacattcacaatggggtggtttggagaaaccaggacagaaggacagtgagagtggaatgcttcatgaaagaaagcagccccaatatctgggtgaggcctatcagtggactca

SEQ ID NO: 194188 - DNA, 282 bp, Glycine max
gtcacaatggatcgttatgagaatgattggagtgttgtgaaacgagggtgggatgctcaagttcttggtgaagccccttataagtttacaaatgctcttgaagctgtcaagaagctgagggcagaaccaaaggccaatgaccaatatttgcctccttttgttattgttgacgagagtgggaaacctgttggtccgatagttgatggtgatgctgttgttacattcaacttccgagctgatcgtatgacaatgattgctaaagctcttgagtatgaaaatttt

SEQ ID NO: 194189 - DNA, 283 bp, Glycine max
ctcactgaaatggttcgaggactaatgctgactctgaaatacttctttgaaacaaaagttacaatcaattatccatttgagaaaggccctttgagccctcgtttccgtggtgaacatgcactccggcgatatccaacaggggaggaacgttgtattgcttgcaaactttgtgaggctatatgtcctgcacaagcaatcacaattgaggctgaggagcgagaagatggcagccgcaggacaactcggtatgatattgacatgaccaagtgcatctattgtggat

SEQ ID NO: 194190 - DNA, 283 bp, Glycine max
tgaaaatgaaggtccttgttttcttcgttgctacaattttggtagcatggcaatgccatgcgtacgatatgttccctctccgaatgaacactggctatggtgcccgtactccggaggtgaaatgcgcaagttggagcgttgctgtggaagcacacaacatcttaggctttgagaccattcctgaagagtgcgttgaagcaacaaaggaatacatccatggcgaacaatatagatcagactccaaaacagttaaccaacaagcttacttttatgccagagactc

SEQ ID NO: 194191 - DNA, 249 bp, Glycine max
tcttggtttcactgtctatccttcaccccaagtttcaacctctgttgttgagccttacaacagtgtcctctccactcattcccttcttgagcacactgatgtggctgtcctgctcgacaacgaagccatttatgacatctgcagacgttcacttgacattgagcggccaacctacaccaaccttaatcgtttagtttctcaggtgatttcctcactgaccgcttccctgaaggttgatggtgcctgaac

SEQ ID NO: 194192 - DNA, 287 bp, Glycine max
  unsure (1)..(287): unsure at all n locations
gaaagttccaccaccttctgatcctccgttaccgtttgatcctagtcggatgattggtatcatcaagaggaaggccttgatcanagacttagctgcggtataccatgctgaatgccttgcatactgtcaagagcttttggaacttcaaactaaatgggaagagccatttattgacttaaaaactccagaggaatcaaaacttaagacagcacgaccctccaaacgtgtaaaaaagttgcgttaggttttcaggtggttgatgcataactcatttagggcgcaaaaga

SEQ ID NO: 194193 - DNA, 128 bp, Glycine max
gtcgtctttcgcgcagaccaaggtgctgaaagtacaatttggctaattgccaaggcatatgttgttgtcaatggctcctgctatcatcaactcatgaggccactggttaaatactcatgctgtgattg

SEQ ID NO: 194194 - DNA, 202 bp, Glycine max
cacaaccctaccccaatgccaacttaaaggtggtgaagaatgtgcccctcagattcttcatgtggagccaaacaagacctatagaatcaggattgccagcaccactgccctagcttcactcaacttagccatttcgaatcacaaacttgtagcggtggaagctgatggaaattacgtttcaccttttgcggttgatgatatt

SEQ ID NO: 194195 - DNA, 187 bp, Glycine max
cgcatgtcgctgggtcttccagtggcggcgacggtgaactgcgccgacaacacgggggcgaagaacctctacatcatttcggtgaaagggatcaaaggccgtttgaaccgtcttccctcggcctgcgttggcgacatggtgatggccaccgtgaagaagggaaaacccgatctgaggaagacggtct

SEQ ID NO: 194196 - DNA, 285 bp, Glycine max
gcagtttcaaagagaggatttgggattgggaaggcgagggattgcgctgcgtctcttccccttctctttcgattcatccctcattcataatcttccaatccaacaacctcagcctcacactcacacatacacacatctgaacgcgtatcgtccctcccatggcttcaaagcgcatcctcaaggagctcaaggacttgcagaaagacccaccaacttcttgcagcgctggtccagtagctgaggacatgttccattggcaagcaacgattatgggtcctgctgata

SEQ ID NO: 194197 - DNA, 282 bp, Glycine max
gaaaacacctgcttctggcgtcttaaaaatacgtcacactccttctcaaccctaaaatcagtgttctttgtttttttgcagaaaagattaggagatggcgaacgcttgattccctgcttcaatcgcattctcatcgagaaaatcgtccctccctccaaaaccagcgccggcattctactcccggagaagacctaccagcttaattccggtaaggtgatagcggttggacctggatcacgtgacaaggcggggaacttgattccggtgtctgtgaaggaaggt

SEQ ID NO: 194198 - DNA, 284 bp, Glycine max
gcgcagtttgccttcgtttgagctctgttctgttctgtgcctccacaaaccaaaccaggcacaagtaatactgtgtaatccaacaaactgaagtatagctaggtgaaaggaagtagtcaagtacaagagaatggcgaagtcattgagatcgaagagggagaagaggctgagggctattcggagggagattgttgaacctttctatgacaagaaagaagctgctaagcttgctgcccaagaggctgcccttgccgcccctaagctggaggttccttcgaaaccaa

SEQ ID NO: 194199 - DNA, 284 bp, Glycine max
cccacactgcataccttaggtcttccgaattcgaagttaatttgcaagatggctaaggaaaaggctcagatcaacattgtggtggttggtcatgtggaccctgaggaggcaaccaccattaacgagctgaagaagcctgttgtggagaaagaagctccagggcatgccatatgagggcatgcacgtacggcctcggaggggaaccagaaaattatgttaacaaaataatctggaaccctaatgtatcagtgtcatcatcagtgtgtagtttaagctagctttgc

SEQ ID NO: 194200 - DNA, 283 bp, Glycine max
gttggtctttatatttagttattgacatcaacaaagtcatggaggaagttaatgtggttcaaaccaagaatggaactgtttcagtagcttctgcgtttgctggccataaggaagctatacagcaaagggaccacaaatttttaagaattgctgttgaagaagcgtataaaggggtagactgtgaagatgggggtcccttggtgctattatagtttgtaatgatgaaattgttgctagatgtcacaacatggttctgaggaacacagaccccactgctcatgca

SEQ ID NO: 194201 - DNA, 264 bp, Glycine max
gcaagccccactcaaccaccacactcctcctcgtttacgctacccctttctgctcttcttctacctttcaagttttaaaagtataaagatggcagagacattcctatttacctcagagtcggtgaacgagggacaccctgagaagctctgcgaccaaatctccgatgctgtcctcgacgcttgcctcgagcaggacccagacagcaaagttgcctgcgaaacatgcaccaaaaccatttggtcatggtcttcggagaatcacga

SEQ ID NO: 194202 - DNA, 245 bp, Glycine max
agaaagcccatggccttgattaaaaagctccgcaaagcgaaaagggaagcaccagcaggtgagaagccagaaccagttcgcacccatctccgcaacatgattattgtgcctgagatgattggtagcatcattggagtctacaatggcaagaccttcaaccaggttgaaatcaaacccgagatgattggacattatctcgctgagttctctatttcatacaacccgtcaagcacggtaggcctggt

SEQ ID NO: 194203 - DNA, 284 bp, Glycine max
ctcgagccgcttcaaatcacagcattcaagataatacaatacgcaacactttttagaaagccttataactataaactataaaagctttgcccagatgaaattacactgcaggcaaatttttcattcacctttagcttagttatcttcattgtcgcccaaattattctttgtcacatctttgtattagccctggatggcaacaccatggggagcagcatccataggtattatcttctcatattctacacccttgttgttccggttttcataggctgaaatgtgcc

SEQ ID NO: 194204 - DNA, 284 bp, Glycine max
cgcaaacgcaaaaatggtgaagtttctgacaccaaacaaggccgtcattgtccttcagggacgctacgccggcaagaaagccgtgatcgttcgaaccttcgacgaaggaactcgcgagcgcccctacggccactgtttggtggcggggataaagaagtaccctgcgaaggtgatcaagaaggactcggcgaagaagacggcgaagaagtcgcgcgtgaaggcgttcgtgaagctcgtcaactaccagcacctcatgcccacgcgctacacgcttgacgtggact

SEQ ID NO: 194205 - DNA, 278 bp, Glycine max
atccttaccaaagagccttggctcgtttctggtccaaattcattgatgataaggtttttggtgctgcatggaaatccgttttcacagctgatgagaaagagcgtgagaagaatgttgaggaagcaattgaggctctgcagtttcttgagaatgagataaaggacaagaagttctttggaggagaggagattgggttggtagatattgctgctgtctacatagcattttgggtcgctatggttcaagaaattgcagggttggagttattcacaagtgag

SEQ ID NO: 194206 - DNA, 281 bp, Glycine max
caaaatagtgaagaaaaagcgcatacggcgtttgcgaaattgcgatttcatgtcatagagaggaaaagaggagacgcggggcggacagagacgaatggcagatcagagcgagcattacaaaacggcgttgcctccggaggaccaggaccgtcccgttcgggtatacgcggatggcatctacgatctcttccactttggccacgcccgctcccttgagcaagccaagaaatcgtttccgaatacatacttgcttgttgggtgttgcaacgatcaagtcaccc

SEQ ID NO: 194207 - DNA, 181 bp, Glycine max
  unsure (1)..(181): unsure at all n locations
ctcgagccgcgggccttcgccggcagcggcatctccgtgacggtgaccgcccccaacggcgacatcgccgccttaaccanaatcgactcggcgaggcagtgggtggcgacgcacatcaaaccctttcaccctcagaccaaaattaattacatcctcgtgggcagcgaggttctccaggggg

SEQ ID NO: 194208 - DNA, 211 bp, Glycine max
ttcgatgctcagtcatctcttttaccattctcttctctcttgctcttgcaggagagagccatgtccatgcatcgctacctgaggaagattattgggaagctgtttggccaaacactcccattcccactgcactgcgagagcttctaaagcatctccctgcaggtgttgaaatcgatgaactccctaagcaaattgatgatacacagtaccc

SEQ ID NO: 194209 - DNA, 203 bp, Glycine max
gtcgatctggcatatcttccttcgtagatcgaactcgaatcttcttccatggcctccaagcggattctgaaggagcttaatggcctccagaaagaccctccaacctcttgcagcgccggtcctgtagcggaagatatgtttcattggcaagcgactataatgggtcccctgatagcccttatgctgggggtgtttttctagtt

SEQ ID NO: 194210 - DNA, 274 bp, Glycine max
ggacgtcagctcgaactccagccgcaaatttctaatgcacagcctgatgatcttattgatttttaccatctgaagagcaggaagggtatgagccaacttgagctggaagatgaggttcaagacgatctcaaacgtgctactggggagttacaaaggatgcagatgatgcaaataagctcaatcgcattcttcagctcactggattcagtgatcctgtttatgctgaagcatatgtcacagtgcatcactatgacattgtccttgatgttactgt

SEQ ID NO: 194211 - DNA, 258 bp, Glycine max
cgcaaacgcaaacgcaaacgcaaacgcagagcgtgatccattgacgaagatggtgcagcgtctcacctaccgcaagcggcacagctatgccaccaagtccaaccaacacagggtcgtcaaaacccctggtgggagctcgtttatcagactaccaagaagagggccagcggacccaagtgccccgtcactggcaagaggattcaggggattccacacttgaggcctgcagagtacaagaggtcaaggttacccagaaac

SEQ ID NO: 194212 - DNA, 258 bp, Glycine max
ctgcccgctgcagcaatggcttcagagaagaaactttcgaaccccgtgagggagataaaagtgcagaagctcgtcctcaatatctctgttggcgagagtggagatcgtctcaccagagcctccaaggtgttggacaacttagtggccaaaccccagtgttttccaaagcaaggtacactgttcgttcctttgggattagaagaaatgagaagattgcatgctatgtcactgtcagaggtgacaaggcaatgcaacttt

SEQ ID NO: 194213 - DNA, 256 bp, Glycine max
ggtccaggcttcgaaatcaacggacacagtattagttgggccaactggaagttccatattggatttgatccacgtgccggccttgtaatatcactggcatccatttatgatttggagcagcacaaatctcgtaagtgctatacacccgttacatttctgagctgtttgtgccataccaagacccaacagatgatttttactataagactttctttgatgctggagagtttgggtttggtctctccacggtctcatt

SEQ ID NO: 194214 - DNA, 254 bp, Glycine max
cagccacaaccacttctaatggtggtgccatggaggagttgctttcgcaactccaatctaatgtccaaaaggctcttgctggtggaggacccgaggcagtgaagaggaacaagagtaggaacaaatttctgcccgccaaaaagtcgatcgcctccttgatcccggttcttccttcctcgagctttcacagcttgcaggacatgacttgtatgaagaacccttgccttctggtggggttgttactgggataggtc

SEQ ID NO: 194215 - DNA, 257 bp, Glycine max
gtgtggttgattcagatgatcttcctctcaatgtttctcgggagatccttcaagaaagcagaattgtaagaataatgagaaagagacttgtaaggaaggcatttgatatgattcaagaccttgctgaaagtgaaataaagaggactacaaaaaattctgggagaactttggtaggttcataaaattaggttgcattgaagacactgcaaatcataagcgcattacaccactattgaggttttacacttccaaaagtg

SEQ ID NO: 194216 - DNA, 255 bp, Glycine max
cgtccaacagctactccaaggtcaacgacgtgttcttgaacttcagaggagaagacacgcgcaagactttcgtgtctcatctgtatgctgccctctctaatgcaggaatcaacactttcatcgatcacaagcttgcaagggaacggagttgggagaggaactgttagcagtcataaaagggtctcggatatccatcgtcgttttctcggctaactatgcttcatcaacttggtgtcttcatgagctggtcgaaat

SEQ ID NO: 194217 - DNA, 256 bp, Glycine max
gtgagaccctccaggagtactggtggtgcaccgagcgcgccctcgactggggccccggtggtggacccgacctcatcgtcgacgacggtgacgacgctacccttctcatccacgaaggcgtcaaggccgaggagtctatgagacgaccggcgaactccccgaccccaactccaccgacaacgccgagtttcagatcgtgcttaccatcatcagagatgggttgaagaccgatcccaccaggtaccgcaagatgaag

SEQ ID NO: 194218 - DNA, 256 bp, Glycine max
ctcgagccgtgcctcccgtcgctcctcgatccggtgatgccatattcgccaacgtcgaacgcgtcaatgcggactgtttactttgacgtatggcgcaattgtgcgtcaattgctcacggatctggaagaggctaggaggttaacaagcagcttgatcaaatgggttacaatattggaatccgtttgattgatgagtttttagccaagtctaatgtctccagatgcaacgattttcagagagacgactgatgctatt

SEQ ID NO: 194219 - DNA, 254 bp, Glycine max
cgcattcatacgtggtgttgttactgctgctcttttctcttttcttttctctttagttctctcttcccctttctttttctttttcttcttcttctgagcttgtttaagcttttcttccattaacatattatccaatgtgtggtattcttgctgttcttggttgttctgatgactctcgagccaaaagggtccgcgtgcttgagctctctcgcagattgaagcaccgtggccctgactggagtgggctccatcaa

SEQ ID NO: 194220 - DNA, 255 bp, Glycine max
cgcgaatcccctgtgatctctcacacaattccaattcctctggatctcgtctcgatcgatagatctcgaacatgagcactggggagcttctcaacatcgaacctctcgaactcaagttcccctttgagctgagaagcagatctcatgttctcttcaattgtccaataagaccgatagctatgtagccttcaaggtgaaaacaaccaatccgaagaagtattgtgttcgtccgaacactggggttgtcacgcctcg

SEQ ID NO: 194221 - DNA, 251 bp, Glycine max
gcgcactcagccgcagtcgcagccgcagcacgggcaagcagcgctggagcaggtgcagtgcttacgtcgcaagaagaccgccgtggccgtgacctactgcaagcgcgggcgcggtctcatcaagatcaacgctgccccattgagctcgtggagccggagatcctccgcttcaaggccttcgagcctatcctcctgttgggtaagacccgcttcgccggcgtcgacatgcgcatccgcgtcaagggtggcgg

SEQ ID NO: 194222 - DNA, 253 bp, Glycine max
ggggttctcacgatttcgattaaccctttctcccacaaactccgattcttcttgtaaacagcggtgccaggtgttaatctagaagttgatataggatgggggcaatgatgtcgaggttctggttcatgttatccctgcaaaagagtataagattgttgttgttggattggataacgctggaaaaaccactaccctttataaattgcatctgggtgaggttgtaacaaccaatcctactgttggtagcaacgtc

SEQ ID NO: 194223 - DNA, 254 bp, Glycine max
cgttgctacagttttggtagcatatgaatgccatggctcagactaccagaagttccctctccaaatgaaaactgggtttggtgagcaatacagcaatgaggtggcatgtgccagttggaggcttggcgtgaagcaaacaacgtagtcaagtggcaaactgttcctgcagcttgcggagagtacatagctgactacgttctaggagaccaatatagatcagattccaaaacagttaaccaacaagcttatttcta

SEQ ID NO: 194224 - DNA, 242 bp, Glycine max
ggaggttggtgctggtgaccagggtcacatgtttggctatgccactgatgaaacccctgagtacatgcccctcagccatgtccttgcaaccaaactcggtgctcgcctcaccgaggttaggaaaaatggtactgtgcttggctgaggccagatggcaagacacaagtaactgttgagtactacaatgacaatggtgccatggttccagttcgtgtccacactgtcctaatttccacacaaca

SEQ ID NO: 194225 - DNA, 258 bp, Glycine max
gcggaggtggcggtggtggtgtagacacggcgtgacggcgatctcttgagataaatgttggttgaaagaggaagaagaagaagagttgtattgtagaatgagccaaccaacggtgatacttgccactgcgagctagatcacactattcgtttttgggaggccaagagtggccgttgctaccgcaccatccaatatcctgattcgcaagtaaaccggctggagataaccccggataaacgcttcctggctgcagctggc

SEQ ID NO: 194226 - DNA, 133 bp, Glycine max
ggaatcttatcccttacaaggatggatttcccactggtttgcttggaaagagatatcaatcctaccaattcaatggcattctttatgtcctggcttgtttgcttcaattaatgcaacttttggagggctcttg

SEQ ID NO: 194227 - DNA, 252 bp, Glycine max
cggctcgaggcagcaatggtgtacgtcaaggctcagaaatcaaaagcctacttcaagagatatcgagtcaagttcaagagtagaagagagggaaaaaccgattaccgtgccaggattcggttgattaatcggacaagaacaaatataacactccgaaataccgatttgttgttcgctttagcaacaaggacattgttgcacagataatatctgctagcattgctggcgatattgttcttgctgcagcatatg

SEQ ID NO: 194228 - DNA, 252 bp, Glycine max
  unsure (1)..(252): unsure at all n locations
ggtagccagccagtcatggtgctcttcaatgtttcacgcgtagagaccacttcccttcgatggccagaagcctggaacctctggtctccggcaagaaggtgaaagtgttcgtgcaacctcattacctcctaactttgttcagtcaacattcaatgcattaactgtgganaaagttagaggtgcaacgctagttgtatctggtgatggtcgttatttttcaaaggaagcnattcagattataactaaaatgtc

SEQ ID NO: 194229 - DNA, 252 bp, Glycine max
ggctactaccccaacaacgtcactactgatcacattcagcagtatctggatgagaacaagtccttaattctgaagattgttgaaagccagaattcaggcaagcttagcgagtgtgccgagaaccaagcaagcttcagagaaatctcatgtacttagctgcaatagctgattctcaaccccaaccacccaccatgcctggtcagtaccctccgagtgggatgatgcagcagggagcacactacatgcaggctc

SEQ ID NO: 194230 - DNA, 251 bp, Glycine max
tggacaagggggtgttggatgatgtgataagaaggcttctggaagggaaaggagggaaacaggtgcaactctctgagtcggagatccgtcaactctgcgtcaacgccagacaaatcttcctctctcagcaattcttctcgacctccgtgctcccatccgcatctgcggtgatatacatggtcagtaccaggacttgctgaggctttttgaatatggtggctaccctcctgcggcaaactacttgtttctgg

SEQ ID NO: 194231 - DNA, 254 bp, Glycine max
ggatatttcactcttctatattcgaaatatgcctttctaggagcattacgatctgcagctcaaatggtctcttatgaagtctctattggtcttattcttattactgtactaagatgtgtaggcttccgcaatttagtgagattgtcatggcgcaaaagcagatatggttcggtattcccttgttccctgtattggttatgttctttatttcttgtctagcagaaactaatcgagctccgtttgatctcccagaa

SEQ ID NO: 194232 - DNA, 260 bp, Glycine max
  unsure (1)..(260): unsure at all n locations
gcccattcaaccataccgtaccagcagaggaaagagagaaaatttcagaacaaaaaagaagcagaggaaaagagagatagagagagaagaaaagctgtgaagagaagagncngaaanccgaancanaaanaantgcttttgagacgaagaactgcgagttgtgcaagcttccggctcggactttctgcgagtcggaccaggctagcttatgctgggactgcgacgccaaggttcatggagccaacttcctcgtggaaaga

SEQ ID NO: 194233 - DNA, 251 bp, Glycine max
tggaaggtccagaggattcggatttgtgaccttcgcctcagagcagtcaatgaaagatgcgatcgcaggaatgaacggccaggaccttgacggtcgtaacatcactgtcaacgaagctcagacccgcgcagccgtggtggtggcggcggcggatacggtggtcgtcgtgaaggtggatacaaccgtaatggtgggggtggaggtggaggatacggcggtggtagagaccgtggttacggtggtgatggtgg

SEQ ID NO: 194234 - DNA, 248 bp, Glycine max
agagggttttggtgtttgaatcgtgaaaatgttcagaaaccagtacgacacggacgtgacgacatggagcccggcggggaggctgttccaggtggagtacgcgatggaggcggtgaagcagggctcgcggcgatagggctccgatccaagacccacgtggtcctcgcatgcgtcaacaaggctaactccgaactctcatcgcaccagaagaagatcttcaaggtcgacaaccacatcggcgtcgccat

SEQ ID NO: 194235 - DNA, 249 bp, Glycine max
gcttgctactgagtttccacactgcataccttatgtcttccgaattcgaagttaatttgcaagatggctaaggaaaaggctcagatcaacattgtggtggttggtcatgtggaccctgaggaggcaacaccattaacgagctgaagaagcctgttgtggagaaagaagctccagggcatgccatatgagggcatgcacgtacggcctcggaggggaaccagaaaattatgttaacaaaataatctggaa

SEQ ID NO: 194236 - DNA, 244 bp, Glycine max
atctatggctacccttattgctcccagcaaccactctccccaagaagacgctgaggctctcagaaaggcttttgaaggatgggggactgatgagaaaactgtcatagtaatattgggtcatagaactgttatcagaggcagcaaatcagaagagtctatgaggaaattttccaggaggatcttgtgaaacgcctagagtctgagatcaaaggagactttgagaaagccgtgtaccgatggatac

SEQ ID NO: 194237 - DNA, 254 bp, Glycine max
ctcgagcctgtccttagttctgggagtgttgatgcttgagtcttgacggaacgaacggaaacatgggatctcaattgacaacaccaagccccttatcgaactggaacacgacgacgcaggcagaatcagagaaccgggaatgtgtggactgctagcatacacattataacagtggttgtaggggcaggggtgctgtctttggcatgggttatggcacaactaggatggttagctggcatagccagtatcattac

SEQ ID NO: 194238 - DNA, 257 bp, Glycine max
  unsure (1)..(257): unsure at all n locations
cttgtatgagggtcctcttgatgatcaatatgcttctgctatcagaaattgtgatcctgaaggtcctctgatgctctatgtctccaagatgattccagcatctgactaaggggagactttttctgcctttggcgngctaatctctggcagggtttcaactggtttgaaggtgaggattatgggacctaattatgtccctggggagaaaaaggatttgtatgttaaaagtgtgcaacgaactgtcatttggatgggaa

SEQ ID NO: 194239 - DNA, 252 bp, Glycine max
gcatgtcgctgggtcttccagtggcggcgacggtgaactgcgccgacaacacgggggcgaagaacctctacatcatttcggtgaaagggatcaaaggccgtttgaaccgtcttccctcggcctgcgtggcgacatggtgatggccaccgtgaagaagggaaaacccgatctgaggaagaaggtcttgccagctgtcatcgttcgccagcgcaagccatggcgccgaaaggacggcgtctacatgtacttcga

SEQ ID NO: 194240 - DNA, 127 bp, Glycine max
atggagtttacgtcatggtcgttttacagagcagggatagcagagtttatggccacttttctgtttctctacatcactgtcttaatcgttatgggaatcgccggggctaagtctaagtgtagtaccg

SEQ ID NO: 194241 - DNA, 246 bp, Glycine max
cgctgctgtcggtgcttcgcctgagtctcattccgtttgcgcccactatcacaggttgtgctgaggcttaactggttcttgaagcatatttcagagttttatcagagaacaaatgggttatattggactcacggtgttgcagctctgcacagatataaatatagtggagtagatcattcctatgtggccaaatatgtactacaacccttttggagtcgctttgttaattttttccccctatggatg

SEQ ID NO: 194242 - DNA, 246 bp, Glycine max
cggctcgggtggtcccagaagggtggtgttgctgcatacgttgatgagcgtgcttacatagagactctcctttcaagccggtgtgattatagcattgtaggtcaagagtttaccagaaatggttgggatttgcctttcctcgagactcaccgttagcagttgacctttcgactgcaatattagagttggcagagaatggagacttgcaaaggatccatgacaaatggcctttgcagcagtgcttgc

SEQ ID NO: 194243 - DNA, 238 bp, Glycine max
  unsure (1)..(238): unsure at all n locations
ggctcgagcaagccccactcaaccaccacacactcntctcgttcacgcacatccctttctgctcttcttcacacctttcaagttttaaaagtataaagatggcagagacattccttttacctcagagtcggtgaacgagggacaccctgacaagctctgcgaccaaatctccgatgctgtcctcgacgcttgcctcgagcaggacccagacagcaaagttgcctgcgaaacatgcacc

SEQ ID NO: 194244 - DNA, 246 bp, Glycine max
ggaaatttaccccgtgataccgttacctaaagagaaattagttgacacaaatggagcaggagatgcttttgttggaggatttctttcacaattggttaagcataagcccattgaagaatgcattaagctgggtgttatgcagccaatgttatcatccaaaggcctggctgcacatacccaccgacgcctgattttcattgagtgattcctctttttctgttactgctatgaatttttttcttttta

SEQ ID NO: 194245 - DNA, 247 bp, Glycine max
gtcgaccgtaccaggacagctcatctgggagatcgtgaagaagaacaactcctttttggtgaaagagttcggaaggggcactcagagcgtgcagttcagcagagagcccaacaatctctacaacccaacactttcaagtactccggtttggcgaaccagaaaactgtcactgttcaacctgctggtaaagaccagtccgtgttgctcgcaacaaccaagacaaagaagcaaaacaagcctgctgctt

SEQ ID NO: 194246 - DNA, 252 bp, Glycine max
gcaaaagatgctgcttctgtgcagaacaaatggttgttggtgaacatacaatctaccaaggaattccgctcgcatatgcttaaccgggatacgtcggccaatgaagctgtttctcagactattagtaaaactgcatattctggcaggtatatgatgatacaactgaaggcagaaaagtttgcacttattacagactggattcaattcctgtcgtacttgttattgatcccatcactggccaaaagatgcgct

SEQ ID NO: 194247 - DNA, 252 bp, Glycine max
gtaagatcactatcattatcgctgaacaatgttatttaacaaaagtatcaaccacaaataaaaacaacaacccaacttcccaatcatcgtcacgtccagcaaaatacattcacaagctatctaaaatctgggaacccacattggcattaaaaaccatgaccatacaattttttagagaaatattatgggcaccatgcctcttcaacaatcccctaaacgttgcttaggcatcagcaaacccaagctcggaaa

SEQ ID NO: 194248 - DNA, 256 bp, Glycine max
  unsure (1)..(256): unsure at all n locations
ataacttagctctgtttttaattattccttgcattctcttgtattaagatggaagcaactaccatcaccaatgggagccaaaacggttcgttttgcttgtccacgacgaagggaagtagngaaccgnttactgtggagcggcggcagaggcgattaaggggagccacctggacgaggtgaagcgcatggtggccgagtaccgcaagccggttgtccggcttcgcggagagacgcttcacatcgctcaggtggccgc

SEQ ID NO: 194249 - DNA, 247 bp, Glycine max
  unsure (1)..(247): unsure at all n locations
ggaatatttgcgtatctgaattacgacgtgaacagagacagacgatacatcttgcaggttctcttcaatggcctcagcagattggagtaccgtggatacgattccgcaggcatcgcgatcgacgatccaatttctctcnccttgttttccgtcaagaaggaaacattgaatcgctcgtcaaatcggtttatcaagaagtgggagaaactgaactgaacttgggggaatgcttcggcactcacgcggg

SEQ ID NO: 194250 - DNA, 247 bp, Glycine max
ggcgcttcatcaagatgggtatttctagggattccatgcacaagaggcgtgccactggtggcaagaaaaaggcttggagaaagaagagaaagtatgagcttgggcgtcaggcagcaaacaccaagtatcaagcaacaagacaatcaggaggattcgtgttagaggtggcaatgttaaatggagggcattgaggctggatactggcaattactcatggggtagtgaagcagttactcgcaagactcgt

SEQ ID NO: 194251 - DNA, 248 bp, Glycine max
gtttctttattaattctctctttcaaatatatggcagaagatgcttcaattattccaacacacacaaaagcacgagtactactctgaacatggtagtccaggtgatgttctcaaattagatcctattggcccttaccccaacaactcaaagatgaccaagtgctcatcaaggtcatcgctgcatccattaatcccgttgattacaagaggatgcacggcgagttcaaggacactgaccctcatctgcc

SEQ ID NO: 194252 - DNA, 245 bp, Glycine max
agagatccatcgatcaattaatttccaatggccgatcagctcaccgacgaacagatctctgagttcaaggaagcctttagcctcttcgacaaggacggcgatggttgtattaccaccaaggaattggcactgtgatgcggtcgcttgggcagaacccaactgaggctgagctgcaggacatgataaatgaggttgatgctgatgggaatggtaccattgatttcccagaattcctcaatctcatg

SEQ ID NO: 194253 - DNA, 250 bp, Glycine max
actaaatatggctgacttgttggaatggtcaaagcaagataagaaacgaatgcttcatgtcgtctaccgtgttggtgaccttgatcgcaccatcaaattttacacagaatgtttaggaatgaagctttgaggcaaagagatatcccagaggagaaatatgctaatgcttttcttggatttggccctgaagaatcccattttgttgttgaattaacatataattatggggttacctcgtatgacattggcg

SEQ ID NO: 194254 - DNA, 249 bp, Glycine max
gtatgtttgacatattgttcggttggtccaaagcttccaaatgtaagaaggcgatcaaacgagcccggtgccggctcaggctactcaagaacaagaggcaggcaatagcaaggcaactgagaaagacttggctgagctaatacaaagtggccatgaagaaactgcatttaaccgggtggaacagcttatgggagatgaaagcttaacagctgcgtatgaattgttagatcacttctgcgaatttatcct

SEQ ID NO: 194255 - DNA, 251 bp, Glycine max
  unsure (1)..(251): unsure at all n locations
gttctattttccgcatcttggatatcttgctaaaagattgaatattgtgttaatctttctagtagtcaacgggaacaatgcacgcactagcagccaccaacaggaaccgttagncggccgccaggctctgggactgganttacagcgttagaacagtttgctgattccattcagggaaatcaaggttgaatgtaccatacctacagatgatggcacgttgcaatcttatgttgggttcagggttcaacatg

SEQ ID NO: 194256 - DNA, 282 bp, Glycine max
attcaagttcgaagaaggagcgaatactattagtacacgtggcttcagaagacatcaatatcgaaggattcaatgttccacgagacacaattgtgattattaatggttgggccatgcaaagagatcctaagatatggaaagatgcgacaagctttaaacctgagaggtttgatgaagaaggagaggagaagaagttggtagcatttggtatgggaagaagggcttgcccaggagaacccatggctatgcaaagtgttagctatactttgggattaatgattc

SEQ ID NO: 194257 - DNA, 282 bp, Glycine max
gaggaagtggacggttgcttccgctctccttcttctctctctcctctttctctttgcagatcaaggtcgaagttcaggcgatgcgagggagattccgacgagcttgtagatcctccgaagtggaggacacgatcggtgctgtgcctcatggcctttccaccgattcagatgtcgtcaagagggagtcggagtcgatctcgaagagatctctccggagcaatgcggagaagtttgagttccaagcggaagtgtcacggcttatggatattatcatcaattctc

SEQ ID NO: 194258 - DNA, 273 bp, Glycine max
cgtgaggagaatatgaagttgtttgttttctttgttgctgcagtagttttggtagcatggccatgccatggcgcaggctaccaaaggttccctctccgaatgaaaactggctatggtgagcgttcttcggaggtaaaatgcgcaagttttaggcttgctgtggaagcacacaacatccgagtcattataaacattcctgaagagtgcgttgaaccaacaaaggactacattaatggcgaacaatttagatcagactctaaaaagttaccacaa

SEQ ID NO: 194259 - DNA, 300 bp, Glycine max
taggaattctgctcgagagttcgtatgcaactcctgggtttacaattcaaaaaactataagaattgtcgcattttctttgccaacaatacatatcttccaagcgagatacgaggtggaattttgaagtacagagaagaagaattgaagaatgtaagaggggatggaactggagagcgcaaggaatgggataggatctatgattatgatgtctacaatgacttgggcaacccggatagcggtgataaatatgcacgccccgttcttggtggttcagccttaccttaccctcgcagaggaag

SEQ ID NO: 194260 - DNA, 284 bp, Glycine max
cctacctctcccttcaagatgcagatcttcgtcaagaccctcaccggcaagaccatcacccttgaggtggaaagctctgacaccatcgacaacgtcaaggccaagatccaggacaaggaaggaatccccccggaccagcaacgtctcattttcgccggaaagcaattcactaggacggccgtacccttgctgactacaacattcagaaggagagtactcttcacctcgtcctccgtctccgtggtggcatgcagatcttcgttaagacactcaccggcaagacc

SEQ ID NO: 194261 - DNA, 275 bp, Glycine max
cgctcccaagggtttaacctttctggctgtgttaatatgcgtttcagcactgtcactgagtccttctgttgcgggggaagggcaaaataatggccttgttatgaacttctacaaggaatcatgccctcaggctgaagacatcatcacagaacaagtcaagcttctctacaagcgccacaagaacactgctttctcctggctcaggaacatcttccatgactgtgctgttcagagttgtgatgcttcactgttgctggactccacaagaaggagct

SEQ ID NO: 194262 - DNA, 280 bp, Glycine max
cattgccagtcccatcataacaccactcacacgcatacataacatcattaacaccatgatcaggacccttgaattttcctccccttgtctatgatcgaggaagaaaatctgtaatatattatgcaaaaaataattaaggtcttttcctttaaatgggctggttcaatgaaccgagaccactgcaggttcatggggatgggaggattaagaggctatgttttttaatcttccgatgttactgttgtttttttttaatttcaataaggatattatatatgta

SEQ ID NO: 194263 - DNA, 281 bp, Glycine max
cccaaacgaagaaaaaagactgagagcaattgcatcaacaacaaattgaaaggatgtcgatcttcgagtacaacggaagcgccgtggtggctatggtcggcaagaactgcttcgccattgccagcgaccgaacgctcggcgttcagctccaaaccatagccacggatttccaacgcatttccaagattcacgacaagctcttcatcgctctctctggcctcgccaccgatgctcaaacattgtatcagcgtcttgttttccggcacaaactgtatcagctt

SEQ ID NO: 194264 - DNA, 292 bp, Glycine max
tacagcttgtgggcttcaagagctgcctcttacctgaggatctctgtgtttcacagaggcttttctaatgttgttaaagatttgaagtatgctgattctcatgagtgggtgaaagttgatgaaaattctgcaaccgtcggactaactgatcatgcccaagatcatttaggtgatgttgtatatgttgaattgccagaagtgggagcagctgtaacacaaggaggtagttttggtgcagttgaaagtgtgaaggcaactagtgacattaactctcctgtttcaggaaaagttg

SEQ ID NO: 194265 - DNA, 220 bp, Glycine max
aaaacccttctctctgtgattaagagaatggcttcagatcggaaacttcacacttttgacgaggtggcaaagcacaaccagacgaaggactgctggctcatcatttctggcaaggtgtatgatgccacgccgttcatagccatggagctgggacgttatccggttttgttatctggaacagggacagatgcaaccagtgactttggcgatgtcaggcaca

SEQ ID NO: 194266 - DNA, 280 bp, Glycine max
ctcctcctcgtcctcgtcgtgtttctctctgttctgattcgagatccgccatgtccatgctcttcagattctctctcctcctccctctcttcctctctacggcctttgcttccgagtcagatcataggtatcaacaagatgacccagttatcctttgggtgaacaaagttggtccttacaacaatccacaagaaacgtacaattattacagcctaccattttgccgttcacctggtaatcctgcacacaaatggggtggtcttggtgaggtcctgggtgg

SEQ ID NO: 194267 - DNA, 277 bp, Glycine max
gctcgaagaccggtggtcccttcggaaccataaagcacccctccgaactcgctcacggcgctaacaacggtcttgacatcgctgttaggcttttggagcaactcaaagcggagtttcctattttgagctacgccgatttctaccagttggctggcgttgttgccgttgaggtcaccggtggacctgaagttcccttcaatcctggaagagaggacaaacctgagccaccaccagagggtcgcttgcccgatgccactaagggttctgaccatttgag

SEQ ID NO: 194268 - DNA, 287 bp, Glycine max
cgagattgcttccagttcttccaaaatggccaaagacccagttcgcgttctcgtcactggagctgcagggcaaattgggtatgctcttgtccctatgattgctaggggagtgatgttgggtcttgacagcccgtgatcctccacatgcttgacattcctccggcagcagagtcattgaatggggttaaaatggaattggtggatgctgcattccctcttcttaaaggtgttgttgccacaactgatgtggttgaggcatgcactggggtcaatattgccgtgatggt

SEQ ID NO: 194269 - DNA, 166 bp, Glycine max
tgtggatatgaaggtcaaggttaaagacaatccaaacctggatgaatgtgttttccacatcgttcttgatggttataatgcccctgtaactgctggaaattttgttgatttggtagaaaggcacttctatgatggcatggaaatccaaagagcggatgggtttgtt

SEQ ID NO: 194270 - DNA, 290 bp, Glycine max
cacctctcacacttcaccttcttcttctttattccttgctcttcaatggcttccgatcttgagcttaaggccaaagaggctttcgaagatgataactatgatctcgcctacgacctcttaactcaggccattggtcccagccccaacaacgcagacctatatgctgaccgtgcgcaagtcaacatcaaagtcaacaacctcaccgaggctgtttctgatgcaaacaaggcgattgagttgaatccttctcactcaaaagcatatttgcgaaaaggtaccgcatgcatcaa

SEQ ID NO: 194271 - DNA, 285 bp, Glycine max
ctggcacttcgttgcttggtgatgtccctttctgttctcttcactcttggtcttgcgagagaaagccatgccagagacgaagatttttggcatgctgtttggccaaacactcccattccaagttcattgcgagatcttctaaagcctggccctgagcagtgacgaaatcgatgatcaccctatgcaaattgaagaaacacagtacccgaaaaccttcttctataaagaagacttcatccaggcaaaacaatgaaagtacaattcagcaagcctccctttcaacaa

SEQ ID NO: 194272 - DNA, 283 bp, Glycine max
  unsure (1)..(283): unsure at all n locations
cttcactttctctcgtttcaatcgaaaccaaaacaaaaacatgggcagaaaattcttcgtcggtggcaactggaaatgcaatgggaccactgaggaggtaaagaagattgntactactttgaatgaggctaaagtccctggagaagatgtcgtagaagttgttgtgagccctccttttgtgttccttcctgttgtaaaaagtttgctgcgccctgatttccatgtttcggcacaaaactgttgggttcgcaaaggtggtgctataccggtgaggttagtgctg

SEQ ID NO: 194273 - DNA, 264 bp, Glycine max
ctttgattccagcaatcccagctcatcctcttctcacagatgacgattatccacaaatacgtggcgcttttaccaatttcaatgtgtgggtcactccatacaataggactgagaagtgggctggtggactctacgttgatcacagccatggagatgatactttagtcgtttggaccaaaaagaatagagacattaacaacaaggacattgtgctgtggcacgtcgtgggaattcatcatgttccatcacaggtagacttcccca

SEQ ID NO: 194274 - DNA, 287 bp, Glycine max
atcgtgaggagaatatgaagttgtttgttttctttgttgctgcagtagttttggtagcatggccatgccatggcgcaggctaccaaaggttccctctccgaatgaaaactggctatggtgagcgttcttcggaggtaaaatgcgcaagttttaggcttgctgtggaagcacacaacatcagagacattaaaaccattcctgaagagtgcgttgaaccaacaaaggactacattaatggcgaacaatttagatcagactctaaaacagttaaccaacaagctttcttt

SEQ ID NO: 194275 - DNA, 285 bp, Glycine max
cactcaaatcactgaaccagccatggctaccttctccaaggaacgcgaaacctttgtatacgttgccaagttagctgaacaagctgaacgctatgatgaaatggtggaggccatgaagaaggtggcgaagctggacgtagggttgagtgtggaagagaggaacctgttctctgttgggtacaagaatgttatggggtcacggagagcttcatggagaatcttgtcatcgatagagcagaaagaggattccaaagggaatgagttgcatgttaagcatatcaggga

SEQ ID NO: 194276 - DNA, 278 bp, Glycine max
tgaatttgaaggacgatgagttccacagaggtcgcagccacaacgaagaagggtggaagagggaaacccaagaccacaaagtccgtttcccgttcctccaaagccggccttcagttccccgtcggccgcgtcgctcgctacctcaaggccggtcgctatgcccagcgcgttggttccggttcacctgtttacctatctgcggttctcgaataccttgccgctgaggttttggagcttgccggcaacgctgcgagggacaacaagaagacgaggatcgt

SEQ ID NO: 194277 - DNA, 275 bp, Glycine max
gcttgtctcaaagattaagccatgcatgtgtaagtatgaactaattcagactgtgaaactgcgaatggctcattaaatcagttatagtttgtttgatggtatcttctactcggataaccgtagtaattctagagctaatacgtgcaacaaaccccgacttctggaagggatgcatttattagataaaaggtcaacacaggctctgcctgttgctttgatgattcatgataactcgtcggatcgcacggcctttgtgccggcgacgcatcattcaa

SEQ ID NO: 194278 - DNA, 275 bp, Glycine max
cgaggcatcaccattgccacaatggttaaaggtcgccaaggagaacgtgtaagactctacgtcaggggttcaattcttggatacaagaggtccaagtcaaatcaatacccaagcacctccctaatccagattgagaatgtaaactctaaggaagaagttgcgtggtactgtgggaagcgcatggcttacatctacaaagcgaaggtaaagaagaacggaagccactatcgctgcatttggggtaaggtcaccaggcctcatggtaacagtggtat

SEQ ID NO: 194279 - DNA, 275 bp, Glycine max
cgagggagccgtagcagcggaagctctagcttgggtagcgaatcacaatggcgagaggattaaagaagcatctgaagaggcttaatgccccaaagcattggatgcttgacaaactgggtggtgcatttgctcctaagccctcatctggaccacacaaatcgagggaatgcctgccactcatactcattttgcgaaaccggctgaagtatgctctaacataccgtgaagtcattgctattctgatgcagcgacatgtccttgttgatggcaaagtc

SEQ ID NO: 194280 - DNA, 284 bp, Glycine max
cgagccagctcagcacgcagaggagcagaagcctaagccttcaacatggcgagagggttgaagaaacacttgaagaggctcaatgctccaaaacactggatgcttgacaagcttggtggggcctttgcaccgaagccatcatctggaccccacaagtccagggagtgtcttcctttgatcctcatcctacggaacaggctaaagtatgctctaacatatagagaagttattgccatcttgatgcagcgccatgttcttgttgatggcaaggttaggacagacaa

SEQ ID NO: 194281 - DNA, 285 bp, Glycine max
actcgagccgattcggctcgaggaggcctgctcttgctttgcttcctacttctatttgctttcacgttagctgccactacagactcaagaaaagatacaagggaatattggaaaatgatcatgaaagatcaggaaatgccagaaggacttcaaggtcttgtttcatttcaatctgaaaataaccctaagactcaagagcagcttggtaaaggttccataaaccattgtgaagagtctctagttacaaatacacgagttaatagtgacttcgaacccataccaagt

SEQ ID NO: 194282 - DNA, 280 bp, Glycine max
tacaacccttctctctgtgattaagagaatggcttcagatcggaaacttcacacttttgaggaggtggcaaagcacaaccagaccaaggattgctggctcatcatttctggcaaggtgtatgatgtcacccctttcatggaggatcatcccggaggtgatgaggttttgttatctgcaacagggaaagatgcaaccaatgactttgaagatgtggggcacagtgattctgctagagatatgatggaaaaatactacattggtgagattgatgcatcaacc

SEQ ID NO: 194283 - DNA, 285 bp, Glycine max
caatcttcgccttcgcccacaacaactcctacaccaggatcgctgccaacgttactttccatttttacccttcatcctcgagaaaaaaatggcgaacgcagcatctggtatggccgtccatgatgagtgcaagctaaagtttctggagctcaaggcgaagaggacgtaccggtatatcgtttttaagattgaggagaaatcgaagcaagttattgtggagaagctgggtgaccctgcaaatggctatgatgaattcgctgccagtcttcctgctgatgagtgtcg

SEQ ID NO: 194284 - DNA, 283 bp, Glycine max
  unsure (1)..(283): unsure at all n locations
aactatnactggtgtgagcctttcatgccccagggttttcttcaacgcatcagcctcanngcaaaacgcgcatnctgtaaagttctcanttccacacancananaannntnnnccgggtagtatcaagttgggtcgcgtgatgaggatccganccgttcgcgctgcgnctgancgcatatcggagaaggtggaggagagcataaagaacgcgcaggaggngtgcgccggcgatnagatgagcggcgagtgcgtggcggcgtgggacgangtgganganctgat

SEQ ID NO: 194285 - DNA, 280 bp, Glycine max
gatcatagtttcacttcggccttatccagtttagggtttcggttctctaccctatctttcacgtatcgaaaccttaaatttacgatcaggtctgagcaatctggttggtagaacctttggtcttagtgagtcaagttttatgtctgaattagacgatcaaattcctactgccttcgatccttttgctgatgcaaatgctgatgactcgggtgctgggtcaaaggagtatgtgcatattcgtgtacagcagcgaaatggtaggaaaagcctgacaaccgtt

SEQ ID NO: 194286 - DNA, 273 bp, Glycine max
ggcttggactgcctggaaacggaggcactgaagaagtgctcatcaggaagaggggtttctctgagactgaaactggtcatgaagatgagtctgccaccactgtggatttgatgcttaatctttcttctaaggaggccgcaaccactgctgctgctgctgcagatccaactgataagcacaagactttgcctaaggagaagacccttctgccagcagatcctgctaagcctccagccaagacgcggtggtgggttggccacctgtgcggtcctt

SEQ ID NO: 194287 - DNA, 260 bp, Glycine max
atctatttcagtagagcgtatgatgtcgatggcccgaggtagagcactcaatgggctagggtggccccatttcgccttaccaaccccagggaaactccgaatacaggcctagatcgtttgtacagacagacttttagggtgctaagcatccaaagtcgagagggaaacagcccagatcgtacgctaaggtccctaagcaatcacttagtggaaaaggaagtgatcgagcgatgacaaccaggaggtgggcttggaagcag

SEQ ID NO: 194288 - DNA, 272 bp, Glycine max
gctcttttctcttttcttttctctttagttctctcttcccctttctttttctttttcttcttcttctaagcttgtttaagcttttcttccattaacatattatcataatgtgtggtattcttgctgttcttggttgttctgatgactctcgagccaaaagggtccgcgtgcttgagctctctcgcagattgaagcaccgtggccctgactggagtgggctccatcaacatggtgactgctttttggcacatcaacggttagccatagttgat

SEQ ID NO: 194289 - DNA, 271 bp, Glycine max
atctgatggatatacggttcttgatgtgcgggacaaaaatcagtttgagcgagctcacatcaaatcttgttctcatgtggctctttttgttgaaaacaaagacaatgatcccggtactattataaaaaggcagctgcacaataatttttctgggttgttctatgggttaccattcactaagcctaataaatccattgtagtctttcttgattttgctcttcgtgactcattatgcatttatgcatgtagcataattaaggaagtgtgatta

SEQ ID NO: 194290 - DNA, 262 bp, Glycine max
cgatcatcacttcacttcactaatacatcatggcagacgaatcccagaacaagtatgagagatctgaggttgaggtccaggatcgtggtgtttttgactttctcggtaagaaaaaggatgaagaagacaagcctcatcctcaggaggaggtcatcgccaccgagtttcaaaaagtcactgtctcagaccaaggagagaacaagcacagcctcttagaaaagctgtcaccgatctgacagcagctctagctcttcaagtgagg

SEQ ID NO: 194291 - DNA, 279 bp, Glycine max
agagatcaactgttactcacccacgccatgggaaaatgaatggtttaagagcaacagcagttaaaagagaacagggattcagcgaagatgacatcggttggtgtggcaccaacttcgggtttgagagaagccagtgggcatggagcagcagctgcggatagattgccagaggagatgaacgatatgtcaattagggatgatagagacatggaagccacagttgttgatggcaacggaacggagacacgacatatcattgtgactaccatttcgggtaga

SEQ ID NO: 194292 - DNA, 281 bp, Glycine max
aatcgatcatcacttcacttcactaatacatcatggcagacgagacccagaacaagtatgagagctctgaggttgaggtccaggatcgtggtgtttttgactttctcggtaagaaaaaggatgaagaagacaagcctcatcctcaggaggaggtcatcgccaccgagtttcaaaaagtcactgtctcagaccaaggagagaacaagcacagcctcttagaaaagcttcaccgatctgacagcagctctagctcttcaagtgaggaggtagcagaagatgga

SEQ ID NO: 194293 - DNA, 262 bp, Glycine max
ctatggtgaacgttccgaagacaaagaagacctactgcaagagcaaggagtgcacgaagcacacgctccacaaggtcacccaatacaagaagggcaaggacagcatcgccgctcatggaaaacgccgttatgaccgccaacagtccggttacggtggacatactaagcctgttttcctcgcgaaggccgataccactatgaagattgtgctgaggctccagtgtcacggatgctagcatgtctcgcgcagctatcattcgtg

SEQ ID NO: 194294 - DNA, 190 bp, Glycine max
cgtctcctccaaagccggccttcagttccccgtcggccgcgtcgctcgctacctcaaggccggtcgctatgcacaacgcgttggttccggttcccctgtttacctatctgcggttctcgaataccttgacgctgaggttttggagcttgccggcaacgctgcgagggacaacaagaagacgaggatcgtt

SEQ ID NO: 194295 - DNA, 271 bp, Glycine max
gtttcgaagagcttaacatggacctattcaggaagtgcatggagcccgtggagaagtgtttgcgggatgctaagatggacaagagcaccgtccatgatgttgttcttgtcggtggttctactaggattcccaaggttcaacagttgttgcaggacttcttcaacggaaaggagctttgcaagagcattaacccagatgaagctgttgcctatggtgcagcagtgcaggctgccattctcagtggcgagggtaatgagaaagtgcaggatct

SEQ ID NO: 194296 - DNA, 265 bp, Glycine max
ataacctttctggctgtgttaatatgcgtttcagcactgtcactgagtccttctgttgcgggggaagggcaaaataatggccttgttatgaacttctacaaggaatcatgccctcaggctgaagacatcatcacagaacaagtcaagcttctctacaagcgccacaagaacactgctttctcctggctcaggaacatcttccatgaccgtgctgttcagagtcgtgatgcttcactgttgctggactcacaagaggagctgtctg

SEQ ID NO: 194297 - DNA, 271 bp, Glycine max
tctcgagccgaatcggctcgacgtgggtggtggcgagactcacaaactcttcgtttacggcagtctgttagccgatgaagttgtccataccctattgaagcgcgtccctccaaccgcacccgccatccttcacgactatcacaggtttaagatcaaaggtcgcgtttatcccgctattctccccgtccaaaacaacaaagttaatggcagggtgcttcttggtatctccggagtagaactagatatcttagatgagttcgaggatgttgaa

SEQ ID NO: 194298 - DNA, 271 bp, Glycine max
cttttaactcctttcgcctttctattcccatctctttcaaacttcagatctatttcttcatcggttgttcaagtaaatgcgcttcgtcaccactgctgaagtgtgtgatgcgaacccccagttaattttgagtggggagcttcgtgcccttcagccagtttttcagatttacggtcgtcgacaggtcttctctggacctatagttaccttgaaggtgtttgaagacaatgttttggttcgtgagttccttgaagagaaaggcaatggaaga

SEQ ID NO: 194299 - DNA, 307 bp, Glycine max
gtacgtgaactcaggcattcggattcgagctcgatctttattctccgtttccgtttccttcccggaattcgatttttcatctctgaaaatgagagagtgcatctcgatccacattggtcaggccgctatccaggtcggaaatgcttgctgggagctctactgtcttgagcacggcatcgggcccgatgggcaaatgccaagtgacaaaacagttggcggaggtgatgatgctttcaacactttcttcagtgagactggtgctggaaagcagtgccagtgccgtctttgtagatctgagacactgtta

SEQ ID NO: 194300 - DNA, 277 bp, Glycine max
gctttaacgaaaaaggacacattttcccttacaatggcacgaaccaaacaaactgcgcgcaagtccaccggaggcaaggcacctcggaagcagctcgccacaaaagccgccagacagtcagctccggcgaccggcggagtgaagaagccgcatcggttccgccctggcacggtggcgctgagggagatccggaagtaccagaagagcacggagctcctgatccggaagctccccttccagcgcctggtgcgcgagatcgcgcaggatttcaagaccg

SEQ ID NO: 194301 - DNA, 271 bp, Glycine max
  unsure (1)..(271): unsure at all n locations
cttcgcaaagatgaatcgggaaaagtnaatgaagatggcnggttcggttagaactggagganagggtactgtgagaagaaagaagaaggctgtccacaagacaacaaccanagatgacaaaaggcttcagagcaccctgaagagaataggggtgaatgccatccctgctattgaagaggtcaatatctttaaggatgacgtagttatccagtttctaaatcccaaagttcaagcatccattgctgctaatactgggttgtcagtggnncac

SEQ ID NO: 194302 - DNA, 265 bp, Glycine max
ccccactttaccaactcctaccaatttctctctgtctccttcttcagcgcatcaatggcgccggtcggcgctctcctcggcatgtggcaccctctcctcgacatcgctgccgtcgtcgacgacgctttcttgcaaaaatacggtatcaagttgaacgatgcgagtctcgctgaggataagcagaaacctatgtatgacgaattggctaacaatcctaatgtggagtacattgctggaggtgctacgcagaattcaatcagggttg

SEQ ID NO: 194303 - DNA, 283 bp, Glycine max
ttcggctcgagaagcttgtgaggttgttgcgagaactgcgaatgaaaaagctgagtttaatagtcatagcagcatttaccttcgactctgtgggtagatctgcgtctgatcatttcttcgaaaacgatggcgtttcactggcagttgctgcaacgcccggacctccacctctcatggtccccctcactcttattcagggagctgcttccaaaggagccgtctgtttggatggaacattgcctggttaccactttcatcctggatttggatctggggcaaatag

SEQ ID NO: 194304 - DNA, 272 bp, Glycine max
gctctttatgtcacgttcatcattcttgccttcggtatctgaatcatttgctgcaaagttgttagctgctgcagaaaagtatggtttgccaagacttaaactgatgtgcgagtctgtactttgcaaagacatctccatagattctgttgcctatattctggctcttgctgatcgttatcgtgctacagaattgaagtctgtctgtctacaattttctgctgaaaaccttgtcgctgtgatgcaatctgatggttttgagtatcttaaggaaa

SEQ ID NO: 194305 - DNA, 268 bp, Glycine max
gaggcagtgcatctttacctattgtggtcactgtggtttcactactgtgccttttggtctcttttggaacgtgctgatgcagcaacttacaccgttggaggacctgggggatggaccttcaacactaatgcttggcccaaaggaaaaagattcagagctggtgatatcctaagtaagtaaatttaattagtactccactccttgtatgtcacttcaaaaattaatgttagtaacacattttttttataagtctatctttttatacttt

SEQ ID NO: 194306 - DNA, 251 bp, Glycine max
ctcgagccgacaagggtcactagatatatgggaacttggtgattatgcgatagaatgtgttggatatcaacagcattaccagtgctaagggtgtcatcggtaccggcattaacatcattgcaggagtcgtcgacaccgttactgctttggcgtcccacatctccatccagctcattagtgccatcaaggctgatggacatgggataggaatagttggaaaggctacaaattttagacgacaagtgtcgtta

SEQ ID NO: 194307 - DNA, 270 bp, Glycine max
aggacctacactgaacgagaaatacgcaacacagctaaagtcaatgtgcccaaggaatgtggatccaaggattgcaatcgatatggacccaagcactccacggtcattcgacaatgtttatttcaagaatcttcagcaagggaagggcctcttctcttcagaccaagttctcttcacggactcaagatccaaggccactgtaaatgcatttgctagtagcagcaaaatcttccatgccaacttcgccgctgctatgaccagattgggccg

SEQ ID NO: 194308 - DNA, 268 bp, Glycine max
agaaaatcctcacccattttcttcgtagccaaacactctgaaattctcagttatgtcgtggcaagcgtatgtggatgatcacctactgcgtgaaatcgaaggtaaccacctcactcacgccgctatcatcggccaagacggaagcgtttgggctcagagcaccaacttccctcagttcaaacctgaggaaataactggcatcaataatgactttaatgagcctggatcacttgctccaactggattgtatatcggtggcaccaaatac

SEQ ID NO: 194309 - DNA, 262 bp, Glycine max
gcgaatgttctcatgtatctcactgatgtagctaaaggcggtgaaactgtcttcccttctgcagaggaacctccacgtcgcagaggtgctgaaacaagcagtgatctttctgaatgtgccaagaaaggaatagcagtgaaaccacgtagaggggacgcacttcttttcttcagtcttcacacaaatgctaccccagacactagcagtctccatgctggatgccctgttatcgaaggtgagaaatggtccgcaacaaagtgga

SEQ ID NO: 194310 - DNA, 266 bp, Glycine max
gagatattgcacgtgcaaggtgggcaatgccggaaccaaatcggttccacattctgggaactgatatgcgacgaacacggcatcgaccccaccggaaagtacaccggcgacgaggcctccgatctccaactggagaggatcaacgtctactacactgaggctctccggcggaacgtacgttccccgggccgtcctcatcgatctcgagcccggcaccatggacagcatcagatccggcgcatacggcaacatctgtcaggcacgac

SEQ ID NO: 194311 - DNA, 267 bp, Glycine max
gtgactgaatgccaagccttggttttagcaccaactagggagcttgctcagcaaattgaaaaggttatgcgagcacttggagattatcttggtgtgaaggtgcacgcatgtgtgggaggtaccagtgttcgtgaagaccaacgcattctatcgagtggtgttcatgttgttgttggtactcctggtcgtgtatttgatatgctgcgcagacagtcacttcggccagactacatcaagatgtttgtattggatgaggctgatgaaatg

SEQ ID NO: 194312 - DNA, 272 bp, Glycine max
gcaatggcttcaagtcaggaggaggtgacccttttgggagctactggaagcccatttgtgtgcagggttcatattgcgctcaagttgaagggagttcaatacaaatatgtcgaagaaaatttgaggaacaagagtgaactgcttctcaaatccaacccagttcacaagaaggttccagtgtttattcacaatgagaagcccatagcagagtctcttgtgattgttgaatacattgatgagacatggaagaacaaccccatcttgccttctga

SEQ ID NO: 194313 - DNA, 274 bp, Glycine max
ctttccagttcatacttcatcctattattactttccctctttgcattccaaatggccatgttgaggttgcacagcaaacaccaacaactgtgacagagaatgaaacaacgactgaggtaaccaagattgaggaaactaccccagaacagccagccaccgaggttactgccccagaaacagtcaacgaagaagcaaaagaggaagcagcagttgagactaatgaggcaacagaagttacagaggaagggaaggctgagaaaacagaagaagaaga

SEQ ID NO: 194314 - DNA, 272 bp, Glycine max
ggcacttcgttgcttggtgatgtccctttctgttctcttcactcttggtcttgcgagagaaagccatgccagagacgaacatttttggcatgctgtttggccaaacactcccattccaagttcattgcgagatcttctaaagcctggccctgcaagtgttgaaatcgatgatcaccctatgcaaattgaagaaacacagtacccgaaaaccttcttctataaagaagaccttcatccaggcaaaacaatgaaagtacaattcagcaagcctc

SEQ ID NO: 194315 - DNA, 270 bp, Glycine max
tgggaagactcaatatgtcaaatgggcatggcaagaaggggttggcttaagctcatctaacgattctttcttctttgatccatcaatccgtagttatttcaagaattatgtcaagacaattttgacaaggaagaatactataactggaattgaatatagaaatgaccccaccatttttggttgggaattgattaacgaacctcggtgcctaactgatccttctggtgatactctccaagattggatagaggaaatgtcagcttttgtcaa

SEQ ID NO: 194316 - DNA, 273 bp, Glycine max
aatggccttgccagtggtcgtcgacgcagagtacctcaaagaggtcgacaaggctcgccgcgatctccgcgcactcatcgctaacaggaactgcgctcctctcatgcttcgattggcctggcacgatgccggaacttacgatgctaagaccaagactggtggacctaacggttcgatccgtaacgaggaagagtattctcacggcgccaacaatggcttgaagaaggctattgatttctgtgaggaagtgaaggaaaaacatcctaaaattac

SEQ ID NO: 194317 - DNA, 273 bp, Glycine max
gcaaaaaacaaagagagagagagagagaaaatgatgaagccatcgatgctcagatctctccactccgccgccacccgcgacgcctctcatctcctccgccgtgggtacgcctccgagccggtgccggagcgcaaggtagccgttctcggcgccgccggcgggatcgggcagcctctctcccttctcatgaagctcaatcccctcgtttcgagcctctccctttacgatatcgccggaactcccggcgtcgccgccgatatcagccacataaac

SEQ ID NO: 194318 - DNA, 267 bp, Glycine max
ctttcggcaaccacagaccatgacattcaagcgcaggaatggagactcgcaaacacacggccgcggccatgtcaaattcatccgatgctccaactgcggaaaatgctgccccaaggacaaggccatcaagaggtttttggttaggaacattgttgaacaggctgcagtcagagatgtgcaggaagcttgtgtctatgaacaatatacacttccaaaactctatgtgaagatgcagtactgtgtttcctgtgctatccactctcatgt

SEQ ID NO: 194319 - DNA, 274 bp, Glycine max
tctatacataaccatcgagatttactatcaaaccaaaaattctcaaaatctcttcacctctgtgatgaccatggagcaacagaaccttagaactcaacatcatatccgcaaaggacatcaagaacgttaacctcttctccaagacggacgtatacgccgtcgttacgctctccggcgaccctctccaccctcagggcgccaccacccacgtcccaaaagacgccggcagcaaccccacgtggaactaccccgtgaaattctccgtcaacgaatc

SEQ ID NO: 194320 - DNA, 272 bp, Glycine max
cggctcgagagccatgcatgtgtaagtatgaactaattcagactgtgaaactgcgaatggctcattaaatcagttatagtttgtttgatggtatctactactcggataaccgtagtaattctagagctaatacgtgcaacaaaccccgacttctggaagggatgcatttattagataaaaggtcaacacaggctctgcctgttgctttgatgattcatgataactcgtcggatcgcacggcctttgtgccggcgacgcatcattcaaatttc

SEQ ID NO: 194321 - DNA, 266 bp, Glycine max
ggaacaatgtaggcaagggaagtcggcaaaatggatccgtaacctcgggaaaaggattggctctgagggctgggcacgggggtcccagtcccgaacccgtcggctgtcggtggactgctcgagctgcttccgcggcgagagcgggtcgtcgcgtgccggtcgggggacggattgggaacgggcccttcggggcctcttccccgggcgtcgaacagtcaactcagaactggtacggagaaaggggaatccaactatctggtgggcag

SEQ ID NO: 194322 - DNA, 267 bp, Glycine max
actctcctctgagaaagcctccagcctctcctccaaagtcccctgcggttcgttcggttattcttcgaaccgttgtctgaagtttacaactcaaaacttcaccgaacgcatttcattcaccaattcgtccaagtctcgtatcaatcaatcagcctatccgtcttgcggttggagagatcggaggggagagcagccatggcgcatcgagtagaccacgagtatgactatctgttcaagatcgttttgatcggagactcaggtgtaggc

SEQ ID NO: 194323 - DNA, 266 bp, Glycine max
ggtcaatgtatgttggcacgttactagttggacttggttatggagctcattgggcaattgttccagctacagcctcagagttgtttggtttgagaaactttggtgctttgtacaatttcattactatagcaaaccctgcaggaaccctcacaacaagctcagtatttggaacttccttggccgtgtcggaggaggttacatatctgagcttgttgtgagggatcatgcatatccaaggccagttgcattggctgtatttcaactca

SEQ ID NO: 194324 - DNA, 270 bp, Glycine max
tcttttcaaggctaattcgtggcctcgtcttctctttttctgtatcgtttttactttcaaccacttccaattttctttttcgtcagatcttaataccatcatggaggatgctgctgcttctgctgctactgctaatgtattggaagccaaagatggtactatttctgttgcttcagcatttcctggtcatcaagaagctgtacaggatagagaccacaagttcttaacaaaagcagttgaagaagcatacaagggggttgaatgtggtga

SEQ ID NO: 194325 - DNA, 269 bp, Glycine max
aagaaaggtgtgaaaggttccgttgtagcagcgaagaagaaggttcaggagaaggtgacgaatcctttgttcgagaagcgtccgaagcagttcgggatcggaggcgcgctgccgccgaagcgggacctgacgcggttcgtgaagtggccgaagaacgtccaaatccaacgcaagaagcgcatcctcaagcagaggctcaaggtccctcctgcactcaaccagttcaccaaaaccctagacacgaatctcgccacgaatctatttaagat

SEQ ID NO: 194326 - DNA, 265 bp, Glycine max
caggtttgtagtgtagcaggaagaagcagcaatggcgccgaagataacacgtaaggttagcagaaaccctgaattgataaggggaatcggaaagtactcgatgtcgcagatgtaccacaagaggggcatttgggctatcaaggccaaaaaccgtggcgttttacctcgccacgaccctaaacccaagcctgaagctcctgctgaaaaaccacccaaattttaccctgctgatgatatcaagaagccccttgtcaacaagcacaaa

SEQ ID NO: 194327 - DNA, 267 bp, Glycine max
actcgagccgaatcggctcgagagggccacttcacttttagaaacccagttttgcatctgggactttgcctgttgaagtgccacttttgaagataataataaaaacaattatgacttggaaaagcagaggagaattgccttctagaagcgtcatctcgcagagatgggtactgtttctctgcttaggaagtttctgtgctggaatgctcttcactaccaggatatggaccatacctgaaaacaacaaaggactagcacgaccaacag

SEQ ID NO: 194328 - DNA, 270 bp, Glycine max
gttcacttgatccttcataagtcgtcatcatcatcatcatcatcaccgttgattgaagaagatgccgatcagaaacatcgccatcggaaggcctgaagaggctactcaccccgacacgttgaaggcggggttggctgagttcatctccaccttgatcttcgtgttcgccggttcaggttccggcatcgcctacaacaagctcaccgacaacggcgccgccactcccgccggcctcatctccgcttccatcgcccatgctttcgccctctt

SEQ ID NO: 194329 - DNA, 262 bp, Glycine max
gagagatagaggagaagatgaacggtggtgaatcttacggtgctattgagacacaatacataaggaggcatcacaaacatgaaccaagggaaaaccagtgcacctctgcacttgttaaacacataagagctcctgttcaccttgtgtggtcactggtgagaagatttgatcaacctcagaaatataaaccatttgttagcaggtgtatcatgcaaggggatcttggcatcggaagtgttcgagaagtgaatgttaaatctgg

SEQ ID NO: 194330 - DNA, 270 bp, Glycine max
caacagttgagaagacagaagaggaaactttgaagcaagaagctcctgaggaaacaaaagaaaatgatgatccgactgaggttaagacaccagaagctgcagaagcagtgacagaaacacagaaagaaactgaggctgaagctaaggaagaggctaacacagaagccccggcagagaaaagcgaggaggagaaagaagggccagctgaaaagaaagatgaggaagtgattgcagaagcagaagcagaagttgagaagagcgaggaggtca

SEQ ID NO: 194331 - DNA, 266 bp, Glycine max
agtccctccttcctctgccttataattcttgtgacccttttcgctggtagcattgaaagtgcaccagcaaacgtgaagccaagcccttatgctgcacccttcaataggagtctttttccttctggttttctatttggaataggctctgcagcttaccagatagaaggagcagcagctatagatggcagaggaccaagtatatgggacacctatactaaacagcaaccagggaagatttgggatcatagtgatggaagtctagcaat

SEQ ID NO: 194332 - DNA, 265 bp, Glycine max
ctcatgatgaattatgcctttggtggtaacttggaagacaaagcatattccactgatgccttctattttagaacacaagccaaggttgaagagttgctaaaggaatatgaaaatgtttgcaccctaagaatccaattgccagtgtcatctgatctcagcaacccacataacttgatcactatgataacaaggtctgataaagtggccaacattccaaacagcatcactgttttggatgaactcgtaccaatttcaattgagatgg

SEQ ID NO: 194333 - DNA, 262 bp, Glycine max
taattattgtgcttattattattgttgagaaagaaaagaatggccaagttaataaacattctttgagttgaacacaggggccaagattccttctgttgggttaggcacttggcaagctgagcctggtgttgtagccaaagctgtcaccacagccattctggttggatacaggcatattgattgtgctcaagcgtataacaatcaagcagagattggttctgctcttaagaagctttttgatgatggtgtggtgaagcgtgag

SEQ ID NO: 194334 - DNA, 264 bp, Glycine max; identical to SEQ ID NO: 191472

SEQ ID NO: 194335 - DNA, 268 bp, Glycine max
aaaattatgagttccaaaggtgttggtgaggattgcctgggatgggcagcaagagatgcatccggagttctatcaccttacaaattcagtcgcaggactcttgggaatgaagatgttcatattaaaattacgcactgtggtgtttgcttcgctgatgtagtttggacaaggaataaacatggtgactcaaagtatcctgtcgtgcctggtcatgagattgctgggattgtgacaaaggttggcgccaatgtccaccattttaaggttg

SEQ ID NO: 194336 - DNA, 266 bp, Glycine max
gttgcagagcagcgaggtgtttagtgtgcaattgttgacaaattaatggcggaaattgtagggcctcgcttgtactgctgttgtaattgtagaaaccaagtctcccttcacgatgatataattgctaaaacctttcagggaagatatggccgaggttttctgttctcccatgcaatgaatattgtggtagggccaaaagaagacaggcacctcatgactggcctccacaccgttgctgatgtttattgtggtgactgccgtgaagt

SEQ ID NO: 194337 - DNA, 260 bp, Glycine max
tcgagcttcttgatccttctttttctccttgaactcaaacatggcagatgaggtggttctgactagatttctggccaagtccatttgggatgagggtcaggattgcacttgctgaaaagggtatcaaatatgagtacaaagaagaggacttgaggaacaagagtcctcttctcctccaaatgaacccggttcacaagaagattccggttctcatccacaatggcaaacccatttgtgaatccctcattgctgttcagtac

SEQ ID NO: 194338 - DNA, 265 bp, Glycine max
tgccaagtactacgaagctggtgcacgttttgccaaatggcgtgcagtgctgaagattggtcccaacgagccatctgagctgtctatccatgagaacgcctatggcttggctagatacgctgtcatatgccaggagaatggcctggttcccattgttgagcctgagatccttgttgatggacctcatgacattcacaagtgtgccgccgtcaccgagcgtgtccttgcagcatgctacaaggctttgaatgatcaccatgtcctt

SEQ ID NO: 194339 - DNA, 269 bp, Glycine max
ctccttggagaatcctaagagtgttctacttctatattaaaatcctacccatcaatggcagattatcagaaatcaggcctttacaaatgggctggtgatgcagagaattttgacaaagagggtccttatattgagcttgttacttctcccaataaccctgatggacatagaagggaagctatggtcaaccgaagccaaggactattgattcatgaccttgcctattattggcctcaatacactccaatatcatccccttcagatcatga

SEQ ID NO: 194340 - DNA, 268 bp, Glycine max
catggctgctaacctcctggcacatgcaccacatcttttctgttgtggaattgctcgttctggtgcttacaacagaacacttactccttttggttttcagaatgaagacagaactctttgggaggccactaatacttatgtagagatgagtccttttatgtcggctaataaagttaagacgcccatcttgcttattcatggggaagaggataacaatccaggaacattaaccatgcagtcaggcaggtttttcaacgctctaaagggt

SEQ ID NO: 194341 - DNA, 246 bp, Glycine max
ctccaacatgccagacgacagcgttctgagtcttttcttcttcgttaacctcttcacatgccttctctctgctaattcccacgatgaccatattttcctaccgagtcaactccatgacgatgactcagtgagttgcactgctaccgacccaaaccttaactacaagccggtgatcggaatccctgacccacaccggcgacggtgcctctagtcggctcagcaacgccaccggggtttcttacatcg

SEQ ID NO: 194342 - DNA, 265 bp, Glycine max
gatgacaacacgcttcaagaagaacaggaagaagaggggccacgtcagcgctggccacggtcgaatcggaaagcacaggaagcaccctggaggacgcggtaacgccggaggcatgcaccaccacaggatcctcttcgacaaataccaccctgggttcttcggcaaggtaggaatgcgctattttcacaagcttcgcaacaaattctactctccgatcctcaacatcgacaagctgtggtccctggtcccgcaagaagtgaaggac

SEQ ID NO: 194343 - DNA, 266 bp, Glycine max
cgccgccggcaatgctaggtttccggtgacgatgctcccctacgcttcgatcccggaggccgtgtcggcgctgggccgcaacctcagcttcgcggagagcctctggttcaactagtccgccgccaagtccgattacttcctctattgcacaaacattctgttcctcttcctcgtctgctccctcgtccccctacccctcgtcttcctcgaattcaagcgcttctccttcgtctcttcccacaagatcgaagcaaaagtccgcttgt

SEQ ID NO: 194344 - DNA, 278 bp, Glycine max
gcaacgccctcgacctattctcacactttaaataggtaggacggtgcggctgctctgttgagccgcgccatggaatcgagagctccaagtgggccatttttggtaagcagaactggcgatgcgggatgaaccggaagctgggttacggtgcccaactgcgcgctaacctagaccccacaaagggtgttggtcgattaagacagcaggacggtggtcatggaagtcgaaatccgctaaggagtgtgtaacaactcacctgccgaatcaactagccccga

SEQ ID NO: 194345 - DNA, 274 bp, Glycine max
gggactctgaccgcgtgcctgttgaagaatgagccggcgactcataggcagtggcttggttaagggaaaccaccggagccgtagcgaaagcgagtcttcacagggcatatgtcactgcttatggacccgaacctgggtgatctatccatgaccaggatgaagcttgggtgaaactaagtggaggtccgaaccgactgatgttgaagaatcagcggatgagttgtggttagcgggtgaaatgccactcgaacccagagctagctggttctccccg

SEQ ID NO: 194346 - DNA, 273 bp, Glycine max
gcgaatctgagaaatggcggattcttctcgggaggagaacgtttacatggcgaaattggcggacaggccgagcgttacgaggagatggttgagttcatggagaaggttgcaaagactgtggaggttgaggagttgacggtggaggagaggaatctcctctctgtggcttacaagaacgtgattggtgcgaggagggcttcgtggaggatcatatcctccattgagcagaaggatgagagcaggggcaatgaggaccacgtggccattataaag

SEQ ID NO: 194347 - DNA, 274 bp, Glycine max
cctcgagccgattcggctcgagcttaaccttctttcttcttatataccgaacatggctaagtactcttcaagtgggaaaagctcttccatgactgctatagccttcctgtttatccttctaatcacttatacaggcacaacagatgcacaatccggggtatgttatggaagacttggcaacaacttaccaacccctcaagaagttgtggccctctacaatcaagccaacattcgcaggatgcgaatctacggtccaagcccagaagtcctcgaa

SEQ ID NO: 194348 - DNA, 269 bp, Glycine max
ggcgacctccaccattggatggacgagaactacctccacaactgctttgctcacaccggcgaggttgtgtcggccaaggtcattcgaaataagcaaactggtcagtctgagggatatggattcgtggagttctattcacgagcgacggctgagaaagtcttgcagaactataatggcacgatgatgcccaatacagatcaggcattccgtctgaattgggccacattcagtgcgggggaaaggcgttcttccgatgctacttctgatct

SEQ ID NO: 194349 - DNA, 272 bp, Glycine max
gaggggaagtacttagaaacagaaacacagagatggaaccagaaacatctctgaactttactttgatgctgactttcttactttatctgaacttggttatgggagtgctgagcgttgatcattatcgcagagttgactactcctgatgaattcgtttttggttcaggcacctctgcttatcaggtggaaggagcttctaacgaagatgggagaactcctagcatctgggatacctttgcccatgcggtgtatgagcatggagaaaatggaga

SEQ ID NO: 194350 - DNA, 277 bp, Glycine max
cccctctcccctccgctcccccaatttcccccaaactttctccctccgccgcttcgccgccgcccctctcgctcgccctccgccgccgcctccgcccctggacgccatggcccagaaaatcggaaagtccacgcgccgccccggctcgtcctccaaggcccgcgtctacgccgatgtcaacgtcgttcgccccaaggaatattgggactacgagtccctcaacgtccagtggggggagcaagatgattatgaggtggtgaggaaggtgggtaggggg

SEQ ID NO: 194351 - DNA, 275 bp, Glycine max
gctgtgacttgttttgagttcaatcaaatcgcattggtatctgaaatcaggaaagatggttagcgtactgagatcaggcaggcacaaagggcagaaggcccagcaaccatccttgccattggaactgcaaacccaccaaaccgtgttgatcagagcacctatcctgattactacttcagaatcaccaacagtgaccacatgaccgagctcaaagagaaatttcagcgcatgtgtgacaagtctatgatcaagacgagatatatgtacctaaacga

SEQ ID NO: 194352 - DNA, 276 bp, Glycine max
gatctttttctgctctttgaagaaagaagggtctttgcttgattttggagatgtctctgctctcagatctcatcaaccttaacctctccgataccaccgagaaggtgatcgcagagtacatatggatcggtggatcaggaatggacctgaggagcaaagcaaggactctcccaggaccagttagcgacccttcagagcttcccaagtggaactatgatggttccagcacaggtcaagctcctggtgaagacagtgaagtgattttatacccacaag

SEQ ID NO: 194353 - DNA, 274 bp, Glycine max
gtgcaaagcctctattttttcttgtgaatttgaaggacgatgagttccacagaggtcgcagccacaacgaagaagggtggaagagggaaacccaagaccacaaagtccgtttcccgttcctccaaagccggccttcagttccccgtcggccgcgtcgctcgctacctcaaggccggtcgctatgcccagcgcgttggttccggttcccctgtttacctatctgcggttctcgaataccttgccgctgaggttcgttgcatttaataataatttg

SEQ ID NO: 194354 - DNA, 272 bp, Glycine max
ctggtttatagatctttgcgaaggaggtttacagcgctcaaccaaagatgcagaacgaggaaggacagatcactgagctttacattcctaggaagtgctccgccacaaacagattgattaccgctaaggaccatgcttcggttcagatcaacattgggcatgtggatgagaatggcgtctacaatggccatttctccacttttgccctctgcggattcatccgtgctcagggtgatgctgacagtgctctagaccgcttgtggcagaagaag

SEQ ID NO: 194355 - DNA, 279 bp, Glycine max
ggtaaccctccaacaacaacacttccgctgcgaaaaatgtctctggtggcgaacgaggatttccagcacattctgcgtgtgctgaacaccaacgtggatgggaagcagaagataatgttcgcaatgacctccatcaagggtattggaaggagattcgccaacatcgcttgcaagaaggctgatgttgacatgaacaaaagggctggtgagttgactgctgctgagttggatagtgtgatgactgtggtggcgaaccctaggcagttcaagatcccagac

SEQ ID NO: 194356 - DNA, 275 bp, Glycine max
gcggaatcagctagaattttctaataatggccaaagacgttgagcaggttacagagcaaggtgaatactccgcgaaggattaccatgacccacctccggcgccgttgatcgacccagatgagctcactaagtggtccttgtacagagccgccatagctgagttcatagcaacactccttttcctttacatcaccgtgttgaccattattggctacaagagacagagtgacaccaaaatccccggtaacaccgagtgcgacggcgttggcattttg

SEQ ID NO: 194357 - DNA, 274 bp, Glycine max
ctaggcacccagagacgaggaagggcgtagtaagcgacgaaatgcttcggggagttgaaaataagcgtagatccggggattcccgatataggtcaacctttcgaactgctgctgaatccacgggcaggcaagagacaacctggtgaactgaaacatcttagtagccagaggaaaagaaagcaaaagcgattcccgtagtagcggcgagcgaaatgggagcagcctaaaccgtgaaaacggggttgtgggagagctatacaagtgtcgtgctgct

SEQ ID NO: 194358 - DNA, 270 bp, Glycine max
aaagttagcatggatggagcaccttaccttcgcaaactggacttcaagatgtacaagagttaccgagagctctctgattctttaggcaaaatgttcagctccttcacctttggcaattgttaatcccaaggtatgatggatttcatgaatgatagcaagctgaatgatctcttgaacagctctgattatgtcccaacctatgaggacaatcatggtgactggatgcttgtcggtgatgtcccatgggagatgtttgttgaatcatgcaag

SEQ ID NO: 194359 - DNA, 270 bp, Glycine max
cggctcgaggtacccttgctctccaagaagatcgtgaagaagcgcgtcaagaagtttatacgcccccagagtgatcgcaagatctccgtcaagccaagctggcgcagacccaagggtattgattctcgtgtcaggagaaagttcaaaggatgcactttgatgcccaacattggttatggctcagacaagaaaacccgccattatctaccaaatggtttcaagaaatttgtcgtgcacaatgtgaaagacctggaacttctcatgatgcat

SEQ ID NO: 194360 - DNA, 270 bp, Glycine max
ccaatatctgggtgaggcctatcagtggactcacaatggtggttgaccttgaactcatgaagatcgttcagtatcacgacggtggcattataccagtaccaactgccgacaacactgaataccgcttttcacatcagaacccaccattcggtccaagacaacatagtctagcaacccatcaaccacagggtccaggcttccaaatcaacggacacagtattagttgggccaattggaagttccatattggatttgatccacgtgccggaa

SEQ ID NO: 194361 - DNA, 272 bp, Glycine max
ctcgagccgtgtaaatctctccatttaccgcaacaatgacgagctcaggaaacagctgcctaatcacaacttccgaactggaagtgattgtgatgttattgcacacctgtacgaagagaatggagaagactttgtggacatgctggatggtatcttctcatttgttctactggacacccgtgacaacagttttatagtggctcgggatgctattggggtcacttccttgtacattggatgggggttagatggctctgtttggatttcatcag

SEQ ID NO: 194362 - DNA, 276 bp, Glycine max
  unsure (1)..(276): unsure at all n locations
gagggtgtgtcttccataatctctcttaatggaacagttgaagccaagtgctgttaactcttctcctctcactccactcaccttcttggccagagcagccaccgtttacggcgatgtcccttccgttgtttataacgacacaaccttcacgtggtctcagacgcgccgccgatgcctccagctggcctctgncctcgcctccctcggcatcggccgnggccacgtcgtctccgtcgtggcccccaacatccccgccatgtacgagccagcattctc

SEQ ID NO: 194363 - DNA, 273 bp, Glycine max
ctcgagccgggagttcaacccaagtcacacgttgcagctcccacaaaaccatttttgctctactttgtatgtatattttgattatcttgatgaatctcgaattaggttttgggtgcagatgagaaatattacagctctgagatgatcaagtgcaaggatgaatcgaaatccttctccagagaccgtctgaatgacaatttctgtgactgccctgatggcactgatgagcctgggcattcggcttgccccaacggaaaattttattgcagaaac

SEQ ID NO: 194364 - DNA, 274 bp, Glycine max
cgagtttcacagcagcaatggtgtacgtcaaggctcagaaatcaaaagcctacttcaagagatatcaagtcaagttcaagagaagaagagagggaaaaaccgattaccgtgccaggattcggttgattaatcaggacaagaacaaatataacactccgaaataccgatttgttgttcgctttagcaacaaggacattgttgcacaaataatatctgctagcattgctggcgatattgttcttgctgcagcatatgcacatgagctgccacgata

SEQ ID NO: 194365 - DNA, 270 bp, Glycine max
cgacagtcctgttgggcgtttgggcctcagtgtttgctatgatttgagatttccagagatgtaccaattgctgcgtttccaacatgaagcacaggtactactggtgcctgcagcattcacaacagtaacaggtgaagcacactgggagattcttcttcgtgcccgtgcaattgagactcaatgctatgtcattgctgctgcgcaagctggcaaacataatgataaaagagaaagctacggtgacacattaattatcgatccatgggggac

SEQ ID NO: 194366 - DNA, 272 bp, Glycine max
aatggcacttcgttgcttggtgatgtccctttctgttctcttcactcttggtcttgcgagagaaagccatgccagagacgaagatttttggcatgctgtttggccaaacactcccattccaagttcattgcgagatcttctaaagcctggccctgcaagtgttgaacatcgatgatcaccctatgcaaattgaagaaacacagtacccgaaaaccttcttctataaagaagaccttcatccaggcaaaacaatgaaagtacaattcagcaag

SEQ ID NO: 194367 - DNA, 265 bp, Glycine max
tcgagcgaatatcttgttgtttggagcgatccgagaaaaactctgtaaacatgttggtttaccaggacctccttacaggtgatgagcttctctctgactccttccgttacaaggaaattgagaatggaatgctgtgggaagttgaggggaagtgggttgttaaaggagcagttgatgtagacattggtgcaaacccttctgctgagggtggaggagaagatgagggagttgatgatgcagctgttaaggttgttgacattgttga

SEQ ID NO: 194368 - DNA, 267 bp, Glycine max
gaaaaaggaaaacaatgggttccgataatcaccagaacttggagttcttgaaggagatcggtttgggctcttccaacattggctcttacattaatggccagtggaaagccactggttcttctgtcacttctgttaatccttctaacaatcagagtatagctcaagtgaccgaagcaactttgcaagattttgaggaggggttgcgagcttgcagtgaagcagctaagacatggatgactataccggcaccgaagagaggtgagattg

SEQ ID NO: 194369 - DNA, 269 bp, Glycine max
gaacagtgtaagtgtatacagagagtgcttgagaaaccatgcagccagcctcggaagctacgccacggacgggtgcggcgagttcacggtggacggcgcggggggactacaatgcgcggcgtgcggctgccaccgcaacttccaccggaaagtgaagtacccggtggcggacatgaggagtatggaggcaagaagcggttcaggtccaagttcacggcagatcagaaggagaagatgctggggtttgcggagaagcttggttggaagct

SEQ ID NO: 194370 - DNA, 248 bp, Glycine max
attcccatgcgccatcttcaggagttccgtcttcaagccatcgatggcttcgaccttaaccagcgccttgtttttgatgaaattttcaaggagggtgatcttgttgatgtctctggcaccaccattggcaagggtttccaaggtggaatcaagcgtcataacttcaaaaggggtccaatgacgcatggttccaagagtcacagacaattaggatcaattggtgctgggaccacacctggtcgtgtgta

SEQ ID NO: 194371 - DNA, 273 bp, Glycine max
cacacctctcctcgttcacgctacccctttctgctcttcttcaacctttcaagttttaaaaacataaagatggcagagacattcctatttacctcagagtcggtgaacgagggacaccctgacaagctctgcgaccaaatctccgatgctgtcctcgacgcttgcctcgagcaggacccagacagcaaagttgcctgcgaaacatgcaccaaaaccaacttggtcatggtcttcggagaaatcacgaccaaggccaacgttgactacgagaag

SEQ ID NO: 194372 - DNA, 270 bp, Glycine max
ggaaactttaatttgcagaatcttcttattttgacagcaataaaggctgatccatccagagttatggattatgttaatagattggataattttgatgggcccgcagttggaggaatggctgtagaagctcagttatatgaggaagcatttgccatttttaagaagttcaacttgaatgttcaagcagtcaacgtgttgcttgataagattcatagcattgatagagctgttgagtttgctttccgagttgaagaagatgctgtttggagt

SEQ ID NO: 194373 - DNA, 270 bp, Glycine max
ccaaaccctagcggcactacacactagttctatcgctatctccccaagatgtcgagcgccgatcccgagcacagagaagaggaggaggcacccgccgttggcgccgacgaggacaccggagctcacgtcgctccaatcgtcaagctcgaggaggttgctgtcaccaccggcgaggaggacgaagatgcaatcctggatctcaaatcgaagctttaccggttcgacaaggacgggaaccagtggaaggagcgtggcgccggcactgtgaat

SEQ ID NO: 194374 - DNA, 269 bp, Glycine max
gaaaaactcgatggaaaaatggtggtttaattctatgttgtttaataggaagttagaatacaggtgtgaattaagtaaatcaatggatagtcttggtcctattgaaaataccagtctaagggaagaccctaaaattttaaccgatatagaaaaaaaaattcacagggatttggattatttagaaatggaaggttttttttctagcgatctgaatactgtttctaagaatgatgatgatcattacatgtatgagactcaatttagtttta

SEQ ID NO: 194375 - DNA, 269 bp, Glycine max
cttgcacatgggttagtcgatcctaagggacgggggaagcccgtctgatagcgctctgtgcgcgtactccgaaagggaatcgggttaaaattcctgatccgggacgtggcggctgacggcaacgttagggagtccggagacgtcggcgggggccccggaaagagttatcttttctgtttaacagcctgcccaccctggaaacggctcagccggaggtagggtccagcggctggaagagcaccgcacgtcgcgtggtgtccggtgcgccc

SEQ ID NO: 194376 - DNA, 269 bp, Glycine max
ggacaatatagtacggcagcaggagcttgcagcatatttcactcactgcaaccttcagacacctcacttgaggttagctttgcagaatgcaatgactgtctgcttcaaggcaaagaaccttgccactgctgcaaactttgcccggaggctacttgagacaaatcctaccaatgaaaaccaagctagggcagcaaggcaagtggtagcagctgctgaaaaaactatgactgatgctacccagttgaactatgatttccgcaacccatttg

SEQ ID NO: 194377 - DNA, 266 bp, Glycine max
attctctctacgtgcaagtcaaaaccggcattcgcaacactcacaaacgtcaccgaacttccgtataaattctcttcccttccgtgattatgactgaaagacggatagaacactcagcgatggcacagaagagattcatcatcgaggtcgagaaggcgaatgaggcgagcgaaggaaggccttcgagaggaactgtctatcgtagcctcttcgccaacgatggattccctgcacctatccaaggtctcaatagttgctgggacgtt

SEQ ID NO: 194378 - DNA, 267 bp, Glycine max
ggtggatacctaggcacccagagacgaggaagggcgtagtaagcgacgaaatgcttcggggagttgaaaataagcgtagatccggggattcccgatataggtcaacctttcgaactgctgctgaatccacgggcaggcaagagacaacctggtgaactgaaacatcttagtagccagaggaaaagaaagcaaaagcgattcccgtagtagcggcgagcgaaatgggagcagcctaaaccgtgaaaacggggttgtgggagagctata

SEQ ID NO: 194379 - DNA, 257 bp, Glycine max
cggctcgagcggcattaaaaatgcagatcttcgtgaaaactctgacagggaagactataaccctcgaggtcgagagcagcgacaccatcgacaatgtcaaggccaagattcaagacaaggaaggcattcctccggatcagcagcgtttgattttcgccggaaagcagcttgaagatggaaggaccctggccgattacaacatccagaaggaatcaacccttcatctcgtcctcaggcttcgtggtggcatcattgag

SEQ ID NO: 194380 - DNA, 270 bp, Glycine max
ctcgagccgcgcggtggttcggcggggaacaagttccggatgtcgctgggtctgccggtggacgcgacggtgaactgcgccgacaatacgggggcgaagaacctctacatcatatcggtgaaagggatcaaagggcgtttgaaccgtctcccctcggcttgcgttggcgacatggtgatggccaccgtgaagaaggggaaacccgatctgaggaagaaggttttgccagctgtcattgttcgccagcgcaagccatggcgccgaaaggac

SEQ ID NO: 194381 - DNA, 272 bp, Glycine max
ctcgagccgttgaagtaatccacccacgggtttcttggagttgtgatcaactacgttacttctctcttggttttcttcatcttccaccttcacctgttggaatggcaaggaactacttcaaacaagaacatgatcttgagaagagaagagctgaggctgctaggattagggagaaatacccagacaggattccggtaattgtggagaaggccgaaagaagtgacatcccaagtattgacaagaagaagtaccttgtccctgctgacttgact

SEQ ID NO: 194382 - DNA, 270 bp, Glycine max
cggctcgagaaccccttcacacactctctctctctctcttgcaatggctgctattgttttcctccacattgcatcattggcctctctttttgttgcaacaagtgcaagaatccctggagtttacaccggtggcccctggcagagtgctcatgccaccttctacggtggcagtgatgcctctggaacaatgggtggtgcttgtgggtacggaaacctgtacagccaaggctacggagtgaacactgcggcgctgagcactgccctgttcaa

SEQ ID NO: 194383 - DNA, 269 bp, Glycine max
gccgtttgtgttgttttcgggacgaagaagaagatggtgtcaggttctggaatctgcgcaaagcgggtggtggtggacgcgcgccaccacatgctgggtcgtctagcctccatcgtggcgaaggagcttctgaacggccagaaagtggtggtcgttcgctgtgaagagatttgcatctcgggcgggctggtgaggcagaagatgaaatacttgaggttccttcgcaaacgcatgaacaccaaaccctcccatggccccatccacttccg

SEQ ID NO: 194384 - DNA, 271 bp, Glycine max
gttactaagtatgatgattttgaactcaagtcaagcgttaccaagaacaatgattttgaaccgagaccaagtgctaccaaatatgatgattttgaactcaggtcaagcgttaccgagaatgatgattttgaaccgagaccaaatattagcaagtatgatgactttgaactcaggtcaagcgttaccgagaatgatgattttgaatcgagaccaagtgttaccaaatatgatgatttagaactcaaatcaagcattaccaaaaacgatgatt

SEQ ID NO: 194385 - DNA, 271 bp, Glycine max
accatgtcacttgctgggaaaatcaccactgaaatcggggttcatgcaaccgctacaaagtggttcaacctcttcgcaacacaactccatcatgttcaaaacctaactgatagagtgcatggaaccaagctgcatcaaggtgaagactggcatcacaacgagacagtcaagcactggacttataccatagatggtaaggttacaacatgtctggagagtattgaatccattgatgaacagagcataacaatcacctacaagctcttcagtg

SEQ ID NO: 194386 - DNA, 270 bp, Glycine max
attattgaattgacaatgaggcctgctcttgctttgcttcctcttctatttgctttcttgttagctgccactacagaatcaagaaaagatacaggggaatattggaaaatgatcatgaaagatcaggaaatgccagaaggacttcaaggtcttgtttcatttcaatctgaaaataaccctaagactcaagagcagcttggtaaacgttccaaaaaccattgtgaagagtctctagttacaaatacacaagttaatagtgacttcgaaccc

SEQ ID NO: 194387 - DNA, 261 bp, Glycine max
gaaattttaaaaatgactgggataaacttaagaattcaattattgaaattgaataagtaaacaatttaattggattggtcgaatggtatcaaaaaaatggagtactaactcccatttcttatttattattgaattaaccgatcaacttgctttgttatcgaacatttctttttgatttcaaaaattttccggaaaaaatttgaatctatttttatatgcgaatcaatcctactacttctggtcctgaggtttctgcgcttg

SEQ ID NO: 194388 - DNA, 266 bp, Glycine max
tcggcttctgcttcaaggaaggagagcttgttattctctatcaacaagtaaaatgtcaggtgaagagggtgtcattgcagttgagccagctgctgctgctgctgccatcccaggcgagccaatggatatcatgactgccttacaacttgtgctcagaaaatctctggcttatggtggtttgtcgcgtggccttcatgaaggtgcaaaagtgattgagaagcatgctgcacaactctgtgttcttgcagaagactgtgaccagcctg

SEQ ID NO: 194389 - DNA, 280 bp, Glycine max
  unsure (1)..(280): unsure at all n locations
gaagaacccttgctgactataacatccagaaggaatctaccctgcacttggtgttgcggcttcgtggtggcatgcaaatctttgttaagactttgactggaaaaaccataactttggaggttgaaagttctgataccattgataatgtgaaggcaaagataagcctctgttcggatctggtgggatacctgntccttagtcctgaatcgttagctanttcacattgtctatggtgcatctgaactgctccacgctccaagggttatggggtctttccggt

SEQ ID NO: 194390 - DNA, 267 bp, Glycine max
ggaaatttaagtgaagagagaatgatgatgaagtctgctatgtgtgcattggtgcttgtggcactggttgtggttgaagtggggcccatggctgaggctgcggtgacttgcaacccaacacagttgactccttgtcttccggcaattaattcaggttctgcaccttcgagtgcttgttgccagaagctgaaggagcaaaagccatgcttctgtggctacctcaaaaaccctagcttgaagcagtatgttaactctcctaatgccaaa

SEQ ID NO: 194391 - DNA, 271 bp, Glycine max
ggaggcaccccttgaaggatctataccagacatgacttcttctactgagcaatatgtgaatttgcagaatatctatcacgctaaagctgaggctgactttcttgtaatagagcgtctactgagaagtactttgaagaagattggtagagattcaaatagcatttcgaagtcaataattaaaagcttctgtaaaaatgcaagaaaactcaaagtttgcaggtaccgtctaattgaagatgagtttaattctccaaacctacctgagttacag

SEQ ID NO: 194392 - DNA, 269 bp, Glycine max
ggagtgggaactatgctaagatcatggacgcggtgcttgcggcaccggattacagcatgaagcgttacctgattttggtaaagaagggtgtttatgttgagaacgtggagatcaagaggaagaagtggaatattatgatggttggagaggggatggattccaccattatctccggtaaccggagtgtcgtcgacggttggaccacattccggtcagctacattcgctgtgagtggcagaggattcatagcaagagacatatcctttcag

SEQ ID NO: 194393 - DNA, 278 bp, Glycine max
gaattcggatcgagagaagatgaagttcaatccacgagtgtcgagcagccgccgcaagagccgaaaggctcacttcacggcgccgtcgagcgtgcggagggtgctgatgagcgcccctctgtcggcggagctccggtcgaagtacaacgtgcggtcgatcccagtccgcaaggaggacgaggtgcaggtggtgcgcggaacatacaagggtcgcgaggggaaggtgacgcaggtgtaccgtcgcaagtgggtcatccacatcgagcgcataacccgcg

SEQ ID NO: 194394 - DNA, 261 bp, Glycine max
aaaattctctcttcctttttgggttctcctattccaagcttcaatcttttctctcttctcacagccttcttcactcacaggaggtgaagatgtcgactccggctaggaagagactgatgagggattttaaaagattgcaacaagatcctcctgctggcatcagtggggctccccaagacaataatattatgctttggaatgctgttatctttggcccagatgacaccccttgggatggaggtacgtttaagttgacacttc

SEQ ID NO: 194395 - DNA, 259 bp, Glycine max
cttcctcagtagtgcgattttcgattctcttctctgcaactatgacctaaccctaaggtcttcttcgacatgaccatcggcggtcaacctgccggccgcatcgtgatggagctctacgccgacgtgactccgagcaccgccgagaacttccgcgcgctctgcaccggcgagaagggcgccgggcggagcggcaagcccctccactacaaaggctcgtccttccaccgcgtgatcccgaacttcatgtgccagggcggcg

SEQ ID NO: 194396 - DNA, 257 bp, Glycine max
gcatcatctcccaattgggttccaagcgcaccacatgtttggcagcctttgccgggctccttctcctcttcctccgcggtctccgccgccgccgatacaacctccccccaggcccaaagccctggcccatcataggcaacctaaacttaattgggtcccttccacatcggtcgatccacacgcttagcaaaaaatacgggcccatcatgcacgtatggttcgggtcgagctccgtggtggtgggctcgtccgttgaa

SEQ ID NO: 194397 - DNA, 274 bp, Glycine max
gagttcggctcgaggtggcattataccagtaccaactgccgacaacactgaataccgcttttcacatcagaacccaccattcggtccaagacagcatagtcctgcaacccatcaaccacagggtccacgcttccagatcaacggacacactattagttgggccaactggaagtaccatattggacttgatccacgtgccggaattgtaatatcactggcatccatctacgacatcggcaacgcacaaatctcgtagagtgtcatgcaaaggcta

SEQ ID NO: 194398 - DNA, 262 bp, Glycine max
cttgttgacaaggtcctagacaagactggcatgaagggcactggtcaagtggactgggcagcaagctgctgaattatcaattgctgctcccactattgaagcatcattggatgcaaggttcctgagtgggttgaaggaggaaagacttgaagctgcaaaggtctttaaatcaggtggtattgctgatatcgtgactgatcaacctgtagacaagaaaaaattggttgatgatgttaggaaggctctttatgcagccaaaatc

SEQ ID NO: 194399 - DNA, 262 bp, Glycine max
gcttcacgaggttttcctgatatgaagatcaagggttcgcctgaatatgtgcgaggttgtgtgaagctagcttgaagcgtcttgatgttgaatacattgatctctattatcagcacagagtggacacatctgtacctatagaggaaacagtgggtgaacttaagaaattggtcgaagagggtaaagtcaaatatattggattatctgaagccagcccagatacaataaggagagcacacgcaattcatcccatcacagctgt

SEQ ID NO: 194400 - DNA, 267 bp, Glycine max
gcagtcgcaaccctaatcagaagaagcgcagcttcaagcgagtgacagccaccaggggtgggtcgtatgcacagccgcggtaagggtatatcctcttctgctttgccctacaaaaggacacctcctagctggctcaagatctcttcgcaagatgtcgaagaaaatatctgcaagtttgcgaagaaaggtttgaccccgtctcagattggtgtcattctcagagattctcacggtattgctcaggtcaatagcgtcactggcagcaaa

SEQ ID NO: 194401 - DNA, 209 bp, Glycine max
ttacttcttctgagcttgtttaagctctttctatttgattccattaacatatatattcacaatgtgtggtattcttgctgttcttggttgttctgatgactctcgagccaaaagggtccgcgtgcttgagctctctcgcagattgaagcaccgtggccctgactggagtgggctccatcaacatggtgactgctttttagcacatcaac

SEQ ID NO: 194402 - DNA, 261 bp, Glycine max
tgttactgctgctcttttctcttttcttttctctttagttctctcttcccctttcttcttctttttcttcttcttctgagcttgtttaagcttttcttccattaacatattatcacaatgtgtggtattcttgctgttcttggttgttctgatgactctcgagccaaaagggtccgcgtgcttgagctctctcgcagattgaagcaccgtggccctgactggagtgggctccatcaacatggtgactgctttttggcacat

SEQ ID NO: 194403 - DNA, 260 bp, Glycine max
ggaagtgcaagcgcagagagaagaatgaacaactctattatggcttttgttctgctaatattactttcggcgttacgctactcaagcgccgaacaagctttcgatgttcgcaaacatctttccactgtctccagatatggagttgtgaaagacatcgctgacactaacttcgtgccttctaaaatccccgagggatgtgttccgatccatttgaatctcgtggcgaggcatggaactcgatctcctacaaagaaaaggat

SEQ ID NO: 194404 - DNA, 258 bp, Glycine max
cgaggaggaggttctgatcttctttcttttttgtctggttccctttcttccttgcgccaatttcgagatccgaaaccggcatcagatccgatccgaaatgtacggattcgaagctctcaccttcaacatccacggcggcttcctagaggccatcgtccgcggccaccgcgccggcctcctcaccaccgccgattacaacaacctctgccaatgcgaaaccctcgacgacatcaagatgcacctctccgccaccgagta

SEQ ID NO: 194405 - DNA, 259 bp, Glycine max
cccaccattactcagcactgccattcttcaatcacactaatggctgtcaccttgtcagatcttcacaccgaagagggcatcaaatccctcgatcaattcctttctgggaaaacctatatctctggggatcaattgacaaaggatgatatcaaagtgtatgcagctgttgtggaaaagccaggagactcttttcctaatgctgctaagtggtacgatgccgtctcttctcaacttgctccaagcttccctgggcacgctc

SEQ ID NO: 194406 - DNA, 259 bp, Glycine max
cgacaatattcactccgggaatggcttccctaccctttccgttgatgaacaaggggttgccatagagctgccactgaaatacggtccattcattgagtcagtgaacaagagagggctgaacctctctgaggtggtgtgttccacattcacaatggggtggtttggagaaaccaaggacagaaggacagtgagagtggaatgcttcatgaaagaaagcagccccaatatctgggtgaggcctatcagtggactcacaatg

SEQ ID NO: 194407 - DNA, 258 bp, Glycine max
cactcccatacacacacgttgtctcgcacacattccttcattccgcagcagcgggcatctttaccttaaacgacaacaatggccgatgccgaggatattcaacccctcgtttgcgataatggaaccggaatggtcaaggctggttttgccggagatgatgcgccgagggcggtgttccccagcattgtggggcgtccacgtcacacgggagtgatggttgggatggggcagaaggatgcgtatgttggggacgacgct

SEQ ID NO: 194408 - DNA, 259 bp, Glycine max
ccgaaattaagtgggagcatcacaaagttcatgataagaagtcaataattacggtgtttggagcctctgcaacttatggcactgctgatggaagtacaattattgcctcgtgttcagaagggactgacatcattctttggcatggaaaaactgggaagagtgttgggcatgtcgatacaaatcaattgaaaaataacatggctactatatcacccaacggtcgttttattgcagctgcagcatttactgccgatgtgaa

SEQ ID NO: 194409 - DNA, 265 bp, Glycine max
gctaggtagtccaaccactgaatcttgggcagatggactcaaacttgccagggggatcaactatcagtttccacagcttgctggttataatctctctacactgatcccatccagaagcgatgatgcaatcagccttgtgacgtcactttgttcatgggatccctgcaagagaccaactgcagcagaggttcttcaacatcctttttttcagagttgcttttacatccctccatcccttcgcaccagagctgtaaccagaactcca

SEQ ID NO: 194410 - DNA, 263 bp, Glycine max
gtgggactgaacaagaggttcagcaaaactgtataaattgtggtgtttgtatgggcaagtacttctgtggaacatgcaagctttttgatcatgatatatctaagcagcagtaccattgcagtggctgtggaatttgcagaactggaggaagcgaaaatttcttccattgctacaagtgtggttgttgctactcaactcttctgaaaaacagtcacccttgtgtagaaggagcaatgcatcatgattgcccggtttgttttgag

SEQ ID NO: 194411 - DNA, 253 bp, Glycine max
tttaacagttcccctcgaaacttctgaagatgggtggcattgcattcggacgcttggatgattctttcagtttaacctcaatcaaggcctatattgctgagttccattcaaccttgctctttgtttttgccggtgttggttcagccatagcctatggtaagttgacatcagatgcagcacttgatcctgctgggttactggcagttgctatttgccacggttttgcactctttgttgcagtttctgttggtgc

SEQ ID NO: 194412 - DNA, 239 bp, Glycine max
ggctcgagcagacttctacctttgtttcaaacccaagtgcagacaaacagcagcgaggtttttcataacaaaggagaatgaaggctttttcagttaaagttgaggaaggaagggaaggtaaaaatggtaacctttctgttggtccagtataccgtaacctcctctcagaaaatgaatttcctccaatggatcctgatttcagtaccacttgggatattttctgtgtgtctgtcaaaaat

SEQ ID NO: 194413 - DNA, 252 bp, Glycine max
actcgagccgctcgagcggctcgagctcgagcacacttcgcttgcttgactgatgtccctttctactctcttcactcttggtcttgacagagaaagccatgccagagacgaagatttttggcatgctgtttggccaaacactcccattccaagttcattgcgagatcttctaaagcctggccctgcaagtgttgaaatcgatgatcaccctatgcaaattgaagaaacacagtacccgaaaaccttcttcta

SEQ ID NO: 194414 - DNA, 255 bp, Glycine max
ctatatccaagtctctgtgtgtgcggctgaggattccgaacgaatgaaggggggaatttctcgcaaagtttaagtaatcatgggtaaggaaaatgttcacatcaacattgtcgtcattggacatgtcgactgctgggaagtcaactaccactggtcacttgatctacaagcttggaggtattgacaagcgtgtgattgagaggttcgagaaggaggctgccgagatgaacaagaggtcattcaagtatgcctggg

SEQ ID NO: 194415 - DNA, 262 bp, Glycine max
ctccgctctctcatcataccgcactctcgggaagttacttcctcttcccggggactctcaatggggtctccatttcctcgcccacgctcaccgcctccaccagatgaagaaaaggccatgtggggtatatgcatccctctccgagagtggagagtattattcccaccgaccgccaactcccctactagacaccgtcaactatcctattcatatgaagaatctctctgccaaggagctgaaacaactcgcggatgaactgcgt

SEQ ID NO: 194416 - DNA, 273 bp, Glycine max
tcggctcgaggatgaagatgatccacgttcttttcctctttgctcttgtctcgttcacttggcatgcttctgtcaatgatttctgtgtagcagacctaaaaggtccagatagcccttcaggctatcagtgcaagccacctaacacagtcacagtggatgactttgtgttctctggctttgtagctggaaacaccacaaacactttcaatgctgcattaacctccgcatttgttactgattttccaggtgtgaatggtcttggtgtatctgtgg

SEQ ID NO: 194417 - DNA, 262 bp, Glycine max
actcgagccgaatcggctcgaggcgtgatccaattacccgcctaccaaatgggcgttaccttaccccactctttaacttcagacgccaatgagcttaaaggagtgcctccaggcatgctggtgaaactgattccatctcatgcaagaaagcagtgtgccttgtttgcgtcatagtgtagcctcgtgtaaatattatctactctgcctgtagaagtgtatgtagtctgtttcaggttgttaatagttggttccttccacctag

SEQ ID NO: 194418 - DNA, 256 bp, Glycine max
caaccacatgtcacactacacaactgtgatcttccgcaggcacttgaggatgaatatggaggatgggttagtcgtgatatcataagacacttcacaaactatgcagatgtgtgttttagagagtttggtgatagagtccagtactggactactgtgaatgatcccaatgcctttgccttgggtggctatgatcaaggaacctcccctcctcagcgatgttctcccccattttgcactacaaacagcactaggggca

SEQ ID NO: 194419 - DNA, 249 bp, Glycine max
ttttgaagaagaagcagttcaattgatcaactcagatttcagggacctaagtctagctgctaatagactcgcccatcatgccatcaaacttggtggcattggctttggagcctcttttttcggattgtttgctgccattgctgctatttatctgttgattttggatcgtacaaactggaaaacaaatattctcacagcactactcattccatacattttcttcagcttgccttcattaattttcgacgt

SEQ ID NO: 194420 - DNA, 251 bp, Glycine max
gacagagcaggggatcctcttctagcccagcaaacttctgaatcagaagctatgaagctggtcaaacctactccttttgattatgggagtggtcatgttgatccaactgctgcattggaccctgggctcatctttgatgcagggtacgaggattatataggcttcttgtgcacaacacctagcattgatgttcatgagataaggaactacactcacaccccatgtaacacctccatgggcaaaccatcaaa

SEQ ID NO: 194421 - DNA, 252 bp, Glycine max
ggtgttcacttgatccttcataagtcgtcatcatcatcatcatcatcagcgttgattgaagaagatgccgatcagaaacatcgccatcggaaggcctgaagaggctactcaccccgacacgttgaaggcggggttggctgagttcatctccaccttgatcttcgtgttcgccggttcaggttccggcatcgcctacaacaagctcaccgacaacggcgccgccactcccgccggcctcatctccgcttccat

SEQ ID NO: 194422 - DNA, 253 bp, Glycine max
tagaagactcattgtggtagctgctgctgcaccaaagaagtcatggctccctggtgtcagacgtggtggcaacctcgtcgacccagaatggcttgatggatcgctaccaggtgactatggctttgacccactaggccttgggaaggacccagcattcctcaaatggtacagagaagctgagctgattcatgggagatgggcaatggctgcagttctaggaatctttgtgggccaggcatggagtggagttcca

SEQ ID NO: 194423 - DNA, 253 bp, Glycine max
gctagctaggttgaaaatagtttggttttgtagtaagtgaggtgaggtgccaaaatggtgaagataactcttggtactttcgatgactcttttggtgttgcctctcttaaggcttatttggcagagttccatgcaactctgattttcgtgttcgctggtgttggttcagccatcgcttacaacgagcttacaaaagatgcagccttggatccaacggggctggtggcagtagctgtggcccatgcatttgcac

SEQ ID NO: 194424 - DNA, 254 bp, Glycine max
  unsure (1)..(254): unsure at all n locations
aaggaggcttccttctccagcctcactgtgaggtcaacaacagagacntccacagtgggaacacggaatgccataccagtcaattttccattcaaagcagggaggacttttccaacagccttggcagctccagtgctgctaggaatgatgttaaatgaagcagctcttccacctctccagtctttggctgatggcccatcaacagtcttctgggtagcagtgatggaatgaacagtggtcatcaaaccctcaac

SEQ ID NO: 194425 - DNA, 255 bp, Glycine max
aaaaaaatgcaagtctcttggtgccgtagccatggtccatgcagaaaggggagatgctgtgtatgaagggcaacggaaaatgatagaacttggaataactggtcctgaggggcatgctctttcaaggcctgcagtgttggaaggagaggcaactgctcgtgccattcgcttagcagattttgtgaatactcctttatatgtggttcatgtaatgagcattgacgcaatggaagaaattgcgaaagcccggaaagc

SEQ ID NO: 194426 - DNA, 258 bp, Glycine max
ccgctcgagcggctcgagcgagaagaaaacatcattctcacaggaggaatatagacttaagaagcagaagaaatatgcaccaaaagtacttatgaggcgtcctgttgctcgaagtatatgtgaggcctattttaagaagtatccatctaaaattggattcttgcgggtggacacattgtcccttctactttccatgggtaatgtttcttcaaattctgacattcttgtagttgatatggttggtggccttcttactgg

SEQ ID NO: 194427 - DNA, 252 bp, Glycine max
cggctcgagctcttcttctcttgcggctagggttttagcgcacttgcttctagatttaaggaagatgggtaaggaaaaggttcacatcagtattgtggttattggccatgttgactctgggaagtccactaccactggccacctgatctacaagcttggaggcattgacaagcgtgttattgagagatttgagaaggaagctgctgagatgaacaagaggtctttcaagtatgcctgggtgcttgataagct

SEQ ID NO: 194428 - DNA, 250 bp, Glycine max
gtacaggcaacaatggcaataacaaggagattttagcttacttgagtgctgcagaaacatatataggagtaaaaccagctccaatcatagcaggattctcatccaggggtcccagttccgtgcaaccattgatactaaagccagacataactgctcctggtgtgaacgtaattgctgcttttacacaaggagctggtccgtctaatcttccatcggatagacgccgatctcttttcaatgtgcaacaggg

SEQ ID NO: 194429 - DNA, 245 bp, Glycine max
ctcgagccgttaactattgagaacaataattttaggagtaaatgtgatgtcatggagaaggaatacaatgatctaaagttcagtgctgtaaagaaggctgctttggactctaaggttttaagagaaaaagaagaggagcttcatcagctaaaggatcagtttgaacttgccctaggtgaagcaagcaaaagccagatcgtcattgctgatttatcccaagaaagagatgatttgaaggaggctct

SEQ ID NO: 194430 - DNA, 246 bp, Glycine max
cgcacattacaaagcctgtctttatgctggcatcaacatcagtggaattaatggagaagtgatgcccggtcagtgggaattccaagttggaccttcagttggaatctcagctggtgacgaggtgtgggcagctcgttacatcttggagaggatcactgagattgctggtgtggtggtttcctttgatcccaagccaattcagggtgattggaatggtgctggtgctcacacaaactacagcactaa

SEQ ID NO: 194431 - DNA, 248 bp, Glycine max
ggatgcttcaagcaccaggtgccacaagttacataggttgcataggaaaggacaaatttggagaggagatgaagaagaaatgtacacttgatggtgtaaaggttaactattatgaaatcgacaatacacctactggaacttgtgctgtttgtgtggttggcggtgaaaggtcccttgttgccaacttatcagctgcaaattgctataagtctgagcatttgacgagaccggaaaattgggcattagtt

SEQ ID NO: 194432 - DNA, 250 bp, Glycine max
gccagtagtcatatgcttgtctcaaagattaagccatgcatgtgtgagtatgaactaattcagactgtgaaactgcgaatggctcattaaatcagttatagtttgtttgatggtatctactactcggataaccgtagtaattctagagctaatacgtgcaacaaaccccgacttctggaagggatgcatttattagataaaaggtcaacacaggctctgcctgttgctttgatgattcatgataactcgt

SEQ ID NO: 194433 - DNA, 251 bp, Glycine max
ctcgagccgggagtttttgaagactattactggcaagaaggagacgggcattgaccttacagctatagaaatcttgtcaaggcacgcatctgatgagttctaccttgggcagagagatggtggtgactactggacttctgatgccggtccattagaggcatttaagaggtttggaaagaagcttgaagagattgaaaagaagcttatagagaagaacaaagatgagacattgagaaaccgctatgggccag

SEQ ID NO: 194434 - DNA, 255 bp, Glycine max
gaaaaagttaattggaagaaagcgcgtcaccaatgtgcaaaggaggagctttactatccccatcctttgatacaagacctaatatgggatagtttatacatattcactgaaccgctacttactcgttggcctttcaacaagttgattagagaaaaggcccttcaagtaactatgaaacatattcattatgaagatgagactagtcgatacataaccattggttgtgtggaaaaggttttatgtatgcttgcttgt

SEQ ID NO: 194435 - DNA, 256 bp, Glycine max
gaaagtgcttgttttgtttgttgctacagttttggtagcatatgggtgccatggctcagactaccagaagttccctctccaaatgaaaactgggtttggtgggcaatacagcaatgaggtggcatgtgccagttggaggcttggcgtggaagcaaacaacgtagtcaagtggcaaactgttcctgcagcttgcggagagtacatagctgactacgttctaggagaccaatatagatcagattccaaaacagttaac

SEQ ID NO: 194436 - DNA, 257 bp, Glycine max
gcttcttcgtggtcttgagcattgtcacagtcgtggtgttatgcggggtgacatcaagggctcaaatcttctgcttgacagtaatggcaatctgaagattggtgattttgggcttgcagctttgtttcagccatctcatgggcagcctttaactagtcgtgtcgtaaccttgtggtaccgaccacctgaacttttgcttggagctacagattatggagttactgtggatttgtggagtgctggatgtattctggcag

SEQ ID NO: 194437 - DNA, 250 bp, Glycine max
agagcttggctcgtttctggtccaaattcattgatgacaagattgtgggtgctgcatggaatgctgttttcacggttgatgagaaagagcgtgagaagaatgttgtagaaacatatgaggctctgcagtttcttgagaatgagatcaaggacaagaaattctttggaggagaagaggttgggttggtagatatagctggtgtctacatagcattttgggtccctttgattcaagaaattgcagggttgga

SEQ ID NO: 194438 - DNA, 248 bp, Glycine max
gcagccacttctccctttcttctgcgctccatcagtctcagccacgctccttctcttatgttgcagacggggagaggtttgacagttgcatccaccccactgccgttgttcatcccaatgccgtcattggccagggtgtttcgattggtcctttttgttctgttagctcctctgcaaagctggggaatggttgtcaactacatcctggaagccatgtttttggaagtacagagttaggggacaattgc

SEQ ID NO: 194439 - DNA, 246 bp, Glycine max
ccgaggcgaagagaagagaaaaattaagatggaggggaaggagcaggatgtgtcgctgggagcgaacaagttcccggagagacagccgattgggacggcggcgcagagccaagacgacggcaaggactaccaggagccggcgccggcgccactggttgacccgacggagtttacgtcatggtccttttacagagcagggatagcagagtttgtggccacttttctgtttctatacatcactgtctt

SEQ ID NO: 194440 - DNA, 248 bp, Glycine max
gcaagccccactcaaccaccacacctctcctcgttcacgctacggctttctgctcttcttctacctttcaagttttaaaagtataaagatggcagagacattcctatttacctcagagtcggtgaacgagggacaccctgacaagctctgcgaccaaatctccgatgctgtcctcgacgcttgcctcgagcaggacccagacagcaaagttgcctgcgaaacatgcaccaaaaccaacttggtcatgg

SEQ ID NO: 194441 - DNA, 249 bp, Glycine max
attttcagttactaatcctagttatttgatttatatactttggggatagtaaatacatgagatagaatattcaaaatggaatatttctattattttattcttcatccaatgactatacattcattatatttttgtgtaaatagaggaaaaactcgatggaaaaatggtggtttaattctatgttgtttaataggaagttagaatacaggtgtgaattaagtaaatcaatggatagtcttggtcctattg

SEQ ID NO: 194442 - DNA, 251 bp, Glycine max
cttttccagggagctcattgacaatggctgaaacaaagtggggggtgaaggacaaaagatggtctctccatggaatgacagctctagtcacaggaggcacccgaggcatagggcatgccattgttgaagagttagctgagtttggagcaactgttcatatatgtgcacgtaatcaagatgatattgataaatgtttagaagagtggaaaaacaagggacttaatgtgactggttcagtatgtgatttacta

SEQ ID NO: 194443 - DNA, 254 bp, Glycine max
cagagtgcttattgttgggggaactggctacataggaaaaagggtggtgaaggcaagtttagctcaaggacatgaaacatttgttcttcacaggccagagattggtgttgatattgagaaagttcagcttctattgtcattcaaggagcaaggagctaggcttgtttcaggttcatttaacgaccataagagcctagtgaatgctgtgaaacttgttgatgttgtcatttgtgccatttctggtgttcacatcc

SEQ ID NO: 194444 - DNA, 255 bp, Glycine max
tttccacttgtctccgaatttagttatcttgagaaacattattggcattgctatatattatggctagcatgaaggttacatgggtggttgtgatcatgtgcatggccgtggtgggtgcaccgatgatggcgcaagccatgacatgcaatgatgtgacggtgaacatggcacagtgcctatcctacctgatgcagggaggaacaccttcaacactttgctgcagcggagtcaagaacattcttggctctgctgtca

SEQ ID NO: 194445 - DNA, 278 bp, Glycine max
  unsure (1)..(278): unsure at all n locations
gcttcttcacttnctctcgtttcaatcgaaaccaaaacaaaaacatgggcagaaaattcttcgtccggtggcnactggnaatgcaatgggaccactgaggaggtaaagnagattgttactactttgaatgaggctaaagtccctggagaagatgtcgtagaagttgttgtgagccctccntttgtgttccttcctgttgtaaaaagnttgctgcgccctgatttccatgtttcggcacanaactgttgggttcgcaaaggtggtgcttataccggtga

SEQ ID NO: 194446 - DNA, 274 bp, Glycine max
attggagtacatgcaagcgtgctgtagtgtcaaagataggattgctttgagcatgattgaagatgctgagaaaaaaggccttattacacctggaaagactgttctggttgagtatacaagtggtaacaccggcataggattggcattcatagcagcattgaggggttataaacttcaggtgactatgccgtcttacgtgagtcttgagaggaaaattatactgcgagcctttggagctgaggtatatcttacagaccctgccaaaggaattgat

SEQ ID NO: 194447 - DNA, 272 bp, Glycine max
ctttctctctgttttctggtaattcatcaattgattcaaaatgcagaggctcaaactgcaactagtgctattcctctcaatctcaacttgtcacactgttttctccttcactgatgggttgttgccaaattggaacttcgagcagggcccaaagccatcacaattgaaggggtccgtagtgacaggccacgatgccataccgaattggacaatttcggggttcgttgaatacataatatcaggacaaaaacagggtgacatgttactggttg

SEQ ID NO: 194448 - DNA, 273 bp, Glycine max
tcgaccgaatcggctcagcatctccatttccatttcctctcacgtcagtttccaagaatcttaagctattggaaagtcttacccaaccgtgagcgctgatcaccagaaggccgttgagaaggcgaagaagaagctcagaggcttcatcgctgagaagagatgcgctcctctaatgctccgtttggcatggcactctgctggaacttacgacgtgagctcgaagaccggtggccccttcggaaccataaagcacccctccgaactcgctcacgg

SEQ ID NO: 194449 - DNA, 274 bp, Glycine max
ggttcttcgtcttctatgtggacggtgtgtgtgattttggcatcactggcctctgcagcactctgtgccaacccacgcaggccagtggatgtacaatttggccgagactacgtgcccacatgggcctttgatcacatcagatatttcaatggtggttctgacattcagcttcatcttgacaagtacactggtactggcttccagtccaaagggtcttacttgtttggtcacttcagcatgtacataaagatggttcctggagattctgctggca

SEQ ID NO: 194450 - DNA, 275 bp, Glycine max
gaaaaactcgatggaaaaatggtggtttaattctatgttgtttaataggaagttagaatacaggtgtgaattaagtaaatcaatggatagtcttggtcctattgaaaataccagtctaagggaagaccctaaaattttaaccgatatagaaaaaaaaattcacagggatttggattatttagaaatggaaggttttttttctagcgatctgaatactgtttctaagaatgatgatgatcattacatgtatgagactcaatttagttttaacaata

SEQ ID NO: 194451 - DNA, 274 bp, Glycine max
gcaagatccagtcagaggaacagtgactggtggaatgatcaaggaacttcttatatcttttaggagagctacaggacaaaagccacaacgcatcatattttatagggatggtgtgagtgagggacagttttatcaggttctactgtttgagcttgatgctattcgaaaggcatgtgcatccctggaacccaattatcagcctcctgtgacttttgtggtggttcaaaagcgtcaccacacaaggctctttgctagcaaccatcatgataagagt

SEQ ID NO: 194452 - DNA, 278 bp, Glycine max
ccaaatcccaactactactcacactcactgcagatctcaatccatggctaccattgttagcatcaaggcccgccagatctttgacagtcgtggcaatccaaccgtcgaggtggatttgacatgctccgatggtacttttgctagagctgctgttccaagtggtgcatccactgggatttatgaggcccttgaattgagagatggaggatctgactaccttggaaagggtgtatcaaaggctgttgacaatgtgaacaccattattgcccctgctttgg

SEQ ID NO: 194453 - DNA, 274 bp, Glycine max
cagaaactaaaagaagttactgtaatgggaagattgttggagcaccacactttgctcatgctgcaatagctgctgggtcatttaacccttcaattgactttgcttctcctcttgatggagatggacatggaagtcatacagcctctattgcggccggaaataatggaattcctgtgaggatgaatggccatgaattcgggagagcgagtgggatggctcctcgtgctaggattgctgtctacaaggcaatttatagactgtttggagggtttgt

SEQ ID NO: 194454 - DNA, 273 bp, Glycine max
atgaggttcaatgattggttttgctgctgttaataatgcagttacagttgaagaagtggaggcattgcatgtgctgtttaaaaggttaagtagctccctgattgatgatgactcgattcacaaggaggagcttcaattggcactgtttcagaccccatatgggaaaaatcttttcctagatcgagtttttgatgttttcgaccaaaaaagaaacggtgtaatcgagtttgacgaatttgtccacgccctcagtgttttccatccatatgcccc

SEQ ID NO: 194455 - DNA, 271 bp, Glycine max
ctcatctcatcggatcgatcaagcatcagggagctttgagggttgattctctggtgtagtagcaatcagcacaatagaaaatgttttttgacggatatggatatcatgggacatcatttgagcagatatatcgatgctacccagcttcctttattgaaaagccccaaatcgaaagtggtgacaaaattatcatgcctccatcagcccttgaccgtctagcatctctgcatattgattacccaatgttgtttgaactccgtaatgatgctgc

SEQ ID NO: 194456 - DNA, 271 bp, Glycine max
agccgagatcgcgctcgagcgcgctcgagctctctctcagtttccaagaatcttaagctacgggaaagtcttacccaaacgtgagcgctcattaccagaaggccgttgagaaggcgaagaagaagctcagaggcttcatcgctgagaagatctgcgctcctctaatgctccgtttggcatggcactctgctggaacttacgacgtgagctcgaagaccggtggtcccttcggaaccataaagcacccctccgaactcgctcacggcgctaa

SEQ ID NO: 194457 - DNA, 273 bp, Glycine max
gcttggactgcctggaaacggaggcactgaagaagtgctcatcaggaagaggggtttctctgagactgaaactggtcatgaagatgagtctgccaccactgtggatttgatgcttaatctttcttctaaggaggccgcaaccactgctgctgctgctgcagatccaactgataagcacaagactttgcctaaggagaagacccttctgccagcagatcctgctaagcctccagccaagacgcaggtggtgggttggccacctgtgcggtcctt

SEQ ID NO: 194458 - DNA, 272 bp, Glycine max
gcgaccctggatcactagaatcacgggttttgagcaaaatgggtgttgtggagggtctcttggcattgggtttgattctgaatgtgtgtgttgtgtgcaatggaggcacaagcagccccttcgtcaggaaagttgagaaggctgtagatatgccacttgacagcgatgtctttgctattcctcctggttataatgccccccagcaggttcatataacgcaaggtgacctagtggggaaagcagtgatcgtgtcatgggtgactgtggatgag

SEQ ID NO: 194459 - DNA, 275 bp, Glycine max
gctggctttggtaacttgcctggtgatatggtattctgggattacattgataagaaacaacttggagccactaaggctgaatggtctgtgactagtgaatggtctccggatgggtgctatttcatgacagctacaacagctccaaggcttcaagttgacaatgggatcaagatttttcactacaatgggtcattgtacttcaagaagatgtttgacaaattgtaccaggttgattggaaaccagagtcacctggtaagtttggtgatattgccga

SEQ ID NO: 194460 - DNA, 277 bp, Glycine max
gcatgctctagtcacagacaccgacacagatctgtcttccgaagcaggaactaaatatggctgacttgttggaatggtcaaagcaagataagaaacgaatgcttcatgtcgtctagcgtgttggtgaccttgatcgcaccatcaaattttacacagaatgtttaggaatgaagcttttgaggcaaagagatatcccagaggagaaatatgctaatgcttttcttggatttggccctgaagaatcccattttgttgttgaattaacatataattatgg

SEQ ID NO: 194461 - DNA, 269 bp, Glycine max
gggacaagtgatcggtgtccacagcgtagaggagtggaaggaacatctcaagaagggagaagagtccaagaaattgattgtggtggattttactgcttcttggtgcggtccatgccgtttcattgccccaattcttgcagagtttgctaaaaagttgccgaatgtcaccttcctcaaggtggatgtggatgaattggagactgtttccaaggagtggggaattgaggctatgccaaccttcctgttcttgaaagaaggcaagctggtgg

SEQ ID NO: 194462 - DNA, 267 bp, Glycine max
gcaatcttcaaggatctcttgaagttaataaagtagcaggaaattttcattttgcaactgggaaaagctttcttcagtctgctatattactggctgatgtgcttgctttacaggataatcattataatattagccatcggatcaacaaattaagttttggtcaccatttccctggattggtaaatcctcttgatggggtaaggtgggtgcaaggacctactcatggcatgtaccagtatttcataaaggtggtccctacaatataca

SEQ ID NO: 194463 - DNA, 269 bp, Glycine max
cctacactcgctcccaatcaaggagcaccaaatcattgacaccctcgtggggcccaccctgaaggacgaggtgatgaagatcatgcccgtccagaagcagacccgcgccggtcagcgaacccgcttcaaggccttcgtggtggtcggcgacaacaacggccacgtcggtctcggagtgaagtgcagcaaggaagtcgccaccgccatacgcggcgccatcattctcgcaaagctctctgttattcctgtgaggagaggctattggggta

SEQ ID NO: 194464 - DNA, 269 bp, Glycine max
gccactcctaaacacatccttcttcgatgtgtgtcggattcacggagatgccgcgaggagcgaatgtaacatgttttgtctcgactgcaatgagaatgcgttttgcttctattgccgttcctcaaaacacaaggatcaccaagttattcagatacggagatcttcgtatcacgatgtagtgagggtggcggaaattcagacagtgttggacattagtggagttcaaacatatgtgatcaacagtgccagggttttgtttctgaatgaga

SEQ ID NO: 194465 - DNA, 271 bp, Glycine max
gctttcttgagttgagttaacagcatggagagggaggaagatgttaaggttggagcacagaaattctcagagaggcaagcattggggacaggagctcagggtgacaaggactacaaggaggcaccaccagcacccttgtttgagccaggggagttaaagtcatggtctttttacagagctgggattgcagagtttgtggccacattcttgttcctctacatcactgtcttgactgtcatgggtgtcaacagggcacccaacaagtgctcct

SEQ ID NO: 194466 - DNA, 273 bp, Glycine max
gccgcaacccattttgcatctaacccttttgtcattaataatctctctgagcactctttccttggtcgatgccgccgatcccacatttggcttcacccctcttggattatctagtagctcaaacttgcagatccaaaagccttacgacgttgcagtcaacgatcgctacagcttttcaaatggagtgcacagattttgggtatactccacggacaagcctcatatgcaaggcagcaatacgaagccacgaactgagattcgtatcgctggata

SEQ ID NO: 194467 - DNA, 265 bp, Glycine max
taagcttatagttgaaatctttgagcatagaaaaaagatgccgatttctagaattgccattggaaatccttcagagtttggccaagcggatgcgcttaaggctgctcttgctgagttcatctcaatgctaatatttgtctttgcaggagaaggctctggcatggcatataacaaactcacagacaatggttcggcaacaccagctggggtggtggcagcatccctgtctcatgcatttgctctttttgttgcggtctctgttggt

SEQ ID NO: 194468 - DNA, 267 bp, Glycine max
gcggagagaagcctaagggaccacttgaggctcttcggcctaaattacagccaacgcagcagcaaacacgttaccggaaatctccttatgctccttcaggagaagaagggggaagtgttccagccgaggatgcaccttccaaccagtaagcagcaatcagtcttttgatgatgtgctgactattgttctaatacctgagtgagtaggtatcacttctttgttttcaacaataaaggaagcttgtcatgtattcatattagcacaaga

SEQ ID NO: 194469 - DNA, 265 bp, Glycine max
gaatatcttgttgtttggagcgatccgagaaaaactctgtaaacatgttggtttaccaggacctccttacaggtgatgagcttctctctgactccttccgttacaaggaaattgagaatggaatgctgtgggaagttgaggggaagtgggatgttaaaggagcagttgatgtagacattggtgcaaacccttctgctgagggtggaggagaagatgagggagttgatgatgcagctgttaaggttgttgacattgttgacacatt

SEQ ID NO: 194470 - DNA, 267 bp, Glycine max
aatttcgttcaaaatttcctgatggtataaactgaatcagttccatgctcatacattgaatttgctgagcgactggtgctgccgcagtataaacatttacctgacacagaggttaaagagttccatagaagagatggttttgaggtagcaagtgctgacaagatatttgaaagcacatccaaggagcagttgagcagagtaggctcataagaggctcatctcactccataccaagaatgtgtatactttatttcccttggggaaata

SEQ ID NO: 194471 - DNA, 265 bp, Glycine max
gttcagttcgcgatgagagccaagtggaagaagaagcgtatgaggaggttgaagaggaagcgccgaaagatgagacagagatccaagtagtgcgttaatccaagtagttgatttccgttgcttttataattatgttgtcaaattgggcacccagttgttagaggcactggtttctcctttttgatgttttgatacatttttgtttggtttaattcgtcttatgttattagctgaaaacaatgctgttactgcgtttgcgaatcaa

SEQ ID NO: 194472 - DNA, 264 bp, Glycine max
ctcgagccgctgttttgctgctttagtctattctgcaaatactagttttgattctctgctggagtcactacttgcctgtgctaagccttctccacaggctggtggcattgctaaacaagctctggattcgataggtcagtgtgttgctgttctatgccttgctgctggtgatgagaagtgtgcatctacagtgaaaatgctcactgacattctcaaggatgacagcagttctaactccgctaagcagcaccttgcaattttatg

SEQ ID NO: 194473 - DNA, 276 bp, Glycine max
atatattaattgaatttgaccaatgaaggccctgctccttgcttttgcctccttcttctatttgctttctcgttagctgccactacggaatcaagaaaagatccaggggaatattggaaaatgatcatgaaagatcaggaaatgccagaaggacttcaaggtcttgtttcatttcaatctgaaaataaccctaagactcaagagcagcttggtaaaggttccaaaaaccattgtgaagagtctctagttacaaatacacaagttaacagtgacttc

SEQ ID NO: 194474 - DNA, 267 bp, Glycine max
cgtcttcataaacgccgcccaaaacttctcatacccttttattcattccattcgtttctagggttttcttttctttgccgagaaaatgagagagtgcatttcgatccacattggccaggccggtatccaggttggcaacgcctgctgggaactctattgccttgaacacggcattcagcccgatggacagatgccgagtgacaagaccgttggcggaggagacgacgccttcaacacatttttcagcgagaccggcgccggaaagca

SEQ ID NO: 194475 - DNA, 267 bp, Glycine max
gtgatgatgcacaatctaagaggggtattttgactctcaagtaccccattgaacatggaattgtgagcaattgggatgatatggaaaagatttggcatcataccttctataatgagcttcgtgttgccccagaagagcatccagttctcttaactgaggcccctcttaaccccaaggctaatcgtgagaagatgacccaaatcatgtttgagaccttcaacacccctgctatgtacgtagccatccaagctgttctttcactgtatg

SEQ ID NO: 194476 - DNA, 264 bp, Glycine max
cttcttgtcagatgcttgttctttggatccagaatcaactaaaacaaaaggcaacgaaggacagagtattcaactatgtgaatcaactgtgtgagagcctgccaagtccatctggagagtcagtgataagctgtaatagtctttccaagatgccaaacattacgttcacaattggaaataaaccttttgtcctcacaccagagcagtatattctaagaactggagaaggcattacagaagtctgccttagtgggtttattgctt

SEQ ID NO: 194477 - DNA, 263 bp, Glycine max
ctttgttactctcacacatgtctcgctccgtgcctttggtttcaaccatttttgtcttgcttctgcttctggtggccactgagatgatggggccaacaatggtggcagaagcaagaacttgtgagtctcagagccaccgtttcaaggggccatgtttgagtgacaccaactgtggctctgtttgccgaaccgaacgtttcactggaggacactgccgtggcttccgtcgcagatgcttctgcaccaaacattgttaattttaa

SEQ ID NO: 194478 - DNA, 262 bp, Glycine max
gtttatcgtgaggagaatatgaagttgtttgttttctttgttgctgcagtagttttggtagcatggccatgccatggcgcaggctaccaaaggttccctctccgaatgaaaactggctatggtgagcgttcttcggaggtaaaatgcgcaagttttaggcttgctgtggaagcacacaacatccgagcctttaaaaccattgctgaagagtgcgttgaaccaacaaaggactacattaatggcgaacaatttagatcagact

SEQ ID NO: 194479 - DNA, 261 bp, Glycine max
ggtgacagtgatggcggggagtgtgggaagaagttgggaattgaagcagtgattgttgctccttctagggagcttggaatgcagatagtgagggagtttgagaaggtgctaggaatggataacaagagggcggttcagcagcttgtagggggtgcaaaccgaaccaggcaggaagatgctctcaagaaaaataaacctgcaattgttgttggcacgcctggtaggatagcggactcagtgcatccgggaaacttcgaactc

SEQ ID NO: 194480 - DNA, 263 bp, Glycine max
ccttcgattcattccatttcttccaaaatggccaaagacccagttcgcgttctcgtcactggagccgcaggcaaattggatatgctcttgtccctatgattgctaggggagtgatgctgggtcctgaccagcccgtgatcctccacatgcttgacattcctccagcagcagagtccttgaatggggttaaaatggaattggtggatgctgcattccctcttcttaaaggtgttgttgctacaaccgatgtggttgaggcatgc

SEQ ID NO: 194481 - DNA, 263 bp, Glycine max
gagagatagaggagaagatgaacggtggtgaatcttacggtgctattgagacacaatacataaggaggcatcacaaacatgaaccaagggaaaaccagtgcacctctgcacttgttaaacacataagagctcctgttcaccttgtgtggtcactggtgagaagatttgatcaacctcagaaatataaaccatttgttagcaggtgtatcatgcaaggggatcttggcatcggaagtgttcgagaagtgaatgttaaatctggc

SEQ ID NO: 194482 - DNA, 267 bp, Glycine max
ggatggactactatgggattttggaggttgacaggaatgcctcagatgaagagttgaagagagcctacagaaagcttgcaatgaaatggcaccctgataagaaccgaaccaataagaaagaggctgagattcaattcaaacagatatctgaatcctacgaggttcttagtgatccccagaagagagcaatttttgatcggtatggagaaggtggccttaaaggtggaatgccaacaccggatgaaggtgtggcttcattcttccgaa

SEQ ID NO: 194483 - DNA, 267 bp, Glycine max
caccgcatcaatggagttggacggcgttctcctcggcatgtgcaaccctctcctcgacatctctgccgtcgtcgacgacgctttcttgcaaaaatacggtatcaagttgaacgatgcgattctcgctgaggataagcacaaacctatgtatgaagaattggctaacaatcctaatgtggagtacattgctggaggtgctactcagaattcaatcagggttgctcagtggatgcttcaagcaccaggtgccacaagttacataggttg

SEQ ID NO: 194484 - DNA, 264 bp, Glycine max
cagttgctcctatagccggcgctcaacaacatggcggacaaggcagtcaccatccgaaccagaaagttcatgacgaacaggcttctctccagaaagcaattcatcgttgatgtccttcatccagggagggctaatgtttccaaggctgaactgaaggagaaattgggcagaatgtatgacgtgaaagacactaacactgtatttgtcttcaagtttcgaactcattttggtggtggcaagtccactgggtttggtttgatctat

SEQ ID NO: 194485 - DNA, 259 bp, Glycine max
gggggttggaaaggtgaaccagaagcgagaatttgcacaactatatggaatgtcagaggcactttcctgtggtttgagcaatgcagggtgtcaggttagcaagtatatgccatttgggccagtagatatggttatgccttaccttttgataagggctgaagaaaatagagggctcttagctgcttcaggttttgatagacaactgatgagaaaggagttgggaaggagactaaaagctgcagtgttctaaattaatcag

SEQ ID NO: 194486 - DNA, 264 bp, Glycine max
gcgagaatggtgagttctccttctttctccgacgagagtgagacctatttgttgtttatgaatgttgaatatgcattttgcaggcagacgttgaggttgatgcggcggcagcggcaggggcagcgcagccgaagaagagaacgttcaagaaattcagcttcaggggcgtggatctggacgcgcttctggacatgtccaccgacgaactggtgaagatgttcagtgcgcgtgcacgtagaaggttccagagaggtctgacgagga

SEQ ID NO: 194487 - DNA, 258 bp, Glycine max
  unsure (1)..(258): unsure at all n locations
ccttgtctcaaagattaagccatgcatgtgtaagtatgaactaattcagactgtgagactgcgaatggctcattaaatcagttataggttgtttgatggtatctactactcggataaccgtagtaattctcgatgtaatacgtgcacaaaaccccgacttctggaagggatgcatttattagataaaaggtcaacacaggctctgcctgttngtttgatgattcatgataactcgtcggatcgcacggtctttgtgcc

SEQ ID NO: 194488 - DNA, 270 bp, Glycine max
gtagaaccgtggtggtgtccgctctgcagtttgcttgcaccgatgatatctcaacaaacgtcgccaccgccgagaggctagttagagctgcacataaacagggtgcgaacatcattctcattcaggaactctttgaaggttattacttctgtcaggcacaaagagaggatttcattcaaagagctaagccacataaggaccatcccacaatcctcaggatgcagaaacttgcaaaagagttaggtgtagtcattccagttagcttctttg

SEQ ID NO: 194489 - DNA, 265 bp, Glycine max
ggcaccccccacaaaaatgacaggagagacagtgaacccaaaagcttaccctttggccgatgcgcaactcgcaataactctcttggatcttgtgcaacaagctgccaactacaagcaactaaaaaagggtgctaatgaagcgactaagacactgaacagaggcgtttctgagttcgttgtgatggccgcagacactgagcctcttgagattcttctccatcttcctctccttgctgaggctaagaatgttccctatgtattcgtt

SEQ ID NO: 194490 - DNA, 264 bp, Glycine max
aaggttttcactttggccgaggtctctcagcacaacaatgccaaagactgttggcttgtcattcatggcaaggtttataatgtaacaaagtttttggaagatcaccctggtggggatgaggtcctgttgtcttccacagggaaagatgcaaccaatgattttgaggatattggtcacagcaccagtgccgtagccatgatggatgagttctatgttggagacattgatacatcaaccatccccagcaaggttaagtacactcct

SEQ ID NO: 194491 - DNA, 260 bp, Glycine max
gctttttgatgatggtgtggtgaagcgtgaggacttatggatcacctccaaactctggtgttcagatcatgcttcagaagatgtgcccaaagcattggataaaacattgcaggatttgcaacttgattaccttgacctctatctgatccactggccagtgcgcatgataagcggatcagttggattcaagaaggaatatctcgatcaaccggacattcccagcacatggaaagcaatggaggcactctatgactcaggca

SEQ ID NO: 194492 - DNA, 265 bp, Glycine max
gcaagagcagcttgcaatcaccttcacttggttcccagtttagttcatcctctaaagtcaaccctcttcacaaatcacactctttccaccacacgcactcgcttctatggcattcaccgaaggttctcttcttcttcatccaaaataagcatgagcctcaaggctggtattgttggccttcccaacgttggcaagtccactctcttcaatgccgttgtggaaaatggaaaggctcaagctgctaattttccattttgtacaatag

SEQ ID NO: 194493 - DNA, 262 bp, Glycine max
cagatcttgatgataacgatgaaaagtggattgataaaaaaaggcatggacatgactctgatgctgtgcttagctgccctgcttgcttcaccaccctctgcctagaatgccaaaggcatgaaaaatatttgacccagtatagggcagtatttgtggtaaactgcaagattgggaatgacaaggttttgaaacaaaatacttcaagatcaagaaaaagaaatagagggaaagaaggatttgatggagatgatgcacattcaac

SEQ ID NO: 194494 - DNA, 261 bp, Glycine max
ctgctcctgacgccgttcccgcacagggagaacgtggaaatccagcagctgccgacgcggcggggcacggagattgtggcgctgtacatacggcacccgatggcgacgtccaccgtgctctactcccacggccacgcagctgatctcggccagatgtacgagctcttcatccagctcagcatccacctccgcgttaacctcatggggtatgactattctgggtacggacagtcatcagggaagccaagtgagcagaataca

SEQ ID NO: 194495 - DNA, 262 bp, Glycine max
tggctcccaagggtttaacctttctggctgtgttaatatgcgtttcagcactgtcactgagtccttctgttgcgggggaagggcaaaataatggccttgttatgaacttctacaaggaatcatgccctcaggctgaagacatcatcacagaacaagtcaagcttctctacaagcgccacaagaacactgctttctcctggctcaggaacatcttccatgactgtgctgttcagagttgtgatgcttcactgttgctggactc

SEQ ID NO: 194496 - DNA, 262 bp, Glycine max
caaatttctactatttttcaatggcttctgcagatgttgagttccgttgctttgttggtgggcttgcttgggtcaccggcaacgatgccctcgagaaagccttgtcaatctacggcgacatcgttgaatcgaaggttatcaacgaccgtgagactggaaggtccagaggattcggatttgtgaccttcgcctcagagcagtcaatgaaagatgcgatcgcaggaatgaacggccaggaccttgacggtcgtaacatcactgt

SEQ ID NO: 194497 - DNA, 264 bp, Glycine max
catagtttcacttcggccttatccagtttagggtttcggttctctaccctatctttcacgtatcgaaaccttaaatttacgatcaggtctgagcaatctggttggtagaactcttggtcttagtgagtcaagttttatgtctgaattagacgatcaaattcctactgccttcgatccttttgctgatgcaaatgctgatgactcgggtgctgggtcaaaggagtatgtgcatattcgtgtacagcagcgaaatggtaggaaaag

SEQ ID NO: 194498 - DNA, 279 bp, Glycine max
ttcggctcgagcaggatttcaatgtggaagctctagagaagtttgttgaggaatctagtacccctgttgttactgtctttaacaatgaaccgagcaatcaccctttcgttgtcaaattcttcaacagtcccaacgcaaaggcaatgttgttcatcaacttcactgccgaaggtgctgaagctatcaaatcaaaatactctgaagctgctgagcaatataaacaacagggtgtcagctttttggtgggagatgttgagtctagtcaaggtgctttccagt

SEQ ID NO: 194499 - DNA, 257 bp, Glycine max
attggccatccctgcagtactccttgtaatactcattttgattctatcctctgtcttgttccatcttcaagatggaagaacaagtccaccaggtcctaaacccctcccaattattggtaaccttcacatgctggggaaactcccacatcgttcccttcaagcccttgccaaaaattattgacccataatgttcataaagttgggacaagtctcaaccgttgtagtttcctcccctgaaactgcagagctattcctca

SEQ ID NO: 194500 - DNA, 263 bp, Glycine max
ggaaaaatggtgtcgctgaaactgcagaagcgcctctccgcaagcgtgctcaagtgcggcagaggaaaggtttggcttgaccccaatgaagtcaacgaaatctccatggccaattctcggcaaaacatcaggaagttggttaaggatgggtttatcatcaggaagccaaccaagattcactcccgctcacgtgctcgtaggatgaaggaggcaaagaggaagggccgccactccggttatggtaaacgtaagggtacaaggga

SEQ ID NO: 194501 - DNA, 260 bp, Glycine max
ctgcttcaaggaaggagagcttgttattctctatcaacaaggaaaatgtcaggtgaagaggttgttgttgcagctgagccagctgctgccatcccaggcgagcctatggatatcatgactgccttgcaacttgtgctcagaaaatctctggcttatggtggtcttgcacgaggccttcacgaaggggcaaaagtgattgagaagcatgctgcacaactctgtgttctagcagaagactgtgaccagcctgactatgttaa

SEQ ID NO: 194502 - DNA, 261 bp, Glycine max
catccttgttggtggatcaacacgtatcccagctgttcaggagcttgtaaagaagttgactggcaaggacccaaatgtcactgtcaatccagatgaagtggttgcccttggagctgcagttcaggctggtgtcttggctggagatgtcagtgatattgtgctgttggatgtcactccattatctttgggtctggaaactctaggtggtgtgatgataaaaattattccaagaaacactactcttcccacctcaaagtccga

SEQ ID NO: 194503 - DNA, 262 bp, Glycine max
attaattctctctttcaaatatatggcagaagatgcttcaattattccaacacacacaaaagctcggtactactctgaacatggtagtccaggtgatgttctccaattagatcctaattggcccttaccccaacaactcaaagatgaccaagtgctcatcaaggtcatcgctgcatccattaatcccgttgattacaagaggatgcacggcgagttcaaggacactgaccctcatctgcctattgtgccgggttatgatgtg

SEQ ID NO: 194504 - DNA, 263 bp, Glycine max
ggccaatatttctactatttctgatttagttgcctttaaaccttatttccaaattggaggcattgtccaccgttatctaggccgtcaaacccttgttatggaagatgatcaagaaattgcttcatatatgtttcgtaggactgtcccttctatgcacttatcccctgaggatgtacgatggatggttggagcttggagagacaggatcataatatgcacagggacatatggacctactcatgctcttatcaaggcctttctgg

SEQ ID NO: 194505 - DNA, 267 bp, Glycine max
cttcttcatcgttgtatccttctagtcaatctcagaatctcaatgttcctagtggagctttccatcctatcagcattgtgcacaaagaagtgtgttctagttcttgcaagaggatatggtgcagcagcagcagcagcagcactgcagaaccaaaggagggccatgaggtgagggctcaggtcaccgtgcgaaggaaaaagctagcagttttcgtttctggtggaggatccaacttcagagcaattcatgaggcctccaaaaggggat

SEQ ID NO: 194506 - DNA, 265 bp, Glycine max
ggagtaactatgactctcttaaggtagccaaatgcctcgtcatctaattagtgacgcgcatgaatggattaacgagattcccactgtccctgtctactatccagcgaaaccacagccaagggaacgggcttggcggaatcagcggggaaagaagaccctgttgagcttgactctagtccgacttcgtgaaatgacttgagaggtgtaggataagtcggagctggaaacagcgaaagtgaaataccactacttttaacgttatttt

SEQ ID NO: 194507 - DNA, 261 bp, Glycine max
gtgggattctattctaagattttcagaatgtctagctgtgggtgtggaagcagctgcaactgtggcagcaactgcggttgcaacaagtactcttttgacttgagttacgttgagaagacaaccacagagactctagttttgggtgttgggcctgtgaaggccaattggagggtgctgaaatgggtgttgcatctgagaacggtggctgcaactgtggatcaagctgcacctgtgacccatgcaactgcaagtaaggtcaag

SEQ ID NO: 194508 - DNA, 256 bp, Glycine max
cacgaatatcttgttgtctggagcgatccgagaaaaactctgtaaacatgttggtttaccaggacctccttacaggcgatgagcttctctctgactccttccgttacaaggaaattgagaatggaatgctgtgggaagttgaggggaagtgggttgttaaaggagcagttgatgtagacattggtgcaaacccttctgctgagggtggaggagaagatgagggagttgatgatgcagctgttaaggttgttgacat

SEQ ID NO: 194509 - DNA, 261 bp, Glycine max
tgcccatcagatgtattctgcattggcaaccgaaccaaggaagcgttgtgaacagccaagtcctgaatgagatctcgcagtgcgtcgaaacccttaacggcgtcaaagaaggaagatgcaaagcctccctcactttctacagacccaatttacgagaccagtcggtgaccatcgattttcctcgcgattttctggggatatcgatgctggagcagccgaacaaatactacttaatcattcgcggccagaagattgttctcg

SEQ ID NO: 194510 - DNA, 259 bp, Glycine max
ggcactgtaagtccaagagaaaaagaaaaatttgagagaaaaggaaaggcttaacaacgcacaaaatgtcctctaatccagtaatactgcagagtgagaacttgaccaagtatatactggagaccagcgtttacccacgagaagaagagactctcaaagagctaaggaatgccactgcaagccatccttggggctttatgggtgctgctcccgatgcgggtcagctaatgaccttgctcttgaagctgttgaatgctaa

SEQ ID NO: 194511 - DNA, 260 bp, Glycine max
aacactttcttctctctgttttccttcttcctcgcatcaatggagtcggacggcgttctcctcggcatgtgcaaccctctcctcgacatctctgccgtccacgacgacgctttcttgcaaaaatacggtatcaagttgaacgatgcgattctcgccgaggataaacacaaacctatgtatgaagaattggctaacaatcctaatgtggagtacattgctggaggtgctactcagaattcaatcagggttgctcagtggat

SEQ ID NO: 194512 - DNA, 140 bp, Glycine max
gagagctggcaattatgagtatagagtcactactgctaactttatggtggagactttaaaatgtgctatatcccttgtggccttgggaagaatatggacaaaaggcggtgtcaatgaggacaacaggttgactacaatct

SEQ ID NO: 194513 - DNA, 262 bp, Glycine max
tgattttgatggtacaattacaaaaggaggatactccagttacatagtagtccatgagaggtactgcttcatgataccaaaaagctatccattggcttccgcagctcctttgctttgtgctggaattactgtttattcaccgatggtccgccacaagatgaatcaacctggtaaatctctaggagtgattggtcttggtggcctcggtcatatggcagtgaaatttggaaaggcatttggtttgagtgtaacgattttcagc

SEQ ID NO: 194514 - DNA, 259 bp, Glycine max
agaaaaactctgtaaacatgttggtttaccaggacctccttacaggtgatgagcttctctctgactccttccgttacaaggaaattgagaatggaatgctgtgggaagttgaggggaagtgggttgttaaaggagcagttgatgtagacattggtgcaaacccttctgctgagggtggaggagaagatgagggagttgatgatgcagctgttaaggttgttgacattgttgacacattcagacttcaggagcaacccgc

SEQ ID NO: 194515 - DNA, 260 bp, Glycine max
acctcgagcgattcggctcgaggagagagtgagtgcaaagccatcaccttcttctcagacaagtagtttggtaaaagatggatgatgctgaggatattcaaccccttgtctgtgacaatggaactggaatggtgaaggcaggatttgctggtgatgatgctcctagggctgtgtttcccagtattgttggccgacctcgtcatactggtgttatggttgggatgggtcataacgatgcctatgtaggtgatgaagcccag

SEQ ID NO: 194516 - DNA, 258 bp, Glycine max
ggtgtggactgtggagtaggatgtttctcaattatgtctttttgggcttgtttgacaggttgggcttggagatacttctggtggtgacagtccgaatgatcactattgctggatgcgtccggaggacatggactatgaccgccctgtgactgaatgccacagttgttccgatctcgcggctgagatggctgctgccttggcttctgcttccattgttttcaaggacaacaaggcctattccaagaaactggtgcatgg

SEQ ID NO: 194517 - DNA, 261 bp, Glycine max
agaatgaatatcgtaagatcgaagcaataaccttttttcctctgccgccactggtttcgatcccacacccacaaccctccatccttcgaatgctcttgcgttttccttaaactgcctcattccgaagccatacacacataacggtttttctaggtgctagcaatgtcgactcctgctaggaagaggctcatgagagatttcaagaggctgcaacaagaccctcctgcaggaatcagtggcgcccctcaggataacaacatc

SEQ ID NO: 194518 - DNA, 261 bp, Glycine max
ctgccagtagtcatatgcttgtctcaaagattaagccatgcatgtgtaagtatgaactaattcagactgtgaaactgcgaatggctcattaaatcagttatagtttgtatgatggtatcttctactcggataaccgtagtaattctagagctagtacgtgcaacaaaccccgacttctgggcgggatgcatttattagataaaaggtcaacacaggctctgcctgttgctttgatgattcatgataactcgtcggatcgca

SEQ ID NO: 194519 - DNA, 261 bp, Glycine max
cttcgatctctcaaactctatcggcgcagaaccaatcctatatcactatggggaagacacatggaatgggagctgcccgcaagctgaagtctcaccgtaggagacaaaggtgggctgacaagtcatacaaaaagtctcatcttggaaatgaatggaagaagccttttgctggttcatcccatgcaaagggtattgttcttgaaaagataggtattgaggctaagcagcccaactctgccattcgaaaatgtgccagggttc

SEQ ID NO: 194520 - DNA, 257 bp, Glycine max
cacgaatatcttgttgtttggagcgatccgagaaaaactctgtaaacatgttggtttaccaggacctccttacaggtgatgagcttctctctgactccttccgttacaaggaaattgagaatggaatgctgtgggaagttgaggggaagtgggttgttaaaggagcagttgatgtagacattggtgcaaacccttctgctgagggtggaggagaagatgagggagttgatgatgcagctgttaaggttgttgacatt

SEQ ID NO: 194521 - DNA, 256 bp, Glycine max
tttttctctcacctgaaaatgtcttgctgcggtggtaactgtggttgcggaacgcctgcaagtgcggcaacccctgcggaggctgcaagatgtacccagacttgagctacaccgagtcaaccaccaccgagaccttggtcatgggagtggcaccacttaaggctcaattcgagagtgctgaaatgggtgttcccgctgagaacgatggctgcaaatgtggagctaactgcacctgcaacccctgcacttgcaactg

SEQ ID NO: 194522 - DNA, 258 bp, Glycine max
ctgagttaaggcttggactgcctggaaacggatgcactgaagaagtgctcatcaggaagaggggtttctctgagactgaaactggtcatgaagatgagtctgccaccactgtggatttgatgcttaatctttcttctaaggaggccgcaaccactgctgctgctgctgcagatccaactggtaagcacaagactttgcctaaggagaagacccttctgccagcagatcctgctaagcctccagccaagacgcaagtgg

SEQ ID NO: 194523 - DNA, 255 bp, Glycine max
tctcgagcctgaaaatttgagtcactctgtaacgattcctgttgctactgataatgtggagatactccaaagaatagtaaagcagttgattggatgtttttacatagatgtgaatgagattcgacgtattggcttgcatgtttccatgcttgaaagtgcagaagcttctaaacaaggtacagtccaatacactttgaaatcatggctcacttctcgatatgtcagtattgaaaatctcgcatatcctatgggtca

SEQ ID NO: 194524 - DNA, 258 bp, Glycine max
gcgcggcacccacacacacagttcgtcggaatgggaagggtgattcgcgctcagcgtaagggtgctgggtcggtgttcaagtctcacactcaccaccgcaagggtccggcgaggttccgcagcctcgacttcggcgagcgcaacggctacctcaagggcgtcgtcaccgacatcatccacgaccccggtcgcggcgcccctctcgccaaggtggcattccgccaccccttccgctacaagaagcaaacggagctcttc

SEQ ID NO: 194525 - DNA, 258 bp, Glycine max
acttcttcgccgtttcagctgaagagccatccgcaggtaagcaatggttaagcataataatgttatccccaatgggcacttccggaaacactggcaaaactatgtgaagacttggtttaatcaaccagcccgaaagaccagaagacggttggctcggcagaagaaggctgtcaagattttccccaggcctactgctggatctctcaggcctattgttcatggccagactctgaaatacaacatgaaagtcagagccgg

SEQ ID NO: 194526 - DNA, 260 bp, Glycine max
tgggcctttacattttgatctgaatactggtgcaaagattccatcggttggtcttggaacatggaaagctcctccaggtgttgtgggtgatgctgttattgctgcagtcaaggctggttacaggcatatagattgtgctaggatatatgataatgaaaaagaggtaggggaggctctgaaaacactattttctactggggtagtacagcgtagtgagatgttcatcacatcaaagctatggatcagtgactgtgcacctg

SEQ ID NO: 194527 - DNA, 259 bp, Glycine max
gtgggacccttccttcgcaagcaagagagagaaagtactgctgacaaggcaaagttcaacaatgtttttctgaagaatctgtcagactcaaccactgatgatgaattgaagaatgtttttggtgagtttcgaactattactagtgctgtcgtaatgagggatggagatgggaaatcaaagtgttttggatttgtgaattttgagaatgctgatgatgctgctagggctgttgaggctctcaatggcaaaaagtttgatg

SEQ ID NO: 194528 - DNA, 257 bp, Glycine max
ctttgagtcttcttgatccttctttttctccttgaactcaaacatggcagatgaggtggttctgctagatttctggccaagtccatttgggatgagggtcaggattgcacttgctgaaaagggtatcaaatatgagtacaaagaagaggacttgaggaacaagagtcctcttctcctccaaatgaacccggttcacaagaagattccggttctcatccacaatggcaaacccacttgtgaatccctcattgctgttc

SEQ ID NO: 194529 - DNA, 258 bp, Glycine max
ctcgagccggtaagttttcactcaatggccagcgctcagctctcagcaatatcttcgtcgatctctacggcgtcgtttgaagggcttcgaccttcggctgttcagtttgcttccgcgggcagaattagaattggcaatctctcccaaaggtctttccggggcttggttgtcacagccgccaccgttgttgcccccaaatacaccgcgattaagcctctgggagacagagtgctgataaaaattaaggaagcagaggag

SEQ ID NO: 194530 - DNA, 258 bp, Glycine max
cttccgggttcacgtttcacaatcactttttgcgcttctctcactcactcactcttcttcttcctcttcgtgtggttttctttctcgaactcgaacgaagatgcgtgagattcttcacatccagggagggcaatgcgggaaccagatcggagccaagttctgggaggtggtgtgcgcggacacgggatcgattcaacggggaggtaccaaggggacaacgagttgcaactcgagcgagtcaacgtctactacaatgaa

SEQ ID NO: 194531 - DNA, 257 bp, Glycine max
gtccactcaaccttcgcttctcgatatgtcagaacttcgcttcccaggtttaagatgccggaggagtcgataccaaaggaggcagcgtatcaaataataaacgatgagttgatgttggatgggaacccaaggttgaacttggcatcatttgtgacaacctggatggagccagagtgtgataaactcatcatggctgccattaataagaactatgttgacatggacgagtatcctgtcaccactgagttacagaatcg

SEQ ID NO: 194532 - DNA, 258 bp, Glycine max
ctgaaggcaacgccactgcaatctgttctaattagaaatagaaggtctcatcatctcaaaaaggcttttgtgattctcgatttgatttggatcgcacagaacgaaggcatgggtcaagcttttcggaagctcttcgacaccttcttcggcaacaccgagatgcgggttgtgatgcttggtctagatgctgctggcaaaacaactatactgtacaagctccacattggagaagttttatctactgttcctacaataggt

SEQ ID NO: 194533 - DNA, 258 bp, Glycine max
caatatcctcctcaccaaaccctaaccacaatcatgcaagactttttgggctcccttcgccgctccttggttttccgacccggcggtgacgattcacctttcgccggaatcgctaacaagctcggctccgccattcgcaaatcgcgaatcgccctcgaacctcctcctccgatacggtggcgcaagggcgagttgatcggttccggcggcttcggtcacgtctacatgggaatgaacctcgactccggggagcttatt

SEQ ID NO: 194534 - DNA, 258 bp, Glycine max
gttcactgtcactttacccaatcctaacactttcttctctctgtcttccttcttcctcgcatcaatggagtcggacggcgttctcctcggcatgtgcaaccctctcctcgacatctctgccgtcgtcgacgacgctttcttgcaacaatacggtatcaagttgcacgatgcgattctcgccgaggataaacacaaacctatgtatgaagaattggctcacaatcctaatgtggagtacattgctggaggtgctactca

SEQ ID NO: 194535 - DNA, 262 bp, Glycine max
cgagaacgaaagtcaacttagtggtaagaactgttgttaccgtgggcaactacgataacatcattgattgggagtttaaaacaagtggctcaatcaaaccctcgattgctctctcgggtatattggaaattaagggagttgatattaagcacaagagtgagatcaagagcgatcaacatggtatcttggtgtcggcaaacagaattggtgtttaccacgacaacttctacatttaccatcttgaccttgacattgatggtgt

SEQ ID NO: 194536 - DNA, 247 bp, Glycine max
agcgaagtccactatgccgaagcaaattcacgagattaaggacttcctcctcactgctaggaggaaggatgcacgctctgtgaaaatcaagcggacaaggatgtggtgaagttcaaggtccgttgctccaagtacctttacaccctctgtgtgtttgattctgagacaggctgatcagttgaagcaatcacttcctccagggtttagcgtgcaggatgtgtgattctactgctgtatgaagatcagg

SEQ ID NO: 194537 - DNA, 267 bp, Glycine max
gtcccaccctgcatcttagcagagccactctgatcactaaaatgccattgttaacttcctctttgttcaacatggttcctctcttctctcttcttttgttctcactcatgattcgttatagtacttctcaggatccaccttcacctggttactaccctagttccaaaattagtcccgttagctttggtgaaggattttagaactttgggggactcagcatcagaaactagaccaagactcattaacaatctggcttgactcttactc

SEQ ID NO: 194538 - DNA, 267 bp, Glycine max
ctcgagccgatcctctatatatagttctctggcaattaaggtctcatccaaataagcacaaatgggtagccagagttacttcaaggctttgattatttgccttatagcactaattggatcaactcaagctcaattgcagcttggtttctatgccaaaagttgtccaaaggctgagcaaataattctgaagtacgttgttgagcatatccacaacgctccatcactagcagctgctctcataagattgcacttccatgattgttttgt

SEQ ID NO: 194539 - DNA, 266 bp, Glycine max
gtgagggtgagagtgacacaaatctagagagagcactagtactctaaaagtctattatattcttcaaaatatgaccatgcatcgcgagtcttgggcttttgtcttcggcgttatgggcaacatcatctcctttggagtgttccttgctccattgccaaccttttaccaaatctacaagaagaaatccactgaaggtttccagtcacttccttatgttgttgcactgctcagtgcaatgctttggatttactatgctttcgtgaaaa

SEQ ID NO: 194540 - DNA, 276 bp, Glycine max
atgcttatataattgcgtaatcaaattcataaacttcgttgcctcttcaatttctccttgctctgttgaatttcccagggccaggtattttaatatggaggtatacataaatatattgcaattgatggtcttcaacgaggaattcctagtaagcgcgagtcatcagctcgcgttgactacgtccctgccctttgtacacaccgcccgtcgctcctaccgattgaatggtccggtgaagtgttcggattgcggcgacgtgagcggttcgctgcccgc

SEQ ID NO: 194541 - DNA, 276 bp, Glycine max
ggctcgcggtaagcctcctgcttatgcttaagctaacaagaagaaacaagtccaattttcctccatcaccaccatagttaccaataattggcaatcttcatcagctaggcacactgccacaccgctccttccaagcactctctcgcaactatggccctctaatgatgctgcaattaggccaaactccaaccctagtggtctcatcagctgacgtggccagagaaataatcaagacgcatgatgttgttttctccaaccgtccacaacctacggctg

SEQ ID NO: 194542 - DNA, 240 bp, Glycine max
gcatccatgttaagctagtggccatcggatccagctacacgcctacaacctacagttttggtttggtttgcttgattgaagatcaaggaaggaagatgttgggtgttataaggcacaagagtattcgccccgccttctccgcaatcagacacttctcttctgcagctaaagagattactgtcaaggatggtctcaactccgcactcgatgaggaaatgtcagctgatcctaaagtcttct

SEQ ID NO: 194543 - DNA, 265 bp, Glycine max
gtacagggcctacaacgcgccgcatgtcgacgtggcatcggcaacatcgaatgatgagcaacgtagtccgacatcggtgccttctccgaaatggtacccggtttcgcgaggtgtttctatccgggtgtcagagaagtcatcaagcatgttgtttgcggttaaagatggagcttcgaaggcatttccatgggacaacagcatgttgtcttggcagagaatgcttttcatttcaaaccagagacaaatggatgaacgtcccaatggt

SEQ ID NO: 194544 - DNA, 140 bp, Glycine max
tgctgctcttttctcttttcttttctctttagttctctcttcccctttctttttctttttcttcttcttctgagcttgtttaagcttttcttccattaacatattatcacgatgtgtggtattcttgctgttcttggttg

SEQ ID NO: 194545 - DNA, 255 bp, Glycine max
actcgagccgaatcggctcgagtatctccatttccatttcctctcactcagtttccaagaaacttaagctatgggaaagtcacacccaaccgtgagcgctgattaccagaaggccgttgagaaggcgaagaagaagctcagaggcttcatcgctgagaagagatgcgctcctctaatgctacgtttggcatggcactctgctggaacttaggacgtgagctcgaagaccggtggtcccttcggaacataaagcac

SEQ ID NO: 194546 - DNA, 226 bp, Glycine max
  unsure (1)..(226): unsure at all n locations
ctcgagccgtctggatgggattattcttgacggggcacctgttaaggtcaggagacctactcattatagtccttccttagctgctaccctaggctcaagccaacctagccctagccttaatctgggtgctgctggctcacgactgngtcggcaggtgacatgatggtctgatcggattncaatngatgactcatatacttactgaacacagtcaggagtttagagc

SEQ ID NO: 194547 - DNA, 233 bp, Glycine max
ctcgagccgatagtgctgcaatggcttcaagtcaggaggaggtgaaccttttcgggagctactgcgaagcccatttgtgctgcagggttcatattcgccctcaagttgcaagggagttcaatacaaatatgtccaagacaatttgaggaacaagagtgaactgcttctcaagtccaacccagttcacaagaaggttccagtggttattccacatgaggagcccatagcagagt

SEQ ID NO: 194548 - DNA, 264 bp, Glycine max
ggactggtgtcttggcatggaattctcgcattttggcttcagggagcagagataggaacatacttcagcatgacatgagggttccaggtgactttgttagcaagcttgttggtcacaagtctgaggtatgtggattgaaatggtcacgtgatgacagggaacttgcttctggtggtaatgataatcagctcctggtatggaatccgcactctcagcaaccagttttgagacttaccgagcacactgctgctgtgaaggccattg

SEQ ID NO: 194549 - DNA, 261 bp, Glycine max
cagtgagaagccgagcgattttgtttaccttccaagagatgaagcatttggtcacttgaagtcatcagatacgctcgcttatggaatcaaatctgtatcccaagatgtcttggctgtcttgactgatgcattcgatggaaatattgtgagccatgagtttgataattttgctggagtgcacaaagctctatgaaggtggagttacacgagctacaaacttccttagaagatcggccctataccagtgatcgaggagatttt

SEQ ID NO: 194550 - DNA, 237 bp, Glycine max
ggaattccgctcgcgctcgagccgccagtctggaactgggaaaacagcaactttctgctctggaattctgcagcaacttgactatagtgtgacgggatgccaagccttggttttagcaccaactagggagcttgctcagcaaattgaaaaggttatgcgggcactcggagattatcttggtgtgaaggtgcacgcatgtctgggacgtaacagtggtcctggaaggacaacgcattc

SEQ ID NO: 194551 - DNA, 271 bp, Glycine max
aggacccatctgctccccatggagttcgtcttttgactgaggactatccttatgcttctgatgggctagagatatgggatgccatcaagtcctgggtgcaagaatatgtctcattctactacaagtcagatgaggaactccaaaaagaccctgaactccaagcttggtggaaagaacttgtagaggtgggtcatggtgatttgtcagataagccatggtggcaaaagcatgaaactcgtgaagacgttggtgaagcttccgctatcctcat

SEQ ID NO: 194552 - DNA, 275 bp, Glycine max
atccaccctccatacacactctctctgagtcggtcgagttgaatcggtgtgagtcagtgaccgagtcgaaccatgtcggacgaagaacaccatttcgaatccaaggccgatgctggagcctccaagacctatcctcaacaagccggaaccatccgcaaaaacggttacatcgtcatcaagggtcgtccctgcaaggttgttgaagtttctacttccaagactggtaagcacggtcatgccaagtgtcactttgttgggattgatattttcactgc

SEQ ID NO: 194553 - DNA, 265 bp, Glycine max
cttgacttctctccgaatgggatatcgacaatagttcaggtgaacgaccttaagaactctcccggactgggcaagagggaactgaggcaggccaccaatcaggcccttcaactgcttcaggacaactaccctgagttcgttgccaagcagatattcatcaatgtcccctggtggtaccttgccttttctaggatgatcagtcccttcttcacacagaggaccaagagtaaatttgtttttgctggcccttccaaatctgctgata

SEQ ID NO: 194554 - DNA, 95 bp, Glycine max
aggagacactgttgcgaaccaatgctgcaccgtgcttcaaggcctcgttgagcttgaagctgcggcgtgtcattgcaccactcttaagctgaagc

SEQ ID NO: 194555 - DNA, 265 bp, Glycine max
ggttcaaacactctcatggcatcagacaagaagattaggatcggcatcaacggatttggaaggattggccgtttggtggccagggttgctcttcagaggaatgacgttgaacttgttgctgtcaacgatccttcatcaccactgattacatgacatacatgttcaagtacgacaccgttcatggggcagtggaagcatttgatgtgaagctgaaggactctaagacccctctcttcggtgagaagcccgtcaccgtttttggatc

SEQ ID NO: 194556 - DNA, 269 bp, Glycine max
tgcaccatatcaaagaggaggaaagattgggttgtatggtggtgctggtgtaggaaaaactgtgcttattatggaacttattaacaatgttgcaaaagctcatggtggtttctctgtgtttgctggtgttggagagcgaacccgagagggtaatgacttgtacagagaaatgattgacaatggtgtcattaagcttggtcataagcagagtgaaagcaaatgtgctcttgtgtatggtcagatgaatgagccccctggtgctcgtgccc

SEQ ID NO: 194557 - DNA, 267 bp, Glycine max
gggagacaagacagagcagtacaggttactaccaagcgctaccaaggtttatattgtttattattctacatatggacatgtcgagaacctagctagagagatagaaaaaggggctgcttcggtggatggagtagaagcaaaactgtggcaggtacctgaaaccttgcctgaagaggtcctgcaaagttgggagcacctccaaagagtgatgctccaattattactcccaatgagcttcctgaggctgatgggtttttggttggtttt

SEQ ID NO: 194558 - DNA, 268 bp, Glycine max
actcgagccgtttctgatcgctcatagagagttcgacgcggcggttgcagaagaagattgcacgatgaagttcaacatcgcgagtcccaccactggatgccagaacaagctcgagatcgacgacgatcagaaactacgagcattttgggacaagaggatctcacaggaggtcagcggagatgcacttggtgaggaatttaaggggtacgtcttcaaaattactggagggtgtgacaaacaaggaatcccgatgaaacaaggagtgcta

SEQ ID NO: 194559 - DNA, 241 bp, Glycine max
agaagcatacattccctggcgaagctgatgaagcgccagacacaattactggggatatagtcagagcaatcagcagaaggaacatcccaaattcaaaagaaaggctgaagatctctttgtagagcacattttgtcacttactgaagccattagtggcttccaatttgtgctgactcacttggatggccgtcagcttcttattagatcgaatcctggggaagttgtcaagcctgattcatac

SEQ ID NO: 194560 - DNA, 258 bp, Glycine max
gttgtaactcgttcttcttcttttgttgttctgtgtttgtgtttgttttttctctcacctgaaaatgtcttgctgcggtggtaactgtggttgcggaagctcctgcaagtgcggcaactgctgcggaggctgcaagatgtacccagacttgagctacactgagtcaacaccaccgagaccttggtcatgggagtggcacctgttaaggctcaatttgagggtgctgaaatgggtgtgcacgctgagaacgatggctgc

SEQ ID NO: 194561 - DNA, 254 bp, Glycine max
ggaagggcgtagtaagcgacgaaatgcttcggggagttgaaaataagcgtagatccggggattcccgatataggtcaacctttcgaactgctgctgaatccacgggcaggcaagagacaacctggtgaactgaaacatcttagtagccagaggaaaagaaagcaaaagcgattcccgtagtagcggcgagcgaaatgggagcagcctaaaccgtgaaaacggggttgtgggagagctatacaagtgtcgtgctg

SEQ ID NO: 194562 - DNA, 229 bp, Glycine max
gctccaggacatgccatatgagggcatgcacgtacggcctcgcaggggaaccagaaaattatgttaacaaaataatctggaaccctaatgtatcagtgtcatcatcagtgtgtagtttaaggtagctttgctatggttacgttctttgagatgagagtcttgatgaacagtacaattctactgtattgctttccttgaaagttaatgcatgcttcttaacttctgtcta

SEQ ID NO: 194563 - DNA, 259 bp, Glycine max
gcgcggcataacctaaacctatctttcttctctctctgtgtgtgcgcttcaacggcaaccagaagcagccatggccactgcaaggactgtgaaggatgtttcacctcatgagttcgttaaggcgtactcctctcacctcaagcgatccggcaagatggagctgccagagtggactgatattgtgaaaactgcaagatttaaggagttggctccttatgatcctgactggtactatgtcagagctgcttccatggcaaga

SEQ ID NO: 194564 - DNA, 271 bp, Glycine max
ggaaacaatgcctatctcaaccttatccccctccttgtcggcaatgtgggattgattttcaccaagggtgacctgaaggaggtcagtgaggaggttgctaagtacaaggttggagctcctgctcgtgttggtttggttgctccaattgatgtcgttgttcctcctggcaacacagggctcgatccctctcagacctctttcttccaggtggttaacattcctaccaagattaacaagggtactgtgggaatcattacacctgtggaactca

SEQ ID NO: 194565 - DNA, 256 bp, Glycine max
tttctctcttctctgcttcttcttgttcaaatcttaggagctgaggagaatcaatcgagagaaatatgtctcgtatcgctcgtggacgccttgctgaggaatcaaagtcatggcgcaaaaaccatccacacggtttcgttgccaagcccgagactctacctgatggcaccgtaaatttgatggtctggcattgcactattcctggcaacaccgggactgattgggaccgtggatatttcccactggcaatgcactt

SEQ ID NO: 194566 - DNA, 267 bp, Glycine max
ctcgagccgcgctgctgctataaaaaagctcgaatactcggataaggagaaacatcttttaatggcgtcccaaatccgtgagtggtctggaatcaatacattcgcacctgctacccagactaagttgcttgaactcttgggaaatcttaaacaagagaatgtgaactccttgactatacttgtgatgggaaaaggaggtgttggaaaatcttcaactgtgaactccatcattggggaaagagtggtttcgattagtcctttccagtc

SEQ ID NO: 194567 - DNA, 204 bp, Glycine max
ctggcaaaggacatggttgatgttcttttgcaacttgccgaggatcctactcttgaggtcaagctcgagaggcatggagttaaggcttttacacaggacctaatagcaggtgggactgagagttcagctgtaacagtggaatgggcaatctcatagctattgagaacggcagagattttcaagaaggcaacagaggagctagac

SEQ ID NO: 194568 - DNA, 249 bp, Glycine max
ccagatctcactttgttccgttcagtgcagagaagaaaatggcggtgatggccgttcaccaattcgcgcaatgcatcacttgccacgcttggagccccgatcaatccatggtggctttatgtccaaacaataatgaagtgcacatctataggttggttgaagacaaatgggaaaaggtgcatgttcttcgaaagcatgaccaggtaatttctgggatagactggagcacaagatcaaatagcatagtta

SEQ ID NO: 194569 - DNA, 160 bp, Glycine max
ctcagtcatctcttttaccattctcttctctcttgctcttgcaggagagagccatgtccatgcatcgctacctgaggaagattattgggaagctgtttggccaaacactcccattcccactgcactgcgagagttctacaagcctctccctgagtgtgaa

SEQ ID NO: 194570 - DNA, 268 bp, Glycine max
accacaccacccatcaacgacatgcttcctctttcccttctcaagactgcccaaggccaccctatgttggtggaactgaaaaatggggagacatataacgggcatttcgttaattgcgacacatggatgaacatccatctgcgagaagtcatttgtacatctaaagacggagatagattttggaggatgcctgaatgctactcacgaggcaatacaatcaagtaccttcgagtacctgatgaggttattgataaagttcaagaagaaa

SEQ ID NO: 194571 - DNA, 263 bp, Glycine max
cgccagatctcatcgcgccaggtgtgaagatcctagcggggtggtctaaagccgtggggcccaccgggttgcccgttgataacaggcgcgtggatttcaacatcatctctggcacctccatgtcgtgccctcacgtgagccgcttagtcgggctgatcatatcggatcacgctgattcggatccagccgctgtgagcatcgctctgatgacaacggcttacacagtctacaaaactggtgagaagttgcagacagcgcaacgg

SEQ ID NO: 194572 - DNA, 273 bp, Glycine max
agcaccaccattactcagcactgccattcttcaatcacactaatggctgtcaccttctcagatcttcacaccgaagagggcatcaaatccctcgatcaattcctttctgggaaaacctatatctctggggatcaattgacaaaggatgatatcaaagtgtatgcagctgttgtggaaaagccaggagactcttttcctaatgctgctaagtggtacgatgccgtctcttctcaacttgctgcaagcttccctgggcacgctcaaggggtaaga

SEQ ID NO: 194573 - DNA, 301 bp, Glycine max
cggaattcggctaacaactatggggtgttggtacatggttaaaggaaattaaagacactactaaagaaggatatagttttgaagagctatgcatcaagaaagaagccattgagggagaagagaagttttgtgcaaaatccttgggaacagtaattggttttgccatttcaaagctgggaaagaacattcaagtactttcaagttcctttgtcaataagcaagaccaatacactgtggaaggagtgcagaatcttggagacaaagcagtgatgtgtcataggctaaatttcagaactgcagt

SEQ ID NO: 194574 - DNA, 290 bp, Glycine max
tgctgttgtgaattgttaatctcattcagacaatcacagttatactctctctctctcactttgatcactgatctcatctcaattttcagatatgtcgacatctgataagccagaagaggtggaaaggggtagcaaggatgaaaagcacaaggaagatgatcaagaggaggggaagggtggattcattgagaaggtgaaggatttcattcatgacattggtgagaagattgaggaagctattgggtttgggaagccgagtgccgatgttactgcgatacacattccatcaa

SEQ ID NO: 194575 - DNA, 293 bp, Glycine max
ctctcacgcagtcgcagtgagtgaaaaggaaaaccctaattgcggtattctcagtgccttcgagagaaagagaaaatggcagataatcttgttctccgtggcaccatgcgcgcccacaccgacgttgtgacggcgattgccactcccatcgacaactccgacatgatcgtcaccgcctcacgcgacaaatccatcatcctctggcatcttaccaaggaggacaagacttacggtgtcccccgccgccgcctcaccggccattctcattttgtccaggacgtcgtcctctcttc

SEQ ID NO: 194576 - DNA, 295 bp, Glycine max
cgccgacgtccacctcggcaccaaaaactgcgacttccaaatggaacgttacatcttcaagcgccgcaacgacgggatttacattattaaccttgggaagacatgggagaagcttcagttagcagctagggttattgttgcaattgagaaccctcaggatatcattgttcaatccgcaaggccttatggtcaaagagcggttctgaagtttgctcagtacactggtgctcatgctattgctggaaggcacactcccggtaccttcaccaatcagcttcagacttcgttcagtgag

SEQ ID NO: 194577 - DNA, 267 bp, Glycine max
tcagggggaagaccagatgtgtcttgggacgaacaagttcccgaagaagccgttgggacggggcgcagagcaagacgcggcaagactacaggagccgcgccgggcgctggttgacccgacggagtttacgtcatggtcgttttacagagcagggatagcagagtttgtgggcacttttctggttctctacatcaccgtcttaaccgttatgggagtcgccggggctaagtctaagtgtagtaccgttgggattcaaggaatcgcttg

SEQ ID NO: 194578 - DNA, 289 bp, Glycine max
ctcatatatcatggctacctccatggtgaagcttatgcttttctctgctctcatactcttgtccttgcaagcagttgtgtctgtaacaccactgcattttcaacatccactagaccccttaaccaaacaagagataagtcttgtccaaaccatagtccaaaacaagtacccaagctcaagtaacaggttgagcttccactacattggactcgccgaacctgaaaaggatgccatcctcaaatgggaatccatcaaaccaactgttataactgtccctcgcaaagccttg

SEQ ID NO: 194579 - DNA, 290 bp, Glycine max
gaaacattattcccattgctatatattatggctagcatgaaggttacatgggtggttgtgatcatgtgcatggccgtggtgggtgcaccgatgatggcgcaagccatgacatgcaatgatgtgacggtgaacatggcacagtgcctatcctacctgatgcagggaggaacaccttcaacactttgctgcagcggagtcaagaacattcttggctctgctgtcaccaccgttgacaaacaaactgtgtgcaactgtctcaaggcggatgctgctaggtacaacatcaatga

SEQ ID NO: 194580 - DNA, 290 bp, Glycine max
ctcccagcaaccactctccccaagaagatgctgaagctctcagaaaggcttttgaaggatggggaactgatgagaacactgtcatagtaattttgggtcatagaactgtgtatcagaggcagcaaatcagaagagtttatgaggaaatttaccaggaggatcttgtgaagcgcctagagtctgagatcaaaggagactttgagaaagccgtgtaccgatggatactggaacctgcagatcgtgatgctgttttggccaatgttgccatcaagagtggcaaaaactacaat

SEQ ID NO: 194581 - DNA, 287 bp, Glycine max
cctcgagccggctcgaggaatccacatcaccctaacgatcaaacggctaggtgtcgctgggacttcaatggcactgactgaagctcagaatcctcttcttggagaaaacacatgtggttccttgttaaaaaagcttcaggaaatatgggatgaggttggtgagagcgacgagcaacgagacaagatgcttcttcagttagagcaggagtgcttggatgtgtacaagagaaaggttgagcaggctgccaagtcaagggcgcagtacttcaagctctgtctgatgctaa

SEQ ID NO: 194582 - DNA, 291 bp, Glycine max
attcccaccacatgcgcagacacgtgatctaggatctctctctatctgggatctgcttccttctcttctctttctcaattctcattcataattctaattcattcctccgatctgcgactttctatttctccctcaacacaacacgagacaccatgttcctctttgactggttctatggcattctcgcttccctcggtctctggcagaaagaagccaaaattctcttccttggtctcgataatgccggcaaaaccaccctccttcacatgctcaaagacgagagattagttc

SEQ ID NO: 194583 - DNA, 293 bp, Glycine max
cggctcgaggatcgcagcaaaccagagattgaactccgacgatgcctcccgtcgctcctcgatccggcgatgccatattcgccaacgtcgaacgcgtcaatgcggactgtttactttgacgtatggcgcaattgtgcgtcaattgctcacggatctggaagaggttgaggaggttaacgagcagcttgatcaaatgggttacaatattggaatccgattgattgatgagtttttagctaagtctaatgtctcaagatgcaacgatttcagagagactactgatgtaattgcaa

SEQ ID NO: 194584 - DNA, 160 bp, Glycine max
ccctcttaataccaattttctagggtttatacaattctcgatggcttcttcagatgttgagtaccgttgctttgtcggtgggctcgcttgggccactgacgaccaagctctcgagagagccttctctcagtacggcgaaatcgttgaaaccaagattatc

SEQ ID NO: 194585 - DNA, 310 bp, Glycine max
tgctcgatccggcgagtaagacaaatgcagcatttcgtggatttgcaagagaattcggagttgggtgagtcgaattcatggctttcagcgaaagagcagtccggtgcggcacccaacaccaatttggatcgcgtcctcttcaacgacctcgtcgagattgtccctctcgttcagtcactcatcgatcgtaaagcaagccgttcattcacgcggcgtggttccatgatctacaccaagacacccacaagagaatcattgtccaaaagaacaacagattcaaaaagtaggacatgttgccaatctattcttg

SEQ ID NO: 194586 - DNA, 293 bp, Glycine max
cttcgtcaaaaccaaccaaacccctccccaattctcaagccaaccatgtcttccttcaagagcaagtaccaagatgaactcattgccaatgctgcttacattggcaccccagggaagggtatccttgctgctgatgagtcaactggtacaattggcaagcgattggccagcattaatgtcgagaatgttgaagcaaataggcgtgctcttcgtgaactcctattcaccacacctggtgcttttgagtgcctcagtggtgtgatcttgtttgaggaaaccctataccaaaagac

SEQ ID NO: 194587 - DNA, 286 bp, Glycine max
ctgagttaaggcttggactgcctggaaacggaggcactgaagaagtgctcatcaggaagaggggtttctctgagactgaaactggtcatgaagatgagtctgccaccactgtggatttgatgcttaatctttcttctaaggaggccgcaaccactgctgctgctgctgcagatccaactgataagcacaagactttgcctaaggagaagacccttctgccagcagatcctgctaagcctccagccaagacgcaggtggtgggttggccactgtgcggtccttccgg

SEQ ID NO: 194588 - DNA, 291 bp, Glycine max
gggtaagggaacggggagtttcggtaagaggaggaacaagacccacaccctctgtgtgaggtgtggccgccgcagcttccacctccagaagagtcgttgcgctgcgcgcgcctaacccgctgcgcccaccaggaaatataactggagcgtgaaggccattaggagaaagaccaccggaactggaaggatgaggtacttgcgtaacgtgcctcgcagattcaagagcggcttcagagagggtaccgaagctgcacccaggaagagaggagctgctgcctctgcctaagcttt

SEQ ID NO: 194589 - DNA, 286 bp, Glycine max
cttaaacaagagaatgtgaactccttaactatacttgtgatgggacaaggtggtgttggaaaatcttcaactgtgaactccatcattggggatagagtggtttcgattaatcctttccagtcggaagggccaagacccgtgattgtgtcgcgatcaagggctggttttacattgaacatcattgacactcctggtctcattgaagggggatacatcaatgatatggcacttgatataataaaacgtttccttctgaacaagaccatagatgtactgctttatgtgg

SEQ ID NO: 194590 - DNA, 286 bp, Glycine max
aattttcgatggcttcttcagatgttgagtaccgttgctttgtcggtgggctcgcttgggccactgacgaccaagctctcgagagagccttctctcagtacggcgaaatcgttgaaacgaagattatcaacgatcgtgagactggaagatccaggggttttggatttgtgaccttcgcctcggagcagtccatgaaagacgccatcgaagggatgaacggccaaaaccttgacggccgtaacatcactgttaacgaagctcagtcccgtggtggcggtcgcggcgg

SEQ ID NO: 194591 - DNA, 284 bp, Glycine max
ggatttcggccgtttgctccccaaggaaagaagcagagtgtttcttttgaaatcagctagaaaagatgtcaggtgaagaggtagctgttgcagctgaggcacctgctgcttcaattccaggtgagccaatggacatcatgactgctctacagcttgtgctgagaaaatctctggcctatggtggtcttgcacgaggtcttcatgaaggtgctaaggtgatcgagaagcatgctgcacagctctgcgttctagcagaagattgtgaccaacctgattatgtgaaa

SEQ ID NO: 194592 - DNA, 288 bp, Glycine max
ctcatctcaattttcagatatgtcgacatctgataagccagaagaggtggaaaggggtagcaaggatgaaaagcacaaggaagatgatcaagaggaggggaagggtggattcattgagaaggtgaaggatttcattcatgacattggtgagaagattgaggaagctattgggtttgggaagccgagtgccgatgttactgcgatacacattccatcaattaatcttcacaaagcagatcttgttgttgatgtgctcaatcaagaacccgaatccggtgccgatccctc

SEQ ID NO: 194593 - DNA, 288 bp, Glycine max
ctctctgttctcttctacctctcaagtctttgaagtatagagatggcagagacattcctatttacctcagagtcagtgaacgagggacaccctgacaagctctgtgaccaaatctctgatgctgtcctcgacgcttgcctcgaacaggacccagacagcaaggttgcctgcgaaacatgcaccaaaaccaacttggtcatggtcttcggagaaatcacgaccaaggccaatgttgactacgagaagatagtgcgtgacacctgcaggaacatcggctttgtctcaaac

SEQ ID NO: 194594 - DNA, 157 bp, Glycine max
ggcagagcaagacaaggtgatcctacacgggatgtgggccagcccttatgccaagagggtggaattggcccttaattttaagggcataccctatgagtatgttgaagaagacttgagaaataagagtgatttgcttctaaagtacaaccctgttcac

SEQ ID NO: 194595 - DNA, 293 bp, Glycine max
  unsure (1)..(293): unsure at all n locations
ctcactcaggatatcccaaagcctttggaagtgggaagacatttggacatgacatattctatcaaatgggattctaccaatgtcacttttgggcgtcgctttgatgtctacctggatcatcctttctttgagcatcagattcattggttctccatttttaactctttcatgatggtcatcttccctnatggattggtgtcaatgatattgatgcgaactctgagaaatgactatgcaaagtatgctcgggaagatgatgatttggagagagtgttagtgaagatctggctgga

SEQ ID NO: 194596 - DNA, 292 bp, Glycine max
cttttgacaaccaatgaagatggttctgtctgggtcctctgtgctgctgcacattgttctgctctcaagactctgttttgctggcgacccaactgttttcactgaacttcgtgtaccctacaccactgtttcacctctgggtgttcctcaacaggtcatagctatcaacaagaagtttccaggacctgtcatcaatgttacaaccaataaccatgtaattgtgaatgtgtacaatgaattggatgaaggccttctcctttcatggtcgggggttcaaatgcggcgtaactcg

SEQ ID NO: 194597 - DNA, 292 bp, Glycine max
gcttctcaagccggcgccatgaggaaggtggcttcctacttcgcccaagccctcgcgcgtcgtatctacggaatcttcccggaagaaaccctcgactcctccttctccgacgttctccacatgcacttctacgcgtcctgcccttacctcaaattcgcgcacttcaccgcgaatcaggctatcctcgaagcatttgccactgctgggagagtccacgtcatcgatttcggcctcagacaagggatgcagtggcctgcactcatgcaagcccttgcattgcggcccggcgggc

SEQ ID NO: 194598 - DNA, 283 bp, Glycine max
atgcctgagtgtaaacttggattaaatgatagagtattattagaggcacaaggtagaacaaccaagggaaaatcaattgacttggaagacatcaaatttcatcagtgtgtgcgtttggcccgatttgagaatgatcgaacgatttcatttatccctcctgatggatcatttgatttaatgacatataggctcagtacacaggttaagcctttagtttgggtggaagcacaagttgaaaaacattcaaaaagccggatcgagattatggtaaaagctaggagtc

SEQ ID NO: 194599 - DNA, 286 bp, Glycine max
cgcggcttccaccgcggctatgtcacacatccttggaaaccccgttaacctcagatgcgcaaccaggtctgctccatcaccaactacacctgtcaccttcaagaccgtcgcacttttctccaagaagaagccagctccacctccaaagaaaaagcctgccgctgtatcccccgccaatgaggaactcgccaagtggtatggtcctgacagaaggatcttcttgcctgagggtctcttggaccgatctgagatccccgagtacttgaccggagaagtgcctggagat

SEQ ID NO: 194600 - DNA, 282 bp, Glycine max
tctgtacccgcctagccattgatttggaaaagtccaacttcaaggatgagtaagcttcagagtgatgctctaagagaagctatctcaggaatcatggctgattccaaggaaaagaacaggaaatttgtggagaccattgaactccaaattgggttgaaaaattatgatccccagaaggacaagcgtttcagtggctctgttaagttgcctcatattcctcgccccaagatgaagatttgtatgcttggagatgcccagcacgttgaggaggctgagaagata

SEQ ID NO: 194601 - DNA, 287 bp, Glycine max
ctcgagccgagaaaatacacattacattactaagtctttgttcatttgagtagtagtgatggctagcctcaaggttgcatgtgtggttgctgtgatgtgcatggttgtggtggccatgagtgctgcacccatggcacaggccgcaatcacgtgcgggcaggtcgccggcgacatgtctccgtgcttcagttatcttcgaagcggcggaaaaccgtcgcaggcctgctgcaacggagtgaagtccctcagcagcgcggcgaagaccaccgcggaccgccagggggcgt

SEQ ID NO: 194602 - DNA, 285 bp, Glycine max
tctctttttcgcctcattccattttcatctatcaatggctccagtagcagcagcatcttcagattcaatcaagccaagagatgtttgcatcgttggtgttgcacgtacaccaatgggtggatttcttggtactctgtcatctctatctgccaccaagctaggctctatagctattgaagctgctcttaaaagggccaatgttgatctatcccttgtggaagaagtattttttgggaatgttcttagtgctaatttggggcaagtcctgcaagacaagctgctctt

SEQ ID NO: 194603 - DNA, 283 bp, Glycine max
tgtgaagtcagtccaaacttcagtttcaaagatgcctcgtggaacgcttgaagttgttctgatcagcgccaaaggaatcgatgacaatgattttctctccagcattgatccttatgtgattctcacatacagggcacaggagaaaaagagcactgtgcaagaagatgctggatccaagccacaatggaatgagagctttcttttcactgtctctgacagtgcatctgaacttaatctaaagataatggataaagacaactttagtcaagatgattgtcttggc

SEQ ID NO: 194604 - DNA, 284 bp, Glycine max
cggctcgaggaaaacccaaagtgcttctctcctctgtctttttctctctcttgctatccttttggctagtggcactgctgcaagtgcaactccaagaagcgcagtgccaagccaccatgtttcaacattcaacagaagcctttttccttccacttttctctttggaattggttcttctgcttaccaggcagaaggagcagcaagtgtagatgggagaggaccaagcatatgggacacctacactagacagcatactgaaaagatttgggatcatagcaccggtg

SEQ ID NO: 194605 - DNA, 289 bp, Glycine max
gttggaatcctcttcttcccctctggtgttctcagtacggaggagtgaaccggagctggtggctccggccaagcccactccccgcgaaattaagatcctatctgagatagattctcaggcgggtcttcgtacccaaattccaatcatacagttctatcgtaacgacccatcattggcaggcaaggacccagttcaagccattcgaaacgctcttgcggaagcacttgttttctactacccgtttgcgggtagaattaaggaagaaggttcggatggacaactcgtggtg

SEQ ID NO: 194606 - DNA, 294 bp, Glycine max
ggagtgtggactttaaaagggtactctataagtttgttgcttgtgcatatttgtactttgttcatgtgctgtggtgtgtgttgttgttgagagagtttgagaaagaataatgggaagaacaccatgttgtgacaagaagggtttgaagaaaggaccttggacagctgaagaggatgaaattctttctagttatatcaagaaaaatggtggtcatggaagctggcgttctcttccaaggatggcaggtcttcttcgttgtggcaagagttgcaggcttaggtggacaaactatct

SEQ ID NO: 194607 - DNA, 283 bp, Glycine max
gaaaaaaaccacaaccaccaccatctagggtttttctttttctcatggctagtttgtcaactaggattttcttcatcatgtcccttgtgtgcctggctctcggtccaatggcacaaggggaaatgacatgtggccaggttgtgagcaacctgaccccatgcatctcctatgtggtgtatggtggaaccaatgttcctgaacagtgctgcaatgggataagaaatctctatggcatggctcagaccaaaccagaccgccaagctgtctgcaactgcatcaagaa

SEQ ID NO: 194608 - DNA, 288 bp, Glycine max
gctgacttggatactcaattttgctgtttcttgaagcaagctgctagtgagattccgtcaaagccactcccacttgttcgggaacaagtgacaaacctttgcatcaatgcactattttcataccgtaaattttgtgctactgtatcctcatctggacaacttattcttccggaggcattaaagcttttgcccctgtacacacttgcattaactaagagtacagggttgcgaacagaaggaaagatagatgaacggtcattttggataaactatgtatcctctatctct

SEQ ID NO: 194609 - DNA, 278 bp, Glycine max
gccaacgccaattccattcagatcacagtcccttcaattcctgctgcagcatactgtgtgcaacaaagccctaaaatggaggggactgtcttcactcctgcactgcaagaacttgagcatgtaaagtctgatcaaggagaaattctgagcaagcctttcttggatgcgtgcaagcacatattgcctgtaatagataagtttggacgtgctatggcacttgttaaatctgacataggtggtaacatatcgagattggaaactatgtattcttccaatcc

SEQ ID NO: 194610 - DNA, 281 bp, Glycine max
gtgggcttcaagagctgcttcctacctcaggatctccgtgtttcacagaagcttctctaacgttttgaatgatctgaagtatgctgattctcatgagtgggtgaaggttgatggaaattctgcaactgttggcataactgatcatgcccaagatcatttgggtgaggttgtgtatgttgaattgcctgaagtgggagccaccgtgacacaaggagaaggttttggtgcagctgaaagtgtgaaggcaactagtgatattaactctcctgtttcaggaaaag

SEQ ID NO: 194611 - DNA, 280 bp, Glycine max
tgggaagttctctgtttatgtccatgcatccaagacaaaaccggttcatgtgagccgttattttgttaatcgggatatacgcagtgacccggtgatttgggggaaaatttctatggttgatgcagagagacgactattggcaaatgcccttcaagatactgacaaccagcaatttgttctactgtctgatagctgtgtgcctctgtatgattttgagtatatctacgagtatctgatgtatacaaatatcagctttgtagactgctttaaggatcccggt

SEQ ID NO: 194612 - DNA, 281 bp, Glycine max
gtttagtgacaccaaacagacgggaaatgggtcgtggggtcagtgctggtggtggacagagttccttggattatctctttggcagtggggtacctgccagcagtgcaaatggtcctcgcactcaaaatgcaagtgctccttcaccaccggttgataagcaaagtccagcaccagcaccagcaccagcacctgcacctgcagcagcagcagtaccagcacctgcaccagcaccagcaccagcaccagctgataagcaaattccagctggaattcctggaagt

SEQ ID NO: 194613 - DNA, 284 bp, Glycine max
ctggaacatcaagctttgatttacaaatacatggtggctggtcttcctgtccctcctgatctagtccttcccattcagaacagcttccactccatttcccaaaccttcttgcaccatccctctaccaccatgagttattgttccttctatgggaagaaggtggacccggagccaggacgatgcaggaggactgatgggaaaaagtggaggtgctccaaggaagcctacccagactccaagtactgtgagcgacacatgcaccgtggccgcaaccgttcaagaaa

SEQ ID NO: 194614 - DNA, 287 bp, Glycine max
ttcttctttgttttcaattaggtttttttgttgctctccttcaaactccatctttccaaatcctctctttgcgattgtgttttgatctgcttcctactgcgatagtttctctactgttacatggccatggcggtttccgcaattggttttgaaggtttcgagaaaaggttggaaatatcctttttccagccgggactttttgctgaccctgaaggaaggggtctaagggctcttacaaaatcccagttgggtgagattctaacaccagctgcttgcaccattgtttc

SEQ ID NO: 194615 - DNA, 281 bp, Glycine max
ggcagcgacacgtatcaacttcaataatcgcatcgcagaagcagtttccggtgcatctcatcgtctccgaaaatgaacgacgcagatgtctcgaagcaaatccagcagatggtgcggttcatccgccaggaagctgaggaaaaggccaacgagatctctgtctccgccgaagaggaattcaatatcgagaagctgcagttggtcgaagccgacaagaagaagatcaggcaagaatacgaacgcaaagagcgccaagttgaaattcgcaagaagattgagta

SEQ ID NO: 194616 - DNA, 279 bp, Glycine max
ctgttattcgcaccgcaaacaaacagtgagccatggccgtcggaaagaacaagcgcatctccaaagggaaaaagggtggcaagaagaaggcagctgatccctttgccaagaaggattggtatgacattaaggccccttctctttttcaagtgaaaaatgttggcaaaaccctcgtctctcgtacgcagggtaccaagattgcttctgaaggacttaaacatagagtgtttgaggtctccttggctgatcttcaaggggatgaggatcatgcattcaaga

SEQ ID NO: 194617 - DNA, 281 bp, Glycine max
gtctcattggtgcccaaccgtgattgcccatcgaatgctcagttcctagatacatatgttcacgctgctgatggtactccgttactcatcaagaacgcaatctgtgtctttgaacaatatggcagcatcatgtggcgtcacaccgaaacaggcattcccaatgaatcgttcgaagaaacgagaacggaagtcaacttagtggtaagaactgttgttaccgtgggcaactacgataacatcattgattgggagtttaaaacaagtggctcaatcaaaccctc

SEQ ID NO: 194618 - DNA, 276 bp, Glycine max
ggcaaacatggcaactcaaatgagcaagaagagaaagtttgtggcggatggagtgttcttcgccgaactgaacgaggttctgacacgtgagttggcggaggacggttactccggcgtggaggttagggttacgccgatgcgcaccgagattatcatcagagccaccagaacccaagccgttctcggtgagaagggaaggagaattagggaacttacctcagtggtgcagaagaggttcaaatttcccgagaacagtgtcgagctttatgctgagaa

SEQ ID NO: 194619 - DNA, 278 bp, Glycine max
cagaaaggtgtggtgattgttaacaatgctcgaggggcaattatggacacccaagcaattgctgatgcttgctctagtggccacgttgcaggctatggtggtgatgtttggcccatacaaccagctccaaaggaccatccatggcgctacatgccaaaccatgccatgactcctcatatttctggcaccaccattgatgcacagttacgttatgctgctggtgtcaaagacatgcttgataggcacttcaagggtgaagactttccagaacaaaacta

SEQ ID NO: 194620 - DNA, 182 bp, Glycine max
ctctcaacaacttcaccttcttcctcctcgatcatgtctcacttcaagggcaagtaccatgatgagcttatcgccaatgctgcgtacattggcactcctggaaagggtattcttgctgctgatgagtcaacagggacaattggcaagcgtttggccagcatcagtgtagagaacattgaatc

SEQ ID NO: 194621 - DNA, 289 bp, Glycine max
ggatttactgctattatgccttggttggccataaatgataaaaatatcccatcatttataaaagggcagaaaatagaagtatcaaaattggagctctatgaggggagcaccagtcctccagatttccttactgaaagtgagctgatatccctgatggagaagaatggaataggaacagatgcatcgattcctgttcatattaacaacatatgtgagcggaattatgtgcaggtacaagcaggcagaaagcttgtcccaaccacattaggcataacattagtaagaggtt

SEQ ID NO: 194622 - DNA, 251 bp, Glycine max
gttactgtctgttcaagctaccatctctctctctctttcttagtgcctccttgccagaagttaaaatggcccaagaaactttcctattcacatctgaatcagtgaacgaggggcacctagacaagctctgtgaccagatctccgatgctgtgctcgatgcatgcttggagcaggacctgacagcaaggttgcctgtgaaacctgcaccaagaccaacatggtgatggttttcggagagatcacaaccaagg

SEQ ID NO: 194623 - DNA, 278 bp, Glycine max
caaattgaccttggacttcgtctttcctctctctccctgtgacctctcgttccgattcgttttcgttggtcttctagaagcttcttccaccatgaactgaaaataaaaagtttccaaagagctcaacgcctcgcacaagaagatactggaagggcttcttaaattaccagagaataggggatgtgctgactgccaagctaaaggtccaagatgggctagtgtaaatcttggcatctttatatgcatgcagtgttcaggaatacatcgaagtttggggg

SEQ ID NO: 194624 - DNA, 277 bp, Glycine max
cttctgtgcatatagaatttgtgaagtgagagtccaacctttcattttcaattttcacagatgcctcgtggaacacttgaagttgttctgatcagcgccaaaggaattcatgacaatgattttctctccagcatagatccttatgtgattctcacatacagggcacaggagaaaaagagcactgtgcaagaagatgctggatccaagccaaattcgcctcagagctttcttttcactgtctctgaaccaagttctgaacttaatctgaagataatgg

SEQ ID NO: 194625 - DNA, 276 bp, Glycine max
tgccggtgttcagatgaagtcaaagtacaagactcaccaatatgttctaggggttgtgtctcttattctgttgattgcagggttatcgactgcattggtgatgctatttcggggtgagaaagggtatgaccactgccattggtgtcgctacttaacatgtgtccctacttctaaatgggaatgcagcaatgacagttaaataagaaaggggaactgattttcacttgcaatatcttttcttgtgtatagccatagagctcttagaaactggcttgt

SEQ ID NO: 194626 - DNA, 278 bp, Glycine max
gctttcttgagttgagttaacagcatggagagggaggaagatgttaaggttggagcacagaaattctcagagaggcaagcattggggacaggagctcagggtgacaaggactacaaggaggcaccaccagcacccttgtttgagccaggggagttaaagtcatggtctttttacagagctgggattgcagagtttgtggccacattcttgttcctctacatcactgtcttgactgtcatgggtgtcaacagggcacccaacaagtgctcctctgttgg

SEQ ID NO: 194627 - DNA, 265 bp, Glycine max
cactcttggtcttgcgagagacagccatgccagagacgaagatttttggcatgctgtttggccaaacactcccattccaagttcattgcgagatcttctaaagcctggccctgcaagtgttgaaatcgatgatcaccctatgcaaattgaagaaacacagtacccgaaaaccttcttctataaagaagaccttcatccaggcaaaacaatgaaagtacaattcaggaagcctccctttcaacaaccatggggtgttggtacatgg

SEQ ID NO: 194628 - DNA, 262 bp, Glycine max
cgtcactccttcctctgccttataattcttgtctcgctttgcgtggtagcattgaaagtgcaccagcacacgtgaagccaagccattatgctgcacccttcaataggagtgtttttccttctggttttctatttggcataggctctgcagcttaccagatagaaggagcagcagctatagatggcagaggaccaagtatatgggacacctatactaaacagcaaccagggaagatttgggatcatagtgatggaagtctagc

SEQ ID NO: 194629 - DNA, 265 bp, Glycine max
  unsure (1)..(265): unsure at all n locations
attaaattcacctgaaagggcctgccatcttgcaatccaagcctttgataccgntgtctcggagctacctaccctgaatgaggattcttacaaggacagtaccttgattatgcaactgttgagggataactttactttatggacttctgatatccccgaagagggtgaggacctaaaaatggaaagcgcagcagggttgatcaaggagaagatgagttaggccgctaacccatcattctgcacaatgtctaagatttgatgcatt

SEQ ID NO: 194630 - DNA, 276 bp, Glycine max
caacattctcacaagtcacagccaaacaccatttcattaattcttgcagaatattgcttagttttgttttatctgaatttggaaacagcttttgaatggctttttcaagagttgcactgctaatatgcacggtcgggtattttgtgcttgcctctgccggcaatttccaccaagattttgatatcacatggggagatggtcgggctaagatactcaacaatggagagcttctcactctgtcacttgacaaagcctctggctcgggtttccaatcca

SEQ ID NO: 194631 - DNA, 277 bp, Glycine max
cgcaggttcgtatcttctctgattcgatcctcccttcgtagatctcaatcgaaaccctcgatttccgcatccgcatcgagacacacatcatccaaccgtgcctctccgcacggttacttgctgaaccgcgtcgccgaatacgctaccgcggcggcggctgctaccgctcctccctctgctccgcctccgggcaagaaggaggttagcggcggcgggaagatcaccgatgagttcaccgggaagggctcgatcgggcaggtctgccaggtcatcggtg

SEQ ID NO: 194632 - DNA, 275 bp, Glycine max
ggcagccatggctggcttcagagctcaatggtcggtctctccctctcctccaactctttcttaggccaacgcctttctcccatcaccctcccctctcttcttccgggtaagtcaacagagaagcaatgtcctattgtaatgaggcttaaacgatgggaacggaaggagtgtaaaccaaacagccttcctatcttgcacaaaatgcatgttaaacttggagatacggtgcaagtcatatctggacgtgaaaggggtaaagttggggagattactaa

SEQ ID NO: 194633 - DNA, 274 bp, Glycine max
cctttcttcaatcgaaaaaaactgcaaccctaacgagattgagagaagatgtcaggctgggacgaaggagccgtctactacagcgaccaagcgctcgccggcgacgacggttcccgtgcccgcggtgaagccggcaccgattcgaaccactctctcatccagaaattcaaggaattcatccgaaacttcgagaccaccaacaatgtcttgccttacagggagagtctcctccataaccctaagttccttctcgtcgatctgggagatctcgaca

SEQ ID NO: 194634 - DNA, 277 bp, Glycine max
cggaagagttgtacttcaccccatcaagaatgtcccctcagaatttgagcatgtggaaaagggggatgcattgtatgcaatggaattagctttgtctttggagaagttagtgaatgagaaacttctgaatgtgcacagtgtggcagatcgcaacaatgaccctcaaatggccgacttcattgaaagcgagtttttgtctgaacaggttgaatcaattaagaaaatttcagagtatgtggctcagttgagaagggttggaaagggtcacggtgtttgg

SEQ ID NO: 194635 - DNA, 276 bp, Glycine max
gaaactttcgaacccaatgagggagataaaggtgcagaagctcgtcctcaatatctccgttggcgagagtggagatcgtctcaccagagccgctaaggttttggaacagcttagtggccaaacccctgtgttttccaaagcaaggtacacggttcgttcctttgggattagaagaaatgagaagattgcatgctatgtcactgtcagaggtgacaaggcgatgcaacttttggagagtggtttgaaggtgaaggaatatgaacttctcagaaggaa

SEQ ID NO: 194636 - DNA, 261 bp, Glycine max
gcaaatccgaagtaggatctctcttgttttttctctaggtttttcgcgatggcgtcgaagtgaattttgaaggagcttaaggatttgtagaaggatcctccaacatcttgcagtgccggtcctgttcattaagatatgtttcattggcaagctacaattatgggtcctccagacagtccctatgctggaggtgttttcctagtgattattcatttccctccagattatccctttaagccacccaaggttggattcaggacg

SEQ ID NO: 194637 - DNA, 254 bp, Glycine max
cttcacttcactaatagatcatggcagacgagacccagaacacagtatgagagctctgaggttgaggtccaggatcgtggtgtttttgactttctcggtaagaaaaaggatgaagaagacaagcctcatcctcaggaggaggtcatcgccaccgagtttcaaaaagtcactgtctcagaccaaggcgagaacaagcacagcctcttagtccagcttcaccgatctgacagcagctctagctcttcaagtgagga

SEQ ID NO: 194638 - DNA, 274 bp, Glycine max
acgatcccaccaccgataaactcatcatgtggggcccagccaacaacagcttcatcgtcctacgaccccctcgacttctctcactccctcctccctgctttcttcaagcacaacaacttctccagcttcgttcgacaactcaacacttatggtttcagaaaggtggatccggatcggtgggaattcgcaaatgagtggttcctgcgaggacagaagcacttgttgagaaacatcgcgcggaggaagcacggtggagctgggaggagcatttcaa

SEQ ID NO: 194639 - DNA, 275 bp, Glycine max
tagcttcttttcatatccaatcttcattccttgtgcttgggcatgctatggtgatcacattgctgaaccctaccaatgcaatcctctctccccatttctatgataaagtttgccctcaggcattgccagttataaagtcagtggttcaacgagcaattatccgtgagcgacgcatcggagcatctcttctgcgcttgcatttccatgattgtttcgtaaatgggtgtgatggatcaatattgctagatgagacccgaaactacactggcgagaag

SEQ ID NO: 194640 - DNA, 271 bp, Glycine max
cccgtttgccttgttgtttgcgaataaatggcaactaagaggagcgcgggaacgttgaaggagggtgatttgaaggggaagagggtattcgtgagggtcgatctgaacgtgcctttggatgacaaccttaacatcaccgatgacactagagtccgtgctgctgttcccaccatcaagtacttgactggttatggtgctaaagtgatcctttctagccattgggacgtccaaaaggtgtaacacctaaatacagtttgaagcctcttgtgcc

SEQ ID NO: 194641 - DNA, 271 bp, Glycine max
ggaagacatatcaagaagtctatgatgaagttctgcatatgagttctgctttacgagcatctggttccgaacctggcactaaaattggactttatggatctaattgccctgaatggattgtggcaatggaggtttgttctgctcaaagctttatttgtgtgcctctctatgacacccttggacctggtgctgtaaattttatcatagatcatgcagaagtagattttgtgttcgtccaagataagaaggttaaagagcttttaaatcctga

SEQ ID NO: 194642 - DNA, 273 bp, Glycine max
tgagttaaggcttggactgcctggaaacggaggcactgaagaagtgctcatcaggaagaggggtttctctgagactgaaactggtcatgaagatgagtctgccaccactgtggatttgatgcttaatctttcttctaaggaggccgcaaccactgctgctgctgctgcagatccaactgataagcacaagactttgcctaaggagaagacccttctgccagcagatcctgctaagcctccagccaagacgcaggtggtgggttggccacctgt

SEQ ID NO: 194643 - DNA, 252 bp, Glycine max
catccccaacttcctcacaaggttacaagcactaaagagttgtgccaccatgtcggacgatgaaagggaggagaaagagttggatctctcttctgccgaagttgtcaccaaatacaaaaccgctgctgagatcgttaacaaggccttgaagctagttatttcagaatgtaaaccaaaggcgaagattgtggatatttgtgagacaggggattcatacattagagagccaactggaaatgtgtacaagcatgt

SEQ ID NO: 194644 - DNA, 271 bp, Glycine max
gcacttcgttgcttggtgatgtccctttctgttctcttcactcttggtcttgcgagagaaagccatgccagagacgaagatttttggcatgctgtttggccacacactcccattccaagttcattgcgagatcttctaaagcctggccctgcaagtgttgaaatcgatgatcaccctatgcaaattgaagaaacacagtacccgaaaaccttcttctataaagaagaccttcatccaggcaaaacaatgaaagtacaattcagcaagcctc

SEQ ID NO: 194645 - DNA, 271 bp, Glycine max
cagtgtgatgaaaatgaaggtccttgttttcttcgttgctacaattttcgtagcatggcaatgccatgcgtcacgatatgttccctctccgaatgaacactggctatggtgcccgtactccggaggtgaaatgcgcaagttggaggcttgctgtggaagcacacaacatctttggctttgagaccattcctgaagagtgcgttgaagcaacaaaggaatacatccatggcgaacaatatagatcagactccaaaacagttaaccaacaagc

SEQ ID NO: 194646 - DNA, 275 bp, Glycine max
  unsure (1)..(275): unsure at all n locations
cttcaccatgtcacttgctgggaaaatcaccactgaaatcggggttcatgcaaccgctacaaagtggttcaacctcttcgcaacacaactccatcatgttcaaaacctaactgatagagtgcatggcaccaagctgcatcaaggtgaagactggcatcacaacgagacagtcaagcactggacttataccatagatggtaaggttacaacatgtctggagagtactgaatccattgatgaacagagcanaacaatcacctacaagctcttcagtg

SEQ ID NO: 194647 - DNA, 273 bp, Glycine max
cgaagtccactatgccgaagcaaattcacgagattaaggacttcctcctcactgctaggaggaaggatgcacgctctgtgaacatcaagcggagaaggatgtggtgaagttcaaggtccgttgctccaagtacctttacaccctctgtgtgtttgcttctgagaaggctgataagttgaagcaatcacttcctccaggtttaagcgtgcaggatgtgtgattcttactgctgtatgaagatcaggtttttctctggattttggggattcatag

SEQ ID NO: 194648 - DNA, 276 bp, Glycine max
ggaagaagctactgggttggcttttaggtttatcattggtagaacaagtgacagagcaaagatgtcagcgcttcagaaggaagtagcagaatatgatgatttcattttgttggatatccaagaggagtacagtaagctcccatacaaaacgttagctttcttcaaagctgcttatgcactttttgatgctgaattttatgtcaaagctgatgacgacatatatttaaggccagatcgtctatcattactactggccaaagagcgatctcatcctca

SEQ ID NO: 194649 - DNA, 278 bp, Glycine max
gctgcaatggcttcaagtcaggaggaggtgacccttttaggagctactggaagcccatttgtatgcacggttcatattgccctcaagttgaagggagttcaatacaaatatgtcgaagaaaatttgaggaacaagagtgaactgcttctcaaatccaacccagtgtcacaagaagaattccaagtgtttattacacaatgcagaagtccatcagcagagtctcttgtggatggtcgaatacattgatgagacatggaagaacaatcccatcttgcctt

SEQ ID NO: 194650 - DNA, 266 bp, Glycine max
gcagtgggaggaggctcgggactctgaccgcgtgcctgttgaagaatgagccggcgactcataggcagtggcttggttaagggaaaccaccggagccgtagcgaaagcgagtcttcacagggcaattgtcactgcttatggacccgaacctgggtgatctatccatgaccaggatgaagcttgggtgaaactaagtggaggtccgaaccgactgatgttgaagaatcagcggatgagttgtggttaggggtgaaatgccactcgaa

SEQ ID NO: 194651 - DNA, 268 bp, Glycine max
ctctgccttccatcaccctcgccatttcccttcccaagatagtagaagatggcagacgctgaggatattcaacctcttgtttgtgacaatggaacaggaatggttaaggctggttttgctggagatgatgccccacgtgctgtgtttcccagcattgtaggtcgtcctcgtcacactggtgtgatggttggcatgggccaaaaagatgcatatgttggtgatgaggcacagtctaagaggggtattttgactctcaagtaccccattg

SEQ ID NO: 194652 - DNA, 269 bp, Glycine max
cggctcgaggctcgggactcatctgggcttctctccccattcaacttctccagaagagaaacgggggagacagatttggtattcaaagtgcaatactgtggaatatgccactcagatctacatatgttaaagaacgagtggggcaacacaacctatcctctggttcctgggcacgagattgctggtgtggtaacagaagttggaagcaaggtgcaaaagttcaaagttggagaccgggtaggtgtggggtgcatgattggatcctgtcg

SEQ ID NO: 194653 - DNA, 268 bp, Glycine max
ttccacatctcatcagggcagtgcgcagagcaggccaaattgtcacttgggtcagtgatcctatgcatggaaacaccattaaggctccctgtggtcttaaaactcgccccttcgattccatcagggccgaagtgagagcattcttcgacgtacacgagcaagaaggaagccacccaggaggggttcatctagagatgacgggtcagaatgtgaccgagtgcattggtgggtcaaggacggtcacatttgatgacttgagctcagttac

SEQ ID NO: 194654 - DNA, 268 bp, Glycine max
acactgaggagggagatagtggaaggcacactcaaatgactcaaccagccatggctaccttctccaaggaacgcgagaactttgtctatgttgccaagttagctgaacaagctgaacgctatgatgaaatggtggatgccatgaagaaggtggcgaactggacgttgaattgagtgtggaagagaggcacctgttctctgttgggtacaagaatgtggtggggtcacggagagcttcatggaggatcttgtcatcgatagagcagaaa

SEQ ID NO: 194655 - DNA, 227 bp, Glycine max
cactcctgtagttaagcctatccgggagccacgggttgctgtacaaactctgcgtgaggttgatatcttcgatgatggctaccgctggcgcaagtatgggcagaaggtggtgagaggcaatcctaaccctaggagttattacaaatgcacgaacactggttgccctgttagaaaacatgtagagagatctcatgatccaaaagctgtgattaccaatatgggggagc

SEQ ID NO: 194656 - DNA, 265 bp, Glycine max
cgcaccttcatatcctgattggtcaagctcgatgcaggcttactatgctcctggagccactccacctgcatgttttgcctcaaatattgcttctccaactccccattcttatatgtggggaagccagcaccctctaattccaccatatagtactcccggtccatatccagctagatatcctcctgggaatgtctatgctcatcctagcatggcaatgacactgagcaccacacagaatggtacagagtttgtaggaaagggttct

SEQ ID NO: 194657 - DNA, 256 bp, Glycine max
attcacacatccaccgttcagttaaaaaccacccaaatccgatggcggcgtcgcggcgtctccgggacctccaatcccaaccggcgaacaagatctgcgtggactgttcccagaagaacccgcaatgggcctccgtatcgtacggcgtcttcatgtgcctagagtgctcaggcaagcaccgcggcctgggcgtgcacatctccttcgtgcgatccgtgacgatggattcgtggtccgaaatccagatcaagaaaat

SEQ ID NO: 194658 - DNA, 274 bp, Glycine max
atccgcctcccttcccttcaactccacggagacagatccgaggagtttgggcaaccctaattcattcctctttgcttcttctatctctattcctctaacaccagtgatggcaggtttggctacagaaggatcgcagtttgatgctcggcaatatgattctaagatgaatgaattgctttccgccgatggacaagaatttttcacttcatatgacgaagtctatgatagttttgatgcaatgggccttcaagaaaatcttctgagaggcatatat

SEQ ID NO: 194659 - DNA, 271 bp, Glycine max
tctgtctctctctacgctttctcgttcgagatccctcaagggatccactaactgaaggagaaatggggttgacattcaccaagcttttcagccggcttttcgccaagaaggaaatgcgaattctgatggtgggtctcgatgcagctggtaagaccaccatcctgtacaagctcaaacttggagagatcgttaccacaattcccaccattgggttcaatgtggagactgtggaatacaagaacattagtttcactgtctgggatgttggtgg

SEQ ID NO: 194660 - DNA, 272 bp, Glycine max
aaggcccttcgtgaagccatgtgcttcatgatggatcctacatcagggaaaaaaatatgctatgtacagtttcctcaaagatttgatgggattgatcgtcatgatagatactcgaatcgcaatgttgtattctttgatatcaatatgaaaggtttagatggcatccaaggaccaatatatgtgggaactgggtgtgtcttcaggaggcaggcattttatggatgtgatgcccctacttcgaagaaagcaccaaggaagacatgtaactgttg

SEQ ID NO: 194661 - DNA, 272 bp, Glycine max
  unsure (1)..(272): unsure at all n locations
caaatatggctgacttgttggaatggtcaaagcaagataagaaacgaatgcttcatgtcgtctaccgtgttggtgaccttgatcgcaccatcaaattttacacagaatgtttaggaatgaagcttttgaggcaaagagatatcccagaggagaaatatgctaatgcttttcttggatttggccctgaagaatcccattttgttgttgaattaacatctaattatggggttacctcgtatgacattggcgatggctttggacatnttgcaatt

SEQ ID NO: 194662 - DNA, 273 bp, Glycine max
cttgatcggtctcttaaacttcctaacattcctgctgtcgattccgatcctaggaggcgggatatggctgagcagcagggcgaacaacaccgactgcctcaagttcctgcagtggccgctcatcatcatcggcgtcagcatcatggtcgtgtccctggcggggttcgccggcgcgtgttaccgcaacaccttcctcatgcggctctacctcgtcgtcatgttcctggtcattgccgttctgatcgggttcatcatattcgcctacgttgtcac

SEQ ID NO: 194663 - DNA, 291 bp, Glycine max
ttcggctcgagatcagcatccacacaagtcacgccgggctccaggtaccgtaactcctgctgggaactctactgcctcgaacatggcatccagcccgacggcatgatgccttctgactccaccttcggtgtagcccacgacgccttcaacaccttcttcagcgaaaccggatctggcaagcacgtcccccgtgctgtcttcgtcgacctcgaacccaccgtcatcgacgaggtccgctgcggcacctaccgtcaactcttccaccccgaacaactcatctccggcaaggaa

SEQ ID NO: 194664 - DNA, 273 bp, Glycine max
ggtgggggcattttcttttcagccaagaagggattcggtgttgatgagcaatattgatctgttgctgcagtaggggaccgagtaagaatgccaaaccagctatggtttgcactgccaatgatttacaaggatggaaagatttcccaaagggacttagagttcttctgcttgaaggagatagtagttctgctgctgagataagagaacaacttgaggccatggactataaggtttccactttctacaaaacccagaagccttgtcagcactctc

SEQ ID NO: 194665 - DNA, 270 bp, Glycine max
agctaccctgaggcttctcttctcttctcttctctgtcgtgagtcaccatggtgagggttagtgtgctgaacgatgctctgaagagcatgtacaatgctgagaaaaggggaaagcgccaagtcatgattaggccatcctccaaagtcattatcaaattccttttggtgatgcaaaagcacggatacatcggagagtttgagtatgttgatgaccacagggctggtaaaatcgtggttgaattgaacggtagactgaacaagtgtggggtt

SEQ ID NO: 194666 - DNA, 269 bp, Glycine max
ctcgagcgctctgatttgatctttgtctcttctctttctctcgtttgagctttttcagtactccaccaaggttttgtcagaaaagcttgaatttttcgcctaccctttacaatgatctcttcgttgagacagcctgttgtagggatcagtggttctgatcttcttttgaggcaaagacatgcaactccaattaaggcaaggtcgtttttaccctctttgtcaagagaaaagggtcaaggatctcttgtttcagttcaaaagccactcca

SEQ ID NO: 194667 - DNA, 267 bp, Glycine max
cttcgctccgtgccatgtcttcctctctcgctcttccttccacacccttcttcgcacatggaacaagaatcttcgctctcaagcactctctccctcgctctagggtttccatgagcgtctccgctggatctcaggcttccgttcaccaggctttgttcgccgattacaaggcctccacttcattcctcttcccgggccagggtgctcaagctgttggaatggggaaagaagctcaaaatgtgcctgctgctgcggttttgttcaaca

SEQ ID NO: 194668 - DNA, 269 bp, Glycine max
cctcgagccgaatcggctcgagcggctcgagaaagggagtagtgacccacgtgctcctagacaagttcaaggacgacgtcactccagagcggattgaagagctcatcaaggactatgccaatctggtcaatctcatcccacccatgaagtcattccattggggcaaggatgtaagtgctgaaaacctgcatcaaggcttcactcatgtctttgaatcaacctttgagagtccagaaggcgttgcagagtatgtagctcatcctgcccat

SEQ ID NO: 194669 - DNA, 268 bp, Glycine max
gaataacctaggggcaacccggtctattcggttttcttctgatggtcaatatatggtggttgctgagcctgcagattttgtgcatgtttatagcacaaaggcagactacagaaaacgtcaagaaattgatttctttggggaaatttctggggtttctctgagccctgatgatgagtgtatatatattggaatctgggaccggacttatgcaagcttgcttcagtatcatagggaagcaccaatataaatatcttgatgcatactgatg

SEQ ID NO: 194670 - DNA, 133 bp, Glycine max
cgacatggacaatgaattggcagcagccgagtacatcgatgatatctacaaattttacaaagagactgaagaagatggttgtgtgcatgactacatgggttcgcagccagatattaatgccaagatgaggtca

SEQ ID NO: 194671 - DNA, 272 bp, Glycine max
gcatctccaaggggaagaagggtggcaagaagaaggcagctgatccctttgccaagaaggattggtatgacattaaggctccttctgtttttcaagtgaaaaatgttggcaaaaccctcgtctctcgtactcagggtaccaagattgcttctgaaggactcaagcatagagtgtttgaggtctccttggctgatcttcaaggggatgaggatcatgcattcaagaagattaggttgagagctgaagatgtgcaagggaagaatgttctgaca

SEQ ID NO: 194672 - DNA, 269 bp, Glycine max
gtgaatatgtcatgtttctcaagccaaacttcttcagaaaattattattcaaggattcctgttgttgatgagggttctacctcagcaaagaaatcaggtggctatatgccatcacttcttttagctccaagaatggatagcgctgaaagttcagtgcagacacaagaatttattgttggaagtaaacctcaaccgtgcccagaaccatccaatggtgtagattactcacttggcactgtatctgggccccaggatacagggataactcc

SEQ ID NO: 194673 - DNA, 267 bp, Glycine max
aagccttcctctctgcagagtgcagagctttctctccccgttgcttcattcattctcaacaacaaaccaatctttcttagaaaatgagggggggcttgtggcaacttgggcaatcgatcactcgccgtcttgcccatggagataagaaggctgttgctcgtcgatgttttgcctcagaagctgagctgaaaaagacagtgtttcatgacttccatgttgctcatggtgggaagatggttccatttgctgggtggagcatgccaatcc

SEQ ID NO: 194674 - DNA, 249 bp, Glycine max
ggctcgaggtttgttctcactaactattaactcatcatgtcgtcgagcccagttggtcaagtcatcaaatgcaaagctgcggtttcatgggaggcagggaagccacttgtgattgaagaagtagaggtggcaccaccacaagctggtgaagtgcgtttgaagatcctctacacctacctttgccacactgatgtttacttctgggaagccaagggccaaactccattgtttcctcgtatatttggtcat

SEQ ID NO: 194675 - DNA, 266 bp, Glycine max
ccaaggaccacatcaagggtcttgttgtcgactttttctcggcaggaacagactccacagcggtggcaacagagtgggcattggcagaactcatcaacaatcctaaggtgttggaaaaggctcgtgaggaggtctacagtgttgtgggaaaggacagacttgtggacgaagttgacactcaaaaccttccttacattagagcaatcgtgaaggagacattccgcatgcacccgccactcccagtggtcaaaagaaagtgcacagaa

SEQ ID NO: 194676 - DNA, 267 bp, Glycine max
gttcgtgtgtgtcaccggtgctgccggttatattgcttcatggattgtcaagttcctacttgaacgtggttacactgtcagggccactgttcgaaacccaaatgatcacacgaaggtagaacatttgctaaaacttgaaggtgcaaaggagagactgcacctttttaaggcagatcttttgggtgaaaattcttttgactccattgttgagggctgtgatggcgtctttcatactgcttctccttttattatcaacgtcaaagaccc

SEQ ID NO: 194677 - DNA, 264 bp, Glycine max
ctttctctatctctatcggtcatgggtgcttttgcttttgatgaggaaaactcctccaccgtggctccggcaacactctacaaagctctgacaaaagatgctgacactatcatcccaaagattattggggccatccaaactattgaaatcgttgaaggaaatggaggacccggaaccgtcaagaagataacagctagtgaaggtgaccaaccagtttcgtgctgcaaaaagtggatgcaattgacgaggctaacttggtatacg

SEQ ID NO: 194678 - DNA, 269 bp, Glycine max
ggcttctgtgcctcaaccaaaaatctcccttctaaccttattcttcttctcgtccttcaccatcattgcgcatgcaattgttcctcaaaacgaaaccttcaaatttgagaactcaggtgaacttggaccctacatcgttgagtacggtgcagattacagaatgataagcatcttcaactctccattccaagttggtttctacaacaccaccccaaatgccttcactctagctttgcgtgtagggctccaacgctcggagcagctatttc

SEQ ID NO: 194679 - DNA, 258 bp, Glycine max
cttgcttcttgcttctattacttgcttctttcttcaccatgtcacttgctgggaaaatcaccactgaaattggggttcatgcaaccgctgcaaagtggttcaacctctttgcaacacaacttcatcatgttcaaaaccttactgatagagtacatggaaccaagctgcatcaaggtgaagactggcatcacaacgagacagtcaaacactggacttataccatagatggtaaggctacaacatgtctggagagtattg

SEQ ID NO: 194680 - DNA, 279 bp, Glycine max
ttcggctcgatggttgatcacagtggtgtggtgcgcggtggcggtgctactgtgcgccgcggcgggcgcgtcgtgggtggaggaggcggcgaacccgatacgaatggtggcgggggtggacgcggaggtggttcgggtgatagggcagtgccggcgcgcgctgaagtttgctaggttcatgagcaggttcgggaagagttaccgaagcgaggaagagatgagggagaggtacgagatattctcgcaaaacctcaggttcatccgctcccacaacaagaa

SEQ ID NO: 194681 - DNA, 264 bp, Glycine max
gtttcacccttggcattttccattctctttttggccttcaccatagaaccctttattggcattgctgcagcagcaccagaagcagtgcttgacacctcaggccagaagctgagaacaggtgtcaagtactacattctgccagtgttcagaggcaaaggtggaggcctaacagtttcaagcagtggcaacaacacatgcccccgctttgtggtgcaagagaagcttgaagtctcaaagggcaccccagttaccttcacaccctac

SEQ ID NO: 194682 - DNA, 261 bp, Glycine max
gcagcctccaattcgtgccactctcttcaaaatggccgttaccttctcaaatctccacacagaatcaaacacaaaatccctcgacgacttcctctctgggaaggtctacgtttctggggatcagttcacaaaggacgacatcaaagtgtatggtgctgttttggagaagccaggtgactcttttcccaatgctgccaagtggtacgaggttgtctcatctcagcttgctgcaagcttccccggcaatgctcaaggggtgag

SEQ ID NO: 194683 - DNA, 262 bp, Glycine max
gaagccactttggtttctttgcctttctcaatacattttcttttccatggaggtaggaagtgttcttaactttcttcaggacaagaccattttaattgttggagccactggctttctagccaaaatttttctggagaaaatattgagggttcaaccaaatgttaagaagctttttcttcttttaagagcttcggatgccaaatcagctaattatcgattgcaaaatgagatcatagcgaaggacttatttattgtgctaaag

SEQ ID NO: 194684 - DNA, 264 bp, Glycine max
gaaaacccaaagtgcttctctcctctgtctttttctctctcttgctatccttttggctagtggcactgctgcaagtgcaactccaagaagcgcagtgccaagccaccatgtttcaacattcaacagaagcctttttccttccacttttctctttggatttggttcttctgcttaccaggcagaaggagcagcaagtgtagatgggagaggaccaagcatatggacacctacactagacagcatactgaaaagatttgggatcat

SEQ ID NO: 194685 - DNA, 274 bp, Glycine max
ctcgagagtcgcaaagatgtttcctttcgggcacaagggtcccaagataaacgggactatggtggttatgccgaacaatgtgttggatatcaacagcatcaccagtgttggagggatcgttgaccaacgcttaggcttcataggcagtgcagtcgatgcacttacttttgcagccaccaaaatctccatccagttgattagtgctaccaaggctgatggtgggaaaggaaaaattggaaagagtacaaatttaagaggaaagataacattaccc

SEQ ID NO: 194686 - DNA, 260 bp, Glycine max
atccctagctctgtcgttccgtcgttgacgatggcgtttcgggtgcgaaccctgacctccgctctctctttcttctctctctcttgtccatcgcttccgccaatgtcttcttcgaagagcgtttcgatgacgggtgggaaaatcgatgggttaaatcagattggaaaaaagatgagaacgtggctggggagtggaaccacacctctggtcaatggaatggagacgctaatgacaaaggtattcaaaccagtgaggattac

SEQ ID NO: 194687 - DNA, 260 bp, Glycine max
ctcgagccgcgccggtggtggtgcaggagttcgtgaaccacggcggggtgatcttcaaggtacacgtcgtcggcgagcgcgtgaggtgcgtgaagcggaagtcactgccggacgtccgagaagacgagctggtgagggtttcggaggatttgcggaggttttcgcaggtgtcgaatttggccacagatgagagaattgacgataggtattataagatgatgcatttggatgacaccgaaatgcctcccctgagcttcatt

SEQ ID NO: 194688 - DNA, 260 bp, Glycine max
aaaaccaaaagcaaacaacaatggcgaaccctgaaggcagtagcagaggctctagatggtcccttaagggaaccactgctctcgttactggaggaacgcgtggaattgggcacgctgtggtggaggaactagcggagtttggtgccacagtgtacacttgttcgaggaatgaagaagagctgaatgcatgcttgaaggagtggaaagagaagggattttcggtttctgggttggtttgtgatgcgtcttctccaccccat

SEQ ID NO: 194689 - DNA, 261 bp, Glycine max
tttctcactctctctcatgttcactcaacaacaacgacgcactcactgacatcaacactagtttcaggtgctatctcatccaccaaatgcagcaaatacactccatgcccggagggaggtttttctccggctccggatccgccgaccggaggctccgaccccaccatcagaaccagcaggccttaaagtgcccccgctgcgactctctcaacaccaagttctgctactacaacaactacaacctctcccagccccgccatt

SEQ ID NO: 194690 - DNA, 263 bp, Glycine max
cacatagctagttgtttaaagtgagagacaaagaaagaagaaaatggcaaactttccagttgttgacatggggaaacttaacaccgaagagagagcagcagccatggagattataaaagatgcctgtgagaactggggtttctttgagttggtgaaccatgggatatccattgagttgatggacactgtggagaggctcacaaaagagcactacaagaagactatggagcaaaggttcaaagaaatggtggccagcaaagggc

SEQ ID NO: 194691 - DNA, 235 bp, Glycine max
aacaatttctctctgtttccttcttcaccgcatcaatgccaatggacggcgttctcctcggcatgtgcaaccctctcctcgacatctctgccgtcgtcgacgacgctttcttgcaaaaatacggtatcaagttgaacgatgcgattctcgctgaggataagcacaaacctatgtatgaagaattggctaacaatcctaatgtggagtacattcctggaggcgctactcagaattc

SEQ ID NO: 194692 - DNA, 265 bp, Glycine max
ggacattgctgcaccgcgaatcaacgcgtggaacagcgaccacctcccgatatatgagcctggccttgatgatgtggtgaagcagtgcagggggaagaatctcttcttcagcactgatgtagagaagcatgttgccgaggctgacattgtctttgcctcggtgaacaccccaacgaagactcagggtcttggagccggcaaggcagctgatctcacatattgggagagtgctgccaggatgattgctgatgtatcgaaatcagac

SEQ ID NO: 194693 - DNA, 259 bp, Glycine max
cgccactcagcacttcgctccctctgtgcttcaccaaccatggccgaaatcgaagctaccgttccagatccctctcaaatcgacgtcaaacttttcaaccgctggagcttcgacgacgttgaggttactgatatgtctctggctgattacattggagtgtccccgtcaaagcatgctacatatgttcctcacactgctggtaggtactcagtgaagaggttcaggagcgcgcagtgccccattgttgagaaactcacca

SEQ ID NO: 194694 - DNA, 127 bp, Glycine max
ctgaaattgctcaggacttcaagactgatctgcgtttccagagccacgccgtgcttgcattgcaagaagctgctgaggcataccttgttgggctctttgaggacactaacctgtgtgccattcacgc

SEQ ID NO: 194695 - DNA, 265 bp, Glycine max
gtaggagggtttcaaaagatggagaacatgcagagcttctggcaattgggcgatgaactccgtggacactcaaaagcatcggaggatcacaaatggttaatggttgcttcgaaattggcggaacagacaagattgaagggggagcgtgtgaacaaccttgatctttcaaagggccccattgaaacaaggtcaagggataaatttgggttccaggaagagaacaaatttgattctcttaacttaagcatgttgaacctggactcta

SEQ ID NO: 194696 - DNA, 278 bp, Glycine max
cttgacaagtgtggcagtccacgacaggggcacagctcaagtcactcatcatgaaccaccctggtcagattggaaatggctatgcccctgtcctcgactgccacacttctcacattgctgtccagtttgctgaactcatgaccaagattgacaggcgatccggcaaagagcttgagaagcagcccaagtttttgaagaacggtgatgctggttttgttaagatgattccaaccaaacccatggttgttgaaactttctccgagtatcctccacttggt

SEQ ID NO: 194697 - DNA, 179 bp, Glycine max
aaaatcaaagagcataatgtcagggatcattcacaagcttggggagacccttcatgtgggagggcacaagaaggaggaggagcataagggtgagcaccatgctggagaatacaaaggggagcaccatggtgaacacagtagtgagtacaaaggagagcatcatggtgaacacaaacctg

SEQ ID NO: 194698 - DNA, 278 bp, Glycine max
ggaagctactagaacactagtttgttgagcactgcgatgaggaagtggacggttgcttccgctctccttcttctctctctcctctttctctttgcagatcaaggtcgaaagtttcaggcgaatgccgagggagattccgacgagcttgtagatcctccgaacgtggaggacaagatcggtgctgtgcctcatggcctttccaccgattcagatgtcgtaaggagtgagtcggagtcgatctcgaagagatcatctccggagcaatgcggagaagtttg

SEQ ID NO: 194699 - DNA, 258 bp, Glycine max
cgatgctggtcacgggaagccgtgtacatgtctatcgttttaaccaacaattagatctccttcgcattggccaagaccttgagttgtttgtcaagactatgccaggtttaagtgcttacgctgagaatccacaagatgctgcagaatctcttattccacttttggaggaagcagaagctgctgttcctcaggagtttcaccccaggacgccagttaaacttggagcaactgcaggtttaaggcaattggaaggggtgc

SEQ ID NO: 194700 - DNA, 278 bp, Glycine max
cgttcacttcccatgcttctgtcaatgatttctgtgtagcagacctaaaaggtccagatagcccttcaggctatcagtgcaagccacctaacacagtcacagtggatgactttgtgttctctggctttgtagctggaaacaccacaaacactttcaatgctgcattaacctccgcatttgttactgattttccaggtgtgaatggtcttggtgtatctgtggcacggttagacatagccaaaggtggatcaatcccaatgcacacacaccctgctgcc

SEQ ID NO: 194701 - DNA, 273 bp, Glycine max
ggcgtatctatcacgcttctccaagagagccctaagaagcgcacatgcgctagcaaggccgcacgtgcagactcatctcgtgacagcagaacgcgcttttccgacggatgcggccgacatcgattaccccgtcggcggatcgcgtgaagtgggactaccgtgggcagaggaagataatcccgttagggcagttggtccccaaagtttccgtggatgctttacgtggcacccaacgtggtcctcgccggccaagtcaccgtctgggacggagcc

SEQ ID NO: 194702 - DNA, 266 bp, Glycine max
caaccaccggccatactcactgttgttctcaagggattcgattctctctgcactcacttctagggttttctctgcgctataagcaatcatggcggatgaaacaccaaatgagatgaaggaggaggttccagaaattgttccttttgatcctaccaagaagaagaagaagaagaaaattacaattgtagatcctgctgatgaacctgtggagaaattggctgagaagacagaaaacctctcagtttccgaggggtgtagatgcaatt

SEQ ID NO: 194703 - DNA, 183 bp, Glycine max
caaacttctgcttcaagacctttggagacagagtcaaatattgggtcactttgaatgaacccttatcatttagtctcaatggctacaatggtggcacctttgcaccaggtagatgttctaaatacgttgccaattgtagtgctggcgattcatccactgaaccctatatcgtgggacactact

SEQ ID NO: 194704 - DNA, 273 bp, Glycine max
gcaatggtgtacgtcaaggctcagaaatcaaaagcctacttcaagagatatcaagtcaagttcaagagaagaagagagggaaaaaccgattaccgtgccaggattcggttgattaatcaggacaagaacaaatataacactccgaaataccgatttgtggttcgctttagcaacaaggacattgttgcacaaataattctgctaacattgccggcgatttagttcttgctacagcatattcacatgagctgacacgatatggtcttgaagtag

SEQ ID NO: 194705 - DNA, 274 bp, Glycine max
attccggtcactcctctcgccggcgatcccttattcctccgtcctccgtcgagtcctttccgattcgaatcgttcccagccttgtgccaccatgaatcccgaatacgattatttgttcaagcttttgctgattggagattctggtgtaggcaagtcatgtcttctcctcgaggtttgctgatgatccatacctgagagatctatcagtaccaattgagttgagttttaaaattcggcactgtggagcaggatgggaagactattaaacttcaaa

SEQ ID NO: 194706 - DNA, 260 bp, Glycine max
gtcatatgcttgtctcaaagattaagccttcatgtgcaagtatgaactaattcagactgtgaaactgcgaatggctcattagatcagttatagtttgtttgatggtatctactattcggataaccgtagtaattctagagctaatacgtgcaacaaaccccgacttctggaagggatgcatttattagataaaaggtcaacacaggctctgcctgttgctttggatggtccaggtaactcccggatcgcacggcctttgt

SEQ ID NO: 194707 - DNA, 123 bp, Glycine max
aacgaatcgaaaaaagaaagatcatggagatggcaaacttggctcgacggaagggttacgccgtcgttttgtcgtcgaggtcgtcgctttgtctgacaaggtggagggggttcacgtccggat

SEQ ID NO: 194708 - DNA, 268 bp, Glycine max
ggacacataaacccggcggtgacattcgggctgttcctaggacgcaaggtttcgttgataagggcgttgttgtacatggtagcacagtgtgccggtgctatctgtggcactggattggccaaggggttccaaaaatcatactacaacaggtatggaggtggtgccaactctgttgctgatggctacaacaatggtactgctttgggtgctgagattattggtaccttcgtacttgtctacactgtcttctctgccactgaccctaaga

SEQ ID NO: 194709 - DNA, 263 bp, Glycine max
gttgtcccaaagaaagagcatctttctcctttctttcatcaccgttggaagagactgagatgggttcaaaaaccaagacttttacctttgaggaggtggctaagcacaatcacaggaaggattgctggattatagtcaaagggaaggtgtatgatgtcaccccatttttggatgatcatccaggaggtgatgaagttttagtgactgcaacagagaaggatgccaccactgattttgaagatattgggcacagtgattcagca

SEQ ID NO: 194710 - DNA, 270 bp, Glycine max
agggtttaacctttctggctgtgttaatatgcgtttcagcactgtcactgagtccttctgttgcgggggaagggcaaaataatggccttgttatgaacttctacaaggaatcatgccctcaggctgaagacatcatcacagaacaagtcaagcttctctacaagcggccacaagaacactgctttctcctggctcaggaacatcttccatgactgtgctgttcagagttgtgatgcttcactgttgctggactccacaagaaggagcttg

SEQ ID NO: 194711 - DNA, 270 bp, Glycine max
tctgcactcacttctagggttttctctgcgctataagcaatcatggcggatgaaacaccaaatgagatgaaggaggaggttccagaaattgttccttttgatcctaccaagaagaagaagaagaagaaaattacaattgtagatcctgctgatgaacctgtggagaaattggctgagaagacagaaaacctctcagtttccgagggggttgagactgcatttactggtttgaaaaagaagaagaagaagcctgttgaaatgggtaacttg

SEQ ID NO: 194712 - DNA, 156 bp, Glycine max
gcaattcaacaagaccccgaactccaagcttggtggaaagaacttgtccaagtgggtcatggtgatttgaaagataagccatggtggcaaaagatgcaaacttgtgaagagttgattgaagcctcggccaccctcatatggatcgcttcagccctt

SEQ ID NO: 194713 - DNA, 121 bp, Glycine max
caaaaatggtgaagttctgaaaccaaacaaagccgtcatcgtacattcagggacgctacgccggcaaaaaagccgtgatagtgcgaaccttcgatgaaggcacgcgcgagacccctacggg

SEQ ID NO: 194714 - DNA, 267 bp, Glycine max
ggctttttcctcactgtatctcctgattccatacaattagttgctcaacatgcagctgcaaataacaagttcttcatgatgaacctttctgccccatttatctgtgagttcttcaaggatgcactgaataaagttctgccatatatggactacgtttttggtaatgagactgaagcaagaacattttctaaagctcaaggctgggagactgtaatgttgagggaatagccttgaaactcagctgcaaggatcggaaacacataaaag

SEQ ID NO: 194715 - DNA, 269 bp, Glycine max
cacagtgcttgtttagactagtgatcttccatggctgtgaaggatagaatcctggtcttgggacccacaggagccattggaaggcacatagtttgggcaagtttaaaggcagggaatcccacttttatattggttagggacacccctgcctctgttaacaagccaaggcttgtcactgctgctaatcctgaaaccagggaagaactcattcagagcttccaaaattctggagttactctaatccagggagatctgaatgatcatgaaag

SEQ ID NO: 194716 - DNA, 260 bp, Glycine max
ccctagttcgcttgcagtcacacaagaggccaatcctattcatagctcgagatgggtgaagaagtgaaggtagttgttccagaatcagtgttgaagaagcgcaagagggaggaggaatgggcgttggccaagaagcaagaactcgatgctgccaagaagaagagagccgagagccgcaaactcatctaaacagaggttagcactacgctaaggggttacgatcaccaggagaaggaattgattcggttgaaaccgaggcc

SEQ ID NO: 194717 - DNA, 267 bp, Glycine max
ggcacttcgttgcttggtgatctccctttctgttctcttcactcttggtcttgcgagagaaagccatgccagagacgaagatttttggcatgctgtttggccaaacactcccattccaagttcattgcgagatcttctaaagcctggccctgcaagtgttgaaatcgatgatcaccctatgcaaattgaagaaacacagtacccgaaaaccttcttctataaagaagaccttcatccaggcaaaacaatgaaagtacaattcagcaa

SEQ ID NO: 194718 - DNA, 242 bp, Glycine max
cacaggtgtcacattcaatcggcacagactcgagaattggaccaaagttcctgaatgccagtgttggttttggaggatcatgcttccagaaggacatattgaacttggtctatatctgtgagtgcaatggccttcctgaggtggccaattactggaaacaggtcatcaagggtaattgcttccaaaaaatgccggtttgtggaaccgcgtggtgtcgtcaatgttccacacagtctcaggga

SEQ ID NO: 194719 - DNA, 219 bp, Glycine max
gcagaagcagtttccggtgcatctcatcgtcttccaaaatgaacgacgcagatgtctcgaagcaaatccagcagatggtgcgtttcatccgccaggaagctgaggagaaagccaacgagatctctgtatctgccgaaaaggaattcaatatcgagaagctgcagttggttgaagccgaaaagaagaagatcaggcaagaatacgaacgcaaagagcgcc

SEQ ID NO: 194720 - DNA, 268 bp, Glycine max
caaacattcaattcatggcagctgcaaagcttcaagctttatggaatcacccagctgggcctaaaaccattcacttctgggcacctacctttaagtggggcatcagcattgccaacattgctgatttctcaaaaccacccgagaaactttcctatcctcagcaaatagcggtcacagctactggaattatctggtctcgttacagcactgtaatcaccccaaaaaattggaacctgtttagtgtaaacattgcaatggcagggacagg

SEQ ID NO: 194721 - DNA, 271 bp, Glycine max
gttcttatcagtgacagagtaaaggaggcataccgatgacgatggcgatgacggcgtcgcagttgcggtgcggttgggggtggaggccaacgccgaatcagcagcagcaacgacgtcgtatggttccggtggtgtgttccatcgctatagagaacgcgaagaacaaagagagagcgaaactgaagaagctcttcgatgaagcgtacgagaggtgccgcactgctcccaccgaaagcgtttccttcactctccaacaattcaccgacgctct

SEQ ID NO: 194722 - DNA, 280 bp, Glycine max
  unsure (1)..(280): unsure at all n locations
gattaatcantcatagatanatccattattcatagttaaacataataactgttgtgttacatctcgtgaattgttacaactgcttaaccattttctattgcagatngcttcgtcggttctctccgcagcttcgcactctgtctcaccctcatgttctctgtccaccacgcacaagggaaagcccatgattagagacaacactttgggattccacagaggagccaatttcttntctagttcaaggtctagagtcgggntcncangggtgntgcaagttaac

SEQ ID NO: 194723 - DNA, 277 bp, Glycine max
agctatagtaagctacacttatttgaggttggagaaatatggctaaagatgttgaggttcaagagcaaggaggagagtactctgcaaaagactaccatgaccctcctccagcacccttgttcgacccagaggagctcacacagtggtccttttatagagccctaatcgctgagttcatagcaacccttctcttcctttatgtcaccgtgctcaccattattggctacaaaaggcagactgatgccacgctaggtggcaccgagtgtgatggggttgg

SEQ ID NO: 194724 - DNA, 128 bp, Glycine max
ggagaaagatggaggggaaggagcaggatgtgtcgttgggaccgaacaagttccccgagagacagccgattgcgacggcggcgcagagccaagacgacggcaaggactaccaggagccggcgccggcg

SEQ ID NO: 194725 - DNA, 243 bp, Glycine max
gtgcttacaagtatgtttcggagctatggcgcaagatagagtctgatgttctgagattcttacatccagtgacgtcatgggagtgccgccagcaaccttctattgtccgattgacaaagtctactcgcacagacaaggctcgccgcttgggtttcaaggctaaccaggggtcatgtgatttaccgtgttcgtgtacgaaagggtggccggaagataccattccaaaaggtattgtttatggta

SEQ ID NO: 194726 - DNA, 253 bp, Glycine max
cccacctcggaggcctaagccaaagcagatcctgcggacattgtaagtaaatcttatgaagatggagatgataactaatgttaccgagtatgaggcaattgcaaaggaaaaattgccaaagatggtttatgactattatgaatcaggggcagagcatcagtggtctttggaggaccgccgatgtattctcaaggattctgtttcggccgcgtattcttgttgatgtgagcaagtagcttgactgcaactgtat

SEQ ID NO: 194727 - DNA, 217 bp, Glycine max
cctcgagccgaatcggctcgagattcgcaccgcaaacagtgagccatggccgtcggaaagaacaagcgcatctccaaggggacgaagggtggcaagaagaatgcagctgatccctttgccaagaaggattggtatgacattaaggctccttctgtttttcaagtgaaaaatgttggcaaaaccctcgtctctcgtactcagggtaccaagattgctt

SEQ ID NO: 194728 - DNA, 266 bp, Glycine max
aaaaaaactcccttgtatattgttgcagctctagctagggtttcgcaagtgcgatcgaagaagaacaacgacgatggcgatggctgcagctctgcgtcgcgaaggaaggcgtttgatccaaccaatcaacgccctccactcttctctcaattcctccctcatctctcaagaccaagcccctcatggcgcgcgctccatttccactcaagttgtgaggaaccgaatgaagagtgtgaggaatatccagaagatcaccaaggccatga

SEQ ID NO: 194729 - DNA, 286 bp, Glycine max
ctcgagcagagagatggaccggaatgagcaggatgtgtcgttgggagcgaacaagttccccgagagacagccgattgggacggcggcgcagagccaagacgacggcaaggactaccaggagccggcgccggcgccgctggttgacccgacggagtttacgtcatggtcgttttacagagcagggatagcagagtttgtggccacttttctgtttctctacatcaccgtcttaaccgttatgggagtcgccggggctaagtctaagtgtagtaccgttgggattcaa

SEQ ID NO: 194730 - DNA, 200 bp, Glycine max
ctctctgcttctctctcttagactcacaaccctattgcgtgctttagcaatcgaccacgattatggccaacagtaacctccctcgaagaatcatcaaggaaacgcagcgtttgctcagtgagccagcacctggaattagtgcgtacccttcggaagacaatatgcggtatttcaatgtgatgatccttggcccaactcag

SEQ ID NO: 194731 - DNA, 261 bp, Glycine max
gaatgccatctcttgttccagttgcttctacgaagcctcgtattggacgatcaggctacaacaaaagccaaggcccttttcacggcttgtctatcacattcttcatctctaagaggttcatacatgaaggtatgagtaacaatgccaatgattccaccttgctttgcctgaaagtgcttgcggtataattcaacagccttggcatgcgacagtatcatattgtgcacggcaatgagaggctcaacatcagagttaccagta

SEQ ID NO: 194732 - DNA, 263 bp, Glycine max
gaggtctttccggaagaacatgttcgcagcccaaaagagcagcggcggagaggaaagcgaaaagagcagccctaatgcaagctttgtcaaagttagcatggatggagcaccttacctccgcaaagttgacttgaagatgtacaagagttacccagagctctctgatgccttgggcaaaatgtttagctccttcaccattggaaattgtgaatcccaaggcttcaaggatttcatgaatgagagcaagttgatggatcttttga

SEQ ID NO: 194733 - DNA, 261 bp, Glycine max
gaaaaagcaggccaagaccttgaaggttgcctgcaatcttaacaatgctgcttgcaagttgaagttagaagactacaaggaagcagaaaaattgtgtaccaaggtgttagacctcgagagtacaaatgttaaagccctctatagaagggcccaagcatatatgcagttaactgacttggatttggctgaacttgacattaagaaagctcttgagattgaccctaacaacagggatgtcaaattggagtacaggactttgaa

SEQ ID NO: 194734 - DNA, 255 bp, Glycine max
aactggactgacaactgaagtcaagtctgtggagatgcaccatgaatctcttacagaggcacatcctggtgacaatgtgggattcaatgttaagaatgttgctgttaaggatttgaagcgtggttatgttgcctcaaactcaaaggatgaccctgcaaaggaggctgctaacttcacagcccaagtcatcatcatgaaccaccctggtcagattggaaatggctatgcccctgtcctcgactgccacacttctca

SEQ ID NO: 194735 - DNA, 258 bp, Glycine max
aaacactgtgtcccttctctcaagtgcacatccttcgaaaccgctgcggctcacacgtggcgctcttggattcgatcactaaaccaatccctaccctccaaactcatcgtgaagctccttttctcagtcaacgttagagcaatagttgaccttccacaaggttattacggaaacgggtttttgctagcgtgcgctgatagcaccgtagaggagttagtggagggtaacttgcgccacggtgtgaagcttgtgcaggaa

SEQ ID NO: 194736 - DNA, 254 bp, Glycine max
gcaaattccaattcccaattcccaattcgaaacccttattcctttcaaagaaccaaattgagtgatcgtgatggcaccaaaggcagagaagaagccagcggagaagaagcccgcggaggagaagaagtcgacggtcggagacaaggctccggcggagaagaagccaaaggccggaaagaagcttccgaagagggaggcgccggcggagaagggaagaagaagaagagaaacaagaagagcgtggagacatacaa

SEQ ID NO: 194737 - DNA, 255 bp, Glycine max
cgccgtcatcctcaaacgacacccttccgctagcaaaacgactgcggtttggtcgtcgtcttccccgaggcatgctcttgggatattattattcatcatcgtaatcacaccctacagagacgttgactttgtgctttttctgggaggggaacaaatggaccaagctcttctggacgacataatcaatcgccttctcgaagttcgcagccggccggggaagcaggtgcagctgtcggagtcggagatccgccatct

SEQ ID NO: 194738 - DNA, 252 bp, Glycine max
tcgagcaagaatggcacttcgttgcttggtgatgtccctttctgttctcttcactcttggtcttgcgagagaaagccatgccagagacgaagatttttggcatgctgtttggccaaacactcccattccaagttcattgcgagatcttctaaagcctggccctgcaagtgttgaaatcgatgatcaccctatgcacattgaagaaacacagtacccgaaaaccttcttctataaagaagaccttcatccagg

SEQ ID NO: 194739 - DNA, 254 bp, Glycine max
ggggtcgtgaaagcgtttgcggggaatctgttgttccatggaagaaagactcagactcagtgcattcgctcctacagtctgatcccaatggtgatagagcactcttcccgaggtgagagggcatacgacatcttctcgcgccttctgaaggagcgcattatctgcatcaacggacccatctccgacgacactgcccacgtcgtcgttgcgcagtcctcttcctcgaatccgaaaatccttccaaacccatcaac

SEQ ID NO: 194740 - DNA, 260 bp, Glycine max
aactacgcacgcactcattcttgagaaagctcaatattcattcgtccatggcactctcttctcgtctcttttccaaatccaaattgatctatggctgtcaaatacttctgcaaaaggagcatgctattccagttcgtcactttgctaaagagtctgcccctcctgcccttaagggagatcagatgctgaagaacatttttgtggaggtgaagaacaaatttgagactgccataggaatattaaagaaggagaagatcacc

SEQ ID NO: 194741 - DNA, 254 bp, Glycine max
ggggggcaaaaggggtcacttttcagatccgagattgagctcctttacccatcatcatcatggagctcctcgggtacctgaatcagggtcacccttctagaggaacaacacttgttattactctttcatcggtgctttcgacacttgtgtccttctccactttcacacatgccttctcttcttctgcgtttccggaactgaatcctataaaacctaggcactcacgtcttctcaggagtgccgtgcaacatgaa

SEQ ID NO: 194742 - DNA, 257 bp, Glycine max
aagaatcccaggcgaggagaaagatggaggggaaggagcaggatgtgtcgttgggagcgaacaagttccccgagagacagccgattgggacggcggcgcagagccaagacgacggcaaggactaccaggagccggcgccggcgccgctggattgacccgacggagtttacgtcatggtcgttttacagagcagggatagcagagtttgtggccacttttctgtttctctacatcaccgtcttaaccgttatgggagt

SEQ ID NO: 194743 - DNA, 257 bp, Glycine max
attcgctggcagctacagctatgatcatcaacagcaccccttttcctctatgatcgattcgattccgtagagtgagaaatcagatcataataatcatcgatgggtaatttgttcgtgaagaagcccaaggtaacagacgtcgataaagcaattctcgctctcaagacccagagacgcaaactcgcccaatatcaacagaagctagatgctgttattgaagcagaaaagcaagctgcacgagacttgattcgtgaaaa

SEQ ID NO: 194744 - DNA, 256 bp, Glycine max
ctctgcgtcgatggcttcgaattcgatcgacggcgacgcgtcacggggtcgggactgtgcataaacgacgtgttaagggacgacgagctgcgctccatatctggggcgagtggagagcgagaaggacaaggaaacgttcgggttggtctgcaagcgatggcttcggttgcagagcacggaaaggaagaaactcgccgcacgtgcgggtccccacatgctccgaaaaatggccgataggttcacacgcttagtcgaa

SEQ ID NO: 194745 - DNA, 256 bp, Glycine max
gtttatcgtgaggagaatatgaagttgtttgttttctttgttgctgcagtagttttggtagcatggccatgccatggcgcaggctaccaaaggttccctctccgaatgaaaactggctatggtgagcgttcttcggaggtaaaatgcgcaagttttaggcttgctgtggaagcacacaacatccgagcctttccaaccattcctgaagagtgcgttgaaccaacaaaggactacattaatggcgaacaatttagat

SEQ ID NO: 194746 - DNA, 254 bp, Glycine max
actcactctcttcgcagcggcactctcggtggctttcatcttctcggggtgagttgtcaagatgtacacatcgaggaagaaaattcacaaggataaggatgctgagccaactgaatttgaggaatcagttggacaggcattgtttgatctagaaaataccaacaatgagctgaaaagtgatctgaaagatttatacataaactcagctgtccaaattgatgtttctggcaaccgaaaggctgtggttatccatg

SEQ ID NO: 194747 - DNA, 255 bp, Glycine max
ggcctgctcttgctttgcttcctcttctatttgctttcttgttagctgccactacggaatcaagaaaagatccaggggaatattggaaaatgatcatgaaagatcaggaaatgccagaaggacttcaaggtcttgtttcatttcaatctgaaaataaccctaagactcaagagcagcttggtaaaggttccaaaaaccattgtgaagagtctctagttacaaatacacaagttaacagtgacttcgaacccatac

SEQ ID NO: 194748 - DNA, 258 bp, Glycine max
attcgctggcagctacagctatgatcatcaacagcaccccttttcctctatgatcgattcgattccgtagagtgagaaatcagatcagaataatcatcgatgggtaatttgttcgtgaagaagcccaaggtaacagacgtcgataaagcaattctcgctctcaagacccagagacgcaaactcgcccaatatcaacagaagctagatgctgttattgaagcagaaaagcaagctgcacgagacttgattcgtgaaaag

SEQ ID NO: 194749 - DNA, 257 bp, Glycine max
attagataccatgatggccatctcaaatccctgcttcattgattgcaagtgcatcattctttgattccgcaacgccatttctccagccgcaagatggcaccttttgatctttttgacactaagaagaagcctaacaacatcaaactgtatgtccgccgtgttttcatcatggacaactgtgaggagttgatgccagaatatcttagctttgttaagggtattgtggattctgaggatcttcctctcaacatttctag

SEQ ID NO: 194750 - DNA, 253 bp, Glycine max
ctcgagcgaatcggctcgagcaggaagtgttcatgatgcatgctgatgctgtgcttactgtagactttagcagagattcagaaatgcttgcatctgggtctcaagatggaaagattaaagtctgccgtattaggactggtcagtgcttacggcgtcttgaacgtgctcattctcaaggtgtcacaagtgtttccttctcccgtgatggaagccagttatcaagcacttcatttgacagcacagcaagaattca

SEQ ID NO: 194751 - DNA, 246 bp, Glycine max
  unsure (1)..(246): unsure at all n locations
cttttcctttctcttctcacttctcacacaccagatatcttcactcttgannctgtcccctcaaatttataatcaatggatggatcatgatccggtgtggttacagtgtacggcaacggtgtaatcaccgagaccaagaagtcccccttctccgttaaagtgggcctggtccagatgctctgcggcgttgtcatcatggaggtcgtcaacgcggaacaggcccgtattgcgtaggaggccggtgcc

SEQ ID NO: 194752 - DNA, 253 bp, Glycine max
ctcgaccggcgtcaatccctccttaagcagacttctcgtgttcctcttgaggagatcacactcaagtttatcgatacctcttcaaagtttgggcatggtcgcttccagaccacacaggagaagcagaagttctttggacgcctcaaagcataattatgttaattggatggaaatgctggaattctatttggttgccatcacttataaactttgtagtgtttctgttttgatattatggattctcgggtagtga

SEQ ID NO: 194753 - DNA, 253 bp, Glycine max
tgccttcgatccttttgctgatgcaaatgctgatgactcgggtgctgggtcaaaggagtatgtgcatattcgcgttcagcagcgaaatggtaggaaaagcctgacaaccgttcagggattgaaaaaagaattcagctataacaagatacttaaagacgttaagaaagagttctgttgcaatggaacagttgttcaggacccagaactaggacaggttattcaacttcaaggtgatcagaggaagaatgtttct

SEQ ID NO: 194754 - DNA, 256 bp, Glycine max
cggctcgaggaaaaactctgtaaacatgttggtttaccaggacctccttacaggtgatgagcttctctctgactccttccgttacaaggaaattgagaatggaatgctgtgggaagttgaggggaagtgggttgttaaaggagcagttgatgtagacattggtgcaaacccttctgctgagggtggaggagaagatgagggagttgatgatgcagctgttaaggttgttgacattgttgacacattcagacttcag

SEQ ID NO: 194755 - DNA, 256 bp, Glycine max
aaaatggccaaagacccagttcgcgttctcgtcactggagctgcagggcaaattgggtatgctcttgtccctatgattgctaggggagtgatgttgggtcctgaccagcccgtgatcctccacatgcttgacattcctccggcagcagagtcattgaatggggttaaaatggaattggtggatgctgcattccctcttcttaaaggtgttgttgccacaactgatgtggttgaggcatgcactggggtcaatattg

SEQ ID NO: 194756 - DNA, 254 bp, Glycine max
cgctaccttttcccgtgtacgaacgaatccaatccaccaaatcggcggcgacgctaccgctctgtctcgaaaccacagatctgccgcggaaccgcgtctccgactatctccgattgatcttccggtaaagtggaccggagatgccggttgccgcttccgccatttacttcctcaacctccgcggcgacgttctcatcaaccgcctctatcgcgacgatgtcgggggaaatatggtggatgcttttaggacgcat

SEQ ID NO: 194757 - DNA, 253 bp, Glycine max
ctcccctacacaaaacatggctttgcccaatcagcaaaccgtcgattaccccagcttcaagcttgtcatcgtcggcgacggtggcacaggaaagacaaccttcgtgaagaggcatctcactggtgaattcgagaagaaatatgaaccgaccattggtgtggaggttcatccgttggattttttcacgaactgtggaaagattcgcttctattgttgggatactgctgggcaagagaagtttggtggcctcaga

SEQ ID NO: 194758 - DNA, 253 bp, Glycine max
ggaaatttaagtgaagagagaatgatgatgaagtctgctatgtgtgcattggtgcttgtggcactggttgtggttgaagtggggcccatggctgaggctgcggtgacttgcaacccaacacagttgactccttgtcttccggcaattaattcaggttctgcaccttcgagtgcttgttgccagaagctgaaggagcaaaagccatgcttctgtggctacctcaaaaaccctagcttgaagcagtatgttaact

SEQ ID NO: 194759 - DNA, 247 bp, Glycine max
gcacagaagaattaacacgtatctagcaagcatggcagtcacactctacgaccttagctctgcctctgggttgaagaagcttgatgagtaccttctcccacgcagctacatcaccgggtaccaagctacaaaggatgatcttactgtttatgcagctttgccaactgctccatcagatgcatatggaaatgtttccaggtggtacaagcacattgatgctttgttgagaatctctggtgtttctggc

SEQ ID NO: 194760 - DNA, 251 bp, Glycine max
ctcacattgctgtgaagttttctgaaatcttgaccaagattgacaggcgatctggtaaggagcttgagaaggagcccaaatttttgaagaatggtgatgctggtatggttaagatggttccaaccaagcccatggtggttgaaactttctctgagtatcctccccttggtcgttttgctgtgagggacatgcgtcagaccgtagctgttggagtcatcaagagtgttgagaagaaagaccccaccggagcc

SEQ ID NO: 194761 - DNA, 251 bp, Glycine max
atcagcttaaaccaacctttcttgtaaactttattgattttgagaattaaagagggtatagacatggctagagcaattgcagtttctttcttggttctgcttctggctttccccactgtatttggagctgaccatgaagttggtgacactggtggatgggccctaggggttaattacaacacctgggcctctgggaaaactttcagaattggtgacaatttggttttcaagtatgactctacccatcaagt

SEQ ID NO: 194762 - DNA, 252 bp, Glycine max
ggtcgcaacaaacacggccgtggccacgtcaagttcattcgatgctccaactgcggcaaatgctgtcctaaggacaaggctatcaagaggtttctggtgaggaacattgttgaacaggctgcagtcagagatgttcaggaggcttgtgtctatgaacaatacacgcttccgaagctttatgtgaagatgcagtattgtgtttcctgtgctatccactctcatgttgtgagggttcgatcccgcactgatagg

SEQ ID NO: 194763 - DNA, 256 bp, Glycine max
gggatcatcacgagattgcaaaatgaagttcaacattgcaaatcccaccactgggtgccagaagaagctggaaatcgatgacgacctgaagcttcgggcattttgggacaagaggatctcccaggaggtccttggtgacgccctgggtgaggagtttaaaggatatgttttcaaaatcactggtgggtgtgacaaacaaggattcccaatgaagcagggagtgttgacccctggtcgtgttcgactcttgctccat

SEQ ID NO: 194764 - DNA, 238 bp, Glycine max
agagatctgccgtagcggataatctctctggagagagccagctaagtgatgttcgaacaagctctggaatgttcatttccaagaacaaggatcctattgttgctggtattgaggacaagatttcgtcatggacctttcttccaaaagaaaatggggaagatatacaagtattgagatatgagcatggccagaaatatgacccgcattatgattacttcactgataaagttaacattgc

SEQ ID NO: 194765 - DNA, 250 bp, Glycine max
caaatcccaactactactcacactcactgcagatctcaatccatggctaccattgttagcatcaaggcccgccagatctttgacagtcgtggcaatccaaccgtcgaggtggatttgacatgctccgatggtacttttgctagagctgctgttccaagtggtgcatccactgggatttatgaggcccttgaattgagagatggaggatctgactaccttggaaagggtgtatcaaaggctgttgacaatg

SEQ ID NO: 194766 - DNA, 251 bp, Glycine max
actcaacacaacgaaccaaaccaacaatgtcgcagccgcagcctcagtcgcagccgcaacacgggcaagcggcgctggagcaggtgcagtgcttcggtcgcaagaagacggcggtggccgtgacctactgcaagcgcgggcgcggcctcatcaagatcaacggctgccccatcgagctcgtcgagccggagatcctccgctttaaggccttcgagcccatcctcctgttgggaaagagccgcttcgccggc

SEQ ID NO: 194767 - DNA, 248 bp, Glycine max
gcacaaagcgggttactgtctgttcaagctaccatctctctctctctttcttagtgcctccttgccagaagttaaaatggcccaagaaactttcctattcacatctgaatcagtgaacgaggggcaccctgacaagctctgtgaccagatctccgatgctgtgctcgccgcatgcttggagcaggaccctgacagcaaggttgcctgtgaaacctgcaccaagaccaacatggtgatggttttcggag

SEQ ID NO: 194768 - DNA, 248 bp, Glycine max
ataatttcttctgctactttagagaccttgctgcaaaggttctctcttagcatggtaacaatgggtttgaaagcactttttgtttggtgcataatatggttggcgtttgcacagttgtcactaggaggaagagtgaggcattacaagtttgatgtggagtacatgatcagaaagccagattgcttggaacacgttgtgatgggaatcaacggccagtttccaggcccaactattagggctgacgttgg

SEQ ID NO: 194769 - DNA, 270 bp, Glycine max
atccggctcgagggacacttgtatgacaataagagcaaatatggaagtcgaagtgtcaagagttaccaatgcccatcacaatgctcgaggagatgtagccagacccaataccacaagccctgcatgtttttctgtcagaagtgctgcaggacatgcctgtgtgtgcccccggggtattatggtaataaagctgtgtgcccttgctacaacaactggaagaccaaggaaggaggacccaagtgcccttgagcttcaacttgttcaacttca

SEQ ID NO: 194770 - DNA, 257 bp, Glycine max
cacaaatcaatccgagttagaaacaagtaagaaggattccacttatgacagaatacctgaagtcaaagcctttgatgaaacaaaacttggtgtgaaaggcctcttcgattctgggatcacaaagataccacgcatgttccatcatgccaaggtggaggaccacactgaaaccatgccaaatgactcaaacttcagtgtccccatcatagatctccaagatatagacacaaactcatcccttcgtgtgaaagcacttg

SEQ ID NO: 194771 - DNA, 249 bp, Glycine max
  unsure (1)..(249): unsure at all n locations
gcatattgtgccctccctctttctagctatttccctctcttaacacaattaacaaagatatatcatatcatatcaactccaaatgatgaaaaatattgggttgtttcttcttgtggtggtggctacttttgtggtggcagccacagctggtagcttttaccaagactttgaaataacatggggtggtgagcgtgccaaaatctatgaaaatggaaatcttctcaccctctccctagacagagnctctgg

SEQ ID NO: 194772 - DNA, 251 bp, Glycine max
tctgctctttgccttctctgacacatttggtgccttgtagagcgtgttttggcaggaaggtggtatggcgaaggacgttgaggttgctgagcgtggctccttctctgggaaggactaccaggaccctccaccagcaccactcattgatgctgaggagctcacaaagtggtccttttacagggctctcattgctgaattcattgccactttgctcttcctctacattactgtgctcacagtcatagggtaca

SEQ ID NO: 194773 - DNA, 252 bp, Glycine max
gtttaacctttctggctgtgttaatatgcgtttcagcactgtcactgagtccttctgttgcgggggaagggcaaaataatggccttgttatgaacttctacaaggaatcatgccctcaggctgaagacatcatcacagaacaagtcaagcttctctacaagcgccacaagaacactgctttctcctggctcaggaacatcttccatgactgtgctgttcagagttgtgatgcttcactgttgctggactcca

SEQ ID NO: 194774 - DNA, 251 bp, Glycine max
caattccattcagatcacagtcccttcaattcctgctgcagcatactgtgtgcaacaaagccctaaaatggaggggactgtctctcactcctgcactgcaagaaattgagcatgtaaagtctgatcaaggagaaattctgagcaagcctttcttggatgcgtgcaagcacatattgcctgtaatagataagtttggagctgctatggcccttgttaaatctgacataggtggtaacatatcgagattggaa

SEQ ID NO: 194775 - DNA, 253 bp, Glycine max
catatctttacttcccaaaacttgctctacaatgagtttccttcgttcttttgcaagaaacaaggatatatcaaaagtaggacgcagaggtatccattgcatgcagaaactatgtgcagaaaaaatatctcctgattcactagagaaggcccaaaatcgtgtgatagatgctgcactcacacttgttcgagaaaatacaaggcttaagaaagaactcgtgcatagtttgggaggtgctgtggcaacttcaact

SEQ ID NO: 194776 - DNA, 250 bp, Glycine max
ctcgagccggaccccaatatacttagccatatctttacttcccaaaacttgctctacaatgagtttccttcgttcttttgcaagaaacaaggatatatcaaaagtaggacgcagaggtatccattgcatgcagaaactatgtgcagaaaaaatatctcctgattcactagagaaggcccaaaatcgtgtgatagatgctgcactcacacttgttcgagaaaatacaaggcttaagacagaactcgtgcat

SEQ ID NO: 194777 - DNA, 250 bp, Glycine max
acgtggtgttgttactgctgctcttttctcttttcttttctctttagttctctcttcccctttctttttctttttcttcttcttctgagcttgtttaagcttttcttccattaacatattatcataatgtgtggtattcttgctgttcttggttgttctgatgactctcgagccaaaagggtccgcgtgcttgagctctctcgcagattgaagcaccgtggccctgactggagtgggctccatcaacatg

SEQ ID NO: 194778 - DNA, 248 bp, Glycine max
tcgagcctttcccaagatagtagaagatggcagacactgaggatattcaacctcttgtctgtgacaatggaacaggaatggttaaggctggatttgctggagatgatgccccacgtgctgtgtttcccagcattgtaggtcgtcctcgtcacactggtgtgatggttggcatgggccaaaaagatgcatatgttggtgatgaggcacaatctaagaggggtattttgactctcaagtaccccattgaa

SEQ ID NO: 194779 - DNA, 273 bp, Glycine max
atttaactgccttgtcaccccctccattgacagaatccagtaaccaacctgaggctgagccagaatttgaaagtcatgcagagaaatttgactggtactctcagtggtaccctttgatgccaatttgtgaccttgacaagaggaagccacatgggaagagggtgttgggaattgatgtggttgtgtggtgggataggaatgagggtgcttggcaggttcatgatgatgcttgtcctcatagattagcacccttgtctgatggaaggattgatc

SEQ ID NO: 194780 - DNA, 263 bp, Glycine max
ccttcctttctttctttctttctttctttatcttctcatttttctcaatacaatttttttctttctttctcaagttttgctacttttctcttcttaaccatagttcacatattatatcatcacatatcatagtgatatcatatcacaatgtgtggcatacttgctgtgcttggttgctctgattcatctcaagccaaaagggtccgcgtccttgagctttctcgcagattgaagcaccgtggtcctgactggagtgggctcca

SEQ ID NO: 194781 - DNA, 262 bp, Glycine max
agagtctctcctgcaggccgcccggaaagctcctgttgctgcacggggttttcgaattcaatgtaacaagtgggctgtgatagtgcgtttactgttgggagaaatacctgagcggactgtcttcatgcagaaaggaatggagaaagctctaaggccttactttgagcttacaaatgctgtgcggattggagacttggaactgtttaggaatattgcggacaagtttgccactacctttaatgcagacagaacccataatttg

SEQ ID NO: 194782 - DNA, 263 bp, Glycine max
caagaaatggcgagtagcagcagcaacactccgaaggaaagcgttgttgtcgactgcggaaggcgtcgaacctcttgcggctattgcagatcctctcgtcacaatagcatctctcatggcatgtgggcacatagccttactgtggatgactaccaagatcttcttgatcgtggctggagaaggtctggatgttttctttataaaccagagatggaaaggacatgctgcccttcttatacaattcgcttgaaagcaagtgactt

SEQ ID NO: 194783 - DNA, 264 bp, Glycine max
tcgctgtactccgaaaggtaatcgggttaaaattcctgatccgtgacgtggcggctgacggcaacgttagggagtccggagacgtcggcgggggccccggaaagagttatcctttctgtttaacagcctgcccaccctggaaacggcgcagccggaggtagggttcagcggcttgaagagcaccgcacgtcgcgtggtgtccggtgcgcccccggcggcccttgataatccggaggaccgagtgcctctcacgctcggtcgtac

SEQ ID NO: 194784 - DNA, 263 bp, Glycine max
ctcaaacatggcagatgaggtggttctgctagatttctggccaagtccatttgggatgagggtcaggattgcacttgctgaaaagggtatcaaatatgagtacaaagaagaggacttgaggaacaagagtcctcttctcctccaaatgaacccggttcacaagaagattccggttctcatccacaatggcaaacccatttgtgaatccctcattgctgttcagtacattgaggaggtttggaatgacagaaatcccttgttgc

SEQ ID NO: 194785 - DNA, 260 bp, Glycine max
ccaaggttgaagtggaagctataggacgtgttcgccacaagaatttagtcaggttgcttggttattgtgctgaaggagctcatagaatgcttgtttatgagtacgtggacaatggtaatttagagtcagtggctgcatggggatgttgggccttgcagtcctctaacttgggaaattcgaatgaacattattctgggaacggctaaaggattaacttatcttcacgaggggttagaaccaaaagttgttcaccgtgatat

SEQ ID NO: 194786 - DNA, 263 bp, Glycine max
cttcaccccggggaactggggaaggatattttcttcttttttggtggttctagttgttaagggaagatattgtaaccatgaatgttgaagaagaggttcagcgtctcagccaagaaatcaagaggcttggtaaggtccaagcagatggcttcttacaaggtaacatttggaacactatttaacgaatgatgaatgcgcaaatatatttgaagcacttgttggaacactaagagcagcgaaaaagcgtaaagtactgacatacg

SEQ ID NO: 194787 - DNA, 263 bp, Glycine max
tcttactgtacgaccagaaacagagacacctgtcagtgctgtatccatccggagaattccacgggttccatcagatatgcctctctatgatatactaaatgagttccaaaagggaagtagtcatatggctgctgttgttaaggctaggggaaaaggcaaagaaactccacaaatcattgatgaagagaaaaatgaagataacaaaagcattggtggggattcacagtttgacactccgttgctacagaagcaggatgcaaaat

SEQ ID NO: 194788 - DNA, 269 bp, Glycine max
ctcgaaccgctcgagctcgagccggttcccaccgttccgcaagcttctctcgcgcgccaaaaatacgctgaacaatctgagtccgccgttaacgaacaaatcaatgtggagtataacgtttcgtacgtttaccatgccatgtttgcgcacttcgatagggacaacgttgcgctgagaggacttgccaagtaagtaacggtttcgttatttttagaatctatcgttttattttatactagttaggagtgattattagttattaataatgg

SEQ ID NO: 194789 - DNA, 266 bp, Glycine max
atttttgtgattcctccgctcattgttgttgaagggtctcgtgaaatcaatctagttttgagacctgtttactggcagaggtgacggagtttcagttttgtaagtgtatgatcataataataaggtttttatagaaaagaaaagttgagaataagatgggggaagatggtaattcttggattaggaggacaaatttttcacacacagtgtgccaaagtttggatcctgctagattaggctctattcctatcagtgttcagtcagag

SEQ ID NO: 194790 - DNA, 246 bp, Glycine max
  unsure (1)..(246): unsure at all n locations
gttctcactaactccctttcactaagttaaaactcaaaacactttgttttttcacttncagttcccccacgcgccaccacnaccacccatgggttgcacggcgtcgaagctgnaaaacgaggacacggtgcggcggtgcaaggagcggcgccgccttcatgaaggaggcggtctacgcgcgccaccacctcgctgctgcccactccgactactgccncnacctccgcctcaccggctccgccctct

SEQ ID NO: 194791 - DNA, 261 bp, Glycine max
tcgagaatatgaagttgtttgttttctttgttgctgcagtagttttggtagcatggccatgccatggcgcaggctaccaaaggttccctctccgaatgaaaactggctatggtgagcgttcttcggaggtaaaatgcgcaagttttaggcttgctgtggaagcacacaacatacgagcctttaaaaccattcctgaagagtgcgttgaaccaacaaaggactacattaatggcgaacaatttagatcagactctaaaacag

SEQ ID NO: 194792 - DNA, 261 bp, Glycine max
caaagattaagccatgcatgtgtaagtatgaactaattcagactgtgaaactgcgaatggctcattaaatcagttatagtttgtttgatggtatctactactcggataaccgtagtaattctagagctaatacgtgtcacaaaccccgacttctggaagggatgcatttattagataaaaggtcaacacaggctctgcctgttgctttgatgattcatgataactcgtcggatcgcacggcctttgtgccggcgacgcatc

SEQ ID NO: 194793 - DNA, 260 bp, Glycine max
cttactgtacgaccagaaacagagacacctgtcagtgctgtaaccatccggagaattccacgggttccatcagatatgcctctctatgatatactaaatgagttccaaaaagggaagtagtcatatggctgctgttgttaaggctaggggaaaaggcaaagaaactccacaaatcattgatgaagagaaaaatgaagaaaactaaagcattggtggggattcacagttgaccactccgttgctacagaagcaggatgcaa

SEQ ID NO: 194794 - DNA, 259 bp, Glycine max
acaatccgccagcgaattgtaccaatcggagagctcaggcaccagctcactctcaagctcgagcagtttgtggctctcgccgtcttccaggctggtgatgctttaatacaattatatcacaatttcatcacagactttgagacgaaaatcaaccttctcaagcttgcacattttgctgttatagtttctcggcagtattctgaaaaagaagctgctgttggttatcttggaggggtcattcagaaacttcaagacacta

SEQ ID NO: 194795 - DNA, 259 bp, Glycine max
gctaatacgtgcaacaaaccccgacttctggaagggatgcatttattagataaaaggtcaacacaggctctgcctgttgctttgatgattcatgataactcgtcggatcgcacggcctttgtgccggcgacgcatcattcaaatttctgccctatcaactttcgatggtaggatagtggcctaccatggtggtgacgggtgacggagaattagggttcgattccggagagggagcctgagaaacggctaccacatccaa

SEQ ID NO: 194796 - DNA, 263 bp, Glycine max
tcggctcgaggggaatggcttccctaccctttccgttgatgaacaagtcgttgccatagagctgccactgaaatacggtcttatcattgagtcagtgaacaagagagggctgaacctctctgaggtggagctgttcacattcacaatgggcatagtttggagaaaccaaggacagaaggacagtgagagtggaatgcttcatgaaagaaagcagccccaatatctgggtgaggcctatcagtggactcacaatggtggttgac

SEQ ID NO: 194797 - DNA, 265 bp, Glycine max
gttcgtttcctggcaaggtcttttgctgtacctggaaatcatcttggacaacaaagtcatggttttcgttggccatatggtccggtggcaattattactccttttaattttcccttagagattcctgtccttcaattgatgggtgcactttatatgggcaacaagccagtccttaaagttgatagcaaggtgagcattgttatggaacaaatgttgcgcctgcttcatacctgtggcttacctctagaagatgtagacttcataa

SEQ ID NO: 194798 - DNA, 264 bp, Glycine max
aagggtttaacctttctggctgtgttaatatgcgtttcagcactgtcactgagtccttctgttgcgggggaagggcaaaataatggccttgttatgaacttctacaaggaatcatgccctcaggctgaagacatcatcacagaacaagtcaagcttctctacaagcgccacaagaacactgctttctcctggctcaggaacatcttccatgactgtgctgttcagagttgtgatgcttcactgttgctggactccacaagaagg

SEQ ID NO: 194799 - DNA, 258 bp, Glycine max
cggctcgagggattttagtagatggtatgatgagccactatgccgaaatgtttcgcatgaaatctgctgctgcaaaagcagatgtcttctatgttatgtccggcatgtggaaaacaacagctgaaagatttttcctatggattggaggctttcgcccctctgagcttctaaaggttcttggccccctgattgaacccctgacggagcaacaacgtttggatatctataaccttggacaatcatgtcaacaagcagaag

SEQ ID NO: 194800 - DNA, 257 bp, Glycine max
cagaacgggttttgaagaagaagcagttcaattgatcaactcagatttcagggacctaagtctagctgctaatagactcgcccatcatgccatcaaacttggtggcattggctttggagcctcttttttcggattgtttgctgccattgctgctatttatctgttgattttggatcgtacaaactggaaaacaaatattctcacagcactactcattccatacattttcttcagcttgccttcattaattttcgacg

SEQ ID NO: 194801 - DNA, 258 bp, Glycine max
ctcgagccggacgtcgtgcgcaaggaggccgagaactgcgactgcctccaggggttccacgtctgccactcgctcggcggaggaaccggctccgggatggggacgcttttgatttccaagatcagagaggtgtaccctgacagaatgatgctcaccttctccgtttttccttcccccaaggtctctgatactgtggttgagccttataacgctactctttctgttcatcagttggtggagaatgctgatgagtgtatg

SEQ ID NO: 194802 - DNA, 260 bp, Glycine max
  unsure (1)..(260): unsure at all n locations
ccaacccttcacactccttcttctccgcttgctcttcgatcatcgcttcagaatcgccgccgaagttcgacctatcncagatcgtcgacgtcttcgtacgcgtcaccggcggtgaggtctgcgcggcgagttccctcgccccgaagatcggtcccctcggtctctcccccaagaagatcggagaagatatcgccaaggaaaccgccaaggactggaagggcctccgcgtcaccgtcaagctcaccgtgcagaaccgtcag

SEQ ID NO: 194803 - DNA, 260 bp, Glycine max
agaaaactctcaaaaaactattatagcaatggcagaacaaaaccaaaaccaaacaacgtgaagctgtaaaggcaccaagaggttggtcacaagagccttctccagagtgatgctctttaccagtatattctggagacaagtgtctacccaagagaacctgaatccatgaaagaactgagagagttgacagcaaaacacccatggaacatcatgacaacctctgcagacgaagggcagttcttgaacatgctccttaagct

SEQ ID NO: 194804 - DNA, 256 bp, Glycine max
cggctcgaggtgccagcagccgcggtaattccagctccaatagcgtatatttaagttgttgacgttaaaaagctcgtagttggaccttgggttgggtcgatcggtccgcctccggtgtgcaccggtcggctcgtcccttctgccggcgatgcgctcctgtccttaactggccgggtcgtgcctccggtgctgttactttgaagaaattagagtgctcaaagcaagcctacgctctgtatacattagcatgggataa

SEQ ID NO: 194805 - DNA, 255 bp, Glycine max
gagcgaatcggctcgagagaaagcactctacatacttgacgtgttgtcaacactaccagagggaagaatggctatgaaggagtgtccaaatatcattcccaatgtggtgaagttgctgatgagagtctcagagaggtgcacacaatttgcattgtcaatattgtgggctatttacaagcttgcccctgaagagtgtgcctccaaggctgtggaggctggattggcagcaaagcttctgttggtgattcagagtgg

SEQ ID NO: 194806 - DNA, 260 bp, Glycine max
  unsure (1)..(260): unsure at all n locations
ggaaaatggcatgtaataatggcctgcagggattacctcaaagctgcaagagctgcaaaatccgctggcatggctaaggaaaactacaccatcatgcactnnggaccttgcctcgctcgacagtgtccgccaatttgttgataacttcagaagatcggaaatgccgttagatgtgctggtttgcaatgctgctgtttacttgccaactgctaaggaacctaccttcactgctgagggctttgaacttagtgttgggacaa

SEQ ID NO: 194807 - DNA, 256 bp, Glycine max
ctttaaagttttcttctgttgctgatcaaagctgatcgaaataacacttcctagctgaactatggaaccggagaagacaccaacaagtttggtttttggtgttaatggtgagaggtttgagctctcccacgttgacccatcaaccacttcgctccaattcttacgcactcgcactcgtttcaagagtgtcaagctcggttgtggtgaagggggttgtggcgcttgtgtagttttaatctccaaatacgatcctgtg

SEQ ID NO: 194808 - DNA, 253 bp, Glycine max
ccatccacttgatgctacacccacaagagttgacaccacatactacacggatttgctgcacaaaaagggtcttctccattctgatcaagagctgttcaagggaaaaggcacagaaagtgacaaattggtgcaactatatagtagaatccctttggcttttgctagagattttaaagcttcaatgatcaagatggggaacatgaagcctctcactgggaggcagggagaaatcagatgcaattgcagaagggtc

SEQ ID NO: 194809 - DNA, 253 bp, Glycine max
caaaaccaaaccacatattaacttgtttgctctaagtcatggctctgatcttgcacgcaaccaaagcaaacaagaatgctttcaagactctgattgcggcagagtacagtggcgtccaagtggaattggcccctaatttcgagatgggtgtctctaatagaactcctgaattccttaaaatgaatcccataggaaaggttcctgtcttggaaacgcccgatggtccagtctttgagagcaatgccattgctcg

SEQ ID NO: 194810 - DNA, 254 bp, Glycine max
cggagtgcgtattcggattggtgggtaatgggtttgcgatcgtggtggctgattcatcggcggtgcacagcatcctcgtccacaagtccaacgaggacaagatcatgctcctcgattcccacaaactcattgcccatagcggcgagcccggagacagggttcagttcacagagtacattcagaagaacgtcgccttgtatcagttccgtaacggcatccctcttaccaccgccgccgccgccaatttcacgcgt

SEQ ID NO: 194811 - DNA, 253 bp, Glycine max
gtttaacccaagggtttcctcaagccgtcgaaagagccgcaagctcacttcaccgctccgtcgagcgtgcgtcgcgtcctgatgagcgcgcctctctcgaccgatctccggtcgaagtacaacgtgcggtccattccggttcgcaaggacgacgaggtgcaggtggtgaggggaacctacaagggccgcgagggcaaagtggtccaggtctatcgccgcaagtgggtcatccacatcgagcgcatcacccgcg

SEQ ID NO: 194812 - DNA, 255 bp, Glycine max
ttcctgccagtagtcatatgcttgtctcaaagattaagccatgcatgtgtaagtatgaactaattcagacttgtgaacttcgaatggctcattaaatcagttatagtttgtttgacggtatctactactcggataaccgtagtaattctagagctaatacgtgcaacaaaccccgacttctggaagggatgcatttattagataaaaggtcaacacaggctctgcctgttgctttgatgattcatgataactcgt

SEQ ID NO: 194813 - DNA, 261 bp, Glycine max
gtggagattgcggactatatagttcttaaaaaaattattcttgttttgttttgtattattttgttttgtaagattgttagatacatgttcagtcttctcaaagaagagaaagaaccaatcacaatattagtcaccggtgcagcaggccaaattggatatgctcttgttccaatgattgcaagaggggcaatgttgggcccaaatcaacctatgattctacacatgcttgacattgaaccggcaacagaatccttaaaaggg

SEQ ID NO: 194814 - DNA, 250 bp, Glycine max
caagttgtttgtcttctttgttgctgcagtagttttggtagcatggccatgccatggcgcaggctaccaaaggttccctctccgaatgcaaactggctatggtgagcgttcttcggaggtaaaatgcgcaagttttaggcttgctgtggaagcacacaacatccgagccattaaaaccattcctgaagagtgcgttgaaccaacaaaggactacattaatggcgaacaatttagatcagactctaaaaca

SEQ ID NO: 194815 - DNA, 251 bp, Glycine max
gcgtgacacctgcaggaacatcggcttcgtctcaaatgatgtgggactggatgccgacaactgcaaggtcctcgtcaacattgagcagcagagccctgatattgctcagggtgtacacggccaccttaccaaaaaacctgaagaaattggtgctggtgaccagggtcacatgtttggctatgccactgatgaaacccctgaattgatgccattgagccatgttcttgcaacaaaactcggtgctcgtctca

SEQ ID NO: 194816 - DNA, 251 bp, Glycine max
ccgaagtcgtaggagggtttcaaaagatggagaacatgcagagcttctggcaattgggcgatgaactccgtggacactcaaaagcatcggaggatcacaaatggttaatggttgcttcgaaattggcggaacagacaagattgaagggggagcgtgtgaacaaccttgatctttcaaagggccccattgaaacaaggtcaagggataaatttgggttccaggaagagaacaaatttgattctcttaactta

SEQ ID NO: 194817 - DNA, 254 bp, Glycine max
tcgagttccaaccatcgatctcaattttcaaccttaacctctaagaatgtcttacgcttatctcttcaaatacatcatcatcggtgacaccggagttggaaagtcttgtcttctacttcaattcacggacaagcgctttcagcccgtccatgacttgaccatcggtgttgaatttggtgccaggatgatcacaattgataacaagccaatcaagttgcaaatatgggatacggctggtcaagaatcattcagat

SEQ ID NO: 194818 - DNA, 254 bp, Glycine max
tcatggctaagtcgaagaaccacaccgctcacaaccagtcctacaaggcccacaagaatggcatcaaaaagccaaagaggcaccgccacacttccaccaaagggatggatccaaagtttctgaggaaccaaaggtacgcgaggaagcataacaagaagagcggtgaaacagccacggaagaagagtaaagtgtcactctcaaatggggctattaggatttgatttgctattcaagtcacatatgttttgtgtca

SEQ ID NO: 194819 - DNA, 258 bp, Glycine max
gcgacatggatccagacgcgttggcaaaggcattcgtggagcactactactccaccttcgacaccaaccgcaacaatctcgccaatctctaccaggaaggttccatgctctctttcgagggtcagaagatccagggctcccacaacatcgtcgccaaactcacctcccttcccttccaacagtgccagcactccatcaccaccgtcgattctcagccctcaggcgtcaacgccgccatgctcgtcttcgtcagcggca

SEQ ID NO: 194820 - DNA, 252 bp, Glycine max
gatccatctcttgtttcttgctttctttcttcaccatgtcacttgctgggaaaatcaccactgaaatcggggttcatgcaaccgctacaaagtggttcaacctcttcgcaacacaactccatcatgttcaaaacctaactgatagagtgcatggaaccaagctgcatcaaggtgaagactggcatcacaacgagacagtcaagcactggacttataccatagatggtaaggttacaacatgtctggagagta

SEQ ID NO: 194821 - DNA, 251 bp, Glycine max
gctccatcttcttcgatctctcaaactctatcggcgcagaaccaatcctatatcactatggggaagacacatggaatgggagctgcccgcaagctgaagtctcaccgtaggagacaaaggtgggctgacaagtcatacaaaaagtctcatcttggaaatgaatggaagaagccttttgctggttcatcccatgcaaagggtattgttcttgaaaagataggtattgaggctaagcagcccaactctgccat

SEQ ID NO: 194822 - DNA, 250 bp, Glycine max
ctcgagccgctgttagatctgtacccgcctagccattgatttggaaaagtccaacttcaacgatgagtaagcttcagagtgatgctctaagagaagctatctcaggaatcatggctgattccaaggaaaagaacaggaaatttgtggagaccattgaactccaaattgggttgaaaaattatgatccccagaaggacaagcgtttcagtggctctgttaagttgcctcatattcctcgccccaagatgaa

SEQ ID NO: 194823 - DNA, 247 bp, Glycine max
ctcgagccgctctgctctttgccttctctgacacatttggtgccttgtagagcgtgtttacgcaggaaggtggtatggcgaaggacgttgaggttgctgagcgtggctccttctctgggaaggactaccaggaccctccaccagcaccactcattgatgctgaggagctcacaaagtggtccttttacagggctctcattgctgaattcattgccactttgctcttcctctacattactgtgctcac

SEQ ID NO: 194824 - DNA, 249 bp, Glycine max
cttgctacagagacagggagtcaagacatagtagtacagattactaccaatggctaccaaggtttacattgtttattattctacgtatggacatgttgtggagctagctagagagttagaaaaaggggccgccttctatgagggagaagaagcaaaactgtggcaggtacctgaaacattgcctgaagaagtccttgctaagttgggagcacctccaaagagtgatgttccaattattactcccaatga

SEQ ID NO: 194825 - DNA, 271 bp, Glycine max
ctcgagccgggttgaaggcggcgtgagaatgttggacatcaacctattcagagaggagaagggccacaaccctgaactcatacgcgaatcccaacgccgtcgtttcgccagcgtcgaaatcgtcgacgaggtcatcaatctcgacaaagaatggcgaaaacgtcaattcgagttggaaaatctccgcaaggaattcaacaagatcaacaaggaagtctccaaactcaagcgtgctggggaggatgcttctaagttcattactgaatcagag

SEQ ID NO: 194826 - DNA, 272 bp, Glycine max
cctgactttaaaatcatcatatttggtagcacttggtaaaggttcagcaaaccattgtacaagagtctctagttacaaatacacaagttaacagtgacttcgaacccataccaagtgttaccaaatatgatgatttggaattcaagtcaagcattatcaagaacgatgattttgaatcgagaccaagtgttactaagtatgatgattttgccctcaagtcaagcgttaccaagaacaatgattttgaaccgagaccaagtgctaccaaatat

SEQ ID NO: 194827 - DNA, 266 bp, Glycine max
agagactggtggtcctgctgctatgatgaggtactggaatgatgaggaggttttgcggaagttgggacaagccatgggtcttgcaaattctggagatgtaggtgcctctgctgaaaattctggggcagatgagacagaagatttgggaaatgaagatgaatcaattgttcatcatactgctagtgttggtgatgtggagggcttgccaaatgcactagccgctggtgctgacaaggatgaagaagattcagagggaagaactgctt

SEQ ID NO: 194828 - DNA, 266 bp, Glycine max
ggtcaggttgttagatatgaggataactttgattcaaccaccaacgtggttgtcaccatcactccgactgataagaagtctatcactgactatggttcacccgaagagttcctctctaaggtggattatttactaggaaaacaggccttcttcggcgaaacacaagccgagggtggttttgatccaaatgcggtggccacggctaacatcttagagacggcaacacctgtgattgatgggaagccgtactattttctgtctgtgtt

SEQ ID NO: 194829 - DNA, 267 bp, Glycine max
ccaaggttcaacaactgctgcaggacttctttaatggaaaggagctgtgcaagaccatcaatcctgatgaagctgttgcatatggtgctgctgttcaggctgcaattttaagtggtgagggcaatgagaaggttcaggatcttctcctccttgatgtcacccctctatctcttggtttggagactgctggcggtgtgatgactgtcttgatccctaggaacactacaattccgaccaagaaggagcacgttttctcaacatactctg

SEQ ID NO: 194830 - DNA, 269 bp, Glycine max
caagaatgcgcacttcgttgcttggtgatgtccctttctgttctcttcactcttggtcttgcgagagaaagccatgccagagacgaagatttttggcatgctgtttggccaaacactcccattccaagttcattgcgagatcttctaaagcctggccctgcaagtgttgacatcgatgatcaccctatgcaaattgaagaaacacagtacccgaaaaccttcttctataaagaagaccttcatccaggcaaaacaatgaaagtacaatt

SEQ ID NO: 194831 - DNA, 264 bp, Glycine max
cacgccttgatgcagacatttctcaaaccaaacaaagccgtcatcgtccttcacggacgctacgccggcaaaaaagccgtgatagtgcgaaccttcgatgaaggcacgcgcgacgcccctacgggcactgcttggtcgcagggataaagaagtaccctgcgaaggtgatcaagaaggattcggccaagaagacggccaagaagtcgcgtgtgaaggcgttcgtgaagctcgtgaactaccagcacctcatgcccacgcgctaca

SEQ ID NO: 194832 - DNA, 262 bp, Glycine max
gtacgttgctactaattttcgtagcatggcaatgccatgcgtacgatatgttccctctccgaatgaacactggctatggtgcccgtactccggaggtgaaatgcgcaagttggaggcttgctgtggaagcacacaacatctttggctttgagaccattcctgaagagtgcgttgaagcaacaaaggaatacatccatggcgaacaatatagatcagactccaaaacagttaaccaacaagcttacttttatgccagagacct

SEQ ID NO: 194833 - DNA, 265 bp, Glycine max
ctagttgtttaaagtgagagacaaagaaagaagaaaatggcaaactttccagttgttgacatggggaaacttaacaccgaagagagagcagcagccatggagattataaaagatgcctgtgagaactggggtttctttgagttggtgaaccatgggatatccattgagttgatggacactgtggagaggctcacataagagcactacaagaagactatggagcaaaggttcaaagaaatggtggccagcaaagggcttgagtcag

SEQ ID NO: 194834 - DNA, 267 bp, Glycine max
cctcgagccgattcggctcgagcaaagtttatgtttttatgtgataccagcattaaaaagaacgtctgaattttccacggaacccggcttgccatatttgatcttaggtgcattttcctctggaatctcactgtttggttgttccatgatctatgggtctactggagctacccacttcgatcaattagccaagattttgactggatacgaaatcactggtgctcgatctagtggtatttttatggggattctatttatcgctgtagg

SEQ ID NO: 194835 - DNA, 266 bp, Glycine max
  unsure (1)..(266): unsure at all n locations
catggctctgggaagaggcagtgcagtggttctactactttgcttcttgctgcttcactctncaatggctcgtgctgccacctacacagttggagattctgggggttggacctttaacactgttgcctggcccaaaggaaagctctttcgggctggtgacacacttgctttcacttatagccctgggactcacaatgtggtggccgtgaacaaggctggatatgatagctgcaagactccaagaggagccaaagtgtataagtcag

SEQ ID NO: 194836 - DNA, 267 bp, Glycine max
tgaaagaatcaattattgcttttcttttacaccttatgaggaaatattccaagttatttagaagtgagttctctgatgataatgattctcagggttctcaaccttgttctcccactgttcagagatctcttgaggatggcattcccggtggtcattgtcatgcctttgacagacagctttcaaaacttagttcctttaattttaagccaaataataggaaatcagggcagatgctccttccgccagaagagttaaggtgcccaatat

SEQ ID NO: 194837 - DNA, 264 bp, Glycine max
ctgatctccattcccattccatggcttccactgaatcatcccctttcaagaaaattcagattcaaagggatgacactacatttgacgcatatgtggttggaaaagaggatgctcctggaattgttgtgattcaggagtggtggggtgtggattacgaaattaagaaccatgccgtgaagatttctcagcttggtagtgggtttaaagctcttattccagatttatacagaggaaaggttggtctggatgttgctgaagctcagc

SEQ ID NO: 194838 - DNA, 265 bp, Glycine max
ccagacgcaaacgcaaacgcaaacgcaaacgcaaacgcagagcgtgatccattgacgaagatggtgctgcgtctcacctaccgcaagccgcacagctatgccaccaagtccaaccaacacagggtcgtcaaaacccctggtgggaagctcgtttatcagactaccaagaagagggccagcggacccaagtgccccgtcactggcaagaggattcaggggattccacacttgaggcctgcagagtacaagaggtcaaggttaccca

SEQ ID NO: 194839 - DNA, 266 bp, Glycine max
agtggtaatggctgctaatgaacaaggaggccacttgtatgacaacaagagcaaatatggaagtggaagtgtcaagagttaccaatgcccatcacaatgctcgaggagatgtagccagacccaataccacaagccctgcatgtttttctgtcagaagtgctgcaggacatgcctgtgtgtgcccccggggtattatggtaataaagctgtgtgcccttgctacaacaactggaagaccaaggaaggaggacccaagtgcccttgag

SEQ ID NO: 194840 - DNA, 265 bp, Glycine max
atctatgcttacctcttcctctgcatgatctttctctcttccgccactcccattctcggttgtggctactgtggcaaaccccccaaaaagcacaagcctggtaaaacaccaaagacacccaaaacacccgttgttaagccaccagtcaccatccctcccattaatgttcctcccgttgttcttccaccaatagtgaagcccccaggtattctccctccaattccaattattaacccaccaaccacaccagggaagggagggaaca

SEQ ID NO: 194841 - DNA, 262 bp, Glycine max
tgcagtggttctactactttgcttcttgctgcttcactctcagatggctcgtgctgccacctacacagttggagattctgggggttggacctttaacactgttgcctggcccaaaggaaagctctttcgggctggtgacacacttgctttcacttatagccctgggactcacaatgtggtggccgtgaacaaggctggatatgatagctgcaagactccaagaggagccaaagtgtataagtcagggacggatcagatcaga

SEQ ID NO: 194842 - DNA, 263 bp, Glycine max
atgacatccagtcaagtagcaggaactcatcagcttccatacccatgacccctcggagcgagggagagatcttacaattttccaatttaaaaagctacagctacaatgagctaaaaatggccacaaaaaatttctgcccagatagtgtcctaggagagggtggatttggttcagttttcaagggctggattgatgaacattcgcttgctgttaccagacccggaacaggcatggttattgccgtgaagaaacttaaccaagac

SEQ ID NO: 194843 - DNA, 263 bp, Glycine max
aaaaaaagcacaagatgggttattggaagtctaaggttcttcccaagatcaagaaggtttttgagaagaatagcaccaagaaagctgctgctgctcaggccaccaagtcctttgatgagtcaaaggaggaatacaacaaagcctttgaagaaaagaagactgaacttcaaactaaagtagttgaaatatacgaggcttcatcaactgaaatcaaaagtttggttaaagaacccaaggaagctggtttgaagaagaactccaca

SEQ ID NO: 194844 - DNA, 257 bp, Glycine max
gcaaggtgtctttgatccgagccatcatgtacatggtggctcagtgcttaggtgctatctgtggagttggtttggttaaggctttccaaaagtcttacttcaacaagtatggtggtggggctaattccctcgctgctgggtacagcacaggtactggattgggtgctgagattattggaacctttgttttggtctacactgtcttctctgccactgaccccaagaggaatgccagagattcccatgtgccggttttg

SEQ ID NO: 194845 - DNA, 259 bp, Glycine max
tgctctttgaagaagggtgtttgcttaattttggagatgtcgctgctctcagattgcatcaaccttaacctctcagacactactgagaaggtgatcgcagagtacatatggatcggtggatcaggaatggacctgatgagcaaagcaaggactctcctaggaccagttagcgaaccttcaaagcttcccaagtggaactatgatggttccagcacatgccaagctcctggagaagacagtgaagtgattatatacccac

SEQ ID NO: 194846 - DNA, 264 bp, Glycine max
  unsure (1)..(264): unsure at all n locations
tttcttcgctcaacatggttcttcannatgatattgatttgctaaatcctccggttgagcttgagaagaggaaacacaagctcaagcgtcttgttcagtcaccaaactctttcttcatggatgttaagtgccagggttgcttcaacataaccactgtctttagccactctcagactgttgttgtatgcggaaactgccagnctgtcttgtgtcaaccaaccggtggccgggcaaggctaaccgagggatgctcctttaggaaga

SEQ ID NO: 194847 - DNA, 267 bp, Glycine max
cggctcgagctacaaccgcaatgacatcaacaggatccttggccccaaggccaattgcatctccttcaaggactctgcatgccgttgctttggctacatggtctccaagaagaagtacatctacaccattgatgatgactgctttgttgccactgatccatccggacacaagattaatgcacttaagcagcatatagaaaacctgctctgcccatccacaccctactttttcaacaccctctatgaacctttccgagaaggtgcaga

SEQ ID NO: 194848 - DNA, 261 bp, Glycine max
atttcattagcagcgttaaagaagagagaagaaaaatgcgaaagttcgatccatggcccgttttcttcaagcgcgagtggaaacgcaactggcccttcctcgttggattcgcagtcaccggagctctaatcaccaaactttcccttggccttaccgaggaagatgctaagaattccaaattcgttaaggcgcaacaaaggtgatttctgaatcgtgacatctgcctggctttgcactttatgttaggtttgtcaagattac

SEQ ID NO: 194849 - DNA, 266 bp, Glycine max
ctcgagccgctgcacactacgtgcggcacgacggcctatgtcgcgcccgaggtgattgggaaaagaggctacgacggcgccaaggccgatatttggtcttgtggcgtaatcctctacgtacttcttgctggttttttacccttccaggatgacaacctggtggccttgtacaagaaaatttaccgcggtgacttcaagtgtccgccgtggttctcctccgaggcgcggaggctcatcaccaagctcctcgaccccaacccgaacac

SEQ ID NO: 194850 - DNA, 259 bp, Glycine max
tgccaatttgatgaagaactttataaggtaactggtgaaggagatgacaaatatctgattgcaacagctgagcagccactctgtgcatatcatttagatgattggatccaccctacccagctaccattaagatatgctggatattcatcatgctttcgtaaagaagctggatctcatggtcgagacactctaggaatattccgagtccaccaatttgagaaagtggagcagttttgcctcactagcccaaatgacaatg

SEQ ID NO: 194851 - DNA, 257 bp, Glycine max
caggggcttagattccttctcttgggttagggacttggcaagctgaacctggtgttgtagctgaagctctcaccacagccattcaggttggatacaggcatattgactgtgctagtgcgtataagaatcaagcagagattggatctgctcttaagaagctttttgatgatggtgtggtgaagcgtgaggacttatggatcacttccaaactctggtgttcacatcatgcatcaggagatgtgccaaaagcattggat

SEQ ID NO: 194852 - DNA, 273 bp, Glycine max
attcattccttgtgcttgtgcttgctataatcatcagactaattcaagatatatctagtcaagtttactgagaagaagagagggtaaaaccgattatcgtgccaggattcggttgattaatcaggagaagaacaaatataaccctccgaaataccgatttgttgttcgctttagcaacaaggacattgttgcacaaataatatctgctagcattgctggcgatattgttcttgctgcagcatatgcacatgagctgccacgatatggtcttga

SEQ ID NO: 194853 - DNA, 273 bp, Glycine max
tctcgagccggaacctctctacgtaacagcacacatcgatttccccaaatcatcgaaactataactcgcgattcccaatcgaaaccctaactcgggatggcgattttgctgggcgaaattcttcaatcgctggagctgtggctgaagctgatcaagaacccgcagccgcagccctacgtaaaccctaatctggaccccgttttgctggtgcccggtgtcggtggctcgatgctgcacgccgttgacgaaaccgacggaagccatgaacgcgtc

SEQ ID NO: 194854 - DNA, 263 bp, Glycine max
ctagtatcttccatggctccgaaagatagtattctggttttgggacccacaggagccattggaagacacatagtttgggcaagtgtaaaggcagggaatcccacttttatattggttagggacacccctgcctctgttaacaagccaaggcttgtcactgctgctaatcctgaaaccagggaagagctcattcagagcttccaaaattctggagttactctaatccagggagatatgaacgatcatgaaagtctggttaatgc

SEQ ID NO: 194855 - DNA, 261 bp, Glycine max
tcggagggagccgtagcagcggaagctctagcttgggtagcgaatcacaatggcgagaggattaaagaagcatctgaagaggcttaatgccccaaagcattggatgcttgacaaactgggtggtgcatttgctcctaagccctcatctggaccacacaaatcgagggactgcctgccactcatactcattttgcgaaaccggctgaagtatgctctaacataccgtgaatgtcatgctattctgatgcagcgacatgtcct

SEQ ID NO: 194856 - DNA, 260 bp, Glycine max
ctctaatatcccatactatgaaaaacatggatatggggtggaggaatttaatgaaaccttatatgatgaatgggctaacaagggcgacgcaccggcattgccagagactcttaaaaattacaacaagctgttgtctcttggcttcaagattgtattcttgtcaggaagatatcttgacaaaatggccgtaacagaagcaaacctaaagaaggctggcttccacacatgggagcagtcaattctcaaggatccacatctta

SEQ ID NO: 194857 - DNA, 259 bp, Glycine max
gaaggaccctatgtgtttcccaactcatcttggggagtgatcatccccccaaacattgaggatgaccactctcccctcccagggtggatggttgagtccctaaaggcagtgaagtacatagactcagaccacttctcagtccctcaaggcaagagagcagtggagctaatagcaggcaaagagagtgccattgctcaagttgccagaaccatccctggcaaaacctatgttctctcattctctgttggggatgctagca

SEQ ID NO: 194858 - DNA, 257 bp, Glycine max
caagaatggcacttcgttgcttggtgatgtccctttctgttctcttcactcttggtcttgcgagagaaagccatgccagagacgaagatttttggcatgctgtttggccaaacactcccattccaagttcattgcgagatcttctaaagcctggccctgcaagtgttgaaatcgatgatcaccctatgcaaattgaagaaacacagtacccgaaaaccttcttctataaagaagaccttcatccaggcaaaacaatg

SEQ ID NO: 194859 - DNA, 261 bp, Glycine max
ctttggaagaagctgatcggagaagatggtgcagcgtctcacctaccgcaagcgccacagctatgccaccaaatccaaccagcacagagtcgtcaagactcccggtggcaagcttgtttatcagaccacgaagaagagggccagcggacccaagtgccctgtcactggaaagaggattcaagggattccacatttaaggccaacagaatataagagatcaaggttacccaaaaaccgcagactgtgaaccgtgcatatggt

SEQ ID NO: 194860 - DNA, 261 bp, Glycine max
tacacattacattactaagtctttgttcatttgagtagtagtgatggctagcctcaaggttgcatgtgtggttgctgtgatgtgcatggttgtcgtggccatgagtgctgcacccatggcacaggccgcaatcacgtgcgggcaggtcgccggcgacatgtctccgtgcttcagttatcttcgaagcggcggaaaaccgtcgcaggcctgctgcaacggagtgaagtccctcagcagcgcggcgaagaccaccgcggaccg

SEQ ID NO: 194861 - DNA, 263 bp, Glycine max
cactccttcatccatgacgcttggctcttcaggatccagtgtcgtggttccaaggaacttcagattgctggaggagcttgagaagggagaaaaaggaatcggagatggaacagttagctatggaatggatgatggtgacgacatttacatgcgctcttggactggaaccattattggcccctataatactgtacatgaaggaagcatttatcaattgaagttgttttgtgataaagactacccagaaaagcccccaagtgttc

SEQ ID NO: 194862 - DNA, 264 bp, Glycine max
acaccgctcacaaccagtcctacaaggcccacaagaatggcatcaaaaagccaaagaggcaccgccacacttccaccaaagggatggatccaaagtttctgaggaaccaaaggtacgcgaggcagcataacaagaagagcggtgaaacagccacggaagaagagtaaagtgtcactctcaaatggggctattaggatttgatttgctattcaagtcgcatatgttttgtgtcaaatctatatttagtagtatagtcattttgat

SEQ ID NO: 194863 - DNA, 260 bp, Glycine max
ggtggacaggctggtttgacgtattggagtcctaatgtgaacattttccgtgacccacggtggggccgtggccaagagactcccggcgaggacccgacattggccgcagaatacgccgccagctatgtcaaaggactccaaggcgatggtgccggaaatcgcctcaaggttgctgcttgttgtaaacactacactgcctatgatcttgataattggaatggtgtggacacgtttcatttcaacgccaaggtgagtaaaca

SEQ ID NO: 194864 - DNA, 259 bp, Glycine max
atttaaacctctcttacttggatcaactcacaaccactctcttttattcttagctttcctttccagttcatacttcatcctattattactttccctctttgcattccaaatggccactgttgaggttgcacagcaaacaccaacaactgtgacagagaatgaaacaacgactgaggtaaccaagattgaggaaactaccccagaacagccagccaccgaggttactgccccagaaacagtcaacgaagaagcaaaagag

SEQ ID NO: 194865 - DNA, 256 bp, Glycine max
agtcactccttcctctgccttataattcttgtgacccttttcgctggtagcattgaaagtgcaccagcaaacgtgaagccaagccattatgttgcacccttcaataggagtgtttttccttctggttttctatttggaataggctctgcagcttaccagatagaaggagcagcagctatagatggcagaggaccaagtatatgggacacctatactaaacagcaaccagggaagatttgggatcatagtgatggaa

SEQ ID NO: 194866 - DNA, 259 bp, Glycine max
gtcgagtttcacagcagcaatggtgtacgtcaaggctcagaaatcaaaagcctacttcaagagatatcaagtcaagttcaagagaagaagagagggaaaaaccgattaccgtgccaggattcggttgattaatcaggacaagaacaaatataacactccgaaataccgatttgttgttcgctttagcaacaaggacattgttgcacaaataatatctgctagcattgctggcgatattgttcttgctgcagcatatgca

SEQ ID NO: 194867 - DNA, 258 bp, Glycine max
  unsure (1)..(258): unsure at all n locations
tgcttcttccgncactcagcacttcgctccctctgtgcttcaccaaccatggccgaaatcgaagctatcgttccagatccctctcaaatcgacgtcacacttttcaaccgctggagcttcgacgacgttgacgttactgatatgtctctggctgattacattggagtgtccccgtcaaagcatgctacatatgttcctcacactgctggtaggtactcagtgaagaggttcaggaaggcgcagtgccccattgttgag

SEQ ID NO: 194868 - DNA, 260 bp, Glycine max
gtggatacctaggcacccagagacgaggaagggcgtagtaagcgacgaaatgcttcggggagttgaaaataagcgtagatccggggattcccgatataggtcaacctttcgaactgctgctgaatccacgggcaggcaagagacaacctggtgaactgaaacatcttagtagccagaggaaaagaaagcaaaagcgattcccgtagtagcggcgagcgaaatgggagcagcctaaaccgtgaaaacggggttgtgggaga

SEQ ID NO: 194869 - DNA, 272 bp, Glycine max
caaattagagtcgtttgagataaaagtgatacgtgtagatctaggaagaggcgttgcctatttaaagcagctaaccctccacaaggaattaaggttgcagagtttgttgtgagctataagctagtttatcgtgaggagaatatgaagttgtttgttttctttgttgctgcagtagttttggtagcatggccatgccatggcgcaggctaccaaaggttccctctccgaatgaaaactggctatggtgagcgttcttcggaggtaaaatgcgc

SEQ ID NO: 194870 - DNA, 270 bp, Glycine max
ctcgagcgaatcggctcagtccatctctctcacaaaatgacaacaatatcaaattgcctcccttctcttcctcttcctcttcctctccaccctccacatagcttccaccctctcaacccccaccaacttcatcaagtcctcctgcagcaccacccagtacccagccctctgcatccagtccctctccgtctacgcctccaccatccagcaagacccccacgagctcgtccagacagccctctccctctccctcaaccacaccgaggccac

SEQ ID NO: 194871 - DNA, 270 bp, Glycine max
agcgcctttctccaagtatcctcccatgaaggttcttttgatgaccattcagaatgctcctccggggcttgattatgatcgtgatagaaagttctccaagtcttttaaggaaatggttgctatgtgcctggtaaaagatcaaacaaagaggccatctgtggagaagttactcaaacactccttcttcaaacaagctaagccaccggagctttctgtaaagaaattatttgctgatttaccgcctttgtggaaccgtgtaaaatccctcca

SEQ ID NO: 194872 - DNA, 266 bp, Glycine max
gtgagagaaaaagaaagaagaaaatggcaaactttccagttgttgacatgggtaaacttaacaccgaagagagagcagcagccatggagattataaaagatgcctgtgagaactggggtttctttgagttggtgaaccatgggatatccattgagttgatggacactgtggagaggctcacaaaagagcactacaagaagactatggagcaaaggttcaaagaaatggtggccagcaaagggcttgagtcagttcaatcagaaatc

SEQ ID NO: 194873 - DNA, 267 bp, Glycine max
cgggcgctcgcgctctctcaatctagccttctttctttttttcaatttccaaatcacgaaactcaagaagatggagaaagcgatcaacagacagaagattttgcttcatcatctcaacccttcatcatccacccaccccaacgaatcatcctccctccatgcttcagcatgtgtggcgggggatagcgctgcttatcaaaggacatcgacattcggggacgatgttgtgatcgtggctgcttatcggactgctcattgcaaagctaa

SEQ ID NO: 194874 - DNA, 268 bp, Glycine max
tcaacgcaaacgcaaacgcaaacgcaaacgcagagcgtgagtccagttgacgaagagtggtgcagcgtctcacctaccgcaagcggcacagctatgccaccaagtccaaccaacacagggtcgtcaaaacccctggtgggaagctcgtttatcagactaccaagaagagggccagcggacccaagtgccccgtcactggcaagaggattcaggggattccacacttgaggcctgcagagtacaagaggtcaaggttacccagaaaccg

SEQ ID NO: 194875 - DNA, 260 bp, Glycine max
  unsure (1)..(260): unsure at all n locations
ttntcccgtgtacgaacgaatccaatccaccaaatcggcggcgacgctccgctctgtctcgaaaccacagatctgctcgcggaaccgcgtctccgactatctccgattgatcttccggtaaagtggaccggagatgccggttgccgcttccgccatttacttcctcaacctccgcggcgacgttctcatcaaccgcctctatcgcgacgatgtcgggggaaatatggtggatgcttttaggacgcatattatgcaaacga

SEQ ID NO: 194876 - DNA, 259 bp, Glycine max
cacattacaagcaacaagttaacgcttaacaccactctccccaatccttttgtgtatgcacaatgagaccatgcaaatgcaaatgcaatgttctctctgctctcattcttcttgtcacattcctttttgcttccgtccactgtgaagacccatatcggtacctcacttggaaggtcacctatggtgacatttatcctcttggtgttaagcaacaggggatcttaatcaatggacagtttccggggcctcaaatagatgc

SEQ ID NO: 194877 - DNA, 92 bp, Glycine max
cggtggatatcgtggcatcttttcaaaccagctatttcatctcaggacttgctccctttggtgatgctttggttgttctagcatatattcct

SEQ ID NO: 194878 - DNA, 263 bp, Glycine max
agtcagagacaaagaaagaagaaaatgtcaaactttccagttgttgacatggggaaacttaacaccgaagagagagcagcagccatggagattataaaagatgcctgtgacaactggggtttctttgagttggtgaaccatgggatatccattgagttgatggacactgtggagaggctcacaaaagagcactacaagaagactatggagcaaaggttcaaagaaatggtggccagcaaagggcttgagtcagttcaatcaga

SEQ ID NO: 194879 - DNA, 260 bp, Glycine max
ctcgagcggttttgtcgtttgcttctttctttgattaatgatgactagctttaaggttgcatgtgtggttgcgatgatgtgcatggttgttcgccatgagtgttacacccatggcacaggccgcaatcacgtgcgggcaggtcgccggcgacgtgtctccgtgcctcagttatcttcgaagcggcggaaaaccgtcggacgcctgctgcaccggagtgaagtcgctcagcggcgcggcgaagaccaccgccgaccgccag

SEQ ID NO: 194880 - DNA, 262 bp, Glycine max
cgaatatgaagttgtttgttctctttgttgctgcagtagttttggtagcatggccatgccatggcgcaggctaccaaaggttccctctccgaatgaaaactggctatggtgagcgttcttcggaggtaaaatgcgcaagttttaggcttgctgtggaagcacacaacacccgagctcttaaaaccattcctgaagagtgcgttgaaccaacaaaggactacattaatggcgaacaatttagatcagactctaaaacagttaa

SEQ ID NO: 194881 - DNA, 270 bp, Glycine max
aacagcgccctagatttgctcttctttgcttcggaacaaagagaaaaacaaataacaatggcgttcgcttctttcctcggcagagttctcttcgcttccgtcttcatactctctgcttaccaagaatttaacgaatttggagttgatgggggacctgcagcaaaagcactcagacctaagtttgatgcctttacacatcgagtgcattctcaagttggctttcaacttcctgagattgatctgaaatttttaattgctggggctattgct

SEQ ID NO: 194882 - DNA, 266 bp, Glycine max
  unsure (1)..(266): unsure at all n locations
ggnaatcactttcgtgttacaacatatggggaatcacatggaggaggtgttgnttgtgttattgatggatgtcctcctcgccttcctctctctgaagcngatatgcaagtggatctcgacagaaggaggccaggtcagagccgaattacaactcctagaanggagactgatacatgtaaaatattttcaggagtttccgaagaatcactactggaactccaattcatgtatctgtacccaatactgatcaaagaggacatgactat

SEQ ID NO: 194883 - DNA, 266 bp, Glycine max
gctcaaccctagtaagccgcaatggtgaagtactcaagggagcctgacaatccaactaagtcttgcaaggctagaggcgccgaccttagggttcattttaagaacacaagggaaactgcctttgcaatcaggaagttgcccttggtcaaggctaaaaggtacttggaagatgttcttgcccacaagcaggcaattccattcagacgtttttgtcgaggtgttggaaggacagcccaggctaagaatagacactctaatggccaagg

SEQ ID NO: 194884 - DNA, 263 bp, Glycine max
caaatttccaaggtaaaaagatgaatctgaagaacatgaagattccgaacgttccaggcggcggtgcgtcctctgcgctgctgaagcttgggcttcttggtggaattggtttatatgcagctgctaacagtctctacaacgttgaaggaggtcaccgagccattgttttcaaccgtctagttggtgtcaaagacaaggtctatcctgaaggaacacactttatgattccgtggtttgagaggcctgttatctatgatgtccgt

SEQ ID NO: 194885 - DNA, 261 bp, Glycine max
ttccctcaggatagctggaccccgcgggcgagttctatcgggtaaagccaatgattagaggcatcggggcgcgcaacgccctcgacctattctcaaactttaaataggtaggacggtgcggctgctccgttgagccgccccatggaatcgagagctccaagtcggccatttctcgtaagcagaactggcgatccgggatgacaccggaagctgggttacggtgcccaactgcgcgctaacctagaccccacaaagggtgtt

SEQ ID NO: 194886 - DNA, 252 bp, Glycine max
agcacccaaaactatggttcttctacagctagatccgtttctcaatgagctcaccagcatgtttgagcgcagactaagcttggctctgtttgggttactcttaaacgatcatctttgaaatctaaggtgcagaggaataaattggccgctgccggtgaagcaattgagtttagatgccttatacgtgcaactgatgggaaaaagacaatttctacttcggttggaccgaagatcaccagcgctttcaagctt

SEQ ID NO: 194887 - DNA, 260 bp, Glycine max
tgccagacgagactcgggtggaggcccgcagcgatactgacgtgcaaatcgttcgtctgacttgggtataggggcgaaagactaatcgaaccgtctagtagctggttccctccgaagtttccctcaggatagctggagcccgcgggcgagttctatcgggtaaagccaatgattagaggcatcgggggcgcaacgccctcgacctattctcaaactttaaataggtaggacggtgcggctgctctgttgagccgcgccat

SEQ ID NO: 194888 - DNA, 267 bp, Glycine max
gcggttgcagaagaagattgcaagatgaagttcaacatcgcgagtcccaccactggatgccagaagaagctcgagatcgacgacgatcagaaactacgagcattttgggacaagaggatctcacagcaggtcagcggagatgcacttggtgaggaatttaagggctatgtcttcaaaattactggaggttgtgacaaacaaggattcacgatgaaacagggagtgcttactcctggtcgtgttcgacttttgcttcacaggggaatc

SEQ ID NO: 194889 - DNA, 264 bp, Glycine max
  unsure (1)..(264): unsure at all n locations
tgcatatggtgtccgaaagttactcttctagacagccaaggccattgaccaccgttggctggcagaacantaatagaaatggaagatcaagaatacctagtgacagatatcggtcattggatgatgagggtttcatgattgttgatcgcacttcactgtatggacctaggaatatgctgatcgacntagagacatgaggatggacatagacacacatgagttatgaggaactacttgcacttggagagagaataggccatgtga

SEQ ID NO: 194890 - DNA, 259 bp, Glycine max
  unsure (1)..(259): unsure at all n locations
cttcctcaatgatctcttccccagctgttaccactgtcaaccgtgccggtgccggcatggttgctnccattcactggcctcaagtccatggctggcttccccaccaggaagaccaacaatgacnttacctccattgctancaacggtggaagantgcnatgcatgcaggtgtggccaccagttggcaagaagaagtttgatntttttcctacctgccagaccttgatgatgcacaattggcaaaggaagtagaatactt

SEQ ID NO: 194891 - DNA, 256 bp, Glycine max
agcgagttcttctagatttaaggaagatgggtaaggaaaaggttcacatcagtattgtggccattggccatgtcgactctgggaaatccactaccactggtcacctgatttacaagcttggaggcattgacaagcgtgttattgagaggtttgagaaggaagctgctgagatgaacaagaggtctttcaagtatgcctgggtgctggacaaacttaaggctgagcgtgaaagaggaatcaccattgatattgcttt

SEQ ID NO: 194892 - DNA, 257 bp, Glycine max
gggtgatgccaacggctccaaccccttcgcttcgtggggtcaattcgtggattttcctctccctccttccatctccggcttcttccccggcttggaattcggattcggattcggatcatccgtgaacacatgtgtggactggagggagactcccagagcgcacgtgtggaagctggtgcttcccggcttctccaacgaggacgtgctggttgagctccaagacgagagggtgctccaagtcagcgtggagagcggca

SEQ ID NO: 194893 - DNA, 256 bp, Glycine max
aaaatggtgaagtttctgaaaccaaacaaagccgtcatcgtccttcatggactctacgccggcaaaaaagccgtgatagtgcgaaccttcgatgaacgcacgcgcgatgcccctacgggcactgcttggtggcagggataaagaagtaccctgcgaaggtgatcaagaaggattcggccaagaagacggccaagaagtcgcgtgtgaaggcgttcgtgaagctcgtgaactaccagcacctcatgcccacgcgcta

SEQ ID NO: 194894 - DNA, 255 bp, Glycine max
ctttccttttcccttccgttggtgccattcgtgcagcaccggatcctctcatttctccggcgataactctcccttttccggcgaattcaccgcttcctcgatatgaatcccgagtatgactatctgttcaagctccttctgattggagactctggtgttggtaaatcatgccttcttctaagatttgctgatgattcatacattgagagctacataagcaccatcggagttgattttaaaattcgcactgttgag

SEQ ID NO: 194895 - DNA, 254 bp, Glycine max
tgcaaagccatcgtcttcttctcagacaagtagtttggtaaaagatggctgatgctgaggatattcaaccccttgtctgtgacaatggaactggaatggtgaaggcaggatttgctggtgatgatgctcctagggctgtgtttcccagtattgttggccgacctcgtcatactggtgttatggttgggatgggtcaaaaggatgcctatgtaggtgatgaagcccagtcaaacagaggtattcttactttgaag

SEQ ID NO: 194896 - DNA, 271 bp, Glycine max
ttcggatagaaaaattaacaagtagcaaagatgtttggaatcatcggagaaaacaagggtcacaagattaaggggaacttggtgattatgcgaaacaatgtgtttgatatcaacagcattaccagtgttaaaggtgtcatcggaaccggacattaacatcattggagcagtcgtcgacaccgttactgctttggcgtcccacatctccatccagctcattagtgccaccaaggctgatggacatgggaaaggaaaagttggaaaggctaca

SEQ ID NO: 194897 - DNA, 255 bp, Glycine max
gagaaatctgatgtttatggctttggagtaatattatgggaaattgtaactgaaaagataccttgggataatctcaactccatgcaggtgattggagctgtaggattcatgaatcaacggctagaaattccaaaaaatgttgatccacggtgggcttctataattgagagctgctggcatagcgatccagcttgtcggccaacgttcccagaactgcttgaaaggcttagagatctgcaaaaacagtatgccatt

SEQ ID NO: 194898 - DNA, 252 bp, Glycine max
agaggatcatccttattattgttaattgaagaagaggaagacctaacataaagatgtccgttacggagctgaaggagcgtcacttggcggcgacggaaaccatcaacagtttgacggagcgcttgaaggagaggcgtctatcattgctcgatacagatattgctggttacgcgaggtctcaaggtagagcccctgtcacctttggtcccaccgatctcgtttgttgtagagcgctccagggtcatacgggaa

SEQ ID NO: 194899 - DNA, 260 bp, Glycine max
agtcttccaagttttcaccatcgtaatgggttccgaagatccagcgtcgtggttcctaggaatttcagattattggaagagcttgagagaggtgagaagggaattggggatggaactgttagctatggaatggatgatgctgatgacatatacatgcaatcttggactgggactatcatcggtccccctagtactgttcatgaagggcgtatctaccagttgaaattgttttgcagcagggattatccagacaatcctcc

SEQ ID NO: 194900 - DNA, 259 bp, Glycine max
gggagcagttaacaccttgggggtcaagttctacaacgatctcattaatgagattatagcaaatggcttaaaaccatttgtcacgctgtttcattgggacctcccacaagcttttgaagatgaatatgggggatttctcaaacctgaaatagtggaggacttccgtaactatgctgacttttgcttcaagacatttggtgatcgggtgaagcactgggtaaccctaaatgaaccatatggctacagcgtgaatggctac

SEQ ID NO: 194901 - DNA, 260 bp, Glycine max
gccttctcctcttcttactccttacaagatgggctacctcaatctgtcccatagagttgttttggcaccgctgaccagacagacgtcttacgacaacgtcccacaaccccatgcccttctctactactcccagagaacttccaacgcaggccttcccattactgaagccactggcgtctctgacacggctcaaggctatccgcaaacccctggcatatggactaaagaccatgttcaagcttggaaacccattgtcgatg

SEQ ID NO: 194902 - DNA, 254 bp, Glycine max
  unsure (1)..(254): unsure at all n locations
gtagaactgaacaagggtttctctttctctttctctgtctgcttctcactttctctcgtttcaatcgaaaaaaatcatgggcagaaaattcttcgtcggtggcaactggaaatgcaatgggaccactgaggaggtgaagaagattgttactactttaaatgangctaaagtccctggagaagatgttgtagaagttgtgtgagcctccttttgtgttccttcctttgtaaaaagtttgctgcgcctgattccca

SEQ ID NO: 194903 - DNA, 260 bp, Glycine max
  unsure (1)..(260): unsure at all n locations
tgctatnctgtgcctgctacgacatttgcacatttagatgctacttctgtactatcatctggattagcggccaaaggtatctatccagcagtagatcctttagattcatcctcatctatgctctaacctcgttccgttggtgaagaacattatgagactccgcaaagcgttaaacatcctttacaacgttacaaagaacttcaagtcattctagctatctctggcttggacgaattatccgcagaagatcgcttaaccgt

SEQ ID NO: 194904 - DNA, 255 bp, Glycine max
gtttatcgtgaggagaatatgaagttgtttgttttctttgttgctgcagtagttttggtctcatggccatgccatggcgcaggctacccaaggttccctctccgaatgaaaactggctatggtgagcgttcttcggaggtaaaatgcgcaagttttaggcttgctgtggaagcacacaacatccgagtctttaaaaccattcctgaagagtgcggtgaaccaacaaaggactacattaatggcgaacaatttaga

SEQ ID NO: 194905 - DNA, 255 bp, Glycine max
atctctccaacctttcactttcgtttctcagttttattcgaatccctctctcaatctcctttccaaatggccagcgttgaggttgcacatcaaacaccaacaacagttccagaaaatgaaacaaccgaggtaagcaagacccaggaaacaaccccagtcactgaggctcctgcaacagaacaaccagcagctgaggttcctgcaacagaacaaccagccgctgaggctcctgccccagaatcaaccaccgaagca

SEQ ID NO: 194906 - DNA, 257 bp, Glycine max
ctagtctccatacatcaacttgggaggttaaagagacggcaacgctgtgctgtccgccttgaccgagccagagcttcgtcttggccctcgattttgccctgtaaaactaatcccagtcacaacagaaataatcaatggcaccgaaacagaccaaggctgagaagaagatcgcttacgatgcgaactagtgcgacctaatggaggagtacggccaaatcctcgttgtaaactccgacaacgtgggatcgaaccagctc

SEQ ID NO: 194907 - DNA, 253 bp, Glycine max
agcctaccctactattatccctttccttcctgcctctctttgctttcctggctctttcagaagatgttgaacaagttgtggacataagtggcaaccccattttcccaggtggcacatattacattatgccatcaacttggggcgctgccggtggtggattgaaactaggccggacaggaaactcaaactgcccagttactgttttgcaagattactcagaaatcttccgtggcacaccagtcaaattcagcat

SEQ ID NO: 194908 - DNA, 253 bp, Glycine max
ttgctgtggaagcacacaacatctttggctttgagaccattcctgaagagtgcgttgaagcaacaaaggaatacatccatggcgaacaatatagatcagactccaaaacagttaaccaacaagcttacttttatgccagagacctcgaagtccatcccaaggacacatttgtgttcagtatagatggcaccgtactctctaatattccatactacaaaaaacatggatatggggtggagaaatttaactcgac

SEQ ID NO: 194909 - DNA, 251 bp, Glycine max
cggctcgagaaggtaggttaacactcttcttcatcgtcgtcgcaatgggacgtgtgatccgtgcgcacgtaagggagcaggctcggtcttcaagtcccacacgcaccaccgcaagggccctgcacgcttccggagcctggacttcggggagcgcaacggctacctcaagggcgtcgtcaccgacgtcatccatgaccctggccgcggcgcgccgctcgcccaggtcgccttccgccaccctttcagataca

SEQ ID NO: 194910 - DNA, 250 bp, Glycine max
aaaagacaacccagagagcgcgtcttaataaacgctcttctctgaaaacccccatttcttttcttcttacttcttctctttcgcttcttcgatcttcgatcttcgtcgctgaaaatgagagagtgcatttcaatccacatcggccaggccgggattcaggttggaaacgcctgctgggagctttactgcctcgaacacggcattcagcctgatgggcagatgccaagtgacaagaccgttggtggaggtg

SEQ ID NO: 194911 - DNA, 251 bp, Glycine max
aaagctttagtttaggatgacccaagtgaggaacaagcaagtggttctaagagattatgtcaccggattccctaaagaatccgacatgaacattgttgaaggcaccataatattgaaggttccagaaggttccaatgatgtccttctaaaaaatctctacttgtcatgtgatccatacatgcgactcctcatggccaaggaccgttctttcggagatggctccttcacccttgcctctccattgaaaggat

SEQ ID NO: 194912 - DNA, 251 bp, Glycine max
ccctacctctcctttcaagatgcagatcttcgtcaagaccctcaccggaaagaccatcaaccttgaggtggaaagctctgacaccatcgacaacgtcaaggccaagatccaggacaaggaaggaattcccccggatcagcaacgtctcatcttcgccggaaagcagctcgaggacggccgtaccctcgccgactacaacatccagaaggagtcaacccttcaccttgtccttcgtctccgtggtggcatgc

SEQ ID NO: 194913 - DNA, 252 bp, Glycine max
ctcgagccggtccatcacaacgacatatttatattcggcatagataacaccgtactctctaatatcccatactatgaaaaacatggatatggggtggaggaatttaatgaaaccttatatgatgaatgggttaacaagggcgacgcaccggcattgccagagactcttaaaaattacaacaagctgttgtctcttggcttcaagattgtattcttgtcaggaagatatcttgacaaaatggccgtaacagaa

SEQ ID NO: 194914 - DNA, 259 bp, Glycine max
cgcactagctagtgctggatttaaagtttcacgttcaaagctagttgacatgatcagcaatggtgatgtgcgtatcaactggatccctgttactaccaaaggaaccacactcaagagtggagatattgtatcaattagtggcaagggaagattaaagataggagaaataaactccacaaagaaaggaaagtttgcagtggagctcattcggtatttgtagaagtttagagagttcagaagtactttcactctcaaagta

SEQ ID NO: 194915 - DNA, 283 bp, Glycine max
gagaaacataaacacaaccaaccatcaagggaagttagagagagagttgagttgtgttgagagagatagagagatagaggagaagatgaacggtggtgaatcttacggtgctattgagacacaatacataaggaggcatcacaaacatgaaccaagggaaaaccagtgcacctctgcacttgttaaacacataagagctcctgttcaccttgtgtggtcactggtgagaagatttgatcaacctcagaaatataaaccatttgttagcaggtgtatcatgcaa

SEQ ID NO: 194916 - DNA, 280 bp, Glycine max
aagggtttaatctttttggctgtgttatgcttctcagcactgtcactgagtcgttgtcttgcggaggataatggacttgttatgaacttctacaaggaatcatgccctcaggctgaagacatcatcaaagaacaagtcaagcttctctacaagcgccacaagaacactgctttctcctggctcagaaacatcttccatgactgtgctgttcagagttgtgatgcttcactgttgctggactccacaagaaggagcttgtctgagaaggaaacagatagaa

SEQ ID NO: 194917 - DNA, 279 bp, Glycine max
gcagctgaagcctatgacattgctgctattaaattcagaggatttaatgctgttacaaactttgatataacaagatatgacgtggaaagaattatggagagcaataaccttcttagtagtgaacaagctaagcggaaaagagagatggatgatggaactagaagcgaggctacagttaaccaaaaacctgtactactcaagaaaccgttctgatgcagaaaagatgcagaagccaatcagaatggaagatggttcagtatccatcctcccaacagcttg

SEQ ID NO: 194918 - DNA, 279 bp, Glycine max
tttcctttccagttcatacttcatcctattattactttccctctttgcattccaaatggccactgttgaggttgcacagcaaacaccaacaactgtgacagagaatgaaacaacgactgaggtaaccaagattgaggaaactaccccagaacagccagccaccgaggttactgccccagaaacagtcaacgaagaagcaaaagaggcagcagcagttgagactaatgaggcaacagaagttacacaggaagggaaggctgagaaaacagaagaagaaga

SEQ ID NO: 194919 - DNA, 278 bp, Glycine max
gcttaatcgaactattcagattctaaaaaatgagttggtggtgggctggagcaatcggtgctgccaagaagaaattcgaggaagaggaaccgccgcgaagcttccagagcgtgggcctggtgatcggcgtgacgggcatcgtgggcaacagcctcgccgagatcctccctctcgccgacacccccgccggtccatggaaggtctacggcgtcgcacgccgcccccgtccgccgtggaacgccgaccatcctgtcgagtacatccagtgcgacgtctcc

SEQ ID NO: 194920 - DNA, 277 bp, Glycine max
ccatgacaaagtaagaaacagggtttacaagctcaatgatcagacagcaaagctttttgtgagaccaagaggttggcatctacctgaagcacatattctgattgatggtgaacctgcaactggttgccttgttgattttggcctctatttctaccacaaccactcggcattccgacgcactcaaggtgctggctttggccctttcttttatcttcccaaaatggagcattcaagggaagctaagatatggaacagtgtgtttgagaaggctgaggat

SEQ ID NO: 194921 - DNA, 272 bp, Glycine max
gtaaagagccagtttctcatgttgtggctcgtccttcaccgagtgatattcttgagtggcattatgtgcaggagggaagtgaaggaacaccttttgcaggtggatattactatggaaaaatcaagtttcctcctgaatatccatataaacctcctggaatcagcatgactacacctaatggacggttcatgacacagaaaaagatctgtttgtctatgagtgactttcatccagaaagttggaatcccatgtggtctgtatcaagcatatta

SEQ ID NO: 194922 - DNA, 269 bp, Glycine max
agggtttactattgttacaagaatcctgtggtatatatgctcaactacatgaatgtagcacatgtacgtgttttgattgaaacctcatcatcaagcatgtgtgggataacgaacaccaagcaattttacatcatctatgacgggtccacaaagcgaaccagagttatcactcttcatggtgtaaaatgtgcttaggaacctaagacgagtacgtgtgctacattcatgtagttgagcatatataccacaggattcttgtaataatagga

SEQ ID NO: 194923 - DNA, 271 bp, Glycine max
ccagaaggacctgttaggagctttgcactggtcagagttctgcgtgctgctgaaatcgatttcaggaagccagcacgccatggtgttttggggattcctggttacgttcagtttacatcccccatccgtagatatttggatcttcttgctcattatcaggtaaaggcattccttagaggcaagcctccaccctttacagctggtaagcttgaagggatagcagctgttgtaaatgagaatgttagaacagtgaggaaactctgcagcagca

SEQ ID NO: 194924 - DNA, 272 bp, Glycine max
ggggtattgtaagtggcagagtggccttgctgccacgatccactgagattcagcccttgtcgctttggggggtcagagtgagaaagagaaagagagaattcgtaaaccctaatttcggaaagatcggcgatgactgcctccaaggatcgcgagaacttcgtctacatcgccaaactcgccgagcaggccgagcgttacgaagagatggtggaatcaatgaagaacgttgcgaatctcgacgttgaactgacggtggaggagcggaatttgct

SEQ ID NO: 194925 - DNA, 269 bp, Glycine max
ctcgcggatctaatattaaggaatagcttaagggcacattacaatgaaggcattgattctggttgggggatttggaacaaggctgaggccactgacactcagtttccctaagcctcttgttgattttgctaacaagcctatgattttgcatcagatagaagcccttaaggccattggagtgactgaggtagtgctagccatcaattaccaaccagaggttatgttgaatttcttgaaggattttgaatcaaagctcggcatcaagatca

SEQ ID NO: 194926 - DNA, 294 bp, Glycine max
aattcggctcgacggtggctacgaagactgagtcaaatactagttgcagggaatgccattttatatgaatgtgttcaaacaataatgagcattgaagataatggtggcttacgtgtacttgccattaatatcctgggaagattcttgtcaaaccgtgacaacaatatcaggtgaattgcttactggatatgcaagtgtttgtgtgtgtgtgagtgagtgagagcaagagagagtcttgaatgaatgacaacaatgtctataaaatcattagcataatgatctggtggatgtatt

SEQ ID NO: 194927 - DNA, 279 bp, Glycine max
cgcgaattctaatggttggtcttgatgccgctggtaagaccaccatcctgtacaagctcaaacttggagagatcgttaccacaattcccaccattgggttcaacgtggagactgtggaatacaagaacattagtttcactgtctgggatgttggtggccaggacaagattcgtcccttgtggaggcactacttccaaaatacacagggtctcatttttgttgttgacagcaatgacagggacagagttgttgaggccagagatgagttgcacaggatgt

SEQ ID NO: 194928 - DNA, 276 bp, Glycine max
cgataacaccctatgggctggatctgtggctgcaccacccgatgcaccattgatggattacattaagcctcttcgcggccatgtgatggagctcaacaagtatctggctcaagattcgaggatcgacatttgccagctccccgtgggtgatgggattaccctgtgccgccgcatcatctgatcattttctcttcatctagatttttcatgacagatattcctttcattaaaacaggttgcgtgaatggtggagttctcaaatgttctactgtcttt

SEQ ID NO: 194929 - DNA, 278 bp, Glycine max
tgattttgtaattgagttcgatcaaatagctcccagtactttaattgatttctgaatatcatcacttaatttgaaggaaagatgttgagcgtagctgagatccgccaggcacaaagggcagaaggcccagcaaccatccttgccattggaactgcaaacccaccaaactgtgttgatcagagcacctatcctgactactacttcagaatcaccaacagtgagcacatgaccgagctcaaagagaaattccagcgcatgtgtgacaagtctatgatcaa

SEQ ID NO: 194930 - DNA, 277 bp, Glycine max
gtgaagtcgctttataacactcaacctaagatgcagaacgaggaaggacagatcaccgagctttacattcctaggaagtgctctgccacaaaccgattgattaccgctaaggaccatgcttcggttcaggttaacattgggcatgtggatgagaatggcgtctacaatggccatttctccacttttgctctctgcggcttcatacgtgctcagggtgatgctgacagtgccctagatcgcttgtggcagaagaagaaagttgaagttaagcaacagt

SEQ ID NO: 194931 - DNA, 274 bp, Glycine max
atgacaatgaggcctgctcttgctttgcttcctcttctatttgctttcttgttagctgccactacagaatcaagaaaagatacaggggaatattggaaaatgatcatgaaagatcaggaaatgccagaaggacttcaaggtcttgtttcatttcaatctgaaaataaccctaagactcaagagcagcttggtaaaggttccaaaaaccattgtgaagagtctctagttacaaatacacaagttaatagtgacttcgaacccataccaagtgtta

SEQ ID NO: 194932 - DNA, 268 bp, Glycine max
agaccctcgatcactctcacgcgctcctatattcgctcctccacactcgctctctcgaacaaccacaacaccatcttcatcacatggcaaacgcagcatctggtatggcagtccatgatgactgcaagttgaggtttttggagctgaaggcaaaaaggacacaccgtttcatagtttttaagattgaggagcagcagaagcaggtcattgtggagaagcttggtgagcctgcccagggctatgaagatttcactgccagccttcctgc

SEQ ID NO: 194933 - DNA, 270 bp, Glycine max
ggaaaatggccattccgtcgtgtttatggaattcaggaacctgttgctgttgtactgtctgccgtctatcttgctatgcagtttcatggttgggtatcttttttcattcttgtgtactataagttgactttgaggctagataagaagacttactatcagtacactggattgtggcatatttatgggattttatccatgaacgcatggctgtggagtgctgttttccatagtagagccgtggaattaacagagatgctggatttttcttct

SEQ ID NO: 194934 - DNA, 271 bp, Glycine max
aaaaatggcacctgcaacactgtctctgtctctcctcctcctgttctcactcagcatcgccgaaaccgttagatcgagcgactacgactacgattgtgtgtacactgcatacgttagaaccggttcggtgttgaagggcggaacggactctaagatcgggctgaagctgtacgacaagtacggctactacatctacattaaaaacctcgaagcatggggcggcttgatgggcaagggctacgactacttcgagcgcggcaacctcgacatc

SEQ ID NO: 194935 - DNA, 273 bp, Glycine max
ggcagctcgtgtgggagatcgtcaagaaaaacaattccttcttggtcaagcagtttggaaggggcacccagagcgtcgaattcagcagagagagcaacaatctctacaacctcaattcgttcaagtactctggtttggcaaacaagaaaactgttactgttcagcctgagggcaaagatcaggctgtgttgttggctacaaccaagacaaagaagcaaaacaagcccgctgcattgctccacaaatctgtgatgaagaaggagttcaggagga

SEQ ID NO: 194936 - DNA, 273 bp, Glycine max
ctgaattcaaaaacatcgaaagagagaggcatggccgagcaaaccttcatcatgatcaagccagatggcgttcaaagaggccttattggcgagattattagcagatttgagaggaagggtttttacttgaaagggttgaaactcgttactgtggaccgtccttttgctgagaagcactatgctgatttgtctgcaaagcctttctttagtggtttggtggattacattgtctctggccctgttgttgccatgatctgggagggtaagaatgtt

SEQ ID NO: 194937 - DNA, 275 bp, Glycine max
ggagaacggtaaaacgaagcatccacaattgctttacgaggccaagctctacaatattcttcaaggaggaagtggcatctcgaacataaaatggtgcggcgtagacggggaggataatgtgcttgttatggacttgctgggacctagtcttgaggatctttttgtctactgtggaagaaagttctccctcaaatctgtgttaatgttggccgatcaaatgatgactagaatagaatatgtgcattctaaaggattcctacacagggatataaaac

SEQ ID NO: 194938 - DNA, 272 bp, Glycine max
acggcctttgtgccggcgacgcatcattcaaatttctgccctatcaactttcgatggtaggatagtggcctaccatggtggtgacgggtgacggagaattagggttcgattccggagagggagcctgagaatcggctaccacatccaaggaaggcatgaatggattaacgagattcccactgtccctgtctactatccagcgaaaccacagccaagggaacgggcttggcggaatcagcggggaaagaagaccctgttgagcttgactctag

SEQ ID NO: 194939 - DNA, 265 bp, Glycine max
gacgaggttaatgcttcctggtttacgattttgtttctaatggaaatctgtcatgctaccttgacgtgaaggaaggtgatggagaagtccttgaatggtcaactagagtttctattgtgaaagggattgctaaaggtatagcatatttacatgcatacaaagcaaagaaacaagctcttgttcaccaaaacatctcagctgagaaagtgctcattgatcagcgatacaacccattgctttcagattctggcttgtacaagcttct

SEQ ID NO: 194940 - DNA, 268 bp, Glycine max
cttcccttactctggtggcgacaatgtcgactcctgctaggaagaggctgatgagagacttcaagaggctgcaacaagacccgcctgcagggatcagtggtgccccccaggataacaacataatgctgtggaatgctgtcatatttggtcctgatgatactccatgggatggaggcacgttcaagttgacactccaatttactgaggactatccaaataaaccaccgactgtacgatttgtgtctcgcatgtttcatccaaatattta

SEQ ID NO: 194941 - DNA, 271 bp, Glycine max
ggcgcattgtctccgacaatattcactccgggaatggcttccctaccctttccgttgatgaacaagtcgttgccatagagctgccactgaaatacggagctcctcattgagtcagtgaacaagagagggctgaacctctctgaggtgctgtgttccacattcacaatggggcggtttggagaaaccaaggacagaaggacagtgagagtggaatgcttcatgaaagaaagcagccccaatatctgggtgaggcctatcagtggactcacaa

SEQ ID NO: 194942 - DNA, 144 bp, Glycine max
attcccccacctggcactggacagagaatatatgagatagatccatctttgctagctcaccgtgaccatcttgatttccgttatggacaatacaaaagagtgtgttatgaaattgacaagcatgaaggcggtctggatacattt

SEQ ID NO: 194943 - DNA, 275 bp, Glycine max
tttccgatggcttctgcagatgttgagtaccgttgctttgtcggtgggctcgcttgggccactgacgaccatgccctcgagagagccttctctcagtacggcgaaatcgttgaaacgaaggtctgtttgttgcaggcatcacatctgatctcacacgattcggattcggaattttctcgatcccgttctgatctgtgatctctgatctgtttgcgttacttgatcttatgatacttgtgttactatatgattcttttattactcacgccaatagg

SEQ ID NO: 194944 - DNA, 277 bp, Glycine max
gggaatagtgctgcaatggcttcaagtcaggaggaggtgacccttttgggagctactggaagcccatttgtgtgcagggttcatattgccctcaagttgaagggagttcaatacaaatatgtcgaagaaaatttgagcaacaagagtgaactgcttctcaaatccaacccagttcacaagaaggttccagtgtttattcacaatgagaagcccatagcagagtctcttgtgattgttgaatacattgatgagacatggaagaacaaccccatcttgc

SEQ ID NO: 194945 - DNA, 276 bp, Glycine max
cgacatcgtcttggccaaccgccctcacttcctcaccggcaagtatatagggtacaacaacaccaccgtcgccgtttccccctacggcgaccactggcgcaacctccgccgcatcatggcgctcgaggttctctccacccaccggataaactccttcttggaaaatcggagggacgagatcatgaggctcgtgcaaaagcttgctcgggactcgcgcaatggcttcaccaaagtagaacttaaatccaggttttcggagatgacatttaacactat

SEQ ID NO: 194946 - DNA, 271 bp, Glycine max
gttactgtctgttcaagctaccatctctctctctctttcttagtgcctccttgccagaagttaaaatggcccaagaaactttcctattcacatctgaatcagtgaacgaggggcaccctgacaagctctgtgaccagatctccgatgctgtgctcgatgcatgcttggagcaggaccctgacagcaaggttgcctgtgaaacctgcaccaagaccaacatggtgatggttttcggagagatcacaaccaaggccaacgtggactatgagaa

SEQ ID NO: 194947 - DNA, 265 bp, Glycine max
atctcgagccagttcggctcagggactgcacggaaacggaggcagtgaagaagtgctcatcaggaagaggggtttctctgagactgaaactggtcatgaagatggagtctgccagcactgtggatttgatgcgtaatctttcgtctaaggaggccgcaaccactggtgacgctgctgcagatccaactgatacgcacaacactttgcctaaggagaagaccttctgccagcagatcctgctaagcctccgccagacgcaggtggt

SEQ ID NO: 194948 - DNA, 269 bp, Glycine max
  unsure (1)..(269): unsure at all n locations
gttcactttcactttaccaactcctaacaatttctctctagttccttcttcaccgcatcaatggagttggacggcgttctcctcggcatgtgcaaccctctcctcgacatctctgcagaagacgncgacgctttcttgcanaaatacggtaacnngttgaacgatgcgattctcgctgaggataagcacaaacctatgtatgaagaattggctaacaatcctaatgtggagtacattgctggaggtgctactcagaattcaatcagggt

SEQ ID NO: 194949 - DNA, 269 bp, Glycine max
ggttcatccaatctccgaaggccttcaccggattgcaaccatgtcgaggagaaaggttagagagccaaaggaggaaaacgtgactctgggcccagctgttagagatggtgaacatgtttttggagtcgctcgcatctttgcctccttcaatgacaccttcattcatgtcactgatctgtctgggagggaaacacttgtccgcatcactggcgggatgaaggttaaagctgacagagatgaatcatctccatatgctgctatgcttgctg

SEQ ID NO: 194950 - DNA, 271 bp, Glycine max
caatggacttgctaggcagtccctgattaatgcagatggcattatagagaaatcatttttgcccggaaagtactccattgagatgtcttcatccgtctacaagaattgggttttcactgaccaagcattaccagctgatctcgtcaagagaggattggcaattgaagatccctctgcaccccatggccttcgccttgtgatagaggactacccttatgctgttgatggacttgaaatatgggatgctattaagacatgggttcatgaatat

SEQ ID NO: 194951 - DNA, 276 bp, Glycine max
ggcgaggagaaagatggaggggaaggagcaggatgtgtcgttgggagcgaacaagttccccgagagacagccgattgggacggcggcgcagagccaagacgacggcaaggactaccaggagccggcgccggcgccgctggttgacccgacggagtttacgtcatggtcgttttacagagcagggatagcagagtttgtggccacttttctgtttctctacatcaccgtcttaaccgttatgggagtcgccggggctaagtctaagtgtagtaccgt

SEQ ID NO: 194952 - DNA, 272 bp, Glycine max
gtgagaggcggcagaaataagaatggcttcaaatcccaaacctttgacttttgaggaggtggctaatcacaacaacaaaaaggattgctggattattatcaatggaaaggtgtatgatatcacgccatttctggatgagcatcctggaggagatgaagttttggtaacgtcaacagggaaggatgccaccattgattttgaagatgtgggccacagtgattctgccatagaaatgatggaaaaatacttcgtcgggaaggttgacacttcca

SEQ ID NO: 194953 - DNA, 266 bp, Glycine max
ctcccatcataaaaaaccgaccctctcctttccctcttcaccaaccaatggctcccccaaaggccgacaagaagcccgcggagaaaaagcccgcagagaaggctccggcggagaagaaacccaaggccgagaagaagatatcgaaggaaggaggaagcgagaagaagaagaagagaacaaagaagagcgtggagacctacaagatttacatcttcaaggtgctgaagcaggttcaccccgacatcggaatctcaagcaaggccatg

SEQ ID NO: 194954 - DNA, 271 bp, Glycine max
ctttgactcacaaccctattgcgtgctttgcaatcgaccccgcctatggccaacagtaacctccctcgaagaatcatcaaggaaacgcagcgtttgctcagtgagccagcgcctggaattagtgcgtccccttcggaggacaatatgcggtatttcaatgtgatgatccttggcccgactcagtcgccatatgaagggggagttttcaagttggaattatttttgccagaagaatatccaatggctgctccaaaggttaggtttctgacaa

SEQ ID NO: 194955 - DNA, 267 bp, Glycine max
tgcatgatctccaattccaccagtgttgttgaggtcttctctcgcatcgaccacaaatttgacctcatgtatgccaagagggcgttcgttcattggtatgttggtgagggtatggaagagggggagttctctgaggcccgtgaagatcttgctgccctggagaaggattatgaggaagttggtgcagaggcaactgaagatggtgatgaaggagaggattatgattagaagtttgcactattatgttactttctgtgttgtttttct

SEQ ID NO: 194956 - DNA, 265 bp, Glycine max
ggtaacactcacttgtggactagtgggaggtgacacccttctatcttctacacccgctagcggagtagtttgtatcgctcagatcatgcagaatgaaagggcgtacatatcactcaagttcctaaaggaattgttggggaaaattcctcttgtacacgttgatgatgtctgtgaagctcatattttctgcatggaaagcacctcgatcagtggaagattcttgtgtgcaagttcatatatttcattagaagagatggctaatcat

SEQ ID NO: 194957 - DNA, 266 bp, Glycine max
gtgggatgataccaagaatatttgaccacttatttactagaattcaaaaggacaaagaggctcgaagagatgaaaagataaaatttacatccaaatgctctttcttggagatatacaatgaacagatccttgatcttttggacccatcatctaacaatctgcagataagagaagacagtaagaaaggagttactgtggaaaatcttacggaaacagaagtcacttatgctcgagaagtcattcaattacttattcagggagctgcg

SEQ ID NO: 194958 - DNA, 263 bp, Glycine max
ctcgagccgctcgagccgttctcttgcggctagggttttagcgagctcttctagatttaaggaacatgggtaaggaaaaggttcacatcagtattgtggtcattggccatgtcgactctgggaaatccactaccactggtcacctgatttacaagcttggaagcattgacaagcgtgttattgagaggtttgagaaggaagctgctgagattttcaagaggtctttcaagtatgcctgggtgctggacaaacttaaggctgag

SEQ ID NO: 194959 - DNA, 282 bp, Glycine max
  unsure (1)..(282): unsure at all n locations
ccctcgagccgaatcggctcgagctgaacattctcttttcccacaacttaatcagatgaagaccttgaaatatctgattctcaggacttgcaacatcaatggaacactacctccatatcttgggaatatgacaactttaaaaaacttagaccttagctttaacaaattgactggaccaattccaagtacctatgatgccctaagaaaagtggattacatatatttaactgggaatcttctcaatggacaagtacctgcatggacagagnaaagtgacaatgt

SEQ ID NO: 194960 - DNA, 281 bp, Glycine max
gaagaggggaaaggttccatgtgaacggcccttgcacatgggttagtcgatcctaagggacgggggaagcccgtctgatagcgctctgtgcgcgtactccgaaagggaatcgggttaaaattcctgaaccgggacgtggcggctgacggcaacgttagggagtccggagacgtcggcgggggccccggaaagagttatcttttctgtttaacagcctgcccaccctggaaacggctcagccggaggtaggctccagcggctggaagagcaccgcacgccgc

SEQ ID NO: 194961 - DNA, 279 bp, Glycine max
attcttcttcttcttcttgttcttgttctatctgtgacgagcatcatggcctcgagagcagtgctattgttggctatgtgtgtgcttccggccatggttgtggccattcgcccagcaaagaaccctttttgcgtgaagggtcgcgtctactgtgacccttgccgtgctggttttgagacctcagcaaccacctacattgccggtgctgagattatgttgcaatgcaagagcagggttagcaacgaggttgtgtacaccaagaaggggtacactgactca

SEQ ID NO: 194962 - DNA, 282 bp, Glycine max
tgaactggtctgaactagctcaaaggccatggtcgctcgtggggatcttggagctgaacttccaatagaggaagttcctttattgcaggaagacatcattcgaagatgtcaaattatgcaaaagcctgttatcgtggcaacaaatatgcttgaaagcatgattaatcatcccacaccaacaagggcagaagtttcagacatcgcaattgcagtaagacaaggtgctgatgctatcatgctttcaggagaaactgcacatggaaaatttccattgaaagctgt

SEQ ID NO: 194963 - DNA, 265 bp, Glycine max
gttcctgcaacagaacaaccagccgctgaggctcctgccccagaatcaaccaccgaagcaccaaaggaagaaaccaccgaggcaccaacagaaacagtagaaaaaacaactacagaagtagccccagaggagcctaaagaagttccagttgagaccgaggaggtggtggcaaaggagacagaggaagagaagccagcagaagagaaatcagaggagaaaactgaagaagtgaaagaagaagcagaggagcctaaagaaactactg

SEQ ID NO: 194964 - DNA, 279 bp, Glycine max
cctcgagccgctcgagccgctcgagcggtcgaggtgcttggtgaccgggaagtggaaacaccttcatcaccgacaagcaactatcacacgacaccagcattgaagaatccccttgactatatgttggtatggtgttccaatgcaggaagtaaggaattgccaattggttctgcttacttttgggtgccccagcttcctgaaggttacagtgcccttggctatttggttactaatgtgcccgacaagcccaatttggatgaaatgatttgtgttcgtgct

SEQ ID NO: 194965 - DNA, 279 bp, Glycine max
ctcgagccgctcactgcagatctcaatccatggctaccattgttagcatcaaggcccgccagatctttgacagtcgtggcaatccaaccgtcgaggtggatttgacatgctccgatggtacttttgctagagctgctgttccaagtggtgcatccactgggatttatgaggcccttgaattgagagatggaggatctgactaccttggaaagggtgtatcaaaggctgttgacaatgtgaacaccattattgcccctgctttggttggcaaggacccaa

SEQ ID NO: 194966 - DNA, 273 bp, Glycine max
  unsure (1)..(273): unsure at all n locations
anttcctactccaancanttncttttttcccgcagtcatgggcaaggtcaagatcggaatcaacggatttggaagaatnnnaacgtttggtggccagggtggctctgcagagagacgatgttgaacncgttgccgttaacgatcctttcattaccaccgattacatgacatacatgtttaaatacgacagtgttcacgggcactggaagcatcacgatgtcaccgttaaggatgagaagacccttctcttcggtgacaagccagtcatgtttt

SEQ ID NO: 194967 - DNA, 283 bp, Glycine max
agctgctgttattcgcaccgcaaacaaacagtgagccatggccgtcggaaagaacaagcgcatctccaaagggaaaaagggtggcaagaagaaggcagctgatccctttgccaagaaggattggtatgacattaaggccccttctctttttcaagtgaaaaatgttggcaaaaccctcgtctctcgtacgcagggtaccaagattgcttctgaaggacttaaacatagagtgtttgaggtctccttggctgatcttcaaggggatgaggatcatgcattcaag

SEQ ID NO: 194968 - DNA, 279 bp, Glycine max
cacacacgcagaaaggttgaaagtagagggacttgattcagtggaggtggacagagatggctaacaacgcagctgcttgtgctgagagagcaactagtgacatgctcattggtcctgactgggcaatcaacatagagttgtgtgatatcattaatatggaccctgggcaagcaaaggatgctttgaagatactcaagaagcgtttggccagtaaaaatccaaaaatacagcttctggctctttttgtattggagactcttagtaagaattgtggtgaaa

SEQ ID NO: 194969 - DNA, 278 bp, Glycine max
agtgtctggtgccttaacttgttcttcattgtgccctttctctgagattgcatataggtttttagtggtgaagcatcaaaatggggagatattcaataccctttatgggtgttctgctactgttctgtctggtttcatcttcagaggcagaatatttgaagtataaagaccctaaggcgccactgaatgtcagaatcagtgacttgttgaagcgaatgtctctcgaagaaaagataggccagatgacacagattgacacgagtgttgctactcctgat

SEQ ID NO: 194970 - DNA, 273 bp, Glycine max
cttctattacttgcttctttcttcaccatgtcacttgctgggaaactcaccactgaaattggggttcatgctaacgctgcaaagtggttcaacctctttgcaacacaacttcatcatgttcaaaaccttactgatagagtacatggaaccaagctgcatcaaggtgaagactggcatcacaacgagacagtcaaacactggacttataccatagatggtaaggctacaacatgtctggagagtattgaatccatcgatgaacagaacaaaaca

SEQ ID NO: 194971 - DNA, 281 bp, Glycine max
agccaagatcttctttgtattgctgttatgtctgatcatagcagcttcttctgggtttgtgaattgctttgatgttgaaaagaaggaaaagattggaatatttgagctcaataaaggtgacctttctttgaaggtcaccaactggggtgcttcaattttgtccctggtgattcctgataagaatggaaagttgagtgatgccgttcttggatatgattctgcccttgattacactaatgatacaacatattttggagcaactgttggccgggttgctaaca

SEQ ID NO: 194972 - DNA, 283 bp, Glycine max
cggctcgaggtccaagaatgtgtgtgtaattggagctggaccctcggggctattggcagcgagggagctgagaaaagaaggtcacaaggtggttgtgttggagcagaaccatgatattggaggtcaatggctatatgacccaaatgtacaagaggaggatacccttaggaagagacccttggctaaaggtgcatagcagcatctatgagtctttaaggttcatgtctcccagagagatcatggggtcaactgatttcccctttttagtcaagaaaggtagaga

SEQ ID NO: 194973 - DNA, 291 bp, Glycine max
gctcgagctttcatactcacccttattgcagtattttgacctcaatggcaccaagttcggcagtgccagatgaacaggttgttgttggagaggagatagagcatgtaagagtgatcactttgaacaggccaaggcaattgaatgccatctcaccagaattggtttctctgctagcaacatatttggaaaagtgggagaaggatgaggaagcagagctagttatcataaagggatctggtagggctttttgcgctggaggggatttgagagtgttctatgacggcaggaaaa

SEQ ID NO: 194974 - DNA, 278 bp, Glycine max
  unsure (1)..(278): unsure at all n locations
cctcgagccgaatcggctcgagccatcttttaacagttcccctcgcanattctgaagatggctggcattgcattcggacgattggatgattctttcagtttaacctcaatcaaggcctatattgctgagttccattcaaccttgctctctgtttttgccggtgttggttcagccatagcctatggtaagttgacatcagatgcagcacttgatcctgctgggttactggcagttgctatttgccacggttttgcactctttgttgcagtttctgttgg

SEQ ID NO: 194975 - DNA, 274 bp, Glycine max
tgccgttcttggcagcagtgagggtgtcactggaactattcacttcgttcaggagggaagtggtccaaccaccgtaactggatctcttgctggtcttaagcctggtctccatggtttccatgtctatgccttgggggacactaccaatggttgcctctcaactggatcacatttcaatcctaataacaaggagcatggtgcccctgaggatgagaatcgtcatgctggtgatcttgggaatgttaatgtcggtgatgatggtactgtcagcttc

SEQ ID NO: 194976 - DNA, 112 bp, Glycine max
gttctcagtcatggggctttgcttcctttgttggcacaattaaatgaacatgcgaagctttctatgcttagaaatgctacctggacactttcacacttctgcaggggcaagc

SEQ ID NO: 194977 - DNA, 277 bp, Glycine max
ctcgagccgcgattttgtagtaagtgaggtgccaatatggtgaagatagctcttggtactctggatgactcttttagcgctgcctctcttaaggcttatttcgcagagttccacgcaactctgattacacgtgttcgctggtgttggatcagccatcgcttacaacgagcttacaaaagatgcagccttggatccaacggggctggtggcagtagctgtggcacatgcatttgcactgtttgtaggtgtctccgtcgccgccaacatctcaggtggc

SEQ ID NO: 194978 - DNA, 278 bp, Glycine max
  unsure (1)..(278): unsure at all n locations
caccancacttcatcaactttacttgacaacaatattgtaaaactcaaaatctagtttcatacttngtttcttcnncttgaaatggctctccaggctgcttctcttgttcctgcttctttctcggttcttaaagagggaaagagtggtgtgtctctcaaggactccaccttgttcggtctttcattttcagaacctatcaaagctaacttcagctcttctgcattgaggtncaagagggaattcgaacaaaagctctgtgctgtgagggccgnaacag

SEQ ID NO: 194979 - DNA, 277 bp, Glycine max
atcctcttctctctctctctctctctctcttaattcctgaaaagcaagtaactaaggaaaagaaaacacaacacacacacaaaggaaaaaacagaaaaaccatgtcttctccaagcaagcggcgagagatggacttgatgaaactgatgatgagtgactacaaggtggagatgattaatgatggaatgcaagagttttatgtgcatttccatggacccaatgagagtccttatcatggaggtgtgtggaaagtgagggttgagctgccagatgctta

SEQ ID NO: 194980 - DNA, 263 bp, Glycine max
tctcgagccgattcggctcgagatccttatcctgtttctttcaatacaagtcatttctagttctagcttgaatcccaacgcaccgatgttcgtgccactcgcctatcggacggtggaggatttctccgaccagtggtgggacctcgttcactcctccccctggttccgcgactactggctccgcgagtgcttccaagatccccagttccaaaacgacgacgctttcgacttcgactttgacctagatctccaagatgaagatg

SEQ ID NO: 194981 - DNA, 274 bp, Glycine max
cagccttatccggtttagggtttcggtttttgacccaacctttgacgtatcgaaaccttaagtttcggatcaggtctgagcaatctggttggtagaacctttggtcttagagagtcaagttttatgtctgaattagacgatcaaattcctactgccttcgatccttttgctgatgcaaatgctgatgactcgggtgctgggtcaaaggagtatgtgcatattcgcgtacagcagcgaaatggaaggaaaagcctgacaaccgttcagggattga

SEQ ID NO: 194982 - DNA, 278 bp, Glycine max
cggctcgagagtttatagacaatctcttctctcggcgatgacaaagttgtgtttcaatggacaataataatattctgggtcttctcaagcttcgaattaaaagaggcattaatcttgccattcgcgctgctcgtgccagcgatccttatgtcgttgtcaacatgggcgatcagaagctgaagactcgtgtcataaaaaaaaactgcaatcctgactggaatgaagaattgaccctctctgtaaaggacattaaaaccccaatacatctgacggtttat

SEQ ID NO: 194983 - DNA, 275 bp, Glycine max
cgaaaccgaagagagagaaaacgtgaaaccgagagagagagagagagagatgagggaaccatcgtcggtgggattcgaaggcaacggcgtcgtttcttcgccgccgcaagctctcatcgagagactgaaagactacggccaagaagacgttttcgccctctggtacgagctctcccccgaggaacgcgagtctctcgtcaaggacattgagagtttagatctttcgagaattgaccggattattcgatgctcgctgcgatctcaaggactgccgg

SEQ ID NO: 194984 - DNA, 277 bp, Glycine max
gtttacacatctctccaacctttcactttcgtttctcagttttattcgaatccctctctcaatctcctttccaaatggccagcgttgaggttgcacagcaaacaccaacaacagttccagaaaatgaaacaaccgaggtaagcaagacccaggaaacaaccccagtcactgaggctcctgcaacagaacaaccagcagctgaggttcctgcaacagaacaaccagccgctgaggctcctgccccagaatcaaccaccgaagcaccaaaggaagaaac

SEQ ID NO: 194985 - DNA, 271 bp, Glycine max
ggacacatcactagtgtttactgtgaggaggagtgaggcagagctgatagctccggcgaagccacccctcgtgaagtgaagctactctcagacatagatgaccaagatgggttacgtttccaaattccggtgatacagttctatcgccacgacccatcaatggcagggaaagaccctgtcgatgtgataagaaaggctgtggccaaaacgcttgtgttttactatccttttgcaggtaggcttagggaaggacttggtcggaaactgatgg

SEQ ID NO: 194986 - DNA, 274 bp, Glycine max
ctcgagccgttcctctcagaaccctcgatcactcccacgcgctcctatatcctctccttcaacgtcgctctctccaacgatcacaacaacatcgtcatcccatggcaaacgccgcatctggtatggcagtccatgatgactgcaagttatagtttttggagctgaagacaaagaggacacaccgtttcatagtttttaagattgaggagcagcagaagcaggtcattgtggagaagcttggtgagccagcccaaggctatgaagatttcactgc

SEQ ID NO: 194987 - DNA, 276 bp, Glycine max
aagaatactaagcagcagtgcagggaagttggtgtgtgtcaccggtgctgccggttatattgtttcatggattgtcaagttcctacttgaacgtggttacactgtcagggccactgttcgaaacccaaatgatcacacgaaggtagaacatttgctaaaacttgacggtgcaaaggagagactgcacctttttaaggcagatcttttgggtgaaaattcttttgactccattgttgagggctgtgatggcgtctttcatactgcttctccttttat

SEQ ID NO: 194988 - DNA, 277 bp, Glycine max
ggcacttcgttgcttggtgatgtccctttctgttctcttcactcttggtcttgcgagagaaagccatgccagagacgaagatttttggcatgctgtttggccaaacactcccattccaagttcattgcgagatcttctaaagcctggccctgcaagtgttgaaatcgatgatcaccctatgcaaattgaagaaacacagtacccgaaaaccaccttctataaagaagaccttcatccaggcaaaacaatgaaagtacaattcagcaagcctcccttt

SEQ ID NO: 194989 - DNA, 273 bp, Glycine max
cgctctcaatcaggcgaagaaagtggtgctaagtctgtttctacttacaggtcttcttcacatcctataactgcaccgtcccccttgtgtggtctgcctgaattttctcaccttggctggggacactggtttacgttaagggacctagaacttgcaacaaacaggttttcaaaagacaatgttattggtgaaggtggatatggtgttgtttatcagggccagttaatcaatgggagtcctgtggctgttaagaagctactcaataatctagga

SEQ ID NO: 194990 - DNA, 280 bp, Glycine max
cactcgagccgaatcggctcgacacacgagataaccagttttctcttacattcatcaatggcaactgcgaggaacgtgaaggatactttcgcctcacgatttcgtgaaggcttatgcttcccacctcaagcgttccggcaagatgcagcttcctgagtggaccgatattgtaaaaacagcaaaatttaaggagttggctccatatgatcctgactggtactacattagggctgcctcaatggcaagacagatctatttgagaggtggtcttggtgttggt

SEQ ID NO: 194991 - DNA, 274 bp, Glycine max
cggctcgagtacccctcttagtcccaattttctagggttttattcattttccgatggcttctgcagatgttgagtaccgttgctttgtcggtgggctcgcttgggccactgacgaccatgtcctcgagagagccttctctcagtacggcgaaatcgttgaaacgaaggtctgtttgttgcaggcatcacatctgatctcacacgattcggattcggaattttctcgatcccgttctgatctgtgatctctgatctgtttgcgttacttgatctt

SEQ ID NO: 194992 - DNA, 272 bp, Glycine max
ggcacttcgttgcttggtgatgtccctttctgttctcttcactcttggtcttgcgagagaaagccatgccagagacgaagatttttggcatgctgtttggccaaacactcccattccaagttcattgcgagatcttctaaagcctggccctgcaagtgttgaaatcgatgatcaccctatgcaaattgaagaaacacagtacccgaaaaccttcttctataaagaagaccttcatccaggcaaaacaatgaaagtacaattcagcaagcctc

SEQ ID NO: 194993 - DNA, 274 bp, Glycine max
gtttacacttgttcttgatctcaatgagacattgattcactatatatggacgcgagatacaggttggcagacttttaaaagacctggagttgatgccttcttggaacatttagctcagttctatgaaatagtgggttacacagatgaacaaaatatgtttgtagaccctgttatagaaaggctggatactaagcattgcattagatacaggctatcaaggccggctactaagtatcaagatgggcaacacttcagagacctctcagaactaaac

SEQ ID NO: 194994 - DNA, 272 bp, Glycine max
accgcctcttccgtaggcagcagcaatggcctcaaatcccaaaactttgacctttgaggaggtagctaagcacaacaacaaaaaggattgctggattattatcaatggaaaggtgtatgatatcacaccatttttggatgagcatccaggaggtgatgaagttttgctgacgtcaacagggaaggatgccaccattgattttgaagatgtgggccacagtgattctgctatagaaatgatggaaaaatacttcattgggaaggttgacactt

SEQ ID NO: 194995 - DNA, 275 bp, Glycine max
tgccagtcctaaaacaattggagtctgctaactttcagagattttacttcgagaacaagcttgaaaatgctacaaaggacacaaataatatgaagttcaggaaccccaaatatttgtcaatattgaaccatttgaggttctacttgccagacatgtatccaaagctgcataaaattttgtttttggatgatgacatagtggttcagaaggacctaactgggctatggaagattgatatggatggcaaggtgaatggagctgtagaaacatgtttt

SEQ ID NO: 194996 - DNA, 268 bp, Glycine max
tcccgcctcttccgtaggcagcagcaatggcctcaaatcccaaaactttgacctttgaggaggtagctaagcacaacaacaaaaaggattgctggattattatcaatggaaaggtgtatgatatcacaccatttttggatgagcatccaggaggtgatgaagttttgctgacgtcaacagggaaggatgccaccattgattttgaagatgtgggccacagtgattctgctatagaaatgatggaaaaatacttcattgggaaggttga

SEQ ID NO: 194997 - DNA, 185 bp, Glycine max
gcaagagtatctgtcacagaattaagtggtcaaatttgtcagatctgtggggatgagctggaagttactgtgaatggggagccatttgttgcttgcaatgaatgtgcattccctgtgtgcagaccttgttatgagtatgaaagaagagatggcaaccaagtttgtcctcagtgtaaaaccagata

SEQ ID NO: 194998 - DNA, 271 bp, Glycine max
tgaacatgcagctgcaaataacaagttcttcatgatgaacctttctgccccatttatctgtgagttcttcaaggatgcactgaataaagttctgccatatatggactacgtttttggtaatgagactgaagcaagaacattttctaaagctcaaggctgggagactgataatgttgaggaaatagctttgaagatttctcagttgccaaggcatcggaaacacataaaaggattacggttatcacccaaggtgcagatcctgtttgcgttg

SEQ ID NO: 194999 - DNA, 270 bp, Glycine max
acgttgtataattttagtagcatggcaatgccatgcgtacgatatgttccctctccgaatgaaaactggctatggtgcccgtactccggaggtgaaatgcgcaagttggaggcttactgtggaagcacacaacatctttggctttgagaccattcctgaagagtgcgttgaagcaacaaaggaatacatccatggggaacaatatagatcagactccaaaacagttaaccaacaagcttacgtgtatgccagagacctcgaagtccatcc

SEQ ID NO: 195000 - DNA, 270 bp, Glycine max
agcctctccattacaaaggtagctcattccatagaattattcctagctttatgcttcaaggaggtgattttacacaaggaaatggaatgggtggagaatcaatttacggagagaagtttgctgatgagaacttcaagttaaagcatactggaccaggacttctatcaatggcaaatgctggtcctaataccaatggttcacaatttttcattacaactgtgacaactagctggttggacggaaggcatgttgtttttggtaaagttcttt

SEQ ID NO: 195001 - DNA, 270 bp, Glycine max
gttcaacattgcgaatcccaccactggttgtcagaagaagctggagatcgatgatgacctgaagctacgagcattttgggacaagaggatctcacaagaggttgttggtgatgctctgggtgaggaattcaaaggctatgtcttcaaaattactggaggttgcgacaagcaaggatttccaatgaagcaaggagtgttgacccctggtcgtgttcgcctcttgctgcatagaggaactccttgtttccgtggttatggaaggcgcaatgg

SEQ ID NO: 195002 - DNA, 269 bp, Glycine max
gtttggttgaaagtagcatagatgtttcctttcgggcaaaagggtcaaaagataaaggggactatggtggttatgcagaagaatgtgttggatatcaacagcatcaccagtgttggagggctcgttgaccaaggcttaggcttcatacgcagtgcagtcgatgcacttacttttgcagccaccaaaatctctctccagttgattagtgctctcaaggctgatggtgggaaaggaaaaattggaaagagtacaaatttaagaggaaagat

SEQ ID NO: 195003 - DNA, 270 bp, Glycine max
cgaccgggtatcaaaggcagagaagagagtaacaaggttgcttcgaacagtttagaatcatgtcttggtgcaccattgagtccgatcccggtgtgtttacagaactcattcagcaaatgcaagtgaaaggagtacaggttgaggaactgtattcattggaccttgactctctcaacagccttaggcctgtttatgggttgatttttcttttcaaatggcgtccaggagaaaaggatgatcgtgtcgttatcaaagatcgcaaccctaact

SEQ ID NO: 195004 - DNA, 268 bp, Glycine max
cttaacaacagcacaaagcgggttactgtctgttcaagctaccatctctctctctctttcttagtgcctccttgccagaagttaaaatggcccaagaaactttcctattcacatctgaatcagtgaacgaggggcaccctgacaagctctgtgaccagatctccgatgctgtgctcgatgcatgcttggagcaggaccctgacagcaaggttgcctgtgaaacctgcaccaagaccaacatggtgatggttttcggagagatcacaac

SEQ ID NO: 195005 - DNA, 178 bp, Glycine max
gttcttccttgcgctcctcctcgttcgttcgttctccctcgcgtagatcggcaatggcggagaccgagacgtttgctttccaggctgagatcaaccagctcctcagtctcatcatcaacaccttctactccaacaaggaaatcttccttcgtgaactcatcagcaacgcctctgatgc

SEQ ID NO: 195006 - DNA, 312 bp, Glycine max
gggaacatatgcagtactgtgttgatcatcctgaagagataagcaagcttgcaaaggtgaaagctcaggtttctgaagttaagggtgtcatgatggagaatattgaaaaggttctggacaggggtgacaagatagaacttctggtggacaagactgagaaccttcataaccaggcacaagatttcaggacttctggaaccagaatccgtcgaaaaatgtggctgcaaaacatgaagataaagctgattgtattgggaatattgataggactattatcaggctctctcctcctcctgttctcactctgcatcg

SEQ ID NO: 195007 - DNA, 312 bp, Glycine max
cctcccctcacactctccaaaccctagcggcactacacacgttatctctctctctctctctctctctccctctctccttccccaagatgtcgagcgccgatcccgagcaccgagaagaggaggaggcacccgccgtcggcgacgacgaggacaccggagcacacgtcgctcccatcgtcaagctcgaggaggttgctgtcaccaccggcgaggaggacgaagatgcaatcctagatctcaaatcgaagctttaccggttcgacaaggatgggaacagtggaaggagcgacgcgcgggcacgtgaagttctga

SEQ ID NO: 195008 - DNA, 275 bp, Glycine max
gctaaggcttggactgcctggaaacgtaggaggcactggcactgaagaagtgctcatcaggaagagaggtttctctgagactgaaactgaaactgaggaggatgagtctgctaccactgtggatttgatgcttaatctttcttctaaggaagctgctgctgctgcagatccaactgataagcacaagactttgcctaaggagaagactcttctgcctgcagatcctgctaagcctccagccaaggcacaggtggtaggttggccacctgtgcggt

SEQ ID NO: 195009 - DNA, 282 bp, Glycine max
tgcgtcctcctggggctatccttgcacctggtgagagtatcatagcaacagtgttcaagtttgtagagcaaccagaaaataatgaaaagcctgaaaaaactggactcaaatttaaaatcatgagcttgaaggtgaaaggattaattgattacgtccctgaactgtttgatgagcagaaggaccaagtagcagtggagcagattttgcgagttgtttctctagatccagagcgtccctgtcctgctttggaaaaactgaaccgacagctggctgatgctgatg

SEQ ID NO: 195010 - DNA, 307 bp, Glycine max
ctgatttgtagtttgttttgtgctttagataaaagttctgccaaatcaagaggggttttaagatcatagtgtgtgttttgcaacaatggctaagttctttgctgctatgatcttggcactctttgccatttccatacttcaaacagtggtaatggctgctaatgaacaaggaggccacttgtatgacaacaagagcaaatatggaagtggaagtgtcaagagttaccaatgcccatcacaatgctcgaggagatgtagccagacccaataccacaagccctgcatgtttttctgtcagaagtgctgc

SEQ ID NO: 195011 - DNA, 309 bp, Glycine max
cgggtgaggacaaccatagtgaccactccactcaacgtagccactcttcgtggaacaataggaaaagagacagagacagatatagaaatcctgacggtgaaattccctagtgcagaggctggtttacctgagggatgcgaaaatacagagtcaatcccctcccctgacttggtactgactttcttaaaggcaatcaggatgttggaagcccccttggaacacctactccttcaacaccgtcctcattgccttatagccagtgctttcttcccttgggcatctcattccgccactaaactcaaaatcccg

SEQ ID NO: 195012 - DNA, 214 bp, Glycine max
cccaagcattgtgacattggctggatattgtgcagagcatggccaacgacttctagtttatgagtatatagcaaatggaaatctgcatgacatgctccattttgctgaagatagcagcaaggcattgtcttggaatgcccgtgtacgcatagcacttggcacagcccgggctttagagtacctgcatgaagtgtgcttgccttctattgtacat

SEQ ID NO: 195013 - DNA, 247 bp, Glycine max
taggcatcattcatacactgaacgaacgctcagctcagtcaggtgccggcgttcctctttcacgttctcatggaaaacgacgacgtcgacatgcacgctgccgacaccagcgaagaattggatgacatgaagaagcgcttgaaggagatggaagatgaagctgctgctttgcgagagatgcaggccaaggtcgagaaggaaatgggatctgcgcaagatcctgcaaatgcttctgcaagtcaggcca

SEQ ID NO: 195014 - DNA, 307 bp, Glycine max
cctcgagccgaatcggctcgaggctccctgagagagctcgtcgcggacgttgcagaagaagaacgcaagatgaagttcaacaacgcgaatcccaccactggatgccagaagaagctcgagatcgacgacgatctgaaactgcgagcattttgggacaagaggatctcacaggaggtcatcggagatgcactcggtgaggaatttaagggctatgtcttcaaaattaccggaggttgtgacaaacaaggatttccaatgaagcagggagtgctgactcctggtcgtgttagacttttgcttcacaggg

SEQ ID NO: 195015 - DNA, 292 bp, Glycine max
ctcgagccgtgaaatgggtcaatttcctcatgttacaagctatgttagcaaggcagaacagtcaccagatgcccttgaagcagtaacagttgcaaagctacgatgtgctgcaggattggctaatctagaagccaaaaagtacaagcttgctgcccgaaagtttctagaaccaggacctgaactgggaagtcactataatgacgtaattgcacctcaagatgttgcaacatatggaggactttgtgcacttgcaacatttgatcgggcagagttaaagagtaaagttatagac

SEQ ID NO: 195016 - DNA, 234 bp, Glycine max
ctcgagccgctccagattacaccatatttgttggtgacttggctgcagatgttactgattatcttcttcaggagacatttagggctcgttataactcggtgaagggtgcaaaagttgtcattgataggctaactggccggaccaagggatatggctttgtaaggttttcagatgagagtgagcaagtgagggctatgactgagatgcaaggggttctttgctcaacaagaccca

SEQ ID NO: 195017 - DNA, 272 bp, Glycine max
tgggggtatgttgagttcgaggagtcgccgccggacgatttcgatccggcgcatccgtacaaggacccggtggcgatgctggagatgagggagcacatcgtgagggagaagtggatccaaatcgagaaggccaagatcattagggagaagctccgatggtgctaccgcatcgaaggcgtcaaccacttccagaagtgccgccacctcgtcaaccaatatctcgagtccacccgcggaatcggttggggcaaggacggtcgtcatctttctct

SEQ ID NO: 195018 - DNA, 300 bp, Glycine max
tctcgagccgctcgagccgtttttttttacataatcatggccatgaaacgtgctgttcaatccctgcttgcctcatcttccaccctcaccaggaaccttcatgcctcaggagaaaaaaagaagattgtaggggtgttctacaaagggaatgagtatgcttcgaatcccaattttgtgggatgtgttgaaagagcattgggtatacgtgagtggttggaatcacagggtcaccagtacatagtcactgatgacaaagagggccccgattcagaactagagacacacttcctgatgccattg

SEQ ID NO: 195019 - DNA, 167 bp, Glycine max
ccaaaacttagggttgggcctttttttgaggttttcagcgcttctttctcacaatggttcttcagaatgatattgatttgctgaatcctccagctgagttggagaagagaaagcacaaactcaagcgtcttgttcagtcaccaaactctttcttcatggatgttaag

SEQ ID NO: 195020 - DNA, 243 bp, Glycine max
ggatcctacaactatggaggaaagtcgtttaaggcttcatccggctcttctggtgcaagcttaaatgaatgcaaaagtgttgctcttagggctctcaaagttaatgagtcgacatgtactcatatgaagtgtacttttggtgggatatggaatggtggagggggggatggacagaagaacctttttgttgcctctttcttctttgaccgggctgctgaggctggttttgctgatcaaaacttg

SEQ ID NO: 195021 - DNA, 240 bp, Glycine max
cgccactggtttcgatcccacacccacaaacgcaaaccctccatcctttgaatgctcttgcgttttcctttcactacctcattcctaactcacacacacacaacgggtgatatcaatgtcgactcctgctaggaagaggctcatgagagatctcaagaggctgcaacaagacccgcctgcaggaatcagcggggcacctcaggataacaacataatgctgtggaacgctgtcatatttgg

SEQ ID NO: 195022 - DNA, 287 bp, Glycine max
aagccccactcaaccaccacactactctctctgctcttcttctacctttcaagtttttaaagtattaagatggcagagacattcctatttacctcagagtcagtgaacgagggacaccctgacaagctctgcgaccaaatctccgatgctgtcctcgacgcttgccttgaacaggacccagacagcaaggttgcctgcgaaacatgcaccaagaccaacttggtcatggtcttcggagagatcaccaccaaggccaacgttgactacgagaagatcgtgcgtgacac

SEQ ID NO: 195023 - DNA, 304 bp, Glycine max
ggctacctccatggtgaagcttatgcttttctctgctctcatactcttgtccttgcaagcagttgtgtctgtaacaccactgcattttcaacatccactagaccctttaaccaaacaagagataagtcttgtccaaaccatagtccaaaacaagtacccaagctcaagtaacaggttgagcttccactacattggactcgccgaacctgaaaaggatgccatcctcaaatgggaatccatcaaaccaactgttataactgtccctcgcaaagccttggccattgttataatcaacagccaaacc

SEQ ID NO: 195024 - DNA, 298 bp, Glycine max
atcccaattccccatcggcagttattcatagacggagactggaaagtccccgtcctcaagaatcggattcccatcatcaacccttccacccaacacatcatacatgatatcccagcagctactaaggaagacgttgatctcgctgtcgctgccgccaaagctgccctctcccgcaacaagggcgccgattgggcctccgcttccggctccgttcgggctcgctacctccgcgccatcgctgccaagatcaccgagaaaaagcctgaactagcaaaactcgaagctattgactgtggaa

SEQ ID NO: 195025 - DNA, 215 bp, Glycine max
  unsure (1)..(215): unsure at all n locations
ggaagntcgaagaggaaaagctattggacaactgaggttgaaactgccaagactgaaaatgatgcaaagataatacttgggttgagccctggtgagctttcagtggtgaatcctaacaagaaaacctctgttggacatgatgtgggataccgtttgattccagcaatcccagctcatcctcttctcacagatgacgattatccacaaatacgtgg

SEQ ID NO: 195026 - DNA, 206 bp, Glycine max
  unsure (1)..(206): unsure at all n locations
atttccaatgctcataccttttgtgggactggttggtccatttcagaattcatctgggatgtttagtatngtggccttcaactcatggtctctaagttattaagcgaagaaaaacacaaggaagcatagggatatacttgaacaatactaatcaaaagcagagtactatatttgttcatgtctaaacaaaaacaatgatagcaata

SEQ ID NO: 195027 - DNA, 309 bp, Glycine max
caaacttgaagcctctaattctcttcttttatctcctagccattgttgttatgatttcaataccatcaagccactgcagcagaaccttgcttccagaaaacgaaaagctgatagagaacacttgcaagaaaactcccaactacaacgtttgccttgagtctctgaaggcaagccctgggagctccagtgctgacgtcacagggctggctcaaatcatggtcaaagagatgaaggccaaagcaaacgatgcattgaaaagaatccaagagttgcagagggtgggagcatcggggcctaagcaaagaagag

SEQ ID NO: 195028 - DNA, 306 bp, Glycine max
ccagaacaatggtttctctggtgatttccccattggattgtggtcattacccaaaattaagctcatcagagctgaaaacaacagattctcagggaagatacccgagtcagtttcaggagctggtcagttggagcaagttcaacttgacaacaacacctttgctggtaaaattcctcaaggtcttggccttgtcaagagcttatacagattttctgcttctctcaaccgtttctatggtgaacttcctccgaacttttgtgactctcctgttatgagcatagtgaatctctcccacaattctctttc

SEQ ID NO: 195029 - DNA, 258 bp, Glycine max
cggcaacaaaggcatctgctgcgacctggcagcaaatggtgaatcagatgcaaaaggcagcattgtctactcgccttgggattccaatgatttatgggatagatgcagttcatggacacaacaatgtctacaatgctaccgtttttcctcacaatgttgggcttggagttaccagggatcctgtgctcataaagaagattggagaagcaactgcccttgaagttagagctactggaattccgtatgtctttgctccat

SEQ ID NO: 195030 - DNA, 290 bp, Glycine max
caaaatcggttttcttctgtctctgatctctcaaagcttcaaattctccttgtttggtttgtctgtgtgtttggagtatgatgtcgccgccggcggtggtaacggaggaggaggggcggacaacgtgtcgtcgaccgtggcgtccggttcttcgcaatccttggaccgtttctctcagaatggggctggattgaaagaacgaaattacttagggttatctgattgctcatcagttgatagcagtgcctctactgtgccaagcttgtgtgatgagataaaggagaacatga

SEQ ID NO: 195031 - DNA, 146 bp, Glycine max
cggaagggtttgatggaacaagacctgagtaagttggatgtcacaaagttgcatccactttctccagaagtcatatctcggcaggctactattactattggcactataggtcatgtggcacatggcaagtcgacagttgtgaaagc

SEQ ID NO: 195032 - DNA, 199 bp, Glycine max
aaaaaatccgcgattcgctcttctcttggaaaagtgaaaaccagaagtacgaacgaaagagaagagcgatttagaagtgagagaagatggggttgtcgttcacgaagctgttcagcaggttgtttgcgaagaaggaaatgaggattctgatggtaggtctcgatgctgctggtaagacaaccatcttgtacaagctcaa

SEQ ID NO: 195033 - DNA, 306 bp, Glycine max
gctcctcccactactcaattccccaacaaaaatgtacgcttttcggtcttcgctcaaaagaaggcaaagaaacttcgaaagattattttgaaggaagatgtggcttatgtaggaaagcaagggcaacttcttgatgtgaaggctggctttttcagaaattacctgcttcctatgggaaaagcacaacttgttactccacagcttctcaaggaaatgaagatagaagaagaaagaattgaggctgagaaaaaacgggtaaaagaagaggcacagcaacttgctctaatttttgaaactgttggggct

SEQ ID NO: 195034 - DNA, 270 bp, Glycine max
gtccaccccctcttactcctcagatgttgacaatggtatagtgaaggatgtagtcctatggagaagaaagacaataaatataagcgctcttgttgcggcaacagcggcatgggtgttgatggaagtgtttgaattcaacttcctcactctcatatcatgggtggccatactcggtcttgcttcaatattcctctatgccaatatgcttagacttttgggcaaggaaccaccgaacttgttggggttggaagtgagtgaaaaaacaacaac

SEQ ID NO: 195035 - DNA, 303 bp, Glycine max
ccctcgagccgattcggctcgagctccttgtattacccaacagatgcaccagttcaacaagatagcgaactacaagcatggtggacggaagctgtggagaagggtcatggtgacttaaaagaaaagccttggtggcctaaaatgcagacaactgaagatctcattcaatcatgctctattatcgtttggacagcttcggctctccatgctgctgttaattttggacaatatccttatgggggcttaatcctgaaccgtccaactctagccagaaggtttatcccagctgaaggaaccccagag

SEQ ID NO: 195036 - DNA, 303 bp, Glycine max
tccaacttcaaatctcacggcttaaacgtgagggaccttgtggccctctctggaggccacaccatagggtttgcaaggtgcaccaccttcagaaacagaatctacaacgtaagcaacaacataatagaccccacgtttgcagcatctgtgaggaagacatgtccgaaaagcggaggagacaacaacttgcatccacttgatgctacacccacaagagttgacaccacatactacacggatttgctgcacaaaaagggtcttctccattctgatcaagagctgttcaagggaaaggcacagaaa

SEQ ID NO: 195037 - DNA, 267 bp, Glycine max
cttccttctcaaatattcttgagatccccattttctccgaagcaaagccatggctaagggtcctggtctctactctgacatcggcaagaaagctagggatctgctgttcaaggactaccacagtgaccagaagttcaccatcaccacctactcaccgactggagtggctattacagcatcaggaaccaggaaaagtgaactgtttctggctgatgtcaacacccagttgaggaacaaaaacatcactactgatatcaaagttgatac

SEQ ID NO: 195038 - DNA, 293 bp, Glycine max
gttcaccctatttacaaacttctgtttcctcactaccgtgacaccatgaatattaattcacttgcccggaaagccctggtcaatgcagatggtattatagagaaaacattcttgtggggtaggtactctatggaaatgtccgctgtcatttacaaggactgggttttcactgatcaagcattacctaatgatcttgtaaagagaggagttgctgttaaggacccatctgctccccatggagttcgtcttttgattgaggactatccttatgcttctgatgggctagagatatg

SEQ ID NO: 195039 - DNA, 299 bp, Glycine max
gctctctcgatctaattttccgactaacactaacaatgacggatgcagctgaagacgctacacgacgccgtaatgcggtggccgagtaccgcaagaaacttcttcaacacaaggaattggattccagagtacgatccgtcagagaaaatttgcgtgcctcgaagaaagagttcaacaaaactgaagatgatttgaagtctcttcaaagcgttggacagatcattggcgaagttcttaggcctctcgacaatgaacgcttgattgttaaggcaagcagcggacctaggtatgtggttggc

SEQ ID NO: 195040 - DNA, 298 bp, Glycine max
gctacccagaacaagatccgagggtttttgctttcactgattctgagttgttgcacgaccagatcccatttgggaaaaaattggagatgcctcttttgacggcactgagagaaaggattctggaacttgccaacaattttgaagattttgttttaaaccttataccctctactgatcttgagcagccactgcatttggccaaagtagctattggacttgtcactttccctgtaaatggtgagatattgcttaagaactgttctatttgctgtgatgacaagccagtgccaattatgat

SEQ ID NO: 195041 - DNA, 295 bp, Glycine max
gattatgttcacggcaagggtcttaagcttggaatttattcagatgctgggtattttacttgtagcaaacagatgcctggttctcttggtcatgagtttcaagatgccaagatttttgcatcatggggtattgattatttgaagtatgataactgtaacaatgatggatcaaaaccaactgatagataccctattatgactcgggctttaatgatggctggtcgtccaatcttcttctcactatgtgaatggggagacttacacccagctctatggggtgctaaagtgggaaaca

SEQ ID NO: 195042 - DNA, 294 bp, Glycine max
atcccaagagtggggagtatgttgaacaccatcttaagaatcccccttctgtcccgtctgacaaattatctcatgtgtacacggccattttgaagtctgacaatgagttgcaaatattgattgatggggaacagaagaagaaggtaaatttcttatctgctgatgattttgaaccccctcttatccctcccaagacaatcccagattctgatgataagaaacctgaggactgggatgagagagagaaaattccagaccctagtgcagtaaagccagatgactgggatgaggatg

SEQ ID NO: 195043 - DNA, 290 bp, Glycine max
gaaacatgaaggtctcccccttagcattttcaatcctttttttgtccttcaccatagaactcttcattggcattgcttcagcagcacaagaaccagtgcttgacacctcaggccagaagctgagaacaggtgtcaagtactacattctaccagtcttcagaggcagaggtggaggcctaacagtttcaagcagtggcaacaacacatgccccctctttgtggtgcaagagaagcttgaagtctcaaagggcaccccagtctacttcacaccctacaatgccgaaagtggt

SEQ ID NO: 195044 - DNA, 286 bp, Glycine max
gcacgaggtggtagcactacatgtttcttttcattcattgttgaacttcaacttcaacttgaacttgaacttgttgcatttggatctcatggcagaagaagcactactgcaaaacaagcaggttctattcaaagggtacatagatggtgttcctaaagaaaccgatatggaactcaaggtcgactcacatattgcgctcaagcctcccccacaaggctcatcagctattctcgttaagaacctttatctctcttgcgatccatacatgcgcggtcgcatgcgtgat

SEQ ID NO: 195045 - DNA, 151 bp, Glycine max
ctttctcgtcactagctctgtgcattcttctctcgctctctgccttccatcacactcggcatttcctttcccaagatagtagaagatggcagacactgaggatattcaacctcttgtttgtaacaatggaacaggaatggttaaagctgga

SEQ ID NO: 195046 - DNA, 176 bp, Glycine max
  unsure (1)..(176): unsure at all n locations
gcgtcaagggtttctctgaaggcgaaggggaagagttcanagggatcgaaggctgcggaagatcgatccgcgagcgagtgcctgaaggagtggacgacatgggcgatgcgaaaagcgaaggtcatcactcactacggtttcatccctttggtcatcgtcatcggtatgaactctga

SEQ ID NO: 195047 - DNA, 293 bp, Glycine max
ttcggctcgagatgggtggtgaggaattgtgtttgatggagaactcagggaaagggaagaggctgtggaagaaggtgaagtaccagctggtggagtaccactccttgcccggttatttgagagacaacgagtacattctcggtcactatcgatccgaatggcccatcaggcaggttttgttgagcgcattcaccatccacaacgaaactctcaacgtttggacgcatttgatcgggttcttcatatttctggcattgaccatatacactgccatgaatcttaattcgctacag

SEQ ID NO: 195048 - DNA, 294 bp, Glycine max
gcttcgtttgagaccattgtagagctgatctataagcacgccatcccaacaccaaagaatgagtgcaccaaaggcctgcaacttggtgtcagttttgctggtggatatattgctggtgtactttgtgcaattgtgtctcatcctgctgataatcttgtctcttttctgaacaatgcaaaaggagcaacagttggtgatgcggtgaagaagcttggcctgtggggtctctttacccgtggtcttcccctgcgtattgttatgattggaactcttactggagcccaatggggaata

SEQ ID NO: 195049 - DNA, 287 bp, Glycine max
cggctcgcgctctcaaggccactgattttggtctctctgtcttcattgaacaagggaaggtttaccatgatatggttggcagtgcttactatgttgctcctgaggtattgcgtcgtagttatggaaaggacatagatatttggagtgcaggcatcatattgtatattcttctgagtggtgtaccacctttttgggctgaaactgaaaagggaatatttaatgccatattggaaggtgaaattgattttgtaagtgaaccatggccatccatatcagacagtgctaaa

SEQ ID NO: 195050 - DNA, 275 bp, Glycine max
ctccgcaccagtttcaccgcacgaatatcttgttgtttggagcgatccgagaaaaactctgtaaacatgttggtttaccaggacctccttacaggtgatgagcttctctctgactccttccgttacaaggaaattgagaatggaatgctgtgggaagttgaggggaagtgggttgttaaaggagcagttgatgtagacattggtgcaaacccttctgctgagggtggaggagaagatgagggagttgatgatgcagctgttaaggttgttgacat

SEQ ID NO: 195051 - DNA, 276 bp, Glycine max
gagaatcccaccactggatgccagaagaagctcgagatcgacgacgatctgaaactgcgagcattttgggacaagaggatctcacaggaggtcatcggagatgcactcggtgaggaatttaagggctatgtcttcaaaattaccggaggttgtgacaaacaaggatttccaatgaagcagggagtgctgactcctggtcgtgttagacttttgcttcacaggggaactccttgcttccgtggatatggaaggcgtaatggagagcgtaggagaaag

SEQ ID NO: 195052 - DNA, 274 bp, Glycine max
accgaatctccgaagcgttcgttgtaaccgaaatccggtgcaccgagagagatccgaatgagggatacgaatctggagttgcaggaatcgggttgggaggagctgcgcaaggaagcgcgcaagatcgagggtgatctcgacgtcaagctctcctcctacgccaaactcggcgctcgtttcacccaaggaggttcaggttatgtagatagtggttcaccacctattgggtccagtaggtgttggaagtccatggaaatggaaatccagtctttac

SEQ ID NO: 195053 - DNA, 272 bp, Glycine max
gctccggcaacctctcttccggcgccgcgctatctcggccgcgcaccaatcttcaatttgattacttgggtcaacgatttctgtcattctcaatcatggcaactagacttcagtttgaaaataattgtgaagttggagtcttctctaaacttaccaatgcctactgtttggttgccattggtggttctgaaagcttctacagtgtatttgaagccgagttagcaggtgttatccctgtggtcaagacatccattggcggtactcgtattatt

SEQ ID NO: 195054 - DNA, 273 bp, Glycine max
gtcctcctttacctgcaaaaacagcaaatggctctgcttaacctcatacttgtctggttatttttcttgagtctgtgtctttattcgtgtcctacttcggcccagttaagtagacaccactatgcaaaaacttgccccaatgtagaaaacattgtcagagaagcagtcaaaaagaagtttcatcaaacatttgttacggtccctgccaccattcgtctcttcttccatgattgcttcgtgcagggctgtgatgcctcggttttggttgcatcc

SEQ ID NO: 195055 - DNA, 296 bp, Glycine max
aactctgctcgagctttgcgaggcggccagaaaaggtgacacggagaaagtgaggtctctcatagactccggcgctgacgtcagccacttcgacggcgaggtcctcaatcctctgatgcacgccgcaaagcacggccatgcacccgtcctcaccctcctcctctccgccggcgctccctggaacgctctttccccctccaacctctccgccggcgactacgccatgcaagaaggccacaacgaagccttcgagcttctcgtcaacgccgggattcaagccgaactgatcctgggaa

SEQ ID NO: 195056 - DNA, 279 bp, Glycine max
gcagtacccaacagctacccaatccattgcttaacagtcacgcaagcagcaaggatcgcaattgcattttgtgggaatcggcggcgagaaaatgcagggttggttctcggggcagagtagcgaggaggaggcgaaccgacgtcgtcgttgctcgccgattggaactcctacgcatccgcccaaacctctgaagattcatccactttccccttcgatatcgaatccgccgttaggtctgccaacgacaccgtttccggcactttcagcgtggtttctaaa

SEQ ID NO: 195057 - DNA, 278 bp, Glycine max; identical to SEQ ID NO: 192749

SEQ ID NO: 195058 - DNA, 276 bp, Glycine max
ggaatcccagatcttcatagccattgttccctcttgcttcttatgattggatctagatggcaaaaccaagttcagctgatggtaggactagaagccatgtgcaaatctttatagtagttggtctgagattcatcttctatatattgggagcatggcaaagaagtggttttggtaagggagatagtatagcattggaaattactaagaatggtgcagactgtaatgtagttcccaatttgagttttgactctcaccatggtggagaagttagcaaaa

SEQ ID NO: 195059 - DNA, 275 bp, Glycine max
ggagaatatgaagttgtttgtttactttgttgctgcagtagttttggtagcatggccatgccatggcgcaggctaccaaaggttccctctccgaatgaaaactggctatggtgagcgttcttcggaggtaaaatgcgcaagttttaggcttgctgtggaagcacacaacatccgagacattaaaaccattcctgaagagtgcgttgaaccaacaaaggactacattaatggcgaacaatttagatcagactctaaaacagttaaccaacaagctt

SEQ ID NO: 195060 - DNA, 273 bp, Glycine max
aaaacctcttccttctttcattcggtgcctattcccattttcttcctctaaaccctaaacaactctttctcttcttccttcgctcgttgttctccctcgcgtagatcgacaatggcggagacagagacgtttgctttccaggctgagatcaagcagctcctcagtctcatcatcaacaccttctactccaacaaggagattttccttcgtgaactcatcagcaacgcctccgatgctttggacaagattcgatttgagagtttgacagataag

SEQ ID NO: 195061 - DNA, 272 bp, Glycine max
taggaccttcagggtatcttgcaccggagtatcttgacgctggaaaccttacatataaagtagatgtatatgcatttggaattgtattattagagttaataacaggtcgaagaattagcgagttggaacagttcaatggacactcgtatctttctgaatggtttcatcccatacgcatgttagagcccggtcatatcttacaaaacgttcgttctctcaaaccatgctttgattctaaggagtcagtggaatttaatcttcagttgcaagcc

SEQ ID NO: 195062 - DNA, 266 bp, Glycine max
gttttagcgcacatcttcttgatttaaggaagatgggtaaggaaaaggttcacatcagtattgtggttattggccatgttgactctgggaagtccactaccactggccacttgatctacaagcttggaggcattgacaagcgtgttattgagagatttgagaaggaagctgctgagatgaacaagaggtctttcaagtatgcctgggtgcttgataagcttaaggctgagcgtgaaagaggaatcacaattgatattgccttgtgg

SEQ ID NO: 195063 - DNA, 278 bp, Glycine max
gtgagacttcactttattttttttccaattcccttcactcctagacttttttttaggagggaagggaggggcaatggagatgcacacacaacctcataagagacaccattttggtgtacaacattgttgtcttattagcctcttcatcttcaccttcttcactactacaaccacccaagcttttgattatgctgatgccctttcaaagagtcttctctactttgaagcacaacgctctgggaggataccttacaatcagcgtgtcacttggcgtgacc

SEQ ID NO: 195064 - DNA, 275 bp, Glycine max
attcattcatctatggccacccttattgctcccagcaaccactctccccaagaagatgctgaagctctcagaaaggcttttgaaggatggggaactgatgagaacactgtcatagtaattttgggctccagaactgtgtatcagaggcagcaaatcagaagagtttatgaggaaatttaccaggaggatcttgtgaagcgcctagaacctgagatcaaaggagactttgagaaagccgtgtaccgatggatactggaacctgcagatcgtgatgc

SEQ ID NO: 195065 - DNA, 270 bp, Glycine max
atttcaatccacattggtcaggccggtatccaggtcggaaacgcctgctgggaactctattgccttgaacacggcattcagcccgatgggcagatgccgagtgacaagaccgttggaggaggagacgacgccttcaacacattcttcagcgagaccggcgccggaaagcacgtgcctcgcgccgtcttcgtggatcttgagcccaccgtgatcgacgaatccgcaccggcgcgtaccggcagctcttccacccggagcagctgatcagcg

SEQ ID NO: 195066 - DNA, 269 bp, Glycine max
ggggtgtggtagtgtggcagcgacacgtatcaacttcaataatcgcatcgcagaagcagtttccggtgcatctcatcgtctccgaaaatgaacgacgcagatgtctcgaagcaaatccagcagatggtgcggttcatccgccaggaagctgaggaaaaggccaacgagatctctgtctccgccgaagaggaattcaatatcgagaagctgcagttggtcgaagccgacaagaagaagatcaggcaagaatacgaacgcaaagagcgcca

SEQ ID NO: 195067 - DNA, 269 bp, Glycine max
ctctccacgcccttcttgggtaaccgtctgaagtgcagcaatggccgatggattgcattcgcagcatccatcggtagttcagaagttatctggacagtcttatcttgtgtccaggcttgctcctaatcactccagaaactgttctaccactggtagttacttcaatggcggttagcagtcttcaggtttggttccagtcacggcacacgcgccggctgagaaaggggtgtctggatttttgttggatttcctgatgggcggagtgtcgg

SEQ ID NO: 195068 - DNA, 267 bp, Glycine max
ctagcctgagatcacattgaacaatggtgaaggctgtggccgttcttggcagcagtgagggtgtcactggaactattcacttcgttcaggagggaagtggtccaaccaccgtaactggatctcttgctggtcttaagcctggtctccatggtttccatgtccatgccttgggggacactaccaatggttgcctctcaactggatcacatttcaatcctaataacaaggcgcatggtgcccctgaggatgagaatcgtcatgctggtg

SEQ ID NO: 195069 - DNA, 274 bp, Glycine max
tggaactgctcggtatgcaagtgttaatactcatttgggagttgaacaaagcagaagagatgatctagaatctctcggatatttgctcatgtattttttgagaggaagtctcccatggcaaggcttgagagctggcactaaaaagcaaaaatatgacaagataagtgagaagaagatgcttactccaatagaggtcttatgcaagtcatatccattggagtttacatcatacttccactactgccgaacgttgcggtttgaagataagcctgat

SEQ ID NO: 195070 - DNA, 272 bp, Glycine max
cttctctctctcaccaaaacaatttgctcacaaaggaggaaaaatggcacctttcgtttccctctctttgttgcttctctttctcaaccaccccctcctttccctctcaaccaaccctgaagggaacgctctgcatgctttgagaagcaggctttctgatcccaacaatatgttgcagagttgggacccaacactggttaatccctgtacttggtttcatgttacctgtgactccaacaatcatgtgattcgcttagacttgggcaactcta

SEQ ID NO: 195071 - DNA, 265 bp, Glycine max
agacactggaccagaccactgaggtttctctggtggagaaatccgtcatcaccattcggtttttggccattgatgctgttgagaaggccaactctggtcaccctggtctccccatggggtgtgctccaatgggtcacattctctacgatgaggtcatgaggtacaatcccaagaatcccacttggttcaaccgtgaccgtttcattctctctgctggacatggctgcatgctccaatatgctctccttcaccttgcaggctatga

SEQ ID NO: 195072 - DNA, 266 bp, Glycine max
cggtaaactgcgggagtaactatgactctcttaaggtagccaaatgcctcgtcatctaattagtgacgcgcatgaatggattaacgagattcccactgtccctgtctactatccagcgaaaccacagccatcggaacgggcttggcgttatcagcggggaaagaagaccctgttgagcttgactctagtccgactttgtgaaatgacttgagagctgttggataagtgggagctggacacagcgaaagtgaaataccactactttt

SEQ ID NO: 195073 - DNA, 274 bp, Glycine max
ctagcacataaaacatggtatagcagtaatctcataactcatttgaggctctgtgagaattgtgaaatggctaaagatgttgaggttcaagagcaaggaggagagtactctgccaaagactaccatgactgctctccagcacctttgttcgacccagaggagctcatctagtggtccttctatagagccctcatcgctgagttcatagcaacccttctacttcctttatgtcactgtgctcaccattattgtgctaaaaaggcagactgatact

SEQ ID NO: 195074 - DNA, 296 bp, Glycine max
gtaaactcaaactccggctccagctcagactactctactactgctacccaattcccgacacgcctcaactttcattcccttattggtggccttcttagaagattttgtccgttcatgtgtttcccaccctagtacccttgacatatttggctcacatcatggattatattttattatatcctgattttggtatgattacatcatatgcaggcagttcattccggtgcagatcttgaatctgctatttcaaattgtatgggctacaaatctgagggtcagggcttcatggtaggggt

SEQ ID NO: 195075 - DNA, 279 bp, Glycine max
gctcgagcgccttcttgggtaaccgtctgaagtgcagcaatggcagatggattgcattcgcagcatccatcggtagttcagaagttctctggacagtcttatcttgtgtccaggcttgctcctaatcactccagaaactgttctaccactggtagttacttcaatggaggtttgcagtcttcaggtttggttccagtcacggcacacgcgccggctgagaaaggggtgtctggagttttgttggatttcctgatgggcggagtgtcggcggctgtgtcc

SEQ ID NO: 195076 - DNA, 271 bp, Glycine max
cgaatggctcattaaatcagttatagtttgtttgatggtatctactactcggataaccgtagtaattctagagctaatacgtgcaacaaaccccgacttctggaagggatgcatttattagataaaaggtcaacacaggctctgcctgttgctttgatgattcatgataactcgtcggatcgcacggcctttgtgccggcgacgcatcattcaaatttctgccctatcaactttcgatggtaggatagtggcctaccatggtggtgacggg

SEQ ID NO: 195077 - DNA, 270 bp, Glycine max
ctcgagccgccaacctttcactttcgtttctcagttttattcgaatccctctctcaatctcatttccaaatggccatcgttgtggttgcacagcaaacaccaacaacagttccagaaaatgaaacaaccgaggtaagcaagacccaggaaacaaccccagtcactgaggctcctgcaacagaacaaccagcagctgaggttcctgcaacagaacaaccagccgctgaggctcctgccccagaatcaaccaccgaagcaccaaaggaagaa

SEQ ID NO: 195078 - DNA, 267 bp, Glycine max
attgaattgacaatgaggcctgctcttgctttgcttcctcttctatttgctttcttgttagctgccactacagaatcaagaaaagatacatgggaatattggaaaatgatcatgatagatcaggaaatgccagaaggacttcaaggtcttgtttcatttcaatctgaaaataaccctaagactcaagagcagcttggtcaaggttccaaaaaccattgtgaagagtctctagttacaaatacacaagttaatagtgacttcgaaccc

SEQ ID NO: 195079 - DNA, 266 bp, Glycine max
cggctcgagaaaagccagaagaagcgaaatcgtaatcgcaatctagcggatatgaaggtcgtcgctgcatacttgctcgcagtgttgggagggaatccatctccttctgccgatgatatcaaaaacatcctcggcgcagttggagctgaggctgagcatgagttgattgagttgctcttgaccgaagtcaagggcaaagacttcaatgagctacttgctagtggaagtgaaaagatttctgcagtggctggtggtggtgcagcggt

SEQ ID NO: 195080 - DNA, 265 bp, Glycine max
ggggttgtattatcccattgcaaagactctagcagagaaagcgggttgggactttgcgaaggagacaggttttgatgttgtcatgataaaccctggtacagcattgggccctctgcttcctccaagaatcaattcaagcatggctgtgcttgttagtgttctcaaagggggcaaagagacctacgaggacttctttatgggaacggctcacttcaaagacatagcattggcacatattttggcacttgagaacaagacagcagca

SEQ ID NO: 195081 - DNA, 263 bp, Glycine max
cgacgatgacgaggttaacgggtctcatcaataagatccaacgagcctgcaccgcgctgggagatcacggtggcgaggagttgtcgctctaggcgtctcttccctctatcgccgtcgtcggtggatcagagttcagggacatcgtcggtgctatacagtgttgtcgggagagattttctgcctcgtggatcttttattgttacacggaggccactagtgctgcaacttcacaagacggaagaagggacacatgagtatgctga

SEQ ID NO: 195082 - DNA, 265 bp, Glycine max
ctcccgcagcagccatggttctcaaaactgaactatgccgattcagtggtgccaagatctacccaggaaagggcatcagatttgttcgtggtgattctcaggttttcctgtttgcaaactcaaaatgtaagaggtatttccacaatcgcctgaagccttcaaagctcacctggactgcaatgtacagaaagcaacacaaaaaggacattgctcaagaagctgtgaggaagaggagacgtgctgccaaaaagccttactctaggtc

SEQ ID NO: 195083 - DNA, 263 bp, Glycine max
  unsure (1)..(263): unsure at all n locations
cggatccnaagagtaagcctgagtgctatggtgtcttcngccttacctatgatttgagggctgaagaagagacaagatcctggaagaaattnattaacattgcagtctcaggtgctgctggaatgattgcaaatcatctacttttcaagcttgcatctggtgaagtttttggcccagatcaacctattgctctcaaattattgggatcagaaaggtcaatccaagctcttgaaggtgttgcaatggaattggaggactctttg

SEQ ID NO: 195084 - DNA, 270 bp, Glycine max
gtagaagaagaagatggcattgggtgttcctgctcttcccctgacatacgtggctcacgttctggcacttgttgccagcatcttggtcgtgctctgggtcctcaattttaggggtggcttggcttgggattctgataacaaggccctcatcttcaatcttcatccagttcttattgtcattggcttactagtccttgggggtgaagctattataagctacaaagcattacccctgaagaaggaagtgaagaaattgatacaccttgtttt

SEQ ID NO: 195085 - DNA, 260 bp, Glycine max
ctcgagccgctcgtgcctctagggttatcatatctccatttccatttcctctctctcagtttccaagaatcttaagctatgggaaagtcttacccaaccgtgagcgctgattaccagaaggccgttgagaaggcgaagaagaagctcagaggcttcatcgctgagaagagatgcgctcctctaatgctccgtttggcatggcactctgctggaacttacgacgtgagctcgaagaccggtggtcccttcggaaccttttt

SEQ ID NO: 195086 - DNA, 264 bp, Glycine max
caacgcctttcttctccgtttccgtttcctcgttcgaattcgctttttgatctgcgaaaatgagagagtgcatctcgatccacattggtcaggctgttatccaggtcggaaatgcttgctgggagctctactgcctcgagcacggcatcgggcccgatgggcaaatgccaagtgacaagacagttggcggtggtgatgatgctttcaatactttcttcagcgagactggtgctggaaagcacgtgccacgtgcagtgtttgtag

SEQ ID NO: 195087 - DNA, 264 bp, Glycine max
gtacgccattcctataataataataagtgacactataagaataggtacattgtcaaagtttcattcaccaactccttttggtttatacagagacagggagacaagacagagcagtacaggttactaccaatggctaccaaggtttatattgtttattattctacatatggacatgttgagaagctagctagagagatagaaaaaggggctgcttcggtggatggagtagaagcaaaactgtggcaggtacctgaaaccttgcct

SEQ ID NO: 195088 - DNA, 263 bp, Glycine max
ctccaccaaccaccactaacaagacctatttcactgatatgctagccaaactttcttcgaccaggaatggtgtacccattggcacaccgactcctctgagctggctctttatctatccggagggaatttataagctcatgacatacataagggacaactacaataatccaccagtgtacattaccgaaaatggcgttgcggaatcaaagaatgactcacttgcaatcaatgaagcccgaaaggatggtattcgaattagatac

SEQ ID NO: 195089 - DNA, 259 bp, Glycine max
cacacacacactctccccgatgtttgagagggtactggcatccaaaaaatgggttctaaaactaatgcttcgggccatagagcacgaaggccgctgtcaatatttgctgtgcttggtctttgctgtttcttttatcttttgggagcatggcaaagaagtggctctgggaagggagataaccttgcattgaaagttaataacctgatgactgactgcactgttttacccaatttgagttttgaatctcatcacaatgatg

SEQ ID NO: 195090 - DNA, 267 bp, Glycine max
ggtgttgttactgctgctcttttctcatttcttttctctttagttctctcttcccctttctttttctttttcttcttcttctgagcttgtttaagcttttcttccattaacatattatcataatgtgtggtattcttgctgttcttggttgttctgatgactctcgagccaaaagggtccgcgtgcttgagctctctcgcagattgaagcaccgtggccctgactggagtgggctccatcaacatggtgactgctttttggcacatc

SEQ ID NO: 195091 - DNA, 270 bp, Glycine max
cccctacacaaaacatggctttgcccaatcagcaaaccgtcgattaccccagcttcaagcttgtcatcgtcggcgacggtggcacaggaaagacaaccttcgtgaagaggcatctcactggtgaattcgagaagaaatatgaaccgaccattggtgtggaggttcatccgttggattttttcacgaactgtggaaagattcgcttctattgttgggatactgctgggcaagagaagtttggtggcctcagagatggatattatatccatg

SEQ ID NO: 195092 - DNA, 282 bp, Glycine max
ctgtgtttgcggctgaggattccgaacgagcgaccttcttcgtttctcgcaaagtttaagtcatcatgggtaaggaaaagactcacatcaacattgtcgtcattggacatgtcgactctgggaagtcaactaccactggtcatttgatctacaagcttggaggtattgacaagcgtgtgattgagaggttcgagaaggaggctgctgagatgaacaagaggtcattcaagtatgcctgggtgcttgacaagctcaaggctgagcgcgaaagaggaattacca

SEQ ID NO: 195093 - DNA, 290 bp, Glycine max
attcggctcgatggatagatcattgcaattgttggtcttcaacgaggaattcctagtaagcgcgagtcatcagctcgcgttgactacgtccctgccctttgtacacaccgcccgtcgctcctaccgattgaatggtccggtgaagtgttcggattgcggcgacgtgagcggttcgctgccacgcgacgttgtgagaagtccactgaaccttatcatttagagaaaataaaggaagttccttttccttgataaatgtcatagttatttggccatattttcccttcatttta

SEQ ID NO: 195094 - DNA, 286 bp, Glycine max
ttcggctcgagaaagatgtttcctttcgggcaaaagggtcagaagataaaggggactatggtggttatgcagaagaatgtgttggcgatcaacagcatcaccagtgttggagggatcgttgaccaaggcttaggcttcataggcagtgcagtcgctgcacttacttgtgcagccaccaaaatctccatccagttgattagtgctaccaaggctgatggtgggaaaggacaatttggaaagagtacaaatttaagaggacagataacattaccaaccttgggagctg

SEQ ID NO: 195095 - DNA, 273 bp, Glycine max
ggcaccgaacatggagatacactgttaatgtgaatttcactgctgttattgattccactcgccttgcgattcaaatcatggaagcttccaaaaggcctggtgtgattatcaacttgggttctgcttctggtctttatccaatggtggctgacccaatttacagtggctctaaaggtggtgttgttatgttttctagatcacttcgtctatacaaacgtcaaggaattcgagtcaatgtgctttgccctgagtttgttgaaactgagatgggaa

SEQ ID NO: 195096 - DNA, 274 bp, Glycine max
caaagagcgacactacttttggacctagacctggacctgctgggcatccaggcaacccttttgatctctcagcaatgtctggtctgctcaatgatccaagtatcaaggaattggctgaacagatagcaaaagatccatcgttcaatcagatggctgagcagcttcagaaaacttttcaaggagctccacaagatgctatccctagcttcgataatcaacaatatttttcaaccatgcaacaggttatgcagaatcctaattttatgaccatggc

SEQ ID NO: 195097 - DNA, 274 bp, Glycine max
ttctgacaagactttaatagcagttgcgaagaactgtccgaatctggctgagttatccatagagtcatgtcccaacattggtaatgaaggtctacaagctattgggaagtgtcccaatctgaggtcaatctcaatcaagaattgctccggggttggtgatcagggagttgctggcctcttgtcttcagcttcttttgctctaacaaaggtgaagcttgagtcactgactgtttctgatctctctctagcagtgattgggcattatggtgttgca

SEQ ID NO: 195098 - DNA, 276 bp, Glycine max
gttttgaagagctatgcatcaagaaagaagccattgagggagaagagaagttttgtgcaaaatccttgggaacagtaattggttttgccatttcaaagctgggaaagaacattcaagtactttcaagttcctttgtcaataagcaagaccaatacactgtggaaggagtgcagaatcttggagacaaagcagtgatgtgtcataggctaaatttcagaactgcagtattttactgccatgaagtccgtgaaacaacagctttcatggttccattgg

SEQ ID NO: 195099 - DNA, 269 bp, Glycine max
ctcgagcgaatcggctcgagatcagcattcacataggtcaggccgggatccaggttgacaactcctgctgggaactcacctgcctggaacatggcatccagcccgatggcatgatgccaagtgactcctccttcggtgtagcccacgacgccttcaacaccttcttcagcgaaaccggatccggcaagcacgtccctcgcgccgtcttcgtcgatctcgagcccaccgtcatcgacgaatccgttgtggcacttaccgtcaactcttcc

SEQ ID NO: 195100 - DNA, 275 bp, Glycine max
ggcccctagaaaagtccatgcctagatttccaaggccatggaagatgaaagagggagtctcctactaccaaagaacatggaggagcaccacccagcacatgatcgtggaacacacgaaactatacaatccaagaagagggtgtgaatgtgtaagggcgttgttgtacatggtggcacagtgtgccggtgctatctgtggtactggattggccaaggggttccaaaaagcatactacaacaggtatggaggtggtgccaactctgttgctgatggc

SEQ ID NO: 195101 - DNA, 277 bp, Glycine max
ctcgagccgctctccacccaaaccctaactcccgaccctgttcccctctcgtatccgtcatgaaaggaggaaagtccaagaccgaatctaagagagccgatcccaaacttgctgtgaataagaagggagccgccaccaaggctaggaaacccgccggcaaggggaaggcagcgaaagaccctaacaagccacagaggcctccaagtgctttcttcgttttcatggaggagttcaggaaggtattcaacaaagaacatcctgaaaacaaagcagtgtc

SEQ ID NO: 195102 - DNA, 276 bp, Glycine max
gaataatagatagaatatgaaagaatttggtggacctgcggggctaatcaagccatcaagggcactcttcatgacgacagtccgtgagtatttttgccatgggcgacctagaaaggttctgaaagagccctgcactgctttcaagtccccagctgcagttatacgacagttatggatgatgatccctgtgttctcattaggatcggttcttccttgtgccgttaccgtgttctgctggttgctcatcggtttcctcacatagatgttgcagttttg

SEQ ID NO: 195103 - DNA, 275 bp, Glycine max
tttccccccacattaactcattcaacccctctttctaaaaggcctcaaggatacactccggacttaattacgttattttgttagggtcaccgtttcgagatattctaaacttgtactgaaaaatatggagggaaaagaagaggacgtaagagttggagccaacaggtacggagagaggcagccaatagggaccgctgctcaggctaaagactacagagagccaccgtcggcgcctctcttcgaaccgggagagttgtcatcgtggtctttctata

SEQ ID NO: 195104 - DNA, 274 bp, Glycine max
caaagattaagccatgcatgtgtaagtatgaactaattcagactgtgaaactgcgaatggctcattaaatcagttatagtttgtttgatggtatctactactcggataaccgtagtaattctagagctaatacgtgcaacaaaccccgacttctggaagggatgcatttattagataaaaggtcaacacaggctctgcctgttgctttgatgattcatgataactcgtcggatcgcacggcctttgtgccggcgacgcatcattcaaatttctg

SEQ ID NO: 195105 - DNA, 272 bp, Glycine max
gtttaagtgggttggattcggaaacttatcaagactcaatgagtttaagtgagttggattccgaaaaagtttaagccgttgggttgagatgctgagtttctatgttaagattcaattgtatttttatgttgtatgtgttggtttcaatccaaaaggaattactcttttcaagtaaaaaaaaaaaaaaaaaaaaaaaaaaaaaaaaaaaaaaaaaaaaaaaaaaaaaaaaaaaaaaaaaaaaaaaaaaaaaaaaaaaaaaaaagagaaaagag

SEQ ID NO: 195106 - DNA, 270 bp, Glycine max
caaagatgtttcctttcgggcaaaagggtcaaaagataaaggggactatggtggttatgcagaagaatgtgttggatatcaacagcatcaccagtgttggagggatcgttgaccaacgcttaggcttcataggcagtgcagtcgatgcacttacttttgcagccaccaaaatctccatccagttgattagtgctaccaaggctgacggtgggaaaggaaaaattggaaagagtacaaatttaagaggaaagataacattaccaaccttgg

SEQ ID NO: 195107 - DNA, 271 bp, Glycine max
accaggctctggctcggaaccttcgacacggcggaggaagctgctttggcttacgacaaagccgcgtataggctccgaggcgacttcgcgaggctgaacttcccgagcctgaaaggctctgccccggggaggagtacaagcctgtgcattccgcggtggacgctaagctcgacgcgatttgcgccaacttggcggaaatgcagaagcaagggaagacggagaaaggtgccaggtcagcgaagaaatcgaagcaaggtccgaaccaggaggc

SEQ ID NO: 195108 - DNA, 273 bp, Glycine max
gccactctcaaacctcattgcttcactaccaatccacccatccaaaacttgcttcgtccatcgcttgatgcgaatcatgatccattctggcttcttctctcaacaaaagcatgacttggagaatgagctagaagccaagtatgtgctaaccgatgcatctgtactattgcttaagaaccatccgatgagtgtgacacctttcttgcatgccatgcttgatccagttttgacaaatccatggaatcaattttctacttggttcaaaaatggtga

SEQ ID NO: 195109 - DNA, 284 bp, Glycine max
ggctcgaggaagctccaacgtatataatcaacgctaacgacactcgtgcctaaccattaaaacacacactctctctcaccaaattcttattagaacgaaaaaagaaaagacaagacaaaagagcgatttttccctcaccaaagaagaaccaaaacaatggcggatcaactcaccgatgaacagatctccgagttcaaggaagccttcagcttgttcgataaggacggcgatggttgcatcacaaccaaggagcttggaactgttatgcgttcattggggcaaaa

SEQ ID NO: 195110 - DNA, 272 bp, Glycine max
taaggcttggactgcctggaaacggaggcactgaagaagtgctcatcaggaagaggggtttctctgagactgaaactggtcatgaagatgagtctgccaccactgtggatttgatgcttaatctttcttctaaggaggccgcaaccactgctgctgctgctgcagatccaactgataagcacaagactttgcctaaggagaagacccttctgccagcagatcctgctaagcctccagccaagacgcaggtggtgggttggccactgtgcggt

SEQ ID NO: 195111 - DNA, 276 bp, Glycine max
cttggaagaggctctccctacactacaggaagatttgtgatgggcggaagttctattggtgatgactgggagctcacttcctcatctaacgagggtcggacagtggtcttagttggacgaactggcaatggcaagagtgcaacaggtaataccattcttggaaggaaggtcttcaagtcaagggctagctcctctgctgtatccacctcatgtgaattgcagacaacagaattaaacgacggacaaattgttaatgttattgacaccccaggatta

SEQ ID NO: 195112 - DNA, 276 bp, Glycine max
gaaaatggcggtacccttgctctccaagaggatcgtgaagaagcgcgtcaagaagtttatacgcccccagagtgatcgcaagatctccgtcaagccaagctggcgcagacccaagggtattgattctcgtgtcaggagaaagttcaaaggatgcactttgatgcccaacattggttatggctcagacaagaaaacccgccattatctaccaaatggtttcaagaaatttgtcgtgcacaatgtgaaagacctggaacttctcatgatgcataacag

SEQ ID NO: 195113 - DNA, 270 bp, Glycine max
cttttcaatcagttacattttctttggtattccaatggccactgttgaggttgtgtcagcaaaggtttccctcccagaggacacaaaagaggcatcattgaaggctgatgagaagaagaacacagaagaagttgttgagactccaacaccaacaccagaaaatgtcgtcactgagcaaacaaaggaggaaagtactgaggccccacaacctgcagctccagaagacaagccctcggttgaagttgtgtctggaactgtcacagaagagcc

SEQ ID NO: 195114 - DNA, 273 bp, Glycine max
  unsure (1)..(273): unsure at all n locations
ctctctcaccctcatatccatcatcttccacacccatnggagcgttcctctgagcaatcaataatcaagttacccacagaccaaccaagggtagagaaactgacccacttgcattttttctaccacgacatcttagagggcaagaacatcacggtggtgaaaatcatcgagccatcagcgagcgaggttcgtgaagcaactgggtttggaaccactttcatgatggacatgttttgaccgagggtccagagctgagctcgaagcacgttggga

SEQ ID NO: 195115 - DNA, 272 bp, Glycine max
ttgggtcctcttccacctcgccttcttctcccaatgccttccctccgcctgggcccactcggcgatcctcctcccgggtcaactcgcccgtgactcaccgcagagctgccccgcccctgaccccaacctctactacaagccagtcatcggaatcgtcagccatcccggcgacggcgcctccggccgcctcagcaacgccaccggcgcctcctacatcgccgcctcctatgtcaaattcgttgaggccgccggcgcccgtgtcgttcccctca

SEQ ID NO: 195116 - DNA, 270 bp, Glycine max
ggcgtcacgatgcagatcttcgtgaaaaacctaacgggtaaaacgatcacgttggaggtggagtcttcggacaccatcgacaacgtgaaggccaagatccaggacaaggaaggcatccctccggaccagcagcgcctcatcttcgccgggaagcagctggaggacggccgcaccctcgccgactacaacatccagaaggagtccacgcttcacctcgtcctccgcctccgtggcggcgccaagaagcgcaagaagaagacctacaccaag

SEQ ID NO: 195117 - DNA, 270 bp, Glycine max
  unsure (1)..(270): unsure at all n locations
ggaacgctaattcattcctctttgcttctatctttattagcctaacaccagtgatggtaggtttggctccagaaggatcgaagtttgatgctcggcaatatgactctaagatgattgnattgctttccgctaatggacaagagtttttcacttcatatgatgaagtctatgatagttttgatgcaatgggccttcaagaaaatcttctcagaggcatatatgcttatggttttgagaggccttctgcaatacagcaaaggggaattgttc

SEQ ID NO: 195118 - DNA, 273 bp, Glycine max
gcagtgggaggaggctcgggactctgaccgcgtgcctgttgaagaatgagccggcgactcataggcagtggcttggttaagggaaaccaccggagccgtagcgaaagcgagtcttcacagggcaattgtcactgcttatggacccgaacctgggtgatctatccatgaccaggatgaagcttgggtgaaactaagtggaggtccgaaccgactgatgttgaagaatcagcggatgagttgtggttaggggtgaaatgccactcgaacccagag

SEQ ID NO: 195119 - DNA, 272 bp, Glycine max
gccttaccttaccctcgcagaggaagaaccggaagaggaaaaactagaaaagatcccaacagtgagaagccgagcgattttgtttaccttccaagagatgaagcatttggtcacttgaagtcatcagattttctcgcttatggaatcaaatctgtatcccaagatgtcttgcctgtcttgactgatgcattcgatggaaatattttgagccttgagtttgataattttgctgaagtgcacaaactctatgaaggtggagttacactacctac

SEQ ID NO: 195120 - DNA, 276 bp, Glycine max
  unsure (1)..(276): unsure at all n locations
tcggcttgaggacggcgtcttcataaacgcctttcttctccgtttccgtttcctcgttcgaattcgctttttgatctgcgatcatgagagagtgcatntcgatccacattggtcaggctgccatccaggtcggaaatgcttgctgggagctctactgcctcgagcacggcaccgggcccgatgggcaaatgccaagtgacaagacagttggcggtggtgatgatgctttcaatactttcttcagcgagactggtgctggaaagcacgtgccacgtg

SEQ ID NO: 195121 - DNA, 268 bp, Glycine max
cttctttcttcaccatgtcacttgctgggaaaatcaccactgaaattggggttcatgcaaccgctgcaaagtggttcaacctctttgcaacacaacttcatcatgttcaaaaccttactgatagagtacatggaaccaagctgcatcaaggtgaagactggcatcacaacgagacagtcaaacactggacttataccatagatggtaacgctacaacatgtctggagagtattgaatccattgatgaacagaacaaaacaatcaccta

SEQ ID NO: 195122 - DNA, 269 bp, Glycine max
gtagatatgaagtttattggggatgatgaaaaattccttgctcttgctacaaatcttgaacagattcgggtttatgacctttcatctatgtcatgttcgtatgtcttatctggtcacactgaaattgttctatgccttgactcctgtgtatcaagttctgggaaaccactgattgttactggaagtaaagacaacagtgttaggttatgggaaccagaaagtgcaaactgcattggagttggtataggtcacatgggagctgttggagc

SEQ ID NO: 195123 - DNA, 283 bp, Glycine max
ggaattccgctcgagctttgaaccagggtgtttgcttgattttggagatgtcgctgctctcagatctcatcaaccttaaccccgcagacactaccgagaaggtgatcgcagagtacatatggatcggtgcatcaggaatggacctgaggagcaaagcaaggactctcccaggaccagttagcgacccttcaaagcttcccaagtggaactatgatggttccagcacaggccaagctcctggagaagacagtgaagtgattatatacccacaagccattttcag

SEQ ID NO: 195124 - DNA, 268 bp, Glycine max
caaagcaatgctcatccttgagttaaaaactggcagcagcttcttccatggctctctcatccccatccttggctggcaaggccgtgaagctgggcccatcagccccagaagtgggaagggtgagcatgaggaagaccgtcaccaagcaggtctcctcaggaagcccatggtacggcccagaccgagtcaagtacttgggcccattctctggcgagcccccgtcctacctaaccggtgagttcccaggcgactacggctgggacactgc

SEQ ID NO: 195125 - DNA, 271 bp, Glycine max
ccccgccaccgggtctgccgaaggttacaccatttatggtcgagtgaagatccccagtgtgggaacaaaagattatattcttcctggaaaaatttcaaatgtcaaagtcatactcaatggtggtcaaagagttacttttctgaggcctgatggatatttcgcattccacaatgttcctgccgggacacatctaattgaagtggctgcaataggctatttcttttctccggtacgagttgatgtaagtgccagacaccatggcaaaattcag

SEQ ID NO: 195126 - DNA, 269 bp, Glycine max
aaggaatcccaatggctttggggctcttggcgatgatcctcttcttcattgcttcctcttcctctcacctcgttcgcgcttccgatgacgccgacgacgcgatcttctacgagtcgttcgacgaggattttgatggacggtggattgtatccgacaaggaggattacaatggtgtctggacgcatgccaagagtgatgggcatgatgattatggacttcttgttagtgaacaagccaggacatatgctatagtcaaagaacttgccgag

SEQ ID NO: 195127 - DNA, 268 bp, Glycine max
agcagatcaatctctctctctgtctcccaatcaaaacagacatgggtttgaaggaggattttgagcagtatgctgagaaagcaaagactttgccaccgactcaatcaaacgaagacttgcttatcctttatggattgtacaagcaggccaccgttggacctgtcaacaccagccgtccgggaatgttcaacatgagggacagagctaaatgggatgcatggaaggctgttgaagggaaatccaaggacgaagcaatgagtgattacat

SEQ ID NO: 195128 - DNA, 265 bp, Glycine max
ggcttttaaaacagtacctgataatcctttgcattaaccagatggcatcttcgctatttcgattgatggcagcatttggaagggatgttatagttgcaaacactgctggaagttttgcattacttatagttctggttttgggaggatttgtgatttcccgagagaatgtgcacaaatggtttctgtggggttactggtcctcaccactgatgtatggacagaatgctatagctgtgaatgaatttcttggtcatagttggagaaa

SEQ ID NO: 195129 - DNA, 266 bp, Glycine max
ctcgagccgagggactatgcaagaaaagtggtggaaaataaagcaagagatgaagctggaaacattctgatacgcatgacagataggtcctctactgttttcaatcatgataatgattcactacctagagtttggactgggaaggaagatgtcagagctattacaagggatgctcgctctgcgtcgctgaagcttctatcagatatggctgctatacgcttggatgagaagccagatcgcattgaaagtgcactttattcatctct

SEQ ID NO: 195130 - DNA, 267 bp, Glycine max
ggagctatagccataaggagaaaaactttcaaagaagtgaaagcaaaaaagagttgttcttttcctttctgctgataagctgtgtgagtgagttcattgacaagcctgaaatgacaactatgctgacaaatgagcatggtctgagtttgaacctcaaggagactgagctttgcctcggtttgcctggcgggggctctgaagtggaaactccaagggccactgggaagagagggttctctgagaccgttgatctgaagcttaatcttc

SEQ ID NO: 195131 - DNA, 262 bp, Glycine max
tggatacctaggcacccagagacgaggaagggcgtagtaagcgacgaaatgcttcggggagttgaaaataagcgtagatccggggattcccgatataggtcaacctttcgaactgctgctgaatccacgggcaggcaagagacaacctggtgaactgaaacatcttagtagccagaggaaaagaaagcaaaagcgattcccgtagtagcggcgagcgaaatgggagcagcctaaaccgtgaaaacggggttgtgggagagct

SEQ ID NO: 195132 - DNA, 269 bp, Glycine max
cagaactgatgttattggcagtagaaggaggaggattcttctctgcttcggcttcagggtatactaagggcctgagccttctcctcttgggtcagaggaatgaggataaacccatgagagtagcgccgtggaaccagtatcagttggtagaccaagaatctgaccctgagctccagctggcttccacaaagaatcgcctagaccgcggctgtgcctcctttgtttgctttggtcgcacttccgcaggacttgatactacgtctcctctt

SEQ ID NO: 195133 - DNA, 270 bp, Glycine max
atcctggatttggatctggggcaaatagttggctcattcaattggagggaggaggatggtgtaataccatcagtagttgtgtctttagaaaaactactcgtcgtggttcctcaaaatacatggaaaagcaactagcattcacagggttgttgagcaataaagctgaagaaaaccctgatttctttaactggaacagagttaaagtacggtactgtgatggagcatctttcagtggagatagtcaaaacgaggttgcacagcttcaatttc

SEQ ID NO: 195134 - DNA, 267 bp, Glycine max
cctcgagccgattcggctcgaggttgagttgaggctaatcaatgcactatagagcgcaatcatcgtccctctttcttctcttccgccatcgttttctttgaaacgcacagcttcaatcaccgaccacaccacccatcaacgacatgcttcctctttcccttctcaagactgcccaaggccaccctatgttggtggaactgaaaaatggggagacatataacgggcatttggttaattgcgacacatggatgaacatccatctgcgag

SEQ ID NO: 195135 - DNA, 266 bp, Glycine max
  unsure (1)..(266): unsure at all n locations
ggggaacaaccacaacaacaaatttnnnaattagccactatgantaagnnttggaataaatgaagcacatgnctaggcaagagtacgttgcgtcattgagaaggaagagtantgggttttctcgcggtgcatccatttatcgaggagtgacgagacaccnccaacatggaaggtngcaagcgaggattggaagagttgctggcaacaaggatctttacttgggaacttttagcacccaagaagaggcagcggaagcatatgatgta

SEQ ID NO: 195136 - DNA, 267 bp, Glycine max
gaagaaatggaggaagcaaagggagttgtgaagcacgttttccttgcaaagttcaaggacgacgtcactccagagcggattgaggagctcatcaaggactatgccaatcttgtcaatctcatcccacccatgaagtcattccattggggcaaggatgtaagtgctgaaaacatgcatcaaggcttcactcatgtgtttgaatcaacctttgagagtacagaaggcattgcagagtatacagctcatcctgcccatgttgaatatgca

SEQ ID NO: 195137 - DNA, 266 bp, Glycine max
cggctcgagcttgaactcaaacatggcagatgaggtggttctgctagatttctggccaagtccatactgggatgagggtcaggattgcacttgctgaaaagggtatcaaatatgagtacaaagaagaggacttgaggaacaagagtcctcttctcctccaaatgaacccggttcacaagaagattccggttctcatccacaatggcaaacccatttgtgaatccctcattgctgttcagtacattgaggaggtttggaatgacaga

SEQ ID NO: 195138 - DNA, 265 bp, Glycine max
  unsure (1)..(265): unsure at all n locations
gaaaaacttagagtggtagttgtaggaaagcaagaacagtgaagtgttctcctaattcagtgagtgaggttctgaattcttcaacttgagatgatggcatcatttgcagggactactcagaagtgcaaagcatgtgagaagactgtgtatttggtggatcagctcactgctgacaacaagatctatcacaaatcatgtttcagatgctaccactgcaagggtaccttaagttgagtaactattgttcctngagggtgtgttatac

SEQ ID NO: 195139 - DNA, 266 bp, Glycine max
ggcgtcgagtataggcatgatggacagtgcctactttgtcggcaggaaccagattctgacctggatcaacaacaggctccacctcaatctctcacgcattgaggaggctgcatctggggctgtgcaatgccagatgatggatatgacgtttccaggggttgttccaatgcacaaggtgaactttgatgcaaagactgagtatgatatgatccagaattacaaaattctgcaggacgtgttcaataagctgaaaattgacaaacatg

SEQ ID NO: 195140 - DNA, 271 bp, Glycine max
  unsure (1)..(271): unsure at all n locations
cttgttctcaagggattcgattttctctgcactcacttctagggtactcctccgcgctatcagcaatcatggccgacgaaacaccanatgagatgaaggaggaggttccagaaattngtccttttgatcctaccaaagaagaagaagaagaagaagattacaaattgtagatcctgctgatgacctgtggagaaattggctgagaagacagaaaaccctctcagttctgaggggggtgagactgcatntgctgggttgaaaaagaagaaga

SEQ ID NO: 195141 - DNA, 259 bp, Glycine max
aatcgagcaggatgtgtcgctgggagcgaacaagttcccggagagacagccgattgggacggcggcgcagagccaagacgacggcaaggactaccaggagccggcgccggcgccactggttgacccgacggagtttacgtcatggtccttttacagagcagggatagcagagtttgtggccacttttctgtttctatacatcactgtcttaaccgtcatgggagtcgccggggctaagtctaagtgcagtaccgttggg

SEQ ID NO: 195142 - DNA, 262 bp, Glycine max
cgagcggccccctttttttttttttttgggaatacgacacaatactaaatcctattgaaataaccacaaacatgctttattacatagaccccaaatcaagttgggacccaacataattaaatccaataaatggaaagaaaccgtttgagacgctttatttcgggaaaacctcaattttaccataagccgattgcagagcatcacaaagctaaactcttaacaggacctggtccccggggaaattcaccatccaatccggggt

SEQ ID NO: 195143 - DNA, 262 bp, Glycine max
agccaaactgcattatcttagctatctctcctgcaaatcaagataccgccacttcagatgccataaaaatcgccagagaagttgacccttcaggtgaaagaacatttggtgtcgttaccaaacttgatcttatggataaaggaactaatgcagttgatgttctcgagggaaggcaatacaggctgcagcatccatgggttggaattgtgaaccgttcacaagctgatattaatagaaacgtagacatgatcgctgctcgtag

SEQ ID NO: 195144 - DNA, 261 bp, Glycine max
tttcacctcaaacacacccttaattacatcgcattctcttcctctttctcttaccgtttgaattagattgcacctactcctctctctttcactcttctttttctggatcttcaacttctccctgattttgctgatttgggggattgagttggaaggggaaacatggctgcttcttctgcatctctttctggtgcttctgcttcggatcttctgaggagttcaaccagcggtttcaatggtgttcctttgacaaccttgggg

SEQ ID NO: 195145 - DNA, 265 bp, Glycine max
ccgatccatccccgaaggtgccgtcatctgcaacgtcgagcaccacgtcggcgaccgcggcgttttcgccagagcctccggtgactatgctattgttataagccacaaccctgataacgacacctctaggatcaagcttccttctggtgcgaagaagattgtgccaagtgggtgcagggcgatgattgggcaggttgcaggtggagggaggactgagaagcctcttctgaaggctggtaatgcttaccataagttcagagtgaag

SEQ ID NO: 195146 - DNA, 274 bp, Glycine max
catcgagccgaatcggctcgaggaaggcagatcaaacaagtctcatatgacatttttatcagaccgattggaaagtaccatctcttcggtcttactttactaattggcctaaaacagtggagcctaggctttatgaggaaggcaaagaaaaagtggcagccatattcaagcaccagggttatgaggtgaaagagcttcttgaagaagacaatgagccatctatagattgcagtggcacaatgaaagtttggcgggtggatggtgatgaattgtc

SEQ ID NO: 195147 - DNA, 277 bp, Glycine max
caaacatgaaggacccagagaggaaccggctatgcaaaaccattgattgtcagaaactgtctcaagaagcatgcagccatgcagcacagaacgaaaggctaccggtgcagatggtggttcaagttctttacttcgagcaaatgaggcttcgcaatgccatgaatggagggcacaaccaactcttctttggtcagttccctcaccgttcagggagtggtgcagggagtggagccatttccccaagagataactatgcatctgttagaagagagaacag

SEQ ID NO: 195148 - DNA, 271 bp, Glycine max
tccgggtagaagtctagccgaatcggctcgagcggctcgaggttgatggtagtcaacgacgaaggcctgttgctcataggctgagttttgagcagatggttgttccctatggagatccaaatgatccacattacagaaaaaacgcttttgatgctggggaagatggattgggaaaaaatgcacattccctcaagaagggatgtgattgtttgggatacatcaagtattttgatgctcacttcacaaatttcactggtggggtggaaacaat

SEQ ID NO: 195149 - DNA, 263 bp, Glycine max
cttgcttctttcttcaccatgtcacttgctgggaacatcaccactcaaattggggttcatgcaaccgctgcaaagtggttcaacctctttgcaacacaacttcatcatgttcaaaaccttactgatagagtacatggaaccaagctgcatcaaggtgaagactggcatcacaacgacacagtcaaacactggacttatactatagatggtaaggctacaacatgtctggagagtattgaatccattgatgaacagaacaaaac

SEQ ID NO: 195150 - DNA, 269 bp, Glycine max
gcttggaagagaaaaatggcaacaaatggcaagacacctgcgataggaatcgatttgggcacgacatactcatgcgttgcagtgtggcagcgtgatcgagtggagatcatcgcgaacgaccaaggaaacagaacaacaccctcttatgttgctttcaatattacccaaaggatgattggtgatgctgccaagaaccaggctgctaccaatccaaccaacactgtctttggacgcaagcgcctaattggtaggagatttagtgatcaaga

SEQ ID NO: 195151 - DNA, 271 bp, Glycine max
tggggagagaggaattttacttggtgctgttcatggagttgtggaatccttgtttaggagatacactgataatggaatgaacgaagatctggcttataagaatactgttgagtctataacagggattatatctaaaaccatctcaactaagggcatgctagctgtatacaatgctttatctgaagatgagaaaagggaatttgagaaggcttatagtgcttcttattatccttgcatggaaattctgtatgagtgctatgaggatgtagcc

SEQ ID NO: 195152 - DNA, 259 bp, Glycine max
gaaagaaagagttgagtgatggcggcttgtctgcaactgtggcaatgcaaactagcgagaccctttgactcattaccggtgcgaaggtcaattcctttgagtctgaggtgttcggtcgcgccctcttcttccaagccgacgcgctcctacagcatcactctcatccccggcgacggcatcggccccgaaatcatctcggtggccaaagacgttcttgtcctcgccggttatctcgaagggattaaatacgacttccgcg

SEQ ID NO: 195153 - DNA, 256 bp, Glycine max
caaaccccgacttctggaagggatgcatttattagataaaaggtcaacacaggctctgcctgttgctttgatgattcatgataactcgtcggatcgcacggcctttgtgccggcgacgcatcattcaaatttctgccctatcaactttcgatggtaggatagtggcctaccatggtggtgacgggtgacggagaattagggttcgattccggagagggagcctgagaaacggctaccacatccaaggaaggcagca

SEQ ID NO: 195154 - DNA, 172 bp, Glycine max
agaatatgaagttgtttgttttctttgttgctgcagtagttttggtagcatggccatgccatggcgcaggctaccaaaggttccctctccgaatgaaaactggctatggtgagcgttcttcggaggtaaaatgcgcaagttttaggcttgctgtggaagcacacaacatacg

SEQ ID NO: 195155 - DNA, 247 bp, Glycine max
ggctcgagggcacccttgccaattgggttcgacgtgttcttacctcaattggcaaccatccccatcaccgcaactactatcaaccctgctcgtagtcttggtgctgctatcatcttcaacaaggaccttggttgggatgaacactggatcttctgggtgggaccattcatcggtgcagctcttgcagcactctaccaccaggtcgtaatcagggccattcccttcaagtccaagtgattcaatcaaa

SEQ ID NO: 195156 - DNA, 256 bp, Glycine max
aaacgcctttcttctccgtttccgtttcctcgttcgaattcgctttttgatctgcgaaaatgagagagtgcatctcgatccacattggtcaggctggtatccaggtcggaaatgcttgctgggagctctactgcctcgagcacggcatcgggcccgatgggcaaatgccaagtgacaagacagttggcggtggtgatgatgctttcaatactttcttcagcgagactggtgctggaaagcacgtgccacgtgcagt

SEQ ID NO: 195157 - DNA, 259 bp, Glycine max
ctcgagccgttggttttgtggatatagcacttgttccattctacacttggttcaaagtctatacagacttttggcagcctcaacattgagaatgagtgccccaggtttgttgcttgggccaagaggtgcctacagaaagagagtgttgcaaagtctcttcctgatcagcacaaggtctatgagctcgttgtggagataagaaagaagttagtcatcgagtaggtttcatgttggatcttaatagccatagtgaagtatt

SEQ ID NO: 195158 - DNA, 258 bp, Glycine max
aagagggtatagacatggctagcgcaattgcagcttcttttttggttctgcttctggctttccccactgtatttggagctgaccatgaagttggtgacactagtggatgggccctcggagttaattacaacacctgggcctctgggaaaactttcacagttggtgacactttggtgttcaagtatgactccactcatcaagttgatgaggttgatgagagtggatacaacagctgcagctcaagcaacagcatcaaga

SEQ ID NO: 195159 - DNA, 195 bp, Glycine max
ataatacacactacactagggtggtggtagcgagagtggaacgaagaagaggtttagaacaaaattcacgcaggagcagaaggataagatgctggcatttgcggagaagctagggtggagaattcagaagcatgacgaagctgctgttgaacaattctgcgctgaaacttgcatcaagagacatgtactcaaggt

SEQ ID NO: 195160 - DNA, 214 bp, Glycine max
ctgccctccgccatgactgaggataaggagatgtcttcctctgtcagcaatggcgatgattccctcactggtcacatcatatctacaactattggaggcaaaaatggggaacccaaacagactattagttacatggcagaacgggttgtaggaacgggatcatttggaattgttttccaggcaaaatgcttggaaactggggaacaagtgctat

SEQ ID NO: 195161 - DNA, 217 bp, Glycine max
catcgctagtccatgggtcagcatcgtccgtatccaggcccgtcagatcttcgacagtcgtggcaatccaactgtcgaggtggatttgacttgctccgatggtacttttgccagagctgctgttccaagtggtgcatccactgggatttatgagccccttgaattgagagatggaggatctgactaccttggaaagggtgtatcaaaggctgttgac

SEQ ID NO: 195162 - DNA, 254 bp, Glycine max
gccgaagttcgacccctcccagatcgtcgacgtcttcgtacgcgtcaccggcggtgacgtcggcgcggcgagttccctccccccgaagatcggtcccctcggtctctcccccaagaagatcggagaagatatcgccaaggaaaccgccaaggactggaagggcctccgcgtcaccgtcaagctcaccgtgcagaaccgtcaggccaaggtcacggtggtcccatccgccgccgcgctcgtcatcaaggccctca

SEQ ID NO: 195163 - DNA, 262 bp, Glycine max
cgcagagcaactcaacacaacgaaccaaaacaacaatgtcgcagccgcagcctcagtcgcagccgcaacacgggcaagcggcgctggagcaggtgcagtgcttcggtcgcaagaagacggcggtggccgtgacctactgcaagcgcgggcgcggcctcatcaagatcaacggctgccccatcgagctcgtcgagccggagatcctccgctttaaggccttcgagcccatcctcctgttgggaaagagccgcttcgccggcgt

SEQ ID NO: 195164 - DNA, 116 bp, Glycine max
tgcttggtaatgtccctttctgttctctttcctcttggtcttgcgagagaaagccatgccagagacgaagatttttggcatgctgtgtggccaaacactcccattccaagcacatt

SEQ ID NO: 195165 - DNA, 252 bp, Glycine max
ctccagtagccggcactaaacaacatggcggacaaggcagtcaccatccgaaccaggaagtttatgacaaacaggcttctctccagaaagcagttcgtcgttgatgtccttcatccagggagggctaatgtttccaaggctgaactgaaggagaagctgggaagaatgtatgacgtgaaagacaccaacactgtatttgtcttcaagttccgaactcattttggtggtggcaagtccactgggtttggtttg

SEQ ID NO: 195166 - DNA, 253 bp, Glycine max
agttgtgctgtgccgcctcttccgtaggcagcagcaatggcctcaaatcccaaaactttgacctttgaggaggtagctaagcacaacaacaaaaaggattgctggattattatcaatggaaaggtgtatgatatcacaccatttttggatgagcatccaggaggtgatgaagttttgctgacgtcaacagggaaggatgccaccattgattttgaagatgtgggccacagtgattctgctatagaaatgatgg

SEQ ID NO: 195167 - DNA, 249 bp, Glycine max
tctcgagccgattcggctcgagatgaaggtctcccccttagcatttacaatcctttttttgtccttcaccatagaactcttcaacggcattgcttcagcagcacaagaaccagtgcttgatacctcaggccagaagctgagaacaggtgtcaagtactacattctaccagtcttcagaggcagaggtggaggcctaacagtttcaagcagtggcaacaacacatgccccctctttgtggtgcaagagaa

SEQ ID NO: 195168 - DNA, 249 bp, Glycine max
gtttgagaatggcaacgatcagcgcggttcaggtggagttcctggagtttccagcggtggttacttcaccagcctccggcaagacctatttcctcggcggcgcaggggagagaggattgacgattgacgggaagttcataaagttcacaggcataggagtatacttggaggataaggcggtgccatcactcgccgctaagtggaagggtaaaacttcagaggagttagttcacaccctccacttctaca

SEQ ID NO: 195169 - DNA, 128 bp, Glycine max
tgttaatatgcgtttcagcactgtcactgagtccttctgttgcgggggaagggcaaaataatggccttgttatgaacttctacaaggaatcatgccctcaggctgaagacatcatcacagaacaagtc

SEQ ID NO: 195170 - DNA, 255 bp, Glycine max
gagagagaaagaggagaaggagtagtgataaggtgatcatagagcatattataagagagtgaaaactaatggaggttggcctcaagaaggagaacatggggtttgaggaaactgagttaaggcttggactgcctggaaacggaggcactgaagaagtgctcatcaggaagaggggtttctctgagactgaaactggtcatgaagatgagtctgccaccactgtggatttgatgcttaatctttcttctaaggagg

SEQ ID NO: 195171 - DNA, 260 bp, Glycine max
cctcgagccgattcggctcgagctagtatccgatcctctgtcatctcgcagctttcatcgttcaccatattctcaccatctcagacatgggcctgctatcttgttttaggtctaccgtcctgagaaaatgttccaaaggaagctctggcatgtcaagattcctgtatacgaacaattttcaacgaaacttgatttcgtctggtggcaatgaatcgtattatgggtattttaacaggagatcatacacttcactttatatg

SEQ ID NO: 195172 - DNA, 262 bp, Glycine max
cactgaactaacaaagcaaccctatgtcgaaggtggtttgtgtcaccggagccagcggcgccgtcggatcatgggtggtcctactcctcctccagcgtggttacaccgtccatgccaccgtccaagctatcaaggatgaaaatgagacgaaacatttggaggaaatggaaggagcaaagagtcatctccatttttttgaaatggatcttcttgacatcgactccattgccgctgccataaagggttgttccggcgtaatcca

SEQ ID NO: 195173 - DNA, 265 bp, Glycine max
gcgagtgcaagtcgtgcggtatcatttagaaacagcttcggtgtgagtaaaccctcggatcttgggttcttgagctctcgtctgaacggcctcagaatctgcttccccaaattgccacccacacccctcactgcttctcccttccccacacccctccctatcgttgccaagagagtgtgtcccttcactggaaagaaatcaaacagggccaacaaagtatcattttcaaaccacaagacaaagaaactgcagtttgtgaaccttc

SEQ ID NO: 195174 - DNA, 255 bp, Glycine max
aaaccacactctcactctctcctttacttctcttcctactcttctccctagtccaaggactcacccccaaatgtgacacccaagaccatggctcaacccttgaagttttccatgtgttcagcccatgttccccatttaggccatcaaagccactctcatgggcagagagtgtcctccagctgcaggccaaggaccaagccaggctacagttcctggctagcatggtggctgggaggtcaattgtgcccattgcct

SEQ ID NO: 195175 - DNA, 249 bp, Glycine max
ctcgagccgctcagacatggcatctcaaggtttgtgtccttcgataaaaaatattcttctcttggactctgaagggaagcgtgtggcagtcaagtattactcagatgactggccaacaaacaatgcaaagttagcttttgagaagtttgtatttactaagactgttaagacaaatgctcgtacggaagctgaggtaacactacttgagaacaatatcattatttacaaatttgtacaagacctgcattt

SEQ ID NO: 195176 - DNA, 251 bp, Glycine max
attcattccttgtgcttgtgcttgctatggtgatcacattgatgaaccctaccaatgcaaccctctctccccatttctatgataaagtttgccctcaggcattgccagttataaagtcagtggttcaacgagcaattatccgtgagcgacgcatcggagcatctcttctgcgcttgcatttccatgattgtttcgtaaatgggtgtgatggatcaatattgctagatgacacccgaaacttcactggcgag

SEQ ID NO: 195177 - DNA, 247 bp, Glycine max
caaatttagataagacaacaggcagactctccctcagccctttgacatggaacatacggatgaacattatattgggaactgcaagaggattggcctatcttcatgagggtcttgaaccgaaagttgtccaccgagatgtgaaatcaagtaacatacttattgatcgccaatggaactccaaggtttccgattttggacttgctaagcttttgtgttctgagaatagttacgtcacaactcgagtgat

SEQ ID NO: 195178 - DNA, 253 bp, Glycine max
tctctcctctgtctttttctctctcttgctatccttttggctagtcgcactgctgcaagtgcaactccaagaagcgcagtgccaagccaccatgtttcaacattcaacagaagcctttttccttccacttttctctttggccttggttcttctgcttaccaggcagaaggagcagcaagtgtagatgggagaggaccaagcatatgggacacctacactagacagcatactgaaaagatttgggatcatagca

SEQ ID NO: 195179 - DNA, 250 bp, Glycine max
cctctgtggcaccatcgctctctctgcgttgttggagaacaatcagaggtaaaagattggagggtgaaccgagaaaaacaattcagaaaatggagaataacgcattcagagatcaaatcatggaggacaatgaacatgaagaaatgcctgattcctttgtttgctgcgtgtgtctggatctattatacgagcccagtgtgatatcttgtggttacatgtgcagtttctggtgtgtctataattcaatgag

SEQ ID NO: 195180 - DNA, 258 bp, Glycine max
  unsure (1)..(258): unsure at all n locations
ctcgttcccctgacggtgctgatggctatggccttgctcgcatctcttccttcttccccaaactcatgtggtctgagggattcacaattgttggatcccctcttgagcattttcgtcaactctggccccaagattaccacaaatactgtgatnnccgtcaagcacctatgatgaagccatgaaaaagctagtgggaaagctgatgtggctgatgttggattctctgggtattacaaaggaagacctgaaatgggccgg

SEQ ID NO: 195181 - DNA, 250 bp, Glycine max
atcagcttgtggccatagtctcattatttatccttttgcttccaaatatccatgggtggggagacgatgggcatgtcattgtttgcaagattgcacaggctcgcctcagtgaagcagctgcagaggctgtgaagaaactgctgccaatatccgcaggaaatgatttgtccacaaagtgttcttggccagatcatgttcatcatatctatccttgggcctctgctttgcactacgcaaataccccagaggc

SEQ ID NO: 195182 - DNA, 250 bp, Glycine max
gcacccgctgtgctgtatctccctcgagagtccaggaatcggcaaacattcgccggagcgggagccggcggcgcttttccgaaccagtagcctcccggcggcgggatctcatggcaatgctgctcagggatcggagaccaccgtcgccggcgttctctacaaatggaccaactacggcaaaggctggagatcccgctggttcctcttgcggaatggcgttctctcctacgccaagatccgctgtccggag

SEQ ID NO: 195183 - DNA, 250 bp, Glycine max
tgctagaaataataatatgggaggaaaagggtatgctctatggctcttcattattgaaatcctggtgcatttttccacatcaagaagtgccacagttccttcaataatagtgtttggagactcctctgtggactcaggtaacaacaacttcattccaaccattgcaaggagcaactttgagccttatggtcgtgactttttcaatggaaaccctactgggagattctccaatggacgcattgcccctgac

SEQ ID NO: 195184 - DNA, 260 bp, Glycine max
aaagaatggcaaagttaataaaattctttgagttgaacacaggggccaagattccttctgttgggttaggcacttggcaagctgagcctggtgttgtagccaaagctgtcaccacagccattctggttggatacaggcatattgattgtgctcaagcgtataacaatcaagcagagattcgttctgctcttaagaagctttttgatgatggtgtggtcaagcgtgaggacttatggatcacctccaaactctggtgttca

SEQ ID NO: 195185 - DNA, 253 bp, Glycine max
ctcgagccgctcccctacacaaaacatggctttgcccaatcagcaaaccgtcgattaccccagcttcaagcttgtcatcgtcggcgacggtggcacaggaaagacaaccttcgtgaagaggcatctcactggtgaattcgagaagaaatatgaaccgaccattggtgtggaggttcatccgttggattttttcacgaactgtggaaagattcgcttctattgttgggatactgctgggcaagagaagtttggt

SEQ ID NO: 195186 - DNA, 246 bp, Glycine max
ttggactgcctggaaacgtaggccgcactggcactgaagaagtgctcatcaggaagagaggtttctctgagactgaaactgaaactgaggaggatgagtctgctaccactgtggatttgatgcttaatctttcttctaaggaagctgctgctgctgcagatccaactgataagcacaagactttgcctaaggagaagactcttctgcctgcagatcctgctaagcctccagccaaggcacaggtgg

SEQ ID NO: 195187 - DNA, 249 bp, Glycine max
ggcggagaaacacaaccttaagaatccagctgtgaagcgcattctccaagagctcaaggagatgcaatcaaacccatccgatgactacctgagcctccctcttgaggaaaatatatttgaatggccatttgctataagggggcctcgtgatactgaatttgaaggtggtatttatcacggacggattcagctgccttcagaatatcccttcaaacctccttcgtttatgttgctcacacctagtggccg

SEQ ID NO: 195188 - DNA, 254 bp, Glycine max
ctcacttctagggttttctctgcgctataagcaatcatggcggatgaaacaccaaatgagatgaaggaggaggttccagaaattgttccttttgatcctaccaagaagaagcagaagaagaaaattccaattgtagatcctgctgatgaacctgtggagaaattggctgagaagacagaaaacctctcagtttccgagggggttgagactgcatttactggtttgaaaaagaagaagaagaagcctgttgaaat

SEQ ID NO: 195189 - DNA, 254 bp, Glycine max
aggggaaacaacagtggtgggtctgagtctaatattaaaactgttgctcctgagactgctggctccactgcagtggttgccattttaagccaaacccacatcatagttgcaaactgtggagattcaagaactgtcttataccgtggaaaagaagccatgccattgtcttctgaccacaaaccaaatagagaggacgagtgggctaggatagaagctgcgggaggaagagtcatacattggaaaggatatcgagt

SEQ ID NO: 195190 - DNA, 244 bp, Glycine max
  unsure (1)..(244): unsure at all n locations
tttgattctcctctaatgatattgtgtattattggatcttatgcaaaatttcattacttttattcaaaaatgcctactccatttttgtattggtccttctcaatttgtcttatatgatgtatttctcagggaggaatcagagggcaagttgaagggaattcttggttacactgaagatgatgtggtctccactgactttatcggcgatngcagatcaagtatttttgatgcaaaggctggaatg

SEQ ID NO: 195191 - DNA, 255 bp, Glycine max
ccctactcattctccatacctcaacgaagacgttaaagagacggcaacactttgctgtccgccttgaccgagcagagcttcgtcttggccctcgattttgccctaaagtactctcagtcacaacagacaccgtcgtcgtcgtcgtcgtcatcaatggcaccgaagcagaccaaggctgagaagaagatcgcttacgatgcgaactgtgcgacctaatggaggagtacggccagatcctcgttgtgaactccgata

SEQ ID NO: 195192 - DNA, 258 bp, Glycine max
gccgcccaaaacttctcatacccttttattcattccattcgtttctagggtcttcttttctttgccgagaaaatgagagagtgcatttcgatccacattggccaggccggtatccaggttggaaacgcctgctgggaactctattgccttgaacacggcattcagcccgatggacagatgccgagtgacaagaccgttggcggaggagacgacgccttcaacacatttttcagcgagaccggcgccggaaagcacgtg

SEQ ID NO: 195193 - DNA, 250 bp, Glycine max
gttcttttcctctttgctcttgtctcgttcacttcccatgcttctgtcaatgatttctgtgtagcagacctaaaaggtccagatagcccttcaggctatcagtgcaagccacctaacacagtcactcgtggatgactttgtgttctctggctttgtagctggaaacaccacaaacactttcaatcctgcattaacctccgcatttgttactgatcttccaggtgtgaatggtctcggtgtatctgtggca

SEQ ID NO: 195194 - DNA, 250 bp, Glycine max
acttctcaaatctcgaaccctctcgttcgtgccgatcactaggtcacacttcatcaatggcgggtagaggcaaaaccctaggatccagcgccgctaagaaggccacctcaaggagcagcaaagccggcctccaattccccgtcggtcgtatcgccaggttcctcaaggccggaaagtacgccgagcgcgtcggcgccggagcccccgtctacctcgccgccgttctcgaatatctcgctgctgaggtttt

SEQ ID NO: 195195 - DNA, 243 bp, Glycine max
gctattagttcgattttgtagtaagtgaggtgccaatatggtgaagatagctcttggtactttggatgactcttttagcgctgcctctcttaaggcttatttcgcagagttccacgcaactctgatttccgtgttcgctggtgttggatcagccatcgcttacaacgagcttacaaaagatgcagccttggatccaacggggctggtggcagtagctgtggcacatgcatttgcactgtttgt

SEQ ID NO: 195196 - DNA, 241 bp, Glycine max
gtgggattctattctaagattttgagaatgtctagctgtgggtgtggcagcagctgcaactgtggcagcaactgcggttgcaacaagtactcttttgacttgagttacgttgagaagacaaccacagagactctagttttgggtgttgggcctgtgaaggcccaattggagggtgctgaaatgggtgttgcatctgagaacggtggctgcaactgtggatcaagctgcacctgtgacccat

SEQ ID NO: 195197 - DNA, 239 bp, Glycine max
ctaccatattgaaacatatgatgtgactacaattagagcaagcacacctatgtttctcatgtctcggaagattaaatcacttggtgtcaaatgggttatctcaggagaaggatctgatgagatctttggagcgtatttgtacttccacaaggcacccaacacggaggagttccacagagaaacatgccccaagatcaaagcacttcaccaatatgattgcttgcgagccaataaatcaa

SEQ ID NO: 195198 - DNA, 245 bp, Glycine max
agagcgtgcaggcaccggccgccggccaggacattcaagcgcaggaacggaggtcgcaacaaacacggccgtggccatgtcaaattcatccgatgctccaactgcggcaaatgctgccccaaggacaaggccatcaagaggtttcttgtgaggaacattgttgaacaggctgcagtcagagatgtgcaggaagcctgtgtctatgaacaatacacgcttccgaaactatatgtgaagatgcagta

SEQ ID NO: 195199 - DNA, 102 bp, Glycine max
ggggtagtaagttcaggtttctacccgaatccatgaacatgtccatgttagcagttgaagcaagttcgtggaataatgactatgcaataccctacccaactt

SEQ ID NO: 195200 - DNA, 248 bp, Glycine max
gcagacgcaaacgcaaacgcaaacgcaaacgcaaacgcagagcgtgatccattgacgaagatggtgcagcgtctcacctaccgcaagcggcacagctatgccaccaagtccaaccaacacagggtcctcaaaacccctggtgggaagctcgtttatcagactaccaagaagagggccagcggacccaagtgccccgtcactggcaagaggattcaggggattccacacttgaggcctgcagagtacaa

SEQ ID NO: 195201 - DNA, 243 bp, Glycine max
cgaacacaccgcgtttcggagagagacgtcgcaatggggaggaggcctgcaacgtgttatcggcagataaaaaacaagccataccccaaatcacgcttttgccgtggtgttcctgatcctaagatcagaatttatgatgttggtatgaagaagaaaggtgttgatgagtttcccttctgtgttcatctggttagctgggaaaaagaaaatgtttcaagtgaagcattggaagctgctagaatt

SEQ ID NO: 195202 - DNA, 246 bp, Glycine max
cctcgagccgaatcggctcgagggaaaatgtcaggttaagaggttcctgttgcagctgagcaccctgctgccatcccaggcgcgcctatggatatcatgactgccttgcaacttgtgctcagaaaatctctggcttatggtggtcttgcacgaggccttcacgaaggggcaaaactgattgagaagcatgctgcacaactctgtgttctagcagaagactgtgaccagcctgactatgttaaactg

SEQ ID NO: 195203 - DNA, 252 bp, Glycine max
cgcgaatcccaccactggttgtcagaagaagctggagatcgatgatgacctgaagctacgagcattttgggacaagaggatctcacaagaggttgttggtgatgctctgggtgaggaattcaaaggctatgtcttcaaaattactggaggttgcgacaagcaaggatttccaatgaagcaaggggtgttgacccctggtcgtgttcgcctcttgctgcatagaggaactccttgtttccgtggttatggaag

SEQ ID NO: 195204 - DNA, 275 bp, Glycine max
caccatgtcacttgctgggaaaatcaccactgaaatcggggttcatgcaaccgctacaaagtggttcaacctcttcgcaacacaactccatcatgttcaaaacctaactgatagagtgcatggaaccaagctgcatcaaggtgaagactggcatcacaacgagacagtcaagcactggacttataccatagatggtaaggttacaacatgtctggagagtattgaatccattgatgaacagagcaaaacaatcacctacaagctcttcagtggtg

SEQ ID NO: 195205 - DNA, 267 bp, Glycine max
ctgcttagtactaatctagtgtaccctgcagtactgaatgctgctattgagctcaacttgtttgagatcattgctaaggcaacaccagctggttcttttatgtcatcccatgaaattgcttctaagctcccaacacaacaccctgagccgcctaataggcttgaccgcacgctgcgtttgcttgctagttattctgttcttactacttccactcgcaccacacaccatggtgccactgaaacagtttatggactctcacaagttgga

SEQ ID NO: 195206 - DNA, 266 bp, Glycine max
ctaacacacttaaaacgaccaataatggcgttcgctcacgacttggagttggaatcctcttcttcccctctggtgttctcagtacggaggagtgaaccggagctggtggctccggccaagcccactccccgcgaaattaagatcctatctgagatagattctcaggcgggtcttcgtacccaaattccaatcatacagttctaccgtaacgacccatcattggcaggcaaggacccagttcaagccattcgaaacgctcttgcgga

SEQ ID NO: 195207 - DNA, 266 bp, Glycine max
ccgggtcaaccccatgttcagtttcatcagttttcaggttatgtaaccgttgatgacaaaaaccagcgtgcactcttcttctactttgctgaagctgaaaaagatgcactttccaaaccccttgttctttggctcaatggagggcccggttgttcttctcttggagttggtgcattttcagagaatggaccatttagacccaaaggagagggcttggttagaaaccaattcagctggaacaaagaagcgaatatgctgtatttgga

SEQ ID NO: 195208 - DNA, 268 bp, Glycine max
cacttcgttgcttggtgatgtccctttctgttctcttcactcttggtcttgcgagagaaagccatgccagagacgaagatttttggcatgctgttccgccaaacactcccattccaagttcattgcgagatcttctaaagcctacccctgcaagtgttgaaatcgatgatcaccctatgcaaattgaagaaacacagtacccgaaaaccttcttctataaagaagaccttcatccaggcaaaacaatgaaagtacaattcagcaagcc

SEQ ID NO: 195209 - DNA, 258 bp, Glycine max
aaatctttgacattatagggcattttgctcagcccaatcccggtgcagtcctgccaaagacaccaattgtttgcaagccatcagaaaatgccattgaattggccatcaagatagccaaccttaacccacaaagaactttgttctttgaggacagtacccgcaacatacaagctggaaaacgtgtggggcttcacactgtgaccgttggtacatcacaaagatgtaaaggagcagattatgccttggaaagcattcaca

SEQ ID NO: 195210 - DNA, 269 bp, Glycine max
gatctctacagcaagagcaaagttctagttgatgtggagaaagttaagccatactatgtgtcactcattgagaagtatttccctgccaaggttagatggtgacaccatttgaattcaagccaaggttttgaggagattgatagataattattctggcgagcgagcaatgtatcaaataattttagttctttttttcttttatacaaggattcagactgcaccttattatattgaattcacctgcaaaattgcaatcttcaaatagtaaa

SEQ ID NO: 195211 - DNA, 265 bp, Glycine max
ctcgagccgctcgagccgttgggtttgattctgaatcttcgtgttgtgtgcaatggacgcacaagcaatcccttcgtcaggaaagttgagaaggctgtagatatgccacttgacagcgatgtctttgctattcctcctggttataatgtcccccagcaggttcatataacgcaaggtgacctagtggggaaagcagtgatcgtgtcatgggtgactgtggatgatccggggtcgagcgaagtgcgttactggagtgagaacagtg

SEQ ID NO: 195212 - DNA, 268 bp, Glycine max
ctccagtatggcttctactcacaatgagtttcatgcacttatgctagtggtggtggttggctccatggtggcttcctgtggtgctaacttcaaccaagactttgatctaacatggggtgatcaccgtgctaagatattcaatggtggtcagcttctatctctttctctggacaaagtctctggctccggcttccaatccaagaaagagtacctatttgggaggatcgatatgcaactcaagctcgttgctggcaactctgccggcact

SEQ ID NO: 195213 - DNA, 272 bp, Glycine max
ctcccctcacttgtgcctagccttatgtcatagtattatcattacattctcatccttctctcttctctctccacccaaaccctaactcccgaccctgttcccctctcgtatccgtcatgaaaggaggaaagtccaagaccgaatctaagagagccgatcccaaacttgctgtgaataagaagggagccgccaccaaggctaggaaacccgccggcaaggggaaggcagcgaaagaccctaacaagccaaagaggcctccaagtgctttcttc

SEQ ID NO: 195214 - DNA, 269 bp, Glycine max
tgtgaactgcgaatggctcattaaatcagttatagtttgtttgatggtatctactcggataaccgtagtaattctagagctaatacgtgcaacaaaccccgacttctggaagggatgcatttattagataaaaggtcaacacaggctctgcctgttgctttgatgattcatgataactcgtcggatcgcactgtctttgtgccggcgacgcatcattcaaatttctgccctatcaactttcgatggtaggatagtggcctaccatggtg

SEQ ID NO: 195215 - DNA, 271 bp, Glycine max
gatgatccacgttcttttcctctttgctcttgtctcgttcacttcccatgcttctgtcaatgatttctgtgttccagacctaaaaggtccagatagcccttcaggctatcagtgcaagccacctaacacagtcacagtggatgactttgtgttctctggctttgtagctggaaacaccacaaacactttcaatgctgcattaacctccgcatttgttactgattttccaggtgtgaatggtcttggtgtatctgtggcacggttagacata

SEQ ID NO: 195216 - DNA, 263 bp, Glycine max
gtgattattgtgttgggctaagcagacaattgaatggatcaattataccatcagaacgtccagatcatatgatgtttgaggtatggaacccactaggaatagttggtgtaatcactgctttcaactttccatgcgctgttctaggatggaatgcttgcattgctttagtctgtggtaactgtgttgtgtggaagggtgctccaacaactcctttgataactattgctgtgacaaagctagtagctgaagttcttgagaggaac

SEQ ID NO: 195217 - DNA, 263 bp, Glycine max
gtccgtgctatcattatcagatcaactagacaagttcagcgaatacaaaaacaagataaaggaaacagttggagaaaatagaatggccacaataatatcaaaaagcatatacgtcttgtgcacaggaagtaatgacattgccaatacttactctctatcaccggttaggagagcacattatgacgttccagaatacacggacttaatggcttcacaagccacaaacttcttgcaggaactttatggactaggagctagaagaa

SEQ ID NO: 195218 - DNA, 264 bp, Glycine max
ggaaatggttgctatgtgcctggtaaaagatcaaacaaagaggccatctgtggagaagttactcaaacactccttcttcaaacaagctaagccaccggagctttctgtaaagaaattatttgctgatttaccgcctttgtggaaccgtgtaaaatccctccagcataaagatgcagccgagctagcactaaagaaaatgccttctgcagaacaagaagctctatctcaaagtgaatatcaccgaggagttagtgcatggaactt

SEQ ID NO: 195219 - DNA, 267 bp, Glycine max
gaagaagaagaagaagaagaagaagaagaagaacgatagtaatggaaatcaagcccggtttgtcagcactcgttaccggtggtgcctctggaatcggcaaaggtcttgcactagctcttgcagagaagggtgtatttatcacgatcgtggatttctctgaagaaaagggaagacaagctgcaatcctcgtcgagaaaattaactccaattttcattctaagttaggatttccgtctgccatatttgtgaaatgtgatgtgagtaatg

SEQ ID NO: 195220 - DNA, 264 bp, Glycine max
cgggggaccttgttgtaaccaaaggagaccagtatgatgtaagagaacatacaaaagagaatgaggtaagaactcttggcaagccagttgatcttgctggacagtactataaagatggagctgatgaggtcagctttctaaatattactggatttcgcgacttccctcttggtgatttaccgatgctgcaggtattgcgatacacatcagaaaatgtttttgtacccttaacagttgggggaggaattagagatttcacagatt

SEQ ID NO: 195221 - DNA, 269 bp, Glycine max
gttatcacatacatgtctggtaggttactggatattccttttcgaaccaaatcaaattttgcattctcagaaccattgatgtattgctgtcggcagtggtgtggcggttttgttgttttatttagtgtaggtatacgccatggtttaataattaaagtctgagagctgtttgttgccaaagggattgaacgatcttaaaaccaggtttaggatttggcattccattaataatggtcccttttaactgtatggtttcacttaatgtaatt

SEQ ID NO: 195222 - DNA, 268 bp, Glycine max
agcgaatcggttgaaggagatgtcaagtcaattaaaaactggaaacgccttgatagatcaacatcttactggaactgatggtgaggtcctgtggagcaagagcactgtctttcttaacagaatgatcaaagctgagaagcctaatcttattgtcttcactggagataatatatttgggcttgattcctcggattcagctaaatcattggaagctgcatttgctcctgcaattgcatcaaacattccttgggtggctgttttagggaac

SEQ ID NO: 195223 - DNA, 262 bp, Glycine max
tttttattgagtctgtgcctttattcatgtcctacttcggacctcttaagtagacaccactatgcaataacatgccccaatgttgaaaacattgtcagagaagcagtcaaaaagaagtttcatcaaacatttgttacggttcatgctaccattcgtctcttcttccatgattgcttcgtgccggtaatcaatcaattgcatgcatttcattcattcaccatataaatgctaaaaagaaagtaaaagagataatccccccatt

SEQ ID NO: 195224 - DNA, 248 bp, Glycine max
  unsure (1)..(248): unsure at all n locations
atggaattgaagttcacgtcgaaatcgctgcagcggcaatcgcgtaagtgcgagaaggaggagaaatcggagaagctgaaggtgaagaaggcgatcgagaaaggcaacatggacggagcgcggatctacgcggagaacgcgatccgtaagcgcacggagcagatgaactacctccggcttgcctcgcgcctggacgccgccgtggcccgcctcgacacgcangcgaagatgacgacgatcagcaagtc

SEQ ID NO: 195225 - DNA, 265 bp, Glycine max
cgccttcttcgccgtttcagctcaagagccaccagcaggtaagatatggttaagcataacaacgttatccccaatgggcacttcaggaaacactggcaaaactatgtgaagacttggtttaatcaaccagcacggaagaccagaaggcgtttagctcggcagaagaaggctgtcaagattttcccaaggcctactgctggacctctcaggccaattgttcatggccagactctgaaatacaacatgaaagtcagatctgggagag

SEQ ID NO: 195226 - DNA, 266 bp, Glycine max
gtttatcgtgaggagaatatgaagttgtttgttctctttgttgctgcagtagttttggtagcatggccatgccatggcgcaggctaccaaaggttccctctccgaatgaaaactggctatggtgagcgttcttcggaggtaaaatgcgcaagttttaggcttgctgtggaagcacacaacatccgacacattaaaaccattcctgaagagtgcgttgaaccaacaaaggactacattaatggcgaacaatttagatcagactctaa

SEQ ID NO: 195227 - DNA, 261 bp, Glycine max
ggcggacggtcgtcggtgcagatcttggtggtagtagcaaatattcaaatgagaactttgaaggccgaagaggggaaaggttccatgtgaacggcacttgcacatgggttagtcgatcctaagggacgggggaagcccgtctgatagcgctctgtgcgcgtactccgaaagggaatcgggttaaaattcctgaaccgggacgtggcggctgagagcaacgttagggagtccggagacgtcggcgggggccccggaaagagt

SEQ ID NO: 195228 - DNA, 137 bp, Glycine max
ggcacttgcaggtatgatgatacagatcctgaagcagaaaagaaggcgtatattgatcgtattgaagacattgtctattggatcggttggtcctcagttaagatgagttacgcacgtgattactttcaggcattgta

SEQ ID NO: 195229 - DNA, 259 bp, Glycine max
gtggtgagaggatggtgggtgttatttcgttggtaacaggaatggctggtccaagtgggtttggatcagcttcaactgcagaacaggttactgaaggagttgatgccagcaacctcactgcaattatcacaggaggagcaagtggtataggattggacgacagcacgagtgttggctcttcgaaaggtccatgtcatcattgcagtacgaaacatggtgtctgcaaaagaggctaaacaacaaatactagaggagaatg

SEQ ID NO: 195230 - DNA, 263 bp, Glycine max
cggctcgagaattgaccgtcgaatccaatcctgaaatcccccaataaatagagaagcgaagaaaccaaaccaaaccatcgagtgcgttgcgcccccaccgtaagtagagctatgtcgttgcgcaggcgaaccttgctcaaggtcattgttctcggcgacagcggggttgggaagacctcgttgatgaatcaatacgtgcacaagaagtttagtcagcaatataaggctaccattggagctgattttgtcaccaaagagcttca

SEQ ID NO: 195231 - DNA, 265 bp, Glycine max
tctttgcattccaaatggccactgttgaggttgcacagcaaacaccaacaactgtgacagagaatgaaacaacgactgaggtaaccaagattgaggaaactaccccagaacagccagccaccgaggttactgccccagaaacagtcaacgaagaagcaaaagaggaagcagcagttgagactaatgaggcaacagaagttacagaggaagggaaggctgagaaaacagaagaagaagaagaagtgaaagaggagactaaagaaac

SEQ ID NO: 195232 - DNA, 266 bp, Glycine max
aagaaaatggcaaactttccagttgttgacatggggaaacttaacaccgaagagagagcagcagccatggagattataaaagatgcctgtgagaactggggtttctttgagttggtgaaccatgggatatccattgagttgatggacactgtggagaggctcacaaaagagcactacaagaagactatggagcaaaggttcaaagaaatggtggccagcaaagggcttgagtcagttcaatcagaaatcaatgacttggactggga

SEQ ID NO: 195233 - DNA, 267 bp, Glycine max
gcgatgaactccgtggacactcaaaagcatcggaggatcacaaatggttaatggttgcttcgaaattggcggaacagacaagattgaagggggagcgtgtgaacaaccttgatctttcaaagggccccattgaaacaaggtcaagggataaatttgggttccaggaagagaacaaatttgattctcttaacttaagcatgttgaacctggactctaaatttactgagaatgtgagcaaaagctcgcttcgaaatggtgtttatggta

SEQ ID NO: 195234 - DNA, 280 bp, Glycine max
aggtcgtcgcccaactgggctccaagcgcagcacatgtttggcagcctttgccgccctccttctcctcttcctccgcggtctccgccgccgccgatacaacctccccccaggcccaaagccctggcccatcataggcaacctaaacttaattgggtcccttccacatcggtcgatccacacgcttagcaaaaaatacgggcccatcatgcacgtatggttcgggtcgagctccgtggtggtgggctcgtccgttgaaattgccaaggccgtcctcaaaac

SEQ ID NO: 195235 - DNA, 285 bp, Glycine max
gcgcgtctattgtgtgccggtgattatgagtatgccatcgcttttcaggagagggtaaaaatcccggatgataagatggtgtattacgagaaccttgcggagatgtacgtgggcgatgatgtttctccagatttctacgggtgggtgtttccaaaatgtgaccatgtggctgtaggcactggaactgtgacacacaagggggacatcaagaagttccaactagcaacaaggaaaagagcagaggacaagattttgggaggcaagatcatccgagtggaggctcac

SEQ ID NO: 195236 - DNA, 286 bp, Glycine max
cctcgagccgaatcggctcgagctctgcactgccatcatccccaaactcctcacaaggttaacagcactaaagagttgtgacaccatgtcggacgatgaaagggaggagaaagagttggatctctcttctgccgaagttgtcaccaaatacaaaaccgctgctgagatcgttaacaaggccttgaagctagttatttcagaatgtaaaccaaaggcgaagattgtggatatttgtgagaaaggggattcatacattagagagcaaactggaaatgtgtacaagaat

SEQ ID NO: 195237 - DNA, 280 bp, Glycine max
ggcacttcgttgcttggtgatgtccctttctgttctcttcactcttggtcttgcgagagaaagccatgccagagacgaagatttttggcatgctgtttggccaaacactcccattccaagttcattgcgagatcttctaaagcctggccctgcaagtgttgaaatcgatgatcaccctatgcaaattgaagaaacacagtacccgaaaaccttcttctataaagaagaccttcatccaggcaaaacaatgaaagtacaattcagcaagcctccctttcaa

SEQ ID NO: 195238 - DNA, 280 bp, Glycine max
ctaccctttctctctctacgatggagccttcctcgatctctccaccgccagccccgcctgccaccgccgtccccttccccgccgaacccaacgaccaccttccaccacccattcccgaaccaccttctaaccacccaccctacgccgagatgatatacacggcaatcgaggcgctgaaggagaaagacggttctagcaagagggcaatagcgaagtatattgagcaagtgtatacgcagcttccaccgaatcactcagacttgttgactcagcacttgaa

SEQ ID NO: 195239 - DNA, 279 bp, Glycine max
ctagaagaagaaaaaaaccacaaccaccaccatctagggtttttctttttctcatggctagtttgtcaactaggattttcttcatcatgtcccttgtgtgcctggctctcggtccaatggcacaaggggaaatgacatgtggccaggttgtgagcaacctgaccccatgcatctcctatgtggtgtatggtggaaccaatgttcctgaacagtgctgcaatgggataagaaatctctatggcatggctcagaccaaaccagaccgccaagctgtttgca

SEQ ID NO: 195240 - DNA, 269 bp, Glycine max
cttccataatcaaggagatcaatctctgcaggttgtttcagacaagataaaatggtgaaggtgtaatgcattggagctggatatgtggggggtccaaaatggtagtcattgctctgaagtgcccctctattgaagtggctgttgttgacatctgcaaatccaggattgcagcatggaacagtgaccagcttcctatctatgagccagggcatggatgctgtggtgaagcaatgtggtggcaagaaccttttcttcagcacggatgttga

SEQ ID NO: 195241 - DNA, 315 bp, Glycine max
tcgcatgcaagatgtgcattcggctcgaagtctggcgactagcgaatcttgggcgacacttggatttgagtgaatcagtgaacaaggctgcgccagttgggtcaatcaagttgaaggtagcttcagaggtttctgaagcattatcactgggtcgtgctgttgtcgctcttgaatctaccattatttcgcatgggatgccatatccccaaaatttggaaactgcaaaagaggtggaacgtattgtaagagagaacggtgcagttcctgcaaccattgcaattttagatggcacgccttgtgtaggcctaagtgtag

SEQ ID NO: 195242 - DNA, 290 bp, Glycine max
gctcgagatggcatctcaaggtttgtgtccttcgataaaaaatattcttcttttggactctgaagggaagcgtgtggcagtcaagtattactcagatgactggccaacaaacaatgcaaagttagcttttgagaagtttgtatttactaagactgttaagacaaatgctcgtacggcagctgaggtaacactacttgagaacaatatcattatttacaaatttgtacaagacctgcatttctttgtcactggtggtgaagatgaaaatgagctcattctagcatcagttc

SEQ ID NO: 195243 - DNA, 280 bp, Glycine max
taggtggtagcaaggttgttgttcagccccatagacatgacggtattttcattgccaagggtaaagaagatgctctcgttaccaagaatcttgttcccggtgaagctgtttacaatgagaaaaggattactgttcagaatgaagatggtaccaaagaggagtacagagtttggaatcctttccgatccaagttggctgctgccatccttggtggagttgacaacatatggattaaacccggagccagagtcctttaccttggagctgcttctgggaccat

SEQ ID NO: 195244 - DNA, 267 bp, Glycine max
gcagcctccaaatccaatggcttcagagaagaaactttcgaacccaatgagggagataaaagtgcagaagctcgtcctcaatatctctgttggcgagagtggagatcgtctcaccagagccgccaaggtgttggaacaacttagtggccaaaccccagtgttttccaaagcaaggtacactgttcgttcctttgggattagaagaaatgaggagattgcatgctatgtcactgtcacatgtgacaagggaattcaacttttggagag

SEQ ID NO: 195245 - DNA, 282 bp, Glycine max
tggacccacaaaggagattctcaaggatgggattacataaggaacggttccaatctagtaaaggatatggatcgtttggatgcatttttcaaagggatgaccacatgggctggatgggttgatcaaaaggttgactctatcaaaactaaagttttctttcaaggcatttctcctactcattatcaaggtcaggagtggaatcaaccaagaaagagttgtagtggagaactagaaccatcagcagggtcaacatatcctgctggtctacctcctgcagcaaac

SEQ ID NO: 195246 - DNA, 270 bp, Glycine max
cggctcgagacgattcttctagatttaaggaagatgggtaaggaaaaggttcacatcagtattgtggttattggccatgttgactctgggaagtccactaccactggccacctgatctacaagcttggaggcattgacaagcgtgttattgagagatttgagaaggaagctgctgagatgaacaagaggtctttcaagtatgcctcggtgcttgataagcttaaggctgagcgtgaaagaggaatcacaattgatattgccttgtggaag

SEQ ID NO: 195247 - DNA, 275 bp, Glycine max
gaagaagcggtctctggggaacaaagaggccgtccggaagtaccgcgagaagaagaaggcgcgtgcggcgtcgctggaggacgaggttgtgaagttgacggctctgaaccagcacttgatgaagaagctgaaggggcaggcggctctcgaggccgaaatcgcgaggctcaagtgtttgttggttgacataagggggatcattgaaggggaaattgggtcgtttccctatcagaaaccaacgccgaatgcgaaccctccggtggctaacttgcctg

SEQ ID NO: 195248 - DNA, 274 bp, Glycine max
ctctaatatcccatactatgaaaaacatggatatggggtggaggaatttaatgataccttatatgatgaatgggttaacaagggcgacgcatcggcattgccagagactcttaaaaattacaacaagctgttgtctcttggcttcaagattgtattcttgtcaggaagatatcttgacaaaatggccgtaacagaagcaaacctaaagaaggctggcttccacacatgggagcagttaattctcaaggatccacatcttatcactccaaatgca

SEQ ID NO: 195249 - DNA, 278 bp, Glycine max
caaagcagcacaagaaggtgttccattttcaacactcatcagatccccgtcatcaattgcgttaacaactcgtaaggcaaccatgaggggcattctttctgtaaggacagccttggttcaacatcgtagtgagaaattgggccttggtttcaggctatttagcactcagggtgcttccactgctagtaccccacagccgccgccaccacctccaccaccagagaaaacccattttggtggccttaaggatgaggacaggatatttactaacttatatg

SEQ ID NO: 195250 - DNA, 279 bp, Glycine max
cttatggtggatacctaggcacccagagacgaggaagggcgtagtaagcgacgaaatgcttcggggagttgaaaataagcgtagatccggggattcccgatataggtcaacctttcgaactgctgctgaatccacgggcaggcaagagacaacctggtgaactgaaacatcttagtagccagaggaaaagaaagcaaaagcgattcccgtagtagcggcgagcgaaatgggagcagcctaaaccgtgaaaacggggttgtgggagagctatacaagtgt

SEQ ID NO: 195251 - DNA, 272 bp, Glycine max
tgaaagtagcaaagatgtttcctttcgggcaaaagggtcaaaagataaaggggactatggtggttatgcagaagaatgtgttggatatcaacagcatcaccagtgttggagggatcgttgaccaaggcttaggcttcataggcagtgcagtcgatgcacttacttttgcagccaccaaaatctccatccagttgattagtgctaccaaggctgatggtgggaaaggaaaaattggaaagagtacaaatttaagaggaaagataacattacca

SEQ ID NO: 195252 - DNA, 272 bp, Glycine max
gcgaagaatggcatccagcaatgaagaggatttggaatataaaataataagggagacctttcagcgtgcatcggattatctgtcgccatacttgaagggcagttcttagtcgccctagaataaacattgttgacaatattaccaaccttcaaagtgttgtccaaattgcaagtataatccagccaaagatcaggtgttataggaaagtcagtaatggctcgttcatatagaacttgaattctggctggcgttccagaagactgctcaaattt

SEQ ID NO: 195253 - DNA, 285 bp, Glycine max
gctcgagaagatcgaggttgaaaagcgactgtttctctctgctactatcgcttttcatccttccgtagatcgaaagggaatcttcttccatggcctcaaagcggattctgaaggagcttaaggacctctagaaagaccctgcagcatcttgcagcgcaggtcctgtagcggaagatatgtgtcattggcaagcgactataatgggtcccctgatagcccttatgctgggggtgtttttctagttactattcattttcctccggattatccattcaagccacccaa

SEQ ID NO: 195254 - DNA, 283 bp, Glycine max
tcggctcaagaattggagataccccagtgataagtatactaaaggacatggtgaacaattttaaggccattgatgaggaggagggaataggtggtgctaaatcaccaacgaggttgagtgacttcaagacaagtagggcatacttctattgggttactagagagcagggttcatttgactggttcaaaggggtcatgaacgaagtggccgaagaggaccaaggaaagtgattgcactccacagctactgcaccagcgtctacgaagagggtgatgctcgctct

SEQ ID NO: 195255 - DNA, 278 bp, Glycine max
tctatcatcaaatcattagccattggctaagcactcatgcaattgtcgagccatttgtcatagcaacaaacaggcaactgactgtggttcacctatttacaaacttctgtatcctcactaccgtgacaccctgaatattaattcacttgcccggaaagccctggtcaatgcagatggtattatagagaaaacattcttgtggggtaggtactctatggaaatgtccgctgtcatttacaaggactgggttttcactgatcaagcattacctaatgatc

SEQ ID NO: 195256 - DNA, 271 bp, Glycine max
ggaaacgaggcacgattctggtcaccaacgacgacggaatcgatgctcctggcttaagggcattggttcactccatcgtcaacgccaaccttttcaacgttctagtgtgcgctcctgatagcgagaaatcagctgttagccacagcatcacttggctccatccagtagctgttaagcaagtacagatcgagggaaccaccgcatttgccgtttctgggactcccgctgattgtgcttctctagggatttccaaagctctctttcccacagt

SEQ ID NO: 195257 - DNA, 266 bp, Glycine max
ccaaggtcctgaatctcacagagacagagagaatgagtacggtgggagaagggaaggtgagtagtaatggtcatggatgttgcaaatcagggccaggctatgcttccccactggaagccatttcctggtcccagagagtctctcatttatgtaacctctgtctacacagggaccggaatagagaagccagactatttggcgacagtggatgtggatccaaactctccaacttattccaaagtcatccataggcttcctgttcctta

SEQ ID NO: 195258 - DNA, 270 bp, Glycine max
cggctcgagaaaactaaaactaaaaccccactcagtcttccagtgaaaaaagaaaggcagcgatggaagaagacttcgacatccccggcggcgaggaaatggatctcggcgaagacaaggtcggcgaggagcgggagatcggctcccgcggcctcaagaagaagctcctcaaagaaggtcaaggctgggaaacccccgaagtcggcgacgaagtccaagttcattacacggggactttgctcgacggaactaagtttgattcgagccgcg

SEQ ID NO: 195259 - DNA, 290 bp, Glycine max
acagaattcagcatcatcgccaatcatgtcttacaacgaaaccctcttcatcttgttctatctgtgacgagcatcatggcctcaagagcagtgttattgttggctatgtgtgtgcttccggcgatggttgtggccattcgcccagcaaagaaccctttttgcgtgaagggtcgtgtctactgtgacccttgccgtgctggttttgagacctcagctaccacctacattgctggtgctgagattatgttgcaatgcaagagcagggttagcaacgaggttgtgtacacgaa

SEQ ID NO: 195260 - DNA, 271 bp, Glycine max
cagcaatggtgtacgtcaaggctcagaaatcaaaagcctacttcaagagatatcaagtcaagttcaagagaagaagagagggaaaaaccgattaccgtgccaggattcggttgattaatcaggacaagaacaaatataacactccgaaataccgatttgtggttcgctttagcaacaaggacattgttgcacaaataatatctgctagcattgccggcgatttagttcttgctacagcatattcacatgagctgccacgatatggtcttga

SEQ ID NO: 195261 - DNA, 266 bp, Glycine max
ctcgagccgtcgcaatcttcactacattcaccgcgcatttgcattcacattgaatatggctgagactacacaatctaatgctgagttgttggagtggcctaagaaagataagcgccgcttcctgcatgttgtgtatcgtgttggtgatcttgatcgcaccattaagttttatactgaatgttttgggatgaagcttttgaggaaaagagatattccagaggagaaatatgccaatgcttttcttggatttggcactgaacaatccc

SEQ ID NO: 195262 - DNA, 260 bp, Glycine max
ggaagcacaacaagggtgcaccaaaactttgacatttcaaacggatgtgctttgtaatgcttgtggtggcagtagtgttccacctggtactaggcctgaaacttgtaagcgatgtaaagggtcaggagtgttatttgtacaagctggcatattcagaatggagagtacttgtggtacctgcaagggaactggaaaaattgtatcgaattactgcaagtcatgcatgttttgcaaagattgtcaaaggaacgaagtcggtc

SEQ ID NO: 195263 - DNA, 265 bp, Glycine max
caatcgagccgattcggctcgagctcatatctccatttccatttcctcactctcagtttccaagaatcttaagccaccggaaaaccttacccaaccgtgagcgctgattaccagaaggccgttgagaaggcgacgaagaagctcagaggcttcatcgctgagaagagatgcgctcctctaatgctccgtttggcatggcactctgctggaacttacgacgtgagctcgaagaccggtggtcccttcggaaccataaagcacccct

SEQ ID NO: 195264 - DNA, 264 bp, Glycine max
accgcacgaatatcttgttgtttggagcgatccgagaaaaactctgtaaacatgttggtttaccaggacctccttacaggtgatgagcttctctctgactccttccgttacaaggaaattgagaatggaatgctgtgggaagttgaggggaagtgggttgttaaaggagcagttgatgtagacattggtgcaaacccttctgctgagggtggaggagaagatgagggagttgatgatgcagctgttaaggttgttgacattgtt

SEQ ID NO: 195265 - DNA, 269 bp, Glycine max
atggacgctggcggaaagatcaagaagggcgccggaggaagaaagggcggcggccctaagaagaagccggtttcaaggtccgtcaaggccggtctccaattccccgtcggaagaattggccgttatttgaagaaaggaaggtacgcccagcgtgtcggtaccggtgctcccgtttacttggccgcagttctcgagtacctagctgctgaggtgcttgagttggctgggaatgctgcacgtgacaacaagaagaacaggattattccgag

SEQ ID NO: 195266 - DNA, 271 bp, Glycine max
cttgtctccgaattagttatcttgagaaacattattcccattgctatatattatggcttacatgaaggttacatgggtggttgtgatcatgtgcatggccgtggtgggtgcaccgatgatggcgcaacacatgacatgcaatgatgtgacggtgaacatggcacagtgcctatcctacctgatgcagggaggaacaccttcaacactttgctgcagcggagtcaagaacattcttggctctgctgtcaccaccgttgacaaacaaactgtg

SEQ ID NO: 195267 - DNA, 267 bp, Glycine max
gcgaggagaaagatggaggggaaggagcaggatgtgtcgttgggagcgaacaagttccccgagagacagccgattgggacggcggcgcagagccaagacgacggcaaggactaccaggagccggcgccggcgccgctggttgacccgacggagtttacgtcatggtcgtttacagagcagggatagcagagtttgtggccacttttctgtttctctacatcaccgtctaaaccgttatgggagtcgccggggctagttctaagtgta

SEQ ID NO: 195268 - DNA, 283 bp, Glycine max
ggtcaaggcccttttacttgttcgtccggttgttcccatcttctctctcgtaccaatcaaatcacacttttgtgttgtgttgggaaaccctaaaccccgttttcggtgagatcgagatcgatcgaacatggatgaggagtacgatgtgatcgtgttgggcacgggtctcaaggagtgcattctcagcggtcttctctccgtcgatggcctcaaggttctgcatatggataggaacgactattacggaggagaatccacttcgctcaatcttattcagctttgg

SEQ ID NO: 195269 - DNA, 279 bp, Glycine max
gaaaccctagcaagcggaacaatggcagacgttgaggtcgatgtggcggctgcagcagcagcagggcagccgaagaagagaacgttcaagaagttcagtttcaggggcgtggatctcgatgcgcttctggacatgtccaccgatgaactcgtgaagatgttcagtgctcgcgcacgtagaaggttccagagaggcctcaccagaaagcccatggccttgatcaagaagcttcgcaaagcgaaaagagaagctccaccaggtgagaagccagaacctgtc

SEQ ID NO: 195270 - DNA, 277 bp, Glycine max
gtggtgttgttactgctgctcttttctcttttcttttctctttagttctctcttcccctttctttttctttttcttcttcttctgagcttgtttaagcttttcttccattaacatattatcacaatgtgtggtattcttgctgttcttggttgttctgatgactctcgagccaaaagggtccgcgtgcttgagctctctcgcagattgaagcaccgtggccctgactggagtgggctccatcaacatggtgactgctttttggcacatcaacggtta

SEQ ID NO: 195271 - DNA, 276 bp, Glycine max
tgggaaccggtccagttcaaggtggaactactgttatcgcctttgttaaggatcctgatggttatacttttggacttatccaaagacctacagtccatgacccattttgtcaagtaatgcttagtgttggtgatttagagcgctcaattaagtcttatgaaaaggctttgggcatgaaggtggtgaggaaggttgataagcctgagtacaagtacactatagctatgctcgggtatggagaggagcacgagacaactgtgttggagttgacatata

SEQ ID NO: 195272 - DNA, 270 bp, Glycine max
gttgtgttgtgtacttgtgttaattgtgttgttgttgtaggaaatttaagtgaagagagaatgatgatgaagtctgctatgtgtgcattggtgcttgtggcactggttgtggttgaagtggggcccatggctgaggctgcggtgacttgcaacccaacacagttgactccttgtcttccggcaattaattcaggttctgcaccttcgagtgcttgttgccagaagctgaaggagcaaaagccatgcttctgtggctacctcaaaaaccct

SEQ ID NO: 195273 - DNA, 270 bp, Glycine max
tgggaaccggtccagttcaaggtggaactactgttatcgcctttgttaaggatcctgatggttattgttttggacttatccaaagacctacagtccatgacccattttgtcaagtaatgcttcgtgttggtgatttagagcgctcaattaagttttatgaaaaggctttgggcatgaaggtggtgaggaaggttgataagcctgagtacaagtacactatagctatgctcgggtatggagaggagcacgagacaactgtgttggagttga

SEQ ID NO: 195274 - DNA, 269 bp, Glycine max
caacgttgtagagggagacttttgggggagagtgagtgagagtacaaagatgtttctgcgtgcggtggcgcggccattgatggcgaaggtgaaggcttcgacggggatcgtggggctggacgtggtgccgaacgcgagggaggtgctgattgggctgtacagcaagacgctgaaagagatccagaaggttcccgaagatgaagggtaccgcaaggccgtggagagcttcaccaagcacaggctcggcgtgtgcaaggaggaggaggact

SEQ ID NO: 195275 - DNA, 277 bp, Glycine max
cggctcgaggaagtttctgaaaccaaacaaagccgtcatcgtccttcagggacgctacgccggcaaaaaagccgtgatagtgcgaaccttcgatgaaggcacgcgcgaggctccctacgggcactgcttggtggcagggataaagaagtaccctgcgaaggtgatcaagaaggattcggccaagaagacggccaagaagtcgcgtgtgaaggcgttcgtgaagctcgtgaactaccagcacctcatgcccacgcgctacacgctcgatgtcgatttg

SEQ ID NO: 195276 - DNA, 274 bp, Glycine max
tggaggccctgattatggagtactcagctgggataacaagcttgctggtgctcaggttcttctgagtcgtttgaggttattcttgagtcccgggtatccatatgaagaaattttaaagacctttcacaaccagacaagcataatcatgtgctcctatctaccagttttcacaagctttaatagaaccaaaggtggcttgattcaattaaaccacggtaggcctcagcctctccaatatgtggtcaatgctgcctttttggctgccctttatagt

SEQ ID NO: 195277 - DNA, 270 bp, Glycine max
cctccatggtgaagcttatgcttttctctgctctcatactcttgtccttgcaagcagttgtgtctgtaacaccactgcattttcaacatccactagaccccttaaccaaacaagagataagtcttgtccaaaccatagtccaaaacaagtacccaagctcaagtaacaggttgagcttccactacattggactctcagaacctgaaaaggatgccatcctcaaatgggaatccatcaaaccaactgttataactgtccctcgcaaagcct

SEQ ID NO: 195278 - DNA, 267 bp, Glycine max
ccgatcctctgtcctctcgatgctttcatcgttcaatatattctcatcatctcagtcttgggcctgctatcttgttttaggtctaccgtcctgagaaaatgttccaaatgaagctctggcatgtcaagattcctctatacgaacaattttcaacgaaacttgatttcgtctggtggcaatgaatcgtattatgggtattttaacaggagatcatacacttcactttatatgggaactggaactgtgggtgggattacaagtgctaga

SEQ ID NO: 195279 - DNA, 268 bp, Glycine max
gactcgagcgaatcgctcgaggggattggagtcattggttgatgaccggggaggcacaggacccatggcaaaagccattgctaaatcattccctcgggtggaatgcattgtgtttgatctaccacatgttgtttctggcttgaaaggaagtgagaaccttaaatatgtttcaggggacatgtttgaggcaattcctccagctgatgccattctgttaaagtggatattgatgactggacatgataggagtgtgtggacatattgaaga

SEQ ID NO: 195280 - DNA, 248 bp, Glycine max
tgacacagcgaagtcgtaggagggtttcaaaagatggagaacaagcagatgttctggcaattgggcgatgaactccgtggacactcaaaagcatcggaggatcacaaatggttaatggttgctatcgacattggcggaacagacaagattgaagggggagcgtgtgaacaaccttgatctttcaaagggccccattgaaacaaggtcaagggataaatttgggttccaggaagagaacaaatttgatt

SEQ ID NO: 195281 - DNA, 276 bp, Glycine max
gcgaactgttaactgcctatggctatggagcgccagaatttgagtctggaatttacacataccaaagtgatgtgtacagctttggagtgatcatgttagaacttttgactggccgtcaatcgcacgatagggcacgagcacgaggggagcaatttctggtcagatgggcagttccccaacttcatgatatcgatgcattatcaaggatggttgatccttcattaaatggaaattacccagcaaaatcattgtcaaattttgcagacattatctcta

SEQ ID NO: 195282 - DNA, 275 bp, Glycine max
cacaaatgataatcatctctactgaccaaatctgaagaaaattgctttctctttggttcctagctcgcactctctctacgcacgcctcaacatcccttctctgctccattcattatgtctccgtcgttggatcttccccccaagggtggcttcagttttgatctatgccgaagaaacgcaatgcttcaaaacaagggcctcaaagccccaacctttctcaaaactggcaccactattgtcggtttagttttccaggatggtgtcattcttggggc

SEQ ID NO: 195283 - DNA, 263 bp, Glycine max
  unsure (1)..(263): unsure at all n locations
cagtcgagttagttngtagctgatggcctggccttcgctgaactgaacgaggttctgacaagagagctggccgaggacggttactccggcgtggaagttagggttacgccgatgcgcaccgaaatcataattagagccaccagaacccaagctgttctcggtgagaattgaaggagaataagggcacttacctctgtggttcagaagaggttcaagtttaccgagaccagtgttgaactttatgctgaacaggtcaacaatag

SEQ ID NO: 195284 - DNA, 269 bp, Glycine max
gtgatgaaaatgaaggtccttgttttcttcgttgctacaattttggtagcatggcaatgccatgcgtacgatatgttccctctccgaatgaacactggctatggtgcccgtactccggaggtgaaatgcgcaagttggaggacttgctgtggaagcacacaacatctttggctttgagaccattcctgaagagtgcgttgaagcaacaaaggaatacatccatggcgaacaatatagatcagactccaaaacagttaaccaacaagctt

SEQ ID NO: 195285 - DNA, 267 bp, Glycine max
aaagaactgtgtcctttcccagttttaaggaaattgcttcttcgggctggttgttctaaatctgcttcgtccaagatcggaacttacaattgctttgcttctcagtcctcccctctaccgagccacaaccctagttaccgtgatgacgagtatgctgatgtggactgggacagtcttggatttggactgatgcccactgattatatgtatattactaaatgttgtgagggccaaaattttggacaaggacaactcagtcgttatggg

SEQ ID NO: 195286 - DNA, 265 bp, Glycine max
ctcgagcgttctggtataaagcagattatggcctgtttcgtttctgcatagcagatagtgcacatgactggagagaaggatcagaacaatacaaattcattgagcattgtcttgcaacagtagatagaaagcatcaaccatggctaatcttttcagctcatcgtccccttggttactcctctaatctttggtatggcatggagggttcatttgaagagcccatgggaagggaaagtttgcagaagctttggcaaaagtacaaagt

SEQ ID NO: 195287 - DNA, 248 bp, Glycine max
attcgggtcgatgatctatggtctgcactccagaaaccgggtaactggagaactgtttgtttcacggatggacattcatcttacttctgaggggagcaatatagtggcaaaagagatcttgaaggtcatcaaagaagcagagtgggaaccttgcctgcactggaattcaatgccaactgaatatggagaagattcaccttatgatcctgttggcctgaggaagacacttgatgctccacggacttctg

SEQ ID NO: 195288 - DNA, 274 bp, Glycine max
caaaatggtgggttatcagaggaagaaaaggagcagatcaggtattctcaggttcactgtaaaaaggactttaccttcgttgaaagggtaaataggagatacgtaaatgtactccgggggcttgaacttcacactggagttttcaatgctgtggagcagaggaaaattgttgagtggatttacagattgcaatggaggggacaacaagggaaactgaaagatcgaacatattcagaaccaagaaagtggatgcgtggtaagggccgcgtgacaa

SEQ ID NO: 195289 - DNA, 269 bp, Glycine max
gaccctgtatggagtggcgaatggcgctgtggtctcaaattttatgcatagtcactctgctgttatgcagcgattgtgcagcatcttttgccaaggagcagcaaaaggaccgggttggtaggctcccaggtcaaggcttcaacatcagcttcgcacactatgctgggtacatcaccgtcaatgagaaagctgggagaacactcttctactggttcattgaggcacttgaagatcctcattctaagccccttgttttgtggctcaatgga

SEQ ID NO: 195290 - DNA, 264 bp, Glycine max
gtttccacactgcataccttacgtcttccgaattcgaagttaatttgcaagatggctaaggaaaaggctcagatcaacattgtcgtggttggtcatgtggaccctgaggaggcaaccaccattaacgagctgaagaagcctgttgtggagaaagaagctccagggcatgccatatgagggcatgcacgtacggcctcggaggggaaccagaaaattatgttaacaaaataatctggaaccctaatgtatcagtgtcatcatcag

SEQ ID NO: 195291 - DNA, 263 bp, Glycine max
  unsure (1)..(263): unsure at all n locations
acgccatcgccaaagggtttcaggttgaaataagtgatttgttataatcaacatgtcatctccacacatacatacgacatcaaaatntaangaaactgaagatgagagaatatacagaggagacgttaaatgatggactcaatgagttcaatgtggagtttcatggtccaaaagcaaagcctttatgaaggtggagtctggaaaattcgggttgagcttcctgattattacccatacaaatccccttccaatggcttcgtgaa

SEQ ID NO: 195292 - DNA, 267 bp, Glycine max
tcgacttctgaggtcatagcaaagaacaaagagagagagagagagaaaatgatgaagccatcgatgctcagatctctccactccgccgccacccgcggcgcctctcatctcttccgccgtgggtacgcctccgagccggtgccggagcgcaaggtagccgttctcggcgccgccggcgggcatcgggcagcctctctcccttctcatgaagctcaatcccctcgtttcgagcctctccctttacgatatcgccggaactcccggcgt

SEQ ID NO: 195293 - DNA, 269 bp, Glycine max
cctcgagccgattcggctcgagcaggtgtacgcagattattatgacatgcagctgctacaggaccagggaaggagggcgtggaccataggtcctctttccctgtgcaaccaagacaaaggcaagcgaggaaagcaagcttccgttgaccaaggagacattttgaagtggctggactccaagaaagcaaattcggtggtgtacgtttgttttggaagcatagccaacttcagtgaaactcagctgagagaaatagcgagggggcttgagg

SEQ ID NO: 195294 - DNA, 288 bp, Glycine max
gctcggaatttcggtcgagcgcgttctatatattattgaattgacaatgaggcctgctcttgctttgcttcctcttctatttgctctcttgttagctgccactacagaatcaagaaaagatacacgggaatattggaaaatgatcatgaaagatcaggaaatgccagaaggacttcaaggtcttgtttcatttcaatctgaaaataaccctaagactcaagagcagcttggtaaaggttccaaaaatcattgtgaagagtctctagttacaaatacacaagttaatag

SEQ ID NO: 195295 - DNA, 262 bp, Glycine max
cgaacctgtttaattcccccaaatcggaagttgatcctgaaaccctaaatagcccttaacgttgtgtctatgtttttgaattatggacgcgaaggatatcctgggattgcccaaaaactcgttcccatctctcgagaagaaatctcgtcctcccaaagagtctcaaagaaaaccagatggcatttcgtgcgaggtgtatgcgcttacgggcggattggcctctctcatgcctgcaattgaagcctctcagttgaagaaaaag

SEQ ID NO: 195296 - DNA, 263 bp, Glycine max
gagaatatgaagttgtttgttttctttgttgctgcagtagttttggtagcatggccatgccatggcgcaggctaccaaaggttccctctccgaatgaaaactggctatggtgagcgttcttcggaggtaaaatgcgcaagttttaggcttgctgtggaagcacacaacatccgagccacacaaaccattcctgaagagtgcgttgaaccaacaaaggactacattaatggcgaacaatttagatcagactctaaaacagttaa

SEQ ID NO: 195297 - DNA, 263 bp, Glycine max
gtgaaggtgaattgctgaagagatagcagatttttgaaggaagatgaataactctgtttcagaaaacagtttcatcattgagagtgatgaagaagatgaggagaaggatttgaataaaggtggagttgatggaaacgattctgattcttccaattactcaaatgaacaccctccacagcgaaagcccaacacttacaacatttcatggcctcagagttacaggcaatctattgatctatatagtagtgtgccatcaccaaaca

SEQ ID NO: 195298 - DNA, 265 bp, Glycine max
gaggacgatctcagattccggtcactcctctcgccggcgatcccttattcctccgtcctccgtcgagtcctttccgattcgaatcgttcccagccttgtgccaccatgaatcccgaatacgattatttgttcaagcttttgctgattggagattctggtgtaggcaagtcatgtcttctcctgaggtttgctgatgattcataccttgacagctatatcagtaccattggagtggactttaaaatccgcactgtggagcaggatg

SEQ ID NO: 195299 - DNA, 267 bp, Glycine max
actggaagtgtctcattcaacaatagaagcctgcatgctattggaagtacacctaacccctatgagaaagccatctctattattggcaagactctggctccttttgatgatgacaacttgattccttgttttggctttggtgatgccaccactcatgatcaagaagtgtttagctttcacagtgataattcaccttgccatggttttgaggaagttttagcttgctatcaaaaaattgttccaaacttgagactgtcaggaccaaca

SEQ ID NO: 195300 - DNA, 264 bp, Glycine max
cggtgctacaagagccttggttcatcagcacagatattttctggtgcgttccctgagaattatgaacctcccagtaatttctactatgaagtaaatgacgattctcccattgttcaggatgatgtcagtttatttgattacaatgtccctgaaagagtaaatgagtttgtggcagctgcaatatcacaggccaatattacgctcacaaatcatataatgtggacaatggggacagatttcaagtaccaatatgcacaaacctgg

SEQ ID NO: 195301 - DNA, 263 bp, Glycine max
actcgagccgattcggctcgaggcagcatttaccttcgtttctgtgactagatctgcgtctgatcctttcttcgaaaacgctaccgtttcactggcagttgctgcaacgcccggacctccacctctcatggtccccctcactcttattcagggagctgcttccaaaggagccgtctgtttggatggaacattgcctggttaccactttcatcctggatttggatctggggcaaatagttggctcattcaattggagggaggag

SEQ ID NO: 195302 - DNA, 265 bp, Glycine max
gctagggttattgttgcaattgagaaccctcaggatatcattgttcaatccgcaaggccttatggtcaaagagcggttctgaagtttgctcagtacactggtgctcatgctattgctggaaggcacactcccggtaccttcaccaatcagcttcagacttcgttcagtgagcctcgtctccttatcctcactgatccaagaacagatcaccagcctattaaggaagctgctcttgggaatattcccaccattgctttctgtgaca

SEQ ID NO: 195303 - DNA, 259 bp, Glycine max
ctccggtgaagagaagaagatggcgaccgtaccaggacagctcatatgggaggtcgtaaagaaggacaactctttcttggtgaaagagttcggaaggggcactcagagcgtgcagttcagcagagagcccgacaatctctacaacctcaacactttcaagtactccggtttggcgaacaagaaaactgtcactgttcaacctgcgggtaaagaccactctgtgttgctggcaacaaccaagacaaagaagcaaaacaag

SEQ ID NO: 195304 - DNA, 269 bp, Glycine max
ctcgagccggcctagccattgatttggaaaagtccaacttcaaggatgagtaagcttcacagtgatgctctaagagaagctatctcaggaatcatggctgattccaaggaaaagaacaggaaatttgtggagaccattgaactccaaattgggttgaaaaattatgatccccagaaggacaagcgtttcagtggctctgttaagttgcctcatattcctcgccccaagatgaagatttgtatgcttggagatgcccagcacgttgagga

SEQ ID NO: 195305 - DNA, 269 bp, Glycine max
gctgcccttcagtccttcagcaatggtttacgtgaagtcacagaaatcaaaagcctacttcaagaggtatcaagtcaagttcaagagaagaagagagggaaaaaccgattaccgtgccaggattcggttgattaatcaggacaagaacaaatataacaccccgaaatatcgctttgttgttcgtttcagcaacaaagacattgttgcacaaataatatctgctagcattgctggcgatattgttcttgctgcagcatatgcacatgagc

SEQ ID NO: 195306 - DNA, 269 bp, Glycine max
ggaggagccaattttgtgaattctggatacaccaaaggtgatggacttggagctgagattgttggcacttttgttcttgtctacaccgttttctctgccactgatgccaagagaaacgctagagactctcacgttcctattttggctccacttcccattggatttgctgtgttcttggtccacttggctaccattcccatcacaggaactggcattaacccagctaggagtctcggagctgccatcatctacaacagagaccatgcatg

SEQ ID NO: 195307 - DNA, 271 bp, Glycine max
gccgtttgctccccaaggaaagaagcagagtgtttcttttgaaatcagctagaaaagatgtcaggtgaagaggtagctgttgcagctgaggcacctgctgcttcaattccaggtgcgccaatggacatcatgactgctctacagcttgtgctgagaaaatctctggcctatggtggtcttgcacgaggtcttcatgaaggtgctaaggtgatcgagaagcatgctgcacagctctgcgttctagcagaagattgtgaccaacctgattatg

SEQ ID NO: 195308 - DNA, 271 bp, Glycine max
taaaaatgcagatcttcgtgaaaactctgacagggaagactataaccctcgaggtcgagagcagcgacaccatcgacaatgtcaaggccaagattcaagacaaggaaggcattcctccggatcagcagcgtttgattttcgccggaaagcagcttgaagatggaaggaccctggccgattacaacatccagaaggaatcaacccttcatctcgtcctcaggcttcgtggtggcatcattgagccttccctcatggctttggctcgcaaata

SEQ ID NO: 195309 - DNA, 269 bp, Glycine max
ggcctccctcctcctcgccttcgtcactgcctcccctgttccagcattcgggctttccgctggagtcggagttggcaacgctttggtgttggagatcgtgatgaccttcggtttggtgtacacagtctacgccactgccgttgaccccaagaagggcacatttgggaattattgctcccatcgccattggtttcattgttggcgctaacattttgttgggtggggccttctccggagcagccatgaaccctgctgtgacatttgggcct

SEQ ID NO: 195310 - DNA, 283 bp, Glycine max
tcggcttcggctcgactcgaccgaatcggctcgaggggttactgtctgttcaagctaccatctctctctctctaccttagtgcctccttgccacaagttaaaatggcccaagaaactttcctattcacatctgaatcagtgaacgaggggcaccctgacaagctctgtgaccagatctccgatgctgtgctcgatgcatgcttggagcaggaccctgacagcaaggttgcctgtgaaacctgcaccaagaccaacatggtgatggttttcggagagatcacaa

SEQ ID NO: 195311 - DNA, 269 bp, Glycine max
gagattttgctgctctttgaagacgggtgtttgcttgattttcgagatgtcgctgctctcagatctcatcaaccttgacctctcagacactactgagaaggtgatcgcagagtacatatggatcggtggatcaggaatggacctgaggagcaaagcaaggactctcccaggaccagttagcgacccttcaaagcttcccaagtggaactatgatggttccagcacaggccaagctcctggagaagacagtgaagtgattatatacccac

SEQ ID NO: 195312 - DNA, 269 bp, Glycine max
cctaaatatggctgacttgttggaatggtcaaagcaagataagaaacgaatgcttcatgtcgtctaccgtgttggtgaccttgatcgcaccatcaaattttacacagaatgtttaggaatgaagcttttgaggcaaagagatatcccagaggagaaatatgctaatgcttttcttggatttggccctgaagaatcccattttgttgttgaattaacatataattatggggttacctcgtatgacattggcgatggctttggacattttg

SEQ ID NO: 195313 - DNA, 267 bp, Glycine max
gtctccgaattagttatcttgagaaacattattcccattgctatatattatggctagcatgaaggttacatgggtggttgtgatcatgtgcatggccgtggtgggtgcaccgatgatggcgcaagccatgacatgcaatgatgtgacggtgaacatggcacagtgcctatcctacctgatgcagggaggaacaccttcaacactttgctgcagcggagtcaagaacattcttggctctgctgtcaccaccgttgacaaacaaactgt

SEQ ID NO: 195314 - DNA, 271 bp, Glycine max
ggcgatcctagcactctcttctgcagctttcgccgacagcttcattcaccatggctgagcaaaccgagaaggcttttttgaaacaaccaaaagtgtttctcagctcgaagaaaactgggaagggaaagagacccggaaagggtgggaaccgcttttggaaatccattgggcttggatttaagactcccagggaagccatcgaaggaacctacattgacaagaagtgccccttcactggcaatgtttccatccgtggccgtatcttggctgg

SEQ ID NO: 195315 - DNA, 263 bp, Glycine max
tgttgcttcgctgttgaatcatggatcagaaggtcgatttcagcgctccccattccatgggaaccactatcatcggcgttacttacaacggcggtgtcgttctcggagccgactctcgaaccagcaccggagtgtatgttgccaaccgagcatcggacaaaatcactcagctcactgataatgtatacgtgtgtcgctctggatcggctgctgattctcagattgtctctgattatgtgcgttacttcctccatcaacacaca

SEQ ID NO: 195316 - DNA, 270 bp, Glycine max
gatcaactgaggagagtgagagacaagagaagagaagatgacaacacgcttcacgaagaacaggaagaagaggggccacgtcagcgctggccacggtcgaatcggaaagcacaggaagcaccctggaggacgcggtaacgccggaggcatgcaccaccacaggatcctcttcgacaaataccaccctgggttcttcggcaaggtaggaatgcgctattttcacaagcttcgcaacaacttctactctccgatcctcaacatcgacaagct

SEQ ID NO: 195317 - DNA, 270 bp, Glycine max
aggggcgtacggttctgttgtggttggagatccgaattttgattatcgaatcgcaaaattctgaatcaatcaatcaatcaatcagtaatcagagccatcaacgactgcaatggtctgcgagaagtgtgagaagaaattatcgtcggtgctagtaccagccaagtggaaagaaggggccagcaatactaccgagggtggtggccgcaagatcaacgagaacaagcttctctccaagaaaaacagatggaccccttacggaaacactaagtg

SEQ ID NO: 195318 - DNA, 268 bp, Glycine max
aaggttcttcttcgtcgtatatctcttcttttgtcgtctgtgtgtctgtgctatctctcacctgacaatgtcttgctgcggtcgtcactgtggttgcggaagcgcctgcaagtgcggcaacagctgcggaggctgcaagatgtacccagacttgagctacaccgagtcaaccaccaccgagaccttggtcatgggagtggcaccagttaaggctcaattcgagagtgctgaaatgggtgttcccgctgagaacgatggctgcaaatgt

SEQ ID NO: 195319 - DNA, 285 bp, Glycine max
tagtacagtggaattcggctcagctgagcgattcggctgaggccatcatagacacaagcatgagcatgaagctgatgatgctagggacattgagcttccacatgtggaccatgggaatgtaaagaataggtcattgccactttctaccatcatagacatactcaagcagaaaactgggaaaaatgatatagatgttgggaaattgagactctcgctttatgacatatttggggaagatgctagccctaaagtgaagaagttcatgacggttatcttgaataaact

SEQ ID NO: 195320 - DNA, 269 bp, Glycine max
tgcaactggttttccaggcaacccttttgatttctctgcaatgtctggcctgctcaatgatccaagtatcaaggaattggctgaacagatagcaaaagatccatcattcaaccagatggctgagcagcttcagaaaacttttcaaggagctccacaggatgctatgcctagctttgataatcaacaatatttttcaaccatgcaacaggttatgcagaatcctaattttatgaccatggctgagcgcctgggtaatgcattgatgcagg

SEQ ID NO: 195321 - DNA, 265 bp, Glycine max
gaactgttattcactggtatggaatcagacaggttggaattcgttgggctgatggaactgctgccatctcacagtgtgctataaacccaggagtggcttttcattacaggtttacagttgacaggcctggtacatatttctatcatggacaccatggtatgcaaagatcagctgggttgtatggttcattgatagtagatttgccaaagggacaaaacgaaccgtttcattacgatggtgaattcaaccttcttcttagtgattt

SEQ ID NO: 195322 - DNA, 262 bp, Glycine max
cggtaatttgggaattattgctcccatcgccattggtttcattgtcggcgctaacattttgttgggtggggccttctctggagcggccttgaaccccgctgtgacatttgggcctgctgtcgtgagctggacctggaccaaccactggatctactgggccgggcctctcatcggtggtggaatcgctggccttgtttacgaggttgtctttatcagccacacccacgagcagcttcccaccactgactactagaggggggga

SEQ ID NO: 195323 - DNA, 266 bp, Glycine max
tctacctctgccactttctgagtacaatacaacactgccatggctgcctcagtctccactattggagctgtcaacagagctccactgagcttgaacagctctgaagctggagattcggttcccagttcagccttctttggcacaagcttgaagaaggttactgcctcaagggtccctaacgtcaagatttcttctggaagtttcaaaatcgttgcggcggagaaagagattgatgagcaacaacagacaaacaaggacagatggaa

SEQ ID NO: 195324 - DNA, 266 bp, Glycine max
cacactgcataccttatgtcttccgaattcgaagttaatttgcaagatggctaaagaaaaggctcagatcaacattgtggtggttggtcatgtggaccctgaggaggcaaccgctcttaacgagctgaagaagcctgttgcggagaaagaagctccagggcatgccatatgagggcatgcacgtacggcctcggaggggaaccagaaacttatgttaacaaaataatctggaaccctaatgtatcagtgtcatcatcagtgtgtag

SEQ ID NO: 195325 - DNA, 266 bp, Glycine max
tagggatctacaatgttggaactggaaagggtagatcagtgaaggagtttgtgaatgcttgcaaaaaggccacaggggtggacatcaaagtagactaccttccacgtcgacccggcgattatgccgaggtgtatagtgacccttctaagatcaacagggaactgaattggaccgcacaatacactgaccttgagaagagtttgcaggttgcatggaaatggcaaaaagctcatcgtaacggttacggtatttcatctgcaatctga

SEQ ID NO: 195326 - DNA, 267 bp, Glycine max
cttctctttacccgttgaaacatccttagttttcagattctgaactcttgattctgaattcatcacaatgaattcgtcaactacagtgaggaagttgtaggtggtgtcccctgttcctgcggacatagacatcgcaaactccgttgaaccagttcatatctcccagattgccaaagagctcaaccgtagtcccaatcactatgacctttacggtaaatacaaggctaaggttttgttgtcggttcttgatgagcttcaaggatcaga

SEQ ID NO: 195327 - DNA, 267 bp, Glycine max
ctaggcacccagagacgaggtagggcgtagtaagcgacgaaatcgcttcggggagttgaaaataagcgtagatccggggattcccgatataggtcaacctttcgaactgctgctgaatccacgggcaggcaagacctcacctggtgaactgaaacatcttagtagccagaggaaaagaaagcaaaagcgattcccgtagtagcggcgagcgaaatgggagcagcctaaaccgtgaaaacggggttgtgggagagctatacaagtgtc

SEQ ID NO: 195328 - DNA, 268 bp, Glycine max
gatcgataggccacgctttcacggttcgtattcgtactggaaatcagaatcaaacgagcttttacccttttgttccacacgagatttctgctcgtcgttgagctcatcttaggacacctgcgttatcttttaacagatgtgccgccccagccaaactccccacctgacaatgtcttccgcccggatcgaccggccgaagccgaccttgggtccaaaaagaggggcagtgccccgcttccgattcacggaataagtaaaataacgttaa

SEQ ID NO: 195329 - DNA, 267 bp, Glycine max
ctttcctctccgaaccctcgatcactctcacgcgctcctatattcgctcctccaccgtcgctctctcgcacacccacaacaccatcttcatcacatggcaaacgcagcatctggtatggcagtccatgatgactgcaagttgaggtttttggagctgaaggcaaaaaggacacaccgtttcatagtttttaagattgaggagcagcagaagcaggtcattgtggagaagcttggtgagcctgcccagggctatgaagatttcactgc

SEQ ID NO: 195330 - DNA, 266 bp, Glycine max
caataatgttcatcgagaattttaaggttgagtgtcctaatgtgaagtacaccgagactgagattcagtccgtgtacaactacgaaaccaccgaacttgttcacgagaacaggaatggcacctatcagtggattgtcaaacccaaatctgtcaaatacgaatttaaaaccaacatccatgttcctaaattaggggtaatgcttgtgggttggggtggaaacaacggctcaaccctcaccggtggtgttattgctaaccgagagggc

SEQ ID NO: 195331 - DNA, 264 bp, Glycine max
agtgtctggtgccttaacttgttcttcattgtgccctttctctgagattgcatataggtttttagtgctgaagcatcaaaatggggcgatattcaataccctttatgggtgttctgctactgttctgtctggtttcatcttcagaggcagaatatttgaagtataaagaccctaaggcgccactgaatgtcagaatcagtgacttgttgaagcgaatgtctctcgaagaaaagataggccagatgacacagattgaaaggagtg

SEQ ID NO: 195332 - DNA, 262 bp, Glycine max
caaggcttcccttagtaacggcgagcgaaccgggaaaagcccaccatgaaaatcggtcgccctcggcgtccgaattgtagtctggagacgcgtcctcagtggcggaccgggcccaagtcccctggaagggggcgccagagagggtgagagccccgtcgtgcccggaccctgtcgcaccacgaggcgctgtcggcgagtcgggttgtttgggaatgcagccccaatcgggcggtaaattccgtccaaggctaaatactggcga

SEQ ID NO: 195333 - DNA, 266 bp, Glycine max
cgaaaagagagaaattcatcgtcgcagtaatcatgggtaaggttcatggatcacttgcacgtgctggtaaggttagagggcaaaccccgaaggtggccaagcaggataagaagaagaagccacgtggccgcgcccacaagaggatgcagtacaatcgccgattcgtcaccgccgtggtgggattcggcaagaagaggggacccaactcgtctgagaagtgaggccgaggcttgaggaatatgttgctactctatttgatttatctt

SEQ ID NO: 195334 - DNA, 262 bp, Glycine max
ccctgaacaatcccattttgttgtggaattaacatataattatggggtgacctcatatgatattggaactggctttggacattttgctatcgcaactccagatgtttacaaattggttgaagacatccgggctaagggtggaaatatcaccagggagccgggtccagttaagggtgggaagtctgttattgccttcgtgaaggatcctgatggttatgcttttgagctcattcaaagatcttccacccctgagccattgtgt

SEQ ID NO: 195335 - DNA, 259 bp, Glycine max
ctcgagccgggatcaaataaaggaacagctctcagctgcagggtggacagttgactttaggcccaggaatggcagagagtaccatgatgcagtgtatgttagtctggacggacatacacactggtcaatcaccttggcctacaaaaggctaaaagagtattatgaagctggtaatggtgaaggtaaggcatataagccaggcttcaaatttacaccaatagcagaagaggatttcaaaatgctaactaaggtaatgaac

SEQ ID NO: 195336 - DNA, 267 bp, Glycine max
ctctgcgaaggtgcaacctgacagcctccaaatccaatggcttcagagaagaaactttcgaacccaatgagggagataaaagtgcagaagctcgtcctcaatatctctgttggcgagagtggagatcgtctcaccagagccgccaaggtgttggaacaacttagtggccaaaccccagtgttttccaaagcacggtacactgttcgttcctttgggattagaagaaatgagaagattgcatgctatgtcactgtcagaggtgacaag

SEQ ID NO: 195337 - DNA, 266 bp, Glycine max
aatacatatcttccaagcgagacaccagccccacttttgaagtacagagaagaagaattgaagaatgtaagaggggatggaactggagagcgcaaggcatgggataggatctatgattatgatgtctacaatgacttgggcaacccggatagcggtgataaatatgcacgccccgttcttggtggttcagccttaccttaccctcgcagaggaagaaccggaagaggaaaaactagaaaagatcccaacagtgagaagccgagcga

SEQ ID NO: 195338 - DNA, 265 bp, Glycine max
ctcgagccggtcaagtatccaccacctaaagtgatgcaggtcgacaagtctgcatggatgactgatgaagaatttgcaagagaaacaattgctggtttgaatccaaatgtcatcaagattattgaggagttcccactaggtagcaagcgagatactcaagcctatggtgatcatacctgtataataacaaaagagcatttggagcctaacttaggtggtctcactgttgagcaggctatccagaacaagaagttgttcatcttag

SEQ ID NO: 195339 - DNA, 262 bp, Glycine max
cggagtgagagagagtgttcttcgtgtgctaccttctcccagaaatggttacgttcaggtttcaccagtaccaggtggtcgggagggctctcccaacggaagcagatcagcatccgaagatctaccgaatgaagctctgggccaccaacgaggttcgcgccaagtctaagttctggtattttttgaggaagctgaagaaggtgaagaagagcaatggtcaagttcttgctatcaacgagatttttgagaagaacccaaccaa

SEQ ID NO: 195340 - DNA, 264 bp, Glycine max
tggagagcgcaaggcatgggataggatctatgattatgatgtctacaatgacttgggcaacccggatagcggtgataaatatgcacgccccgttcttggtggttcagccttaccttaccctcgcagaggaagaaccggaagaggaaaaactagaaaagatcccaacagtgagaagccgagcgattttgtttaccttccaagagatgaagcatttggtcacttgaagtcatcagattttctcgcttatggaatcaaatctgtatc

SEQ ID NO: 195341 - DNA, 267 bp, Glycine max
gttcttatcagtttaatatctgatatgtgggccattggtccacacgatattaaatttatttcttgaaggggagggcccaacacagtagctctgctactggggtcgtcaagcgtcgcccttgtgttgcactataacatgggcctggcgcaccctacaaaataaaataaaaaataaaaaaaaaaaagtaaaataaaaaaaaaaaaaaaaaaaaaggggggccaatggctcccaagggtttaacctttcgggctgggttaaaaggcgttt

SEQ ID NO: 195342 - DNA, 263 bp, Glycine max
gccgtagcagtaactcgtggaattgctagcaatggcgaggatcaaggtttacgagctgaggcagaagacgaaggctgatctgttgaatcagctgaaggacctcaaggccgagcttgccttgcttcgtgttgctaaggtcaccggcggtgcacctaacaagctctctaagatcaagctggtgaggttgaacattgcccaggttttgacggtgatttctcagaagcagaaggccgcgttgagggatgcctacaagaacaagaagt

SEQ ID NO: 195343 - DNA, 262 bp, Glycine max
gttctctctgccagagatggcattgtttcgctaggaggtccccatatccctcttaagactggaagaagggatggtagaaggagcagagctgatgtggttgagcagttcctcccagaccacaatgagtccatttctgcagttcttgacaagtttggtgccatgggaattgacacccctggcgtcgttgcactgcttggagcacacagtgttggtcgaacccattgtgtgaagttggtgcaccgtttgtacccagagattgatc

SEQ ID NO: 195344 - DNA, 261 bp, Glycine max
ctttacttcccaaaacttgctctacaatgagtttccttcgttcatttgcaagaaacaaggatatatcaaaagtaggacgcagaggtatccattgcatgcagaaactatgtgcagaaaaaatatctcctgattcactagagaaggcccaaaatcgtgtgatagatgctgcactcacacttgttcgagaaaatacaaggcttaagaaagaactcgtgcatagtttgggaggtgctgtggcaacttcaactcttcttggagttc

SEQ ID NO: 195345 - DNA, 260 bp, Glycine max
ggcgttctatatattattgaattgacaatgaggcctgctcttgctttgcttcctcttctatttgctttcttgttagctgccactacggaatcaagaaaagatccaggggaatattggaaaatgatcatgaaagatcaggaaatgccagaaggacttcaaggtcttgtttcatttcaatctgaaaataaccctaagactcaagagcagcttggtaaaggttccaaaaaccattgtgaagagtctctagttacaaatacaca

SEQ ID NO: 195346 - DNA, 258 bp, Glycine max
ctcgagcgaatcggctcgagatcacctccacctccagtttacacttatgcttccccaccactacctatctacaagtaagactcgaattgcggaagcaccattcacgataaatcatgttctagtttttatcgaggaataaaggcaagctctatttggagtcaagtgaaacatctatcttcctgtccaagttctttgaataaaagtctgaatgtgtcatctctgcactacaatatttgtgattctgaccaagttggttct

SEQ ID NO: 195347 - DNA, 247 bp, Glycine max
gttactgctgctcttttctcttttcttttctctttagttctctcttcccctttctttttctgtttcttcttcttctgagcttgtttaagcttttcttccattaacatattatcataatgtgtggtattcttgctgttcttggttgttctgatgactctcgagccaaaagggtccgcgtgcttgagctctctcgcagattgaagcaccgtggccctgactggagtgggctccatcaacatggtgactg

SEQ ID NO: 195348 - DNA, 255 bp, Glycine max
gaaggcgtcttcataaacgcctttcttctccgtttccgtttcctcgttcgaattcgctttttgatccgcgaaaatgagagagtgcatctcgatccacattggtcaggctggtatccaggtcggaaatgcttgctgggagctctactgcctcgagcacggcatcgggcccgatgggcaaatgccaagtgacaagacagttggcggtggtgatgatgctttcaatactttcttcagcgagactggtgctggaaagca

SEQ ID NO: 195349 - DNA, 270 bp, Glycine max
attcggctcgagctatcgagtaaattaactatgaagcctaccctactattatccctttccttcctgcctctctatgctttcctggctctttcagaagatgttgaacaagttgtggacataagtggcaaccccattttcccaggtggcacatattacattatgccatcaacttggggcgctgccggtggtggattgaaactaggccggacaggaaactcaaactgcccagttactgttttgcaagattactcagaaatcctccgtggcaca

SEQ ID NO: 195350 - DNA, 261 bp, Glycine max
cgcgtggcagcgtttgcgtttgctctgctgtggcaatcggcctcagcagccgacgtcgttgtgctctctgaagataacttcgagaaggaagttggtcaggacagaggagctctcgttgagttctatgctccttggtgtggacactgcaaaaagcttgctccagaatatgaaaagcttggtagcagcttcaagaaagccaaatctgttttaattggcaaggttgactgtgatgagcataagagtttgtgcagcaagtatgga

SEQ ID NO: 195351 - DNA, 126 bp, Glycine max
  unsure (1)..(126): unsure at all n locations
tctttgacangctgcagtacgtttctggtagcatggccatgccatggcgcaggctaccaaggttcctctccgaatgaaatggtatggtgacgtcttcggagtaaatggcagtttagctctgtggag

SEQ ID NO: 195352 - DNA, 259 bp, Glycine max
ctaccaatggctaccaaggtttacattgtttattattctacgtacggacatgttgagaagctagctagagagatagaaaaaggggctgcttctgtggagggagtagaagcaaaactgtggcaggtacctgaaacattgcctgaagaagtccttgctaagttgggagcacctccaaagagtgatgttccaattattactcccaatgagcttcctgaggctgatggctttttgtttggttttcccacaagacttggatcta

SEQ ID NO: 195353 - DNA, 254 bp, Glycine max
gtagtaacatcattttaaatccattctatttgaattggcattttctccaccataattattgtccaaaaacgtttacaataatgagtcttggtcaatttatttgcgaaaatgtatgtatagttcaaacgaaaaatgcaccacacctaaaatcgggtcaaattctaacagttcaaatggattctgtaggaataagatcggctaacccttatttggcgactcctggagcaacggttcatggccattatggggaaata

SEQ ID NO: 195354 - DNA, 253 bp, Glycine max
ctcttggtcttgcgagagacagccatgccagacacgaagatttttggcatgctgtttggccaaacactcccattccaagttcattgcgagagcttctaaagcctggccctgcaagtgttgaaatcgatgaccaccctatgcaaattgaagaaacacagtacccgaaaaccttcttctataaagaagaccttcatccaggcaaaacaatgaaggtacaattcagcaagcctccctttcaacaaccatggggtgt

SEQ ID NO: 195355 - DNA, 247 bp, Glycine max
agagtatagtggtgttgcctgcaactgaaggtgttgatagtacaatttggctattggccaaggctcatgttattgtgaatgactctggttatcatcagctcgtgagccattggttaaatactcatgcagtgatggaaccatttgccatagcaaccaataggcatctcagtgtgctccaccctatttataaacttctttatccacacaacatcgaattccaaaatatcaatggacttgctaggcagtc

SEQ ID NO: 195356 - DNA, 190 bp, Glycine max
ggaagccttgatggttccgaacagaaggtgaaaatggaacgtttcgatacgttggtgggtattgggaggcgagagagcatggaagatgggacgggtgcccgaatatatttggtgaatttaatgaagactctaccgatccgttaggtgcatcttcttaatttggttcaggtaacctttacatattttccac

SEQ ID NO: 195357 - DNA, 256 bp, Glycine max
ccagattctcactgcttctggtgatcaaacaataaaagtatgggatgttcaagaacagaagtgtcttggactgttgactgggcacacaggaagtgtgaaatctatgtgttctcatccaactaattctgatattattgtctctggttctagagatggatcctttcgtatttgggacttgagatgcaagtccactgctaagagtaggtgtggagaagttagcatatgttcaatgggaggcgtcaaaggagcacatatt

SEQ ID NO: 195358 - DNA, 255 bp, Glycine max
cgactagccgcgttgactcggttccgtttttcattctcgcggatctaatattaaggaatagcttaagggcacattacaatgaaggcattgattctggttgggggatttggaacaaggctgaggccactgacactcagtttccctaagcctcttgttgattttgctaacaagcctatgattttgcatcagatagaagcccttaaggccattggagtgactgaggtagtgctagccatcaattaccaaccagaggtt

SEQ ID NO: 195359 - DNA, 254 bp, Glycine max
tgagagggttggatatagctctcagggttctggatccacacttattatgccatttcttgataaccagctgaagtctcctagcccactcctgttacctgcgcaggatgctgttactccattgtctgaagcagaagcagttgatctggtcaaaactgtttttgcatctgcaactgagagagatatatacactggagataaggttgaaatcgtcgtcctaaatgccagtggtattcgtcgtgaatacatggacctaa

SEQ ID NO: 195360 - DNA, 248 bp, Glycine max
gaaagatctgtgactattattattattattattatttctgatttttgtgggaaaatggctgtctgggcaccggtgttgatcggggtggtgctgttcatgctgctccaaccggggctgcttttttcctttctgggaaacgggaagcagctagagtttgggagcatggagaccaacggcaaggccattttcatccacactctcatcttcttcgccctctactccatcctcatcctcgccgttaaagtcca

SEQ ID NO: 195361 - DNA, 255 bp, Glycine max
ctcgagtcttgataatgaaagtgcttgttttgtttgttgctacagttttggtagcatatgaatgccatggctcagactaccagaagttccctctccaaatgttaactgggtttggtgggcaatacagcaatgaggtggcatgtgccagttggaggcttggcgtggaagcaaacaacgtagtcacgtggcaaactgttcctgcagcttgcggagagtacatagctgacgacgttctaggagaccaatatagatcag

SEQ ID NO: 195362 - DNA, 258 bp, Glycine max
ggataccttaggaatccataagacacattaattcaccactatagttgttctgttagaagtgctacaaacaacaatggctgctaattaggaagatgtgaagcttttgggagctactgggagcccatttgtgtgcagggttcagattgccctcaagttgaagggagttcaatacaaatttttggaagaaaatttgaggaacaagagtgaactgcttctcaaatccaacccagttcacaagaaggttccagtgtttattca

SEQ ID NO: 195363 - DNA, 253 bp, Glycine max
gtttaaagtaagagagaagaaagaagcaaatggcaaactttccagttgttgacatggggaagcttaacaccgaagagagacctgcagccatggagattataaaagatgcctgtgagaactggggtttctttgagttggtgaaccatgggatatccattgagcttatggacacagtggagaagctcacaaaagagcattacaagaagactatggagcaaaggttcaaagaaatggtgaccagcaaaggtcttga

SEQ ID NO: 195364 - DNA, 250 bp, Glycine max
cttcctttcactctcaatccttttcgcctttgtctgcgaatggactcgttcgatcaggcacctcccggcgatgtcaaatccggtgacaaaatcttcaggaccaagtgtgctcagtgtcacaccgtcgaaaaaggtgccggtcacaagcaaggactcaatctgaatggtttgtttggaaggcaatcaggcactactcccggttattcttactcttcagctaacaagaacatggctgttacttgggaagaaa

SEQ ID NO: 195365 - DNA, 255 bp, Glycine max
caactactcattctccatacctcaacgaagacgttaaagagacggcaacactttgctgtccgccttgaccgagcagagcttcgtcttggccctcgattttgccctaaagtactctcagtcacaacagacaccgtcgtcgtcgtcgtcgtcatcaatggcaccgaagcagaccaaggctgagaagaagatcgcttacgatgcgaactgtgcgacctaatggaggagtacggccagatcctcgttgtgaactccgat

SEQ ID NO: 195366 - DNA, 259 bp, Glycine max
agaaagaaaggttagggtagatcacgcaggcttcagccatgagaactcacacaattatctctctcattcttctctccttatttctccgaacccaatccgaggttataacgttatcctctgatacgtttaatgataagatcaaggagaaagacactgcatggtttgtgaaattctgcgttccctggtgcaagcattgtaagaacctgggttctttgtgggatgatttggggaaggcaatggaaggagaagatgaaataga

SEQ ID NO: 195367 - DNA, 255 bp, Glycine max
aaacgtatgcttttggtcgtgaactaggagaatggggactcgagaactatttaagtgtgaagcaagtgaccaagtacatatctgatgaaccgtggggctggtatcagtcgccttcaaagctgtgatatgaattgctgttctaaaatctggcatgaataagttgtgggggacattaatttgtgatgatgatcttaattcgagaaaataatgtgcatatgtataacactgaaattgttccatggccttgttaatgac

SEQ ID NO: 195368 - DNA, 260 bp, Glycine max
tgaaacgtgactttgaggaaaatggctcggtggagagagtgacccttttccttaatctggcaaatggtcctacgattgagcgtatcatcactcctcgtattgctcttactactgctgaatatttggcatatgaatgtggcaagcatgttcttgtgatactaactgatatgagttcttatgctgatgctcttcgtgaggtaatgtacctaaaactattataataaggtggcaaaagaaaagaaaagagatgggaaatcttt

SEQ ID NO: 195369 - DNA, 258 bp, Glycine max
  unsure (1)..(258): unsure at all n locations
cnctgtctngcttcttcactttctctcgttncaatcganaccanaacaaaaacatgggcagaaaattcttcgtcggtggcaactggaaatgcantgggancactgaggaggtaaagaagattgttactactttnaatgaggctaaagtccctggagaagatgtcgtagaagttgttgtgagcccnccttttgtgttccttcctgttgnaaaaagtttgctgcgccctgatttccatgtttcggcacaaaantgttggg

SEQ ID NO: 195370 - DNA, 255 bp, Glycine max
tgttttattcattttccgatggcttctgcagatgttgagtaccgttgctttgtcggtgggctcgcttgggccactgacgaccatgccctcgagagagccttctctcagtacggcgaaatcgttgaaacgaaggtctgtttgttgcaggcatcacatctgatctcacacgattcggattcggaatactctcgatcccgttctgatctgtgatctctgatctgtttgcgttacttgatcttatgatacttgtgttac

SEQ ID NO: 195371 - DNA, 256 bp, Glycine max
tggcttctaatattcaaactctgcttgtgcttgttctggcaacattgggaacatttatgatcccttccaatgcacagcttactcctaatttctataagaaagtttgtccccaggcattgccaatcataaggtctgtcgttcaccgagcaattattcgtgaacgacgcattggagcctccttgctgcgtttgcatttccatgactgctttgttaatggttgtgatggatcagttctactggatgacacgcacaactt

SEQ ID NO: 195372 - DNA, 248 bp, Glycine max
ctgggccttctactggggcactagcgagtggtctgctcagcagatcaccgaggcctgggctgtggcacagagattggaccttgttggtcctattgttgaacagcctgagtataacctcttgtccaggcacaaggttgagtctgagtttcttgctctgtacaccaactatggcacaggcctcactacatggagtcgtcttgcctctggagtgctcactgggaaatataagaaaggagttataccaccgg

SEQ ID NO: 195373 - DNA, 245 bp, Glycine max
ctcgagccggttcctaccatagtgctaggaaagtgagtgagagacagagatcacatagcacaatagcttctactcaatatttcttgcaccaccatgctcttaccacccctgccagatccccatcacaacgcatcatggttagcaccaagcctaaccagcttatttgcaaggcacagaagcaagaggatattgatgtcagcccaatctctcgccggttagctctaaccgtgctcattggtgctact

SEQ ID NO: 195374 - DNA, 251 bp, Glycine max
gaccatcttccaccttaacccttctggccgttttgtcattggtggccctcatggtgatgctggtctcactggaagaaagatcatcattgatacctatggtggctggggtgctcatggtggaggtgccttttcagggaaggaccctaccaaggttgacagaagtggtgcctatattgtaaggcaggctgcaaagagtgtcgtggcaaatggccttgctagaaggtgcattgtgcaagtttcctatgccattg

SEQ ID NO: 195375 - DNA, 260 bp, Glycine max
gttcttttcctctttgctcttgtctcgttcacttcccatgcttctgtcaatgatttctgtgtagcagacctaaaaggtccagatagcccttcaggctatcagtgcaagccacctaacacagtcacagtggatgactttgtgttctctggctttgtagctggaaacaccacaaacactttcaatgctgcattaacctccgcatttgttactgattttccaggtgtgaatggtcttggtgtatctgtggcacggttagacat

SEQ ID NO: 195376 - DNA, 257 bp, Glycine max
ctcgagccgattcggctcgagctgtgggttggggttttggagtcgcgagcaccaatggcttccttgatggcaattgtagtactaggtgttgtcttggtgctctgtttttgctctgctctcttgaggtggaatgaagtaaggtacaggaagaaaggtttgcctcctggcacaatgggttggccactttttggggagacaactgagtttcttaagcagggtccaaacttcatgaaaacccagagagcaaggtatggcag

SEQ ID NO: 195377 - DNA, 255 bp, Glycine max
ctcgagccgcggtttagggtttcggtttttgacccaacctttgacgtatcgaaaccttaagcttcggatcaggtctgagcaatctggttggtagaacctttggtcttagagagtcaagtgttatgtctgaattagacgatcaaattcctactgccttcgatccttttgctgatgcaaatgctgatgactcgggtgctgggtcaaaggagtatgtgcatattcgcgtacagcagcgaaatggaaggaaaagcctga

SEQ ID NO: 195378 - DNA, 280 bp, Glycine max
  unsure (1)..(280): unsure at all n locations
gtacgtgagctcggaggtcggcgcgnatctaaaacgatcagagaagggcgcaggtgcttctgtaatgcttgcagaattggcattggaggctggtttgcctgagggtgtcttaaatatagttcatggaacccatgatattgtggatgctatttgtgatgatgacgacatcaaaggcatatccgttgttggttcaaatgttgccggaatgcacatatattcaagagcagcaggtaaaggggaacgcgttcagtctaacatgggagccaaaaatcatgcgatt

SEQ ID NO: 195379 - DNA, 254 bp, Glycine max
gaaattttaaaaatgactgggataaacttaagaattcaattattgaaattgaataagtaaacaatttaattggattggtcgaatggtatcaaaaaaatggagtactaactcccatttcttatttattattgaattaaccgatcaacttgctttgttatcgaacatttctttttgatttcaaaaattttccggaaaaaatttgaatctatttttatatgcgaatcaatcctactacttctggtcccgaggtttct

SEQ ID NO: 195380 - DNA, 249 bp, Glycine max
gcattcctcctccttcgcctcctcctgctgctccacctcgccatcgccgctcacggcatcggcatcaactacggcacgctcggcgacaaccttccaccgcccgcggcgtcgcgaacttcctgaagacgaagacgaccatcgaccgcgtgaagatctacgacgtgaacccggacatcctgcgggccttcgccggcagcggcatctccgtgacggtgaccgcccccaacggcgacatcgccgccttaacca

SEQ ID NO: 195381 - DNA, 248 bp, Glycine max
aacacctcgtccctcacaatgcagctagcaatggcggccaacgctgtcgtttcaccgtcgccgttccgacctcagccctttctccggtcatccttctccggcgtctccgtcaagctcactccccaatccataacgctttcacgctccaagcccctcaccgtcttcgccgccaccaagaaggccgtcgccgtcctcaaggggacctccgccgtcgaaggcgtcgccactctcatccaagaagacgatgg

SEQ ID NO: 195382 - DNA, 245 bp, Glycine max
gaaagaagctgcatccaaggaacttttgactgtgagtcatcatcatgatgatcatgtgtacagaaaccttctgaaagatctcattgttcagtgtttgctaagactgaaagaaccttctgtcttattgagatgtcggaaagatgacctgcacttggtagagaacgtgctggattcagctgctcaggagtatgctgagaaagcaaatgtcgatcccccagagatcattgttgacaaccaagtctatc

SEQ ID NO: 195383 - DNA, 247 bp, Glycine max
cgttcttttcctctttgctcttgtctcgttcacttcccatgcttctgtcaatgatttctgtgtagcagacctaaaaggtccagatagcccttcaggctatcagtgcaagccacctaacacagtcacagtggatgactttgtgttctctggctttgtagctggaaacaccacaaacactttcaatgctgcattaacctccgcatttgttactgattttccaggtgtgaatggtcttggtgtatctgtg

SEQ ID NO: 195384 - DNA, 249 bp, Glycine max
tgaagttttgttattgtgtgcaatggcagccaagagcaaaatcctagtccttggaggaacaggatacattggaaaattcatagttaaggcaagcgcagaagcaggacaccccacttttgccttagttagagagagcaccctttctcatcctgaaaaatctaaacttattgagagcttcaagacctccggagttactcttctttatggtgatctaactgatcatgaaagccttgttaaggctatcaagca

SEQ ID NO: 195385 - DNA, 253 bp, Glycine max
agcgatcatagtttcacttcggccttatccagtttagggtttcggttctctaccctatctttcacgtatcgaaaccttaaatttacgatcaggtctgagcaatctggttggtagaacctttggtcttagtgagtcaagttttatgtctgaattagacgatcaaattcctactgccttcgatccttttgctgatgcaaatgctgatgactcgggtgctgggtcaaaggagtatgtgcatattcgtgtacagcag

SEQ ID NO: 195386 - DNA, 267 bp, Glycine max
ggtgtcttctgatggcactgtcaagtttgaggagaaggatggcattgactacgccgccgtgccagttcagctaccgggaggcgaacgtgtgccctttctcttcaccctcaagcagttggtggcatcagggaagccagatagctttagtggggagtttctagtcccatcctaccgtggaagctctttcttggaccccaagggaagaggtgcttccacaggttatgacaatgcagttgctttgcctgctggtggaagaggagatgagga

SEQ ID NO: 195387 - DNA, 264 bp, Glycine max
ctcgagccgttgcggctgaggattccgaacgagtgaccttcttcgtacctcgcaaagtttacgtaatcatgggtaaggaaaaggttcacatcaacattgtcgtcattggacatgtcgactctgggaagtcaactaccactggtcacttgatctacaagcttggaggtattgacaagcgtgtgattgagaggttcgagaaggaggctgccgagatgaacaagaggtcattcaagtatgcctgggtgctcgacaagctcaaagctg

SEQ ID NO: 195388 - DNA, 260 bp, Glycine max
ctcgagccggttcgagcacccaaggcacggttcactgggatttcttcccaggaagcgtgcacctcgtcacaggggcaaagtgaaggcattccccaaggatgacccatccaaggcacccaagctcactgcattcttgggttacaaggccggtatgactcacattgttagagaggtcgagaagccaggatcaaagcttcacaagaaggaaacttgtgagcctgttacaattattgagacccctccaatggttattgttggtg

SEQ ID NO: 195389 - DNA, 255 bp, Glycine max
ggtgtggctgtcatacaggttggtgcacaaactgagactgagctcaaggaaaagaaattgagagttgaagatgttcttaatgctacaaaggcagctgtagaggagggtattgtagttggtggtggttgcactcttctgagacttgcatcaaaggtggacacaatcaaggatagccttgataatgatgaagaaaaagttggagctgatattgtgaaaagagctcttagttaccctttgaaattaattgccaaaaac

SEQ ID NO: 195390 - DNA, 260 bp, Glycine max
cctcgagccgaatcggctcgagcggctcgagttgcggctagggttctagcgagttcttctagatttaaggaagatgggtacaggaaaaggctcacatcagtattgtggttatcggccatgttgactctgggaagtccactaccactggccacctgatctacaagcttggaggcattgacaagcgtgttattgagagatttgagaacgaagctgctgagatgaccaagaggtctttcaagtatgcctgggtgcttgataag

SEQ ID NO: 195391 - DNA, 260 bp, Glycine max
actccttcagaatccccctttcccagttcccaacttcatttcaaatcaatatgaagaaaattgtgctaaagttggaaatccatgacgacaaaaccaagacaaatgccatgagggcagtatctggtattttatgtgtggagatagtctcatttgacatgaatgatctgaaaatgactataatttgtaatgttgatgctgtaatagtagttggcaagcttagaaaatgttgtgatcatgctgatatactatcagttggacca

SEQ ID NO: 195392 - DNA, 259 bp, Glycine max
accgtcgattaccctagtttcaaactcgtcatcgtcggtgacggtggtacaggaaagacaacgttcgtgaaaaggcatcttaccggtgaatttgagaagaaatacgaaccgaccattggagtggaggttcacccattggatttcttcacaaactgtggaaagattcgcttctactgttgggatactgccggacaagagaagtttggtggcctcagggatggatattatatccatgggcaatgcgccattatcatgtttg

SEQ ID NO: 195393 - DNA, 260 bp, Glycine max
cccttgttatctctctttcattctcacttgtactcatctctttttcacaactttttttgtaccttctgatctaatggcagttccagtgattgatttttcaaagctgaatggtgaagaaagaaccaaaactatggcacagcttgctaatgggtgtgaagagtggggattttttcagttgatcaaccatggtattccagaggaactccttgagagggtgaagaaggttgcctctgcagttctataagctggaaagagaggag

SEQ ID NO: 195394 - DNA, 262 bp, Glycine max
cgggagatgttgcacgtgcaacgtgggcaatgcgggatccacatcggttccaagttctgggaagtgatatgcgacgaacacggcatcgaccccaccggaaagtacaccggcgacgaggcctccgatctccaactggagaggatcaacgtctactacaatgacgcctccggcggaaggtacgttccccgggccgtcctcacggatctggagcccggcaccatggacagcatcagatccggcccatacggcaagatcttcaggc

SEQ ID NO: 195395 - DNA, 280 bp, Glycine max
ttcggctcgaggcttaagaacacaaacaggagcactgttgatgttattgcatcccgactgtatttttactattcgtatagctatgagcttacaggagatcttgctgaaattcggggcaacctccttgcattccaccgatttgcgactctccgtcatgatgagctgggacaggaaacacttcttaatttgttacttcgaaactaccttcactacaacctatatgatcaggctgagaagttgaggtccaaggctcctcgatttgaagcacattcaaaccagc

SEQ ID NO: 195396 - DNA, 265 bp, Glycine max
atagctagttgtttaaagtaagagagaagaaagaagcaaatggcaaactttccagttgttgacatgggcaagcttaacaccgaagagagacctgcagccatggagattataaaagatgcctgtgagaactggggtttctttgagttggtgaaccatgggatatccattgagcttatggacacagtggagaagctcacaaaagagcattacaagaagactatggagcaaaggttcaaagaaatggtgaccagcaaaggtcttgagt

SEQ ID NO: 195397 - DNA, 262 bp, Glycine max
gggagccatgtacgacccttctttgaaaaaatggcatcatccaactatatcaacaccgcccacaaaattgattgtcttacctgtggcttcttctggcggcttagtttgctttcttgacattggtcatcgaaacttctttgtttgtaacccactgactcaatccttcaaggagttgccagctcgatcagtcaaggtctggtctcgtgttgctgtagggatgatggcaaatggaaactttgctggttcaggctacaagatcgta

SEQ ID NO: 195398 - DNA, 251 bp, Glycine max
gccgattgggctcgagcctgaggtggccaactaatggaaaactgtcatcaaggtgaatgactactaataaatgcggtactgtgaaccgcgtggtgtcgtcaatgttcaacacagtctcagggaagaagattgctattttgggatttgctttcaagaaggacactggtgacactagggagatcccagccattgatgtgtgcaagggctgtcaaggagacaaggccaagttgagcatatatgatcctcaggtc

SEQ ID NO: 195399 - DNA, 254 bp, Glycine max
ctgaatcttccatctccatttttcacctgatttctttgacacggttccagagatgtttaatttcaaacaaagatgagcagaactgaattatctaatatgaagcaacctcctgttcccctggcaaccctgattggccaggagttacggaatggaaaaatcgaaaagccttttgtgaagtatgggcaggctggcctggcaaagaaaggagaagattactttttaatcaaagcagattgccagagagttccagggga

SEQ ID NO: 195400 - DNA, 181 bp, Glycine max
gtttatcgtgaggagaatatgaagttgtatgtcttctttgtctctgcagtagttttggtagcatggccatgccatggcgcaggctaccaaaggttccctctccgaatgaaaactggctatggtgagcgttcttcggaggtaaaatgcgcaagtcttaggcttgctgtggaagcacacaaca

SEQ ID NO: 195401 - DNA, 261 bp, Glycine max
  unsure (1)..(261): unsure at all n locations
ataccctttctccttctaacgagtgaggataaatggcgcgtaagaagatcagagagtatgactcaaagaggttgttgaaggagcactttaagagactctctggcaaggagttgccgatcaagtctgcacaaattaccgctcgtaatgatttnactgagctacaagagtaggaaccctggctttcatcttctaaattggttgttaaacctgacatgttatttggaaagcgtggcaaaagtggtttggttgccttgaatttgg

SEQ ID NO: 195402 - DNA, 261 bp, Glycine max
ctccagacatagtaaggaatatcagactgagccctctttcttgattctatgggtggtggtgcatggccgttcttagttggtggagcgatttgtttggttaattccgttaacgaacgagacttcagcctgctaaatagctatgtggaggtaaccctccacggccagcttcttagagggactatggccgcttaggccacggaagtttgaggcaataacaggtctgtgatgcccttagatgttctgggccgcacgcgcgctaca

SEQ ID NO: 195403 - DNA, 259 bp, Glycine max
cgttccacgctcaactcccataagttgatgaagcatctgatgattcatcaacttatgggagttgatcctggaactaatcctgtttgccatttccttaccagcaaggccattttatgggtacccaatttatctaccgacactgcctatcagaccaacattgttgcttaattagtccatgcatcttgagcaccatgagaatgagattgtgtataacatacattatcatgtgctgtgtgtcatgcaagtactaccttctcta

SEQ ID NO: 195404 - DNA, 255 bp, Glycine max
  unsure (1)..(255): unsure at all n locations
gttgctctcctcagaattggtaccagaggaagtccactagctctggctcaggcatatgagaccagagacaagctcatggcatcacatgcagagctagcagaagaaggggcnattcagattgtaataatanaaacaactggtgacaaaatactatcacagccacttgcagacattggtgggaagggcctattcacaaaaganatagatgaggcactcataaacggtgacattgacatcgctgtccactcaatgaaa

SEQ ID NO: 195405 - DNA, 264 bp, Glycine max
actctcgagcaagtttttacctggggcatgtttgatatccaatgatggcacaaagaagatgtgtggttgtgctcatagggcatggtacactagggggtgtcctagcaaatatggttgggctgctctaataggccttgctctctacatcatattcttctcacctggcatgggaactgttccatgggttgtgaactcagagatctatcccttgaggtacagaggggtttgtggaggaatagcatccacaactgtttggatttccaa

SEQ ID NO: 195406 - DNA, 255 bp, Glycine max
tttcgaaccccatttctggtttctcttccccttttgttattcatcttcaacctcaccccttcgcacgcactctatggagcatcctcacccgtgcttcaactcactccctctaacttcaactacaaggttctgaactccactggcgttctccttgttgaattctttgctccatggtgtggacactgttaggttctgatctctatattgtagatggcagctactgttttgaagggtgttgttactgttgcagcaatt

SEQ ID NO: 195407 - DNA, 256 bp, Glycine max
gtggagtgctccttacatcgataaccccagttacaagggcatatggaagcctcgcgagattccaaaccctgaatactttgaactcgcaaaacctgattttgagcctattgctgctattggcattgagatttggacaatgcaggatggcatcctatttgacaatgttctgatagctaacgatgataaagttgcagaatcctatcgggagactacatggaagcccaagtttaccgttgagaaagacaaactgaaggct

SEQ ID NO: 195408 - DNA, 256 bp, Glycine max
  unsure (1)..(256): unsure at all n locations
caagagtcccagcaaacaccaaagtgagagagaaaatgatgaagccatcgatgctcagatctcttcactctgccgccacccgcggcccctcncacctctcccgccgtggctacgcctccgagccggtgccggagcgcaaggtggccgttctaggtgccgccggcgcgatcgggcaacccctctcccttctcatgaagctcaaccccctcgttttcagcctctccctctaccatatcgccggaactcccggtgtcgc

SEQ ID NO: 195409 - DNA, 256 bp, Glycine max
ggaagccctcagaacacttttgtaccagggctgattgatcttgccatcgcgaggaacactttgattggtggagatgacttcaagagtggtcagaccaaaatgaaatctgtgttggttgatttccttgtgggggctggcatcaagccaacatctatagtcagttacaaccatctgggaaacaatgatcgtatgaatctttcggctccacaaactttccgttccaaggaaatctccaagagcaacgttgttgatgata

SEQ ID NO: 195410 - DNA, 257 bp, Glycine max
gtaccttctcccacgcagttacatcactgggtaccaagctacaaaggatgatcttactgtttatgcagctttgccaactgctccatcagatgaatatggaaatgtttccaggtggtacaagcacattgatgctttgttcagaatctctggtgttactggcgagggatctggtgttattgttgagggatctctagttgcagagcctgttgcaactccccctgctgcagacacaaaggctgctgttgctgaggatgacg

SEQ ID NO: 195411 - DNA, 261 bp, Glycine max
ctcgagccgctcgagccgttttccttggaccattctctatcaattctgggatccgtctcctaatgatagtaccgtatggtgtccaacttgagaaaggaccagctgatcgacggactgctgatttcttgtggatgatgatatttggtgcctttgcactattggttttgtctgctatccccatattttggtccccatttttggcagtaccacttgtttttatgctcctttatgtttggagtagagaatttccaaatgcccaaa

SEQ ID NO: 195412 - DNA, 256 bp, Glycine max
  unsure (1)..(256): unsure at all n locations
cctcgagccgattcggctcgagcctgagtaggccaattactggaaaacggtcatcaaggtgaacgactatcanaaaatgcggactgtgaaccgcgtggtgtcgtcaatgttcaacacagtctcatggaagaagattgctattttgggatttgctttcaagaaggacactggtgacactagggagaccccagccattgatgtgtgcaagggcctcttgggagacaaggccaagttgagcatatatgatcctcaggtc

SEQ ID NO: 195413 - DNA, 251 bp, Glycine max
gcttctccagcctagtttgttctcagatcttcttcttccatggaccataacacacaagtggagaagataggcgagggaacatacggcgtcgtttacaaggctcgcgaccgcgccaccaatgagacaatcgctctgaagaagattcgcctcgagcaggaggacgaaggcgttcccagcaccgccattcgcgcgatttctcttctcaaagagatgcagcataggaacattgttaggttgcaggatgtagtgca

SEQ ID NO: 195414 - DNA, 253 bp, Glycine max
caaacacaaaccgaaaaggcgaaaggggttttccgagtgagatctagggtttccatcgattcggagagaggatattgatcgaacgacctcagcgagcaaggacaggaggtggagtactagatcatggattcggtgccttcgaattcgcatggaaacctcgatgagcagatttctcagctcatgcagtgcaaacccttgtccgagcaagaggtaagggtcttgtgtgataaggcaaaagagattttgatggaag

SEQ ID NO: 195415 - DNA, 256 bp, Glycine max
ttccctacctctcccttcaagatgcagtacctcgtcaagaccctcaccggcaagaccatcacccttgaggtggaaagctctgacaccatcgacaacgtcaaggccaagatccaggacaaggaaggaatccccccggaccagcaacgtctcattttcgccggaaagcaacttgaggacggcctcacccttgctgactacaacattcagaaggagagtactcttcacctcgtcctccgtctccgtggtggcatgcaga

SEQ ID NO: 195416 - DNA, 260 bp, Glycine max
ctccgttgaaccagttcatatctcccagattgccaaagagctcaaccttagtcccaatcactatgacctttacggtaaatacaaggctaaggttttgttgtcggttcttgatgagcttcaaggatcagaagatgggtattatgttgtcgtcggaggcattactccgacgcctctcggggaaggcaaatctactactacagtgcggatttgtcaagctttaggtgcttttcttgataaaaaggtagttacctgccttcgtc

SEQ ID NO: 195417 - DNA, 254 bp, Glycine max
ctgcacgctctgcttccagcgagtgttctttcttcgtttcaacaccttaatttgcacacgctgcttcttacacttgagaaatggcacaagaaacctttctattcacatctgaatctgtaaacgagggtcaccccgacaagctgtgcgaccagatctctgatgcagtgctctatgcgtgccttgaacaggaccctgacagcaaggttgcctgtgagacatgcaccaagaccaacatggtcatggtctttggagag

SEQ ID NO: 195418 - DNA, 252 bp, Glycine max
ggaggttggtttatgtagttgtgtggttcaatctgtatgtggcatgcacattcattcaagtttcaggtctggacgcctctaacttcagcaagtgttggttcccagcaatttacaactttggtgactcaaattcagacacaggagctgtttttgcagcattcacaggggtgaagcctcccaatggcataagcttctttggaagcctctcaggaagggcctctgatggtcgtctcatcatagattttatgactg

SEQ ID NO: 195419 - DNA, 247 bp, Glycine max
cgaaggtggtatggcgaaggacgttgaggttgctgcgcgtggctccttctctgggaaggactaccaggaccctccaccagcaccactcattgatgctgaggagctcacaaagtggtccttttacagggctctcattgctgaattcattgccactttgctactcctctacattactgtgctcacagtcatagggtacaagcaccagactgacctcaaggaaaatggtgaactctgtcgtggggttggc

SEQ ID NO: 195420 - DNA, 252 bp, Glycine max
ttggactgcctggaaacggaggcactgaagaagtgctcatcaggaagaggggtttctctgagactgaaactggtcatgaagatgagtctgccaccaccgtggatttgatgcttaatctttcttctaaggaggccgcaaccactgctgctgctgctgcagatccaactgataagcacaagactttgcctaaggagaagacccttctgccagcagatcctgctaagcctccagccaagacgcaggtggtgggtt

SEQ ID NO: 195421 - DNA, 251 bp, Glycine max
  unsure (1)..(251): unsure at all n locations
agggcatactgacaaggatggatggtaccctcctggccatggtgatgtcttcccatcattattgaacagtggcaaacttgatgcactattgtcacagggtaaagagtatgtgtttgttgccaattcggntaacttgggagctatagttgacttgaaaatcttgaatcatttgatccagaacaagaatgaatactgtatggaggtgactcccaaaacattggctgatgtaaagggtggcactttgatttctt

SEQ ID NO: 195422 - DNA, 261 bp, Glycine max
tggagaatatgaagttgtttgttttctttgttgctgcagtagacttggtagcatggccatgccatggcgcaggctaccaaaggttccctctccgaatgaaaactggctatggtgagcgttcttcggaggtaaaatgcgcaagtcttaggcttgctgtggaagcacacaacatccgagcctttacaaccattcctgaagagtgcgttgaaccaacaaaggactacattaatggcgaacatttagatcagactctaaaacagt

SEQ ID NO: 195423 - DNA, 289 bp, Glycine max
cggctcgagccagaatccatttcatgctttcctcctatgctccagttatctctgctgagaaaccctaccatgaacagctttcagtggctgaaattaccaacagtgctttcgagccatcgtccatgatggccaagtgtgaccctcgccacggaaagtacatggcatgttgcctgatgtaccgtggtgacgttgtgcccaaagatgtgaatgctgctgttgccaccatcaagaccaagaggacaattcagtttgtggattggtgccctactggtttcaagtgtcgtcttaa

SEQ ID NO: 195424 - DNA, 288 bp, Glycine max
gcactctatgacatttgcttcaggaccttaaaactcaccactcctagttttggtgatctgaaccacctgatttctgcgacaatgagtggagtgacatgttgcttgaggttccccggacaactgaactccgacctgaggaagctagcagtgaacctgatcccattcccacgtctccacttcttcatggtggggtttgcacctctcacctcacgcgggtctcagcagtacgtgtccctcactgtccccgaactcacccagcaaatgtgggacgccaagaacatgatgtgt

SEQ ID NO: 195425 - DNA, 288 bp, Glycine max
gttcagctgtatttctatatatattaatttatcaaaatgcaggaagtcagacggaaagaagaagctgctgcacgagctggaattgttcttgaggagaagaattggccgccatttttcccaattatccatcatgatatcgctaatgaaattccaattcatcttcaaagattgcagtatgttgcatttacttcattgttaggatttgcattgtgcatcacatggaatattgtagctggtcacttcagcttggattaagggagaaggagtgaaaatatggtttcttgctat

SEQ ID NO: 195426 - DNA, 290 bp, Glycine max
cggctcgagaatcgttcctatcatcacttctcaaatctcgaaccctctcgttcgtgccgatcactaggtcacacttcatcaatggcgggtagaggcaaaaccctaggatccagcgccgctaagaaggccacctcaaggagcagcaaagccggcctccaattccccgtcggtcgtatcgccaggttcctcaaggccggaaagtacgccgagcgcgtcggcgccggagcccccgtctacctcgccgccgttctcgaatatctcgctgctgaggttttggaattggctggaaa

SEQ ID NO: 195427 - DNA, 286 bp, Glycine max
cgagtttcacagcagcaatggtgtacgtcaaggctcagaaatcaaaagcctacttcaagagatatcaagtcaagttcaagagaagaagagagggaaaaaccgattaccgtgccaggattcggttgattaatcaggacaagaacaaatataacactccgaaataccgatttgttgttcgctttagcaacaaggacattgttgcacaaataatatctgctagcattgctggcgatattgttcttgctgcagcatatgcacatgagctgccacaatatggtcttgaagt

SEQ ID NO: 195428 - DNA, 284 bp, Glycine max
cttgaataggtgtacagtgctaaagggttaagtttgaaacctagcctgctagttgcatcatcaggtccaatccataagcttctgggaatcaaacgatgatgatgtttgaagatatgggtttttgtggggatttcgatatgttttctgctccccttggagaaggggacattaccacccggcaaactgagccagaggtgatagttgaggatgattatagtgatgaagaaattgatgtagacgagctcgagaggaggatgtggagggacaaaatgcgtctgaagcga

SEQ ID NO: 195429 - DNA, 290 bp, Glycine max
ctcgagccggcatatggtcctgttagtgaagtctacgtgccttcgagtgaaggagttgacgcttacatttggttactggcaaaggcttacgttgttgtgaatgatgcttgctaccatcaaatcattagccattggctaaacactcatgcggttgtggagccattcgtcatagcgacaaacaggcatctgagcgtggttcaccctatttacaaacttctgtttcctcactatcgtgacatcatgaacattaattcacttgcccgcaaatccttggtcaatgccgacggtat

SEQ ID NO: 195430 - DNA, 291 bp, Glycine max
gccatatctttacttcccaaaacttgctctaccctgagtttccttcgttcttttgcaagaaacaaggatatatcaaaagtaggacgcagaggtatccattgcatgcagaaactatgtgcagaaaaaatatctcctgattcactagagaaggcccaaaatcgtgtgatagatgctgcactcacacttgttcgagaaaatacaaggcttaagaaagaactcgtgcatagtttgggaggtgctgtggcaacttcaactcttcttggagttcctttgggtcataattcatcgttt

SEQ ID NO: 195431 - DNA, 243 bp, Glycine max
cgacgtcgtcgctctcactccggctccgtttccggctcctcctctcgcccctcttccccctccgactcccgctcctcctctcgctcgcgctccgtttctcgttcccgctctccctcgcgctccagatcctcctctccctcctcctcgtctccctcccgaagttctcgcagccgcagccctcccccacagcgccgccgaagtcctgctgatgcagctaggcgacgtcggtctcctcctcacaac

SEQ ID NO: 195432 - DNA, 288 bp, Glycine max
  unsure (1)..(288): unsure at all n locations
cgcggcncttctggcggcaggaagtgaacagccccttcgagtattgcgacattgtgaccaccacgactcacaaacacctgcggggcccacgtgcggggatgatcttttaccggaagggccccaagccgccgaagaaggggcagccggagaacgcggtttatgatttcgaggacaagattaacttcgcggtgttcccttcgctgcagggtgggccccacaaccaccagatcggtgctctcgccgtggcgctgaagcaggccgcgtcgcccgggtttaaggcctacgcga

SEQ ID NO: 195433 - DNA, 206 bp, Glycine max
  unsure (1)..(206): unsure at all n locations
ncggagggattcgctcgccatcatggggaagaagaagaagagagtttcctcgaaggtgtggtgttattactgcgatcgcgaattcgacgacgagaagatcttggtgcagcatcagaaagccaagcactttaagtgccatgtctgccacaagaagctctctatcgctggcggcatggccatccacgtcctccaggtccacaaggaat

SEQ ID NO: 195434 - DNA, 289 bp, Glycine max
  unsure (1)..(289): unsure at all n locations
ctcaagtcaagcattatcaagaacgatgattttgaatcgagaccaagtgttaccaagcatgatgattttgaactcaagtcaagcgttaccaagaacaatgattttgaaccgagaccaagtgttacaaagtatgataactttgaacccagaccaagtgttaccanatatgatgattttgaactcaggtcaagcgttaccgagaatgatgattttgaaccgagaccaaatattagtaagtatgatgactttgaactcaggtcaagcgttaccgagaatgatgattttgaat

SEQ ID NO: 195435 - DNA, 286 bp, Glycine max
ggaccctgaggaggcaaccaccattaacgagctgaagaagcctgttgtggagaaagaagctccagggcatgccatatgagggcatgcacgtacggcctcggaggggaaccagaaaattatgttaacaaaataatctggaaccctaatgtatcagtgtcatcatcagtgtgtagtttaagctagctttgctatggttacgttcttagagacgagagtcttgatgaacagtaccattctgatgtattgctttccttgaaagttaatgcatgcttcttatcttctgtct

SEQ ID NO: 195436 - DNA, 282 bp, Glycine max
gaaatattttggaatatcagcttagaagtgcttgtgtctttggtgctgaataaatcattagttcacatccaaatctggatgaaaactttaagatcttgtgggctaatcatggggatgatataagtattcaatactcaggaactcctgctcttaaaggagactttgtcagattcgggcaccgcacaattcaagggatactacaagatggtgtcaatgctcttctacgatattatttcaataattttgttgatggaacgaagcaggatgcaattgatctcttgc

SEQ ID NO: 195437 - DNA, 285 bp, Glycine max
aggcaaactacttcttctcatacatggcatctcaaggtttgtgttcttcgataaaaaatattcatcttttggtatctgaagggaagcgtgtggcagtcaagtattactcagatgactttgcaacaaacaatgcaaagttagcttttgagaagtttgtatttactaagactgttaagacaaatgctcgtacggaagctgaggtaacactacttgagaacaatatcattatttacaaatttgtacaagacctgcatttctttgtcactggtggtgaagatgaaaatg

SEQ ID NO: 195438 - DNA, 285 bp, Glycine max
  unsure (1)..(285): unsure at all n locations
cagcactgccattcttcaatcacactaatggctttcancttctcagatcttcacaccgaagacggtacataatccctcgatcaattcctttctgggaaaacctatatctctggggatcaattgacaaaggatgatatcaaagtgtatgcagctgttgtggaaaagccaggagactcttttcctaatgctgtcaagtggtacgatgccgtctcttctctacttgctccaagcttccctgggcacgctcaaggggtaagattcagtggcgctgctgctccagctgaa

SEQ ID NO: 195439 - DNA, 278 bp, Glycine max
ggtattcttagcttagcagcgagcttatccagtcgacggatgggaagtgttccattggcctccgctgctgctcttgccagaaggctagaagggaaggtggcactgataactggtggagcaagtggtataggtgagtgcacagcaagacttttctccaagcatggagccaaagtggtgattgctgatatccaagacgagttaggccactcaatttgcaaagacttggattcatcttcagctacttacattcattgtgatgtcacaaaagaagaaaacat

SEQ ID NO: 195440 - DNA, 282 bp, Glycine max
actcgagccgattcggctcgagatcgaatctcagaaaaatgagagacgtcatcagcattcacataggtcaggccgggatccacgtcggaaactcctgctgggaactctactgcctcgaacatggcatccagcccgacggcatgatgccttctgactccaccttcggtgtagcccacgacgccttcaacaccttcttcagcgaaacccgatctggcaagcacgtcccccgtgctgtcttcgtcgacctcgaacccaccgtcatcgacgaggtccgctgcggca

SEQ ID NO: 195441 - DNA, 282 bp, Glycine max
gtaagcttcagagtgatgctctaagagaagctatctcaggaatcatggctgattccaaggaaaagaacaggaaatttgtggagaccattgaactccaaattgggttgaaaaattatgatccccagaaggacaagcgtttcagtggctctgttaagttgcctcatattcctcgccccaagatgaagatttgtatgcttggagatgcccagcacgttgaggaggctgagaagataggattggactacatggatgttgaggccttgaagaagcttaacaaaaaca

SEQ ID NO: 195442 - DNA, 298 bp, Glycine max
  unsure (1)..(298): unsure at all n locations
ggaattcgggtcgangtaaggttgagctatagcctaaaaggagagacaataaatagtttctactttctagtcatagatagatggctggcccaattatgagacctcagattgtgctatttggctcctccataattcaaatgagcttcgacaatggtggttggggtgctattctagctaacttgtacgctaggaaggcggacatcatcttaagaggatactctggttggaattcaaggcgggctttggaggttttggatgaaattttccccaaggatgcttatgtgcaaccatcattggt

SEQ ID NO: 195443 - DNA, 281 bp, Glycine max
  unsure (1)..(281): unsure at all n locations
ctcacagtgactggtctgtgctttggggtggttgtggttggagttgttccattctccttagatgcacaactagatccctcgttttacagagacacgtgtcccaaggttcactccattgttcgcgaagtggtgaggaacgtttccaagaaagatccccgcatgcttgccagtctcattagacttcactttcatgactgttttgttcaaggatgtgacgcatcagttttgttgaacaacactgccaccatagagagtgagcaacatctcctgccanacaacaa

SEQ ID NO: 195444 - DNA, 277 bp, Glycine max
caccactgaattgggaagtgagatcaggtattgcacttggagctgcccgtggcattgagtacctacattcacgagggcctaatgtttctcatggaaatatcaagtcatcaaacatcctcttaaccatatcatatgatgccagagtgtctgactttggccttgcacaccttgttagcccctcctctacccctaaccgtgtggccggctaccgtgcaccggaggtgactgatcctcgcaaggtgtctcagaaggtagatgtgtacagttttggtgtgtt

SEQ ID NO: 195445 - DNA, 277 bp, Glycine max
ggacttataccatagatggtaaggttacaacatgtctggagagtattgaatcctttgatgaacagagcaaaacaatcacctacaagctcttcagtggtgacattggtcataattataagaactttaagttcatctttcaagccattgatgataatgatcatggcggtactattatcaaatggaccgttgaatacgagaggtttcgtgaggaggttgatcctccatatggccacattgaatacctgcacaaatgcactaaagatattgatggtcatct

SEQ ID NO: 195446 - DNA, 278 bp, Glycine max
gttcattttttagcaagagctgccttcatcaagtgggaatgtggatgcatgaatgccattgtgcgtcatcatctacttcatttgattgtttagggttaaacaatggttgggatctcccaagtagtttatgtccctgttgtgagcctagctctccggtatcagagcagttgcattgttggagagactactataagtggagatgcatcccgctagactcgcctgttgctttgcttcttcaatggccacttacaatatatcttgctgctcgacttgttgga

SEQ ID NO: 195447 - DNA, 277 bp, Glycine max
gcgaatctgagacatggcggattcttctcgggaggagaacgtttacatggcgaaattggcggacaggccgagcgttacgaggagatggttgagttcatggagaaggttgcaaagactgtggaggttgaggagttgacggtggaggagaggaatctcctctctgtggcttacaagaacgtgattggtgcgaggaggcttcgtggaggatcatatcctccattgagcagaaggaggagagcaggggcaatgaggaccacgtggccattataaaggagta

SEQ ID NO: 195448 - DNA, 280 bp, Glycine max
gcaggatggctagaagattggtggtattggtactgtgccagtgggacgtgtagagaccggggttgtgaagcctggtatggtggtgcactgtggtcccactgggctgacaactgaggttaagtctgttgagtcgcaccatgacgctctcacagaggctcttccaggtgacaatgttggctttaatgtgaagaatgttgcagtcaaggatctcaagcgtggttttgttgcatccaactccaaggacgaccctgcctaagaagctgccaacttcacatcccaa

SEQ ID NO: 195449 - DNA, 277 bp, Glycine max
agtgcttctctcctctgtctttttctctctcttgctatccttttggctagtcgcactgctgcaagtgcaactccaagaagcgcagtgccaagccaccatgtttcaacattcaacagaagctgcttaccttccacttttctctttggatttggttcttctgcttaccaggcagaaggagcagcaagtgtagatgggagaggaccaagcatatgggacacctacactagacagcatactgaaaagatttgggatcatagcacgctcgacatgggagctg

SEQ ID NO: 195450 - DNA, 276 bp, Glycine max
cgagcagtgtgatgaaaatgaaggtccttgttttcttcgttgctacaattttggtagcatggcaatgccatgcgtacgatatgttccctctccgaatgaacactggctatggtgcccgtactccggaggtgaaatgcgcaagatggaggcttgctgacgaagcacacaacatctttggctttgagcccattcctgaagagtgcgttgaagcaacaaaggaatacatccatggcgaacaatatagatcagactccaaaacagttaaccaacaagctt

SEQ ID NO: 195451 - DNA, 276 bp, Glycine max
gttcttcttcttttgttgttctgtgtttgtgtttgtcttttctctcacctgaaaatgtcttgctgcggtggtaactgtggttgcggaagctcctgcaagtgcggcaacggctgcggaggctgcaagatgtacccagacttgagctacactgagtcaaccaccaccgagaccttggtcatgggagtggcacctgttaaggctcaatttgagggtgctgaaatgggtgtgcccgctgagaacgatggctgcaaatgtggaccaaactgctcctgcaac

SEQ ID NO: 195452 - DNA, 279 bp, Glycine max
ggcattcgtggagcactactacagcaccttcgacaccaacaggaacggcttagcgaatctctaccaggagggttccatgctcactttcgaagggcagaagatccaaggcgcttccaacatcgttgccaagctcacctccctcccttttcagcagtgccaccactcaatctccaccgtcgactgccagccctccggcgtcaacgccggcatgctcgtcttcgtcagcggaaaccttcagctcgccggcgaacagcacactctcaagttcagccagatgtt

SEQ ID NO: 195453 - DNA, 188 bp, Glycine max
cctgggtgcttgataagcttaaggctgagcgtgaaagaggaatcacaattgatattgccttgtggaagtttgaaaccaccaagtactattgcacagtcattgatgcctctggacacagggatttcatcaagaacatgatcactgggacatcccaagctgactgtgctgttcttatcattgattccact

SEQ ID NO: 195454 - DNA, 281 bp, Glycine max
ctttcctctcagaaccctcgatcactcccacgcgctcctatatcctctccttcaccgtcgctctctccaacgatcacaacaacatcgtcatcccatggcaaacgccgcatctggtatggcagtccatgatgactgcaagttaaggtttttggagctgaagacaaagaggacacaccgtttcatagtttttaagattgaggagcagcagaagcaggtcattgtggagaagcttggtgagccagcccaaggctatgaagatttcactgccagccttcctgctg

SEQ ID NO: 195455 - DNA, 278 bp, Glycine max
gtcctctctcactcagattcagcaattttctattttctcctctcatggcttcagattccaaaaaggatttccctgctgatgacaaagctggaacagcagagtctaaagcatccaaagatgaaacgtcatctaaagattctccagcagcacaaagagcgactacagctacttctggacctgcaactggttttccaggcaacccttttgagttctctgcaatgtctggcctgctcaatgatccaagtatcaaggaattggctgaacagatagcaaaagat

SEQ ID NO: 195456 - DNA, 281 bp, Glycine max
cttgatctcatcataatcgtcagcgtcaattgaagaagatgccgatcagaaacatcgccgtcggaaggcctgaagaggcgactcaccccgacacgttgaaggcggctttggctgagttcatctcaaccttcatcttcgtgttcgccggctcaggctccggcatcgcctacaacaagctcaccgacaacggcgctggcacccctgccggcctcatctccgcctccatcgcccatgcattcgccctcttcgtcgccgtctccgtcggcgccaacatctccggc

SEQ ID NO: 195457 - DNA, 280 bp, Glycine max
gccgccgccgccgccgtgtccgacggtgagtcaacgtgagcaatggatggtagagtcgcaggtgtttcagatttaccaactcttcgccaccattcctcgcaacgcccaaacgctcatgttggagcttcaacgcgataatcacatgcagtatgtctccaaaggccttcgccatctcagttccgcattttccgttttggacgctaatcgaccctggctctgctactggatcttccactccattgctttgtcgggagaatccgtcgatgatgaactcgaagat

SEQ ID NO: 195458 - DNA, 284 bp, Glycine max
ctcactttctcgctcgccaaacgcccctctctctcctccactggccgaccagctcaccgacgaccagatcgccgagttcaaggaggccttcagcctcttcgacaaggacggcgatggttgtattactactaaggaacttgggactgtgatgcggtcactagggcaaaacccaactgaggcagaactgcaggatatgattaatgaggttgatgctgatggcaatggaaccatcgacttcccagagttcctcaacctgatggctcgcaagatgaaagacaccgact

SEQ ID NO: 195459 - DNA, 287 bp, Glycine max
gggggttgtaagtttggtaaatcttgtaaatataaccacacaagaggaaaaatttcaacagcaccagcaccacttttggaacttaactttcttggcctgcctattcgtctgggagagagagagtgcccctactacatgcgcactggctcttgtaagtttggagcaaactgcaagttcaaccatcctgaccctacagctgttggaggagtaggaggtgatcctgcttcagggtatggtaatggagggtctatttcattacaaggtgtatcacaaacatctgtaccctc

SEQ ID NO: 195460 - DNA, 258 bp, Glycine max
ctgctactttgaatcacgcgattccgttgtcccaacagttgagttatttcaaggaataccaaggcaagctggccaaggtagctggcagtaaaaaagcagcctcaatcatcaaggatgcgttgtatgtgctcagtctggaagcagtgactttgtgcaaaattattatgtcaatccttggatcaacaaagtctacactcctgatcagtattcgtcctacttaattggttcattctcaagttttgttaaggacttgtatgg

SEQ ID NO: 195461 - DNA, 246 bp, Glycine max
  unsure (1)..(246): unsure at all n locations
tgcaggaactaaatatggctgacttgttggaatggtcaaagcaagataagaaacgaatgcttcatgtcgtctaccgtgttggtgaacttgatcgcaccatcaaattttacacagaatgtttaggaatgaagctttgaggcaaagagatatcccagaggagaaatatgctaatgcttttcttggatttggccctgaagaatcccattttgttgaagaattancatataattagggggttacccgtat

SEQ ID NO: 195462 - DNA, 255 bp, Glycine max
  unsure (1)..(255): unsure at all n locations
agaatatgaagttgtttgtattctttgttgctgcagtagttttggtagcatggccatgccatggcgcaggctaccaaaggttccctctccgaatgaaaactggctatggtgagcgttcttcggaggtaaaatgcgcaagttttaggcttgctgtggaagcacacaacatccgagaaactanaaccattcctgaagagtgcgttgaaccaacaaaggactacattaatggcgaacaatttagatcagactctaaaa

SEQ ID NO: 195463 - DNA, 102 bp, Glycine max
gtagttttggtagcatggccatgccatggcgcaggctaccaaaggttccctctccgaatgaaaactggctatggtgagcgttcttcggaggcaaaatgcgca

SEQ ID NO: 195464 - DNA, 241 bp, Glycine max
catgaacccaaattatacagattttagattccctcagattaaagctcatccttggcacaaggttttccacaagcgaatgcctcctgaagcaattgaccttgcatcaatgcttctccaatattcacctagtctacctgcactgcgctggaagcatgtgcacatcctttctttgatgagcttcgcgagccaaatgcccgtcttcctaatggccatccagtgcccccatttttcaacttcaaac

SEQ ID NO: 195465 - DNA, 258 bp, Glycine max
attcgctcttctcttcgaataaaccacaaaaccaacaaacgagaagtggagtgagagaagatggggttgtcgttcacgaagctgttcagcaggttgtttgcgaagaaggaaatgaggattctgatggtaggtctcgatgctgctggtaagacaaccatcttgtacaagctcaagcttggagaaatcgtcaccaccatccccaccatcggatttaatgttgagactgtggagtacaagaacatcagcttcactgtgtgg

SEQ ID NO: 195466 - DNA, 258 bp, Glycine max
aagccttacagatttctggaagacaaatgatgattaacaataatgaaaatatggccggggtaatgaatcacactgattatcttaacgattgtaaaagtgtggtttattcatatctttccaaaaaactatcatttagcgccgcaaatactgcattccgtatactatctgcttgcaaagtcaacaaagtttgtcatatgacttttaataagccaacagaagtaattaatgcatgttggaatgtagctgcccccagccctt

SEQ ID NO: 195467 - DNA, 259 bp, Glycine max
aagaaaccctagcaagtggagcaatggcagacgttgaagtcgatgtggcggcagcagcagcagcagggctgccgaagaagagaacgttcaagaagttcagttttcgaggcgtggatctcgatgcacttctcgacagtccaccgatgaactcgtcaagatgttcagtgcccgcgctcgtagaaggttccagagaggcctcaccagaaagcccatggccttgatcaagaagctccgtaaagcgaaaagggaagctccacca

SEQ ID NO: 195468 - DNA, 241 bp, Glycine max
ctcgacccgaaaacaaaggtcaagattaaccgtggtgttgccatctgtcacttggacacctccgattggagcccgacccatggagcattcatctcgttagggtcgggtccaggtcggattgaggtgtgccactggatcttcgagaatgacgtggcgtggaccattgtgaagtgagagaagagaacatcagaataaggaaggaagaagagttacctctataggaaattaaagttcaattttt

SEQ ID NO: 195469 - DNA, 83 bp, Glycine max
gtccctttatgttctcttcactcttggtcttgcgagagaaagccatgccagagacgaagatttttggcatgctgtttggccaa

SEQ ID NO: 195470 - DNA, 255 bp, Glycine max
actcgagccgaatcggctcgagcctaaacaggccaactattagcaaaggattcatgcctgaaacggggtctcctgaatatgaacgcgttggctaagaaccctgagaaggagtttttgaagactattactggcaagaggagaccctcattgaccttacagttatagaaatcttgtcaaggcacgcatctgatgagttctaccttgggcagagagatggtggtgacaactgaacttctgatgccggtccattagagg

SEQ ID NO: 195471 - DNA, 256 bp, Glycine max
cgcattttgcatctaacccttttgtcattaataatctctctgaccactctttccttggtcgatgccgccgatcccacatttggcttcacccctcttggattatctagtagctcaaacttgcaaatccaaaagcttacgacgttgcagtcaacgagcgctacagcttttcaaatggagtgcacagattttgggtatactccacggacaagcctcatatgcaaggcagcaatacgaagccacgaactgagattcgtat

SEQ ID NO: 195472 - DNA, 255 bp, Glycine max
gacagcctacaaatccaatggcttcagagaaggaactttcgaacccaatgagggagataaaagtgcagaagctcgtcctcaatatctctgttggcgagagtggagatcgtctcaccagagccgccaaggtgttggaacaacttagtggccaaaccacagtgctttccaaagcacggtacacttttcgttcctttgggattagaagaaatgagaagattgcatgctatgtcactgtcagaggtgacaaggcaatgc

SEQ ID NO: 195473 - DNA, 253 bp, Glycine max
gtcaaattggtgcttgggatgcagttgtaacttgtttctttatcgatactgctcataatattgtagagtacattgaaataatttcaaaaattttgaaagatgggggagtttggataaatttacggacctctacttatcactttgcagatatgtatggacaggatgatgaaatgtccattgaattgagtttggaagatgttaagagggttgcatttcattatggatttgaatttgagaatgaaagaactattga

SEQ ID NO: 195474 - DNA, 108 bp, Glycine max
cggctcgaggaaggtccttgtgttcttcgttgctacaattttggtagcatggcaatgccatgcgtacgatatgttccctctccgaatgaacactggctatggtgcccg

SEQ ID NO: 195475 - DNA, 252 bp, Glycine max
aaaaatttagatgatagcattggtgatgaaaaacttaaggagctgttctccccttttggtaccattacctcttgcaaggttatgagagacccaaatggcttaagtcgtggatcgggttttgttgcattctgactcccgaggaggcatctagagcactcctggagatgaatggcaaaatggtggtaagcaaacctctgtatgtgactctagaacaaaggaaagaagataggagagctagactgcaggctcagt

SEQ ID NO: 195476 - DNA, 253 bp, Glycine max
gcaagctccaaagacagattcaagacagagctggatggaattcaagtagagttgcaagcaactgatcctactgagatgggtcttgatgtgttcaaaagccgtgccaactaagatgattatataaaatagtagctttctggtgggagcagcacccctgaagccttagttactcatatggaaaatatcctagtttgtgggatggtcaacttgggtacttatggtcccaaactctcaattttccaagttgtggcat

SEQ ID NO: 195477 - DNA, 244 bp, Glycine max
aggaaaatcatttagattctgaactgccactcatgcctaaagcagtggtcacaattctgcttagcaaaaattctttttcgggtgagataccaaatcactttagtgaattgagtcatcttcagcatctagatcttcatcaaatcatctcagtaagatgcccccatcttccttgttctctttgccaaacattagctatttgaatttagccagtaatgagctaagtggatcccttccacagaaacta

SEQ ID NO: 195478 - DNA, 256 bp, Glycine max
agcatctcaaggtttgtgtccttcgataaaaaatattcttcttttggactctgaagggaagcgtgtggcagtcaagtattactcagatgactggccaacaaacaatgcaaagttagcttttgagaagtttgtatttactaagactgttaagacaaatgctcgtacggaagctgaggtaacactacttgagaacaatatcattatttacaaatttgtacaagacctgcatttctttgtcactggtggtgaagatgaa

SEQ ID NO: 195479 - DNA, 251 bp, Glycine max
cttggctccgccatttttcgtagctgctgttcttgcgcgtgaacaaccctcaggtaagccaaaaccatggttaaccataacaatgttatcccaaacggacacttcactaagcactgagcagaactatgttagacttggttcaatcagccagcacggaagacaaggagacgattggctcgtcagaagaaagctgtgaagatattccccagacctacggctggacctctcaggcccattgtacatggtcaaac

SEQ ID NO: 195480 - DNA, 253 bp, Glycine max
agatgcaacacctttgactcttggccaagagtttagtgggtatactacacaagtgaagtacggtattgatcgagtaattggcactttgccgcacctgtatcagcttgcccagggtggtacagctgtagggactggattgaatacaaagaaggggtttgatgccaagatagcagcagcagtagctgaggaaacaaatctgccttttgttacggcagaaaataagtttgaggccttggctgcccatgatgctttt

SEQ ID NO: 195481 - DNA, 255 bp, Glycine max
cctgcatcttcaaccatgtcagcaatgctgcaacctcagatcattccgctcaaggaaggcacggacacttcgcaagggaagccacagctggtgagcaacatcaatgcctgcaccgccgtcgccgacgtcgtccgcaccaccctcggccctcgcggcatggacaagctcatccacgacgacaagggaaccgtcaccatctccaacgacggcgccaccatcatgaagctcctcgacatcgtccaccccgctgcaaaa

SEQ ID NO: 195482 - DNA, 217 bp, Glycine max
  unsure (1)..(217): unsure at all n locations
acgacaccctcgtccaccgctgctacatcgccctcggccagcttcagttcgtcatctccgagatccatgacgaccctcncacacctctccaagccatcaaactcctcgctctctatttctcctcccccgacccaaggattccgccatcgcgagtctcaaggagtggcttgccgatcccgccattgcaaacaacgccacgctgaggctcgtcgcgggt

SEQ ID NO: 195483 - DNA, 251 bp, Glycine max
  unsure (1)..(251): unsure at all n locations
gtttatcgtgaggagaatatgaagttgtttgtactctttgttgctgcagtagttttggtagcatggccatgccatggcgcaggctaccaaaggttccctctccgaatgaaaactggctatggtgagcgtcttcggaggtaaaatgcgcaagttttaggcttgctgtggaagcacacaacatccgagcatttanaaccattccacaagagtgcgttgaaccaacaaaggactacattaatggcgaacaattt

SEQ ID NO: 195484 - DNA, 254 bp, Glycine max
  unsure (1)..(254): unsure at all n locations
ttntnttntctctcaacaacttcanctnnntccaacntngatcatgtctncncttcaagggcaagtaccatgatgagcttatcgccaatgctgcgtacattggcactcctggaaagggtattcttgctgctgatgagtcaacagggacaattggcaagcgtttggccagcatcagtgtagagaacattgaatccaacaggcgagctcttagggagctgcttttnactgctcctggtgttcttcaatatctcagt

SEQ ID NO: 195485 - DNA, 252 bp, Glycine max
  unsure (1)..(252): unsure at all n locations
cattccataaatctctgtaggccgtcctcgatttcancgcaacatgacacccgaaggacatggcaatcgcaacttctacatgagtgttaacaacaacggctacattagcgctaatgacccgttgaactgggcgcggtggcggaggcgatggccgggagccacctcgacggggtcaagcgcatggtggaggagtaccggaggccggtcgtgaagctcggcggcgagaccctgacgatctcgcaggtggcggcg

SEQ ID NO: 195486 - DNA, 253 bp, Glycine max
cgctatagaaaatgttcaaaaaattttcaggtgaagatgtatctgcacagaaccaagtgaaggcatctgttcaacgaaaaatacggcaaagtattgctcaagagtatccgggtcttgaacctgtgttggcagatatacttcccaagaagtcccctctaatagttgctaaatgtcagaaccatctcaatctggttcttgtgaacaacgtgccactgtttttcagtgtccgtgatggaccatacatgcccacctt

SEQ ID NO: 195487 - DNA, 249 bp, Glycine max
ccagtattgcaaataccacttgtcgtgatgtgtggactgaataccatgaaatgggatttgaaggagtgagagcagttgctgaacataaagtttacacagctggctcactcgttgacctccttcaatttgtgctccaaagatgatgtctcgtggtagtgctcatttctcttatggaattgctgacaatttggatgaccctaaatataatcactacaagtattggtcaaaccccttggaaacaaattacca

SEQ ID NO: 195488 - DNA, 250 bp, Glycine max
ggcacgcgtctacaccgatgtcaatgttcttcgccccaaagagtactgggattacgagtccctcaccgttcaatggggtgatcaagatgattatgaggttgtgcgcaaagtgggaaggggaaagtaccgtaggtttttgaaggcataaatgttaatagcaatgagcgttgtgtaatcaagattctcaagcctgtcaagaaaaagaagattaaaagagagataaaaatacttcagaacctttgtggggggc

SEQ ID NO: 195489 - DNA, 272 bp, Glycine max
gcagaaagcagcagggaaggaggaggagggaaaactgcagaagggaattgcagagttctacgacgagtcgtctggcatatgggagaacatttggggcgatcacatgcaccacggcttttatgacccggattccaccgtttctgtatctgatcatcgcgctgctcatatccgaatgatccaagaatctcttcgttttgcctctctgctttctgagaacccttctaaatggcccaagagtatagttgatgttgggtgtggcatagggggcagct

SEQ ID NO: 195490 - DNA, 271 bp, Glycine max
atctgcagctacgatgggtaagggaacggggagtttcggtaagaggaggaacaagacccacaccctctgtgtgaggtgtggccgccgcagcttccacctccagaagagtcgttgctctgcgtgcgcttaccccgctgcgcgcaccaggaaatataactggagcgtgaaggccattaggagaaagaccaccggacctggaaggatgaggtacttgcgtaacgtgcctcgcagattcaagagcggcttcagagagggtaccgaagctgcaccc

SEQ ID NO: 195491 - DNA, 275 bp, Glycine max
  unsure (1)..(275): unsure at all n locations
cacactcgaactcgagccgattcggctcgagcagnctcgagctcgagcgtgaaaacgctgcagaggcagcaccgagctgtattgatactaccttgctgtacccaatttcatgtccaaagttgtgatgaaattgaagatgtaatcagcagatctcaatttccagaagggttccttttcggaacaggcacttcctcttaccagattgaaggagcgtattttgaagatggaaagggtttaagcaattgggatgcttttagtcatacaccaggacagat

SEQ ID NO: 195492 - DNA, 274 bp, Glycine max
aatccctccttcctctgccttataattcttgtgacccttttagctggtagcattgaaagtgcaccagcaaacgtgaagccaagccattatgctgcacccttcaataggagtgtttttccttctggttttctatttggaataggctctgcagcttaccagatagaagcagcagcagctatagatggcagaggaccaagtatatgggacacctatactaaacagcaaccagggaagatttgggatcatagtgatggaagtctagcaatcgattttt

SEQ ID NO: 195493 - DNA, 268 bp, Glycine max
aatgaaggtccttgttttcttcgttgctacaattttcgtagcatggcaatgccatgcgtacgatatgttccctctccgaatgaacactggctatggtgcccgtactccggaggtgaaatgcgcaaacttggaggcttgctgtggaagcacacaacatctttggctttgagaccattcctgaagagtgtcttgaagcaacaaaggaatacatccatggcgaacaatatagatcagactccaaaacagttaaccaacaagcttactttta

SEQ ID NO: 195494 - DNA, 266 bp, Glycine max
agaggctaagatttttgtgaaatctcttcgctccacattctcatttctacaggatgttcgtgttccaactattgctgttattgaaggagtagctcttggtggtggacttgaaatggctcttgcatgtgatattcgaatttgcggagaaaatgctctgatgggtttgccagagacaggacttgcaataatccctggggcaggtggaactcagcgactgcctagattggttggaaaagcaatagcaaaggatattatatttactggtc

SEQ ID NO: 195495 - DNA, 268 bp, Glycine max
ctcgagccgcaactttgtgcttctcattagtcgccaagggaaggtgagactgacaaaatggtactcaccttattctcagaaagaaaggagtaaggtaatccgtgagctcagtggaatgattctttaccgtgctcccaagcaatgtaattttgtagaatggcgaggacataaagttgtttataaaaggtatgctagtctctatttctgcatgtgcattgatcaagatgacaatgaattagaagtccttgaaataattcatcattttgtg

SEQ ID NO: 195496 - DNA, 271 bp, Glycine max
gttcttttcctttctgctgataagctgtgtgagtgagttcattgacaagcctgaaatgacaactatgctgacaaatgagcatggtctgagtttgaacctcaaggagactgagctttgcctcggtttgcctggcgggggctctgaagtggaaactccaagggccactgggaagagagggttctctgagaccgttgatctgaagcttaatcttcagaccaaggaagatctgaatgagaatctgaagaatgtctcaaaggagaagactctcctt

SEQ ID NO: 195497 - DNA, 268 bp, Glycine max
ctccaagcagcctccaattcgtgccactctcttcaaaatggccgttaccttctctaatctccacacagaatcaggcacacagtccctcgacgacttcctctctgggaaggtctacgtttctggcgatcagttcacaaaggacgacatcaaagtgtatggtgctgttttggagaagccaggtgactcttttcccaatgctgccaagtggtacgaggttgtctcatctcagcttgctgcaagcttccccggcaatgctcaaggggtgaga

SEQ ID NO: 195498 - DNA, 267 bp, Glycine max
cacactcccatacacacacgttgtctcgcacacattccttcattccgcagcagcaaacatccataccttaaacgacaacaatggccgatgccgaggatattcaacccctcgtttgcgataatggaaccggaatggtcaaggctggttttgccggagatgatgcgccgagggcggtgttccccagcattgtggggcgtccacgtcacacgggagtgatggttgggatggggcagaaggatgcgtatgttggggacgaggctcaatcca

SEQ ID NO: 195499 - DNA, 268 bp, Glycine max
cgaagtcatcaagcacgagcgcctcgtcgacgaccggttcttcctcatctgcaaggggcaagagcggttccgcgtacaatggtgttgtccgcaccaaaccctacctcgtcgcgcaggtgacgtggctcgaggaccgcccttctccctccaccgacctcgatctcgacggtctcgccaccgaagtggagacctatatgaaagacgttatccggttatcgaaccggttgggagggaaaccggagaaggaggttggggatttgagacgaaa

SEQ ID NO: 195500 - DNA, 267 bp, Glycine max
gtggatatctaggcacccagagacgaggaagggcgtagtaagcgacgaaatgcttcggggagttgaaaataagcgtagatccggggattcccgatataggtcaacctttcgaactgctgctgaatccacgggcaggcaagacccaacctggtgaactgaaacatcttagtagccagaggaaaagaaagcaaaagcgattcccgtagtacccgcgagcgaaatgcgagcagcctaaaccgtgaaaacggggttgtgggagagctatac

SEQ ID NO: 195501 - DNA, 262 bp, Glycine max
  unsure (1)..(262): unsure at all n locations
gagttttcaaatggcagaggaaaaaggtagagtttgtgtcactggaggcactgggttccttggttcatggatcatcaagagactccttgaagatggatatgctgttaacaccactattagatctgacccaggacgaaagagagatgttagcttccacacaacatacgagatcacatccgcanagctanaaattttcaacgctgatctcagcgaccctgaaagttttgatccagcagttgagggatgtgttggaattttccac

SEQ ID NO: 195502 - DNA, 266 bp, Glycine max
agcatctttacctcttccattttatacaccagtatcgctctgtatttgtctcatcctcctaactgaaccctaatttcttctgggaaactctattttctctaatatggagcaatactggtctgggagtgccatcaatgaaaacaaaggaatggtagataatttgcatcgttatggagtaatcacatctagaaaggtagctgaagtaatggaaaccattgatagagctttgtttgtacccagcggcggcggactccaaccttatgtgg

SEQ ID NO: 195503 - DNA, 268 bp, Glycine max
gttctcttctgtcattgcttctcctccacacacgcacagagacacacacttttgcagtcacattgagaatggggcgtgttcgcacgaagacggtgaagaaatcctcgcggcaagtgatagagaggtactactcccgcatgacgctggacttccacacgaacaagaaggctctggaagaggtggccatcattccctccaagaggctccgcaacaagatcgcggggttctccacccatctcatgaagcggatccagaagggtcccgtgcg

SEQ ID NO: 195504 - DNA, 262 bp, Glycine max
tgttgaatcaagcatagatgtttcctttcgggcaaaagggtcaaaagataaaggggactatggtggttatgcagaatcatgtgttggatatcaacagcatcaccagtgttggagggatcgttgaccaaggcttaggcttcataggcagtgcagtcgatgcacttacttttgcagccaccaaaatctccatccagttgattagttctaccaaggctgatggtgggaaaggaagaattggtaagagtacaaatttaagaggaaa

SEQ ID NO: 195505 - DNA, 266 bp, Glycine max
  unsure (1)..(266): unsure at all n locations
ccttcttctcttcccctttctttttcttcttctgagcttgtttaagctctttctatttgattccattaacatatattatcacaatgtgtggtattcttgctgttcttggttgttctgatgactctcgagccaaaagggtccgcgtgcttgagctctctcgcagattgaagcaccgtggccctgactggagtgggctccatcaacatggtgactgctttttagcacatcaacggttagccatagttgatnctgcttctggggatcaa

SEQ ID NO: 195506 - DNA, 267 bp, Glycine max
caggcttccaaatcaacggacacaacattagttgggccaactggaagttccatattggatttgatccaagtgccggaattgtaatatcactggcatccatttataatttggagaagcacaaatctcgtagtgtgttatacaaaggttacatttctgagctgtttgtgccataccaagacccaacagatgatttactataagacattctttgatgctggagagtttgggtttggtctctccacggtctcattggtgcccaaccgtgat

SEQ ID NO: 195507 - DNA, 262 bp, Glycine max
gcctataacaagaaacaggcggaaggtcctactggtggggatgaagaagaatctgagaagtctgtatctgaggtgaatgatgaagatgatgatgaggaaggcagtggcgaggaagaggatgacgattagagaatggactgataattgcatttatgtaggttctgatgattttgatcatctgttgtaggtggtctggtcatttcctgataaacatatttcatgcttccaaaaaatatttccctgctccctccgtaaattggtt

SEQ ID NO: 195508 - DNA, 120 bp, Glycine max
ggcacttcgttgcttggtgaagtcccttactgttctcttcactcttggtcttgcgagagaaagccatgccagagacgatgatgtttggcatgctgtttggccaaacaatcccattccaag

SEQ ID NO: 195509 - DNA, 261 bp, Glycine max
accttcttctccgtttccgtttcctcgttcgaattcgctttttgatctgcgaaaatgagagagtgcatctcgatccacattggtcaggctggtatccaggtcggaaatgcttgctgggagctctactgcctcgagcacggcatcgggcccgatgggcaaatgccaagtgacaagacagttggcggtggtgatgatgctttcaatactttcttcagcgagactggtgctggaaagcacgtgccacgtgcagtgtttgtagat

SEQ ID NO: 195510 - DNA, 266 bp, Glycine max
cgaacatggctaagtatcattcaagtgggaaaagctcttccatgactgctatagccttcctgtttatccttctaatcacttatacaggcacaacagatgcacaatccggggtatgttatggaagacttggcaacaacttaccaacccctcaagaagttgtggccctctacaatcaagccaacattcgcaggatgcgaatctacggtccaagcccagaagtcctcgaagcactaagaggttccaacattgagcttttgctagacatt

SEQ ID NO: 195511 - DNA, 264 bp, Glycine max
ccaaagtctttcaaggctcgaatgacggtgcgcctagctgttgctggtgctttccatcctacatacaacacaccagctgtgtcaagattggaagcagcattggcaacaacagaaatctgaaccccaagaataccagtcatctccaatgtgcctgcacagccacatacagaccctgtcacaataaagaagctattggcacgccaggttacttcacctgttcaatgggaaacaacagtgaagactcttctaaccaagggtctgaag

SEQ ID NO: 195512 - DNA, 265 bp, Glycine max
attcgttatcgctttgcactagcagctttgaaacccggttcatccgaagcccttcaccgaaccatgtcgaggagaaaggttagagagccaaaggaggaaaatgtgactctgggtccagctgttagagatggtgaacacgtttttggcgttgctcgcatctttgcctccttcaacgacaccttcatccatgtcactgatttgtctggcagggaaacccttgtccgaatcactggtggtatgaaagttaaagctgacagagatgaat

SEQ ID NO: 195513 - DNA, 263 bp, Glycine max
  unsure (1)..(263): unsure at all n locations
tatttgccgctgacaccgatcaggaaagcaggaaaacacacacaacaaggagcagatcgggtacctcaggtttctcatggaaattggcggatcatccaaagcttccaaagggtaagactgccgctgttgtggtattggatggttggggagaggccacacccaatgagtaccgntgnatccacaaggctganncaccctgnatggattcacttaaaaagggtgntcntgtaaggtggagattggtcagggctcatggtactgct

SEQ ID NO: 195514 - DNA, 259 bp, Glycine max
cctcaaccccatttctgaacggccatggccatggctccagccttctctggaaacccagttcggcggtgactcagacccactgggccccgccgagtttgctgcctcaaatcaatgcgatgaagacgatgcagggaaaagtggtgtgctccacgaacgacaagacggtggccgtggaggtggtgcggctggcccctcacccaaagtacacgaggcgcgtgacgaagaagaagaagtaccaggcccacgatcccgataacca

SEQ ID NO: 195515 - DNA, 260 bp, Glycine max
agaacacctatgataataagaaaaagattgagcagatgatggatcttattaatagccttaagctctgcgttcggtggtttaagagaatcgaagaagggtatatgcaagaaaaggaaaagcttcaatctgagctagagactgctgagaagaagtgcactgatactgggactgagatgaagagtaagattgaggagttggaagagactgtatctgatttgaggaagacaatttcttctctagaagagagaattgtaaaggaa

SEQ ID NO: 195516 - DNA, 259 bp, Glycine max
cggctcgagcagctcgaggtctcttcctctacgcaacaatggttaccgccaagaaaaccaagaaaccccatgaacgcatcaacaacaggcttgctcttgtcatgaagagcggcaaatacacccttggttataagaccgttctcaaatctcttaggagctccaaagggaaattgattatcattgctaacaactgcccccctttgagaaagtcagagattgaatactatgccatgttggcaaaggttggagttcatcatta

SEQ ID NO: 195517 - DNA, 133 bp, Glycine max
cagttttcaaatggcagaggcaaaaggtagagtttgtgtcactggaggcactgggttccttggttcatggatcatcaagagactccttgaagatggatatgctgttaacaccactattagatctgacccagga

SEQ ID NO: 195518 - DNA, 256 bp, Glycine max
ctcgagccggtttatcgtgaggagaatatgaagttgtttgtcttctttgttgctgcagtagaccttggtagcatggccatgccatggcgcaggctaccaaaggttccctctccgaatgaaaactggctatggtgagcgttcttcggaggtaaaatgcgcaagttttaggcttgctgtggaagcacacaacatccgagctcttaaaaccattcctgaagagtgcgttgaaccaacaaaggactacattaatggcgaa

SEQ ID NO: 195519 - DNA, 257 bp, Glycine max
cccagattcaaccagttaaacttggaacccaaggctttgaggtttcaaaattgggattcggatgtatgggccttactggagcgtacaatgaccctctccaagaacaggatggcatatctgttatcaagtatgcgttcagtaagggaatcacattttttgatactgcggatgtttatggagccaatgctaatgaacttttggttggaaacgctttgaagcagctgcccagagaaaagattcagatagccacaaaattt

SEQ ID NO: 195520 - DNA, 251 bp, Glycine max
aggtagttatgacaaacaaggattcccgatgaaacagggagtgcttactcctggtcgtgttctacttttgcttcacaggggaactccttgcttccgtggatatggaaggcgtaatggagatcgtaggagaaagtctgttcgtgggtgcattgtcagcccagacctctctgtattgaactaggtaattgtgaagaagggtgagaatgatttaccaggattgactgatgctgagaagccaaggatgagaggcc

SEQ ID NO: 195521 - DNA, 255 bp, Glycine max
  unsure (1)..(255): unsure at all n locations
caccatgctgtgacaaggtgggtttaaagaagggaccgtggacgccagangaagatcanaagctcttggcttatattgaagaacatggccatggaagctggcgtgctttgccancaaaagctggacttcagaggtgtggcaaaagttgcaggttgagatggactaattatctaaggcctgatattaagaggggaaagttcagcatgcaagangagcaaaccatcattcaactccatgcactattagggaacaggt

SEQ ID NO: 195522 - DNA, 255 bp, Glycine max
caaaaaataaaaatcaaagagcataatgtcagggatcattcacaagattggggagacccttcatgtgggagggcacaagaaggaggaggagcataagggtgagcaccatgctggagaatacaaaggggagcaccatggtgaacacagtagtgagtacaaaggagagcatcatggtgaacacaaagctggagagtaccatggacagcacaagccagagcacaaagaggggttcctagacaaagtcaaggacaagat

SEQ ID NO: 195523 - DNA, 254 bp, Glycine max
gacagagaaggagatgtatagcaatttcaaagagcaagcaatagagtacgtgaaacaagcggtagatgaagacaataagggaaactacgcgaaagcgtttcaactttacatgaacgcgttggagtatttcaaaacgcacctcaagtacgagaagaaccctaagatcaaggaggccatcactcagaaattcaccgagtatctccgccgggccgaggagatccgggccgtcctcgacgatgggcccagcggcccgg

SEQ ID NO: 195524 - DNA, 249 bp, Glycine max
ccacaacaccccaaaaaccaaggaagcatattactacagaatgatctttgagaggttcttccctcagaactcagctaggctcactgttcctggaggagcaagtgttgcatgtagcacagccaaagctgttgagtgggatgctgcttggtctaacaaccttgatccctctggtagagcagcacttggagtgcacatttcagcctatgaaaaccagaacaacaagggtgtagaaattgagaagataatacc

SEQ ID NO: 195525 - DNA, 126 bp, Glycine max
  unsure (1)..(126): unsure at all n locations
acattttcatgactgatggtgcaagccctgctgtccataatatgatgcaattactcattagatcagaaaatgatggtattctgtgtcccattccacagnacacncnnccntnagcctcaattgccc

SEQ ID NO: 195526 - DNA, 249 bp, Glycine max
actagcatgaaccacatgggcctccgcaaccactagtgggacgacaccgtcgccggcccaaggccggaaaacggtctcggcaagctccgaaaacaccacaccttcactttccgacctagctccggccaggaaacggagggcgagagcgtgagatcgtacggagccgaatcgtcggaggaagcgacgagagtgacgcgtagtatcatgatcgtgaaaccgcccgggtaccagagtggatcgcctccggtt

SEQ ID NO: 195527 - DNA, 257 bp, Glycine max
ctcgagccgcttcattggttcctatgcccctgtcccagcctctgaaccctaccctgaggctacccttctcttctcttctctgtcgtgagtcaccatggtgagggttagtgtgctgaacgatgctctgaagagcatgtacaatgctgagaaaaggacgaaagcgccaagtcatgattaggccatcctccaaagtcattatcaaattccttttggtgatgcaaaagcacggatacatcggagagtttgagtatgttgat

SEQ ID NO: 195528 - DNA, 256 bp, Glycine max
ctgctatggctgctctgcaatacttggaatcgctgcgtaattcgcaccctgagctctccgattggtacaattcgctggcggatctgtatcagaagaagctctggcaccagctcactctcaagctcgagcagtttgtggctctcgccgtcttccaggctggtgatgctttaatacaattatatcacaatttcatcacagactttgagccgaaaatcaaccttctcaagcttgcacattttgctgttatagtttctcg

SEQ ID NO: 195529 - DNA, 259 bp, Glycine max
ccagtcttggagggatcgttgaccaaggcttaggcttcataggcagtgcagtcgatgcacttacttttgcagccaccaaaatctccatccagctgattagtgctaccaacgctgatggtgggaaaggaaaaattggaaagagtacaaatttaagaggaaagataacattaccaaccttgggagctggcgaacaagcatacgatgttaattttgaatgggacagtgacttcggaattcccggtgcattttatattaagaa

SEQ ID NO: 195530 - DNA, 259 bp, Glycine max
cggtgaagcatttggtcacttgaagtcatcagattttctcgcttatggaatcaaatctgtatcccaagatgtcttgcctgtcttgactgatgcattcgatggaaatattttgagccttgagtttgataattttgctgaagtgcacaaactctatgaaggtggagttacactacctacaaactttcttagcaagatcgcccctataccagtgatcaaggaaatttttcgaactgatggcgaacagttcctcaagtatcca

SEQ ID NO: 195531 - DNA, 259 bp, Glycine max
ctcgaggcgctcgagccgggcagctctatggcaacgacttgttcatcaacggaaagggtaaggaagccatcgcaatacggtccattcattgagtcagtgaacaagagagggctgaacctctctgaggtggtgtgttccacattcaaatgaaccaattggagaaaccaaggacagaaggacagtgagagtggaatgcttcatgaaagaaagcagccccaatatctgggtgaggcctatcagtggactcacaatggtggtt

SEQ ID NO: 195532 - DNA, 267 bp, Glycine max
ctcgagccgatcgatcttaaggctgggggtaagagcaaaaagaccacaaagaacagcaccaaacatccaatgacatctacctcaaattacttgtcaagctttatcggttccttgttcgaaggactggcagcaatttcaatgctgttatactcaagcgcttgttcatgagcaaggttaacaagcctccaatttctttgtcaaggttaattaagtatacaaaggggaaggaggataaaattgctgtaatagtggggactgtaactgatg

SEQ ID NO: 195533 - DNA, 265 bp, Glycine max
caagggttcaatctttttggctgtgttatgcttctcagcactgtcactgagtcgttgtcttgcggaggataatggacttgttatgaacttctacaaggaatcatgccctcaggctgaagacatcatcaaagaacaagtcaagcttctctacaagcgccacaagaacactgctttctcctggctcagaaacatcttccatgactgtgctgttcagagttgtgatgcttcactgttgctggactccacaagaaggagcttgtctgag

SEQ ID NO: 195534 - DNA, 267 bp, Glycine max
ctcactgtgctcaccattattggctacaaaaggcagactgatacaacggtaggtggcaccgactgtgatggggttggcattttgggcatcgcttgggcctttggtggcatgatcttcatccttgtttactgcaccgccggtatttcaggaggacacataaacccggcggtgacatccgggttgttcctaggacgcaaggtgtcgttgataagggcgttgttgtacatggtggcacagtgtgccggtgctatctgtggtactggattg

SEQ ID NO: 195535 - DNA, 255 bp, Glycine max
cgactcttcagtttctcctcgttgttcttcgctttcctgttttcaatttcgattctttcgttaatttaataagatgtttgggagggcaccgaagaagagcgataatacgaggtactacgaaatcctcggcgtctccaagaacgcttcgcaggatgatctgaagaaggcttacaagaaagccgccattaagaatcaccccgacaagggcggtgatcccgagaagtttaaagagctggcgcaacttatgaggttctg

SEQ ID NO: 195536 - DNA, 258 bp, Glycine max
  unsure (1)..(258): unsure at all n locations
caacaccatagtgaaatcgcttccaaggctgcacttctctcgtgtctcaatgttctcttcttcaccgtggttagctccacatatgtgccatgccacccacnccccaaaactccaaaacacccacctgtcccaaagccaccttccccaaagcaagcaagttgccccaaagacactattaagtttggtgtgtgtgctgatgtgttaggtttgatcaacgtgcaacttgggaagccaccaaagaccccatgctgcaacctc

SEQ ID NO: 195537 - DNA, 260 bp, Glycine max
cttttattcattttccgatggcttctgcagatgttgagtaccgttgctttgtcggtgggctcgcttgggccactgacgaccatgccctcgagagagccttctctcagtacggcgaaatcgttgaaacgaaggtctgtttgttgcaggcatcacatctgatctcacacgattcggattcggaattctctcgatcccgttctgatctgtgatctctgatctgtttgcgttacttgatcttatgatacttgtgctactatatg

SEQ ID NO: 195538 - DNA, 267 bp, Glycine max
acaaattccttgctatctaagttgaaagatcttgctgagagaagaaagctagaagacttgacaatcggcccagtcctcacatgtacgaatataatgatgctagaacacaagaataaattgcttgagataccagtatcaaagctgctctttgggggtagtcctctagagaaccattcaattccacctatttatggtgccattaaaccaacagctgtctatgttcctctcgaggaaattatgaaggataagaattttgatcttgtaaca

SEQ ID NO: 195539 - DNA, 257 bp, Glycine max
cctgccttcactttgacaactgctataaatgaatggagctccacgttatactcaataatctacagttcattgccaactataattgttggtattctcgacaaggatcttggtaaaaggactctccttaagtatcctcaactttatggggcaggacagagacatgaggcctacaacaagaaattatttttgttaacaatgttagatactttgtggcaaagcatggttatcttctgggcacccctctttgcatattggag

SEQ ID NO: 195540 - DNA, 253 bp, Glycine max
ctctgctgttgtttacaaggactggcttttcactgatcaagcactgcccaatgatcttgtcaagagaggagttgccgttaaggatccatccgctccccatggagttcggcttttgattgaggactatccttatgcttctgatgggctagagatatgggatgccatcaagtcctgggtgcaagaatatgtgtcattctactacaagtcagatgcagcaattcaacaagaccccgaactccaagcttggtggaaa

SEQ ID NO: 195541 - DNA, 252 bp, Glycine max
cacatgcctcaatgttgaaaacattgtcagagaagcagtcaaaaagaagtttcatcaaacatttgtcacggttcctgctaccattcgtctcttcttccatgattgcttcgtgcagggttgtgatgcctcggttttggttgcatccacaaaaaacaacaaaccagagaaggatcacccagataatgtttcactagctggagatggatttgacacagtgattaaagcaaaagaagcagttgatgcagttccatt

SEQ ID NO: 195542 - DNA, 251 bp, Glycine max
ctaagctattagaacactagtttgttgaccactgcgatgaggaagtggacggttgcttccgctctccttcttctctctctcctctttctctttgcagatcaaggtcgaaagtttcacgcgaatgccgagggagattccgacgagcttgtagatcctccgaaggtggaggacaagatcggtgctgtgcctcatggcctttccaccgattcagatatatacaagagggagtcggagtcgatctcgaagagatc

SEQ ID NO: 195543 - DNA, 251 bp, Glycine max
ccaatggcgaggatcaaggtttacgagctgaggcagaagacgaaggctgatctgctgaatcaactgaaggacctcaaggcggagttgccttgcttcgtgttgctaaggtcaccggtggtgcccctaacaagctttccaagataaaggtggtgaggttgaacattgcccaggttttgacggtgatttctcagaagcagaaggctgcgttgagggatgcctacaagaataagaagtacttgcctctcgatctc

SEQ ID NO: 195544 - DNA, 260 bp, Glycine max
cgcgacagcaagatcggagacagaatggcgaaaacgacgtcgttgctgctctttacactgctcctcttcggaacccttgctctcatccaggcgaagaactcgaaggaggatttgaaggaggtgacccacaaggcttactttgatgttgagattaatggaaaagaagcaggtcgtattgtaatgggtctttatgggaaggctgttccaaaaactgcagaaaacttccgagcactttgcacaggggaaaagggaactgctaa

SEQ ID NO: 195545 - DNA, 257 bp, Glycine max
ccctcaggtaagccaaaaccatggttaagcataacaatgttatcccaaacggacacttccgtaagcactggcagaactatgtgaagacttggttcaatcagccagcacggaagacaaggagacgattggctcgtcagaagaaagctgtgaagatattccccagacctacggctggacctctcaggcccattgtacatggtcaaactttgaaatacaacatgaaagtgagaggtgcgaaggggattttctcttgaaga

SEQ ID NO: 195546 - DNA, 254 bp, Glycine max
ctcgagcccacgctgcgtctcttcctcttctctttcgatccatccatcattcctaatcctcacctccaaccacctcaccctcacactcacatatacacatatctgaacgcgtatcgtccctcctatggcttcaaagcgcatcctcaaggagctcaaggacttgcagaaagacccaccaacttcttgcagcgctggtccagtagctgaggacatgttccattggcaagcaacaataatgggtcctgctgatagtc

SEQ ID NO: 195547 - DNA, 246 bp, Glycine max
cttgtctcaaagattaagccatgcatgtgtaagtatgaactaattcagactgtgaaactgcgaatggctcattaactcagttatagtttgtctgatggtatctactctgataaccgtagtaattctagagttaatacgtgcaacaaaccccgacttctggaagggatgcatttattagataaaaggtcaacacaggctctgcctgttgctttgatgattcatgataactcgtcggatcgcacggcc

SEQ ID NO: 195548 - DNA, 250 bp, Glycine max
cgtagaacccttccactgtggtgactctgcgatgggtgcctacaagtatgtttcagagctatggcgcaagaagcagtctgatgtcatgcgcttcttgcagcgggtgaggtgctgggagtataggcagcaaccttccattgttcgtttgacaaggtctacccgccctgacaaggctcgtcgcttgggcttcaaggctaagcagggctatgtgatttaccgcgttcgtgttaggaggggtggccgaaagaga

SEQ ID NO: 195549 - DNA, 250 bp, Glycine max
cgcggcgacagtcactctccgacaacaacacttccccggcgaaaaatgtctctggtggcgaacgaggatttccagcacattctgcgtgtgctgaacaccaacgtggatgggaagcagaagataatgttcgctatgacctccatcaagggtattggaaggagattcgccagcatcgcttgcaagaaggccgatgttgacatgaacaaaagggctggtgagacgagtgctgcagagttggatagtgtgatga

SEQ ID NO: 195550 - DNA, 263 bp, Glycine max
caaacccgtccctcacactctccaaaccctagcggcactacacactagttctatcgctatctccccaagatgtcgagcgccgatcccgagcacagagaagaggaggaggcacccgccgttggcgacgacgaggacaccggagctcacgtcgctccaatcgtcaagctcgaggaggttgctgtcaccaccggcgaggaggacgaagatgcaatcctggatctcaaatcgaagctttaccggttcgacaaggacgggaaccagtg

SEQ ID NO: 195551 - DNA, 250 bp, Glycine max
cagtgcacaacatcgattatccaaatgggcgaagaaaggccttggttccggaatcggtggtgaagaaggagaaaaggaacgtcgagtgggctttggcgaagaagcaggaactcgatgccgctaagaaaatgaggttcgaaacgcggaagctgatttttaacagagccaaacaatactcaaaggaatacgacgagcagcaaaaggaactgattaggttgaagcgtgaagccaagcttaagggagggtttta

SEQ ID NO: 195552 - DNA, 248 bp, Glycine max
ctcgggtgctgggtcaaaggagtatgtgcatattcgcgttcagcagcgaaatggtaggaaaagcctgacaaccgttcacggattgaaaaaagaattcagctataacaagatacttaaagacgttaagaaagagttctgttgcacatggaacagttgttcaggacccagaactaggacaggttattcaacttcaaggtgatcagaggaagaatgtttctactttcctagtacaggctggtatcgtgaag

SEQ ID NO: 195553 - DNA, 243 bp, Glycine max
  unsure (1)..(243): unsure at all n locations
gtccctccttcctctgccttataattcttgtgacccttttgcgtggtcagattgcaattgcaccagcatacgtgaagccaagccattatgctgcacccttcaataggagtgtttttccttctggttttctatttggaataggctctgcagcttaccagatagaaggagcagcagctntagatggcagaggaccaagtatatgggacacctatactaaacagcaaccagggaagatttgggatc

SEQ ID NO: 195554 - DNA, 247 bp, Glycine max
ccgatctctctctattctttgaaaccaaagttcaaactctgtcttccctgggttctatttcgaaatcaacgacgatgagttccacagaggcagcagccacagagaagaaaggtggaagacggaaaccgaagacttcaaagtccgttctcccgttcctccaaagctggccttcagtttcccgtcggccgtgtcgctcgctacctcaaggccggtcgctacgcccagcgcgttggctccggttcccctg

SEQ ID NO: 195555 - DNA, 243 bp, Glycine max
caacatctctggtggccatgtcaaccctgctgtgacttttggattggctcttggtggccacatcaccatcctcactggcttcttctactggattgcacagcttcttggctccatcgtggcatgttttcttctcaactatgtcacaggaggcttgccaactccaatccacagtgtggcttctggggttggagctgttgaaggagttgtgaccgagatcatcatcacatttggtttggtgtacac

SEQ ID NO: 195556 - DNA, 250 bp, Glycine max
cgagtccctgcagaaaccatgtattattttcctgctgagaatagagccaaattctggtataaagcagattatggcctgtttcgtttctgcatagcagatagtgaacatgactggagagaaggatcagaacaatacaaattcattgagcattgtcttgcaacagtcgatagaaagcatcaaccatggctaatcttttcagctcatcgtccccttggctactcctctaatctttggtatggcatggagggtt

SEQ ID NO: 195557 - DNA, 254 bp, Glycine max
ctggatacctaggcacccagagacgaggaagggcgtagtaagcgacgaaatgcttcggggagttgaaaataagcgtagatccggggattcccgatataggtcaacctttcgaactgctgctgaatccacgggcaggcaagagacaacctggtgaactgaaacatcttagtagccagaggaaaagaaagcaaaagcgattcccgtagtagcggcgagcgaaatgggagcagcctaaaccgtgaaaacggggttgt

SEQ ID NO: 195558 - DNA, 290 bp, Glycine max
ctttcacttcacttgtggttcctcactctctctctctacacaccacactgaggacggagacagtggaaggaaggaacactcaaatcactgaaccagccatggctaccttctccaaggaacgcgagaactttgtatacgttgccaagttagctgaacaagctgaacgctatgatgaaatcgtggaggccatgaagaaggtggcgaactggacgttgagttgagtgtggaagagaggaacctgttctctgttgggtacaagaatgtggtggggtcacggacagcctcatgga

SEQ ID NO: 195559 - DNA, 283 bp, Glycine max
caagaatggtgttctctacagaggtgtgtcacctgatgttttgatgttggaacaaactggacatatacagctggtggacttcagatttggaaaacagctttctggtgagagaacattcacaatttgtgggatggcagattcactggctccagagattgttttgggaaaaggccatggtttccctgctgactggtgggcgttgggagttttaatatattatatgttacgtggtgagatgccatttggatcatggagagaaaatgaacttgatacagttgccaaa

SEQ ID NO: 195560 - DNA, 281 bp, Glycine max
agattgtattagaaatgattgaacttcgagaactggatactgcacgtgctattttaaggcaaacgcaggtgatgggtgtaatgaaacaagagcagcctgaaagatatttgcgtcttgatcatctcctagttagaacttattttcatccaaatgaggcttatcaagactcaacaaaagagaagcgacgtgcacaaatagcccaagctattgcagcagaagttactgtagtgccaccatcccgattgatggctttaattggtcaggctttgaagtggcagcag

SEQ ID NO: 195561 - DNA, 276 bp, Glycine max
tgaagctggagatggatctgatatttataagctatatggtgttgtagtacatattgatatgctaaatgcttcattttttggtcattacatctgttacatcaaggatttccagggaaactggtatatgattgatgactggaaggttatgactgtggaggtggaagaggtactttctcagggagcatacatgctcttgtatagcaggtgtagtgcccggacatcaagctttcaaattcaaactagcgaatcttcagggatagcagaagttcagacaga

SEQ ID NO: 195562 - DNA, 280 bp, Glycine max
ctcgagccgctatggtgatgtgagccgcccaaagccaatgaccgtcttctggtcatctctgcctcagagctttaccaagcgcccaatgaagggaatgcttaccggtcctgttaccattctcaactggtcctttgttagaaatgaccaacctagatctgagaccacctaccagattgctttgtctatcaaggacgaagtggaagaccttgaaaaggctggcatcactgttatccaaattgatgaagctgctttgagagagggtcttccactgaggaaatca

SEQ ID NO: 195563 - DNA, 286 bp, Glycine max
ttgtctttctctatctctatcggtcatgggtgcttttgcttttgatgaggaaaactcctccatcgtggctccggcaacactctacaaagctctgacaaaagatgctgacactatcatcccaaagattattggggccatccaaactattgaaatcgttgaaggaaatggaggacccggaaccgtcaagaagataacagctagtgaaggtgaccaaaccagtttcgtgctgcaaaaagtggatgcaattgacgaggctaacttggtatacgactacagcatagtggga

SEQ ID NO: 195564 - DNA, 283 bp, Glycine max
atttggtcgtctttgatatctaccaacccctctacgacttggccaccaagccttctgaaaacggattttttgaagcaaggaaggcttgttgtggaacggggttgatcgaggtatctattttgtgcaataagaagtccataggaacatgtgctaatgcatctgaatatgtattctgggatggttttcatccctcagaggctgcaaacaaggttttggcggatgaattgattacttctggcatctctcttatatcctaatcaaacacttcacgagtcatactttg

SEQ ID NO: 195565 - DNA, 280 bp, Glycine max
cctcagcaaacctcaatagtgatcaagtggcaccaagtgtgtcttatgcttgtcaaaatgcagattgcacaagtcttggatatcaaacttcatgtggtggtttagatgctcgtggtaatctttcttatgcattcaatagttacttccaagtgaatgaccagattgacagtgcatgcaaattccccggtctttctgttgtcactgacaaagatccttcaactggagattgcaagctcaaaatcatgattcagacagattctgctggtctacatgggaatgg

SEQ ID NO: 195566 - DNA, 269 bp, Glycine max
gcgagtctgggccacagcaaccagcgacaacaactcaatcagctagggttgctttgcttgctatcttgttggaggattttctgttcaagagaagatggtaactagaattgtggatcttcgttcagacacagttacaaagccaactgaagcaatgagagctgctatggcaagtgctgaagttgatgacgatgttctaggctatgatccaactgcttttcgcttagaacagggatggcaaagacaatgggaaaagaagctgccctttttgt

SEQ ID NO: 195567 - DNA, 268 bp, Glycine max
cttgattatgatcattgtgctaatgtgcctcctactgcgttggtgaatattacccactcggtgttcaatgtgaatgatggtgtcaatgggaacaatttatggatgataaggctgtttagcaagattgcgtctttccagcactttatccctcttgattttgatgccagtgatcatgggacatcgagcttccctgttgcttctgtgcttcgtatagggattttggacattaggattcttaacacgtgataggatgctgggaacttgttgg

SEQ ID NO: 195568 - DNA, 276 bp, Glycine max
  unsure (1)..(276): unsure at all n locations
caccaaacccgtttgcnttgttgtttgcgaataaatggcaactaagaggagcngggaacgttgaaggagggtgatttgaaggggaagagggtattcgtgagggtcgatctgaacgtgcctttggatgacaaccttaacatcaccgatgacactagagtccgtgctgctgttcccaccatcaagtacttgtctggttatggtgctaaagtgatcctttctagccatttgggacgtccaaaaggtgtaacacctaaatacagtttgaagcctcttgtg

SEQ ID NO: 195569 - DNA, 275 bp, Glycine max
ctcgccaaacgcccctctctctcctccaatggccgaccagctcaccgacgaccagatcgccgagttcaaggaggccttcagcctcttcgacaaggacggcgatggttgtattactactaaggaacttgggactgtgatgcggtcactagggcaaaacccaactgaggcagacctgcaggatatgattaatgaggttgatgctgatggcaatggaaccatcgacttcccagagttcctcaacctgatggctcgcaagatgaaagacaccgactccg

SEQ ID NO: 195570 - DNA, 278 bp, Glycine max
cgcagttctaagctcagggaaacgttttatttcacactctgcgattcgcgatggccgacgatgactatgaggatatcgacatggggtacgaggatgagccaccagagcccgagattgaggaaggtgcagaggaagatttggagaacaaaaacgatgagttaactggagagcctattgacactgaggataaggaagaggaacaaccagtggagcggcctcgaaagacatcaaaatatatgactaagtatgagcgtgctaggattttaggtacccgtgct

SEQ ID NO: 195571 - DNA, 265 bp, Glycine max
atggctcattaaatcagttatagtttgtttgatggtatctactactcggataaccgtagtaattctagagctaatacgtgcaacaaaccccgacttctggaagggatgcatttattagataaaaggtcaacacaggctctgcctgttgctttgatgattcatgataactcgtcggatcgcacggcctttgtgccggcgacgcatcattcaaatttctgccctataaactttcgatggtaggatagtggctaccatggtggtgacg

SEQ ID NO: 195572 - DNA, 266 bp, Glycine max
aagaggttgagatgagtggatgcaaaggacccataacaactttcattgttgaacctctcatcccacacaatgaagagtcctaccttaacattgtctccgagagacttgggaacagtataagcttttcagaatgtggaggaattgaaattgaagacaactgggataaggttaagactgcatttgttccaactggaatgtctcttacgtcagaaatcgttgccccacttgttgcaacccttcccttggagatcaggggaattattgag

SEQ ID NO: 195573 - DNA, 279 bp, Glycine max
gtgcatccatcgttaagctagtggcgatcggatccagctacagcatagagatcaaggatcgaaggaaggaagatgttgggtgttataaggcacaagagtattcgccctgccttctccgcaatcagacacttgtcttctgcagctaaagagattactgtcagggaggctctgaactccgcactcgatgaggaaatgtcagctgatcctaaagtgttcttgatgggtgaagaggttggggaatatcagggtgcatacaagatatccaaggggctgctcgac

SEQ ID NO: 195574 - DNA, 282 bp, Glycine max
gctacctccatggtgaagcttatgcttttctctgctctcatactcttgtccttgcaagcagttgtgtctgtaacaccactgcattttcaacatccactagaccctttaaccaaacaagagataagtcttgtccaaaccatagtccaaaacaagtacccaagctcaagtaacaggttgagcttccactacattggactcgacgaacctgaaaaggatgccatcctcaaatgggaatccatcaaaccaactgttataactgtccctcgcaaagccttggccatt

SEQ ID NO: 195575 - DNA, 267 bp, Glycine max
ctcgctgttaagcttgttggttaccaaaatagagtgtctggatggttcagtattgtgaaagttgctgatgatgcttcttcttcttctgtgggctataagcttgtgttctgtctatggccagaagaagaggtgatgattcacttatgtaagaatgttgggattcgtaccgatggtaagggaatcaggcgcttggtgctgtctgagaacactcctttagtcgttcagtttcagaaatttcgatctgcactggccctgaataatcatgtg

SEQ ID NO: 195576 - DNA, 271 bp, Glycine max
acatattaacttgattagaaaaaagatgttacctcagaagcaagctgaagaagccatgatgtcaagcctcactcaaacgatggagcgggatgagggagaggaagtgataggggagacctcaaattttagctttaaaaatgctctctggcatggtggttctgcctacgatgcttggttcagctgtgcctcaaatcaggttgctcaggttctgttgactctgccttactcattctctcagctgggaatggtttcaggcatcatattccaagtg

SEQ ID NO: 195577 - DNA, 268 bp, Glycine max
tttcactgttgttgttggtcacattcacagtggcctcatctgccaatgtcagctacgacggtcgctccctcattattgatgcccaacggaaacttcttatctctgcctccattcattacccacgcagcgttcccgcgatgtggcctggtcttgttcaaacagccaaggaaggaggagtagatgtgattgaaacctatgttttctggaatggccatgagctttctccaggcaattattactttggaggaaggtttgatctggtcaagtt

SEQ ID NO: 195578 - DNA, 278 bp, Glycine max
gatggcttcttttcatatccaatattcattccttgtgcttgtgcttgctatggtgatcacattgatgaaccctaccaatgcaaccctctctccccatttctatgataaagtttgccctcaggcattgccagttataaagtcagtggttcaacgagcaattatccgtgagcgacgcatcggagcatctcttctgcgcttgcatttccatgattgtttcgtaaatgggtgtgatggatcaatattgctagatgacacccgaaacttcactggcgagaaga

SEQ ID NO: 195579 - DNA, 277 bp, Glycine max
cagtttccacactgcataccttacgtcttccgaattcgaagttaatttgcaagatggctaaggaaaaggctcagatcaacattgtggtggttggtcatgtggaccctgaggaggcaaccaccattaacgagctgaagaagcctgttgtggagaaagaagctccagggcatgccatatgagggcatgcacgtacggcctcggaggggaaccagaaaattatgttaacaaaataatctggaaccctaatgtatcagtgtcatcatcagtgtgtagttta

SEQ ID NO: 195580 - DNA, 264 bp, Glycine max
gagatcaaccccgacgaaggcaaggggtttttctcggcttcttcagatttctgaaatggcgcctgtttcagcattagccaagtacaagctcgtcttcctcggtgaccaatccgtgggcaaaaccagcatcatcactcgcttcatgtatgataaattcgataacacctatcaggctacaattggtattgattttctatcagaaactatgtatcttgaagatcgaactgttcgactgcagttgtgggatacagctgggcaggaaag

SEQ ID NO: 195581 - DNA, 266 bp, Glycine max
caaaattaaaagaagcaagcatgggggaatccaatgtcatgaccaagactgaggatggtgcttgtctgtctgcaatgctgcttagtactaatctagtgtaccctgcagtactgaatgctgctattgagctcaacttgtttgagatcattgctaaggcaacaccagctggttcttttatgtcatcccatgaaattgcttctaagctcccaacacaacaccctgacctgcctaataggcttgaccgcatgctgcgtttgcttgctagt

SEQ ID NO: 195582 - DNA, 275 bp, Glycine max
gcttcttccgccactcagcacttcgctccctctgtgcttcaccaaccatggccgaaatcgaagctaccgttccagatccctctcaaatcgacgtcaaacttttcaaccgctggagcttcgacgacgttcacactactgatatgtctctggctgattacattggagtgtccccgtcaaagcatgctacatatgttcctcacactgctggtaggtactcagtgaagaggttcaggaaggcgcagtgccccattgttgagagactcaccaactctctc

SEQ ID NO: 195583 - DNA, 263 bp, Glycine max
aaacacccttcaatggctaccactaccactaaagtttacattgtttactattctatgtacggacatgttgagaagctagctgaagagattaaaaaaggagctgcttctgttgaaggagtagaagcaaagctatggcaggtacctgaaacactgcctcaagaggtccttgggaaaatgggagcacctccaaagagtgatgtaccaattattacacccaatgagctacctgaggctgatggcttattgcttggtttccccacaag

SEQ ID NO: 195584 - DNA, 264 bp, Glycine max
gccaaaggaatcgatgacaatgattttctctccagcattgatccttatgtgattctcacatacagggcacaggagaaaaagagcactgtgcaagaagatgctggatccaagccacaatggaatgagagctttcttttcactgtctctgacagtgcatctgaacttaatctaaagataatggataaagacaactttagtcaagatgattgtcttggcgtggcaaccattcatctggatccagtgtttgaagcgggtagcattcca

SEQ ID NO: 195585 - DNA, 277 bp, Glycine max
ttggaaatggcagcggcaggttgtcagaagcttctggaattgagcacgaagatcgtcgctgttggcagaaactacgctgctcatgccaaagaactaggcaacgccgttcccaaggagccggtgttgtttctgaaaccgacgtcgtcttacttgagtaacggcggaaccattcaaatcccacacaacgagggctctctgcatcacgaggttgagctcgctgtggtcatctccaagaaagcccgtgacgtctccgaatcctctgccatggattacgtcg

SEQ ID NO: 195586 - DNA, 252 bp, Glycine max
gcttccttaagctccttagtgctgctccttgcagctctaattctatcccctcgcgttcttgcaaactatgagaatcccccagtgtacaagcctcccactgagaaaccaccagtttataagcccccagttgagaagcctcctgtttacaagcctccagttgaaaagcctccagtttataagcctccagtagagaagccaccagtgtacaagccaccagttgagaaacccccagtgtacaagccgccagttgag

SEQ ID NO: 195587 - DNA, 272 bp, Glycine max
ctggggatcatcatggttgcccctatcgacatttcagtgaagagaaccaccgagctgctcttagcggaatgggggtaaacagttcagcaatggccgatgtgatggacaaagtgagaaatagacattattcgttggcttgcaccttgacatttgaagctcttcatggcatgccgtgtgatgcagggattaaccatccaaatcaatacttcagtgacagtcaaaagatattaaagccaaagaaggattcttcagcctaagtattttagttattg

SEQ ID NO: 195588 - DNA, 270 bp, Glycine max
tctctctctctatctccgtgtttcattccaactgcaaaacaacaactcaattaagaaattcttctccggagccatggcagatctcaagtctacattcttgaacgtctattccgttctcaaatctgaactcctccacgaccccgccttcgagttctccgatgatgctcgccattgggtcgaccggatgctagactacaatgtgcctggaggaaagttgaaccggggactgtcagtcattgacagctacagattgttgaaagacggacaggc

SEQ ID NO: 195589 - DNA, 274 bp, Glycine max
ggaacttcttgtttggtgccttctgttctggagctagcaaaacaacccatcatcgaagttccagaacgatatgttcatgccaatcaagatccacatattctttccaacacaatttctttaccacaagttcccatcatagacttgcatcaattgttgtctgaagatccaagtgaactagagaagctggaccatgcgtgcaaagaatggggtttctttcagcttataaaccatggagtggaccctccagtggtggaaaatatgaagataggtgttc

SEQ ID NO: 195590 - DNA, 269 bp, Glycine max
aaaacaagtagtgttccgaaaagatggctcagcaggatgtggtagaagggttcaagttcgaacagcactccgggttctagcgcgtgagagtggcgcgcgtgtggaagacgaagcaggggcagcacttcgttgtggagtggcgcgtgggcatcactctcttctcagactgcgtctcctcgtatctccgcgatgacaactctgacatcgttgctactgataccatgaaaaacacagtgtatgcaaaagcaaaggaatgctcagacatactc

SEQ ID NO: 195591 - DNA, 267 bp, Glycine max
gcaacataccatcaaaaggatttatgtcagtcttactgctgggctacccactccagttgctgggcgtgttgaggttccagttggccgtgatcctaataatcggattcgtatgactgctgtagctggaccagttaattctagaaaggcccgtcatgctgctagtaggtacaaagtaattgagatacttgctggggggagttgttctttggttgagtggaagttggaaactggacgcactcatcagatacttcatgacacaactttgag

SEQ ID NO: 195592 - DNA, 265 bp, Glycine max
gcacatgccaagtgacaagacagttggcggtggtgatgatgctttcaatactttcttcagcgagactggtgctggaaagcacgtgccacgtgcagtgtttgtagatcttgagcccactgttattgatgaggtgagaaccggaacttaccgccagcttttccacccagagcagctcatccacggcaaagaagatgccgccaacaactttgcccgtggccattataccattgggcaagagattgctgatctgtgcttggaccgcatc

SEQ ID NO: 195593 - DNA, 249 bp, Glycine max
tgccgtcttcatggttcacttggctacaatccctgtcactggaaccggcattaaccctgcaaggagtttcggaccagctgtgatcttcaacaacgacaaagcctgggacgaccaatggatttactgggttggaccgtttgttggagctgcggtggctgcaatctaccatcaatacattcttagaggttctgcaatcaaagctcttggatccttcaggagcaacgcttaattaaaaaaaaaaaaaatcaa

SEQ ID NO: 195594 - DNA, 269 bp, Glycine max
catttttctagctccttctctcatcactcatctatggctacctttccctcccctccttcaccatcttcttcttcttcaattccgtctccaagatctagaatgttttactatgctggaagtgaagaccactatgaggagcctcacttcctccaagcttgttttctttgcagaaaaccactaggccaaaatcgtgacatcttcatgtacagagggaacacaccattttgtagcaaagagtgcagacaggagcaaatagagattgatgaggc

SEQ ID NO: 195595 - DNA, 267 bp, Glycine max
cagagactccataacccgaaaatgcctttcaagaggtacgttgagattggaagggttgctcagatcaactatggcaaagagtatgggaggctcgtggttattgtcgatgtcattgaccagaatagggctcttgttgatgctcctgacatggtgaggtcccaagtgaacttcaagaggctatcactcactgacatcaagatcgatattaagaggatccccaagaagaaggatctcattcaagccatggaggctgctgatgttaagaac

SEQ ID NO: 195596 - DNA, 264 bp, Glycine max
gccggcactaaacaacatggcggacaaggcagtcaccatccgaaccaggaagtttatgacaaacaggcttctctccagaaagcagttcgtcgttgatgtccttcatccagggagggctaatgtttccaaggctgaactgaaggagaagctttgaagaatgtatgacgtgaaagacaccaacactgtatttgtcttcaagttccgaactcattttggtggtggcaagtccctgggtttggtttgatctatgattcagttgagaat

SEQ ID NO: 195597 - DNA, 271 bp, Glycine max
tcactacaagctgcagctaccttcatgcaacccaccaaggtgggcatggccactcgcaacctcaaatctacacaatgcatttctaaggcttttggcttggaacccgctgcagctaaactcatttgctcccttaagcccgatctcaaagattttgctcaaaaatgtgtcgacgccaccaaaattgcaggattcgcccttgccacctcagctctcgttgtttctggagcgagtgcagaaggtgttccaaagaggctaaccttcgacgaaatcc

SEQ ID NO: 195598 - DNA, 205 bp, Glycine max
ctcgagccgaatcggctcgaggcgcagcgtagcaaaagctcgtgaccttgctagcaatggaccggatcaaggtttacgaactgaggcagaagacgaaggctgatctgctgaatcacctgaaggacctgaaggcggacttgccttgcttcgtgttgctaaggtcaccggtggtgcccctaacaagctttccaagataaaggtggtg

SEQ ID NO: 195599 - DNA, 236 bp, Glycine max
cgcaaacattgagccatggccgtcggaaagaacaagcgcatctccaaggggaagaagggtggcaagaagaaggcagctgatccctttgccaagaaggattagtatgacattaaggctccttctgtttttcaagtgaaaaatgttggcaaaaccctcgtctctcgtactcagggtaccaagattgcttctgtgggactcaagcatagagtgtttgaggtctcctggctgatcttcac

SEQ ID NO: 195600 - DNA, 264 bp, Glycine max
ctcaaagattaagccatgcctgtgtaagtatgaactaattcagactgtgaaactgcgaatggctcattaaatcagttatagtttgtttgatggtatctactactcggataaccgtagtaattctagagctaatacgtgcaacaaaccccgacttctggaagggatgcatttattagataaaaggtcaacacaggctctgcctgttgctttgatgattcatgataactcgtcggatcgcacggcctttgtgccggcgacgcatca

SEQ ID NO: 195601 - DNA, 264 bp, Glycine max
cacccattcatacgtggtgttgttactgctgctcttttctcttttcttttctctttagttctctcttcccctttctttttctttttcttcttcttctgagcttgtttaagcttttcttccattaacatattatcatcatgtgtggtattcttgctgttcttggttgttctgatgactctcgagccaaaagggtccgcgtgcttgagctctctcgcagattgaagcaccgtggccctgactggagtgggctccatcaacatggtg

SEQ ID NO: 195602 - DNA, 216 bp, Glycine max
cactcggaattcgggtctagggacatattgcacgtgcaaggtgggcaatacgcggaaccaatcggctcccagttctgggaagtgatatgcgacgaacacggcatcgaccccaccggaaagtataccggcgacgaggcctccgatctccaactggagaggatcaacgtctactacaatgaggcctccggcggaaagtacgttccccgggccgtcctc

SEQ ID NO: 195603 - DNA, 260 bp, Glycine max
ggtggccgcgacaagagactttggctttgttaaggatacgctccgacatggacgtagcgtttcgagatgcaagtgttcaaggtcccttgtgggaagaagtatccaggaaaatggcagagcttgggtatcacagaagctccaagaagtgcaaagacaaattcgagaacgtgtacaagtaccacaagagaaccaaagaaggtcgaagtgggaaacaagatggaaaaacatatcgtttctttgatcaactacaagcccttgag

SEQ ID NO: 195604 - DNA, 265 bp, Glycine max
cggcgaatccgccgtgctcattgagttgccgtctgccaccacgcctagagtgctcccacccaagagggtttataagcataacggctacttgatggtgtcgtgcaatggaagactcaaccaaatgagggctgcgatatgtgacatggtggcgattgcaaggtatttaaacgtgacgcttatagtgccggaattggataaagcgtccttttgggctgaccccagtgagttccaagatatctttgatgtggaccactttattacatcc

SEQ ID NO: 195605 - DNA, 266 bp, Glycine max
acgaaatttacgatagcttttgaaggtaccagtttttgtcatcactctctcagctgatcggtgcttatagatccagcgtcagcagattcaatttgacactggaagcaatttctcatttcaaagattaagtgaaaacatggttgtccttgctgcatccattgtgagcaaatctggcaaagttctagtttctagacagtttgtggacatgtctcgtatcagaattgagggtcttctagcagcatttcccaagttaataggcactggaa

SEQ ID NO: 195606 - DNA, 257 bp, Glycine max
agaagatgtcgaccgtaccaggacagctcatctgggagatcgtgaagaagaacaactcctttttggtgaaagagttcggaaggggcactcagagcgtgcagttcagcagagagcccaacaatctctacaacctcaacactttcaagtactccggtttggcgaaccagaaaactgtcactgttcaacctgctggtaaagaccagtccgtgttgctcgcaacaaccaagacaaagaagcaaaacaagcctgctgctttg

SEQ ID NO: 195607 - DNA, 253 bp, Glycine max
ctcacccattttcttcgtagccaaacactctgaaattctcagttatgtcgtggcaagcgtatgtggatgatcacctactgtgtgaaatcgaaggtaaccacctcactcacgccgctatcatcggccaagacggaagcgtttgggctcagcagcaccaacttccctcagttcaaacctgaggaaataactgccatcaataatgactttaatgagcctggatcacttgctccaactggattgtatatcggtggca

SEQ ID NO: 195608 - DNA, 261 bp, Glycine max
gggcttctctgtggacctgcctgatcttggtatcacttgcttctgcttccttcgccgccaacccaagagcaccaattgatgtgccatttggcagaaactatgtgcctacctgggcctttgatcacatcaaatacctcaatggtggttctgagattcagcttcatcttgataaatacacaggtactggcttccaatcaaaagggtcctacttgtttggtcacttcagcatgtacataaaattggttgctggtgattcagctg

SEQ ID NO: 195609 - DNA, 265 bp, Glycine max
gaggaaccctagctagggtttggaagaagctgatccgagaagatggtgcagcgtatcacctaccgcaaacgccacagctatgctaccaaatccaaccagcacagagtcgtcaagactcccggtggccagcttgtttatcagaccacgaagaagagggccagcggacccaagtgccctgtcactggaaagaggattcaagggattccacatttaaggccagcagagtataatagatcaaggttacacagaaaccgaaggactgtga

SEQ ID NO: 195610 - DNA, 263 bp, Glycine max
cggctcgagctcgagccgaatcggctcgagctcaattttctgagcagccaaacactcctctctctacctctacaaaattctcagtttgcagagaaaatcacgatcatgtcgtggcaagcgtatgtcgacgatcaccttctgtgtgacatcgaaggtaaccacctcactcacgctgctatcatcggccaagacggcagcgtttgggctcagagtaccgacttccctcagttcaaacctgaggagataactgccatcatgaatga

SEQ ID NO: 195611 - DNA, 254 bp, Glycine max
tttcctattttataatctctagcataattcagcatggccaaagacaagtacaggtctttcttgcatgatgaacctgataacgttcagtggagacatggtggccctcccacttatgatgctgttaacaagctttttgaagaaggaagaacaaaggagtggacagacggatcattggaggagatagtgcaaaatgctattaagtcatgggagatggagctctcacacaagacccgtttgcacgacttcaagacaat

SEQ ID NO: 195612 - DNA, 209 bp, Glycine max
agttcgaccacccaaggcacgggtcactgggatttctccccaggaagcgtgctgctcgtcatagtggacaagtgaaggcattccccacggatgagccatccaaggcacccaagctgcatgccaagcttgggttacaaggctggtatagctcacattgttagagaggtcgataagccatgatcaaagcttctccagacggaaacatgtgc

SEQ ID NO: 195613 - DNA, 261 bp, Glycine max
ctcacaacagcagctgcagcagcaatggctcccaaacgaggtggaaaggctccggctcttgccgctaagaagaagcctgagaaggtcacgaatccgttgttcgagaagcgtccgaagcagttcggaatcggaggggcgttgcctccgaagagagacttgactaggttcgtgaagtggccaaagaatgttcaaattcagaggaagaagaggattctgaagcagaggttgaaggttcccccagctttgaaccagtttaccaaa

SEQ ID NO: 195614 - DNA, 265 bp, Glycine max
cacccatccacaaacgaacacacactttgattgagaatggggcgtgttcgcacaaagacagtgaagaagtcctcgcggcaagtgatcgagaggtactactctcgcatgacgctggacttccacacgaacaagaaggttctggaagaggtcgccatcattccctccaagaggctccgcaacaagatcgcgggattctccacccacctcatgaagcggatccagaagggtcccgtacgtggaatctccctcaagctgcaggaggagg

SEQ ID NO: 195615 - DNA, 256 bp, Glycine max
gcacatgggcaatgttccatgtgaatatttgctactagcaccaagatctgctccgacgaccgctccgcccgggctcgcgccctgggttttgcagcgaccgccgcgccctcctactcatcggggcttagtccttgccccgacggccgggtataggtcgcgcgctttagcgccatccattttcggggctagttgattcggcaagtgagacgttatacactccttagcggatttcgacttccatgaccaccgtcctgct

SEQ ID NO: 195616 - DNA, 264 bp, Glycine max
cctcgagccgaatcggctcgagtccgcagcagccttcttcgccgttatcagtcaagagccacacgcaggtaagatatggttaagcctaacaacgttatccccaatgggcacttcaggaaacactggcaaaactatgtgaagacttggtttaatcaaccagcacggaagaccagaaggcgtttagctcggcagaagaaggctgtcaagattttcccaaggcctactgctggacctctcaggccaattgttcatggccagactctg

SEQ ID NO: 195617 - DNA, 258 bp, Glycine max
gatgacagacaaagcaagagagaatttcaataacttgcaacttgcctactccatattttcttttgatcacaatttaatatatggtatctagcctgtggtgtggccataacaagaagggagagtaaacaaaataatttaaggttgagatgaggaagtgtgagctctgtaacagtcccgcgaagttgttctgcgaatcagttcaagccaacctctggtggaaatgcgatgctaaggttcacagtgcaaacttcctcgtca

SEQ ID NO: 195618 - DNA, 236 bp, Glycine max
gtgaagtgagtagtgagtgctgaatcgagtcgaatcgattctccgaacatggcggcgagcgatcgcacagtgttgcaattgtcttcatcatcttcttcttcttcgcagatcttgtccgcgaaggtccaccctctggtcatcttcaacatctgcgattgctatgttcgacgccctgaccaagccgaccgcgtcatcggaaccctatcggctccgtcttcccgagggaacgtcgatat

SEQ ID NO: 195619 - DNA, 216 bp, Glycine max
cgattaccctagtttcaaactcgtcatcgtcggtgacggtggtacaggaaagacaacgttcgtgaaaaggcatcttaccggtgaatttgagaagaaatacgaaccgaccattggagtggaggttcacccattggatttcttcacaaactgtggaaagattcgcttctactgttgggatactgccggacaagagaagtttggtggcctcagggatgg

SEQ ID NO: 195620 - DNA, 247 bp, Glycine max
tcctcgagcgaatcggctcgagggaactgcaatttctatcaaccctcctgtgatttgggcttacgcaggactcctcatcaataccatcaacagcattcctgcaggagagcttgatggagggagaatttcgtttgccctatggggaagaaaggcttcattacgcttcacaggggtttcaattgcgttgctgggagtctcggcactgcttaatgatgtagctttctattgggtagttctgatattcttc

SEQ ID NO: 195621 - DNA, 253 bp, Glycine max
caaaaacatcgaaagagagaggcatggccgagcaaaccttcatcatgatcaagccagatggcgttcaaagaggccttattggcgagattattagcagatttgagaggaagggtttttacttgaaagggttgaaactcgttactgtggaccgtccttttgctgagaagcactatgctgatttgtctgcaaagcctttctttagtggtttggtggatcacattgtctctggccctgttgttgccatgatctggga

SEQ ID NO: 195622 - DNA, 233 bp, Glycine max
gggaaaaccgcaccgccgccgtagaagacaacaaccatggtgcacgtctccttttacaggaactatgggaagacattcaagaagccgcgtcgtccgtacgagaaggagcgtctcgacgcggagttgaagctggttggtgagtacgggcttcggtgcaagagagagctgtggatggtgcagtacgcgctcagccgcatccgcaacaacgcgcggatactcctcaacctcgacga

SEQ ID NO: 195623 - DNA, 242 bp, Glycine max
ctagaatcccatctcataagcttagcaatggcctctacgtatcaggacggccggagcagcccaaagaaagaactccaacaatgacatcaacagccgtgccatataccggtggagacatacaaaagtctggagaattggggaagatgtttgatattcctgttgatggctctaaatctaggaaatctggaccaataacaggtgctccatcacggactggatcttttggaggagctggttcgcat

SEQ ID NO: 195624 - DNA, 255 bp, Glycine max
aatcactctagctgttgcaaatttctactatttttcaatggcttctgcagatgttgagatccgttgctttgttggtgggcttgcttgggtcaccggcaacgatgccctcgagaaagccttttcaatctacggcgacatcgttgaatcgaaggttatcaacgaccgtgagactggaaggtccagaggattcggatttgtgaccttcgcctcagagcagtcaatgaaagatgcgatcgcaggaatgaacggccagga

SEQ ID NO: 195625 - DNA, 255 bp, Glycine max
caaccctgacactccttcttctcagcttcctcttcgatcatcgcttcagaatgccgccgaagttcgacccctcccagatcgtcgacgtcttcgtacgcgtcaccggcggtgaggtcggcgcggcgagttccctcgccccgaagatcggtcccctcggtctctcccccaagaagatcggagaagatatcgccaaggaaaccgccaaggactggaagggcctccgcgtcaccgtcaagctcaccgtgcagaaccgtc

SEQ ID NO: 195626 - DNA, 253 bp, Glycine max
ggtcgcggaggatcggcagggaacaagttccgcatgtcactgggtctgccggtggcggcgacggtgaactgcgccgacaacaccggcgcgaagaatctctacatcatatcagtgaaggggatcaagggaaggctgaaccggttgccgtcagcttgcgtgggtgacatggttatggccaccgtcaagaagggaaagcctgatctccgtaaaaaggtgctccccgccgtcatcgtccgtcagcgccaaccgtggc

SEQ ID NO: 195627 - DNA, 254 bp, Glycine max
gctggtgctcctttgtcatctcatcctgacgtagacaagatttcctttactggaagctctgcaactggaagcaggattatgacagctgcagcacagctaacgaagcctgtttctctagagcttggtggaaaaagcccaatcattgtttttgaggatgttgtccttgataagactgctgaatggaccatctttggctgcttctttacaaatggtcagatatgcagtgcaacatctcgccttattgtgcatgaaag

SEQ ID NO: 195628 - DNA, 253 bp, Glycine max
agggtatctatatttccacaaggcaccaaacatagaagagtttcatcaagaaacatgccgcaagattaaagcactccacaaatatgattgcttgcgagccaataaatcgacctttgcctggggtctagaagccagagtgccatttttggacaaagattttatcagagttgcaatgaacattgatcctgattataaaatgattaaaaaggaagaagggcgacttgagaaatgggtactgaggagggcctttgat

SEQ ID NO: 195629 - DNA, 273 bp, Glycine max
cgttatcatttctccatttccattttctctctcacttttcaagaatcgtaagctatgggaaagtcttacccaactgtgagtgctgattaccagaaggccgttgagaaggcgaagaagaagctcagaggcttcatcgctgagaagagatgcgctcctctaatgctccgtttggcatggcactctgctggaacctttgacaagggcacgaagaccggtggacccttcggaaccatcaagcaccctgccgaactggctcacagcgctaacaacggt

SEQ ID NO: 195630 - DNA, 214 bp, Glycine max
tggaagtgcatcagaaacgtgaagccaagccattactggtgcacccttcaataggagtgtttttcccttctggttttctatttggaataggctctcgcagcttaccagatagaaggagcagcagctatagatggcagaggaccaagtatatgggacacctatactaaacagcaaccaggcaagatttgggatcatagtgatggaagtctagcaa

SEQ ID NO: 195631 - DNA, 267 bp, Glycine max
cgcctcgagtctagatcgcgagcgccgcccttttttctttttttttttgaaataaacacaaacatcctttattacatagatctcaaatctagtttggactcaacatatttaattccaataaagggagcaaaatcgtttgaaacgttttttttcaggaaaacctcaattttatcataagccgattgcagagcatcaaaaagctaaactcttaacaggccttggtccccggggaatttcaccatccaatccggggttcagggcgctaaa

SEQ ID NO: 195632 - DNA, 279 bp, Glycine max
cggaatgcggctcgagcatgccgcaggagctgctgcacctgctggaagtcaccaaaatcgggtgtctgttgctgagttcatagttggccgtggctttggaactgtcattagacatcgtgactttgcagacagatctaactattatgatggtctgtctggtggtgaatcacgtgcaatttctggacggaaaggcacccactctgccaaggatcctccagtgatgcatatgaactgatttgaccacggcatcggctaagaaagccagacacttcttgcctt

SEQ ID NO: 195633 - DNA, 267 bp, Glycine max
cgaggtttggactcttctttggttgcatccatcacttctcgttacttcgccaacacaaaggatcctgagcagtggggatcaaagttacattcattctgtgtaggccttgagggctcaccagatttgaaggctgcaaaagaggttgctgactatctaggcactgtccaccatgagtttaccttcactgttcaggatggaatagatgccattgaagatgtcatctaccatattgaaacatatgatgtgactacaattagagcaagcaca

SEQ ID NO: 195634 - DNA, 263 bp, Glycine max
ccggggtcccagtcccgaacccgtcggctgtcggtggactgctcgagctgcttccgcggcgagagcgggtcgtcgcgtgccggtcgggggacggattgggaaccggcccttcggggcctcttccccgggcgtcgaacagtcaactcagaactggtacggacaaggggaatccgactgtttaattaaaacaaagcattgcgatggtccctgcggatgttgacgcaatgtgatttctacacagtgctctgaatgtcaaagtgaag

SEQ ID NO: 195635 - DNA, 271 bp, Glycine max
gttttggaagcagagaccgaaatacttcgagatggcccgtacaaagcaaactgctcgtaagtcaactggaggaaaagctcccaggaagcagcttgcaaccaaggctgcacgtaagtctgcaccaacaactggtggtgtgaagaagcctcatcgttatcgccctggaactcttgctcttcgtgagattaggaaataccagaagagcactgagctccacatcaggaagcttcctttccagaggttggttcgtgaaattgcccaggatttcaag

SEQ ID NO: 195636 - DNA, 266 bp, Glycine max
actcttcttcatattcttcttcttcttcttgttcttgttctatctgtgacgagcatcatggcctcgagagcagtgctattgttggctatgtgtgtgcttccggccatggttgtggccattcgcccagcaaagaaccctttttgcgtgaagggtcgcgtctactgtgacccttgccgtgctggttttgagacctcagcaaccacctacattgccggtgctgagattatgttgcaatgcaagagcagggttagcaacgaggttgtgta

SEQ ID NO: 195637 - DNA, 266 bp, Glycine max
accgacacagatctgtcttccgaagcaggaactaaatatggctgacttgttggaatggtcaaagcaagataagaaacgaatgcttcatgtcgtctaccgtgttggtgaccttgatcgcaccatcaaattttacacagaatgtttaggaatgaagcttttgaggcaaagagatatcccagaggagaaatatgctaatgcttttcttggatttggccctgaagaatcccattttgttgttgaattaacatataattatggggttacct

SEQ ID NO: 195638 - DNA, 266 bp, Glycine max
taaatatggctgacttgttggaatggtcaaagcaagataatgaacgaatgcttcatgtcgtctaccgtgttggtgaccttgatcgcaccatcaaattttacacagaatgtttaggaatgaagcttttgaggcaaagagatatcccagaggagaaatatgctaatgcttttcttggatttggccctgaagaatcccattttgttgttgaattaacatataattatggggttacctcgtatgacattggcgatggctttggacatttt

SEQ ID NO: 195639 - DNA, 266 bp, Glycine max
cgaggtttggactcttctttggttgcatccatcacttctcgttacttggccaacacaaaggctgctgcgcagtggggatcaaagttacattcattctgtgtaggccttgagggctcaccagatttgaaggctgcaaaagaggttgctgactatctaggcactgtccaccatgagtttaccttcactgttcaggatggaatagatgccattgaagatgtcatctaccatattgaaacatatgatgtgactacaattagagcaagcac

SEQ ID NO: 195640 - DNA, 266 bp, Glycine max
catctgatctgctgaaacacgccacactcttcttaccacgggcctcctcgatcacttgtgggatgacaccgtcgccggtcctcgcccggagaacggccttggcaagctccgaaagcaccacaccttcgctttccgatctgcctccggcaagggtacgcatgcgcatgcccttgctgaacttaatttcccaaattcattttagttattctaaaaataatgataataataataacaagaaccgcagcaagaattagttcttatgatct

SEQ ID NO: 195641 - DNA, 268 bp, Glycine max
gtaaaatcgccatctgtgaaacgagtcatcttaacatcttctgtggctgcagttgcatataataaaaggcctaaaagtcctgaagttgtagttgatgaaacctggtggtctgatccagattactgtagggaattaaagctgtggtatttactttcaaagactttggctgaagatgctgcctggaaatttgccaaagaaaacgaccttgacttggttgttgttaacccagcaatggttgtagggcctcttttgcaagcagagcttaaca

SEQ ID NO: 195642 - DNA, 268 bp, Glycine max
actcagtgtaccattgctcacgcacttgagaagaccaaataccccgaatccgacatttactggaaaaaattggaagagagataccacttctcttgccaattcacagctgatctatttgccatgaaccacacagatttcattaacaagcagtaccttccaggagattgctggaagcaaggacactgttggacagtacgaatctcacacagccttcacccttcctggactctaccgcgttgtgcatggtattgatgtctttgatccaaaa

SEQ ID NO: 195643 - DNA, 265 bp, Glycine max
caaggcagcgactgccaggcaagggaagcatctttagctccaaatccaatggcggatacctcaagccgatcaagagacctcgacaagctccttctccgccctggcaatctcgtcggtcctaggttcgaacctggccctgagttgcgagatgaccttcaggccttcgccaaagtgttggtggttggggctggtggcttgggttgcgaattgttgaaggatttagccctctctggtttccgaaaccttgaggtcattgacatggatc

SEQ ID NO: 195644 - DNA, 266 bp, Glycine max
cagactgtgaaactgcgaatggctcattaaatcagttatagtttgtctgatggtatctactactcggataaccgtagtaattctagagctaatacgtgcaacaaaccccgacttctggaagggatgcatttattagataaaaggtcaacacaggctctgcctgttgctttgatgattcatgataactcgtcggctcgcacggcctttgtgccggccacgcatcattcaaatttctgccctatcaactttcgatggtaggatagtgg

SEQ ID NO: 195645 - DNA, 257 bp, Glycine max
  unsure (1)..(257): unsure at all n locations
gtttatcgtgaggagaatatgaagttgtttgtcttctttgttgctgcagtagttttggtaccatggccatgccatggcgcaggctaccaaaggttccctctccgcatgaaaactggctatggtgagcgttcttcggaggtaaaatgcgcaagttttaggcttgctgtggaagcacacaacataaaaaaccagaaaannattcctgaagagtgcgttgaannaanaaaggagtagattaatggagaagaatttagatg

SEQ ID NO: 195646 - DNA, 260 bp, Glycine max
cagatccgccatggcctccaccaaggaacgtgaacagttcgtctacgtcgccaagctcgccgaacaatccgaacgctatgcagaaatggtggaagcaatgaagaatgtggcgaactaaacgtggaattgacggtagaggtgcggaaccttctgtcggtcgggtacaagaacgtcgtgggtgctcgtagggcttcgtggaggattctttcctcgattgaacagaaagaagaagctaaagggaacgatgtgagcgtgaagag

SEQ ID NO: 195647 - DNA, 263 bp, Glycine max
gttgcgaggcactttgagatacctcttggcaaatcttcatgattggaaaacagaatacactgttccataccatgaacttcccaggatcgatcaacatgcactttttcagcttgaaaatgttgtaaaagccattcaaggaaattatgaaaattaccagttttttaaaatatttcagattttgcagaggtttgttattgttgacctgtcaaatttctattttgatgttgccaaggatcgactttatgttggtggatcaacaagtt

SEQ ID NO: 195648 - DNA, 266 bp, Glycine max
ctctctctctctcaaccataatagtcatgggtttgaaggaggatactgagcagtatgctgagaaagcaaagactttgccaccgactcaatcaaacgaagacttgcttatcctttatggattgtacaaacaggccaccgttggacctgtcaacaccagccgtcctggaatgttcaacatgagggacagagctaaatgggatgcatggaaggctgttgaagggaaatccaaggacgaagcaatgggtgattacatcattaaggtgaaa

SEQ ID NO: 195649 - DNA, 262 bp, Glycine max
ctcgagccgcgagacgcctcacgagggtcaccaacggcacgtgcctttcgcgggccgggaccctactgctggtcggcaaacggacggcgggcgcacgcgtcgcttctagcccggattctgacttagaggcgttcactcataatccaacgcacggtagcttcgcgccactggcttttcaaccaagcgcgatgaccaattgtgcgaatcaacggttcctctcgtactaggttgaattactattgcgacactgtcatcagtaggg

SEQ ID NO: 195650 - DNA, 265 bp, Glycine max
ctgtctcctcctcaatcttcattgtcctgttctttcccttggtgacaaaccaagactaacacacacagaacatagcttgtgttggtgaggtgagaagataaagaaagaatggcatttgcaggaacaacacagaagtgtatggcctgtgacaaaaccgtttatctggttgataagttgaccgcggataaccgagttttccacaaagcttgcttcacatgccatcactgcaaaggaaccctcaagctgagcaactacaactcttttg

SEQ ID NO: 195651 - DNA, 263 bp, Glycine max
ctccatacctcaacgaagaggttaaagagacggcaacactttgctgtccgccttgaccgagcagagcttcgtcttggccctcgattttgccctaaagtactctcagtcacaacagacaccgtcgtcgtcgtcgtcgtcatcaatggcaccgaagcagaccaaggctgagaagaagatcgcttacgatgcgaactgtgcgacctaatggaggagtacggccagatcctcgttgtgaactccgataacgtgggatcgaaccagct

SEQ ID NO: 195652 - DNA, 261 bp, Glycine max
cgcaaaccaatttgtgaatctgcaattatagtgcagtacattgatgaggtctggaatgataaagctccaatcttgccctctgacccttatgagagagctcaagccagattctgggtagattacattgacaaaaaggtgtatgacacttggaggaaaatgtggctttctaaaggagaggagcatgaggcagggaagaaggagtttatctctatctttaagcagctagaagagacactgagtgacaaagcttattatggaagt

SEQ ID NO: 195653 - DNA, 261 bp, Glycine max
aaaatttgaaggctaaaccagggtcagtggtgtcagtagatattgaaacagccacgcagttggacattgttgccgagtttgagatagacaaggaaacccttgacaaaattcctcaatccaacgaggaatacacgtgcagcaccagtggtggatctaaacaacgtggtgccttaggaccttttggtcttttggttttggcagatgaggggctttctgagtatactcctcagtatttttatgtcattaaagggagcaatggaa

SEQ ID NO: 195654 - DNA, 267 bp, Glycine max
cgcacttcgttgcttggtgatgtccctttctgttctcttcactcttggtcttgcgagacaaagccatgccagacacgaagatttttggcatggctgtttggccaaacactcccattccaagttcattgcgagaccttctaaagcctggccctccaagtcttgaaatcgatgatcaacctatgcaaattgaagaaacacagtaacccgaaaaccttcttctataaagaagagcttcatccaggcaaaacaatgaaagtacaattcagc

SEQ ID NO: 195655 - DNA, 259 bp, Glycine max
gcttgtcttgtttgtcgctacagttttggtatcatatgaatggcatggctcagactaccagaagttccctctccagatgtacactgggtttggtgggcaatacagcaatgaggtggcatgtgccagttggagtcttggcgtggaagtaaacatcgtagtcaagtggcaaactgttcctgcagcttgtggagagtacatagctgactacgttctagcagaccaatatagatcagattccataacagttaaccaactagct

SEQ ID NO: 195656 - DNA, 261 bp, Glycine max
ctcgagccgaaacaaggcaaaagtagtacgagaataattgatatacataaaaaaaaaaaaaacagaccaccctgagcaaaaggacccaaacttcaacaacaatttgatagctacgtgtcccaatgccgagtcccccaacaccgttaatttggacgtgagaacccccgtgaaactcgacaacatgtattacatcaacctcttgaaccgccaaggagtgttcacttctgaccaggacactccgggcagccccaaaaccaagga

SEQ ID NO: 195657 - DNA, 260 bp, Glycine max
agcagcagagcttgtatacgtcgccgcttcaggtagaacatgatcattcccgagaagaaccgtaaagagatctgcaaatacctcttccaagagggagtttgctttgcgaagaaggacttcaatctggcgaacacccggagattgatgtgtcgaatctgcaggtgataaagctgatgcagagcttcaaatccagagagtacgtgagggaaacatttgcgtggatgcactattactggttcctcaccaacgatggaattgag

SEQ ID NO: 195658 - DNA, 262 bp, Glycine max
acacatactaagacgcaagaattcttctacaatggatctcctccttctggaaaagaccctcataggtctcttcctcgctgcggtggtcgccatcgccgtctccaccctccgcggccggcaattcaagctcccaccgggcccactccccgtcccaatcttcggcaactggctccaagtcggccacgacctcaaccaccgcaacctcaccgatttggccaaaaaattcggtcacatcttcctcctccgcatggggcagcgcaac

SEQ ID NO: 195659 - DNA, 258 bp, Glycine max
aggagctgatgttgcagagagtgttgcccaattcgcaaggaggcgtcagcgtggggtttgtgtgctcagtgggagtggctcagtggccaatgttacacttagacagccttctgctcctggtgctgtggtggcacttcatggaaggtttgaaattttgtccctaaccgggactttcctacctggccctgctcctccaggatccacaggactcaccgtgtatctggctggaggacaaggccaggtagtgggagggagtgt

SEQ ID NO: 195660 - DNA, 263 bp, Glycine max
  unsure (1)..(263): unsure at all n locations
cttggatgnncaggggatgggaattcctgttggtaaattggcnttgtacacagcactaggaaancgttagaccatcngcatgtttgcctattacgattgatgtggggacaaacaatgagaaattacnnaatgatgagttttacattgggcttanacaaaagagggcaactgggcaggaatattctgaacttttgcacgagttcatgactgctgtcaagcaaaactnacggagaaaaagttcttgttcagtttgaagattttgc

SEQ ID NO: 195661 - DNA, 262 bp, Glycine max
cttgacgccattggccattgagttaagtaagccgcatcctcagggcgaaggatatggtcctgttagcgaagtctacgtgccttcgagcgagggagttgaagcttacatttggttactggcaaaggcttatgttgttgtgaatgattcgtgctaccatcaactcgtcagccactggctaaacactcatgcggttgttgagccattcgtcatagcaacaaacaggcatctgagcgtggttcaccctatttacaaacttttgttt

SEQ ID NO: 195662 - DNA, 259 bp, Glycine max
agaaattagggttcatatctcatttcctctgatttcatctcagatttcgccttcgttcgtatcgaagaagaagaagatggggaaacagattgtgccggtgaaatcagtgatctacgcgctctcccctttccagcagaagataatgccgggtctctggaaggacttgcccacaaagattcaccacaaggtctccgagaattcgatcagcgccactctcttgcttggtcccctcgtcggaacctacacgtatgttcagaac

SEQ ID NO: 195663 - DNA, 258 bp, Glycine max
atttctatatcctgatttagcgtgggacttccgtttgccgttggtgaaaagcatcaatgttagtggtcacaagtatggtcttgtctaccctgctgttggttgggttgtatggaggagcaaagatgacttgccagatgaacttgtttttcacataaattatcttgcatctgatcagcccactttcacattgaatttctccaaaggatctagtcaaattattgctcaatattatcaattgattcggcttggctttgaggg

SEQ ID NO: 195664 - DNA, 259 bp, Glycine max
cctcgagccgctcgagccgattcggctcgagcttggaatggtcaaaccaagataagaaacgaatcgttgatgccgtctagcgtgttggtgaccttgatcgacaccatcaaattttacacagaatgtttaggaatgaagcttttgaggcaaagagatatcccagaggagaaatatgctaatgcttttcttggatttggccctgaagaatcccattttgttgttgaattaacatataattatggggttacctcgtatgaca

SEQ ID NO: 195665 - DNA, 260 bp, Glycine max
ctcgagccgctctgcttttgctagtgattgtcttcatacaggaacacgaacaatgaagaatgcaaagggcaagggagcagcaagggcctcaaaagaatcactgaagcccgttgatgaccgaaaggttggaaagcggaaggcttccggtaagcctgggacacgtagtgcaccaaagaaggagaagaaggccaagaaagaccccaacaagcctaaaagaccacccagtgctttctttgtgttccttgaggagttcaggaaga

SEQ ID NO: 195666 - DNA, 258 bp, Glycine max
gttttcttcgttgctacaattttcgtagcatggcaatgccatgcgtacgatatgttccctctccgaatgaacactggctatggtgcccgtactccggaggtgacatgcgcaagttggaggcttgctgtggacgcacacaacatctttggctttgagaccattcctgaagagtgcgttgaagcaacaaaggaatacatccatggcgaacaatatagatcagactccaaaacagttaaccaacaagcttacttttatgcc

SEQ ID NO: 195667 - DNA, 257 bp, Glycine max
ctggccgctggcagcagaccgccgtcgccgaagacgacggcggggaagctgctgaaccggttcgtggagagcaaggcgtcggcggtgtcgctgcaggtgggggaacacgtgcagttggctacacacacaccacaacgaatcaccgtggcatcccagatcatttgctgttaaggatgagatattctgcttgtttgagggggctctagacaatttgggcagcctgagacaacagtatggactggccaagtcagccaatg

SEQ ID NO: 195668 - DNA, 251 bp, Glycine max
aattttccccggccagcgggaaatggtggacccggtggagcttcgcggcgaggagcagctctcgttgctgtcagattccaggaatggtgacgggcggacgcggttgaacttcgacgggtttcagctatcttcggagcacacggataagcaagtgaaaccccctcgcggactccatgactgtcatggggctcttggtcaagaagataatattgcggatactagcagcagcaggtagaagtgcttgagggctt

SEQ ID NO: 195669 - DNA, 258 bp, Glycine max
aagaaagactcccaggcgaggagaaagatggaggggaaggagcaggatgtgtcgttgggagcgaacaagttccccgagagacagccgattgggacggcggcgcagagccaagacgacggcaaggactaccaggagccggcgccggcgccgctggttgacccgacggagtttacgtcatggtcgttttacagagcagggatagcagagtttgtggccacttttctgtttctctacatcaccgtcttaaccgttatggga

SEQ ID NO: 195670 - DNA, 261 bp, Glycine max
cttagaacccccttcgcccttcggattccgccaccgccataacgccatagctgccggcgaacgatttccgggtttgttactttcacctcaaagttcctatctttaccctcgacatggcgaaggtaacaagctcaaaactgaacattgcaataattcacccagatcttggcataggtggagctgaaagattgattgtggatgctgctgttgagcttgcatcccaaggccataaagttcatgtttttactgcacatcatgata

SEQ ID NO: 195671 - DNA, 256 bp, Glycine max
ctcgccctcaccgtcgagaactttctcgagcgccgcctccagacccctgttttcaagtccggcatggccaagtccatccaccatgctagggttcttatcaagcacagacatatcagggttggtaggcaagtggtgaacatcccatctttcttggtaagggttgactcacagaagcacattgacttttcacttacaagtccccttggtggtggtcgccctggaagagtgaagagaagaaaccaaagggctgctgcta

SEQ ID NO: 195672 - DNA, 252 bp, Glycine max
cctaccttttcccgtgtacgaacgaatccaatccaccaaatcggcggccacgctccgctctgtctcgaaaccacagatctgccgcggaaccgccgtctccgactatctccgattgatcttccggtaaagtggaccggagatgccggttcccgcttccgacatttacttcctcaacctccgcggcgacgttctcatcaaccgcctctatcgcgacgatgtcgggggaaatatggtggatgcttttaggacgca

SEQ ID NO: 195673 - DNA, 257 bp, Glycine max
ccttccgaagcgacaagcagcacccactctctcttctcggaccttccaaacatggaacgcatacttggcggcaagtaccagctcgggcgcaagatcggaagtggatccttcggcgaaatctacctcgcgacgcatattgataccttcgagatcgtcgccgtcaagatcgagaatagtaaaacaaaacatccccaactgctttacgaggtggcattcctaacataaaatggtccggcatagatggggaggataatgtg

SEQ ID NO: 195674 - DNA, 258 bp, Glycine max
ccaccctacacctctaacctcgacactctccttgtcgcctctcgcgacggttccgtcgcatcctactccatctcttcctccgtcgtcgcctctaagctcaaaaatccattcggttttgtcaatgccgatacagatgagttattggctgaaccaaattgcttcgttcaagcgcacgctggacctgcttacgatgtcaagttttatggtgacggcgaagatgctctgttgctgagctgtggtgatgatggtcagattcga

SEQ ID NO: 195675 - DNA, 249 bp, Glycine max
ctggacatggcagcggcacgttgtcagaagcttctggaattgagcacgaagatcgtcgctgttggcacaaactacgctgctcatgccaaagaactacgcaacgccgttcccaaggagccggtgttgtatctgaaaccgacgtcgtcttacttgagtaacggcggaaccattcaaatcccatacaacgagggctctctgcatcacgaagttgagctcgctgtggtcatctccaagaaagccgtgacgtct

SEQ ID NO: 195676 - DNA, 271 bp, Glycine max
gctcgctattcggcactctctatctctctctctgcaaccaaatggcaacttctaccaccgtacctaacggtaccctcccctccggttccgtcaacggacgcttagcctctgtctacagtgaggtccaaaacacgcgcgtggaccacgcgctccctctcccctctgtcctcaagcatcccttcaccattctccacggtcctccaagctccgccgccggaaatccagacgagatcgcgaagtgtgttccgcatttgttcggacaaccttccgc

SEQ ID NO: 195677 - DNA, 263 bp, Glycine max
caaaaatctcccttctaaccttattcttcttctcgtccttcaccatcattgcgcatgcaattgttcctcacaacgtaacttacaatttgagaactcaggtgaacttggaccctacatcgttgagtacggtgcagattactgaatgataagcatcttcaactctccattccaagttgggttctacaacaccaccccaaatgccttcactctagctttgcgtgtagggctccaacgctcggagcagctatttcgttgggtttggg

SEQ ID NO: 195678 - DNA, 261 bp, Glycine max
tcggctcgaggcttgttttgtttgttgctacagttttggtagcatatgaatgccatggctcagactaccagaagttccctctccaaatgaaaactgggtttggtgggcaatacagcaatgaggtggcatgtgccagttggaggcttggcgtggaagcaaacaacgtagtcaagtggcaaactgttcctgcagcttgcggagagtacatagctgactacgttctaggagaccaatatagatcagattccaaaacagttaacc

SEQ ID NO: 195679 - DNA, 259 bp, Glycine max
agtttccacactgcataccttacgtcttccgaattcgaagttaatttgcaagatggctaaggaaaaggctcagatcaacattgtggtggttggtcatgtggaccctgaggaggcaaccaccattaacgagctgaagaagcctgttgtggagaaagaagctccagggcatgccatatgagggcatgcacgtacggcctcggaggggaaccagaaaattatgttaacaaaataatctggaaccctaatgtatcagtgtcat

SEQ ID NO: 195680 - DNA, 257 bp, Glycine max
  unsure (1)..(257): unsure at all n locations
tggtgctcttagcttcttggtgcttggtgactggggaagaagaggtgcttacaaccaatcactagttgctttccagatgggaaaggttggagagaagcttgatatcgactttgtagtttccactggagacaacttctatgacaatggactgactagtgaccatgacaacgcgtttcaagaatcattcactanaatttacacagcacaaagcttgcaaaatcagtggtacagcgtgttaggcaaccacgactataggg

SEQ ID NO: 195681 - DNA, 256 bp, Glycine max
cctcgagccgaatcggctcgagaagccatgcatgtgtaagtatgacctaattcagactgtgcgactgcgaatggctcattagatcagttatagtttgtttgatggtatctactactcggataaccgtagtaattctagagctaatacgtgcaacaaaccccgacttctggaagggatgcatttattagataaaaggtcaacacaggctctgcctgatgctttgatgattcatgataactcgtcggatcgcacggcc

SEQ ID NO: 195682 - DNA, 263 bp, Glycine max
agggaatagtgctgcaatggcttcaagtcaggaggaggtgacccttttgggagctactggaagcccatttgtgtgcagggttcatattgccctcaagttgaagggagttcaatacaaatatgtcgaagaaaatttgaggaacaagagtgaactgcttctcaaatccaacccagttcacaagaaggttccagtgtttattcacaatgagaagcccatagcagagtctcttgtgattgttgaatacattgatgagacatggaaga

SEQ ID NO: 195683 - DNA, 260 bp, Glycine max
gggaaagggaggtaagaacaggaagaggggaaagaacgaggcggacgacgagaagcgagagctggtgttcaaggaggacgggcaggagtacgcgcaggtgctccggatgctgggtaacgggcggtgcgaggcgatgtgcatcgacgggacgaagaggctctgccacatccgcgggaagatgcacaagaaggtgtggatcgccgccggagacatcatcctggttggactcagggactaccaggacgacaaggctgacgtca

SEQ ID NO: 195684 - DNA, 259 bp, Glycine max
gttggaacacaagagaggtctgattaatactagttttctgtaaaatcgcaaagaaacacacagttagcaccgtcaacctctgcaaccaccgattccaaccatgcttcccctttcccttctcaagactgcccaaggccaccccatgctggtggaactgaaaaatggggagacttataacgggcacttggttaattgtgatacatggatgaacatccatctccgagaagtcatttgtacctctaaagatggagatagattt

SEQ ID NO: 195685 - DNA, 254 bp, Glycine max
ctagttgtttaaagtaagagagaagaaagaagcaaatggcaaactttccagttgttgacatggggaagcttaacaccgaagagagacctgcagccatggagattataaaagatgcctgtgagaactggggtttctttgagttggtgaaccatgggatatccattgagcttatggacacagtggagaagctcacaaaagagcattacaagaagactatggagcaaaggttcaaagaaatggtgaccagcaaaggt

SEQ ID NO: 195686 - DNA, 259 bp, Glycine max
cacttttcaagaatcgtaagctatgggaaagtcttacccaactgtgagtgctgattaccagaaggccgttgagaaggcgaagaagaagctcagaggcttcatcgctgagaagagatgcgctcctctaatgctccgtttggcatggcactctgctggaacctttgacaagggcacgaagaccggtggacccttcggaaccatcaagcaccctgccgaactggctcacagcgctaacaacggtcttgacatcgctgttagg

SEQ ID NO: 195687 - DNA, 261 bp, Glycine max
ggtatccttatagattggctgcaatattaccctttttcatttttgaagtatcgtttgaaattgaagtacaatggcactttccttcagggaagaaagagatacctttggagccattcaagttccctccgagaaattatggggagcacaaactcaaagatcgttgcagaacttcgatatcggtgggccccgcgaacgcatgcccgaacccatcattcgcgcctttggcgtcttgaagaaatgcgctgctaaggtgaacatgga

SEQ ID NO: 195688 - DNA, 257 bp, Glycine max
ctagtcacagacaccgacacagatctgtcttccgaagcaggaactaaatatggctgacttgttggaatggtcaaagcaagataagaaacgaatgcttcatgtcgtctaccgtgttggtgaccttgatcgcaccatcaaattttacacagaatgtttaggaatgaagcttttgaggcaaagagatatcccagaggagaaatatgctaatgcttttcttggatttggccctgaagaatcccattttgttgttgaattaa

SEQ ID NO: 195689 - DNA, 257 bp, Glycine max
ctgggtagctgcagggaagcagccagatcttgagaagaatgtgggtgttggagggtatggttatccagctttagtggcccttaaccttaagaaagctgtttatgctcctctcaagagtgcttttgaacttgaccaaattatagaatttgtgaaagaagctggacgtggaggcaaagggaatttgcccattgaaggaactccaacaattgtaaagacagaaccatgggatggaaaagatggagaaataattgaggagg

SEQ ID NO: 195690 - DNA, 256 bp, Glycine max
ctcgtccttacattacaagacaaattcacagtctaaacaagaaattcagaaaattaagctttgggtgaatggagaacctaatttctttggtgaacaaaatccagagggcttgcaccgctttgggtgaccacggcgaacaagtgccttacccactctctgggactctctccccgctatcgccgtcgtcggtggccagagctctggaaagtcctcagtattggaaagtattgttggcaaggatttcttacctcgtgga

SEQ ID NO: 195691 - DNA, 256 bp, Glycine max
gccggcgctgaggcctccctcaatcacaggcgcaaacaccaaacagctcccgccgacggcgctaaaggcgttaaggtagcaaacggagccatggggaagccgtcctcttccaagcactcctgcggcgcgtcgttcatgaaatggaccgtggctgacgctgtccacgtggtgacgcaccattggatgccgtgcttgttcgcattggggcttctcttcttcatggccgtggagtacacgcttctcatggtgccgccgt

SEQ ID NO: 195692 - DNA, 255 bp, Glycine max
ccaattcccaattcgaaacccttattcctttcaaagaaccaaattgagtgatcgacatggcaccaaaggcagagaagaagccagcggagaagaagcccgcggaggagaagaagtcgacggtgggagacaaggctccggcggagaagaagccaaaggccggaaagaagcttccgaaggagggaggcgccggcggagaagggaagaagaagaagagaaacaagaagagcgtggagacatacaagatctacatcttca

SEQ ID NO: 195693 - DNA, 255 bp, Glycine max
atggcgcgtacaaagcaaactgctcgcaagtccaccggcggcaaggctccccggaagcagctggcgacgaaggccgctcggaagtctgctccggcgaccggcggagtgaagaagccgcacaggttcaggcctggaacagtggccctgagggagatcagaaagtaccagaagagcacggagcttctgatccgaaagcttccgtttcagcgtttggttcgtgaaatcgctcaggatttcaaaacggatctgaggttt

SEQ ID NO: 195694 - DNA, 258 bp, Glycine max
gaatgaccctctttactggtagttcaagagtggcagataaattggctgttgatttgaaaggtcgcgttaaattagaagatgctggatttgactggaaaatactgggccctgatgtccatcaggaagattacatagcgtgggtctgtgatcaggatgcatatgcatgcagtggtcagaaatgctcagcacaatcattgttatttatgcatgagaactggtctaaaacttccttgctatctaagttgaaagatcttgctg

SEQ ID NO: 195695 - DNA, 252 bp, Glycine max
gtacatggaagcaagaccattggaggaaggtcttgccgaggccattgacgatggcaagattggaccaagggatgaccccaagattcgctccaagatcttgtcagaacagtttggttgggacaaggatctcgccaagaaaatctggtgctttggccctgagacccttggacccaacatggtggttgatatgtgtaagggagtccagtatttgaatgaaatcaaggattctgtggttgctggattccagtgggc

SEQ ID NO: 195696 - DNA, 257 bp, Glycine max
atttgtttgcgttttttgcatagaagaattaacatgtatatagcaagcatggcagtcacactctacgaccttagctctgcctctgggttgaagaagcttgatgagtaccttctcccacgcagctacataaataggtaccaagctacaaaggatgatcttactgtttatgcagctttgccaactgctccatcagatgaatatggaaatgtttccaggtggtacaagcacattgatgctttgttgagaattctggtgtt

SEQ ID NO: 195697 - DNA, 254 bp, Glycine max
aaaaaatgaccttaaattacaacattgccctcgccttctctgcggtgctcacgctgctcctctttcccctactgaccgtaggggagctcgtggaggagcagccactagtcctcaagtaccacaacggccagctacagaagggccgcatcaccgtcaatctcatctggtacggcaccttcaccccgatccaacggtccataatcgcggacttcataaactcgttaagcagcgcgccaaacgcgcctctcccctcg

SEQ ID NO: 195698 - DNA, 248 bp, Glycine max
gcaagccccactcaaccaccacacctctcctcgttcacgctacccctttctgctcttcttctacctttcaagttttaaaagtataaagatggcagagacattcctatttacctcagagtcggtgaacgagggacaccctgacaagctctgcgaccaaatctccgatgctgtcctcgacgcttgcctcgagcaggacccagacagcaaagttgcctgcgaaacatgcaccaaaaccaacttggtcatgg

SEQ ID NO: 195699 - DNA, 164 bp, Glycine max
  unsure (1)..(164): unsure at all n locations
ctcgagccgagagtttgcatcttttgccaccatggcttatctttcaaatcaccatgacccagttctacaagttgtttccacaaagcttggaacattaagncgctcgagccgttttttttatccaantaaacgaagtgtnnattatttgagtagttgaggtttgt

SEQ ID NO: 195700 - DNA, 250 bp, Glycine max
gccgtgctttccctttatgctagtggccgtacaactggtattgttctggactctggagatggtgtcagtcacacggtgcctatctatgaaggttatgccctcccacatgcaatcctgcgtttagaccttgcagggcgtgatctcactgatgccctgatgaaaatcttgactgagcgtggttactctttcaccacatctgcggagcgggaaattgtgagggacatgaaggagaaactggcctacattgctc

SEQ ID NO: 195701 - DNA, 255 bp, Glycine max
ggatgcttatgtgcaaccatcattggtaattgtgtattttggtggcaatgattctattgatcctcacccatctggccttggtcctcatgtaccccttgaagaatatgttgaaaacatgaggaaaattgctaatcatcttaagagcctctcggaccatattcgcattatatttctcacttctcctccgatcaatgaagaactaatccgcaaaaagctcagtgcaacgcaatcaggaagaaccaatgaatcctgtgg

SEQ ID NO: 195702 - DNA, 255 bp, Glycine max
ctcaattgttgcgtgactcaaagaaacaaattgcgctcagccttactgaattgcagaaaaatcccctgaactacactcaggtgtctgtcttggcagatgacattctaaagaatgtggagtatgacgcattaaggattgttttcaacaaatttcattctgttgtacaatttttgccaacagttgcaactgtactgtctcctgaggttattgagagagaggctgaatcaggaggaaagctggggaattggattcata

SEQ ID NO: 195703 - DNA, 257 bp, Glycine max
ctagagcaagatcaggctgctgttgagtctcacaagcgagctgcagctgcaacagcagctggcaagttcaaagaagaaatcattccagtttctacaaagtttgtggaccctaaaactggagtggagaagaaaattattgtttctgtcgatgatggtatccggccaaacacaaatttagcagatttggcaaagctgaagcctgcattccagaaagatggaaccacgacagcagggaatgctagccaaattagtgatgg

SEQ ID NO: 195704 - DNA, 254 bp, Glycine max
gcgaacatagacatcgaagggatcttgaagcagcagcagccttatgatgggcgcgttccgaagacgaagatagtgtgtactttgggccctgcttctcgatccgtagaaatgaccgagaagcttctgagggcagggatgaacgttgctcgtttcaatttctctcatggcacccacgactatcaccaggaaaccctcaacaatctcaagactgccatgcacaacactggcatactctgtgccgtcatgcttgacac

SEQ ID NO: 195705 - DNA, 254 bp, Glycine max
agtgaatgaaatgggggacaagcaccagcagcaccaggaagacagcaccgatttcacctccgaggacgaaggcaccgaagattaccgccgcggctcctaccacgccgtccgaatcggcgacaccttcaacgccggtcgctacgccgttcagagtaaactcggttggggccatttctccactgtctggctcgcttgggacaccaaacattctagatacgtggctttgaaagttcagaagagtgctcagcactaca

SEQ ID NO: 195706 - DNA, 254 bp, Glycine max
caacagcaacatcaatggctactaccaccgccaacaaagacgaaaccattagcaccattgcatcttcttcttctccagtcttcatatccacagagaccttatgcaccatcctcacccatcacactctgatgaaccacttccaatctactctccccaaagcctcaaccattctccaaaccccaattcgccaacaccactctctctctccttcctcctccctcctcctcatgccctcttggtcctcttcctcttct

SEQ ID NO: 195707 - DNA, 249 bp, Glycine max
cgacaccaagtcaaacaggtgatttgttcactttgtgggactgaacaagaggttcagcaaaactgtataaattgtggtgtttgtatgggcaagtacttctgtggaacatgcaagctttttgatgatgatatatctaagcagcagtaccattgcagtcgctgtggaatttgcagaactggaggaagcgaaaatttcttccattgctacaagtgtggttgttgctactcaactcttctgaaaaacagtcac

SEQ ID NO: 195708 - DNA, 255 bp, Glycine max
ctactctactgcttcaccttctgctctagaaaattcagtggtgatacatggcttcggctactctctctgtagccaaaccagcccttcaggcaaatgggaaaggcttctctgaattctctggcctccgcagctcatcaggcttccttcccttttctagaaaatcttcagaggatttccattctgtcattgccttccagacctatgcagttggaagcagtggaggatacaagaagggtgtgacagaagcaaaactga

SEQ ID NO: 195709 - DNA, 250 bp, Glycine max
ctacggtttatacaattttcgatggcttcttcagatgttgagtaccgttgctttgtcggtgggctcgcttgggccactgacgaccaagctctcgagagagccttctctcagtacggcgaaatcgttgaaacgaagattatcaacgatcgtgagactggaagatccaggggttttggatttgtgaccttcgcctcggagcagtccatgaaagacgccatcgaagggatgaacggccaaaaccttgacggcc

SEQ ID NO: 195710 - DNA, 250 bp, Glycine max
gaatactgctgggatagagcctgaagatgttgcaaagcgtcttatggactatggcttccatagtccgacaatgtcatttcctgtgcccggcacactcatgattgaaccaactgaaagtgaaagcaagtccgagttagacaggttttgtgatgctcttatttccattcgacacgaaattgctgagattgagaaaggaaaggctgacattaacaacaatgttctaaagtgtgctcctcatccaccaccagtg

SEQ ID NO: 195711 - DNA, 254 bp, Glycine max
  unsure (1)..(254): unsure at all n locations
atgcacttcaatttcagaaccaaaaacttcagactgagatattggcactgaaaagcagagaaccaactgaatccatcaacctcaacaaagaaactgagggatccagcagcaatagaagtgagaacagctcagagattaagttggatatctcaagaacaccagctattgatagtcctctatccactcagcagaacaacgnccaacagaacactctttccatcttctgctagaccaacaggagtggctcagctttt

SEQ ID NO: 195712 - DNA, 251 bp, Glycine max
caggcctgctcttgctttgcttcctcttctatttgctttcttgttagctgccactacggaatcaagaaaagatccaggggaatattggaaaatgatcatgaaagatcaggaaatgccagaaggacttcaaggtcttgtttcatttcaatctgaaaataaccctaagactcaagagcagcttggtaaaggttccaaaaaccattgtgaagagtctctagttacaaatacacaagttaacagtgacttcgaac

SEQ ID NO: 195713 - DNA, 244 bp, Glycine max
cgctatagaaaatgttcaaaaaattttcaggtgaagatgtatctgcacagaaccaagtgaaggcatctgttcaacgaaaaatacggcaaagtattgctgaagagtatccgggtcttgaacctgtgttggatgatatacttcccaagaagtcccctctaatagttgctaaatgtcagaaccatctcaatctggttcttgtgaacaacgtgccactgtttttcagtgtccgtgatggaccatacat

SEQ ID NO: 195714 - DNA, 246 bp, Glycine max
ccaatattacaggaatggtttgaccgcgttgactcggagaaaagtggaagcataacagcggtgcagctaaagacagctcttgctgtggtcaacctggaatttccgctctcagtggttcagcaaatgatcaggatgtacgatttcgaccggaatggtactatgagctttcaagaatttgtttcactcaacaacttcctccttaaggttcaacatgcattttctgatctagagaggggtcgtggtttt

SEQ ID NO: 195715 - DNA, 248 bp, Glycine max
ctcgagccgctttcagaagatgttgaacaagttgtggacataagtggcaaccccattttcccacgtggcacatattacattatgccatcaacttggggcgctgccggtggtggattgaaactaggccggacaggaaactcaaactgcccagttactgttttgcaagattactcagaaatcttccgtggcacaccagtcaaattcagcatacctgggataagccctggaatcatctttacaggtactcc

SEQ ID NO: 195716 - DNA, 253 bp, Glycine max
ctcgagccgggtagccatagcatagcagagatcgacataacatagccagcaacatcaatatcaccgacagacaacaatttcgggaatccgctggctatgactgcagttgtggtcgtcccattgggccttctcttcttcgcttccggcctcatcgttaacctcattcaggcaatatgctacgtggttgtgcggccggtgtcaaagaatttgtaccggcggatgaacagggtggtggctgaactgctgtggctgg

SEQ ID NO: 195717 - DNA, 243 bp, Glycine max
atgttatatggcggtagcaaggaggcagctgcttctgttagcaaggatgcagaagttatgttgaaacttgggagcactgaagacaaacgtgagcaatatcgattgatgagagatgcaatggagaaacgattcattcgagttacacggggctcaatagttggaggggtacgtcttggaatgttcactgctgcattttatggcatacgaaatctgctcgctgagaagagaggtgttcatgatgtt

SEQ ID NO: 195718 - DNA, 240 bp, Glycine max
ctcagactaccagaagttccctctccaaatgaaaactgggtttggtgggcaatacagcaatgaggtggcatgtgccagttggaggcttggcgtggaagcaaacaacgtagtcaagtggcaaactttcctgcagcttgcggagagtacatagctgactacgttctaggagaccaatatagatgcgattccaaaacagttaaccaacaagcttatttctatgctaaatccctcaaactcaca

SEQ ID NO: 195719 - DNA, 235 bp, Glycine max
atcttgttgtttggagcgatccgagaaaaactctgtaaacatgttggtttaccagtacctccttacaggtgatgagcttctctctgactccttccgttacaaggaaattgagaatggaatgctggggaagttgaggggaagtgggttgttaaaggagcagttgatgtagacattggtgcaaacccttctgctgagggtggaggagaagatgagggagttgatgatgcagctgtta

SEQ ID NO: 195720 - DNA, 195 bp, Glycine max
ttgaaatgttgatgccaatgcaggcttttagagatttcttatttgtttctttgtagattaatatggttgatagtgtatgattgcattcaaattattgtgaaaattcttttaattatatcttcttgtttgtttgcaataaaattttcaatatttgacataaaaaagcataataatatgcatatacatattatgcat

SEQ ID NO: 195721 - DNA, 242 bp, Glycine max
caggaattaggaatattcgacaggtagagtttcttcaatggctcctaaagttgataagaagaatgatccaaaggcccaggccttgaagactgctaaggcagttaagtcaggtgctacctttaagaaaaggtaaagaagatccgaacttctgtcactttccacaggccgaagaccttgaagaaggacaggaaccccaagtaccctcgcattagcgccccgccgaggaacaagcttgatcatta

SEQ ID NO: 195722 - DNA, 243 bp, Glycine max
gcaccgcaaacagtgagccatggccgtcggaaagaacaagcgcatctccaaggggatcaagggtggcaagaagaaggcagctgatccctttgccaagaaggattggtatgacattaaggctccttcttttttcaagtgaaaaatgttggcaaaaccctcgtctctcgtatccagggtaccaagattgcttctgaaggactcaagcatagagtgtttccggtctccttggctgatcttcaaggg

SEQ ID NO: 195723 - DNA, 244 bp, Glycine max
gcaaacccaaagtgcttctctcctctgtctttttctctctcttgctatccttttggctagtggcactgctgcaagtgcaactccaagaagcgcagtgccaagccaccatgtttcaacattcaacagagcctttttccttccacttttctctttggaattggttcttctgcttaccaggcagaaggagcagcaagtgtagatgggagaggaccaagcatatgggacacctacactagacagcata

SEQ ID NO: 195724 - DNA, 243 bp, Glycine max
ctggtgttgttactgctgctcttttctcttttcttttctctttagttctctcttcccctttctttttctttttcttcttcttctgagcttgtttaagcttttcttccattaacatattatcacaatggtggtattcttgctgttcttggttgttctgatgactctcgagccaaaagggtccgcgtgcttgagctctctcgcagattgaagcaccgtggccctgactggagtgggctccatcaa

SEQ ID NO: 195725 - DNA, 241 bp, Glycine max
caaaaccgtacctgtaagtcttgccgtaatcctcagagaggcaattcttgctgctcataggcatctgttcaatggtgaactggtcgtattccgaaagtgagtgaagcacggacttgatagtagtctaggaggcacataaatgtactcatcaacatcgaaaaagaacatccacttggccatgaacttgtatctatgaagacaatcattgaccaccatgaactggttatgatagtatccatcc

SEQ ID NO: 195726 - DNA, 238 bp, Glycine max
ggcatctcaaggtttgtgtccttcgataaaaaatattcttcttttggactctgaagggaagcgtgttgcagtcaagtattactcagatgactggccaacaaacaatgcaaagttagcttttgagagtttgtatttactaagactgttaagacaaatgctcgtacggaagctgaggtaacactacttgagaacagtatcattatttacaaatttgtacaagacctgcatttctttgtca

SEQ ID NO: 195727 - DNA, 237 bp, Glycine max
ggaggttaaagagacggcaacgttgtgctgtccgccttgaccgagccagagcttcgtcttggccctcgattttgccctgtaaaactaatcccagtcacaacagaaataatcaatggcaccgaaaagaccaaggctgagaagaagatcgcttacgatgcgaactgtgcgacctaatggaggagtacggccaaatcctcgttgtaaactccgacaacgtgggatcgaaccagctccaga

SEQ ID NO: 195728 - DNA, 242 bp, Glycine max
cggaggagaggtcgcaaacgcaaaaatggtgaagtttctgacaccaaacaaggccgtcattgtccttcagggacgctacgccggcaagaaagccgtgatcgttcgaaccttcgacgaaggaactcgcgagcgcccctacggccactgtttggtggcggggataaagaagtaccctgcgaaggtgatcaagaaggactcggcgaagaagacggcgaagaagtcgcgcgtgaaggcgttcgtga

SEQ ID NO: 195729 - DNA, 229 bp, Glycine max
ctcgagggcacttcgttgcttggtgatgtccctttctgttctcttcactcttggccttgcgagagaaagccatgccagagacgaagatttttggcatgctgtttggccaaacactcccattccaagttcattcgagatcttctaaagcctggccctgcaagtgttgaaatcgatgatcaccctatgcaaattgaagaaacacagtacccgaaaaccttcttctataaag

SEQ ID NO: 195730 - DNA, 228 bp, Glycine max
ctcgaggggaatagtgctgcaatggcttcaagtcaggaggaggtgacccttttgggagctactggaagcccatttgtgtgcagggttcatattgccctcaagttgaagggagttcaatacaaatatgtcgaaaaaatttgaggaacaagagtgaactgcttctcaaatccaacccagttcacaagaaggttccagtgtttattcacaatgagaagcccatagcagagt

SEQ ID NO: 195731 - DNA, 243 bp, Glycine max
tggcactgtggcaaagtggattttgaagaacagtgcagagtctgaaaacatgaactggatacttgctaactcaaagccatgtcccaagtgtaagcgaccaattgaaaaaaatcatgggtgcatgcaatgacatgcactccaccctgtaaatttgaattttgctggctatgcgttggtgcatggtcagaccatggtgaaagaactggtggtttttatgcttgcaatcgttatgaagcagctaaa

SEQ ID NO: 195732 - DNA, 245 bp, Glycine max
ccctcgagccgaatcggctcgagcggctcgaggcaaaatcatggagatcgagcgcatcgttgaactccctcacacatacatggtccgacccccgagaaagagagcgcgtttgggctgggacatcgctaggtccccaaggctcaggtaggattgttttgtggacaagaggttgagaatatttcaagctttgctccttcagaacatccccctagttctctgtttaagggagttgctcgaaatggttc

SEQ ID NO: 195733 - DNA, 238 bp, Glycine max
tactactacaagggaagaaaaacttagctactaaggaaggatcaaagagaatggctcaagcaatggcatcaatggctggcttgcgtggttcctctcaggctgtgttggaaggtagccttcaggtagtggctccacacgcttgaatgtggggagtggaagcagggtggcctcagtcacacgtgcagggttcacagttagagcacaacaacaacaagtgagtggtgaggtacacagcagc

SEQ ID NO: 195734 - DNA, 189 bp, Glycine max
ggtgatttgaaggggaatagggtattcttgagggtcgatctgaacgtgcctttggatcacaaccttaacatcacgatgacactagagtccgtgctgctgttcccaccatcaagtaattgactggttatggtgctaaagtgatcctttctagccatttgggacgtccaaaaggtgtaacacctaaatacc

SEQ ID NO: 195735 - DNA, 245 bp, Glycine max
tcgagctcgagccgtctttcttgattctatgggtggtggtgcatggccgttcttagttggtggagcgatttgtctggttaattccgttaacgaacgagacctcagcctgctaaatagctatgtggaacgtaacctccacggccagcttcttagagggactatggccgcttaggccacggaagtttgaggcaataacaggtctgtgatgcccttagatgttctgggccgcacgcgcgctacactga

SEQ ID NO: 195736 - DNA, 238 bp, Glycine max
gaggcggaatccatcgcgccggccagggagccttcggaaacatgtgtcgtggaggttgcatgtatgacccgaccaagatctggtgccgatggcacaggaaaatcaatgtgaaccagacgcgctacgcgttgtctccgacatcgctgcctccgacatcccctacactcgtcctcggacgcggccaacgcatcgagtccgtcccggagctcacactcgtcgttagcgactccgccgagag

SEQ ID NO: 195737 - DNA, 198 bp, Glycine max
gggttctattgcttaggttaggtcactttctgttctcttcactcttgctcttgcgagagaaagccatgccagagacgaagatttttggcatgctgtttggccaaacactcccattccaagttcattcgagatcttctaaagcctggccctgacaagtgttgaaatcgatgatcaccctatgcaaattgaagaaacaca

SEQ ID NO: 195738 - DNA, 237 bp, Glycine max
aggtgattacaaggcaattgtacagaaccgcaatccattaatccctcctatatttggcacagatgaatttggctggtgttgtgagtggaatccagctatgatgaagttaactggatggaagcgaaggaggtgatggataaaatgcttttgggagagatttttggcacccagatggctgcttgtcgcctaaagaatcaagaagcttttgttaatttgggcgtcgtacttaataaagcc

SEQ ID NO: 195739 - DNA, 252 bp, Glycine max
cggaatgctcgaggaagaagcgccgcagctatggtgcagtattccagagaacccgacaatcccaccaagtcctgtaaggccagaggcgctgatctcagagttcattttaagaacactagggagacaccctttgtcatcggaagttgccccttgttaaagctaaacgatacttagaggatgttttggcccacaaacaggctattcctttccgacgcttttgtggtggtgttaggaggacggcccaggctaaga

SEQ ID NO: 195740 - DNA, 166 bp, Glycine max
tgattgaacacgctgccgatcagaaccatcgccatcggaaggcctgaacatgctactcaccccgacacgttgacagcgggttggctgtcatcatctccaccttgatcttcgtgttcgccggttcatgttccggcatcgcctacaacaagctcaccgacaacggcgc

SEQ ID NO: 195741 - DNA, 236 bp, Glycine max
ctcggaattcactcggctcgacggggttttgcgttcgtgcgttacaagtatgctgatgaggctcagaaggccgttgagaggctcgacgggagactggttgctcgtcgccaaataacggtccagtttgcgcaatatgggcctaatctgaacggactgacaaaggaaggattattgacacatccccaagatcaaggcgttcaaggagccgtagctcaaggcatacgcatcgtgatgat

SEQ ID NO: 195742 - DNA, 213 bp, Glycine max
  unsure (1)..(213): unsure at all n locations
gaagctagctatatgcttaatacatgcaagtcgaacgtattcatgcanagaactgaggaaacggaaaagaggattctaacgtgacggttgtttatctcgactaggaggtgggaacagttgaaacaaagtggcgaaagagtgcgtaatgcgtgggaatctaccgaacagttcgggccaaatcctgaaaatagctacaaagagctgtttaatgag

SEQ ID NO: 195743 - DNA, 237 bp, Glycine max
cgaggagaggtcccaaacgcgtcaatagtgaagtttctgaaaccagaccagggcgtcatcatccttcagggacggtacgccggcaagacagccgtgatcgttcacaccttcgacgaaggaactcggagagcccctacggccactgtttggtgacggggataaagaagtaccctgcgaaggtgatcaagaaggactcggcgaagaagacggcgaagaaatcgcgcgtgaaggcgttcg

SEQ ID NO: 195744 - DNA, 245 bp, Glycine max
  unsure (1)..(245): unsure at all n locations
ccgctcgacgcttgccactgactttccacactgcataccttacgtcttccgaactccaagttcatttgcacgacggctaacgacaaggctcagatcaacattctggtggttggtcatgtggaccctgacgcgcaaccaccattcacgagctgaagaacgcctgttctggacacatccgctccagggcatgccatatcacggcatgcacgtacggcctcggactcgaancccccccccccctaaca

SEQ ID NO: 195745 - DNA, 237 bp, Glycine max; identical to SEQ ID NO: 195738

SEQ ID NO: 195746 - DNA, 257 bp, Glycine max
gagaatgatgatgaagtctgctatgtgtgcagtggtggttgtagcacttcttcttctggcggccgtggggcccatggctgaggctgtgacatgcaccccaacagagttgagtccgtgtcttccagcaatcacttccggtgctaaaccttccaatgcttgttgcacgaagctgaagcagcaaaaaccatgcttatgtggctacctcaaaaacgctagcttgaagcagtatgttaactctcctaatgcccgaaaaaccg

SEQ ID NO: 195747 - DNA, 249 bp, Glycine max
gtaagaagagaaagttcgtagctgatggagtgttgttcgctgaactgaacgaggttctgacaagagagttggtcgaagatggttactctggcgtggaagttagtgttgtgacgatgcgtaccgagatggataaaaagggtaaaagctcgtttggttctgatttccagtacgaatacgaaccttgaaaccgcgcctcgggctctagagccttcggattttgaagctagaggtgtcagtaaatcacaggat

SEQ ID NO: 195748 - DNA, 255 bp, Glycine max
ttggaggttaccttctatcaaagataaaatgcatgagatgtggagggaagtctgagcgtcaggaaaggatgatggatctgactgttgagatagaaggcgagataacaaccctggtggaggcccttcgacgatttacaagcactgagactttagatggggaaaacaagtaccactgtgtcagatgtaaatcatatgagaaggccgagaagaagctgacagtttcagaggcaccgaatgttcttacagttgcattaa

SEQ ID NO: 195749 - DNA, 252 bp, Glycine max
agatcctccatggcctccaccaaggaacgtgaaaacttcgtctacgtcgccaagctcgccgaacaagccgaacgctatgaagaaatggtggaagcaatgaagaatgtggcgaactaaacgtggaattgacggtagaggagcggaaccttctgtcggttgggtacaagaacgtggtgggtgctcgtagggcttcgtggaggattctttcctcgattgaacagaaagaagaagctaaagggaacgatgtgagcg

SEQ ID NO: 195750 - DNA, 257 bp, Glycine max
attcccaccaaagagcacacttgatcccacactctatggtgatcaaaccagtaccataacaaaagaacaattggagattaacatgggaggggtcacagtagaagaggcacttagtactcagagattattcatattagattaccaagatgcattcatcccatatttgacgaggataaacagcctacctactgcaaaagcttatgccacaaggacaatcctgttcttgaaagatgatggtactttgaagccacttgcta

SEQ ID NO: 195751 - DNA, 254 bp, Glycine max
ggaaggggaaggatatgagcgtccaaatgagggggccattgttaaagtgaaactaattggtaagctacaagatggtaccgcttttttgaaaaagggccatgatgaagaagagaagctgtttgaattcaaaacagatgaggaacaagttgttgatggacttgatagagctgtattgactatgaagaagggtgaggttgcgttgttgaccattgcacctgattatgctttcggtacatcagagtcccaacaggagt

SEQ ID NO: 195752 - DNA, 252 bp, Glycine max
ttaacctttcactttcgtttctcagttttattcgaatccctctctcaatctcctttccaaatggccagcgttgaggttgcacagcaaacaccaacaacagttccagaaaatgaaacaaccgaggtaagcaagacccaggaaacaaccccagtcactgaggctcctgcaacagaacaaccagcagctgaggttcctgcaacagaacaaccagccgctgaggctcctgccccagaatcaaccaccgaagcacca

SEQ ID NO: 195753 - DNA, 257 bp, Glycine max
gaggaccgagtgcctcccacgcccggtcgtactcataaccgcatcaggtctccaaggtgaacagcctctggtcgatggaacaatgtaggcaagatggagctgccagagtggactgatattgtgaaaactgcaagatttaaggagttggctccttatgatcctgactggtactatgtcagagctgcttccatggcaagaaagatctacttgagaggaggacttggtgttggtgcctttcagaggatttatggtgggag

SEQ ID NO: 195754 - DNA, 168 bp, Glycine max
gggtttggtctctccacggtctcattggtgcccaaccgtgattgcccatcgaatgctcagttcctagatacatatgttcacgctgctgatggtactccgttactcatcaagaacgcaatctgtgtctttgaacaatatggcagcatcatgtggcgtcacaccgaaaca

SEQ ID NO: 195755 - DNA, 239 bp, Glycine max
tttctctgctctttgccttctctgacacatttggtgccttgtagagcgtgttttggcaggaaggtggtatggcgaaggacgttgaggttgctgagcgtggctccttctctgggaaggactaccaggaccctccaccagcaccactcattgatgctgaggagctcacaaagtggtccttttacagggctctcattgctgaattcattgccactttgctactcctctacatactgtgctca

SEQ ID NO: 195756 - DNA, 258 bp, Glycine max
tctttcttcaccatgtcacttgctgggaaaatcaccactgaaatcggggttcatgcaaccgctacaaagtggttcaacctcttcgcaacacaactccatcatgttcaaaacctaactgatagagtgcatggaaccaagctgcatcaaggtgaagactggcatcacaacgagacagtcaagcactggacttataccatagatggtaaggttacaacatgtctggacagtattgaatccattgatgaacagagcaaaaca

SEQ ID NO: 195757 - DNA, 255 bp, Glycine max
agaaaatgggagtggagaagcagttgttgaggcacggcaccggtcccaagccaattcccggtcagaacgtcaccgttcactgcactggtttcgggaagaacggtgacctttctcagaaattctggagcaccaaggctcctggccaggaccctttcactttcaaaatcggccaaggttctgttatcaaaggatgggatgaaggtgtgcttggcatgcaaattggtgcagttgctcgtctccggtgctctccggatt

SEQ ID NO: 195758 - DNA, 255 bp, Glycine max
ggatctgagttaaaaaaaattcagaaggagcaacctttgcagcaccctccaaagcctccacagaaaagaaaatggcggggtagcactgtggccccttttgctggtaacaacatgttagtcttgtatagttgtcctgctccagacaaatctaccagcaagcacttcgtgcaagtgttacacaatgaacaccctgttccattgccaggttgtgatggctctgatttctgtccatttgaagtattcaaggaaaaaata

SEQ ID NO: 195759 - DNA, 252 bp, Glycine max
gaagcttgttgtgggggatgttttccgtgccccatcaaatcctgccttgttgtgtataatggttggtgatggagttcaaattctggggatggctgttgtgacaattttgtttgctgcacttggattcatgtcaccggcctcacggggaacacttatcataggtatgctgtttttctacatgatacttggtgttgctgctggttatgttgcagttcggctatggaggacaatcggctgcggtgatcagaaggg

SEQ ID NO: 195760 - DNA, 245 bp, Glycine max
gaagaagaagcagctcttttggccctatgtcctcaaccgtcccttgttttctcctccttttgttctgtctctcaggatctgctgaggcctacaagaattatacagttggagactctttaggatggtttgacaatactgagaagtccaatgtcaattaccagaagtgggctgacagtatagaattcagcttgggagatttcctcattttcaactcggccactaaccactcagtggttcagacatac

SEQ ID NO: 195761 - DNA, 262 bp, Glycine max
ctcgagccgcaaaactgaactatgccgattcagtggtgccaagatctaccccggaaagggcatcagatttgttcgtggtgattcttcaggttttcctgtttgccaactcaaaatgtaagcggtatttccacaaccgcctgaagccctcaaagctcacctggactgctatgtacagaaagcaacacaaaaaggacattgctcaagaagctgtgaagaagaggagacgcgctgccaaaaagccttactctaggtccattgttgg

SEQ ID NO: 195762 - DNA, 271 bp, Glycine max
gctcgatctcgagccgaatcggctcgagcacagagagaggggtttgggattcgagggattgacgctgcgtctcttcctcttctctaccgatccatccctcattcctaatcctccaatccaaccacctcagcctcacactcacctatacacatatctgaacgcgtatcgtccctcctatggcttcaaagcgcatcctcaaggagctcaaggacttgcagaaagacccaccaacttcttgcagcgctggtccagtagctgaggacatgttcca

SEQ ID NO: 195763 - DNA, 260 bp, Glycine max
aaaggaaaacaatgggttccgataatcaccagaacttggagttcttgaaggagatcggtttgggctcttccaacattggctcttacattaatggccagtggaaagccactggttcttctgtcacttctgttaatccttctaacaatcagagtatagctcaagtgaccgaagcaactttgcaagattttgaggaggggttgcgagcttgcagtgaagcagctaaagacatggatgactataccggcaccgaagagaggtga

SEQ ID NO: 195764 - DNA, 251 bp, Glycine max
agtctgttcgtgggtgcattgtcagcccagacctctctgttttgaacttggtaattgtgaagaaaggtgagaatgatttaccaggattgactgatgttgagaagccaaggatgagaggcccaaagagagcatccaaaatccgtaaactgttcaacctgtctaaggaggatgatgttaggaagtatgtcaacacctaccgtcgtacatttacgacaaaagctgggaaaaaggtgagcaaagctcccaagata

SEQ ID NO: 195765 - DNA, 260 bp, Glycine max
cggctcgacctcgagccgaatcggctcgatggtaagggaacggggagtttcggacagaggaggaacaagacccacaccctctgtgtgaggtgtggccgccgcagcttccacctccagaagagtccttgctctgcgtgcgcttaccccgctgcgcgcaccaggaaatataactggagcgtgaaggccattaggagaaagaccaccggaactggaaggatgaggtacttgcgtaacgtgcctcgcagattcaagagcggctt

SEQ ID NO: 195766 - DNA, 252 bp, Glycine max
gcacacctatgtttctcatgtctcggaagattaaatcacttggtgtcaaatgggttatctcaggagaaggatctgatgagatctttggagggtatttgtacttccacaaggcacccaacaaggaggagttccacagagaaacatgccgcaagatcaaagcacttcaccaatatgattgcttgcgagccaataaatcaacatttgcttggggtctagaagcccgtgtaccatttttggacaaggcgtttatca

SEQ ID NO: 195767 - DNA, 177 bp, Glycine max
cagactgagagctctttcttgattctatgggtggtggtgcatggccgttcttagttggtggagcgatttgtctggttaattccgttaacgaacgagacctcagcctgctaaatagctatgtggaggtaaccctccacggccagcttcttagagggactatggccgcttaggccacgg

SEQ ID NO: 195768 - DNA, 111 bp, Glycine max
gggtttggtctctccacggtctcattggtgcccaaccgtgattgcccatcgaatgatcagttcctagatacatatgttcacgctgctgatggtactccgttactcatcaag

SEQ ID NO: 195769 - DNA, 258 bp, Glycine max
actcgagccgaatcggtcgagcggctcgaggctccatcacctaataccttccccacttcccatgtaaatcacgtttagttcgcacaaggacttaaaaaatggctgatgctgaggacattcaacctcttgttgttgataatggaactggaatggtcaaggcgggttttgcaggtgatgacgctcctagggccgtgttccccagtattattgggcgaccacgccataccggtgtaatggttgggatgggtcagaaggatg

SEQ ID NO: 195770 - DNA, 255 bp, Glycine max
cacgcttcttcttttgctcgaatcatggagggtggttatgctcgtcgactcttgcaggtcggtataagatcaataaacaaagaagggcgtgaacaagccaaaaagttcggggtagagcagtttgaaatgcgacatttttcgaaagatcgtccatttttggaaaacctgaatctaggagaaggtgctaaaggagtatacatttcaatcgatgtggattgtcttgatccagggtatgctgtaggagtgtcccactat

SEQ ID NO: 195771 - DNA, 279 bp, Glycine max
gtgttgttgttgtaggaaatttaagtgaagagagaatgatgatgaagtctgctatgtgtgcattggtgcttgtggcactggttgtggttgaagtggggcccatggctgaggctgcggtgacttgcaacccaacacagttgactccttgtcttccggcaattaattcaggttctgcaccttcgagtgcttcgttgccagaagctgaaggagcaaaagccatgcttctgtggctacctcaaaaaccctagcttgaagcagtatgttaactctcctaatgcc

SEQ ID NO: 195772 - DNA, 274 bp, Glycine max
ggatacagaattgttggaatcattggagaccaatggagcgatctgcttggagaccacagaggcgaaagcaggacctttaagcttcctaatcccatgtactacattgagtagtaccttcacctctctcaacaatctagctagagtttgctcctatctatatgtaataaggtatgctgatatgcactattcaaataggagcattagctatgtttgttaatgtcactttatgttatgtgggtaagtcacctaagacactccacgtacctacttgttg

SEQ ID NO: 195773 - DNA, 265 bp, Glycine max
ctcggcgaatcggctcggggagcaggatgtgtcgttgggacgacaagttcccgacagacagccgattgggacaccggcgcagagccaagacgacggcaaggactaccaggagccggcgccggcgccgcatggttgcacccgacggagtttacgtcatggtcgttttacagagcagggatagcagagtttgtggccacttttctgtttctctacatcaccgtcttaaccgttatgggagtcgccggggctaagtctaagtgtagta

SEQ ID NO: 195774 - DNA, 141 bp, Glycine max
gcgaattcgtttccggcttcactggaagtgccggcttggcacttataacaaagcatgaagcactgctgtggacggatggacgatattttttgcaggctgagcaagaacttagtgctcagtggaagcttatgcgtattggtg

SEQ ID NO: 195775 - DNA, 227 bp, Glycine max
aagcaatacatcagaatggtactgttcatcaagactctcatctcaaagaacgtaaccatagcaaagctagcttaaactacacactgatgatgacactgaagaatgatcgggacgaggtgttaacttgcattaagtttaattttaaaattgtttttggatcttttgtgtctgatatgtaaagtcgtctttgcatgcctgatctgggggaacttttttgctttgttgtg

SEQ ID NO: 195776 - DNA, 258 bp, Glycine max
ggattttggtgatcttgtgaattgatctgcgatgtcggacgaggtagttctgttggatacatgggctagcatgtatggtatgagggctaggattgcattggctgaaaagggtgttaggtatgaatacaaggaagagaatctcatgaacaggagtcctttgcttttgcagatgaacccaattcacaagaagattcctgttttgatccataatggcaaacccatttgtgaatctgcaataatagtgcagtacattgatga

SEQ ID NO: 195777 - DNA, 267 bp, Glycine max
cggctcgagttaagtgccacagtcatgatggagaggaaggttatcctggggatatcactgttactgccacttacacactcacctcaagcacaactctgaggcttgacatggaaggagtgccaaagggcaagcccaccatagttaacttagctcagcatacctactggaacttagctggccacaactcagggaatatacttgaccattcaattcagttatgggctaatcatatcacacctgtgaacgagaataccgtgccaaccggtg

SEQ ID NO: 195778 - DNA, 278 bp, Glycine max
tacgtttctggggatcagttcacaaaggacgacatcaaagtgtatggtgctgttttggagaagccaggtgactcttttcccaatgctgccaagtggtacgaggttgtctcatctcagcttgctgcaagcttccccggcaatgctcaaggggtgagattcagtggcaaagcttctgctccagcggaggctgctcctgcgaaaccggatgcttctgctgctgaagatgacgatgacccttgatctcttggcgatgagactgaggaagacaaaaaggcagc

SEQ ID NO: 195779 - DNA, 268 bp, Glycine max
ataagtctttccttcctctgccttataattcttgtgaaccttttacgaggtagcattgaaagtgcaccagcaaacgtgaagccaagccattatgctgcacccttcaataggagtgtttttccttctggttttctatttggactaggctctgcagcttaccagatagaaggagcagcagctatagatggcagacgaccaagtatatgggacacctatactacacagaaacagggacgtttgggatcaagtgatggagtctagcaattgt

SEQ ID NO: 195780 - DNA, 277 bp, Glycine max
ctgaagcatctgcaagtgctcctgacttggctctggcacttcaattgtcacataacagatagtgcacaggatcaatcaagccagtcagacatgagcaaattgttagctgatcaatactttgtatcttctatccttgcatcgcttcctggggttgacccaaatgacccttctgtcaaggatttgctggcgtccatgcaaaatcagtctgagcctcaacagaagaatgacgacaagccatcaaacgaggaggagaagaagtaatcattaagagccactt

SEQ ID NO: 195781 - DNA, 287 bp, Glycine max
ctttctttcttcaccatgtcacttgctgggaaaatcaccactgaaatcggggttcatgcaaccgctacaaagtggttcaacctcttcgcaacacaactccatcatgttcaaaacctaactgatagagtgcatggaaccaagctgcatcaaggtgaagactggcatcacaacgagacagtcaagcactggacttataccatagatggtaaggttacaacatgtctggagagcattgaatccattgatgaacagagcaaaacaatcacctacaagctcttcagtggtga

SEQ ID NO: 195782 - DNA, 209 bp, Glycine max
cgtgaacaagcctcaggtaagccaaagccatggttaagcataacaatgttatccccaacggacacttccgtaagcactggcagaactatgtgaagacctggttcaatcagccagcacggaagacaagaagacggttggctcgtcagaagaaagctgtgaagattttccccagacctacagctggacctcttagacccattgtacatggt

SEQ ID NO: 195783 - DNA, 243 bp, Glycine max
gcgatccgagaaaaactctgtaaacatgttggtttaccaggacttccttacaggtgatgagcttctctctgactccttccgttacaaggaaattgagaatggaatgctgtgggaagttgaggggaagtgggttgttaaaggagcagttgatgtagacattggtgcaaacccttctgctgagggtggaggagaagatgagggagttgatgatgcagctgttaaggttgttgacattgttgacac

SEQ ID NO: 195784 - DNA, 202 bp, Glycine max
atcggtgttcacttgatctcatcataatcgtcagcgtcaattgaagaagatgccgatcagaaacatcgccgtcggaaggcctgaagaggcgactcaccccgacacgttgaaggcggctttggctgagttcatctcaaccttcatcttcgtgttcgccggctcaggctccggcatcgcctacaacaagctcaccgacaacggc

SEQ ID NO: 195785 - DNA, 201 bp, Glycine max
acttcacccattcatacgtgttgttgttactgctgctcttttctcttttcttttctctttagttctctcttcccctttctttttctttttcttcttcttcttagcttgtttaagcttttcttccattaacatattatcatcatgtgtggtattcttgctgttcttggttgttctgatgactctcgagccaaaagggtccgc

SEQ ID NO: 195786 - DNA, 275 bp, Glycine max
gtttatcgtgaggagaatatgaagttgtttgttttctttgttgctgcagtagttttggtagcatggccatgccatggcgcaggctaccaaaggttccctctccgaatgaaaactggctatggtgagcgttcttcggaggtaaaatgcgcaagttttaggcttgctgtggaagcacacaacatccgagcctttaaaaccattcctgaagagtgcgttgaaccaacaaaggactacattaatggcgaacaatttagatcagactctaaaacagttac

SEQ ID NO: 195787 - DNA, 267 bp, Glycine max
ctttttgccaaaatctcaaagtgctgcagattacaaggcagcaagtagagctctggacttcttctttggttggtattctgatccggttttctatggtgactatccggagagtatgaaatcttcagtaggttctaggctcccaaaattcacaaaagctgaatctgaaggtctaaaaaattccatagattttcttggtgtgaattactacaccacttattatgcggaacatgctgaacctgtcagtgccaaccgaaccttctacacaga

SEQ ID NO: 195788 - DNA, 187 bp, Glycine max
gaccttacgacgcgtcgttcactcggttatggctatgttaatttcagtaaccctcaggatgcggcgagggcattggatgtgctgaatttcactccactcaacaacagaccaattaggatcatgtattctcatcgggatcctagtcttaggaagagtggtacatgcgatatttttatcaggaatttgg

SEQ ID NO: 195789 - DNA, 260 bp, Glycine max
tactcgagccgattcggctcgagctattgattcatcaatggcaaccgacgaggaccgtgaaggatgtttcgcctcacgatttcgcgaaggcttacgcctcccatctcaagcgttccggcaagatggagcttcctgagtggactgatattgtaaaaacagcaaaatttaaggaattggctccatatgatcctgactggtattatgatagggctgcctcaatggcaagacagatttatttgagaggcggtcttggtgttggg

SEQ ID NO: 195790 - DNA, 220 bp, Glycine max
attacacctgacactcagccattgttcttgaatgaactgacaaaatataatcttggagaagactgccctgtatttgacaacttatttgaattttgtcagatttatgctggtggaactatagatgatgcacgtcgattaaacaatcaactgtgtgatattgctatcaactgggccggtggactacatcatgccaagaactgcgaggcatctcgattttgtt

SEQ ID NO: 195791 - DNA, 278 bp, Glycine max
  unsure (1)..(278): unsure at all n locations
ggactaccttctgatggaggaggagttcgtggcgaatcaggagcnactcaagccgcaggaggagaaggccgaggaagacagatccaaggnccgatgatctccgaggctctcccatgagcgtcggaaacctcgaagagctgcatcgacgagaatcacgctattgtctcctcctccgttgggccngagtactatgtncggaatccngtcttcgttgataaggatncagtttntntnntngttgtgctattttgatgcataataaggttctttctgttgtt

SEQ ID NO: 195792 - DNA, 138 bp, Glycine max
cttacttctacgacggtgatgtcggtagtgtatactttggggcgcagatccaatgaagccccaccggctttgcatgactcatcatcttgttctctcatacgatcttcataagaagatggagatttaccgtccacacaa

SEQ ID NO: 195793 - DNA, 266 bp, Glycine max
gtcatatgcttgtctcaaagattaagccatgcatgtgtaagtatgaactaattcagactgtgaaactgcgaatggctcattaaatcagttatagtttgtatgatggtatctactactcggataaccgtagtaattctagagctaatacgtgcaacaaaccccgacttctggaagggatgcatttattagataaaaggtcaacacaggctctgccagttgctttgatgattcatgataactcgtcggatcgcacggcctttgtgccg

SEQ ID NO: 195794 - DNA, 223 bp, Glycine max
cgggaattagcttgtgatgtgcgaatttggtgctgctgctactgctattactactactccttcttcattgagttctttatcttcttctaggtggccaaatacagaagttcatgctttgataagactgaggacaagtcttgaaaccaagtaccaagacaatggaccaaaggctccattgtgggaggatatatcagcaggaatgctgaggctcgggtacaacagg

SEQ ID NO: 195795 - DNA, 268 bp, Glycine max
agtctgatctaaattgttcgccattaatgtagtcctttgttggttcaacgcactcttcaggaatggcgaacaatttagatcagactctaaaacagttaaccaacaagctttcttttatgctagtgaacgcgaagtccatcacaacgacatatttatattcggcatagataacaccgtactctctaatatcccatactatgaaaaacatggatatggggtggaggaatttaatgacacttatatgatgatgggttaacagggcgacccc

SEQ ID NO: 195796 - DNA, 219 bp, Glycine max
ccctagttcatttttcttctccgttctcttctctctctgttcttcactcactctcattcattcaccatgacgaaacaacatgccaattggtctccttacgataacaacggaggatcatgtgttgcgattgctggagcagattactgcgttatcgccgcagatacgagaatgtccaccggttacaacatcctcactcgcgattactccaaaatctcccaa

SEQ ID NO: 195797 - DNA, 227 bp, Glycine max
ggcggcaacagggagagaagatgaagttcaatccacgtgtgtcgagcagccgccgcaagagccgaaaggtcatttcacggcgccgtcgagcgtgcggcgggtgcttatgagcgcccctctcgtcggcggagtgcggtccaagtacaacgtgaggtcgatcccagtacggaaggaggacgaggtgcaggtggtgcgaggaacatacaagggtcgcgaggggaaggtga

SEQ ID NO: 195798 - DNA, 267 bp, Glycine max
  unsure (1)..(267): unsure at all n locations
gaatttcgatgctcagtcatctcttttaccattctcttctctcttgctcttgcaggagagagccatgtccatgcatcgctacctgaggaagattattgggaagctgtttggccaaacactcccattcccactgcactgcgagagcttctaaagcctcaccctgcaggtgttgaaatcgatgaactccctaagcaaattgatgatacacagtacccaaaaacattcttctataaagaagacttcatccaggcantacaatgaaagtac

SEQ ID NO: 195799 - DNA, 258 bp, Glycine max
ctttctctctctctctgtctgccatggttctctccaaaaccacctccgaatccgacgtctctgtccactcaaccttcgcttatcgatatgtcagaacttcgcttcccaggtttaagatgccggaggagtcgataccaaaggaggcagcgtatcaaataataaacgatgagttgatgttggatgggaacccaaggttgaacttggcatcatttgtgacaacctggatggagccagagtgtgataaactcatcatggctg

SEQ ID NO: 195800 - DNA, 231 bp, Glycine max
tggaacagctgaagccaagtgctgctaactcttcccctctcactcccctcgtgttcttggacagagcagccaccgtccacggcgacgtccctttcgttgtttataacaacaccaccttcacgtggtcccagacgcgccgccgatgcctccagctggcctccgccctctcctcccttggtatccgccgcggcagcgtcgtctccgtcgtggtccccaacatccacacaacat

SEQ ID NO: 195801 - DNA, 269 bp, Glycine max
ttcaatttgttgactggtgccccactggtttcaagtgtggaatcaattaccagcctccaactgttgttcctggcggtgatcttgccaaggttcagagggctgtgtgcatgatctccaattccaccagtgttgttgaggtcttctctcgcatcgaccacaaatttgacctcatgtatgccaagagggcttttgttcattggtatgttggtgagggtatggaagagggagagttctctgaggctcgtgaagatcttgctgccctggagaaa

SEQ ID NO: 195802 - DNA, 211 bp, Glycine max
caaaccttgcccagactacatacgttcccatgagggttttaagcttgcatataagtgcatggcaaagaattatccatgttttggacatgcagccacaatgccaaacattgtgtggtggaaaacctgtgtgcgagattcttttgtcagggctggatatgaatacgatgaagagacatttgagaaaatcttcagacgtatatatgcgtccttt

SEQ ID NO: 195803 - DNA, 236 bp, Glycine max
gccgatgtcagcactaaggtgaagaacaagaacatcacaactgatgtcaaagtggacactaactcaaatctgcgtacaatcattactgtggatgaacctgcccctggactcaagacaatttttagctttaattttccagatcagaaatctggcaaggtagaactccagtaccagcatgagtatgctggaatcagcaccagcattggattgacagcaaatcctgttgttaacttctc

SEQ ID NO: 195804 - DNA, 255 bp, Glycine max
gttccagcggcggtggtggcggttttagtggtggtggaggtggtagcgggagtggaacgaagaagaggtttaggacgaagttcacgcaggagcagaaggataagatgcttgcatttgcggaggagctagggtggagaattcagaagcatgacgaagttgctgtggaacaattctgcgctgaaacttgcgtcaagagacatgtgctcaaggtttggatgcacaataacaaacacatcttgctattctgagcaacgt

SEQ ID NO: 195805 - DNA, 268 bp, Glycine max
ctcgagccggccttgctttcttcttcacttcaaacttgccaatctcgaagatggcaatagacttggcatctcccaattgggttccaaccgcagccgcatgtttggcagccatggccgccctcctcctcttcctcctccgcggtctccgccgccgtaaatacaatctccccccaggccccaagccctggcccatcataggcaacctaaacttaatcggctccctcccacaccagtcgattcaagcgctgagtaaaacatacgggcccat

SEQ ID NO: 195806 - DNA, 267 bp, Glycine max
atgagattatagcaaatggcttaaagccatttgtcacgctgtttcattgggacctcccacaagctcttgaagatgaatatgggggatttctcaaacctgaaatactggaggacttccgtaactatgctgacttttgcttcaagacatttggtgatcgggtgaagcactgggtaaccctaaatgaaccatatggctacagcgtgaatggctacagtggtggaaattttgcaccaggtagatgttctaactacgttggaaaatgccctg

SEQ ID NO: 195807 - DNA, 266 bp, Glycine max
atccaatctccgaatcctttaatcgcattgcaaccatgtcgaggagaaaggtcagagagccaaaggaggaaaacgtgactcttggcccagctgttagagatggcgaacatgtctttggcgtcgctcgcatatttgcctcctttaatgataccttcattcatgtcactgatctgtctgggagggaaacgcttgtccgcatcactggtggaatgaaggttaaggctgacagagatgaatcatctccttatgctgctatgcttgcagct

SEQ ID NO: 195808 - DNA, 270 bp, Glycine max
aggacacccctaccattgccaaccctgattacaagggcccatggaaggcaaagaaaatcaagaaccccaactataaaggaaaatggaaggcaccattgattgataacccagatttcaaggatgaccccgacctatatgttttccccaacttgaagtacgtgggcattgaattgtggcaggtgaaatctggtactttgtttgacaatgtcttaattactgatgatcctgaatatgccaagcaactggctgaagaaacatggggcaagcaca

SEQ ID NO: 195809 - DNA, 270 bp, Glycine max
gtgcaaagccatcgtcttcttctcagacaagtagtttggtaaaagatggctgatgctgaggatattcaaccccttgtctgtgacaatggaactggaatggtgaaggcaggatttgctggtgatgatgctcctagggctgtgtttcccagtattgttggccgacctcgtcatactggtgttatggttgggatgggtcaaaaggatgcctatgtaggtgatgaagcccagtcaaaaagaggtattctactttgaagtacccattgagcaggt

SEQ ID NO: 195810 - DNA, 272 bp, Glycine max
ggggtattgagattgagattcaagtaatggggaagagcaaggttcttgtggtggggggaactgggtacatagggaggaggatagtgagggcaagactggcactgggccatgagacctatgtggttcagaggccagagttgagcctccagatagagaagctgcagaggctcctctccttcaagaagcaaggtgctcatctcattgaggcctctttcaatgatcacaagagccttgttgatgctgtgaagcaggttgatgttgtcatcagtgcc

SEQ ID NO: 195811 - DNA, 290 bp, Glycine max
ctacaagctcgtgaactcaaagccggtcttccccccctcaagcacaagtttgtcttctggtacacgcgccgaacacctggagttcgaaatcaaacatcatacgaggacaacataaagaaaattgttgaatttagtacggttgaaggattttgggtctgctactgccatcttgctcgtcccgcttctttacctagtccaacagatttgcaccttttcaaggaaggaatccgtcctctatgggaggactctgctaactgcaatggtggtacatggattatacgattcaaaaa

SEQ ID NO: 195812 - DNA, 282 bp, Glycine max
  unsure (1)..(282): unsure at all n locations
gcggcggcgtgtgcngcggtggcgctggtggtgcgccaccgcatgntgagctccggaaagtggggtcgcgtggtggctattgtgaaagagtttgaggagcagtgtaggaccccaantgggaagctgagacaggttgctgacgccatggacgttgagatgcacgcgggtcttgcttctgaaggtggcagcaagctcaagatgttgatcattatgttgataatctccctctggggatgagaaaggancttttatgcatagacttggtggcaaantncgaacctc

SEQ ID NO: 195813 - DNA, 289 bp, Glycine max
cccaatatacttagccatatctttacttcccaaaacttgctctacaatgagtttccttcgttcttttgcaagacacaaggatatatcaaaagtaggacgcagaggtatccattgcatgcagaaactatgtgcagaaaaaatatctcctgattcactagagaaggcccaaaatcgtgtgatagatgctgcactcacacttgttcgagaaaatacaaggcttaagacagaactcgtgcatagtttgggaggtgctgtggcaacttcaactcttcttggagttcctttgggt

SEQ ID NO: 195814 - DNA, 264 bp, Glycine max
gggtcctgtacgaggttttggggaaaagcttagctccattattgatgcctgcctttcacaatatgatgaggaggcaatcttctttgatgaagctgtgagaaatgcaaaacgaaagcaattggaatcaaaggctttggatcttgtgtaccctgcttatacaacattgttagggcatatacgctctaaagctctagatgattttacgactaagctggaacaatcactaaacaatggagaagggtttgcttcatctgttcgcacttg

SEQ ID NO: 195815 - DNA, 230 bp, Glycine max
tacacgcagcaagaagaagaaggagaagcccaagatgggaacaatggagagcttgaagttcttggtgtcttcaaagtacatcagagatcttgccactttagtggttgcttatggaatcagcatcaatcttgttgaggttacatggaagtctaagctcaaagctcagtttcctagtcccaatgagtactcttcttttatgggtgacttctctactgcaactggaattgcca

SEQ ID NO: 195816 - DNA, 280 bp, Glycine max
  unsure (1)..(280): unsure at all n locations
cttgactattacacattccccattttgatttgatatgattgaattggcctcttgccagcaaaacagaatgtggaagctcaagttcgccgaaggagggaatccatggcttcggacattgaacaatcacgttggaagacaggtgtgggagttcgatcctaagcttggatcgccgcaagatctcctcgagattgagaaagctcgccagaattttcacgataaccgctttagccanaaacacagcgcaaatctacttatgcggatgcagttcgcaagagagaac

SEQ ID NO: 195817 - DNA, 279 bp, Glycine max
gttggttcctcaatcactgtggtggggacaccccattatgctcacaaggactatgctcccatgcttgcaaggtcaaggaaaggtgatggattggcattggtttcggtttcacagtttgtggttgaattacaagggctaaagtcagtggaatgggaagatcctcctaagattcttcacttgaatcctaggttaagaggggattggagcaaacggccagttattgagcataatacctgttatcggatgcactggggaacagctcaaagatgtgatggtttg

SEQ ID NO: 195818 - DNA, 277 bp, Glycine max
atcagtttcaccgcacgaatatcttgttgtttggagcgatccgagaaaaactctgtaaacatgttggtttaccaggacctccttacaggtgatgagcttctctctgactccttccgttacaaggaaattgagaatggaatgctgtgggaagttgaggggaagtgggttgttaaaggagcagttgatgtagacattggtgcaaacccttctgctgagggtggaggagaagatgagggagttgatgatgcagctgttaaggttgttgacattgttgaca

SEQ ID NO: 195819 - DNA, 284 bp, Glycine max
gaaagatggaggggaaggagcaggatgtgtcgttgggagcgaacaagttccccgagagacagccgattgggacggcggcgcagagccaagacgacggcaaggactaccatgagccggcgccggcgccgctggttgacacgacggagtttacgtcatggtcgttttacagagcagggatagcagagtttgtggccacttttctgtttctctacatcaccgtcttaaccgttatgggagtcgccggggctaagtctaagtgctataccgttgggattcaaggaatc

SEQ ID NO: 195820 - DNA, 291 bp, Glycine max
tcttaagcttgctactgagtttccacactgcataccttaggtcttccgaattcgaagttactttgcaagatggctaaggaaaaggctcagatcaacattgtggtggttggtcatgtggaccctgaggaggcaaccaccattaacgagctgaagaagcctgttgtggagaaagaagctccagggcatgccatatgagggcatgcacgtacggcctcggaggggaaccagaaaattatgttaacaaaataatctggaaccctaatgtatcagtgtcatcatcagtgtgtagtt

SEQ ID NO: 195821 - DNA, 287 bp, Glycine max
aattctttgagttgaacacaggggccaagattccttctcttgggttagggacttggcaagctgaacctggtgttgtagctgaagctctcaccacagccattcaggttggatacaggcatattgactgtgctagtgcgtataagaatcaagcagagattggttctgctcttaagaagctttttgatgatggtgtggtgacgcgtgaggacttatggatcacttccaaactctggtgttcagatcatgcaccagaagatgtgccaaaagcattggataaaccattacag

SEQ ID NO: 195822 - DNA, 284 bp, Glycine max
gagcttcagaattacttgttgtaattgaagggagcatcctagctggattcatttcttctgccaacattgtctacctcaaaactcttaagaagggggatgttatggcattccctcaaggcttgcttcatttccaaatcaatgcaggcaaatcttcagccctggcaattgtaagcttcagtagctccaatcctggtctacaaattctggacttcgctttgttcaaaagtagtttccccacaccattgatagtacaaaccactttccttgatgctgctctggtgaag

SEQ ID NO: 195823 - DNA, 283 bp, Glycine max
aaaaaagttaagatgggtaaagtttattttaatttatattaaaaatttgtgcgatacctagcttcttcattattttacttttatctctttctgatgatttgttaaagaaaatcaaatttgtggtacatcaacttggtagtgtcaaattgttaataacttgtgttggtttatgacttgagcagagatgatggggccaacaatggtggcagaagcaagaacttgtgagtctcagagccaccgtttcaaggggccatgtttgagtgacaccaactgtggctctgtt

SEQ ID NO: 195824 - DNA, 285 bp, Glycine max
ctttgaaaaggattgtaaagctgaatgaggggtttgatcgttttcttgagagggagcttgaaattcttggtagcatcaaacaccgttatctagtgaatttacgaggatattgcaattcacctacgtcaaagttgttaatatatgattacctaccaggtggtagtcttgacgaagcacttcatgaaagagctgatcaactagactgggattcgcgcttgaatataatcatgggagctgcaaaagggcttgcctacttgcaccatgattgttcccccaggatcatac

SEQ ID NO: 195825 - DNA, 284 bp, Glycine max
tgaatctcgtgctataatgaggtattatgcagaaaaatacagatctcaaggggttgagttgctgggaaaaacaatagaagagaggggtctagtggagcaatggctagaagttgaagcacacaactttcatccacaagcctacaacttgtgtcttcatggtttgtttggttcactatttggtgtgactccagatcccaaggtgattgaggagagtgaagcaaagctggtacaagtgttgaacatctatgaggagaggctctcaaagactaagtatttggctgggg

SEQ ID NO: 195826 - DNA, 265 bp, Glycine max
gtggagatttgtttgcgggatgccaagatggataagagtaccgtccatgatgttgttcttgttggtggttctactaggattcccatggttcaacagttgttgcaggacttcttcaacggaaaggaactttgcaagagtattaacccagaagttcgatgagaaggaaaacattgtgttcatcacagtggtgtgttgcagcccagagaagataagagacaagctttgctaaaaaggtggcggctcaatcaaaagcattgagatactg

SEQ ID NO: 195827 - DNA, 237 bp, Glycine max
ctcgtcactccttgctcttagccctcctcctcttcgccgccgtggccaccgccgcgatggcggtggcgcgtccgacgccgacgacatcctgatccgtcaggtggtgccagatgttggcgaagcgaagaggaggacaacctgctgaacgccgagcaccacttcgcgaccttcaaggccaagttcgccaagacctacgccaccaaggaggagcacgatcatcgctacggcgtcttcaag

SEQ ID NO: 195828 - DNA, 285 bp, Glycine max
ctctactctgacatcggcaagagagctcgcgatcttctgttcaaggattatcagaatgaccacaagttcaccatcaccacttacactaccactggagtggaaatcacttcaactggagtcaggaaaggtgaaatatatttggccgatgtcagcactaaggtgaagaacaagaacatcacaactgatgtcaaagtggacactaactcaaatctgcgtacaaccattcatgtggatgaacctgcacctggactcaagacaatttttagctttaattttccagatcag

SEQ ID NO: 195829 - DNA, 282 bp, Glycine max
cagaaatcaaaagcctacttcaagagatatcaagtcaagttcaagagaagaagagagggaaaaaccgattaccgtgccaggattcggttgattaatcaggacaagaacaaatataacactccgaaataccgatttgtggttcgctttagcaacaaggacattgttgcacaaataatatctgctagcattgccggcgatttagttcttgctacagcatattcacatgagctgccacgatatggtcttgaagtaggacttacaaattatgcagcagcttattgc

SEQ ID NO: 195830 - DNA, 269 bp, Glycine max
ggttagatgggttcgcttcagtcttggagaagtgcttacggtgccttcaaggataccaccaaagtgggtcttgcccatgtcaatagcgattacgcggatttggacgttgccatagtcaaagccacgaaccacgtcgagtgtccccccaaagagaggcagctcagaaagattctgtttgccacgtctgctgtgagacctagggctgatgtcgcttactgtatccatgcgctttcgcggcggttgacaaagacgcggaattggacggtggc

SEQ ID NO: 195831 - DNA, 275 bp, Glycine max
caccgaacaacttcccctgtaaatcgcgtttcgtttgtgcaaggttttaaaagatggctgatgctgaggacattcaacctcttgttgttgataatggaactggaatggtcaaggctggttttgcaggtgatgatgctcctagggccgtgttccccagcattattgggagaccacgccatactggtgtaatggttgggatgggtcagaaggatgcttacgtgggtgatgaagcccaatcaaaaaggggtatactcaccttgaagtatcctatagag

SEQ ID NO: 195832 - DNA, 274 bp, Glycine max
tttgcttcaagcgtttgtctgatgccacaatcttgttagtactgtatggtcttacaagcatgtattttgctggggttatggttcggttgattcttgtggctacccctgctgtgtgcctcattagtgctatagcggtttctgccactgtgaagaatttggctcgggtagtgagggccaaaagcccagctgttcaaagtggatctactacacggactaactctgcaaacagatcttccaagggtgtagttgacaactgccagcctttccaaaagaa

SEQ ID NO: 195833 - DNA, 282 bp, Glycine max
atgggtactaacagatctttaatggccacgatcctcatcgtgttcttcacggtgttggcagtgtcatcggcgttggacatgtcgataatctcgtatgacagaagccacgcggacaagtcagggtggaagagtgacgaggaggtaatgagtatatacgaggagtggcttgtgaagcatgggaaggtgtataacgccgtcgaagagaaggagaagaggtttcagatcttcaaagacaacctcaactttatcgaagaacacaatgctgtgaaccggacatacaag

SEQ ID NO: 195834 - DNA, 290 bp, Glycine max
cacagctattgaatttcacttcacttcacttgcatgccaaatgaaaacaacctcttcccagaatcttgtcggtatttaactccctcgatttcacaacaccaataacaatgagagtttcaacagagacagagccggagactaaaaagataaaacgcattcgcggcggcggggactcgagcaagcaccctttgtaccgcggcgtgcggatgcggaactgggggaagtgggtgtcggaaatccgcgagccgaggaagaaatcgcggatatggctaggcacattccccacgccg

SEQ ID NO: 195835 - DNA, 289 bp, Glycine max
gcttgctactgagtttccacactgcataccttatgtcttccgaattcgaagttaatttgcaagatggctaaggaaaaggctcagatcaacattgtggtggttggtcatgtggaccctgaggaggcaaccaccattaacgagctgaagaagcctgttgtggagaaagaagctccagggcatgccatatgagggcatgcacgtacggcctcggaggggaaccagaaaattatgttaacaaaataatctggaaccctaatgtatcagtgtcatcatcagtgtgtagtttaag

SEQ ID NO: 195836 - DNA, 266 bp, Glycine max
gaggcacaccagaactggcctgggctgctgccaagcatgggcgtgttgtctacattcttgaattgctcttgcctttgaaggaagaaattccactccagctaagagctgctggcagcgtccttgttggggaagcttgttagccaacaaatgcatggaccaagagttgctataacacttgcaaggtttctccctgatggccttgtgtcagtaattagggatggacctggtgaatccgctgtagttggtcttgagcagactcacgagac

SEQ ID NO: 195837 - DNA, 284 bp, Glycine max
gagaaattgagtttctgagataaccacttttctctttgattcatcaatggcaaccgcgaggacctcgaaggatgtttcgcctcacgatttcgtgaaggcttacgcctcccatctcaagcgttccggcaagatggagcttcctgagtggactgatattgtaaaaacagcaaaatttaaggaattggctccatatgatcctgactggtattatgttagggctgcctcaatggcaagcaagatttatttgagaggcggtcttggtgttggggctttccagaggatct

SEQ ID NO: 195838 - DNA, 281 bp, Glycine max
tcgacgcggcggttgcagaagaagattgcaagatgaagttcaacatcgcgagtcccaccactggatgccagaagaagctcgagatcgacgacgatcagaaactacgagcattttgggacaagaggatctcacaggaggtcagcggagatgcacttggtgaggaatttaagggctatgtcttcaaaattactggaggttgtgacaaacaaggattcccgatgaaacagggagtgcttactcctggtcgtgttcgacttttgcttcacaggggaactccttgc

SEQ ID NO: 195839 - DNA, 279 bp, Glycine max
gtccaaacctatatagatgatcgacttgaaaagggagaagaaatctcacctacactcaccaaagccatcgaaaattctcgtgtatctattgtcattttctcagagaactatgcttcctcaaagtggtgcttgggtgaactcatcaagattatggaatgcaagaatgaaaaaggacagatggtaataccagttttctacaacgtagattcatcccatgtgaggaagcagacagggagctgtgagcaagcctttgaaaaacatgagggagaacctaggtgc

SEQ ID NO: 195840 - DNA, 279 bp, Glycine max
ctcccttcccttcgactccacggcgcagatccgaggagtttgggaaaccctaattcattcctctttgcttctatctctattaccctaacaccagtgatggcaggtttggctccacgaaggatcgcagtttgatgctcggcaatatgactctaagatgaatgaattgctttccgctgatggacaagaatttttcacttcatatgatgaagtctatgatagttttgatgcaatgggccttcaagaaaatcttctcagaggcatatatgcttatggttttga

SEQ ID NO: 195841 - DNA, 285 bp, Glycine max
cggagaccgtgccggtttccgtcgcggctttggcggtcgtggacgcggcggcgacaggggacgagggcggcgcagggcaggagggcgccgcgacgaggaggagaagtgggtcccagtgacgaagctggggcgcctggtgaaggaggggaaaattcggagcctggagcagatctacctacactcgctcccaatcaaggagcaccaaatcattgacaccctcgtggggcccaccctgaaggacgaggtgatgaagatcatgcccgtccagaagcagacccgcgccgg

SEQ ID NO: 195842 - DNA, 270 bp, Glycine max
  unsure (1)..(270): unsure at all n locations
gcacagaagaattaacacgtatatagcaagcatggcagtcacactctacgaccttagctctgcctctgggttgaagaagcttgatgagtaccttctcccacgcagctacatcaccgggtaccaagctacaaaggatgatcttactgtttatgcagctttgccaactgctccatcagatgaatatggaaatgtttccaggtggtacaagcacattgatgctttgttgagatctctggtgtttctggcganggatctggtgttattgttgag

SEQ ID NO: 195843 - DNA, 281 bp, Glycine max
atggctcctcggtctagcagcaaggacgcccaagaccttttccgcgctctttggtctgcttatgctgcaacccccactaatctcaagatcattgatctctatgtcatctatgccgtattcaccgctttcatccaggttgtttacatggctttggttggatcatttccatttaactccttcctatcaggagtactttcttgtgtaggaactgctgttcttgctgtttgtctcaggatccaagtgaataaagagaataaggaattcaaggatcttgcacctga

SEQ ID NO: 195844 - DNA, 278 bp, Glycine max
attgacaatgaggcctgctcttgctttgcttcctcttctatttgctttcttgttagctgccactacagaatcaagaaaagatacaggggaatattggaaaatgatcatgaaagatcaggaaatgccagaaggacttcaaggtcttgtttcatttcaatctgaaaataaccctaagactcaagagcagcttggtaaaggttccaaaaaccattgtgaagagtctctagttacaaatacacaagttaatagtgacttcgaacccataccaagtgttacca

SEQ ID NO: 195845 - DNA, 237 bp, Glycine max
gaaggtgtatggtccaacctatggatcccccaagagggtcctggtgtgtctgattgagaaggaaattgagtttgaaacagtgcatgttgatctcttcaagggagagaataaggaacctgagttccttaagctgcagccatttggatcccttcctgttattcaagacggtgattatactctctatgaatctcgtgcaataatcagatacttagctgagaagtataaagaccagggact

SEQ ID NO: 195846 - DNA, 280 bp, Glycine max
ggcgaaactggtcattattttgccatgaaggcaatggagaagggtgttatgctcaatcgtaacaaggtgcatagagcttgcacagagagagagatactcgacatgttggaccacccttttcttcctgcattatatgcttcctttcagacgaagacacatgtttgcttgataactgattattgttctggtggagaactattccttcttcttgaccgacagccagctaaggttctcagggaagatgcagtgagattttatgccgctgaagtagttgttgcgt

SEQ ID NO: 195847 - DNA, 271 bp, Glycine max
gcaaggacttgggagtgaaattcccattcgaccagccaatgaagatctacaacagtttgtggaacgctgatgactgggcaacgaggggtggtttggagaaaacggattggtcgaaagcacccttcatagcagcgtacaaggggtttcacatcgacgggtgcgaggcttcggtgaacgccaagttctgcgacacgcagggcaagaggtggtgggaccagcctgagttccgtgaccttgacgccgcccagtggcgtaggctcagatgggtgcg

SEQ ID NO: 195848 - DNA, 273 bp, Glycine max
taaaatggcgtcgtcacaaccagagatgtagcatccaaagaaggtttttggttgggctgctcgggactcatctgggcttctctccccattcaacttctccagaagagaaacgggggagaaagatttggtattcaaagtgcaatactgtggaatatgccactcagatctacatatgttaaagaacgagtggggcaacacaacctatcctctggttcctgggcacgagattgctggtgtggtaacagaagttggaagcaaggtgcaaaagttcaa

SEQ ID NO: 195849 - DNA, 281 bp, Glycine max
caaaaatctcccttctaaccttattcttcttctcgtccttcaccatcattgcgcatgcaattgttcctcaaaacgaaaccttcaaatttgagaactcaggtgaacttggaccctacatcgttgagtacggtgcagattacagaatgataagcatcttcaactctccattccaagttgggttctacaacaccaccccaaatgccttcactctagctttgcgtgtagggctccaacgctcggagcagctatttcgttgggtttgggaggcaatagggccaacc

SEQ ID NO: 195850 - DNA, 282 bp, Glycine max
atacacacgacccatttttctcttggtgttgtagaaattgttgtttcttcctctctgagttccaactttcacctcaaccaaatacacaacaaaatggggtttcagaagataagggttggcaaccccatcgtcgaaatggatggggatgaaatgacccgagtgatttggaaactgataaaagataagcttatttttccttatttggagctggatattaagtattttgaccttggccttcctcatcgcgatgccactaatgatagagttactattgaaagtgct

SEQ ID NO: 195851 - DNA, 287 bp, Glycine max
gtttggagcgatccgagaaaaactctgtaaacatgttggtttaccaggacctccttacaggtgatgagcttctctctgactccttccgttacaaggaaattgagaatggaatgctgtgggaagttgaggggaagtgggttgttaaaggagcagttgatgtagacattggtgcaaacccttctgctgagggtggaggagaagatgagggagttgatgatgccactgttaaggttgttgacattgttgacacattcagacttcaggagcaacccgcattcgataagaag

SEQ ID NO: 195852 - DNA, 287 bp, Glycine max
ctctcgagccgaatcggctcgagctgacactccttcttctccgcttccccttcgatcatcgcttcagaatgccgccgaagttcgacccctcccagatcgtcgacgtcttcgtacgcgtcaccggcggtgaggtcggcgcggcgagttccctcgccccgaagatcggtcccctcggtctctcccccaagaagatcggagaagatatcgccaaggaaaccgccaaggactggaagggcctccgcgtcaccgtcaagctcaccgtgcagaaccgtcaggccaaggtcacg

SEQ ID NO: 195853 - DNA, 286 bp, Glycine max
cccaggcgaggcgaaagatggaggggaagtgagaggatgtgtcgttggcgagcgaacaagttccccgagagacagccgattgggacggcggcgcagagccaagacgacggcaaggactaccaggagccggcgccggcgccgctggttgacccgacggagtttacgtcatggtcgttttacagagcagggatagcagagtttgtggacacttttctgtttctctacatcaccgtcttaaccgttatgggagtcgccggggctaagtctaagtgtagtaccgttggga

SEQ ID NO: 195854 - DNA, 279 bp, Glycine max
ggcattttgggcatcgcttgggcctttggtggcatgatcttcatccttgtttactgcaccgccggtatttcaggaggacacataaacccggcggtgacattcgggttgttcctaggacgcaaggtgtcgttgataagggcgttgttgtacatggtggcacagtgtgccggtgctatctgtggtactggattggccaaggggttccaaaaagcatactacaacaggtatggcagtggtgccaactctgttgctgatggctacaacaatggtactgctttg

SEQ ID NO: 195855 - DNA, 279 bp, Glycine max
agggacatatgggaaggtgtacagagcaagagagaaggcaactgggaagatcgtggctctgaagaagactcgtctccacgaggacgaagaaggtgtccctcccaccactctccgtgaggtttccattctgcgaatgctctctcgcgatccccatgtcgttaggttactggatgtcaaacaaggtcagaacaaggaagggaagacagtgctctacttggtatttgagtacatggacaccgatctcaagaaattcatacgctctttccgtcaatctgggga

SEQ ID NO: 195856 - DNA, 276 bp, Glycine max
ctgattctaccgtcatcaactaggagaagaagcttcattttctgcaaaatggatccctctgcggcattgctatttaaccacctcaagggtgcagacccgttcttcctgctagcgggtcctaatgtgattgaatcggaggagcacattctgcggatggctaagaacatcaagagtgttgcatctgaagttggaataccattggttttcaagtcaagctttgacaaagctaaccgaacatcatcaaaatcatttcgtggcccggggatggctgaggga

SEQ ID NO: 195857 - DNA, 275 bp, Glycine max
aatcgcttgggccttcggtggcatgatcttcgccctcgtttactgcaccgctggcatctcagggggacacataaacccggcggtgacatttgggctgtttttggcgaggaagttgtcgttgcccagggcgattttctacatcgtgatgcaatgcttgggtgctatttgtggcgctggcgtggtgaagggtttcgaggggaaaacaaaatacggtgcgttgaatggtggtgccaactttgttgcccctggttacaccaagggtgatggtcttggtg

SEQ ID NO: 195858 - DNA, 279 bp, Glycine max
caccgcgatatgaacgatgcaaaatagtttcagatacgtcgcgttgattgattgatatgaagtggttgactttctggaactgcatatctatcctcgtgttgtcttttgctttcttcttcttctattgtcacacatacacatctactccttccctcatggctgagcaatcttccaagtccatttacgatttcacagtcaaggacatcagtggaaatgatgtgagtctgaataattacagcgggaaggttctactgattgtgaatgtcgcctcacaatgtg

SEQ ID NO: 195859 - DNA, 283 bp, Glycine max
tataactcctgtttctttattaattctctctttcaaatatatggcagaagatgcttcaattattccaacacacacaaaagctcggtactactctgaacatggtagtccaggtgatgttctcaaattagatcctaattggcccttaccccaacaactcaaagatgaccaagtgctcatcaaggtcatcgctgcatccattaatcccgttgattacaagaggatgcacggcgagttcaaggacactgaccctcatctgcctattgtgccgggttatgatgttgct

SEQ ID NO: 195860 - DNA, 288 bp, Glycine max
cgctcgagccgctcgagccgtttcttctctctgttttccttcttcctcgcatcaatggagttggacggcgttactcctcggcatgtgcaaccctctcctcgacatctctgccgtcgtcgacgacgctttcttgcaaaaatacggtatcaagttgaacgatgcgattctcgccgaggataaacacaaacctatgtatgaagaattggctaacaatcctaatgtggagtacattgctggaggtgctactcagaattcaatcagggttgctcagtggatgcttcaagcacc

SEQ ID NO: 195861 - DNA, 281 bp, Glycine max
cgtttctatttctgggcattcagaagattgcaggaaaagttatcagctttatttccatattgaacagagttgttgatctagaatggagatcactagaataggccaatggttaagtcttctgatatgtgtactactattactgcagacagaaggggttcctgtgggaatcacttttgttgaaaatgcagtggcaaaaggggctgtttgtttggatgggagtcctccagcttaccacttccacaagggatctggagcagggattaacaactggatagttcact

SEQ ID NO: 195862 - DNA, 276 bp, Glycine max
ctctttcataacctagtgcgactctgtgtcagagtttgtgaagtgaatcccataatcatgaagaaaggcaacttgggacttggtctcaaactctcagttcctgtgtctgatcaatctaattttgccaggttcctgactgacagtgggacttttaaggatggggatctgcttgtcaacagggcatggagttcgaattgtctctcagaatgatgtcgaagctccacctccaatcaagcctacagacaaccagttaactttggcagacatagatgtaat

SEQ ID NO: 195863 - DNA, 279 bp, Glycine max
  unsure (1)..(279): unsure at all n locations
ggcactggtttcgaacccttcgttgtggttaggtcttcttcacctttcganttttggnatccatgggtcagggaactccgggcggcatgaaccggcagggcgaccggaagccggacggcggcgacaagaaggagaagaagttcgagccgtcggctccgccggcgcgcgtggggcggaaacagcggaagcagaaaggtccggaggcggcggcgcggttgccgacagtgactccggtgncnnatgcaaactgcggcttctgaagctggagcggatcaagga

SEQ ID NO: 195864 - DNA, 278 bp, Glycine max
ctcgagccggaaaaataagtctggccattgaagtatgtaaattcttctttcactttaatattccccactggattctttccatctgtcactcttacagtcttcaaacttgtcttctcaaaagagttggcaacaccatcaatgtcaaggtcaagatggtaaatgtagaagtggtcgtggtaaacaccaatgctgtttgccgacaccaagataccatgttgatcgctcttgatctcactcttgtgcttatttcgattttcgaaggtaaaaagatgaatctg

SEQ ID NO: 195865 - DNA, 280 bp, Glycine max
gaataactgaatatcgtatagctcaaaataaagatttaaccaaatgcaattcatatgaaaaaagccaattaattctttacaaagaacaacaagtaaacgcattaaaaaaaaaaattagaaaacaatatagatacgatcttttatcctataattttatcaattatgcagataagaaagactcatatatttatggatatagatccctatttcaagtaaaaaaaaaccaagtgatttcttctaattacaacacgtataaaaaagaattattggatatcataga

SEQ ID NO: 195866 - DNA, 258 bp, Glycine max
ggcctgctcttgctttgcttcctcttctatttgctttctcgttagctgccactacggaatcaagaaaagatccaggggcatattggaaaatgatcatgaaagatcaggaaatgccagaaggacttcaaggtcttgtttcatttcaatctgaaaataaccctaagactcaagagcagcttggtaaaggttccaaaaaccattgtgaagagtctctagttacaaatacacaagtcaacagtgcattcgaacccataccaa

SEQ ID NO: 195867 - DNA, 278 bp, Glycine max
ccaccacctaaagtgatgcaggtggataagtctgcatggatgactgatgaagaatttgcaagagaaacgattgctggtttaaatccaaatgtcattaagattatagaggagttcccactaagtagcaagctagatactcaagcctatggtgatcatacctgtataatagcaaaagaacatttggagcctaacttaggtgggctcactgttgagcaggctatccaaaacaagaagttgttcatcttagatcaccatgactatctcattccttatttgag

SEQ ID NO: 195868 - DNA, 275 bp, Glycine max
gaaaaagggttcggtgttctgttcgcgatgagagccaagtggaagaagaagcgtatgcggcggttgaagaggcagcgccgaaagatgagacagagatccaagtagtgcgttaaacctagtttgtttctgttgcttttacaattgcttatgttgtcgaatgggacacccagttgttagtggcactggtttctcctttttgatgtttgatacattttgttggattcaagtagtttatgttcgtcttatgttattagctcaaaacaatgttgttactg

SEQ ID NO: 195869 - DNA, 277 bp, Glycine max
cgcattttaggcattgaaaactaattgaaggcgttgcagtccagcgttgatcagaatcagagcatggacgggcatgattcagaagacccaaagcaaagcactgctgatatgacagcttttgtgcaaaatcttcttcagcagatgcaacttaggttccagacaatgtctgactccatcatttctaagattgctgagatgggagaccgtataaatgcagttggcgcaaagcatcaatgatttaagatcagagatgggcgtggagagcactccatcacct

SEQ ID NO: 195870 - DNA, 273 bp, Glycine max
ggccagcatcttctcgaagacgagcttcaacttctctgcgaatatgtaaaagagatccttattgaggagtccaatgtgcagcctgtcaatagtccagtgactgtttgtggtgatattcatggtcaattccatgatctaatgaaacttttccagactgggggtcatgtgcctgaaacaaattatatttttatgggagactttgttgatcgaggttacaatagtcttgaagttttcaccatccttttacttctaaaagctagatacccagctaat

SEQ ID NO: 195871 - DNA, 275 bp, Glycine max
  unsure (1)..(275): unsure at all n locations
cccagattgtgttcgagcacttgaccatcacatactttcggttgcatggatgccacctttaccacaatggagggcccttaggagagcttgtgccaccaaagtgttctcttctcagcagctcaatttnacacaagttcttcgccagaggaagatgcaagatttgatggattatgtgcaggaacgatgcgagagaggtgaagctatggatattggtgaggcttcctttacaactgttcttaattccatatcaaacactttcttctcaatggatttgg

SEQ ID NO: 195872 - DNA, 285 bp, Glycine max
cagaattcaaagacggcgtcttcataaacgcctttattctccgtttccgtttccttacccggaattcgatttttcatctctgaaaatgcgagagtgcatctcgatccacattggtcaggccggtatccaggtcggaaatgcttgctgggagctctactgtcttgagcacggcatcgggcccgatgggcaaatgccaagtgacaaaacagttggcggaggtgatgatgctttcaacactttcttcagtgagactggtgctggaaagcacgtgccacgtgccgtctt

SEQ ID NO: 195873 - DNA, 278 bp, Glycine max
gtccctttctgttctcttcactcttggtcttgcgagagaaagccatgccagagacgaagatttttggcatgctgtttggccaaacactcccattccaagttcattgcgagatcttctacagcctggccctgcaagtgttgaaatcgatgatcaccctatgcaaattgaagacacacagtactcgaaaaccttcttctataaagaagaccttcatccaggcaaaacaatgaaagtacaattcagcaagcctccctttcaacaaccatggggtgttggta

SEQ ID NO: 195874 - DNA, 241 bp, Glycine max
ctcgagccgctcgagccgttttgaccaggatgactgggagcactatgctaagcttactgcagaggttggacccaatgtacaaattgttggtgatgatctcttggttaccaaccccaagagggttcagaaggcaattgatacaaaagcatgcaatgctcttctccttaaggtcaaccaaattggttctgtgactgagcagtattgaagctgtcaggatgtccaaaaaagctggctggggtgt

SEQ ID NO: 195875 - DNA, 274 bp, Glycine max
ggcgccgaagataacacgtaaggttagcagaaaccccgaattgataaggggcatcggaaagtactcgaggtctcaaatgtaccacaagaggggcatttgggctatcaaggccaaaaaccgtggcgttttacctcgccacggccctaaacccaaacctgaaactcccgctgaaaaaccacccaaattttaccctgctgacgatgtcaagaaaccccttgtcaacaagcgcaaacccaaacccgcgaactcagggctagcattactcccgggacag

SEQ ID NO: 195876 - DNA, 278 bp, Glycine max
ttcggctcgagagcgcgtctcgtctctccttgcagcccaagccatggcgcctctgatcctgcatggtggaaaaaccaacaaaaattcttacaagacactcattgcggcggagcatgccggcgtccaagttgactttgccccacattttgagatgggtgtctccaataaaactcctgaatttctcaagatcaatcctattggcaaggttcctgtgttggaaacacctgatggtccagtattcgagagcactgccattgctcgctctgttacccagctga

SEQ ID NO: 195877 - DNA, 278 bp, Glycine max
ggcccttcggggcctcttccccgggcgtcgaacagtcaactcagaactggtacggacaaggggaatccgactgtttaattaaaacaaagcattgcgatggtccctgcggatgttgacgcaatgtgatttctgcccagtgctctgaatgtcaaagtgaagaaattcaaccaagcgcgggtaaacggcgggagtaactatgactctcttaaggtagccaaatgcctcgtcatctaattagtgacgcgcatgaatggattaacgagattcccactgtccct

SEQ ID NO: 195878 - DNA, 280 bp, Glycine max
cccattcatacgtggtgttgttactgctgctcttttctcttttcttttctctttagttctctcttcccctttctttttctttttcttcttcttctgagcttgtttaagcttttcttccattaacatattatcacaatgtgtggtattcttgctgttcttggttgttctgatgactctcgagccaaaagggtccgcgtgcttgagctctctcgcagattgaagcaccgtggccctgactggcgtgggctccatcaacatggtgactgctttttggcacatc

SEQ ID NO: 195879 - DNA, 279 bp, Glycine max
ccctcgagccgattcggctcgagcttaggtcttccgaattcgaagttcatttgcaagatggctcaggaaaaggctcagatcaagcttgtcgtggttggtcatgtggaccctgaggcggcaaccaccattaacgagctgaagaagcctgttgtggagaaagaagctccagggcatgccatatgcgggcatgcacgtacggcctcggcggggcaccagaaaattatgttaacaaaataatctggcaacctaatgtatcagtgtcatcatcagtgtgtagtt

SEQ ID NO: 195880 - DNA, 273 bp, Glycine max
gctagtttatcgtgaggcgaatatgaagttgtttgtcttctttgttgctgcagtagttttggtagcatggccatgccatggcgcaggctaccaaaggttccctctccgaatgacaactggctatggtgagcgttcttcggcggtaaaatgcgcaagttttaggcttgctgtggaagcacacaacatccgagcctttaaaaccattcctgccgagtgcgttgaaccaacaaaggactacattaatggcgaacaatttagatcagactctaaaac

SEQ ID NO: 195881 - DNA, 276 bp, Glycine max
tggggaactggctacataggacaaaggttggtgaaggcaagtttagctcaaggacatgaaacatttgttcttcacaggccagagattggtgttgatattgagaaagttcagcttctattgtcattcaaggagcaaggagctaggcttgtttcaggttcatttaacgaccataagagcctagtgaatgctgtgaaacttgttgatgttgtcatttgtgccatttctggtgttcacatccgcagccaccaaattctactccaacttaaacttgttgat

SEQ ID NO: 195882 - DNA, 275 bp, Glycine max
ctgaaagagaagatcgaggcgaaaatagagggtgatcatcatcatcacaaggatgaggacacaagtgtccctgttgagaaagttgaggttgttgaaacagcacatgctgaggaaaagaaggggttcctcgacaagattaaggcgaagctaccagggcacaagaagacagaggaggccacagctactactcctcctccaccaccacctgttgcatcattggagcatggtgaaggtgctcatcatgaaggagaggccaaggagaagaaaggtatatt

SEQ ID NO: 195883 - DNA, 261 bp, Glycine max
gttcgatcaaatagctcccagtactttaattgatttctgaatatcatcacttaatttgaaggacagatggtgagcgtagctgagatccgccaggcacaaagggcagaaggcccagcaaccatccttgccattggaactgcaaacccaccaaactgtgttgatcagagcacctatcctgactactacttcagaatcaccaacagtgagcacatgaccgagctcaaagagaaattccagcgcatgtgtgacaagtctatgatc

SEQ ID NO: 195884 - DNA, 273 bp, Glycine max
aaaaaactcttccaaagtagaggcagagaatctgaaagctagggtttgggatgccgaagaacaagggcaagggcggcaagaaccggaagcgcggtaagaacgaggcggacgacgagaagcgggagctggtattcaaggaggacggacaggaatacgcgcaggttctccgaatgctcggaaacggtcgctgcgaacgcatgtgcatcgacggcaccaagcgcctctgccatatccgcggcaagatgcacaagaaggtctggatcgccgccggcg

SEQ ID NO: 195885 - DNA, 273 bp, Glycine max
gagggtggttgaggggctgtctggtggttttcgcagtggtctcagcgttgggcgtgtgtggccctgctctttactggcgattcaagaacgccatcactctccgcaacaacaacaacaaactctcttgcccttcctgcctctgtgactgccctccccctctctcgctcttccaacttgctcctgggctggcgaatctctctgtctcagattgtggaagtcatgacccggatctaaaggcggcgatggcgaagcagtttgtggaccttctcagcg

SEQ ID NO: 195886 - DNA, 273 bp, Glycine max
cgccctcctcttcacacattttctgtgggctctaacaaacattctcgttcacactttcagattgtgtgacgattcgggcgggtggccgaactgatgttcctcctgccaacaggaagtcagaggttgaccctttgaagcgggtgccatttgaaaaacctccatttagtctcagccaaatcaagaaggtcattccacctcactgtttccagcgttctgttttccgctcattctcctatgttgtttacgacctcaccatagccttctgcctctatt

SEQ ID NO: 195887 - DNA, 273 bp, Glycine max
catccccgaagcccttcaccgcattgcaaccatgtcgaggagaaaggtcagagagccaaaggcagaaaacgtgactctgggcccagctgttagagatggtgaacatgtctttggcgtcgctcgcatctttgcctccttcaatgataccttcattcatgtcactgatttgtctgggcgggaaacgcttgtccgcatcactggtggaatgacggttaaggctgacagagatgaatcgtctccttatgctgctatgcttgcagctcaggatgttgc

SEQ ID NO: 195888 - DNA, 277 bp, Glycine max
ttctccttgaactcaaacatggcagatgaggtggttctgctagatttctggccaagtccatttgggatgagggtcaggattgcacttgctgaaaagggtatcaaatatgagtacaaagaagaggacttgaggaacaagagtcctcttctcctccaaatgaacccggttcacaagaagattccggttctcatccacaatggcaaacccatttgtgaatccctcattgctgttcagtacattgaggaggtttggactgacagaaatcccttgttgcctc

SEQ ID NO: 195889 - DNA, 278 bp, Glycine max
tggcaatgaagcttccattaagcagaagctgaagctgattaaggggtccttctactccatcaccttcagtgccgctcgaacctgtgcacaagaggagaagctcaacgtgtcagtggttccaaccactgagaagagggaccggggcatcatccccattcagactatgtatggtagcaatggctgggagtctttcacttgtggcttccgagcagatttcccagaagctcaaattgtcatccataaccctggcaaagaagaggatccagcttgtggtcccc

SEQ ID NO: 195890 - DNA, 186 bp, Glycine max
attggatcgttctctcagactgtagaacggaggagggtacgccgtgaattcaaggctaacaagatctgcgaggaagagtatgtaaagtcaattaaggaggaaattcgcaaagttgttgagcttcaagaagagcttgatattgatgttcttgttcatggagaaccagagagaaatgatatggttgag

SEQ ID NO: 195891 - DNA, 273 bp, Glycine max
ctctattctttgaaaccaaagttcaaactctgtcttccctgggttctatttcgaaatcaacgacgatgagttccacagaggcagcagccacagagaagaaaggtggaagagggaaaccgaagacttcaaagtccgtttcccgttcctccaaagctggccttcagtttcccgtcggccgtgtcgctcgctacctcaaggccggtcgctacgcccagcgcgttggctccggttcccctgtttatctctccgcggttctcgaatacctcgctgccg

SEQ ID NO: 195892 - DNA, 277 bp, Glycine max
cctcgagccgaatcggctcgaggtttgtcttctttgttgctgcagtcgttttggtagcatggacctgccatggcgcaggctaacaaaggttccctctccgaatgaacactggctatggtgagcgttcttcggaggtaaaatgcgcaagttttaggcttgctgtggaagcacacaacatccgagcctttaacaccattcctgaagagtgcgttgaaccaacaaaggactacattaatggcgaacaatttagatcagactctaaaacagttaaccaaca

SEQ ID NO: 195893 - DNA, 263 bp, Glycine max
gaaattttaaaaatgactgggataaacttaagacttcaattattgaaattgaataagtaaacaatttaattggattggtcgaatggtatcaaaaaaatggagtactaactcccatttcttatttattattgaattaaccgatcaacttgctttgttatcgaacatttctttttgatttcaaacattttccggaaaaactttgaatctatttttatatgcgaatcaatcctactacttctggtcctgaggtttctgcgcttgac

SEQ ID NO: 195894 - DNA, 274 bp, Glycine max
ggagaacgtaacgtgctctggtttctggactcgaagatgaaggccacaaaggaattgagcgagcaagtggaggaaaacgaggtcaaggttttggttgaggaggacgacgaagaatacgagtccgtggatgaagtagtagacgacgcagaagatgatgaagacgaagaagaggacgatgacgacgacgaaggagacgacaatgacgacgaggaagatgatgctcctgacggcggtgacgacgacgacgacgaagatgatgaagaagaaggtgatg

SEQ ID NO: 195895 - DNA, 278 bp, Glycine max
cacagagacagagagaatgagtacggtgggagcagggcaggtgagtcgtaatggtcatggatgttgcaaatcagggccaggctatgcttccccactggaagccatttctggtcccagagagtctctcatttatgtaacctctgtctacacagggaccggaatagagaagccagactatttggcgacagtggatgtggatccaaactctccaacttattccaaagtcatccataggcttcctgttccttatttaggtgacgaattgcatcacacaggct

SEQ ID NO: 195896 - DNA, 277 bp, Glycine max
caccccatccattcccttatccccacttcaccacactctatcagccccaattctggtcatgcttctctctccgttcgcgcctccatcgccgtggaaacccccacggagacggtgaagctgaacaagtacagctcccgcatcaccgagccccaatcgcagggcgcctcccaggccgtgctctacggcgtcggtctctccgaggacgacatggccaagccccaggtcggcgtctcctcggtctggtacgagggcaacacctgcaacatgcacctcctcc

SEQ ID NO: 195897 - DNA, 273 bp, Glycine max
ggcccttcgatgtcttcttgtgtttcaatgaggcagagacacgccacagcttcacaggtactctctatcacgctttacagagcgccagattcaagacttacatggagaatggcaagttgagacgtggcgacaaaatcgcaaccgctattctcactgcaatggaagcatcaaggatttcaatcgtcgttttctcaccatactttgcctgctccacctgctgccttgatcaacttgtccacatccatcgctgtatgaataccaaaaaccaactca

SEQ ID NO: 195898 - DNA, 270 bp, Glycine max
ctcttctccatcgcgcgtcagacacacattttagttgctactaatgggaactgttgaagctgcaaacaaggatgcaaatggaagtctcctagagaaaaatccttcagttgtttttgtgttaggtggcccaggaagtggaaagggtacccaatgtgcaaatattgtccaaaattttgggtatactcatctcagcgctggtgatcttctgcgagcagaaatcaaatctggttctgacaatggtacaatgattcagaatatgattaaagaagg

SEQ ID NO: 195899 - DNA, 274 bp, Glycine max
cgctatagagattgttagtggaaagagcaacacaaattataggccaaaggcggagtttgtatatcttttagattgggcctatgttctccaagagcaaggaaaccttctggagctggtggatccaagtcttggttcaaagtactcctcagaagaggccatgagaatgctgctgttagcactcttgtgcaccaacccttctcccactcttagaccatgtatgtcatcagtagtgagcatgcttgagggaaaaactccaattcaagcaccaataatt

SEQ ID NO: 195900 - DNA, 271 bp, Glycine max
ccactctgaatgccaaacaccttccaagaggagagtcatcagtttctggtcccgtagttaggttgttcaagccattcgatgaactttttgttgacttccaggatttcaatgtggaagctctagagaaatttgttgaggaatctagtacccctgttgttactgtctttaacaatgatccgagcaatcaccctttcgttgccaaattcttcaacagtcccaatgcaaaggcaatgttgttcatcaacttcactgccgaagatgctgaatcttt

SEQ ID NO: 195901 - DNA, 266 bp, Glycine max
ctcgagccgaatcggctcgagggctcgagccgagccgcagcagcaacgtgatcgaagcgaaaagcgagtaatcagcagagaaagtactcgtcgtagttatgggtaaagttcacggatcacttgcacgtgccggtaaggttagaggccaaaccccaaaagtggccaagcaggataagaagaagaagccacgtggccgcgctcacaagaggatgcagtataatcgccgattcgtcaccgccgtggtgggattcggcaagaagagggga

SEQ ID NO: 195902 - DNA, 271 bp, Glycine max
  unsure (1)..(271): unsure at all n locations
gactgttgatggaccatcagccaaggactggagaggtggacgagctgcttcatttaacatcattcctagcagcactggagctgccaaggctgttgggaaagtcctccctgctttgaatggaaaattgactggtatggcattccgtgttcccaccgtggatgtctctgttgttgacctcacagtgaggctggagaaagaagcttcctacgatgaaattaaaaatgctntcaaggaggaatcagagggcaagttgaagggattcttggttaca

SEQ ID NO: 195903 - DNA, 273 bp, Glycine max
cgaaggtgagtagtaatggtcatggatgttgcaaatcagggccaggctatgcttccccactggaagccatttctggtcccagagagtctctcatttatgtaacctctgtctacacagggaccggaatagagaagccagactatttggcgacagtggatgtggatccaaactctccaacttattccaaagtcatccataggcttcctgttccttatttaggtgacgaattgcatcacacaggctggaattcatgcagctcttcccatggagacc

SEQ ID NO: 195904 - DNA, 272 bp, Glycine max
gcttgtctcaaagattaagccatgcatgtgtaagtatgaactaattcagactgtgaaactgcgaatggctcattaaatcagttatagtttgtttgatggtatctactactcggataaccgtagtaattctagagctaatacgtgcaacaaaccccgacttctggaagggatgcatttattagataaaaggtcaacacaggctctgcctgttgctttgatgattcatgataactcgtcggatcgcacggcctttgtgccggcgacgcatcatt

SEQ ID NO: 195905 - DNA, 275 bp, Glycine max
cgtagagttaatttatggagcaatggtgcctgtggatgtccagaaagcactagagaaggagtttgaaatggctttgcaagatcgtgtgatggaagaaacaaaagacaagaaaaacgcagttgaggcttatgtttatgacatgagacacaagcttaatgacaaataccaagagtttgtcactgcttcagagagagatgattttactgctaaacttcaggaagtggaagattggctttatggtgagggtgaagatgaaactacaggtgtatatactg

SEQ ID NO: 195906 - DNA, 272 bp, Glycine max
ggatcgcacggcctttgtgccggcgacgcatcattcaaatttctgccctatcaactttcgatggtaggatagtggcctaccatggtggtgacgggtgacggagaattagggttcgattccggagagggagcctgagaaacggctaccacatccaaggtaggcagcaggcgcgcaaattacccaatcctgacacggggaggtcgtgacaataaataacaataccgggctcattgagtctggtaattggaatgagtacaatctaaatcccttaa

SEQ ID NO: 195907 - DNA, 265 bp, Glycine max
gcggctagggtttagcgagctcttctagatttaaggcagatgggtaaggcaaaggttcacatcagtattgtggttattggccatgttgactctgggaagtccactaccactggccacctgatctacaagcttggcggcattgacaagcgtgttattgagagatttgagaaggcagctgctgagatgaacaagaggtctttcaagtatgcctgggtgcttgataagcttaaggctgagcgtgacagaggaatcacaattgatcttg

SEQ ID NO: 195908 - DNA, 272 bp, Glycine max
cttctgatcgctccctgagagagctcgtcgcggcggttgcagaagaagattgcaagatgaagttcaacatcgcgaatcccaccactggatgccagaagaagctcgagatcgacgacgatctgaaactgcgagcattttgggacaagaggatctcacaggaggtcatcggagatgcactcggtgaggaatttaagggctatgtcttcaaaattaccggcagttgtgacaaacaaggatttccaatgaagcagggcgtgctgactcctggtcgt

SEQ ID NO: 195909 - DNA, 265 bp, Glycine max
ccacatagtagctattatactctctagagtaattgcggaatctgctagaattttctaataatggcgaaagacgttgagcaggtcacagagcaaggtgaatactccgcgacggactaccatgaccctcctccggcaccgttgatcgacccagatgagctcacaaagtggtccttgtacagagccgccatagctgagttcatagcaacactcctttttctttacatcaccgtgttgaccattattggctacaagagacagagtgaca

SEQ ID NO: 195910 - DNA, 273 bp, Glycine max
ggatatcctttggtatatagttgaggttaatttcactgccactgcctacaaatcgaccaaatagcattgaccctgcattgaaaatgtctggtagatttgatagtgaaattgatattggtgttcctgatgaagttggaagacttgaagtccttcgcgtacataccaaaaacatgaagctttcagatgctgttgatctagagagacttgcaaaagatactcatggatatgttgatgctgaccttactgccctttgcactgaagctgctcttcaat

SEQ ID NO: 195911 - DNA, 266 bp, Glycine max
ggtttctcttcctccctggaagaaaaagaagagtcaccgctacgacgccgttcgtgcttttttgaggtgccacagtcatgtttgggcgtagtggaccaatgaggagtgacaactccaaatattatgatattctcggggtttccaaaaatgccagttaagatgaaatcaagaaggcctatagaaaggctgctatgaagaaccatccagataagggaggagatcctgaaaagttcaaggagttaggtcaagctatgaagttttaagtg

SEQ ID NO: 195912 - DNA, 259 bp, Glycine max
atattattgaattgacaatgaggcctgctcttgctttgcttcctcttctatttgctttcttgttagctgccactacggaatcaagaaaagatccaggggaatattggaaaatgatcatgaaagatcaggaaatgccagaaggacttcaaggtcttgtttcatttcaatctgaaaataaccctaagactcaagagcagcttggtaaaggttccaaaaaccattgtgaagagtctctagttacaaatacacaagttaacag

SEQ ID NO: 195913 - DNA, 257 bp, Glycine max
gcgagcggcccccttttttttttttttaaatttcaaggcttcacgaaattaagattgaagccaaagagaacgatttcatagacatatggatagagtatagcattagctattacaacaacatatccaaatggaagtctgttttctccatttcaaggaatatccaaatatatgtccagaatgatgatatacgttaaactaaagtataatgaataaattgttaatttgcccttcttatcctcaggcaaagcagaagcttt

SEQ ID NO: 195914 - DNA, 258 bp, Glycine max
ccagtagtcatatgcttgtctcaaagattaagccatgcatgtgtaagtatgaactaattcagactgtgaaactgcgaatggctcattaaatcagttatagtttgtttgatggtatctactactcggataaccgtagtaattctagagctaatacgtgcaacaaaccccgacttctggaagggatgcatttattagataaaaggtcaacacaggctctgcctgttgctttgatgattcatgataactcgtcggatcgca

SEQ ID NO: 195915 - DNA, 257 bp, Glycine max
gcgatttcgatctcgcatagcattctacaatggccactattccagttaaccccaagcctttcttgaacaatttgactgggaagcccgtaattgtgaaactcaagtggggaatggagtacaagggctatctcgtttccgttgattcctacatgaacttgcagctggccaacactgaagagtacattgagggacagtttactggaaatttgggagagattttaatcagatgtaacaatgttctctaccttcgaggagta

SEQ ID NO: 195916 - DNA, 255 bp, Glycine max
ggacactgcaaggattgatcaggctcatccagttggggtcacttcggtgtcgtgggcgccatcgatggcacccggagcccttgtcggtgctgggttgcttgatcctgtacagaagctgtgctctggtggttgataatactgtgaaggtatggaagctaaacaatggactctggaagatggactgcttccctgctcttcagatgcacatggattgcgttcgagatgttgcttgggcaccaatttagggctccctaa

SEQ ID NO: 195917 - DNA, 260 bp, Glycine max
ctctgttttcgcctcattccattttcatctatcaatggctccagtaccagcagcatcttcagattcaatcaagccaagagatgtttgcatcgttggtgttgcacgtacaccaatgggtggatttcttggtactctgtcatctctatctgccaccaagctaggctctatagctattgaagctgctcttaaaagggccaatgttgatccatcccttgtggaagaagtattttttgggaatgttcttagtgctaatttggggc

SEQ ID NO: 195918 - DNA, 262 bp, Glycine max
agaaaaaggaaaacaatgggttccgataatcaccagaacttggagttcttgaaggagatcggtttgggctcttccaacattggctcttacattaatggccagtggaaagccactggttcttctgtcacttctgttaatccttctaacaatcagagtatagctcaagtgaccgaagcaactttgcaagattttgaggaggggttgcgagcttgcagtgaagcagctaagacatggatgactataccggcaccgaagagaggtg

SEQ ID NO: 195919 - DNA, 265 bp, Glycine max
ggccgctcttgctttgcttcctcttctatttgctttcttgttagctgccactacggaatcaagaaaagatccaggggaatattggaaaatgatcatgaaagatcaggaaatgccagaaggacttcaaggtcttgtttcatttcaatctgaaaataaccctaagactcaagagcagcttggtaaaggttccaaaaaccattgtgaagagtctctagttacaaatacacaagttaacagtgacttcgaacccataccaagtgttacc

SEQ ID NO: 195920 - DNA, 259 bp, Glycine max
actcgagccgaatcggctcgaggctgcatgcactttcactcgaagatcccttgaagcgagtctacggccacagcaaccagcgaacacaactcaatcagctagggttgctttgcttgctatcttgttggaggattttctgttcaagagaagatggtaactagaattgtggatcttcgttcagacacagttacaaagccaactgaagcaatgagagctgctatggcaagtgctgaagttgatgacgatgttctaggctatg

SEQ ID NO: 195921 - DNA, 257 bp, Glycine max
caggaatggaggtcgcaacaaacacggccgcggccacgtcaagttcattcgatgctccaactgcggcaaatgctgccctaaggacaaggctatcaagaggtttctggtgaggaacattgttgaacaggctgcagtcagagatgtgcaggaggcttgtgtctacgaacaatacacgcttccgaagctgtatgtgaagatgcagtattgtgtttcctgtgctatccactctcatgttgtgagggttcgatcccgcactg

SEQ ID NO: 195922 - DNA, 257 bp, Glycine max
ctccgatctccgacaatggcgacccaaatgagcaagaagagaaagttcgtagctgatggagtgttcttcgctgaactgaacgaggttctgacaagagagttggccgaggcacggttactccggcgtggaagttagggttacgccgatgcgcaccgaaatcataattagagccaccagaacccaagctgttctcggtgagaagggaaggagaataagggaacttacctctgtggttcagaagaggttcaagtttcccg

SEQ ID NO: 195923 - DNA, 256 bp, Glycine max
gctacctccatggtgaagcttatgcttttctctgctctcatactcttgtccttgcaagcagttgtgtctgtaacaccactgcattttcaacatccactagaccctttaaccaaacaagagataagtcttgtccaaaccatagtccaaaacaagtacccaagctcaagtaacaggttgagcttccactacattggactcgccgaacctgaaaaggatgccatcctcaaatgggaatccatcaaaccaactgttataa

SEQ ID NO: 195924 - DNA, 258 bp, Glycine max
ctcgagccgctcccatctgcttctcactgatctccattcccattccatggcttccactgaatcatcccctttcaagaaaattcagattcaaagggatgacactacatttgacgcatatgtggttggaaaagaggatgctcctggaattgttgtgattcaggagtggtggggtgtggattacgaaattaagaaccatgccgtgaagatttctcagcttggtagtgggtttaaagctcttattccagatttatacagagg

SEQ ID NO: 195925 - DNA, 257 bp, Glycine max
aggcccacctcgatccctcttagtagtgggctcatgcggctctgtatgcggggatcttcgataagtaccatgcaatcaaggggctcggatgtaactggggtttcaaggcttccaatgaagggatcaccgttgattggttgaatcacttgataggttggcttttctgattggatggccctaacagtgaagctaaattgcctcttagaaggcaggatgtggagtggtgaagatccagagaggcccgtgggagctacaag

SEQ ID NO: 195926 - DNA, 304 bp, Glycine max
acctggtcacttgtactctagcaaagaaagagggttccgcagatggtacaatcctccttggttctctgaggctattccatctgccccttatgatcctcttgttttaagacacgcctttgagcaggcagtcataaaaaggttgatgactgatgtgccttttggtgttctactctctggaggtttggactcttctttggttgcatccatcacttctcgttacttggccaacacaaaggctgctgagcagtggggatcaaagttacattcattctgtgtaggccttgagggctcaccagatttgaag

SEQ ID NO: 195927 - DNA, 296 bp, Glycine max
aagtgaaggaacagaagcagaaaccaaatcatgtgttctctactttggagttccattgcattgtgtgtagctttcctactccttgagcttggcgttgtgcacccttcaccctcacaccataggatcactcgcttgccgggtcaaccccatgttcagtttcatcagttttcaggttatgtaaccgttcatgacaaaaaccagcgtgcactttttttccactttgctgaagccgaaaaagatgcactttccaagccccttgttctgtggctcaatggagggcctggttgttcttctct

SEQ ID NO: 195928 - DNA, 290 bp, Glycine max
cttcaccatgtcacttgctgggaaaatcaccactgaaatcggggttcatgcaaccgctacaaagtggttcaacctcttcgcaacacaactccatcatgttcaaaacctaactgatagagtgcatggaaccaagctgcatcaaggtgaagactggcatcacaacgagacagtcaagcactggacttataccatagatggtaaggttacaacatgtctggagagtattgaatccattgatgaacagagcaaaacaatcacctacaagctcttcagtggtgacattgatcata

SEQ ID NO: 195929 - DNA, 307 bp, Glycine max
cacaaccctgaactcatacgcgaatcccaacgccgtcgtttcgccagcgtcgaaatcgtcgacgaggtcatcaatctcgacaaagaatggcgaaaacgtcaattcgagttggaaaatctccgcaaggaattcaacaagatcaacaaggaagtctccaaactcaagcgtgctggggaggatgcttctaagttcattactgaatcagaggagaccaaaaaatcgatagcggagaaagaggttgaagtgcgggaaactctgaatctcttgaattccaagttggaaactattggaaacctcgtccacgatt

SEQ ID NO: 195930 - DNA, 300 bp, Glycine max
cgctcccaagagcacgcaccaccactattgcacttcttcctcgttctccctctttttcttcttcttcgctaaacccttttttctatctcactaacacaacaatgggagacgagaagaagggcaagcctgctgcttccggcgtgtggtccaccatcaagcctttcgtcaatggtggagcctccggcatgctcgccacctgcgtcattcaacccatcgatatgatcaaggtgaggattcaacttgggcaaggatcagctgcgcaggtcacttccaccatgcttaagaatgacgggtttgctg

SEQ ID NO: 195931 - DNA, 299 bp, Glycine max
gtttcaccgcacgaatatcttgttgtttggagcgatccgagaaaaactctgtaaacatgttggtttaccaggacctccttacaggtgatgagcttctctctgactccttccgttacaaggaaattgagaatggaatgctgtgggaacttgaggggaactgggttgttaaaggagcagttgatgtagacattggtgcaaacccttctgctgagggtggacgagaagatgacggagtcgatgatgcagctgttaaggttgttgacattgttgacacattcagacttcaggagcaacccgca

SEQ ID NO: 195932 - DNA, 299 bp, Glycine max
tgggaatcgatcttaaggctgggggtaacagcaaaaagaccaaaagaacagcaccaggatccaatgacatctagctcaaattacttgtcaagctttatcggttccttgttcgaaggactggcagcaatttcaatgctgttatactcaagcgcttgttcatgagcaaggttaacaagcctccaatttctttgtcaaggttaattaagtatacaaaggggaaggaggataaaattgctgtaatagtggggactgtaactgatgatatcagagtatatgaagttccagcattgaaaattaca

SEQ ID NO: 195933 - DNA, 277 bp, Glycine max
ctcattccttcatttttagacctagctccatctccctccactcaccataacatcttatcagaagcaaatgctgccaacaccaacttctgtgtaaatgttagcaacaatggctacattagtgctaatgaccccttgaactggggtgcggcggcggaggctatggctgggagccacctcgacgatgtcaagcgcatgctagaggagtaccggacgcccgtcgtcaagctcggtggagagaccctgaccatctcgcaggtcgcggcgatcgcggcccacg

SEQ ID NO: 195934 - DNA, 276 bp, Glycine max
cggatcgagcaaagatgtttgggcgcttcgacaaggggcaaaagataaaagggacagtggtgtaagtgacctagaatgtgttggacttcgacgacataacctccatcggtaaaggtggtgatattgacacagccaccggcatcttacgccaatgcgtcatcttagttcgcggactaattgatgctgccacttccttcttaggccgtgatatcaccatggcgttgatcagtgctactcagacttatggcagtggaaatccgaatatggacaagaatc

SEQ ID NO: 195935 - DNA, 305 bp, Glycine max
ctcggttctgccttcacaaaaaaattatcgagatcccctttttctcctaagaaaagccatggctaagggtcccggtctctactctgacatcggcaagaaagccagggatctgctgttcaaggactaccacagtgaccagaagttcaccatcaccacctactcacccactggagttgctataacagcatcaggaaccaggaaaagtgaactgtttgtggctgatgtcaacacccagttgaagaacaaaaacatcactactgatatcaaagttgatacagattctaatctcttcacaactatcactg

SEQ ID NO: 195936 - DNA, 161 bp, Glycine max
gggcgacgcaccggcattgccagagactcttaaaaattacaacaagctgttgtctcttggcttcaagattgtattcttgtcaggaagatatcttgacaaaatggccgtaacagaagcaaacctaaagaaggctggcttccacacatgggagcagttaattc

SEQ ID NO: 195937 - DNA, 302 bp, Glycine max
gagagagagagagaggagagagtattggcgcttcatcaagatgggtatttctagggattccatgcacaagaggcgtgccactggtggcaagaaaaaggcttggagaaagaagagaaagtatgagcttgggcgtcaggcagcaaacaccaagttatcaagcaacaagacaatcaggaggattcgtgttagaggtggcaatgttaaatggagggcattgaggctggatactggcaattactcatggggtagtgaagcagttactcgcaagactcgtattctagatgttgtatacaatgcctcaa

SEQ ID NO: 195938 - DNA, 300 bp, Glycine max
gatctccctcactccgtttttggttctgaaagtgtagccttcgattgccatgggaaaggaccatatgttggagtgtctgatggtagaattctcaggtggcaagagacaaagacagagtggattgactttgcagttacctcgccacacaggaacaagaaattatgcgacgggttacaaaatgacaagatggaatcaatgtgtggaagacccttaggcctcaaattcaacactgtaacttgtgaactgtacattgccgatgcatactttgggcttctggtggtaggaccaagtggtggtgtg

SEQ ID NO: 195939 - DNA, 304 bp, Glycine max
aagcgaaatcgcaatcgcaatccagcgaatatgaaggtcgtcgctgcatacttgctcgcagtgttgggagggaatccttccccttctgccgatgacatcaaacacatcctcggcgcagttggagctgaggctgagaatgagttgattgagttgctcttgactgaagtcaagggaaaagacttcaatgagctaattgctagtggaagtgaaaagatgtctgcagtgtctggtggcggtgcagcggttgccgttgctgctgcaccagctggaggtgctgctgcacctgctgccgaagcaaaggaag

SEQ ID NO: 195940 - DNA, 302 bp, Glycine max
ctacccgccgctcgatgggaattgcgcttcaaggcgtctcgtagggctaatccgcctcacgagggtcaccaacggaacgtgcctttgagggggccgatgccccctactgactggtcggcaaacggacggcgggcgcacgcgtcgcttctagcccggaatctgacttagaagcgttcagtcataatcctacgcacggtagcttcgggcaataggcgttacaaccgagcgcgatgaccagttgtgcgattcaacggttcctctcgtactaggttgaattactattgcgacactctcatcagtag

SEQ ID NO: 195941 - DNA, 301 bp, Glycine max
ctcgtttacacatctctccaacctttcactttcgtttctcagttttattcgaatccctctctcaatctcctttccaaatggccagcgttgaggttgcacagcaaacaccaacaacagttccagaaaatgagacaaccgaggtaagcaagacccaggaaacaaccccagtcactgaggatcctgcaacagaacaaccagcagctgaggttcctgcaacagaacaaccagccgatgaggctcctgccccagaatcaaccaccgaagcaccaaaggaagagaccaccgaggcaccaacagaaac

SEQ ID NO: 195942 - DNA, 299 bp, Glycine max
  unsure (1)..(299): unsure at all n locations
tctttttcttctctctcaacaacttcaccttnttcctcctcgatcatgtctnacttcaagggcaagtaccatgatgagcttatccgccaatgctgcgtacattggcactcctggaaagggtattcttgctgctgatgagtcaacagggacaattggcaagcgtttggccagcatcagtgtagagaacattgaatccaacaggcgagctcttaggcnnnnncttttcactgctcctggtgttcttcaatatctcagtggtgtcatcctctttgatgaaaccctctaccagagcacagtgc

SEQ ID NO: 195943 - DNA, 301 bp, Glycine max
tccgaaaccctaaccctaacggagacatggcggacacttggcatcgatattcgggacggagaaggacagggtgaactgtccgttctacttcaagatcggcgcgtgcaggcacggcgaccggtgctcccggcttcacaccaagccgacaattagcccaacattggttctgtcgaacatgtaccagaggcccgacatgaacatgagcattatcaccaaccccgatcagccacaaccccaatcccttgaccccgacaaggtgcaggatcacttcgacgacttctacgaagatctcttcgaggag

SEQ ID NO: 195944 - DNA, 300 bp, Glycine max
tgttaccaaagctgtgaagaaaatcaagcgaagaaatgggccacatagaggagaggatttcaccttgtcacaagcaatggccaaggccgatttttgggtcatgttcttctctcttgtcatgggctgtggatcgggcttgacaatcataaataacatgggtcagatttgtcaatcattgggagacaacaatgtcaatgtttatgtgtcggttatcagcatatccaacttccttggtcgtgttggtggcggctacttctcagaggttatagtaaggagttttgggtacccaagacttgctgc

SEQ ID NO: 195945 - DNA, 240 bp, Glycine max
tggagatcaaccggcgcatcttagccaccaacaagtacatcagctacggtgcgctgcagaggaacactgtcccctgctctcgccgcggcgcttcctactacaattgcagacccggggcccaggcaacccttacagccgcggttcagcccattcgaggtcagagctgattcttagttattatttctcgattgatcgatggttgtgtgtgtaaaattgtcatatatccaatttcgacatcgg

SEQ ID NO: 195946 - DNA, 300 bp, Glycine max
acggaggttgggaattactattatggtcaaggtcacccaatgaagccacatactatacggatgacacatgctcttctagcccattatggattgctacagcacatgcaggtccacaagccatttcctgctagagacagggacctttgtcgttttcatgctgatgattatgctgcaatcccttcgagccataattcctgaaaaacaccaggatcatctaaggcaactgaaacgctttaatgttggtgaagattgtcctgtttttgatggcctctactctttctgtcaaacttatgcaggggg

SEQ ID NO: 195947 - DNA, 301 bp, Glycine max
taaagggtacgatggtgcaaaggttgatatttggtcttgtggggttgttttgtttgttttgatggcgggttatttgcccttccatgaccgtaacgttatggctatgtataagaagatttacaagggtgagtttcggtgtcccaggtggttttcttctgaacttacaagacttttctctaggcttctcgatactaccctcagacaaggattttgtttcccgaaatcatggagaatcgctggttcaagaagggtttcaaccagattaggttttatgtggaggatgatagagtttgtagttttg

SEQ ID NO: 195948 - DNA, 160 bp, Glycine max
ctcaaactcgggatcacagaaaccagcaacagttcttgcgctgaggtttcacgatgttgctggaacttgcagttggtgtgtatgtgttagctttgtatctgcacttgcgtcccacaccaagtgcaaaatcaaaagcacttcgccacctcacaaaccctcc

SEQ ID NO: 195949 - DNA, 301 bp, Glycine max
cagcaatggtgtacgtcaaggctcagaaatcaaaagcctacttcaagagatatcaagtcaagttcaagagaagaagacagggaaaaaccgattaccgtgccaggattcggttgattaatcaggacaagaacaaatataacactccgaaataccgatttgtggttcgctttagcaacaaggacattgttgcacaaataatatctgctagcattgccggcgatttagttcttgctacagcatattcacatgagctgccacgatatggtcttgaagtaggacttacaaattatgcagcagctta

SEQ ID NO: 195950 - DNA, 296 bp, Glycine max
ctcgagccgattcggctcgagattcattctcgtttccctttcgagcgtgattgtttgttaactgaacttttcgagcaaaatgtctggacgtggaaacgggggcaaaggtttggcgaacggacgagcgagacgacaccgtaaggtgttgcgcgataacattcagggaatcaccaagcctgcgattcggcgtttggctcgcaggggtggtgtgaagcgtatcagtggtctcatctacgacgagacacgtcgcgtgctcaagatctttctggagaacgtgattcgtgacgccgttacct

SEQ ID NO: 195951 - DNA, 298 bp, Glycine max
ccctactcattctccatacctcaacgaagaggttaaagagacggcaacactttgctgtccgccttgaccgagcagagcttcgtcttggccctcgattttgccctaaagtactctcagtcacaacagacaccgtcgtcgtcgtcgtcgtcatcaatggcaccgaagcagaccaaggctgagaagaagatcgcttacgatgcgaactgtgcgacctaatggaggagtacggccagatcctcgttgtgaactccgataacgtgggatcgaaccagctccagaacattcgcaagggtctccg

SEQ ID NO: 195952 - DNA, 276 bp, Glycine max
aggctcgagcattccgcaaaatggctgccaccaccttagtctctgaagtcactctcccctcctcatccggccagcggaagatgccgctgatgggcctcggcaccgcgccggaagcaaccagcgcggttaccacaaaagatgctgttcttgcaggcatcaagcagggctacacgcactttgatgctgcttctgcttatggtgtggaacagtctgagggagaagccatagctgaagcacttaagcaacgactaattgcatccagagatcgactcttca

SEQ ID NO: 195953 - DNA, 297 bp, Glycine max
  unsure (1)..(297): unsure at all n locations
gacgatcaccatgctgcgacaaggtaggtttaaagaaaggaccatggactccagaggaagatcagaagctcttagcttatnttgaagaacatggccatggaagctggcgtgctttgccagcaaaagctggacttcagaggtgtggcaanagttgcagactaagatggaccaattntcttaggcctgacattaagaggggaaaattcagcttgcangangaacaanccatcattcnattcatgcctcttnggaaacaggtggtcggcatagccacacattgccaaagagaacggacat

SEQ ID NO: 195954 - DNA, 297 bp, Glycine max
ggtatccattacctaacaaatcagcacctgttatgttgtagtcgacattagagtatcggtatgatctttcataagcatggacatggccagcaaagatcacatcaactttgtactcgatgaaccagctctcaaaaacagatcgcatgctttcaccctccatatagtgagctccattactattgtagagcggaacgtgcatgagaacaatgagccacggagacatctcactctcaaaacgcgcatcagctcctctttaagccacatgtattgacgagtgtatttcacaaatggtgaata

SEQ ID NO: 195955 - DNA, 296 bp, Glycine max
ggagaatatgaagttgtttgttttctttgttgctgcagtagttttggtagcatggccatgccatggcgcaggctaccaaaggttccctctccgaatgaaaactggctatggtgagcgttcttcggaggtaaaatgcgcaagttttaggcttgctgtggaagcacacaacatccgagcgtgcaaaaccattcctgaagagtgcgttgaaccaacaaaggactacattaatggcgaacaatttagatcagactctaaaacagttaaccgacaagctttcttttatgctagtgaacgcg

SEQ ID NO: 195956 - DNA, 302 bp, Glycine max
  unsure (1)..(302): unsure at all n locations
tgccaccgactcctccgctgcttcgtcacgccagctttcgcagagggagacggacatccacatgatcctcgccgccgacgttcanctcggcaccaaacactgcggcttttggcatcgaacgctacgtcttcaagcgccgcaccgatggtatttacataattaaccttggaaagacatgggagatgcttcagcttgctgctacgattatagtcgccactgagaacccacaggatatcatcgttcagtccgccaggccttatggccagagggcagttctaaagtttgctcaatacactggagct

SEQ ID NO: 195957 - DNA, 300 bp, Glycine max
cgctacatgtggttatgttcccattccttgcatttggccacattagtccatttgttcagctctccaacaagttgttctctcatggtgttcatgtcactttcttgtcagctgcatccaacattcccagaatcagatcaactcttaatctcaatccagccatcaatgttatctcactaaagttcccaaatggtataaccaacactgctgaattgccacctcacttagctggaaatctcatacacgcccttgacctcactcaagatcaggtgaagtcccttttgttggaactcaaaccccact

SEQ ID NO: 195958 - DNA, 299 bp, Glycine max
agaaaaatccgcgattcgctcttctcttggaaaagtgaaaaccagaagtacgaacgaaagagaagaccgattcgcagttccagaactgggggttgtcgttcagaagccgttccagaaggttgtttgcgaagaaggaaatgaggattctgatggtaggtctcgatgctgctggtaagacaaccatcttgtacaagctcaagcttggagaaatcgtcaccactatccccaccatcggatttaatgttgagactgtggagtacaggaccatcagcttcactgtgtgggatgttggtggtcag

SEQ ID NO: 195959 - DNA, 290 bp, Glycine max
tgaaggtgcttcggcgactcctcgagacaccagggctccaccaggggccagcctgtttcgacgctctgggtgcgaactcataggaatccgctggcttcccctactgcatcacaagtggcttctccatcgccgcttccaggttggctctgcccgacaccggcttcatctcctacggcgaaatcctggaccagggccaactcatcacccaagccgtttccattcccgtcattggcgacgccgacaacggctacggcaatgccatgaacctcaagcgaaccgtcaagggtttc

SEQ ID NO: 195960 - DNA, 157 bp, Glycine max
taggaagtcaacttagtggtaagaactgttgttaccgtgggcaactacgataacatcattgattgggagtttaaaacaagtggatcaatcagaccctcgattgctctctcgggtatattggaaattaagggagtggatattaagcacaagagtgagc

SEQ ID NO: 195961 - DNA, 296 bp, Glycine max
gctaaatcctgcaaaagaaagtctcccaatgtttgtggtttagataatgctgatgatgtgtggtaccaaaaaatggaggtctgtaaaacccctttacctgaggtaaccagcaaaaatgaagttgccggaggagagttacagaagtttcctgctagactttttgcagtccctcctcgaatagcccagggagctattccaggggttacagctgaatcttatcaagaggacaacaaattatggaaaaagcatgttaacgcttacaaaagaatgaataaattgattggcactactagata

SEQ ID NO: 195962 - DNA, 294 bp, Glycine max
  unsure (1)..(294): unsure at all n locations
gaaactcgagagtgtaaggttttgcatttcatttgacgaagagtgagagagtcttatctgtcgtctctgatctctgatcgcatcttcattccgaaaatggctgtttcggctatcactggagcgaggctaactctagggatgtctctttcctcttccacgcgatnnanaaacngagnaatggccgtatctatcgaccccaagaccgataacaaactcactcttaccaagtccgaggaagctttcgctgcggccaaggagctgngcctggaggagtgaatcccagttcgtgccttt

SEQ ID NO: 195963 - DNA, 294 bp, Glycine max
ctacccgccgctcgatgggaattgcgcttcaatgcgtctcgtagggctaatccgcctcaccagggtcactaacggcaactttctttcgcgggttgaggctcctagtgctggtcggcaaacgcgacggctggcgcaggcgtcgcttgtaccccggattctgacttagaggcgttcagtcataatccagcgcacggtagcttcgcgccactggcttttcaaccgagcgcgatgacctattgtgcgaatcaacggttcctctcgtactaggttcaattactattgcgacactgtcat

SEQ ID NO: 195964 - DNA, 296 bp, Glycine max
tgagaatggaagcctcagagcagaacaattcaaaggtagtgttcattgattctttgcagtcatgggagttccacgtcaaccaagcctataatcagaatactcctgttgttgttcacttcactgcttcatggtgcatgccatcggtggctatgactcctgtttttgaagaactggcttcaagctatccggaagttctgtttctcactgttgatgttgatgaagtcaaggaggtagccaccaaaatggatgtaaaggcaatgccaacatttttgctgctgaaggacggtgctgcggtg

SEQ ID NO: 195965 - DNA, 297 bp, Glycine max
ctctcgtcgttctttttatttgcggtttcttcttcttctcacgttctacctaacattttctaaaacatgtctggggaagaggaagaaaacgccgcagagctcaaaattggagacgagtttttgaaggcaaagtgcttaatgaactgtgaagtttcattgattcttgagcacaagtatgagcagcttcaacagacatccgatgatcccatgaatcaagtttctcaggtatttgaaaagtcactgcagtatgtgaagcgtttcagccgctataaaaatcctgatgctgttagacaagtt

SEQ ID NO: 195966 - DNA, 298 bp, Glycine max
agagtgttgccatctctacgccgagttccgggcagaagaatggatcaggaggttgttttcttagtggaaggaaattgacggtgaaaaaggagagagcagcaattggaggacgatcgatgggcactacagtgtgcgcagttgctgagcctgacagacctctatggttcccaggcagcacccctcctccatggcttgatggcactctacctggagacttcggctttgaccctcttggtcttggatctgacccggagagtctgagatggaatgttcaggcagagctagtgcactgcagatg

SEQ ID NO: 195967 - DNA, 294 bp, Glycine max
tgcagaggatgctgccaggaaatttttaagcgaatacgacattaagttggttgttattaacccatcaatgtccatagggcctctcttgcaaccagagctgaatgcaagttcttcttcaattttaaacctaatcaatggttcaccaacgttttcaaataatagttttgggtggatcaatgtgaaagatgttgcaaacgcgcatattcaagcatgtgagattgattcagctagtggaagatattgtctggttgaaagagtgatacacttctccgaacttgcaaaaattttacgtga

SEQ ID NO: 195968 - DNA, 293 bp, Glycine max
gtggtgtcatcctctttgaggaaaccctctaccagagcacagctgcaggcaagccctttgtgaatgtcttgaaggaagctggtgtgcttcctggcatcaaggttgacaagggcacagtcgagcttgctggaactaatggagaaaccaccactcagggtctagatggccttggtcagcgttgtgccaagtactacgaagctggtgcacgttttgccaaatggcgtgcagtgctgaagattggtcccaacgagccatctgagctgtctatccatgagaacgcctatggcttggct

SEQ ID NO: 195969 - DNA, 290 bp, Glycine max
ctcggagccgctattatccccagacgccaccgccgcagcaccagaagaagaacaagtgtgatggctgagtacgacctaactccgcggatggcgccgaatctcgacaggcaccttgtgttccctctcctggagttcctgcaggagcggcactctacgacgacgaccacatcctgaaggcgaagatcgaccttctcgacaacaccaacatggttgactacgctatggacatccacaagagcctctaccacaccgaggacgtcccgaacgatatggtcgaccgccgcgccgag

SEQ ID NO: 195970 - DNA, 294 bp, Glycine max
gaataccaggattttgtggttcgcaactattctccacctccacaaattaacaatagcatcaagatggaagttggaattgaagattgtctgcacatcgaatttgaatacaacaaaagcaagtatcatctgaaagatgtcatcattggcaagatatacttcttacttgtcagaatcaagataaaaaacatggatcttgagattaggcgtcgagaatccacaggatcagggaccaacacccatgttgagacagaaacattggctaaatttgagttgatggatggtgctcctgttaga

SEQ ID NO: 195971 - DNA, 245 bp, Glycine max
aggacacctgctagcaggaacacgtacaatcttcgagacgcagtttcgcggtgcactactcacgtatatcccaagtcatggactgctatatatattgcgcttgacaacgtgggaatgtggaacttgaggtctgaattttgggcacggcagtacctattgccaacagttttacatgcgcgtttatacaacatcgacatcaatccgagatgaatatcctgttccaaagatgcactactttgtggtag

SEQ ID NO: 195972 - DNA, 292 bp, Glycine max
ctcgagccgctcgagccgcgcaaccttatatgtgctgaccctaactttgccatcagcatctgcagtctatagggcatttggggaccagcttctcacccattccaatgccctctcattgctcccaaagactggtttcagagataccgctgtcatcctcatgctcattcatcagttcataacttttggatttgcttgcactcctttatacttcgtgtgggagaaattcattggggtgcatgagaccaagagtttgttcaaaagggctttggctagacttcctgttgtgattcca

SEQ ID NO: 195973 - DNA, 277 bp, Glycine max
ggctcgagcttagttatgctacggagttggagagggggtatttctttgcaaggtgcagattcttttgcgttttggaaaaagacactaccattcttaatctcctactcaggatgctcctctttaatatattcaaggagttcctggtcagaggagaacagcaacatttgcttagcatccttaattgaaagatagtcataggccttctcactgcaaccagctatttcatctctgacagtctttgccaaaagatccataaaataaacgtatgtatcatgtg

SEQ ID NO: 195974 - DNA, 295 bp, Glycine max
gtgacaaatatggatcctcaggcctttattaggttgtcaataggttctctggggttgcgatgcactggaattgaactgagcactacaaaatctggaattcaaacactctctttaccttgtgtttgtgagatacggcttcgaggttttcctgttcaaacatcatcagtccccgtgatatcctccacagaagttatacctgatactcagaacgttgcttttagcttttaccttgaggaatctgatttaaaagcgttgttagctcccggttgcttctacaacactcatgcttgtttgg

SEQ ID NO: 195975 - DNA, 293 bp, Glycine max
taaatttgagagaaaactctgcaaacatgttggtttatcaggacctccttacaggtgatgagcttctctcggactccttccgttacaatgaaattgagaatcgaatgctgtgggaagttgacgggaagtgggttgttaagggagcagttgatgttgacattggtgcaaacccttctgctgagggtggacaagatgagggagtcgatgacgcagctgttaaggttgttgacattgttgatacattcagacttcaggagcaacccgcttttgataagaaacagtttgttaccttc

SEQ ID NO: 195976 - DNA, 289 bp, Glycine max
gcgccgtctccgatctccgacaatggcgacccaaatgagcaagaagagaaagttcgtagctgatggagtcgtcttcgctgaactgaacgaggttctgacaagagagttggccgaggacggttactccggcgtggaagttagggttacgccgatgcgcaccgaaatcataattagagccaccagaacccaagctgttctcggtgagaagcgtaacgagaataagggaacttacctctgtggttcagaagaggttcaagtttcccgagaacagtgttgaactttatgctga

SEQ ID NO: 195977 - DNA, 299 bp, Glycine max
agctagttgtataaagtaagagagaagaaagaagcaaatggcaaactttccagttgttgacatggggaagcttaacaccgaagagagacctgcagcaatggagattataaaagatgcctgtgagaactggggtttctttgagttggtgaaccatgggatatccattgagcttatggacacagtggagaacctcacaaaagagcattacaagaagactatggagcaaaggttcaaagaaatggtgaccagcaaaggtcttgagtcagttcagtcagaaatcaatgacttggactgggaaa

SEQ ID NO: 195978 - DNA, 287 bp, Glycine max
acggctgtcacgaaattgtgagcaggtaaacatctacaatctgttgccatggcaaaaacaactcacatagctattgtttcaagccctggttttggccacatagttccaataaacgagttcagcaagcgacttgtgaagcttcacccaaattttcaagtgacctgcatcattccttcacttgagtcatccacagaatcctgcaaagcctaccttaaaacccttccttcattcatagacttcatctttctttctccagttagcatagaacaattatcccaaggaggata

SEQ ID NO: 195979 - DNA, 286 bp, Glycine max
ctcgagccgctcgagccgttccacctggtcacttgtactctagcaaagaaagagggttccgcagatggtaccatcctcattcaggcctttcatttctgatgactctcgagccaaaagggtccgcgtgcttgagctctctcgcagattgaagcaccgtggccctgactggagtgggctccatcaacatggtgactgctttttggcacatcaacggttagccatagttgatcctgcttctggggatcaacctctctttaacgaggacaaatccgtcattgttacggta

SEQ ID NO: 195980 - DNA, 283 bp, Glycine max
atgatggcaaacagttgtgtttcaatggacaataataatatcctgggtcttctcaagcttcgaattaaaagaggcgttaatcttgcaattcgcgatgctcgtaccagcgatccgtatgtcgtcgtcaacatgggtgatcagaagctgaagactcgtgtcgtaaaaaacaactgcaaccctgactggaatgaagaattgaccctttctgtaaaggacgttaaaaccccaatacatctgacggtttatgacaaagacactttctctgttgatgacaaaatgggtg

SEQ ID NO: 195981 - DNA, 282 bp, Glycine max
tacccagtagacaacttttcatagatggagagtggaaagtccctcttctcaacaatcggtttccgatcatcaaccccgctactgaagacatcatagggcatattccagccgctactaaggaagatgttgaccttgcggtggatgctgctaaaagagccttttcccataacaaaggcaaagattggtcttcagctcctggctctgttcgtgctcgctatcttcgagccatcgcttcaaagataacagagaaaaaggatgaactaggaaagcttgaagcaattg

SEQ ID NO: 195982 - DNA, 281 bp, Glycine max
ggccaagcccctgtgttttccaaagcaaggtacacggttcgttcctttgggattagaagaaatgagaagattgcatgctatgtcactgtcagaggtgacaaggcaatgcaacttttggagagtggtttgaaggtgaaggaatatgaacttctcagaaggaacttcagtgatactggttgctttggctttggcattcaggagcatatcgatttgggaatcaagtatgatccttcaactggtatttatggaatggacttctttgttgttctcgagcgtcctgg

SEQ ID NO: 195983 - DNA, 279 bp, Glycine max
gcggaatcagcggggaaagaagaccctgttgagcttgactctagtccgactttgtgaaatgacttgagaggtgtaggataagtgggagctggaaacagcgaaagtgaaataccactacttttaacgttattttacttattccgtgaatcggaagccgggcactgcccctctttttggacccaaggtcggcttcggccggtcgatccgggcggaagacattgtcaggtggggagtttggctggggcggcacatctgttaaaagataacgcaggtgtccta

SEQ ID NO: 195984 - DNA, 280 bp, Glycine max
ctctctctctctctcaaccataatagtcatgggtttgaaggaggattttgagcagtatgctgagaaagcaaagactttgccaccgactcaatcaaacgaagacttgcttatcctttatggattgtacacacaggccaccgttggacctgtcaacaccagccgtcctggaatgttcaacatgagggacagagctaaatgggatgcatggaaggctgttgaagggaaatccaaggacgaagcaatgggtgattacatcattaaggtgaaacagctgctggaa

SEQ ID NO: 195985 - DNA, 281 bp, Glycine max
cacgtatcttcatcaataatcgcagaagcagtttccggtgcatctcatcgtcttccaaaatgaacgacgcagatgtctcgaagcaaatccagcagatggtgcgtttcatccgccaggaagctgaggagaaagccaacgagatctctgtatctgccgaagaggaattcaatatcgagaagctgcagttggttgaagccgaaaagaagaagatcaggcaagaatacgaacgcaaagagcgccaagtcgaaattcgcaagaagattgagtactcaatgcagctg

SEQ ID NO: 195986 - DNA, 279 bp, Glycine max
ctcattcggtgctccgaatctcagattctagggttagggttcccaatttctccaccgatcagaaaatgagttcaactggtggttctaccaagggcggaaggggcaagcccaaagcctccaaatccgtttcaagatcgcagaaagctggtctccaattccccgttggaagaatcgctcgattccttaaggctgggaaatacgccgagcgtgttggtgctggtgctcctgtgtacctctctgcagtgctcgaatatctcgctgctgaggttttggaattgg

SEQ ID NO: 195987 - DNA, 280 bp, Glycine max
cggctcgagtgagcagccaaacactctctctctgtctctcgaaaattctcagtttgcagagaaaatctgaatcatgtcgtggcaagcgtatgtcgacgatcaccttctgtgtgacatcgaaggtaaccacctcactcacgctgctatcatcggccaagacggcagcgtttgggctcagagtaccgacttccctcagttcaaacctgaggagataactgccatcatgcctctctttaatgagcctggatcacttgctccaactggattgtatctcggtggc

SEQ ID NO: 195988 - DNA, 278 bp, Glycine max
agtccctccttcctctgccttataattcttgtgacccttttcgctggtagcattgaaagtgcaccagcaaacgtgaagccaagccattatgctgcacccttcaataggagtgtttttccttctggttttctatttggaataggctctgcagcttaccagatagaaggagcagcagctatagatggcagaggaccaagtatatgggacacctatactaaacagcaaccagggaagatttgggatcatagtgatggaagtctagcaattgatttttatca

SEQ ID NO: 195989 - DNA, 278 bp, Glycine max
gtgattttatacccacaagccattttcagggatccattcagaaggggtaacaatatcttggttatctgtgatgcctacactcctgctggagaacctattcccactaacaagaggcacgctgctgccaaggttttcagccatcctgatgttgttgctgaagtgccatggtacggtattgaacaagaatacaccttgttgcagaaagatatccaatggctcttgggtggcctgttggtggtttccctggacctcagggtccatactactgtggtgttggc

SEQ ID NO: 195990 - DNA, 280 bp, Glycine max
ctaccctactattatccctttccttcctgcctctctttgctttcctggctctttcagaagatgttgaacaagttgtggacataagtggcaaccccattttcccaggtggcacatattacattatgccatcaacttggggcgctgccggtggtggattgaaactaggccggacaggaaactcaaactgcccagttactgttttgcaagattactcagaaatcttccgtggcacaccagtcaaattcagcatacctgggataagccctggaatcatctttac

SEQ ID NO: 195991 - DNA, 284 bp, Glycine max
gtggcactgcattcttcccattgacttcaacctcatcaaagataggaaattcagccttgaaccttgtgcaaactacttcctgaatttcttcattgtttcctggttcccgtccagcaaactggttgcacggaaatgccaagacttcacatccttgattcttgtacctctcgtacaatacattcaattctttgtaatctgtctgtgtcaaaccacattgagaggcgacattcacaatcagtagaaccttcccgctgtaatcattcagcctcaccatcattccacac

SEQ ID NO: 195992 - DNA, 278 bp, Glycine max
cacaaacaatgtctgacagtcaagaatctgacaagaacattgagatatggaagatcaagaaattgatcaaggctctggaagctgctcgaggtaatggtaccagcatgatttctctgctaatgcctccacgcgatcaaatttcccgggtcactaagatgttgggagatgaatttggaactgcttcaaacatcaaaagtagggtgaaccgacagtctgtgttgggagccatacttctgctcagcagaggttgaaactatataacaaggtccctccaaatg

SEQ ID NO: 195993 - DNA, 281 bp, Glycine max
gtttcagggtcactactactctgtctctgctctccctgttttggctcttgtccctgcaccaagcaagagctgcaaagttccacaatgtgagtggctacagagggaaaaagccagttgtagcaaatgggtgcaatattgtcctgggaagttgggtggttgacacgtcttatcctctctatgactcttcatcatgccccttcattgatcccgagtttgattgccaaaagtatggaagacctgacaaacagtacctcaaatacgcttggaaacctgattcatgt

SEQ ID NO: 195994 - DNA, 277 bp, Glycine max
cctaactacgcacgcactcattcttgagaaagctcaatattcattcgtccatggcactctcttctcgtctcttttccaaatccaaattgatctatggctgtccaatacttctgcaaaaggagcatgctattccagttcgtcactttgctaaagagtctgcccctcctgcccttaagggagatcagatgctgaagaatctttttgtggaggtgaagaacaaatttgagactgccataggaatattaaagaaggagaagatcaccattgacccagaaga

SEQ ID NO: 195995 - DNA, 280 bp, Glycine max
  unsure (1)..(280): unsure at all n locations
cggagaatctgggagaaggaacatacgggaaagtgtacaaggctcgggagaaggcgagtgggagcctggtggctctgaagaagacgcgtctggagatggacgaggagggtgtccctcccaccgcactacgcgaggtgtctctccttcagcttctctcccaatccatctacatcgtccgcctccctctccgtcgaacacgtcgacaaggtccccccgtcncagaactcctcctccaaccccctcccctcgcccatcctttaccttgttttcgagtatctcg

SEQ ID NO: 195996 - DNA, 286 bp, Glycine max
cacaatggcaatctcctccacttccaactccctgcattcccaccaaatctctaatcccccaatcccaccccctcattcccaacaccaggcccgccctccggcccaagcccggcccatccccttccatcttcgccgttcacgccgccgagcccgccaaaaaccccgtcgtcaccgacaagcccaagccccaagcccaacaacctcccccggcctcggcccgggcaacgaaatgggccgtggacagctggaagtcaaagaaagcctgcagctgcccgaatacccgagc

SEQ ID NO: 195997 - DNA, 278 bp, Glycine max
actgcgtccttctgttgcgggggaagggcaaaataatggtcttgttatgaacttctacaaggaatcatgccctcaggctgaagacatcatcacagaacaagtcaagcttctctacaagcgccacaagaacactgctttctcctggctcaggaacatcttccatgactgtgctgttcagagttgtgatgcttcactgttgctggactccacaagaaggagcttcacaccgaaggaaacagatagaagctttgggttgagaaatttcaggtacattgaga

SEQ ID NO: 195998 - DNA, 285 bp, Glycine max
gaaatttacgatagcttttgaaggtaccagtttttgtcatcactctctcagctgatcggtgcttatagatccagcgtcagagattcaatttgacactggaagcaatttctcatttcaaagattaagtgaaaacatggttgtccttgctgcatccattgtgagcaaatctggcaaagttctagtttctagacagtttgtggacatgtctcgtatcagaattgagggtcttctagcagcatttcccaagttaataggcactggacagctacacacatatgttgagac

SEQ ID NO: 195999 - DNA, 281 bp, Glycine max
cttgaagttgttgctcaaggactaacggggaggattttttttcctcggtggcgacaatgtcgactcctgctaggaagaggctgatgagagacttcaagaggctgcaacaagacccgcctgcagggatcagcggtgccccccaggataacaacataatgctgtggaatgctgtcatatttggtcctgatgatactccatgggatggaggcacgttcaagttgactctccagtttactgaggattatccaaataaaccaccaactgtgcgatttgtgtctcgc

SEQ ID NO: 196000 - DNA, 279 bp, Glycine max
ctcgagccgcacttttctctttgattcatcaatggcaaccgcgacgaccgtgaaggatgtactcgctcacgatttcgtgaaggcttacgcctcccatctcaagcgttccggcaagatggagcttcctgagtggactgatattgtaaaaacagcaaaatttaaggaattggctccatatgatcctgactggtattatgatagggctgcctcaatggcaagacagatttatttgagaggcggtcttggtgttggggctttccagaggatctatggtggaag

SEQ ID NO: 196001 - DNA, 277 bp, Glycine max
ggtgttcacttgatccttcataagtcgtcatcatcatcatcatcatcaccgttgattgaagaagatgccgatcagaaacatcgccatcggaaggcctgaagaggctactcaccccgacacgttgaaggcggggttggctgagttcatctccaccttgatcttcgtgttcgccggttcaggttccggcatcgcctacaacaagctcaccgacaacggcgccgccactcccgccggcctcatctccgcttccatcgcccatgctttcgccctcttcgtc

SEQ ID NO: 196002 - DNA, 272 bp, Glycine max
gaaaaactctgtaaacatgttggtttaccaggacctccttacaggtgatgagcttctctctgactccttccgttacaaggaaattgagaatggaatgatgtgggaagttgaggggaagtgggttgttaaaggagcagttgatgtagacattggtgcaaacccttctgctgagggtggaggagaagatgagggagttgatgatgcagctgttaaggttgttgacattgttgacacattcagacttcaggagcaacccgcattcgataagaagc

SEQ ID NO: 196003 - DNA, 276 bp, Glycine max
gtttaccttcactgttcaggatggaatagatgccattgaagatgttatctaccatattgaaacatatgatgtgactacaattagagcaagcacacctatgtttctcatgtctcggaagattaaatcacttggtgtcaaatgggttatctcacgagaaggatctgatgagatctttggagggtatttgtacttccacaaggcacccaaccccgaggagttccacagagcaacagtgtcatcgatcaaagcacttcaccaatatgattgcttgcgagc

SEQ ID NO: 196004 - DNA, 276 bp, Glycine max
ggacctcaataagttgaacaccacaaaaattgagatggaccctggaagtcgcaagacatttgatcttagctactatagtcatgtgattaagagaaggggtctatttgagtcagatgctgcattgttgacaaactcagttacaaaggctcaaatcattgaattgcttgaagggtcagttgaaaatttctttgctgagtttgcaacctccatggagaaaatgggaagaattaatgtaaagacagggacagaaggagagatcaggaagcattgtgcatt

SEQ ID NO: 196005 - DNA, 277 bp, Glycine max
caaaattctatgtggtgttgcagatggtgatgattactgcttggatcactgaccttttcacttgtatgggtggttgttttggatgctgtatgaaacccacaccaattattgctgtggatgaacctgcaaagggactaagaattcaggggcagacagtaagaaaaccacacatatcagatggtttctggagttcaagcacttgtgatctggataacagcaacattcaatctcagagaagtatctcgtctgtcagtacattaaatcaaattctctatca

SEQ ID NO: 196006 - DNA, 274 bp, Glycine max
aatggcacttcgttgcttggtgatgtccctttctgttctcttcactcttggtcttgcgagagaaagccatgccagagacgaagatttttggcatgctgtttggccaaacactcccattccaagttcattgcgagatcttctaaagcctggccctgcaagtgttgaaatcgatgatcaccctatgcaaattgaagaaacacagtacccgaaaaccttcttctataaagaagaccttcatccaggcaaaacaatgaaagtacaattcagcaagcct

SEQ ID NO: 196007 - DNA, 283 bp, Glycine max
gcaagaactcagagcacttgcttcttgcagcatcaaaatgggcttctctctgttaccaaaagcaactccttgcattttgttcttggctctgctgttttgtacttgcttcacttcaacagatgcttatgatccgcttgacccaaatgggaatatcacaatcaaatgggatattataagctggacccctgatggatatgtggctgttgttacgatgaacaacttccaacaatatcgtcatatcgcttcacctggctggtcaatgggatggacatgggcgaaaaag

SEQ ID NO: 196008 - DNA, 280 bp, Glycine max
aatggcacttcgttgcttggtgatgtccctttctgttctcttcactcttggtcttgcgagagaaagccatgccagagacgaagatttttggcatgctgtttggccaaacactcccattccaagttcattgcgagatcttctaaagcctggccctgcaagtgatgaaatcgatgatcaccctatgcaaattgaagaaacacagtacccgaaaaccttcttctataaagaagaccttcatccaggcaaaacaatgaaagtacaattcagcaagcctcccttt

SEQ ID NO: 196009 - DNA, 276 bp, Glycine max
caaaatttgaggaacatttgtctctcatcaatggctgccacgagaccggtgcagtgtttgttacgaagggtttgcagaggaagtaggactattggggttgccacagaagttaatgcttcttcttcttctcagaaaatcatcgacaaggaatatgaacacagtgctcacaattaccatcctcttccgattgtatttgctcaagcaaagggaacctctgtttgggatccagagggaaacaaatatcttgattttctatcaggttactctgctgttaat

SEQ ID NO: 196010 - DNA, 285 bp, Glycine max
gcagcagttgaatttggaaaacaagatgtctcaccgcaagttcgagcacccgagacacggttcccttggctttctcccaaggaagcgagcttctcgtcatcgcggaaaggtgaaggctttcccaaaagacaatcctagtcaaccatgcaggttgactgcctttgtgggctacaaagctggaatgacccacattgttagagaggttgagaaacctggatcaaagcttcacaagaaagagacatgtgaagctgttactatcattgaaactcctccattggttgttgt

SEQ ID NO: 196011 - DNA, 276 bp, Glycine max
ggcgttctatatattattgaattgacaatgaggcctgctcttgctttgcttcctcttctatttgctttcttgttagctgccactacagaatcaagaaaagatacaggggaatattggaaaatgatcatgaaagatcaggaaatgccagaaggacttcaaggtcttgtttcatttcaatctgaaaataaccctaagactcaagagcagcttggtaaaggttccaaaaaccattgtgaagagtctctagttacaaatacacaagttaatagtgacttc

SEQ ID NO: 196012 - DNA, 272 bp, Glycine max
ttgtaattggtcatagtgccacatcagggggtatcttagacagagctattgaagcagaagataggaagcatggagatttcctgagactggatcatgttgaaggataccttgaattgtcagcaaagacaaagacatactttgccactgctgttaacttatgggatgctgacttctatatcaaagttgatgacgatgttcatgtaaatatagcgacactgggacaaactctactgagacatcgatcaaaaccgcgggtgtacataggatgcatg

SEQ ID NO: 196013 - DNA, 272 bp, Glycine max
agtcaaccatgaactctcgatcactctttgccttcctcttcgcaatttgcgcgcactccgtcgccgttgccgacacctcctccgcgtatccttccatccccggcacggaaaccggtgagtgctccctccgcggcgtgggcgtgggcgacggtgttctggttcctccacggcgagaagtatacgaggaggggcgaatcttcgacatcactcacagatatgtccccgagatgccggtgtgggactcgacggaggggctcgggcaacacttcctg

SEQ ID NO: 196014 - DNA, 273 bp, Glycine max
cacaatcggtggtctgagaaatcttgtttgtgttgggtttgttatggctcggagagctgaggaagagtacgattacctgttcaaggttgtactgatcggtgattccggtgttggaaaatccaatcttctgtcccgattcactcgcaacgagttttgcctcgaatccaagtccaccattggagtcgaattcgccactcgcactcttcaggtggagggaagaactgtgaaagctcaaatatgggataccgccggacaggaacgatacagagcaat

SEQ ID NO: 196015 - DNA, 251 bp, Glycine max
gctcgcctattttctaaattcttccctccctgaataagatcgcaataggactaccaaggtattgcatcaggcatcatcaggtcggccagaggtcatcactagcaagtctgggaggtctgtcaccaagtatcctgttcctgagtgcaagtgccatgatgactcgcaccatcagtctacctaaatttcacgtatctataccaaagcggttagtgtgaagattacacgtgcatggataaacttacacgggagcg

SEQ ID NO: 196016 - DNA, 273 bp, Glycine max
tggcgggtacggtttcgacttgtttcttcttcgtgtgtcttctttctctccttcttctctttcagatctccgctgaggaatcctcggagaaggagttcgtactcacattggatcactctaactttcacgacactgtcagcaagcacgatttcatcgtcgtcgagttctacgccccatggtgtggtcactgtaagaagcttgctccggagtatgagaaagctgcttctatcttgagtagtcatgatcctcctattgtcttggctaaagtagatg

SEQ ID NO: 196017 - DNA, 280 bp, Glycine max
gctcccctattttctaaattcttccctccctgaaaaagagttcaataggattatcaaggaattgcatcaggattcattaggtcagccagaactcaggactagcaagtctgggagggatgtcaccaagtatcctgttcctgagtgcatgtgcaatgatgactctcatcatcattcttcctaaattgcacatttgataccaaagctcttggtgtgaagattacacgaaaatggataaacaaacacggaagcgatgctacgagtatgattttgatcccttgcg

SEQ ID NO: 196018 - DNA, 281 bp, Glycine max
agcgcttagaatctgcggtgtcgcgcttggcgtcgctatccgccggattccacccctccgccacacaatccggcggcgccgacgctcccgatgcggcgctcgcatccctccatcgtcgccttcgccgatctgatcgaccagtacgtcggtagggtttccggcgctgccgaggacatcggtggtcaagtcttggatgtcaccaaactggtgcaggaagctttcaatgttcagaaagagcttctgattaagctcagacagactcagaagcctaaccttgctgg

SEQ ID NO: 196019 - DNA, 278 bp, Glycine max
aggatagtggcctaccatggtggtgacgggtgacggagaattagggttcgattccggagagggagcctgagaaacggctaccacatccaaggaaggcagcaggcgcgcaaattacccaatcctgacacggggaggtagtgacaataaataacaataccgggctcattgagtctggtaattggaatgagtacaatctaaatcccttaacgaggatccattggagggcaagtctggtgccagcagccgcggtaattccagctccaatagcgtatatttaa

SEQ ID NO: 196020 - DNA, 276 bp, Glycine max
gatctcaccatctttcacgcactcttccatcagattcaccctttcgtttaacgcaaactcataacttgaaggttaatggctgctccaccggcaagggctcgtgccgattacgattatctcataaagcttctcttgatcggtgacagcggtgttgggaaaagttgcctccttctgcgtttctccgatggttctttcaccactagtttcatcacaactataggcattgattttaagataagaaccattgagcttgatggcaaacggatcaagctccaa

SEQ ID NO: 196021 - DNA, 276 bp, Glycine max
ctctcctcttccagacaccaacatggcttcaatgaccatgatatacaccttactctttctttctttcactttgtcatatgctattaagacctccaccatcatcaactacaccgacaatgaggtcatggccatgtacgaggagtggttggtgaagcaccaaaaggtgtacaatgagttgggaaagaaggacaagagattccaagttttcaaggacaacttagggttcatacaagagcacaacaacaatctaaacaacacttacaaacttgggttgaa

SEQ ID NO: 196022 - DNA, 270 bp, Glycine max
gcttccttaagctccttagtgctgctccttgcagctctaattctatcccctcaagttcttgcaaactatgagaatcccccagtgtacaagcctcccactgagaaaccaccagtttctaagcccccagttgagatgcctcctgtttacaagcctccagttgagaagcctccagtttataagcctccagtagagaagccaccagtgtacaagcccccagttgagaaagccccagtgtacaagccgccagttgaggaaccaccagtgtacaag

SEQ ID NO: 196023 - DNA, 272 bp, Glycine max
actgttttgtaaggggatgtgatgcatcagtccttctgaactcaacaaccaatcaagctgaaaagaatgctcctccaaatctcacagtaagaggctttgacttcattgacagaataaagagccttgttgaggcagaatgccctggtgtggtctcttgtgctgatatcctcactttgtctgccagagacactattgtagccacaggtggaccattttggaaagttccaacaggtcgaagagatggggtcatctctaacttgacggaagccaga

SEQ ID NO: 196024 - DNA, 272 bp, Glycine max
ctcgagccgaggaaagacaacgttcgtgaaaaggcatcttaccggtgaattcgagaaaaaatacgaaccgaccattggagtggaggttcacccattggatttcttcacaaactgcggaaagattcgcttctactgttgggatactgctggacaagagaagtttggtggcctcagagatggatattatatccatgggcaatgtgcgattataatgtttgatgttactgcccgtctaacatacaaaaatgtccctacctggcaccgggatcttt

SEQ ID NO: 196025 - DNA, 273 bp, Glycine max
attgctttcatctgctgctcttgagaatccttgcattaagcatgccgtggagttagaacaatcttttatggaaggggcttacaatcgtgtcttgagtgcacggcagacagtgccacatgatacatacgtttatttcatggatcttttggcaaagactgtcagagatgaaatagcaggttgcagtgagaaggcctatgactatctttcaattaaggatgccaagcaaatgttgctgttctcctcagaccagggactcctggaatatattaaaga

SEQ ID NO: 196026 - DNA, 278 bp, Glycine max
gcagcttttgcctacaactcccttcaccatggctgaacaaaccgagaaagcttttctgaagcaaccaaaagtgtttctcagcacaaagaagactgggaagggaaagagacctggaaaaggtgggaaccgcttttggaagtccattgggcttggatttaagactcccagggaagccatcgaaggaacctatattgacaagaagtgccccttcactggcaatgtttccatccgtggccgtatcttggctggaacatgtcacagtgctaagatgaacagga

SEQ ID NO: 196027 - DNA, 282 bp, Glycine max
tatctatctaatatactatacaaaaagttcttatcagtgacagagtaaaggaggcataccgatgacgatggcgatgacggcgtcgcagttgcggtgcggttgggggtggaggccaacgccgaatcagcagcagcaacgacgtcgtatggttccggtggtgtgttccatcgctatagagaacgcgaagaacaaagagagagcgaaactgaagaagctcttcgatgaagcgtacgagaggtgccgcactgctcccaccgaaggcgtttccttcactctccaaca

SEQ ID NO: 196028 - DNA, 260 bp, Glycine max
ggctcgaggcattgcgatggtccctgcggacgttgacgcaatgtgatttctgcccagtgctctgaatgtcaaagtgaagaaattcaaccaagcgcgggtaaacggcgggagtaactatgactctcttaaggtagccaaatgcctcgtcatctaattagtgacgcgcatgaatggattaacgagattcccactgtccctgtctactatccagcgaaaccacagccaagggaacgggcttggcggaatcagcggggaaagaa

SEQ ID NO: 196029 - DNA, 272 bp, Glycine max
ctttgttgctgcagtagttttggtagcatggccatgccatggcgcaggctaccaaaggttccctctccgaatgaaaactggctatggtgagcgttcttcggaggtaaaatgcgcaagttttaggcttgcactggaagcacaaacatccgagcctttaaaaccattcctgaagagtgcgttgaaccaacaaaggactacattaatggcgaacaatttagatcagactctaaaacagttaaccaacaagctttcttttatgctagtgaacgcga

SEQ ID NO: 196030 - DNA, 273 bp, Glycine max
gccgtcatcaatagtggtccccgtgaagatgcaactagaattggttctgctggagtggtgaggagacaggctgttgatatctcaccccttcgacgtgttaatcaggctatatatcttctaacaacaggtgctcgggaagcgctttcagaaacatcaagacaattgctgaatgcttggccgatgaacttattaatgcagccaaaggttcatccaatagttatgctatcaagaaaaaggatgaaattgagagagttgccaaggctaatcgttaag

SEQ ID NO: 196031 - DNA, 272 bp, Glycine max
gtcgaccgtaccaggacagctcatctgggagatcgtgaagaagaacaactcctttttggtgaaagagttcggaaggggcactcagagcgtgcagttcagcagagagcccaacaatctctacaacctcaacactttcaagtactccggtttggcgaaccagaaaactgtcactgttcaacctgctggtaaagaccagtccgtgttgctcgcaacaaccaagacaaagaagcaaaacaagcctgctgctttgcttcacaaatctgtcatgaaaa

SEQ ID NO: 196032 - DNA, 270 bp, Glycine max
gaaaagtcgtatcccacgagcttcagtccaaggagcttcccagcacaagaatccaacccgatcgtcgatggttcgggaacacgcgtgttgtgaatcagaaagagcttgagtttttccgagaagagctacagagccgcatgtctagtaattacaatgtaattctgaaggagaagaaacttccgctttcgctactcaacgatcaccagaagcaagctagagttcacctgcttgatagagagcctttccaggatgcgtttggaccgaagacta

SEQ ID NO: 196033 - DNA, 267 bp, Glycine max
cggtgtgtgtgctgatgtgttaggtttgattaatgtgcaacttgggaagccaccaaagaccccatgctgcaacctaattcagggtcttgctgatcttgaagctgcagtgtgcctttgcactgctctcaaggctaatgtgttgggcatcaacctcaatgttccagtgaacttgagcttgcttctaaactactgtggaaagggtgttcccaagggattcgtctgctattaaatcaaacacttataatgtgtagcttcctattgctatat

SEQ ID NO: 196034 - DNA, 268 bp, Glycine max
ggcggttgcagaagaagattgcaagatgaagttcaacatcgcgaatcccaccactggatgccagaagaagctcgagatcgacgacgatctgaaactgcgagcattttgggacaagaggatctcacaggaggtcatcgggatgcactcggtgaggaatttaagggctatgtcttcaaaattaccggaggttgtgacaaacaaggatttccaatgaagcagggagtgctgactcctggtcgtgttagacttttgcttcacaggggaactc

SEQ ID NO: 196035 - DNA, 271 bp, Glycine max
cttcctcttcgcacaaagcagcaagcatccttgagatggaaactttcctcttcacctcagaatctgtaaacgaaggccatcccgacaagctgtgtgaccaggtttcagatgccatcctagatgcatgcttggagcaagaccagaaagcaaggttgcttgcgagacctgtacaaaaactaacatggttatggtctttggtgagattacaaccaaggccagcgtgaactacgagaaaatagttcgagacacttgcaaaggcattgggtttgtg

SEQ ID NO: 196036 - DNA, 267 bp, Glycine max
ctgatcataaatcacatagctagttgtttaaagtgagagacaaagaaagaagaaaatggcaaactttccagttgttgacatggggaaacttaacaccgaagagagagcagcagccatggagattataaaagatgcctgtgagactggggtttctttgagttggtgaaccatgggatatccattgagttgatggacactgtggagaggctcacaaaagagcactacaagaagactatggagcaaaggttcaaagaaatggtggccagc

SEQ ID NO: 196037 - DNA, 273 bp, Glycine max
tagcattcctcctcttctttgccttgactacaaaaccactactacttggatacactggagctgctccagagccagtgattgatacatcaggcaagaagctgagagctgatgcaaattaccatatcatccctgcagtgccctcaccatatgtggctttgttggctgtttcactggtggaggcctttcactagacagcatagatgaatcttgccctcttgatattataatcgagaaagccaatgaaggcctaccactgagattctcaccagttaa

SEQ ID NO: 196038 - DNA, 274 bp, Glycine max
tcgggtatgatgacatcccaaaagagctcccagatcctgaagccaagaagcctgaagattgggatgatgaggaagatggtgagtggacaccccctaccattgccaaccctgattacaagggcccatggaaggcaaagaaatcaagaaccccaactataaaggaaaatggaaggcaccattgattgataacccagatttcaaggatgaccccgacctatatgttttccccaacttgaagtacgtgggcattgaattgtggcaggtgaaatctggt

SEQ ID NO: 196039 - DNA, 270 bp, Glycine max
  unsure (1)..(270): unsure at all n locations
cggaaatttcgtcaaggctacttttgactgtttgccgaaaacctacggttttctaacacctgaattctggaaggagactcggttctccaaatcaccattccaagagtacactgatctattggcaaagccaacaggganagcccacatcctcgaggaggaaagggtggaggcttgagttagcagaagcagcagcagttttgatgttatcggatgattgtgcctcgtcttaagcatgctaggacccagtaattatatgttttgctacctttt

SEQ ID NO: 196040 - DNA, 268 bp, Glycine max
caacgttacatttgaggactttccttattacttgagtgaacgaactcaagttttgttgacaagtgctgcatatgttcatttaaaacatcttcacttttccaagcacaccaggaactccccaccagcaagcagggccatttgctatctggtccagcagaaccttaccagcaaatgcttgccaaagctttagcacattactttgaatcaaagttgctgttgttagatattactgacttttctgtgaagttgcagaataaatttggatgtt

SEQ ID NO: 196041 - DNA, 258 bp, Glycine max
cctcgagccgattcggctcgagtgggtgcctacaagtatgtttcacagctatggcgcaagacgcagtctgatgttatgaacttcttgcagcgggtgaggtgctgggagtatcgccagcaaccttctattgtccgtttgacaaggtctactcgcccagataaggctcgtcgcttgggtttcaaggctaagcagggttacgtgatttaccgtgttcgcgtacgaaggggtggccgtaagagaccagttccaaagggtatt

SEQ ID NO: 196042 - DNA, 263 bp, Glycine max
ctcgagccgtactgctgctcttttctcttttcttttctctttagttctctcttccccttactttttctttttcttcttcttctgagcttgtttaagcttttcttccattaacatattatcacaatgtgtggtattcttgctgttcttggttgttctgatgactctcgagccaaaagggtccgcgtgcttgagctctctcgcagattgaagcaccgtggccctgactggagtgggctccatcaacatggtgactgctttttggc

SEQ ID NO: 196043 - DNA, 269 bp, Glycine max
gtttttggttgggctgctcgggactcatctgggcttctctccccattcaacttctccagaagagaaacgggggagaaagatttggtattcaaagtgcaatactgtggaatatgccactcagatctacatatgttaaaaacgagtggggcaacacaacctatcctctggttcctgggcacgagattgctggtgtggtaacagaagttggaagcaaggtgcaaaagttcaaagttggagaccgggtaggtgtggggtgcatgattggatcc

SEQ ID NO: 196044 - DNA, 270 bp, Glycine max
ctcgagccggatcggctcgaggctcatgttcactctgctcagagccttggtcaactatatacccattttgttaaagaatatcccattgtgtcaattgaggatccgtttgctcaagatgattggggttcgcgggcttcttgctcgcttcagttgatattcaacttgtaggagatgatttcttagttacaaatcctaagagaatagctgaggccatcaaaaagaaggcttgtaatggtttgcttctaaaggttaaccagattggtacagtga

SEQ ID NO: 196045 - DNA, 270 bp, Glycine max
gacctcctatcttgttccctctcttctttcttctttgtgccttcacctcatatctaccttcagccaccgctgatgatgatcatgtgtacgacactgacggcgataagcttcaatacggtgtcacttatttcgtgttgcagtgataagaggaaatggcggtggaatacaagtagcaaaagcaggaaacgaaacttgccctctgactgtggtgcaatctggcaacgagctctctgaggggttaccgataaagattgcatctcgatcagcagg

SEQ ID NO: 196046 - DNA, 271 bp, Glycine max
ctcgagcctattatttctaattctctcttatcaggtccattgaatatgtctccgtcgttgcatcttcctcccaagggtggcttcagttttgatctatgccgaagaaacgcaatgcttcaaaacaagggcctcaaagcccaacctttctcaaaactggcaccactattgtcggtttagttttccaggatggtgtcattcttggtgctgatactagggcaactgaaggacctatagtggctgataaaaactgtgagagaattcattatatggc

SEQ ID NO: 196047 - DNA, 269 bp, Glycine max
gaaaaactctgtaaacatgttggtttaccaggacctccttacaggtgatgagcttctctctgactccttccgttacaaggaaattgagaatggaatgctgtgggaagttgaggggaagtgggttgttaaaggagcattgatgtagacattggtgcaaacccttctgctgagggtggaggagaagatgagggagttgatgatgcagctgttaaggttgttgacattgttgacacattcagacttcaggagcaacccgcattcgataagaa

SEQ ID NO: 196048 - DNA, 261 bp, Glycine max
gtttttgtatcctctatatatagttctctggcaattaaggtctcagctaaatacgcacaaatgggtagccagagttgcttcaaggctttgattatttgccttatagcattaattggatcaactcaagctcaattgcagcttggtttctatgccaaaagttgtctaaaggccgagaaaataattttgaagtatgttgtagagcatatccgcaatgctccatcactagcagctgctctcataagaatgcacttccatgattgt

SEQ ID NO: 196049 - DNA, 263 bp, Glycine max
agaatcttcagttgaaagggaagaacacacaagaacaaagagaggaagaaacgcgaatgaagggagaattagagttgccaccagggttcagatttcaccccactgatgaagaattggtgaatcactacttgtgtaggaagtgcgcgggtcaaccaatcgcggttcccatcatcaaagaggtcgatttgtacaagtttgatccatggcagcttccagaaattggctactacggcgagaaagaatggtacttcttttctcctcgg

SEQ ID NO: 196050 - DNA, 262 bp, Glycine max
tcaatggcaagcagaggtatgcggtcaacggtgtctcatacaatgaaccagataccccattgaaacttgccgactacttcaacatccctggagttttctacgttggaagcattcctacctatcctaacgggggaacaatgcctacctccaaacttctgtcatgggggctaatttccatgaattggtggagattgtattccaaaattgggaggattctgtgcagtcatggcacattgacggctattccttctttgttgtaggg

SEQ ID NO: 196051 - DNA, 268 bp, Glycine max
  unsure (1)..(268): unsure at all n locations
aagagtggtgtgtctctcaaggactccaccttgttcggtctttcattttcagaacctatcaaagctaacttcagctcttctgcattgaggtgnaagagggaattcgaacaaaagctctgtgctgtgagggccgaaacagtggctacagcctctccagcagttaccaagtctacaccagaagggaagaaaacattgaggaagggcagtgttgtgataactggggcttcatctggactaggcctggccactgctaaggctttggctgaga

SEQ ID NO: 196052 - DNA, 269 bp, Glycine max
tgggagaggaccaagcatatgggacacctacactagacagcatactgaaaagatttgggatcatagcaccggtgacatgggagctgatttttatcatcgatacaagggtgacataaaaatagcgaaagaaattgggctggactctttcagattctctatctcatggtcaagaatattcccaaagggcaagggagcagttaacccccttggggttaaattctacaacaatgtcatcgatgagatcctagcaaatggtttaaaaccttttg

SEQ ID NO: 196053 - DNA, 269 bp, Glycine max
ggacaatgctgctgtgctgggtctagaacatttgtacacgaacgtgtgtacgatgaatttattgagaaagcaaaggcacgtgctttgaagcgtgctgttggtgatccattcaaggggggaatagagcaaggtcctcagattcattcagaacaatttcagaaaatactgaagtatattaggtccggtgttgaaagtggagctactcttgaaactggaggagatagatttggcaactcaggcttctatattcagcctactgtcttctcaaa

SEQ ID NO: 196054 - DNA, 270 bp, Glycine max
gaaaaagacgagccaccgctgcgacgccgttcgtgcatttttgagcgtgccgctgtcatgtttgggcgtggtggatcaaggaggagtgataactccaaatattatgatattctcgggatttccaaaaatgccagtcaacatgaaatcaagaaggcctatagaaaggcggctatgaagaaccatccagataagggaggagatcctgaaaagtttaaggagttaggtcaagcatatgaacttttaagtgatcctgagaagaaagaactgtat

SEQ ID NO: 196055 - DNA, 266 bp, Glycine max
  unsure (1)..(266): unsure at all n locations
ctctatagtaagctacacttatttgaggttggagaaatatggctanagatgttgaggttcaagagcaaggaggagagtactctgcaaaagactaccatgaccctcctccagcacccttgttcgacccagaggagctcacacagtggtccttttatagagccctaatcgctgagttcatagcaacccttctcttcctttatgtcaccgtgctcaccattattggctancaaaggcagactgatgccacgctaggtggcacngagtgt

SEQ ID NO: 196056 - DNA, 237 bp, Glycine max
accggcattgcccttgttaacccattcatcatataaggtttcattaaattcctccaccccatatccatgtctttcatagtatgggatattagagagtacggtgttatctatgccgaatataaatatgtcgtgtgatggacttcgcgttcactagcataaaagaaagcttgttggttaactgtcttagagtctgatctaaattgttcgccattaatgtagtcctttgttggcgccgcc

SEQ ID NO: 196057 - DNA, 258 bp, Glycine max
  unsure (1)..(258): unsure at all n locations
gcagtacaagcagatatttcaatgctgcaagtgcagctgatcgtcctacatcttcagaattgtggccagagaagcccaatatggattctctatatatgccttgggatcatgttaatatgacacccacatttagaggtagaggcctttctatacggggcgagggtcctttaaggaatgtgaggagccgttctgcacttgatttggaatccaanctggctagggcccattatcaaatactcatccacacaactcatactc

SEQ ID NO: 196058 - DNA, 258 bp, Glycine max
ctcgagccccactaaaaccccactcagtcttccagtgaaaacagaaagccaccgatggaagcacgactcgacatccccggcggcgaggaaatggatctcggcgaagacaaggtcggcgaggcgcgggagatcggctcccgcggcctcaagaagaagctcctcaaagaaggtcaaggctgggaaacccccgaagtcggcgacgaagtccaagttcattacacggggactttgctcgacggaactaagtttgattcgagc

SEQ ID NO: 196059 - DNA, 260 bp, Glycine max
cttgctctcaggccactgtgctgcttttgtcacatttgagttctggatccaaatcgaacgtggagggcttctcacaacttctccgtcttctttgttggtgtcctgcttacatttccactcatgatgcaatgcaaactggtgttttcatatggacatggttggtttctgctgcacctgaacttggagctcttgtccttgctgagcttgtcgatgcatggttatggacaattgataccaagcggggtctttttgcatctgaa

SEQ ID NO: 196060 - DNA, 264 bp, Glycine max
gagaatatgaagttgtttgtcttctttgttgctgcagtagttttggtagcatggccatgccatggcgcaggctaccaaaggttccctctccgaatgaaaactggctatggtgagcgttcttcggaggtaaaatgcgcaagttttaggcttgctgtggaagcacacaacatccgagccacttaaaaccattcctgaagagtgcgttgaaccaacaaaggactacattaatggcgaacaatttagatcagactctaaaacagttaa

SEQ ID NO: 196061 - DNA, 261 bp, Glycine max
ctaacactcattaattgcaagaatggcacttcgttgcttggtgatgtccctttctgttctcttcactcttggtcttgcgagagaaagccatgccagagacgaagatttttggcatgctgtttggccaaacactcccttccaagttcattgcgagatcttctaaagcctggccctgcaagtgttgaaatcgatgatcaccctatgcaaattgaagaaacacagtacccgaaaaccttcttctataaagaagaccttcatcca

SEQ ID NO: 196062 - DNA, 235 bp, Glycine max
ctcgagccgatagtgacttcgaacccatacactgtgttaactaatatgatgatttggaatacaagtcacgcattatcaagaacgatgattttgaatcgagacaagtgttaccaagcatgatgattttgaactcaagtcaagcgttaccaagaacaatgattttgaaccgagaccaagtgttacaaagtatgataactttgaacccagaccaagtgttaccaaatatgatgatttt

SEQ ID NO: 196063 - DNA, 267 bp, Glycine max
ggtctctcttcctccgctgcttctacacacaatgaaggtcaaagttatatcacgctccgtggatgagttcacccgagagcgaagtcaagaccttcagagggtgttccggaattacgatcccagccttcgtcctcaagagaaggcggtggagtatgtgcgtgctgttaatgcggtgaagttggacaagatatttgcaagaccatttattggagcattggatgggcatgtagatgctgtttcgtgtatgacgaggaaccctagccagtt

SEQ ID NO: 196064 - DNA, 257 bp, Glycine max
cacatcactagtgtttactgtgaggaggagtgaggcagagctgatagctccggcgaacccacccctcgtgaagtgaagctactctcagacatagatgaccaagatgggttacgtttccaaattccggtgaacagttctatcgccacgacccatcaatggcagggaaagaccctgtcgatgtgataagaaaggctgtggccaccacgcttgtgttttactatccttttgcaggtaggcttagggaaggacttggtcgg

SEQ ID NO: 196065 - DNA, 243 bp, Glycine max
gcaaaaaaccaaaaccaccaccatctaggcgttttctttttctcatggctagtttgtcaactaggattttcttcatcatgtcccttgtgtgcctggctctcggtccaatggcacaaggggaaatgacatgtggccaggttgtgagcaacctgaccccatgcatctcctatgtggtgtatggtggaaccaatgttcctgaacagtgctgcaatgggataagaaatctctatggcatggctcaga

SEQ ID NO: 196066 - DNA, 257 bp, Glycine max
ccgaggcgaagagaagagaaaaattaagatggaggggaaggagcaggatgtgtcgctgggagcgaacaagttcccggagagacagccgattgggacggcggcgcagagccaagacgacggcaaggactaccaggagccggcgccggcgccactggttgacccgacggagtttacgtcatggtccttttacagagcagggatagcagagtttgtggccacttttctgtttctatacatcactgtcttaaccgtcatgg

SEQ ID NO: 196067 - DNA, 258 bp, Glycine max
  unsure (1)..(258): unsure at all n locations
gttgcatcaatatcacttagtccanatgttccagcacaaatatttatgggagttatgctccatccacctcaacctggagatatttcttatgacaaatttgtnagggagagcaccggaatacttgaatcactgagaagangagcaaggcnaatgactganggnttcaacagtngcagnnatgtggtntgtnattttactgaaggtgccatgtattcattccctcaaatacgtttgccgccaagagctttagaggctgct

SEQ ID NO: 196068 - DNA, 262 bp, Glycine max
gcccttatatattgccatggaaagcatgtaatacatagggatattaaaccagagaaccttcttattggttcacagggtgagttgaaaatagcagactttgggtggtcagtgcacacattcaatcgcaggcggaccatgtgtggcacactggattaccttcctcctgagatggtggagagtgtagaacatgatgcgagtgtggatatatggagccttggtgtcttgtgctatgagtttctttatggagtccctccttttgagg

SEQ ID NO: 196069 - DNA, 261 bp, Glycine max
aaaaaagttagggttttgcattttggatcagtcagactcagacatgggaggaggcaatgcccagaagtcaaagatggctcgcgagaagaatctcgagaagcagaaagcagcggctaaggggagccagttggattcaaacaagaaagctatgtctattcagtgtaaggtgtgcatgcaaacatttatatgcaccacatcagaagtgaagtgtaaggagcatgctgaagccaaacaccccaaatctgatctctatgtttgttt

SEQ ID NO: 196070 - DNA, 262 bp, Glycine max
gccagtagtcatatgcttgtctcaaagattaagccatgcatgtgtaagtatgaactaattcagactgtgaaactgcgaatggctcattaaatcagttatagtttgtttgatggtatctactactcggataccgtagtaattctagagctaatacgtgcaacaaaccccgacttctggaagggatgcatttattagataaaaggtcaacacaggctctgcctgttgctttgatgattcatgataactcgtcggatcgcacggc

SEQ ID NO: 196071 - DNA, 263 bp, Glycine max
cttgttggttatgctgttgtggagttacttctctgttgtttttaccgatccgggcagtgtccctccaaactggaagcctatgattgatgaggaaagaggagaggctgatccgttggttgggacagagtttagtaatgtgctgtctgatcccaatcaacgggttcggtactgtcggaaatgcaatcaactcaagccgcctcgatgccatcattgttcagtttgtgggcgctgtgttttgaagatggaccaccattgtgtgtggg

SEQ ID NO: 196072 - DNA, 261 bp, Glycine max
tctgtttccttcttcaccgcatcaatggagttggacggcgttctcctcggcatgtgcaaccctctcctcgacatctctgccgtcgtcgacgacgctttcttgcaaaaatacggtatcaagttgaacgatgcattctcgctgaggataagcacaaacctatgtatgaagaattggctaacaatcctaatgtggagtacattgctggaggtgctactcagaattcaatcagggttgctcagtggatgcttcaagcaccaggtg

SEQ ID NO: 196073 - DNA, 262 bp, Glycine max
ctttctttctggcttcagtttttgcagtgaaaatggcggtgactttaacatcaaccctctttatggctttgctatttgctgcttcagcttttgctgctcttcagcctagagtacctgaagcttaccttcaaaatggaaactttgaggagcagccaaaccccaaaaacctccagaaaacaaagctcatggggaaatattctttgcccaaatgggaagtcaatggtctggttgagtatgtctctgggggtccccaacctggagg

SEQ ID NO: 196074 - DNA, 253 bp, Glycine max
gtaagaactgttgttaccgtgggcaactacgataacatcattgattgggagtttaaaacaagtggctcaatcaaaccctcgattgctctctcgggtatattggaaattaagggagtggatattaacacaagagtgagatcaagagcgatcaacatggtatcttggtgtcggcaaacagcattggtgtttaccacgaccacttctacatttaccatcttgaccttgacattgatggtgttgccactcttttgag

SEQ ID NO: 196075 - DNA, 254 bp, Glycine max
cgcacacgaggagcagcctcaggaggagaaggatgtctcacaggacgttcgagcacccaaggcacggttcactgggatttcttcccaggaagcgtgctgctcgtcacaggggaaaagtgaaggcattccccaaggatgacccatccaaggcacccaagctcactgcattcttgggttacaaggccggtatgactcacattgttagagaggtcgagaagccaggatcaaagcttcacaagaaggaaacttgtgag

SEQ ID NO: 196076 - DNA, 258 bp, Glycine max
ggatgtagagaccatcaaggaactgattgagcaaggaaatgcaacaagaagtactggcaccacaggtgcaaatgaggagtcttcacggtcacatgcaatacttcagcttgctatcaagagatcagttgatggaaatgtatccaagcctcctcgtgttgttgggaagctctccttcatagatcttgctggaagtgaacgtggagcggataccacagataatgacaaacagacaagaatagaaggtgctgagatcaataa

SEQ ID NO: 196077 - DNA, 257 bp, Glycine max
tcgagcaaccctaaggagttgttgagtttggtacatgggcggagaagtgttgacgatggcgcacgtcacggccaacttgcaagcagcaaccaccgcatccaccccttacgcgcttcccaccaatctccctctcctctccgcttttctctccttcgctctcgctcagttcctcaagatcttcacctcctggtataaggagaagagatgggattctaaaaggttgcttgattcgggtggaatgccttcgtcacattctg

SEQ ID NO: 196078 - DNA, 259 bp, Glycine max
ctgagatctcatatatcatggctacctccatggtgaagcttatgcttttctctgctctcatactcttgtccttgcaagcagttgtgtctgtaacaccactgcattttcaacatccactagaccctttaaccaacaagagataagtcttgtccaaaccatagtccaaaacaagtacccaagctcaagtaacaggttgagcttccactacattggactcgacgaacctgagaaggatgccatcctcaagtgggaatccatc

SEQ ID NO: 196079 - DNA, 262 bp, Glycine max
ggaagtctttcctttgtgttagctaaatttgatggattacttgggcttgggtttcaggagatctcagttgaaaatgctgtgccagtatggtacaatatggtgaagcaaaatcttgtaagcgaacaggtgttctctttttggctcaatggtgatccaaaagtgaaaaatggtggtgaactagtttttggaggtgttgatcctaaacacttcaaaggagaacatatctatgttccagttactaaaaagggttactggcagattg

SEQ ID NO: 196080 - DNA, 259 bp, Glycine max
gcggtttcagagtttgtgacgcacgcatccatggccaccaccaccaacgccgccgcagccccgccgcgccagctctcccagaaggaagccgacatccagatgatgttagccgccgacgtccacctcggcaccaaaaactgcgacttccaaatggaacgttacatcttcaagcgccgcaacgacgggatttacattattaaccttgggaagacatgggagaagcttcagttagcagctagggttattgttgcaattgaga

SEQ ID NO: 196081 - DNA, 256 bp, Glycine max
ctcccattctctcgcatctcaatacccttttgatttgtgaaaggaaagcaaacatgcttgatcaggtccaacaccctacaatcatggacaaggttgctggccagctccatctccgttctggtgtttctggtattaggagttatgaaggagcctactgccaccccacaatgtaccaaagaccctcttttgggaattactcgaatgctgcattgcagtatcctgtgatgccctcatgcaaagctactatggatttgtc

SEQ ID NO: 196082 - DNA, 255 bp, Glycine max
cagggttcttctatagcactagttctcaaggaggaggccaagaaactaccccgttgacatctattactcagcttgttcaccatggattgatctttgtccccattggatacacatttggcggtggcatgtttgagttggagaaggtgaaaggtggctccccatatggtgcaggaacttatgctggagatggctcaaggcagcctagtgaattggaattggctcaagctttccatcagggaaagtactttgcgggca

SEQ ID NO: 196083 - DNA, 254 bp, Glycine max
tggtagcatggccatgccatggcgcaggctaccaaaggttccctctccgaatgaaaactggctatggtgagcgttcttcggaggtaaaatgcgcaagttttaggcttgctgtggaagcacacaacatccgagcctttaaaaccattcctgaagagtgcgttgaaccaacaaaggactacattaatggcgaacaatttagatcagactctaaaacagttaaccaacaagctttcttttatgctagtgaacgcgaa

SEQ ID NO: 196084 - DNA, 256 bp, Glycine max
ctctctgtttccttcttcaccgcatcaatggagttggacggcgttctcctcggcatgtgcaaccctctcctcgacatctctgccgtcgtcgacgacgctttcttgcaaaaatacggtatcaagttgaacgatgcgattctcgctgaggataagcacaaacctatgtatgaagaattggctaacaatcctaatgtggagtacattgctggaggtgctactcagaattcaatcagggttgctcagtggatgcttcaag

SEQ ID NO: 196085 - DNA, 258 bp, Glycine max
gtgatggctaaggccaatgttgttatcaaccttattggaagggattatgagacaagaaactacagctttgaagaagtgcactatcacatggctgagcaactagcaaagatttccaaagagcatggtggtatcctgagatttattcaagtttcttgtttaggtgcatctccttcatctccatctaggatgctcagaactaaatcagctgctgaggccatgattttaagggaactacctgaggccacaatcttgaaacct

SEQ ID NO: 196086 - DNA, 252 bp, Glycine max
tacagcgtgaagggaatacctggctttatgaacccaacctgaatacacttagagagaagctgcagctgcccattggttcatgtgaactgacagttcctttgaaagctaaagaaaatttttattcataaaggccacaccgagaagcttatgcaaccatcctgcactctgcacagatgtatgtttgtggagccattactgcagctcagagtattcgcatgtcgggttcaacacgagatcttgtgattcttgttg

SEQ ID NO: 196087 - DNA, 191 bp, Glycine max
ctccagtggacagcatgttgactatgatcaacgccctgatatgtttagaggaactgttcgatatgctagtgttcatgctcatttggggagaactgctagtagacgatatgatcttgaatctctggtatacactctggtttcccttcataagggccgattaccatggcaaggttatcagggtgatagcaaat

SEQ ID NO: 196088 - DNA, 250 bp, Glycine max
acctaacgcagcatcgctattctcttcattccatggctttgcccaaccagcaaaccgtggattaccctagtttcaaactcgttatcgtcggcgatggtggcacaggaaagacaacctttgtgaaaaggcatctcaccggagaattcgagaagaaatatgagccaaccatcggtgtggaggttcacccattggattttttcacaaactgtggaaagattcgattttactgctgggatactgctggacagga

SEQ ID NO: 196089 - DNA, 192 bp, Glycine max
  unsure (1)..(192): unsure at all n locations
atgtgtcgttgacagngaacaagttccccgacagacagccgattcggacggcggcgaagagccaagacgacggcaaggactaccaggtgccgctgtcggcgccagctggatgacacgacgcgatttacgtcatggtcgttttacatagcagggatagcaggatttgttgccattttctgactctctacatca

SEQ ID NO: 196090 - DNA, 255 bp, Glycine max
  unsure (1)..(255): unsure at all n locations
gctgcttcaacataacaactgtgtttagccactctcagactgttgtggtttgcggaaactgccagactgtgttgtgccaaccaacaggcggacgggcaaggttaaccgaaggtgctcttgtggaaggctgagagagatattgtctanaattnancanaattaatataccatancggactcgnntccantcancnnctannaancgnnaatcttcatcattgacatcttaagtctggttnacaaaccattaaactc

SEQ ID NO: 196091 - DNA, 195 bp, Glycine max
ccacaaaaaaaaaaaaaaaaaaaaaaaaaaaaaaaaaaaaaaaaaaaaaaaaaaaaaaaaaaaaaaaaaaaaggtataaaaacaaactaaaagctagaaaatgaagttcaagacgatactcaaacgtgctactggggagtttacaaagggtgggggggggtgcaaataagctcaatcgcatccttcagctcactg

SEQ ID NO: 196092 - DNA, 256 bp, Glycine max
  unsure (1)..(256): unsure at all n locations
tttcctctgtctcctcctcaatcttcattgtcctgttctttcccttggtgacaaaccaagactaacacacacagaacatagcttgtgttggtgaggtgagaagataaagaaagaatggcattnnacaggaacaacacagaagtgtatggcctgtgacaaaaccgtttatctggttgataagttgaccgcggataaccgagttttccacaaagcttgcttcagatgccatcactgcaaaggaaccctcaagctgagc

SEQ ID NO: 196093 - DNA, 256 bp, Glycine max
  unsure (1)..(256): unsure at all n locations
ggttactgtcaatggcgacggcggggttgtatcggcgccttcttccttgcccccctggcgtnngagtttgttcctcacaaggcaagcaactatttcttgaatccattcagaatggaaccatggacggcttctaacagttggtttcctatttccaaacgcaatccgagcgcagncttttgcggcctcgccagcctgtccatggtcctcaatgctcttgccattgatcctggcagaaaatggaaaggaccttggagat

SEQ ID NO: 196094 - DNA, 238 bp, Glycine max
aatctctcttctctttcttcttcttcctttaaccatgagacacatcttgcacgttcagggaggccaatgcggtaaccaaatcggttccaagttctgggaggtgatctgcgacgagcacggcatcgatcccaccggaaagtacaacgaggaaggcaacagcagcatccaactcgaaaggatcaatgtgtattacaacgaggcctctggcggaaggtacgttccccgtgccgtgcttatg

SEQ ID NO: 196095 - DNA, 242 bp, Glycine max
ggttaccttcatggtgaagcttatgcttttctctgctctcatactcttgtccttgcaagcagttgtgtctgtaacaccactgcattttcaacattgactagagtatataaccagacaagagataagtcttgttcaaaccatagtccaaataaagtaacgaagctgaagtaacaggttgagcttccactacattggactcacagattctgaaaaggatgccatcctcaaatggggatccatca

SEQ ID NO: 196096 - DNA, 201 bp, Glycine max
tcagagaagcgtcttaataaacgctcttctctgaaaaacctgatttcttctcttcttctcttctctttcgtttcgatcttcgatctctgaaaatgagagagtgcatttcaatccacatcggtcaggccggtattcaggtcggaaacgcctgctgggagctctactgcctcgaacacggcattcagcctggtgggcacatgt

SEQ ID NO: 196097 - DNA, 266 bp, Glycine max
agagggtctcgttctccgcggaaccatgcgcgcccacaccgacgtcgtgacggcgattgccactcccatcgacaactccgacatgatcgtgacggcgtcgcgcgacaaatccatcattctctggcacctcaccaaggaggacaagacctacggtgtcccccgccgccgcctcaccggacattctcacttcgtccaggacgtcgtcctctcatccgacggtcagttcgccctctccggctcctgggacggcgagctccgcctctggg

SEQ ID NO: 196098 - DNA, 261 bp, Glycine max
cttgtctcaaagattaagccatgcatgtgtaagtatgaactaattcagtctgtgaaactgcgaatggctcattaaatcagttatagtttgtttgatggtatctactactcggataaccgtagtaattctagagctaatacgtgcaacaaaccccgacttctggaagggatgcatttattagataaaaggtcaacacaggctctgcctgttgctttgatgattcatgataactcgtcggatcgcacggcctttgtgccggcg

SEQ ID NO: 196099 - DNA, 256 bp, Glycine max
agatcctgctaagcctccagccaaggcacaggtggtaggttggccacctgtgcggtccttccggaagaacatgttagctgtacaaaagagcgtcggagaagagaacgagaagaacagcagcagccctaatgcacgctttgtcaaagttagcatggatggagcaccttacctccgcaaagtggacttgaagatgtacaagagttaccgagagctctctgattctttaggcaaaatgttcagctccttcaccataggc

SEQ ID NO: 196100 - DNA, 253 bp, Glycine max
cgaatgacgaggctcatttcggttctcttcttcttgctagtgatcacggtgggatcttctgcttctccacagcattggagacaaaaaagggttcgcgagccgtgcaagaagttggtgttttatttccacgacataatttacacacggccacaattccaacaatgccacttccgcaattgttggaacacccgcatggggaaacaggaccatactagcggggcagaaccacttcggtgacttggttgtgttcgat

SEQ ID NO: 196101 - DNA, 251 bp, Glycine max
ggcagaggttctaatggactttccccaacttacaatgacattacctgatggtcgtgaagaatctgtcatgaagcgcacaacactagtggctaacacttcaaacatgccagtggctgctcgtgaagcttcaatttatacaggaatcacattagctgagtattttagagatatgggttataatgtcagtatgatggcagattctacatctagatgggcagaagcattgcgtgaaatctctggacggctggcag

SEQ ID NO: 196102 - DNA, 255 bp, Glycine max
  unsure (1)..(255): unsure at all n locations
ctggggaggtgagaatcaaactctcagagaagagcttcagagactttctgaagaatgcgagangcttacatccgaaaataattctatcaaggaagagttggagcggttgtgtggtccagaagcagttgctaacctggattaaacagcaacacatttcagttcctcagngnagtgtttgatggtacnggnaaatttnganngntccttaattangacgntctgcngcgggantttctccnnggcccgnccttctta

SEQ ID NO: 196103 - DNA, 256 bp, Glycine max
cgccgctcgatgggaattgcgcttcaaggcgtctcgtagggctaatccgcctcacgagggtcaccaacggcacgtgcctttcgcgggccgaggcccctactgctggtcggcaaacggacggcgggcgcacgcgtcgcttctagcccggattctgacttagcacgaatatcttgttgtttggagcgatccgaagctaactctgtaaacatgttggtttaccaggacctccttacaggtgatgagcttctctctgact

SEQ ID NO: 196104 - DNA, 254 bp, Glycine max
gtgtgatgaaaatgaaggtccttgttttcttcgttgctacaattttcgtagcatggcaatgccatgcgtacgatatgttccctctccgaatgaacactggctatggtgcccgtactccggaggtgaaatgcgcaagttggacgcttgctgtggaagcacacaacatctctggctttgagaccattcctgaagagtgcgttgaagcaacaaaggaatacatccatggcgaacaatatagatcagcctccaaatca

SEQ ID NO: 196105 - DNA, 261 bp, Glycine max
  unsure (1)..(261): unsure at all n locations
gctcccaagggtttaacctttctggctgtgttaatatgcgtttcagcactgtcactgagtccttctgttgcggtcggaagggcaaataatggccttgttatgaacttctacaaggaatcatgccctcaggctgaagacatcatcacagaacaagtcaagcttctctacaagcgccacaagaacactgctttctcctggctcaggaacatcttccatgactgtgnctgtcagagttgtgatgcctcactgtggctggactcc

SEQ ID NO: 196106 - DNA, 262 bp, Glycine max
ctcctcttttccatccatttcattgttatcatgtcaagttccttacccacaaatagtgatgaagtgtttgcaaaacagtctccaatgtctccatccacaaaacccgtggaaaaaatcacccaactacacttctatttccataacaacgtaacggcgaaaaacccaactgctatgagaattgttgggcctcccaagggcttcattactcagtttgggactgttgtgatgatggatgaccctctaactgaaggaccaagtccaa

SEQ ID NO: 196107 - DNA, 255 bp, Glycine max
tctggatcccagccttcctcggtggaaagtgctaaaccaactgaagtgacaagaatatttaccatggggctcccatttacatctcaacatggaggtcaaatactctttggacccgatgatgggtatttatacttaatgatgggatatggaggaggtgctggtgatccttacaattttgcacaaaacaagaaatccttgcttggaaagattatgagacttgatgtagacaacatcccaagtgcagcagatattagt

SEQ ID NO: 196108 - DNA, 255 bp, Glycine max
agaggttattattgggagcttgaatccaaatgataccaggggaaagaccgttacttgcaaagctgccgtggcatatggtcctggagagccctttgtggtggaacgtgttctggttcatcctcctcagaaaatggaggttcgaatcaagatcctcttcacttcaatctgccacaccgatctcagtgcttggcaaggcgagaatgaggctcaacgtgcatatcctcggattttcggccatgaagcttccgggattgt

SEQ ID NO: 196109 - DNA, 256 bp, Glycine max
cgccatcgtcgagagaagcgtgagacacttctcgtttatgatgagagctaagatagtttagttgtcaagtcataaatcagtatcatcactttaaatttcattagaagctcgtcaaaatgtcacggaagggtttgatggagcaagacctgagtaagttggatgtaacaaagttgcatccactttctccagaagtcatatctcggcaggctactattaatatcggcactataggtcacgtggcccatggcaagtcaac

SEQ ID NO: 196110 - DNA, 257 bp, Glycine max
ctcgagccgacaaatttctaatgcacagcctgatgatcttattgatttttaccatctgaagagcaggaagggtatgagccaacttgagctggaagatgaggttcaagacgatctcaaacgtgctactggggagtttacaaaggatgcagatgatgcaaataagctcaatcgcattcttcagctcactggattcagtgatcctgtttatgctgaagcatatgtcacagtgcatcactatgacattgtccttgatgtta

SEQ ID NO: 196111 - DNA, 251 bp, Glycine max
attctctctctcactccttcatctacgtaatttccttccttcctttctttctttctttctttctagatcttctcatttttctcaatacaatatttttctttctgtctctagtcatgttacttttctcttcttaaccatagttcacatattatattatcagatatcatagtgatatcatatcacaatgtgtggcatacttgctgtgcttggttgctctgattcatctcaagtcaaatgggtctgcgtccttg

SEQ ID NO: 196112 - DNA, 255 bp, Glycine max
ctcgagccgcatacactctgctcgtagggtttctccacctagacggaaatggctcccaacccgcctagtacgggtctgtttgttggactgaacaagggtcacgtcgtcaccaagaaggaattgcctccacgcccctcagatcgtaagcggaaaacaagcaagagggtgcactttgtgaggaacctcataagagaggtagccggttttgcaccctatgaaaagcgtataactgagttgctgaaggttgggaaggat

SEQ ID NO: 196113 - DNA, 255 bp, Glycine max
gcgttttctgcgtcatctccgattccccgacaatggccacccaaatgagcaagaagagaaagttcgtagctgatggagtgttcttcgctgaactgaacgaggttctgacaagggagttagccgaggacggatactccggcgtggaagttagggttacgccgatgcgcaccgaaatcatcatcagagccaccagaacccaagccgttctcggtgagaagggaaggagaatcagggaacttacctcggtggttcaga

SEQ ID NO: 196114 - DNA, 220 bp, Glycine max
gcttctaagcctctctctcgtggatcagcaactgtggaatcacaggggcaagctgagaagtgtgccaagacaaagaggaagaaccagtatcgtggaatccgtcagcgtccatggggaaagtgggctgctgagatccgtgacccaagaaagggggttcgtgtttggcttggaactttcagcactgctgaagaagctgcaagagcttatgatgctgaagcaa

SEQ ID NO: 196115 - DNA, 203 bp, Glycine max
ctgctctttgaagaaagaagggtctttgcttgattttggagatcgtctctgctctcagatctcatcaaccttaacctctccgataccaccgagaaggtgatcgcagagtacatatggatcggtggatcaggaatggacctgaggagcaaagcagggactctcccaggaccagttaccgacccttcagagcttcgcaagttgaa

SEQ ID NO: 196116 - DNA, 265 bp, Glycine max
gttcaattctttctctgtcgtcgctctttcttcaacttcaagcttaattcctcatgtctttcagaggcctcagccggccaaatgccacatcaggcatgggtgttgctgatcacagcaaaaacaccttcatggaattgaagcagaagaaggttcatcgttatgtgatctttaaggtcgatgagaagaaaagggaggttgtggttgagaagactggtggcccggctgagagctatgacgattttgctgcatctttgccggagaatga

SEQ ID NO: 196117 - DNA, 259 bp, Glycine max
gcaccactgccataagtcccttccctattgtaatttctgccagcctcaaaaaaagacttgctctgcctctgccactctctgagtaggactacactgccatggctgcctcagtctccactgttggagctgtcaacggagctccactgagcttgaacagctctggagctggagcttcagttcccagttcagccttctttggcaccagcttgaagaaggttattgcctcaagggtccctaacgtcaagatttcttctggaag

SEQ ID NO: 196118 - DNA, 255 bp, Glycine max
cttcaggccagaatttttgaatagattggatgaaatgattgtactcaggcagctcacaaaactggaggtgaaggagattgctgacataatgctcaaagaggtgtttgatagactgaaggtgaaagatattgaacttcaagtgacagaaagattcagggacagagtggtggaggaaggttataaccctagttatggagctagacctctaagaagagccataatgcgacttttggaggacagcatggctgagaagat

SEQ ID NO: 196119 - DNA, 251 bp, Glycine max
tccgccttctctgaattgtaaaaatgtcgctcggagaaactgcttgttcatacgcagctctcatccttcatgaagatggaatcagtgtacatgccgacaagatcagcaccttgttggaaactgcaaaggttcaagtagatacctattggccaaccttatttgctaaacttgctgagaagaaaaatcttggcgatttgatagccaatgcagcaggcggtggtgcaccagttgctgttgcagctgcccctgtt

SEQ ID NO: 196120 - DNA, 251 bp, Glycine max
gtggatacctaggcacccagagacgaggaagggcgtagtaagcgacgaaatgcttcggggagttgaaaataagcgtagatccggggattcccgatataggtcaacctttcgaactgcgcctgaatccacgggcaggcaagagacaacctggtgaactgaaacatcttagtagccagaggaaaagaaagcaaaagcgattcccgtagtagcggcgagcgaaatgggagcagcctaaaccgtgaaaacggggt

SEQ ID NO: 196121 - DNA, 190 bp, Glycine max
ggtttgaatagctatgcatcatgtaagatgctactgatgtattagaaacgttgcgtgcaaaatcctatggataaggtattggtgatatatttcaaagctgtgaaatcccattcaagtaggtgcaatttccattttcaatacgcaatgtggatacacagtggatcgagcgcagaatcaaggctactgagta

SEQ ID NO: 196122 - DNA, 257 bp, Glycine max
cctcgagccgaatcggctcgaggcagtgcagtggtcctactactacgcttcttgctgcttacactctcagatggctcgtgacgccacctacacagttggagattctgggggttggacctttaacactgttgcctggcccaaaggaaagctctttcgggctggtgacacacttgctttcaattatagccctgggactcacaatgtggtggccgtgaacaaggctggatatgatagctgcaagactccaagaggagcca

SEQ ID NO: 196123 - DNA, 253 bp, Glycine max
aagtgcttctctcctctgtctttttctctctcttgctatccttttggctagtcgcactgctgcaagtgcaactccaagaagcgcagtgccaagccaccatgtttcaacattcaacagaagcctttttccttccacttttctctttggaattggttcttctgcttaccaggcagaaggagcagcaagtgtagatgggagaggaccaagcatatgggacacctacactagacagcatactgacaagatttgggat

SEQ ID NO: 196124 - DNA, 253 bp, Glycine max
attttctctcttcttcttctttctccttttccttattcacattagatcagactatggatcgcccaacactatcatcattattttcattcctactaacacttcatctatcattatcaggggtaatttcaacaacattcactctagttaacaaatgtgactacaccgtgtggccgggaattctttccaatgcgggtgttcctcctctttcaaccaccggcttggttctccaaaccggcgcctccaccacaatcga

SEQ ID NO: 196125 - DNA, 250 bp, Glycine max
ctcgagccgttgcggctgaggattccgaacgagtgaccttcttcgtttctcgcaaagtttaagtaatcatgggtaaggaaaaggttcacatcaacattgtcgtcattggacatgtcgactctgggaagtcaactaccactggtcacttgatctacaagcttggaggtattgacaagcgtgtgattgagaggttcgagaaggaggctgccgagatgaacaagaggtcattcaagtatgcctgggtgctcga

SEQ ID NO: 196126 - DNA, 248 bp, Glycine max
caaggatttccaatgaagcagggagtgctgactcctggtcgtgttagacttttgcttcacaggggaactccttgcttccgtggatatggaaggcgtaatggagagcgtaggagaaaggctgttcgtgggtgcattgtcaccccagacctctctgttttgaacttggtaattgtgaagaaaggtgagaatgatttaccaggattgactgatgttgagaagccaaggatgagaggcccaaagagagcatc

SEQ ID NO: 196127 - DNA, 251 bp, Glycine max
cgcacactgaattcaaaaacatcgaaagagagaggcatggccgagcaaacctctctcatgatcaagccagatggcgttcaaagaggccttattggcgagattattagcagatttgagaggaagggtttttacttgaaagggttgaaactcgttactgtggaccgtccttttgctgagaagcactatgctgatttgtctgcaaagcctttctttagtggtttggtggaaacattgtctctggccctgttgtt

SEQ ID NO: 196128 - DNA, 255 bp, Glycine max
aaacaaagagagagagagagagaaaatgatgaagccatcgatgctcagatctctccactccgccgccacccgcggcgcctctcatctcttccgccgtgggtacgcctccgagccggtgccggagcgcaaggtagccgttctcggcgccgccggcgggatcgggcagcctctctcccttctcatgaagctcaatcccctcgtttcgagcctctccctttacgatatcgccggaactcccggcgtcgcgccgatata

SEQ ID NO: 196129 - DNA, 228 bp, Glycine max
cgcaagaccattggaggaaggtcttgccgaggccattgacgatggcaagattggaccaagggatgaccccaagattcgctccaagaccttgtcagaagagtttggttgggacaaggatctcgccaagaaaatcttgtgctttggccctgagacccttggacccaacatggtggttgatatgtgtaagggagtccagtatttgaatgaaatcaaggattctgtggttgc

SEQ ID NO: 196130 - DNA, 261 bp, Glycine max
ttttctttgtggactaatgcatggttaatgattcctttgtttttgtgtatctgacagggtgtgttacatggcaaatacgatgacctcccagagcagtcgttttacatggttggcggtattgaagaggtcattgctaaggctgagaaaattgctaaggaatctgcagcgtcttaattacatacaacagccatgttctcattttaatcctttttttgtaattgctaaatttaataatttaggaactcttggcaatgccaaacg

SEQ ID NO: 196131 - DNA, 257 bp, Glycine max
ttttctttgtggactaatgcatggttaatgattcctttgtttttgtgtatctgacagggtgtgttggatggcaaatacgatgacctcccagagcagtcgttttacatggttggcggtattgaagaggtcattgctaaggctgagaaaattgctaaggaatctgcagcgtcttaattacatacaacagccatgttctcattttaatcctttttttgtaattgctaaatttaataatttaggaactcttggcaatgcca

SEQ ID NO: 196132 - DNA, 256 bp, Glycine max
cttcctcacccctttctccatctaacgagtaaggaaaaatggcgcgtaagaagatcagagagtatgactcaaagaggttgttgaaggagcactttaagagactttctggcaaggagttgccgatcaagtctgcacaaattactgcatcaactgatttcactgagctacaagagaaggaaccctggctttcatcttctaaattggttgtgaaacctgacatgttatttggaaagcgtggcaaaagtggtttggttgc

SEQ ID NO: 196133 - DNA, 258 bp, Glycine max
ctgatatcttttacgtgcccatcaaacaaataagctctccactctatttcagtcaccaatcaccaatgactccttctttcactaacgtcaaaatcttctcttctctcgtcctagacggattcttcaacgctctcaccagacgcgggtacgcgtggcatcacaaagcgcaacaaaggaaggagtgggctttatgagcggcaagatggcaccaaagtcaggggaagacaacaaaggggtgtctacgtacaaggtttcgtg

SEQ ID NO: 196134 - DNA, 255 bp, Glycine max
attgctagcaatggcgaggatcaaggtttacgagctgaggcagaagacgaaggctgatctgctgaatcaactgaaggacctgaaggcggacttgccttgcttcgtgttgctaaggtcaccggtggtgcccctaacaagctttccaagataaaggtggtgaggttgaacattgcccaggttttgacggtgatttctctagagcagaaggctgcgttgagggatgcctacaagaataagaagtacttgcctctcgat

SEQ ID NO: 196135 - DNA, 254 bp, Glycine max
ctcctctctctgcatcgctgcgttttccgaatcgaaaggtgacgttagtaagtaacaatggtggagaaggccaagggtaggaaggaggaggttgtcactcgagagtacaccatcaacctccacaaacgcttgcatggctgcacatttaagaagaaggctcctaaagcaattaaggagataaggaagtttgctcagaaagcgatggggacgaatgatgtaagagtggatgtgaagctcaacaaggctgtgtggag

SEQ ID NO: 196136 - DNA, 258 bp, Glycine max
attctatctcactttcatactcacccttattgcagtattttgacctcaatggcaccaagttcggcagtgccagatgaacaggttgttgttggagaggagatagagcatgtaagagtgatcactttgaacaggccaaggcaattgaatgccatctcaccagaattggtttctctgctagcaacatatttggaaaagtgggagaaggatgaggaagcagagctagttatcataaagggatctggtagggctttttgcgct

SEQ ID NO: 196137 - DNA, 254 bp, Glycine max
atccctagctctgtcgttccgtcgttgacgatggcgtttcgggtgcgaaccctgacctccgctctctctttcttctctctctcttgtccatcgcttccgccaatgtcttcttcgaagagcgttttgatgacgggtgggaaaatcgatgggttaaatcagattggaaaaaagatgagaacgtggctggggagtggaaccacacctctggtcaatggaatggagacgctaatgacaaaggtattcaaaccagtgag

SEQ ID NO: 196138 - DNA, 252 bp, Glycine max
caagtttcacttcagccttatccggtttagggtttcggtttttgacccaacctttgacgtatcgaaaccttaagtttcggatcaggtctgagcaatctggttggtagaacctttggtcttagagagtcaagttttatgtctgaattagacgatcaaattcctactgccttcgatccttttgctgatgcaaatgctgatgactcgggtgctgggtcaaaggagtatgtgcatattcgcgtacagcagcgaaat

SEQ ID NO: 196139 - DNA, 258 bp, Glycine max
gagcgatccgagaaaaactctgtaaacatgttggtttaccaggacctccttacaggtgatgagcttctctctgactccttccgttacaaggaaattgagaatggaatgctgtgggaagttgaggggaagtgggttgttaaaggagcagttgatgtagacattggtgcaaacccttctgctgagggtggaggagaagatgagggagttgatgatgcagctgataaggttgttgacattgttgacacattcagacttcag

SEQ ID NO: 196140 - DNA, 257 bp, Glycine max
aaagagaggtttgagatgatttttcaatcttttatactggataatctagtattcttatgcatgaagataattaattcgatagttgtggtcggactctattatggatttctgaccacattttccatagggccctcttatctcttccttcttcgagctaggcttgtggaagaagggaccgagaagaaaatatcagcaacaactgggtttattacgggacagctcataatgttcatcacgatctattatgcgcctttgca

SEQ ID NO: 196141 - DNA, 256 bp, Glycine max
gggagaagcttctcacatcccttcgtcaacacctctccgactcttctcgttctctccatggcttcgtcctccttcaaggtggcgaggagcaaacgcgttacgacaccgatcacttggagctcttcaggcaagagagttacttcgcttacttgtttggagtcatagagcctggattctatgcagcttgacgttgcaactgggaattctatcctatttgctcctaggttaccttcagagtatgctgtttggttggggg

SEQ ID NO: 196142 - DNA, 235 bp, Glycine max
ataagtccctccttcctctgccttataattcttgtgacccttttagctggtagcattgaaagtgcaccagcaaacgtgaagccaagccattatgctgcacccttcaataggagtgtttttccttctggttttctatttggaataggctctgcagcttaccagatagaaggagcagcagctatagatggcagaggaccaagtatatgggacaccgatactaaacagcaaccaggga

SEQ ID NO: 196143 - DNA, 253 bp, Glycine max
ggaatttcgatgctcagtcatctcttttaccattctcttctctcttgctcttgcaggagagagccatgtccatgcatcgctacctgaggaagattattgggaagctgtttggccaaacactcccattcccactgcactgcgagagcttctaaagcctctccctgcaggtgttgaaatcgatgaactccctaagcaaattgatgatacacagtacccaaaaacattcttctataaagaagaccttcatccaggc

SEQ ID NO: 196144 - DNA, 253 bp, Glycine max
acctttctggctgtgttaatatgcgtttcagcactgtcactgagtccttctgttgcgggggaagggcaaaataatggccttgttatgaacttctacaaggaatcatgccctcaggctgaagacatcatcacagaacaagtcaagcttctctacaagcgccacaagaacactgctttctcctggctcaggaacatcttccatgactgtgctgttcagagttgtgatgcttcactgttgctggactccacaagaa

SEQ ID NO: 196145 - DNA, 247 bp, Glycine max
acctgatcttctgtgaagggttcgagtgagagcatacctgtcgggacccgaaagatggtgaactatgcctgagcggggacgaagccagaggaaactctggtggaggcccgcagcgatactgacgtgcaaatcgttcgtctgacttgggtataggggcgaaagactaatcgaaccgtctagtagctggttccctccgaagtttccctcaggatagctggagcccgcgggcgagttctatcgggtaaag

SEQ ID NO: 196146 - DNA, 251 bp, Glycine max
gggaacaggtggccaagacaagagactttggctttgttgaagatacggtcggatatggacgtggcttttagagacgcaagtgtaaagggtcccttgtgggaagacgtttctaggaaactagcagagcttggctaccacagaaatgccaagaagtgcaaagagaagtttgagaacgtttacaagtaccacaagagaaccaaaacaggtcgaagtgggaaatcagaaggcaaaacttatcgcttctttgatcc

SEQ ID NO: 196147 - DNA, 254 bp, Glycine max
cggaaagtgagggaaagacaaaatcggttttatgaatcggattgattgtttaattttcctttgataatctcaattacttagtacctgtaatgagcaggcttgtatggaccctcaacaggcacactgatgtaatcagcctgggccgggctaagcttggtgagcttagctccaagtttgccaaggtgaagtgcagccaccttctcatcaaggtgcttgggcaaaacgtaaactttcttctcgtacttgccggtact

SEQ ID NO: 196148 - DNA, 251 bp, Glycine max
tcgagcaacacacacactgtgtttgtgaaactctctctcacacacaagtcacaaaaacaacttgtgttgttccaatggcatcagcaacaccccttttgaaagatgagctcgacatcgtgatccccacgatcaggaatctggatttcttggagatgtggaggccattctttgagccttaccatctcataattgtgcaagatggtgacccttcaaagaccatcaaggtccctgaaggcttccactatgagctc

SEQ ID NO: 196149 - DNA, 255 bp, Glycine max
ctcgagccgcccgcagcgatactgacgtgcaaatcgttcgtctgacttgggtataggggacgaaagactaatcgaaccgtctagtagctggttccctccgaagtttccctcaggatagctggagcccgcgggcgagttctatcgggtaaagccaatgattagaggcatcgggggcgcaacgccctcgacctattctcaaactttaaataggtaggacggtgcggctgctctgttgagccgcgccatggaatcgag

SEQ ID NO: 196150 - DNA, 251 bp, Glycine max
tcttgtttcttgctttctttcttcaccatgtcacttgctgggaaaatcaccactgaaatcggggttcatgcaaccgctacaaagtggttcaacctcttcgcaacacaactccatcatgttcaaaacctaactgatagagtgcatggaaccaagctgcatcaaggtgaagactggcatcacaacgagacagtcaagcactggacttataccatagatggtaaggttacaacatgtctggagagtattgaatc

SEQ ID NO: 196151 - DNA, 251 bp, Glycine max
gaaatacttcgagatggcccgtacaaagcaaactgctcgtaagtcaactggaggaaaagctcccaggcagcagcttgcaaccaaggctgcacgtaagtctgcaccaacaactggtggtgtgaagaagcctcatcgttatcgccctggaactgttgctcttcgtgagattaggaaatattagaagagcactgagctcctaatcaggaagcttcctttccagaggttggttcgtgaaattgcccaggatttca

SEQ ID NO: 196152 - DNA, 247 bp, Glycine max
gtgctgcaatggcttcaagtcaggaggaggtgacccttttgggagctactggaagcccatttgtgtgcagggttcatattgccctcaagttgaagggagttcaatacaaatatgtcgaagaaaatttgaggaacaagagtgaactgcttctcaaatccaacccagttcacaagaaggttccagtgtttattcacaatgagaagcccatagcagagtctcttgtgattgttgaatacattgatgagac

SEQ ID NO: 196153 - DNA, 249 bp, Glycine max
cggctcgagcaaatcccaagtctcctaaaaccctaattcgcagtgaaaatgagagaaatcttgcacatccagggagggcaatgcggtaaccagatcggagcgaagttctgggaggtgatatgcgacgagcacggcatcgaccacaccggaaagtacagctgcgactccgagctccaattggagcgcatcaatgtttattacaatgaagccagcggcggaaggtacgttccacgcgccgtcctcatggat

SEQ ID NO: 196154 - DNA, 254 bp, Glycine max
agcgtaggggattgaaaatgagtatgtacggtagggatccgtggggagggccgttggagatccacgccacagactccgccaccgacgacgagcgcaccggaatctccaggagctggaccgaggcgctttagacgagacacaacagagctggctcttgggcgccggagaacagaaaaagaagaagaaaaggtacgtagatcttggctgcatcatcgtcagccgcaagctcttcatctggacactcggcactctcg

SEQ ID NO: 196155 - DNA, 253 bp, Glycine max
ctcgagccggtggatacactaaagcaatcaacaagactgttcaaatattggatgaactagttgaggatggttctgacaatatggatgttcgtgataaggaacaagttatttcaagaatgaaagcagccgttgccagcaagcaatttggtcaagaagatatcatatgttcgcttgttgctgatgcatgcatccaagtgtgccccaaaaaccctgcaaactttaatgtggacaacgttcgtgttgcaaagctctt

SEQ ID NO: 196156 - DNA, 251 bp, Glycine max
ctcgagccacactttctcgctccccaaaaccccctctctctcctccaatggccgaccaactcaccgacgaccagatcgccgagttcaaggaggccttcagcctcttcgacaaggacggcgatggttgcattactaccaaggaacttgggactgttatgaggtcacttggtcaaaacccaactgaggcagaactgcaggatatgataaacgaggttgatgctgatggcaacggaaccatcgatttcccagag

SEQ ID NO: 196157 - DNA, 251 bp, Glycine max
aaggattattcctgaacccttcaaaaccctcttatctctcttctatcgcttggcctgatattctttttggctgagagatcaagcaaaaatgagcgtggttggatttgattttggtaatgagagttgcattgttgctgtcgcaagacaaagggggatcgacgttgtgctcaatgatgagtcaaagcgtgaaacacctgcaattgtatgctttggtgacaaacagcggttccttgggacagctgggggctgct

SEQ ID NO: 196158 - DNA, 252 bp, Glycine max
ctcgagccgctcgagccgattcggctcgagcgcaatcttcactacattcaccgagcatttacattcacactgaatatggctgagactacacaatctacatgctgagttgttggagtggcctaagaaagataagcgccgcttcctgcatgttgtgtatcgtgttggtgatcttgatcgcaccattaagttttatactgaatgttttgggatgaagcttttgaggaaaagagatattccagaggagaaatatgc

SEQ ID NO: 196159 - DNA, 246 bp, Glycine max
tctcgagcgataagtccctccttcctctgccttataattcttgtgacccttttggctggtcccattgaaagtgcaccagcaaacgtgaagccaagccattatgacgcacccttcaataggagtgtttatccttctggttttctatttggaataggctctgcagcttaccagatagaaggagcagcagctatagatggcagaggaccaagtatatgggacacctatactaaacagcaaccagggcag

SEQ ID NO: 196160 - DNA, 247 bp, Glycine max
cctcgagccgattcggctcgagggtagcatatgaatgccatggcccagactaccagaagtcccctctccaaatgaaaactacggtttggtgggcaatacagcaatgaggtggcatgtgccagttggaggcttggcgtggaagcaaacaacgtagtcaagtggcaaactgttcctgcagcttgcggagagtacatagctgactacgttctaggagaccaatatagatcagattccaaaacagttaacc

SEQ ID NO: 196161 - DNA, 277 bp, Glycine max
tacgtaagtgctgaattcgtttctaggatccacgtgtcggaattgtaatatctctggcatccatttatgatttggagaagcacaaatctcgtagagtgttatacaaaggttacatttctgagctgtgtgtgccataccaagacccaacagatgatttttactataagactttctttgatgctggagagtttgggtttagtctctccacggtctcattggtgcccaaccgtgattgcccatcgaatgctcagttcctagatacatatgttcacgctgc

SEQ ID NO: 196162 - DNA, 252 bp, Glycine max
atccagcagcaatggtgtacgtcaaggctcagaaatcaaaagcctacttcaagagatatcaagtcaagttcaagagaagaagagagggaaaaaccgattaccgtgccaggattcggttgattaatcaggacaagaacaaatataacactccgaaataccgatttgtggttcgctttagcaacaaggacattgttgcacaaataatatctgctagcattgccggcgatttagttcttgctacagcatattcac

SEQ ID NO: 196163 - DNA, 250 bp, Glycine max
gagaattttaaggttgagtgtcctaatgtgaagtacaccgagactgagattcagtccgtgtacaactacgaaaccaccgaacttgttcacgagaacaggaatggcacctatcagtggattgtcaaacccaaatctgtcaaatacgaatttaaaaccaacatccatgttcctaaattaggggtaatgcttgtgggttggggtggaaacaacggctcaaccctcaccggtggtgttattgctaaccgagagg

SEQ ID NO: 196164 - DNA, 254 bp, Glycine max
  unsure (1)..(254): unsure at all n locations
ccaacctacccctttttcttctcccaccaacttcaccgtcantcttcctcgatcatgtctcacttcaagggcaagtaccatgatgagcttattgccaatgctgcttacattggcactcctggaaagggtattcttgctgctgatgagtcaacagggacaattggcaagcgtttggccagcatcagtgtagagaatgttgaatccaacaggcgtgctcttagggagctgctttnccaccgctcccggtgctctta

SEQ ID NO: 196165 - DNA, 251 bp, Glycine max
aacgggttaacctttctggctgtgttaatatgcgtttcagcactgtcactgagtccttctgttgcgggggaagggcaaaataatggccctgttatgaacttatacaaggaatcatgccctcaggctgaagacatcatcacagaacaagtcaagcttctctacaagcgccacaagaacactgctttctcattagtcaggaacatcttccatgactgtgctgttcagagttgtgatgcttcacatgttgctgg

SEQ ID NO: 196166 - DNA, 247 bp, Glycine max
agaacaacagaacaacagagcaaaaagctccaccaatggcgggttacagagccgacgacgactacgactacctcttcaaggtggtcctcatcggcgactccggcgtgggcaagtccaacctcctctcgcgcttcaccaagaacgagttcaacctggagtccaagtccaccattggcgtcgagttcgccacccgcaccttgaacgtcgattccaaagtcatcaaggcccagatctgggataccgcagc

SEQ ID NO: 196167 - DNA, 250 bp, Glycine max
ctcgagccgctcgagccgcgattctcttctctgcaactatgcctaaccctaaggtcttcttcgccatgaccatcggcggtcaacctgccggccgcatcgtgatggagctctacgccgacgtgactccgagcaccgccgagaacttccgcgcgctctgcaccggcgagaagggcgccgggcggagcggcaagcccctccactacaaaggctcgtccttccaccgcgtgatcccgaacttcatgtgccaggg

SEQ ID NO: 196168 - DNA, 245 bp, Glycine max
ctcgagccgctcgagccggttctgggaggtggtgtgcgcggagacgggatcgattcaacggggaggtaccaaggggacaacgagttgcaactcgagcgagtcaacgtctactacaatgaagcgagttgcggaaggttcgtgcctagggcgttgctcatggatctggagccagggaccatggacagcgtcagatctggtccctacggtcagattttccggccagataacttcgtctttggacagtc

SEQ ID NO: 196169 - DNA, 247 bp, Glycine max
gcgaaagtagaatctgaaaaacaatggcggcgaagtagtacacccacgccgtggcttccgatctgatcgacttcctcaacgcttctccaatggctttccacgccgtagacgagatgaagaggcgtttgcgtagcgcggggtaccaccaactctctgagagggaagtgtgggaactgcaaccgggcaacaagtacttcttcaccagaaatcactccaccatcgtcgccttcgccatcggcaaaaagta

SEQ ID NO: 196170 - DNA, 238 bp, Glycine max
ctccgccctctggaactgccccaaatgcagatccgaataccccaaatctcacattcccaaaacctatttctgcttctgcggcaaaatagagaaccctcctaacgatccatggattttacctcactcttgcggcgaggtttgtggaagaccgttgaagcacagttgcggccaccattgtttgctactctgccaccccgggccgtgcccctcttgccccaaactagttaaagttcgatgc

SEQ ID NO: 196171 - DNA, 249 bp, Glycine max
agcttcttctagatttaaggaagatgggtaaggaaaaggttcacatcagtattgtggtcattggccatgtcgactctgggaaatccactaccactggtcacctgatttacaagcttggaggcattgacaagcgtgttattgagaggtttgagaaggaagctgctgagatgaacaagaggtctttcaagtctgcctgggtgctggacaaacttaaggctgagcgtgattatggaatcaccattgatattg

SEQ ID NO: 196172 - DNA, 249 bp, Glycine max
ggaagttaccgtgcaactgatcaattatacaaagagtgaagttctggaacctgtttcatttgcaacctatgcgtgaccagaagggagaagtgcagtattttattggtgttcaacttgatggtagtcaacatgtagagcctcttcacaactgcatcgcagaagatactgcaaaggagggagaacagttggtcaaacaaacggcagaaaatgttgatgaggcggtaagagattttccggatgctaacaaga

SEQ ID NO: 196173 - DNA, 246 bp, Glycine max
accctttgttctctcctcttccagacaccaacatggcctcaatgaccatgatatacaccttactctttctttctttcactttgtcatatgctattaagacctccaccatcatcaactacaccgacaatgaggtcatggccatgtacgaggagtggttggtgaagcaccaaaaggtgtacaatgagttgggaaagaaggacaagagattccaagttttcaaggacaacttagggttcatacaagagc

SEQ ID NO: 196174 - DNA, 246 bp, Glycine max
agaaaccctagccactctcccggcgtcacgatgcagatcttcgtgaaaaccctaacgggtaaaacgatcacgttggaggtggagtcttcggacaccatcgacaacgtgaaggccaagatccaggacaaggaaggcatccctccggaccagcagcgcctcatcttcgccgggaagcagctggaggacggccgcaccctcgccgactacaacatccagaaggagtccacgcttcacctcgtcctccgc

SEQ ID NO: 196175 - DNA, 246 bp, Glycine max
gcgaaaccgagagagcgaaggggcaaacacaattttttttatcttcttttttatttcttgtagagagagagagagagaaaatgttggggatcttcagcagttcagtggtgtcgccgccggaggagctggtggccgctggcagcagaacgccgtcgccgaagacgacggcggggaagctgctgaaccggttcgtggagagcaaggcgtcggcggtgtcgctgcaggtgggggaacacgtgcagttgg

SEQ ID NO: 196176 - DNA, 242 bp, Glycine max
gcagatctcaattgcatcgctgtccatggctaccatcgttagcatcaaggcccgccagatcttcgacagtcgtggcaatccaactgtcgaggtggatttgacttgctccgatggtacttttgccagagctgctgttccaagtggtgcatccactgggatttatgaggcccttgaattgagagatggaggatctgactaccttggcaagggtgtatcaaaggctgttgacaatgtgaacaccg

SEQ ID NO: 196177 - DNA, 243 bp, Glycine max
cgacaacatagtctcggaacacggtgagaaggctcccaatgttgtctacaaaggaaggactgaagatgataggttggttgctgtgaagcgcttcaacaagtctgcttggcctgatcctcgacagttcctagaggaagcaagggcagtggggcagctgaggaatgagcggttggctaacttggttggttgttgctgtgaaggggaagagagattgcttgttgctgagtttatgccaaatgaaac

SEQ ID NO: 196178 - DNA, 242 bp, Glycine max
ctatcctacctgatgcagggaggaacaccttcaacactttgctgcagcggagtcaagaacattcttggctctgctgtcaccaccgttgacaaacaaactgtgtgcaactgtctcaaggcggatgctgctaggtacaacatcaatgaccagtatgctcaggcactccctggtttctgcaaggtcaatgtcccttacaagatcagccgctccactaactgtgcaagcatcaggttctgaacaag

SEQ ID NO: 196179 - DNA, 275 bp, Glycine max
cggctcgagcttcctttctctgctctttgccttctctgacacatttggtgccttgtagagcgtgttttggcaggaaggtggtatggcgaaggacgttgaggttgctgagcgtggctccttctctgggaaggactaccaggaccctccaccagcaccactcattgatgctgaggagctcacaaagtggtccttttacagggctctcattgctgaattcattgccactttgctcttcctctacattactgtgctcacagtcatagggtacaagcacc

SEQ ID NO: 196180 - DNA, 187 bp, Glycine max
aggcgacaatgtcggcgacatagtagtattcggagacaacaatcctgcgtcgtcaaagcctaagtttgggacatactggattaaagatgggaaagttgttggggtctttctggacggtggaactcctgaagagaaccaggctattgctaaagttgatctacatctgcaaccggaggctttttttttt

SEQ ID NO: 196181 - DNA, 269 bp, Glycine max
gcaactttaaacgccgaagaaagttcatccaatctccgaagcccttcaccgcattgcaaccatgtcgagaagaaaggttagagagccaaaggaagaaaacgtgactctgggcccagctgttagagatggcgaacatgtctttggcgtcgctcgcatctttgcctccttcaatgataccttcattcatgtcactgatctgtccgggagggaaacacttgtccgcatcacaggtggaatgaaggttaaggctgacagagatgaatcgtctc

SEQ ID NO: 196182 - DNA, 264 bp, Glycine max
tcgagctcaaccttctttcttcttatatatcgaacatggctaagtatcattcaagtgcgaaaagctcttccatgactgctatagccttcctgtttatccttctaatcacttatacaggcacaacagatgcacaatccggggtatgttatggaagacttggcaacaacttaccaacccctcaagaagttgtggccctctacaatcaagccaacattcgcaggatgcgaatctacggtccacgcccagaagtcctcgaagcactaa

SEQ ID NO: 196183 - DNA, 266 bp, Glycine max
attctctaagaatcaaatactttctattcaatttctttgaaattcacaccaaaatagaattaattaagcgcaatcggtttcagtttgcgtggtgttcaaagacgtgtggatgtcccaaagggctgtgtagcagtgtatgtgggagaaaatcaaaagaagcgctttgtgattcccatatcatacttgaaccaaccttcatttattgagttgttgaatcaaagcaagaatttggatttgatcatccaatgggtggcctcacgattcct

SEQ ID NO: 196184 - DNA, 269 bp, Glycine max
ctttagcaccattctagatatcagagaactttgcagctctcttaggtttttaaaaaacaccacgcaaacagcaagatggccacttccgacagtaacatgctactaaattatgttccagtttatgtgatgctcccactcggagttgtcaatgttgacaatgtttttgaagacccagatggccttaaagaacagctcttgcagcttcgagctgcgggtgttgacggggttatggttgatgtgtggtgggggatcatagaactgaaggggcc

SEQ ID NO: 196185 - DNA, 267 bp, Glycine max
gctgcagtagttttggtagcatggccatgccatggcgcaggctaccaaaggttccctctccgaatgaaaactggctatggtgagcgttcttcggaggtaaaatgcgcaagttttaacgcttgctgtggaagcacacaacatccgagcctttaaaaccattcctgaagagtgcgttgaaccaacaaaggactacattaatggcgaacaatttagatcagactctaaaacagttaaccaacaagctttcttttatgctagtgaacgcga

SEQ ID NO: 196186 - DNA, 267 bp, Glycine max
cttctatatattattgaattgacaatgaggcctgctcttgctttgcttcctcttctatttgctttcttgttagctgccactacggaatcaagaaaagatccaggggaatattggaaaatgatcatgaaagatcaggaaatgccagaaggacttcaaggtcttgtttcatttcaatctgaaaataaccctaagactcaagagcagcttggtaaaggttccaaaaaccattgtgaagagtctctagttacaaatacacaagttaacagt

SEQ ID NO: 196187 - DNA, 266 bp, Glycine max
agaatacatagtttccaatctcgatatgttaccacctatgtcagatttaactacctgtacagtttggtacaggtagaggttgaaactaaaacagctaaatcatcatccagttgtaccaatggacttctttggctgacaagagcaatggatttcttggtggctttgttccgaaacttaaccgagcatgaagattggccaatgtcacaagcatgtacagattcgtataacaagactctgaagaagtggcatggttggcttgctagttc

SEQ ID NO: 196188 - DNA, 272 bp, Glycine max
ccgattcgttccatggacccctaaatagttaagggatcccccgtttgattcatattccgatcaaaaactttatttcttacttaaagggaatcctttataccctcaatgaatgatttgcggtataatatacattatcgtaatttgtatacaagaagaatcaattctaaattgacaacttgagttctaaaattatgaaacataagtttttggaattggatctataatccgaatttttttgagtatgacgaaaggatctatggagagatatatag

SEQ ID NO: 196189 - DNA, 264 bp, Glycine max
ttaaagttatagttcaaaatgaggaacaggtggagctttcatttgcaagaatgtgggatcattcactagagggaaagtttgtccccttaaatattgacaaaagattcataatgctccgtggttcatcaggcttctactcttatggaatttatgagcacctaaatggatggccagattttgatattagtgaaacaaggatcactttcaagcttaggaaagacaagtaaattctcattttgacaaaacagttcgatgcccctctct

SEQ ID NO: 196190 - DNA, 270 bp, Glycine max
acttaatcgatcatcacttcacttcactaatacatcatggcagacgagacccagaacaagtatgagagctctgaggttgaggtccaggatcgtggtgtttttgactttctcggtaagaaaaaggatgaagaagacaagcctcatcctcaggaggaggtcatcgccaccgagtttcaaaaagtcactgtctcagaccaaggagagaacaagcacagcctcttagaaaagcttcaccgatctgacagcagctctagctcttcaagtgaggag

SEQ ID NO: 196191 - DNA, 268 bp, Glycine max
aggatgcttacgtgggtgatgaagctcaatcaaaaaggggtatactcaccttgaagtatcctatagagcatggcatagtcagcaactgggatgatatggagaagatttggcatcacacattttacaatgagcttcgtgttgcccctgaagaacaccctgtacttcttaccgaggcacccctcaatcccaaggccaacagagagaagatgacccaaattatgtttgagactttcaatgtgcctgccatgtatgttgcaattcaggctgt

SEQ ID NO: 196192 - DNA, 266 bp, Glycine max
ggccactgcaagaactgtgaaggacgtttctcctcatgagttcgtcaaagcttactcttctcacctcaagcgatctggcaagatggagctgccagagtggactgatattgtgaaaactgcaagatttaaggagttggctccttatgatcctgactggtactatgtcagagctgcttccatggcaagaaagatctacttgagaggaggacttggtgttggtgcctttcagaggatttatggtgggagcaagaggaatggtagccgcc

SEQ ID NO: 196193 - DNA, 268 bp, Glycine max
gcttctgctgcaagacctcgctgaaaattagggtttcgattcggaggtagacgaagatgttcggaagggctccgaagaaaagcgacagcaccaggtactacgaaatcctcggcgtttccaagaacgcttcgccggatgacttaaagaaggcttacaagacagccgccattaagaaccatcctgacaaaggcggggatcccgagaagtttaaagagcttgctcaagcctatgaggttctgagtgaccctgagaagcgcgagatttatga

SEQ ID NO: 196194 - DNA, 267 bp, Glycine max
cgggtgccctgagatcacattgaacaatggtgaaggctgtggccgttcttggcagcagtgagggtgtcactggaactattcacttcgttcaggagggaagtggtccaaccaccgtaactggatctcttgctggtcttaagcctggtctccatggtttccatgtccatgccttgggggacactaccaatggttgcctctcaactggatcacatttcaatcctaataacacggagcatggtgcccctgaggatgagaatcgtcatgctg

SEQ ID NO: 196195 - DNA, 267 bp, Glycine max
attccggtgggccatggcaaagcgctcacgccactttctacggtggcagcgacgcctcaggaactatgggaggggcgtgtgggtacgggaacctatattcccaaggctacggcgtgaacactgcggcactaagcactgctctattcaacaatggtttcagctgtggagcgtgcttcgaaatcaaatgcaccgatgacccgaaatggtgtcatccaggtaacccttccatctttgtcaccgccacaaacttctgcgctccaaactacg

SEQ ID NO: 196196 - DNA, 266 bp, Glycine max
aggggaaggagcaggatgtgtcgttgggagcgaacaagttccccgagagacagccgattgggacggcggcgcagagccaagacgacggcaaggactaccaggagccggcgccggcgccgctggttgacccgacggagtttacgtcatggtcgttttacagagcagggatagcagagtttgtggccacttttctgtttctctacatcaccgtcttaaccgttatgggagtcgccggggctaagtctaagtgtagtaccgttgggatt

SEQ ID NO: 196197 - DNA, 270 bp, Glycine max
aaaaaaacgtgattcgctcttctcttcgaataaaccacaaaaccaacaaacgagaagaggagtcagagaagatggggttgtcgttcacgaagctgttcagcaggttgtttgcgaagaaggaaatgaggattctgatggtaggtctcgatgctgctggtaagacaaccatcttgtacaagctcaagcttggagaaatcgtcaccaccatccccaccatcggatttaatgttgagactgtggagtacaagaacatcagcttcactgtgtggg

SEQ ID NO: 196198 - DNA, 266 bp, Glycine max
gctggccatctcttgtttcttgctttctttcttcaccatgtcacttgctgggaaaatcaccactgaaatcggggttcatgcaaccgctacaaagtggttcaacctcttcgcaacacaactccatcatgttcaaaacctaactgatagagtgcatggaaccaagctgcatcaaggtgaagactggcatcacaacgagacagtcaagcactggacttataccatagatggtaaggttacaacatgtctggagagtattgaatccattg

SEQ ID NO: 196199 - DNA, 267 bp, Glycine max
cctcgagccgaatcggctcgaggaaaacccaaagtgcttctctcctctgtctttttctctaccttgctatccttttggctactcgcactgctgcaagtgcaactccaagaagcgcagtgccaagccaccatgtttcaacattcaacagaagcctttttccttccacttttctctttggaattggttcttctgctttccaggcagaaggagcagcaagtgtagatgggagaggaccaagcatatgggacacctacactagacagcata

SEQ ID NO: 196200 - DNA, 204 bp, Glycine max
tttggatatttatatacccactcgtgcggtacttcattgtatgatctatatctatatatctatatctatatatctatctatagatatatagatatataagatccatctgtatagatatcatcatctacatccagaaagccgtatgctttgtaagaagcttgtacagtttgggaagaggttttgattgatcaaaaagaagaatct

SEQ ID NO: 196201 - DNA, 263 bp, Glycine max
gcagaattcaccaagtgttggattgttcacccaccaatagggaacgtgagctgggattagaccgtcgtgagacaggttagttttaccctactgatgacagtgtcgcaatagtaattcaacctagtacgagaggcaccgttgattcgcacaattggtcatcgcgcttggttgaaaagccagtggcgcgaactaccgtgcgttggattatgactgaacggctctaagtcagatccgggctagaaacgagcgtgccgcccgcgtcc

SEQ ID NO: 196202 - DNA, 273 bp, Glycine max
cagttttacatttttttttgttcctgagttccaatggctcttcaggctgcttccttggtttctgcttctttttctattgctaaagagggaaagtctggtgtatctctcagggacaccacaatgtttggtgtttcattgtcggatactctcaaatctgacttcagctctccctcatcgacttgcaaaagggaattccaacaaaaatttgggccctttgagggttcagtcagtggcaacaacaatccaggagtcaccaaggcttcaccagaaggc

SEQ ID NO: 196203 - DNA, 271 bp, Glycine max
gattacatagggttggcagagaatccgtcaatggacggaagctctgacaaactgtcttctgaggatggtaaaacctcatcactgaacttgaaggagacagagctgaggcttggcctccctggttgcgactctccagagagaaaatcaggttctgcactctgtctttttggcaaagagttgcagaacaataacaatgtttgctcagttgtaagccctttgaaggctggggccaagaggggcttctctgatgtcactgagggatctcaaggag

SEQ ID NO: 196204 - DNA, 266 bp, Glycine max
gtgaaagtgtttgacaaagcagactactatgcacatcctgagcattacaatcccactttccatgaaaaaatagcaccatatgcatctgttattgtcaattgcatgtattgggagaaaagatttcctcaattgctgagctataagcagatgcaagacttaatgggccgggggagcccccttgttggaatagctgacataacgtgtgatatagggggttcaattgagtttgttaaccgcagtacttcaattgattcacccttcttcag

SEQ ID NO: 196205 - DNA, 261 bp, Glycine max
cttgcttgcaccatgacccatgtcatgccttgggtgaccttgtcggaattaagaagcatttcaggaggaagcacagcaatcataagcaatgggtctgtgaaagatgctccagaggctatgcagtgcagtctgattacaaagcacatctcaaaacgtgtggcacccggggccactcttgtgattgtggccgcgttttctcaagggttgagagtttcattgagcaccaagatgcttgcaacatggggaggctcaggcctgagt

SEQ ID NO: 196206 - DNA, 211 bp, Glycine max
cggttgtgctaatggagttgttgactggattaatggcacttgatgaggatagacctgaggaaagccaatacttggcagcatggttctggcatataaaatcagataagaagaaactaaatggctgctatcgatcctgcccttgatgtaaaagaagaaacatgtgagagcgtctccatcattgctgagctagcagggaatgcactgcaagaga

SEQ ID NO: 196207 - DNA, 261 bp, Glycine max
cttgcccgatgccactaagggttctgaccatttgagagatgtgtttggcaaagctatggggcttactgaccaagatatcgttgctctatctgggggtcacactattggagctgcacacaaggagcgttctggatttgagggtccctggacctctaatcctcttattttcgacaactcatacttcacggagttgttgagtggtgagaaggaaggtctccttcagctaccttctgacaaggctcttttgtctgaccctgtatt

SEQ ID NO: 196208 - DNA, 257 bp, Glycine max
  unsure (1)..(257): unsure at all n locations
gcagttttatgtcaatgttgacaaggaagagtggaagctggagacattatgcgacctttatgagactctggctatcacccagagtgtcatttttgtgaataccaggcgcaaggtggactggctcactgacaagatgcgaacaatgatcacacagtctctgccacccacggtgacatggaccaaaatacccgtgatatcatcctgcgtgaattccggtccggctcttcncgagttctcattaccactgaccttcttgc

SEQ ID NO: 196209 - DNA, 252 bp, Glycine max
cgagaattagggttcgattccggagagggagcctgagaaacggctaccacatccaaggaaggcagcaggcgcgcaaattacgcaatcctgacacggggaggtagtgacaataaataacaataccgggctcattgagtctggtaattggaatgagtacaatctaaatcccttaacgaggatccattggagggcaagtctggtgtcaacagccgcggtaattccagctccaatagcgtatatttaagttgttgc

SEQ ID NO: 196210 - DNA, 209 bp, Glycine max
cattcaccttctgttctattggatcctctttgagaatgtgatgtctttgcaccgtagcaagtgaacatttataggtctcttagagtatgggagggctaatgaatgggttgtgactgaaaaacttatctgatctgtcaacaataataataagaataaatcaggagatgctgccaagaagaataatgccatcaaggccagccccaaaaaga

SEQ ID NO: 196211 - DNA, 138 bp, Glycine max
tgaagtacggattgcagctgctgggaaagtgaccaagttttgccggatattaaatccagatctttcaattcagcatattcttccttgcgtgaaggaattgtcaacggattctttgcagcatgttcgctctgctttggc

SEQ ID NO: 196212 - DNA, 263 bp, Glycine max
cccattcatacgtggtgttgttactgctgctcttttctcttttcttttctctttagttctctcttcccctttctttttctttttcttcttcttctgagcttgtttaagcttttcttccattaacatattatcacaatgtgtggtattcttgctgttcttggttgttctgatgactctcgagccaaaagggtccgcgtgcttgagctctctcgcagattgaagcaccgtggccctgactggagtgggctccatcaacatggtga

SEQ ID NO: 196213 - DNA, 261 bp, Glycine max
tgaatctgatgaccgagctgccaccgttggatctgatggtatttttactcgtgatttctctgccccaactgggcaggataaaatggacaagacaatattgcctcaggttatgcaagttaagcactttggtcgtagtggaagaaccaagtggacccatcttgtcaatgaggatactactgattggaataacccgtggacttacaatgacccacttcgtgcaaagtctaatgacaaaatggcagcaatgaatgcacctatagt

SEQ ID NO: 196214 - DNA, 261 bp, Glycine max
ctacctctgtcatcaatgggaatgattccctaactggtcacatcatatctacaaccattggacgcaaaaatggggaacccaaacagactattagctacatggcagaacgggttgtaggaactggatcatttggaatcgttttccaggcaaaatgcttggcaactggggaggcagtggcaattaaaaaggttttacaagacagaagatacaagaatcgtgaactgcagttaatgcgtgttttggatcatccaaatgtgatct

SEQ ID NO: 196215 - DNA, 260 bp, Glycine max
gttcacataaaacatcgacagagatcgacgaggaaaagctaagcctaacaatgtggagctccaaaacgacattgatgtttggcgtcgcagccattgctctgatgatgtttctctcatctgcttcagcggacgacgtcgttgcactcacagaggaaaccttcgaaaacgaggttggcaaggatcgtgccgctctcgtcgagttttacgctccctggtgtggacactgtaaaaggcttgcaccggagtacgaacagctcgga

SEQ ID NO: 196216 - DNA, 260 bp, Glycine max
gccaagcttaagggagggttttatgttgaacccgaagctaagctcttgttcatcatcaggatccgcggtatcaatgccatggatcccaaaacaaggaagattctgcagcttctgcgtttgagacagatttttaatggcgtctttcttaaagtgcacaaagctacagtgaatatgctccatagggtagagccttatgttacctatgggtaccctaatttgaagagtgttagagaattgatctacaagaggggctatggaaa

SEQ ID NO: 196217 - DNA, 259 bp, Glycine max
ctgaagatgtccctaatggtgggggcgttttgctttctgaattgtgggctggacctacctactcaaactcaccacctcccagttccttaccaattcccaagttttccgtccggccgaagaggaccgtgtctcttgatcttcctggttcctcctcccctgggattgaaatgcgcctggtggctaagtctgcgccctcttcccctagcagggagcgtttggatctgccttttacaagggatctctttgatgataatgctga

SEQ ID NO: 196218 - DNA, 256 bp, Glycine max
cgtacgttgaatggtggtgccaactttgttgcccctggttacaccaagggtgatggtcttggtgctgagattgttggcactttcgtccttgtttacaccgttttctccgccaccgatgccaaacgtaacgccagagactctcacgtccccattttggcacccttgcctattgggttcgcggtgttcttggttcacttggcaaccatccctatcaccggcactggtatcaaccctgctcgtagtcttggtgctgcta

SEQ ID NO: 196219 - DNA, 256 bp, Glycine max
aatccccacaatagtgtttccaaactcctctgcccaacagaggatgccagtcgttggaatgggatctgcccctgacttcacatgcaagacagacacaaaggaggctatcattgaggccgtgaaacagggttacagacacttcgacactgctgctgcttatggctctgaacaggctctcggtgaagctctcaaggaagctatccatcttggcctcgtctcccgccaagacctctttgtcacttccaagctttgggtc

SEQ ID NO: 196220 - DNA, 232 bp, Glycine max
tgattctcctgattacaccatatttgttggtgacttggctgcagatgttactgattatcttcttcaggagacattcagggctcgttacaactcggtgaagggtgcaaaagttgtcattgataggctaactggccgtaccaaggggtatggctttgtaaggttttcagaagagagtgagcaaatgagagctatgactgagatgcaaggggttctttgctcaacaagacccatg

SEQ ID NO: 196221 - DNA, 264 bp, Glycine max
ctcgagccggctgaatacagggtgcaccaaagaagaggaggtcttgcagtatgccagagctgtaattgattgtgcaactgcaaaccctgatggccagaagagagctcttgtgataggaggaggcatagccaactttactgatgttgctgccacatttagtggtataattcgggcattgaaggagaaggagtcgaaattgaaagcagcaaggatgcacatctttgtgaggacgaggggtcccaactaccagaagggtctagcttt

SEQ ID NO: 196222 - DNA, 261 bp, Glycine max
ggccatcacagaagggggaatggagttttctcaagatgattttgatcggttactgttattcgagcacacgcgaaagagcgctgaagcaaactacgcagagaatcctctagacgctgataatctgaccaagtgggggggagctttgatcgagttgtcatcgttccaagctcctaaggatgccaaggcgatgattgatgatgccctttcaaagctggaggaggctttgctgatcaatccaactaagcatgacactctttggtg

SEQ ID NO: 196223 - DNA, 257 bp, Glycine max
ggggttgtgcccctttgggccggggtcgtcattactgctcttgattgttttatttttctctttcttgagaactatggtgtgaggacattggaagctttttttgctgttctcattggtgtgatggcaatctcatttgcatggatgtttggtgaagccaagcccagtggcaaggaacttcttcttggcgttttgattccgaaactcagctccaaaactatacagcaggctgttggagttgtggggtgccttattatgcc

SEQ ID NO: 196224 - DNA, 258 bp, Glycine max
cgcacttcgttgcttggtgatgtccctttctgttctcttcactcttggtcttgcgagagaaagccatgccagagacgaagatttttggcatgctgtttggccaaacactcccattccaagttcattgcgagatcttctaaagcctggccctccaagtcttgaaatcgatgatcaccctatgcaaattgaagaaacacagtacccgaaaaccttcttctataaagaagaccttcatccaggcaaaacaatgacagtacc

SEQ ID NO: 196225 - DNA, 260 bp, Glycine max
cggcgttccacttccgaaagaagaagagaacttccagaaagtttatgttaaagctccatcttttctttcaattcacatgggggttaaagctgaggttttgccgccagatacagactgtcaccattttgtgcttgagagcaactggtccaaattggaggagccatatggaagtatctttctaagtataccaactgttcttgattcatcattggctcctgaaggccgtcatatccttcatatattcacaacttcttccatgg

SEQ ID NO: 196226 - DNA, 257 bp, Glycine max
ggaggctcgggactctgaccgcgtgcctgttgaagaatgagccggcgactcataggcagtggcttggttaagggaaaccaccggagccgtagcgaaagcgagtcttcacagggcaattgtcactgcttatggacccgaacctgggtgatctatccatgaccaggatgaagcttgggtgaaactaagtggaggtccgaaccgactgatgttgaagaatcagcggatgagttgtggttaggggtgaaatgccactcgaa

SEQ ID NO: 196227 - DNA, 258 bp, Glycine max
gcagaagcggctcgccgcgagcgtgctcaagtgtggcagaggaaaggtttggcttgaccccaatgaagtcaacgaaatctccatggccaattctcgccaaaacataaggaagctggttaaggatgggtttatcatcaggaagcccaccaagattcactctcgctcacgtgctcgtcgaatgaaggaagccaagaggaaaggacgtcactctggatacggtaagcgtaagggtacaagggaggcaaggcttcccactaa

SEQ ID NO: 196228 - DNA, 257 bp, Glycine max
ctcgagccgcaaatgcttgcttgagttaagtggtaacaatgcaataatagtcatggatgatccagatatcaaattggctgtacgatctattttgtttgcagctgtgggtactgctggtcagcggtgtacaacttgccgtagactgtttctgcatgaaagtatttacgcagatgtactagaccaacttattggagtctacaaacaagtcaaaattgggaatcccttggagaaggggactctagttgggcccttgcata

SEQ ID NO: 196229 - DNA, 257 bp, Glycine max
ctcgagccgcaatagcaatgggttggatcggtgagactgttgattccatcaaatctcttcacatccgccaggtcctcacccaggctgtgagcctaggcatgattgttacgtctgcactgataatatggaaggcattgatgtgcgttactggcagtgaatctcccgttgttgttgttctttctggaagcatggaacccggattcaagcggggagacatcttgttcttgcacatgagtaaagacctattcgggcagggg

SEQ ID NO: 196230 - DNA, 249 bp, Glycine max
caaaaatgaaggccagcaccaatgttaggcatattgttcttccttgtactagttctgccagggcccaacttatcccagatattattcgctgttatagcagtggaggccggacaattgtatttaccgagacaaaagaatgtgcttctcagcttgcagggatcttgaatggagcaaaagctctccatggtgacatacagcaatcaacacgtgaggttactctgtctggctttaagtctggggaattcatga

SEQ ID NO: 196231 - DNA, 155 bp, Glycine max
ccgctcctgtccttaactggacgggtcgtgactccggtgctgttactttgaagaaattagagtgctcaaagcaagcctacgctctgtatacatcagcatgggataacaccacaggatgctgatcctattgtgttggccttcgggatcggagtaat

SEQ ID NO: 196232 - DNA, 266 bp, Glycine max
agaagaagcagttcaattgatcaactcagatttcagggacctaagtctagctgctaatagactcgcccatcatgccatcaaacttggtggcaatggctttggagcctcttttttcggattgtttgctgccattgctgctatttatctggtgattttggatcgtacaaactggaaaacaaatattctcacagcactactcattccatacattttcttcagcttgccttcattaattttcgacgtcttcaggggagagcttggaaaat

SEQ ID NO: 196233 - DNA, 269 bp, Glycine max
aaaatgggttcttcttcttctatgtggacggtgtgtgtgattttggcatcactggcctctgcagcactctgtgccaacccacgcaggccagtggatgtacaatttggccgaaactacgtgcccacatgggcctttgatcacatcaaatatttcaatggtggttctgacattcagcttcatcttgacaagtacactggtactggcttccagtccaaagggtcttacttgtttggtcacttcagcatgtacataaagatggttcctggaga

SEQ ID NO: 196234 - DNA, 267 bp, Glycine max
ctttctcccacaaactccgattcttcttgtaaacagcggtgccaggtgttaatctagaagttgatataggatgggggcaatgatgtcgaggttctggttcatgttattccctgcaaaagagtataagattgttgttgttggattggataacgctggaaaaaccactaccctttataaattgcatctgggtgaggttgtaacaaccaatcctactgttggtagcaacgtcgaagagctcgtctacaagaatatacgatttgaggtctg

SEQ ID NO: 196235 - DNA, 148 bp, Glycine max
cgttatcttcttcttttgttgtttgtgtgtttgtcttttctctcacctgaaaatgtcttgctgcggtggtaactgtggttgcggaagcgcctgcaagtgcggcaacggctgcggaggctgcaagatgtacccagacttgagctacacc

SEQ ID NO: 196236 - DNA, 142 bp, Glycine max
ggtgttcacttgatccttcataagtcgtcatcatcatcatcatcatcaccgttgattgaagaagatgccgatcagaaacatcgccatcggaaggcctgaagaggctactcaccccgacacgttgatggcggggttggctgag

SEQ ID NO: 196237 - DNA, 147 bp, Glycine max
gcgatttctcatttcatttttcacacttcaacaatggcgaaaaccttcaaatacatcatcctcggtggaggagtttccgctggttatgcggcgagggagtttgccaaacagggcgttaagccaggggagttggctatcatttcgaaa

SEQ ID NO: 196238 - DNA, 149 bp, Glycine max
cgttatcttcttcttttgttgtttgtgtgtttgtcttttctctcacctgaaaatgtcttgctgcggtggtaactgtggttgcggaagcgcctgcaagtgcggcaacggctgcggaggctgcaagatgtacccagacttgagctacaccg

SEQ ID NO: 196239 - DNA, 269 bp, Glycine max
aagattgctagatgaagttcaacatcgcgagtcccaccactggatgccataagaagctcgagatcgacgacgatcagaaactacgagcattttggggcaagaggatctcacaggaggtcagcggagatgcacttggtgaggaatttaagggctatgtcttcaaaattactggaggttgtgacaaacaaggattcccgatgaaacagggagtgcttactcctggtcgtgttcgacttttgcttcacaggggaactccttgcttccgtgga

SEQ ID NO: 196240 - DNA, 147 bp, Glycine max
tggagacttcgctgctaactggatctattgggttggcccattgattggaggaggtttggctggcttgatttatggagacgtcttcattggttcatatgcgcgtgtcccagcctctgaaacctacccttgagcttcaacttgaaaaat

SEQ ID NO: 196241 - DNA, 148 bp, Glycine max
aagggtttcaagggatggaaaacatgcagagcttctggcaattgggtgatgaactccgtgggcactcaaaagcatcggaggatcacaagtggttaatggttgcctcgaaactggccgaacagacaagattgaagggggagcgtgtgaa

SEQ ID NO: 196242 - DNA, 148 bp, Glycine max
cgtttgccttgttgtttgcgaataaatggcaactaagaggagcgtgggaacgttgaaggagggtgatttgaaggggaagagggtattcgtgagggtcgatctgaacgtgcctttggatgacaaccttaacatcaccgatgacactaga

SEQ ID NO: 196243 - DNA, 267 bp, Glycine max
gggatcgcccctttctagagaacctgaaactaggggaaggtgttaaaggtgtatatatctcaatagatgtggattgtctcgatcccgcctttgctccaggagtgtctcacatagagccaggaggtctttctttccgtgatgttctcaacatcctgcacaatcttcaaggcgctgttgttgctggagacgtggtcgaatttaacccgcaacgtgataccgttgatggaatgactgccatggtagctgctaagctggtcagagaactgg

SEQ ID NO: 196244 - DNA, 264 bp, Glycine max
aattgatgccagtcacattgccctgcaggcaaatgaagttgtgaaagcaaataacttgtctgatgttgttgttgtattgcatgggcgagttgaggatgttgaaattaatgaagaagtggatgttataatttccgaatggatgggctatatgcttctgtatgagagcatgcttgacaatgtattaaagcctagatatccttggctcaaacctggtggtcttattcttccttcaagttcaacgttgtacatggctcctgtcactca

SEQ ID NO: 196245 - DNA, 143 bp, Glycine max
ccgccatgctgtagttcacgatcagacaacaggagagaaatattgtcccctggacaatgttataatgaaccaagatgaagagatgtttaccgttagcaatagttcactttctgagtttggtgttcttggatttgaattgggtt

SEQ ID NO: 196246 - DNA, 145 bp, Glycine max
ctcgagccgcgccaacaaactcttcaacaaatgcaccgtatactgacaactcgccaatcaggccgtgcactccttgctatacatgactacttttcgcgtctgagtgcactcagttcactctggcttgctcgccctagagattgag

SEQ ID NO: 196247 - DNA, 144 bp, Glycine max
aacgctggcggcatgccttacacatgcaagtcggacgggaagtggtgtttccagtggcggacgggtgagtaacgcgtaagaacctacccttgggaggggaacaacagctggaaacggctgctaataccccgtaggctgaggagc

SEQ ID NO: 196248 - DNA, 145 bp, Glycine max
aagaaaggagagtttgtagaatacattcctaccagagaatattatcacaggcacacaagatgcttgtactgggagggaaagcttatcctcccatttgctgatcaattttggtttaggtatctgtttggctggttgatgccaccca

SEQ ID NO: 196249 - DNA, 258 bp, Glycine max
ctaggcacccagagacgaggaagggcgtagtaagcgacgaaatgcctcggggagttgaagataagcgtagatccggggattcccgatataggtcaacctttcgaactgctgctgaatccacgggcaggcaagagacaacctggtgaactgaaacatcttagtagccaggggaaaagaaagcaaacgctttccccgtaatagcggcgacctatatgggaccagcctaaaccgtgaaaacggggttgtgggagagctata

SEQ ID NO: 196250 - DNA, 142 bp, Glycine max
ctcgtttctggtccaaattcattgatgataaggtttttggtgctgcatggaaatccgttttcacagctgatgagaaagagcgtgagaagaatgttgaggaagcaattgaggctctgcagtttcttgagaatgagataaagga

SEQ ID NO: 196251 - DNA, 134 bp, Glycine max
  unsure (1)..(134): unsure at all n locations
cacnantaccttccaggagattgctgnaannaaggacactgttggacagtatgagtctcacacagcctttacccntcctggactctaccgtgttgtgcacggcattgatgtctttgatccaaaattccacattg

SEQ ID NO: 196252 - DNA, 139 bp, Glycine max
cttcttctatgtggacggtgtgtgtgattttggcatcactggcctctgcagcactctgtgccaacccacgcaggccagtggatgtaaaatatggccgaaactacgtgcccacatgggcctttgatcacatcaaatattt

SEQ ID NO: 196253 - DNA, 140 bp, Glycine max
cacatcaaaagagacatggctgagcaaaccttcatcatgatcaagcctgatggcgtccaaagaggccttattggcgagatcattagcagatttgagaagaaaggtttctacttgaaaggtttgaaacttgttactgtgga

SEQ ID NO: 196254 - DNA, 260 bp, Glycine max
  unsure (1)..(260): unsure at all n locations
ggttaggctatggttgatgagagcgttgttgagtccccagtgaagaggcagagagatgatggtgaagaaaatggtgtctctgtttccatggacgcggagggtggcaaagaccctcttagtaacggtttatcatctgtgattcctgggtggttctctgaaatcagtgcaatgtggcctggagaggctcactccttgaaggtggaaaagattttgtttcaagganagtcagaataccaaaatgtcatggtcttccagtcatc

SEQ ID NO: 196255 - DNA, 132 bp, Glycine max
cttttgatgggcaggaggctaagccatacaagaatgaccctgaaatcttggcaatgacaaacttgataccagcctatcagcggaatgaaatattggaatttgagaaaatcttgaagagtaacagatgaccca

SEQ ID NO: 196256 - DNA, 257 bp, Glycine max
tctcaatcgaatctcagaaaaatgagagaaatcatcagcattcacataggtcaggccgggatccaggtcggaaactcctgctgggaactctactgcctcgaacatggcatccagcccgacggcatgatgccttctgactccaccttcggtgtagcccacgacgccttcaacaccttcttcagcgaaaccggatctggcaagcacgtcccccgtgctgtcttcgtcgacctcgaacccaccgtcatcgacgaggtccg

SEQ ID NO: 196257 - DNA, 290 bp, Glycine max
atcgagccgctgctccgtaccagtttcactgcataaatttgagagaacactctgcaaacatgttggtttatcaggacctccttacaggtgatgagcttctctcggactccttccgttacaatgaaattgagaatggaatgctgtgggaagttgaggggaagtgggttgttaagggagcagttgatgttgacattggtgcaaacccttctgctgagggtggagaagatgagggagtcgatgacgcagctgttaaggttgttgacattggtgatacattcagacttcaggag

SEQ ID NO: 196258 - DNA, 285 bp, Glycine max
gtaagagagaagaaagaagcaaatggcaaactttccagttgttgacatggggaagcttaacaccgaagagagacctgcagccatggagattataaaagatgcctgtgagaactggggtttctttgagttggtgaaccatgggatatccattgagcttatggacacagtggagaagctcacaaaagagcattacaagaagactatggagcaaaggttcaaagaaatggtgaccagcaaaggtcttgagtcagttcagtcagaaatcaatgacttggactgggaaag

SEQ ID NO: 196259 - DNA, 290 bp, Glycine max
cattcgacaggtagagtttcttcaatggctcctaaagttgataagaagaacgacccaaaggcacaggccttgaagactgctaaggcagttaagtctggtgctacctttaagaagaaggcaaagaagatccgaacttctgtcactttccacagaccgaggacattgaagaaggataggaaccccaagtaccctcgcattagcgcgcctccaagaaataagcttgatcattatcagatcctgaaataccctctgaccactgaatccgccatgaagaagattgaggacaacaa

SEQ ID NO: 196260 - DNA, 285 bp, Glycine max
gtgaaaatgtcagtggtggttgtggttattggtgtcggtgtttgcactgtaactgatgtaaaagctaacctcaaaggtttcatgtgtgcctgtataccagttttgtcaacatctttacagcaaatttcaataggttctcttcaaaagaaatgttcaattggatcttttgaattgctgagtaaaactgcttccatccaagcgttttttcttcttattcttggtcaatttgttgattactacctcagtggcaaattgataaccaactataagatgtcttctggtgcc

SEQ ID NO: 196261 - DNA, 270 bp, Glycine max
tttcttcaccatgtcacttgctgggaaaatcaccactgaaatcggggttcatgcaaccgctacaaagtggttcaacctcttcgcaacacaactccatcatgttcaaaacctaactgatagagtgcatggaaccaagctgcatcaaggtgaagactggcatcacaacgagacagtcaagcactggacttataccatagatggtaaggttacaacatgtctggagagtattgaatccattgatgaacagagcaaaacaatcacctacaagct
